United States Patent Application Publication US 2008/0318210 A1 - sequence listing, part 9

SEQ ID NO: 320745 - RNA, 16 nt, Human herpesvirus 5
ccuccuaguaaugcau

SEQ ID NO: 320746 - RNA, 17 nt, Human herpesvirus 5
ccuccuaguaaugcauu

SEQ ID NO: 320747 - RNA, 17 nt, Human herpesvirus 5
ccucgccuaagacuuug

SEQ ID NO: 320748 - RNA, 13 nt, Human herpesvirus 5
ccucgcugggcua

SEQ ID NO: 320749 - RNA, 15 nt, Human herpesvirus 5
ccucgggaggacuca

SEQ ID NO: 320750 - RNA, 24 nt, Human herpesvirus 5
ccucgucgccuuccagcuuaccgc

SEQ ID NO: 320751 - RNA, 14 nt, Human herpesvirus 5
ccucuacaaacuag

SEQ ID NO: 320752 - RNA, 14 nt, Human herpesvirus 5
ccucuaccucgucc

SEQ ID NO: 320753 - RNA, 14 nt, Human herpesvirus 5
ccucuagagacaga

SEQ ID NO: 320754 - RNA, 13 nt, Human herpesvirus 5
ccucuauguuaca

SEQ ID NO: 320755 - RNA, 17 nt, Human herpesvirus 5
ccucuccuguugcucuc

SEQ ID NO: 320756 - RNA, 17 nt, Human herpesvirus 5
ccucucgcgcccgcaga

SEQ ID NO: 320757 - RNA, 21 nt, Human herpesvirus 5
ccucugccugggcacgcgcgu

SEQ ID NO: 320758 - RNA, 14 nt, Human herpesvirus 5
ccucuguguuccca

SEQ ID NO: 320759 - RNA, 19 nt, Human herpesvirus 5
ccugacccgcggcuacgua

SEQ ID NO: 320760 - RNA, 15 nt, Human herpesvirus 5
ccugagaacaugugg

SEQ ID NO: 320761 - RNA, 14 nt, Human herpesvirus 5
ccugcaccaaccga

SEQ ID NO: 320762 - RNA, 21 nt, Human herpesvirus 5
ccugcacgacaucuuccgcga

SEQ ID NO: 320763 - RNA, 19 nt, Human herpesvirus 5
ccugcacguccaugucgcg

SEQ ID NO: 320764 - RNA, 20 nt, Human herpesvirus 5
gucuuuuuaaggagcucuga

SEQ ID NO: 320765 - RNA, 22 nt, Human herpesvirus 5
gucuuuuuucucguuguacgca

SEQ ID NO: 320766 - RNA, 13 nt, Human herpesvirus 5
gugaaccaugauc

SEQ ID NO: 320767 - RNA, 13 nt, Human herpesvirus 5
gugaauggaaaua

SEQ ID NO: 320768 - RNA, 16 nt, Human herpesvirus 5
gugaauucuggcaaga

SEQ ID NO: 320769 - RNA, 23 nt, Human herpesvirus 5
gugaauucuggcaagaguucaaa

SEQ ID NO: 320770 - RNA, 14 nt, Human herpesvirus 5
gugaauugcgaagc

SEQ ID NO: 320771 - RNA, 21 nt, Human herpesvirus 5
gugacacagcacgcugauaac

SEQ ID NO: 320772 - RNA, 14 nt, Human herpesvirus 5
gugacguggauacu

SEQ ID NO: 320773 - RNA, 15 nt, Human herpesvirus 5
gugacuuacaucuca

SEQ ID NO: 320774 - RNA, 23 nt, Human herpesvirus 5
gugagauacauguucauaaacuc

SEQ ID NO: 320775 - RNA, 23 nt, Human herpesvirus 5
gugagguguuucagggugacaag

SEQ ID NO: 320776 - RNA, 18 nt, Human herpesvirus 5
gugaguacacgcaggcaa

SEQ ID NO: 320777 - RNA, 19 nt, Human herpesvirus 5
gugaucuucauucacuguu

SEQ ID NO: 320778 - RNA, 18 nt, Human herpesvirus 5
gugaugaacgacacaugc

SEQ ID NO: 320779 - RNA, 16 nt, Human herpesvirus 5
gugaugaugcugcuga

SEQ ID NO: 320780 - RNA, 16 nt, Human herpesvirus 5
gugaugcgagugguga

SEQ ID NO: 320781 - RNA, 19 nt, Human herpesvirus 5
gugauuauacaacaggugu

SEQ ID NO: 320782 - RNA, 12 nt, Human herpesvirus 5
gugcaguaccuc

SEQ ID NO: 320783 - RNA, 13 nt, Human herpesvirus 5
gugcaguaccuca

SEQ ID NO: 320784 - RNA, 17 nt, Human herpesvirus 5
gugccagcccuauccuc

SEQ ID NO: 320785 - RNA, 15 nt, Human herpesvirus 5
gugccaggcuguuca

SEQ ID NO: 320786 - RNA, 21 nt, Human herpesvirus 5
gugccccccgggauccaagag

SEQ ID NO: 320787 - RNA, 20 nt, Human herpesvirus 5
gugcccuuaccuaucaucac

SEQ ID NO: 320788 - RNA, 15 nt, Human herpesvirus 5
gugccgaugagauaa

SEQ ID NO: 320789 - RNA, 15 nt, Human herpesvirus 5
gugccuucggccagc

SEQ ID NO: 320790 - RNA, 17 nt, Human herpesvirus 5
gugcgacgccaugcuca

SEQ ID NO: 320791 - RNA, 22 nt, Human herpesvirus 5
gugcgcuugguaacucacuguu

SEQ ID NO: 320792 - RNA, 11 nt, Human herpesvirus 5
gugcggugaaa

SEQ ID NO: 320793 - RNA, 21 nt, Human herpesvirus 5
gugcguggaaaauugcaacuu

SEQ ID NO: 320794 - RNA, 17 nt, Human herpesvirus 5
gugcucaaguucagugu

SEQ ID NO: 320795 - RNA, 15 nt, Human herpesvirus 5
gugcucgcgcacgua

SEQ ID NO: 320796 - RNA, 21 nt, Human herpesvirus 5
gugcucggaccgugacggugg

SEQ ID NO: 320797 - RNA, 19 nt, Human herpesvirus 5
gugcugauaagacggacug

SEQ ID NO: 320798 - RNA, 23 nt, Human herpesvirus 5
gugcugcaccucaacaagggcug

SEQ ID NO: 320799 - RNA, 15 nt, Human herpesvirus 5
gugcugcauguguau

SEQ ID NO: 320800 - RNA, 16 nt, Human herpesvirus 5
gugcugccgcacgaga

SEQ ID NO: 320801 - RNA, 22 nt, Human herpesvirus 5
gugcuggccgccgcugcacggc

SEQ ID NO: 320802 - RNA, 16 nt, Human herpesvirus 5
gugcuuaagcagaaac

SEQ ID NO: 320803 - RNA, 14 nt, Human herpesvirus 5
gugcuuaaggugaa

SEQ ID NO: 320804 - RNA, 22 nt, Human herpesvirus 5
guggaacgagcgccguccugca

SEQ ID NO: 320805 - RNA, 22 nt, Human herpesvirus 5
guggacgacuggcucaacuuuc

SEQ ID NO: 320806 - RNA, 22 nt, Human herpesvirus 5
guggaggagacuaccucaguca

SEQ ID NO: 320807 - RNA, 16 nt, Human herpesvirus 5
guggauacuaguaaaa

SEQ ID NO: 320808 - RNA, 14 nt, Human herpesvirus 5
guggcagcuggcuu

SEQ ID NO: 320809 - RNA, 15 nt, Human herpesvirus 5
guggccgaacagcag

SEQ ID NO: 320810 - RNA, 13 nt, Human herpesvirus 5
guggcucaugccg

SEQ ID NO: 320811 - RNA, 16 nt, Human herpesvirus 5
gugggaaugguaaaga

SEQ ID NO: 320812 - RNA, 20 nt, Human herpesvirus 5
gugggagucaacacuaccaa

SEQ ID NO: 320813 - RNA, 18 nt, Human herpesvirus 5
gugggccuauagacucua

SEQ ID NO: 320814 - RNA, 14 nt, Human herpesvirus 5
gugggcuacuuuga

SEQ ID NO: 320815 - RNA, 17 nt, Human herpesvirus 5
gugguaucucacaccgu

SEQ ID NO: 320816 - RNA, 13 nt, Human herpesvirus 5
guggugacggugg

SEQ ID NO: 320817 - RNA, 13 nt, Human herpesvirus 5
guggugaucgugg

SEQ ID NO: 320818 - RNA, 17 nt, Human herpesvirus 5
gugguggcuguaggcua

SEQ ID NO: 320819 - RNA, 19 nt, Human herpesvirus 5
guggugugcgaaguguuga

SEQ ID NO: 320820 - RNA, 17 nt, Human herpesvirus 5
guguaccaucuggcgca

SEQ ID NO: 320821 - RNA, 17 nt, Human herpesvirus 5
guguacgccaucuucau

SEQ ID NO: 320822 - RNA, 18 nt, Human herpesvirus 5
guguagauuuauggaaaa

SEQ ID NO: 320823 - RNA, 14 nt, Human herpesvirus 5
guguaugcaugucg

SEQ ID NO: 320824 - RNA, 16 nt, Human herpesvirus 5
gugucaaaaaucacuu

SEQ ID NO: 320825 - RNA, 19 nt, Human herpesvirus 5
guguccgcucaacuuucua

SEQ ID NO: 320826 - RNA, 13 nt, Human herpesvirus 5
guguccuacaaag

SEQ ID NO: 320827 - RNA, 19 nt, Human herpesvirus 5
gugucgacuccgcuggauc

SEQ ID NO: 320828 - RNA, 13 nt, Human herpesvirus 5
gugucugucucaa

SEQ ID NO: 320829 - RNA, 21 nt, Human herpesvirus 5
gugugaagcgguggaaaccaa

SEQ ID NO: 320830 - RNA, 22 nt, Human herpesvirus 5
gugugacguggauacuaguaaa

SEQ ID NO: 320831 - RNA, 13 nt, Human herpesvirus 5
gugugcucucuau

SEQ ID NO: 320832 - RNA, 14 nt, Human herpesvirus 5
guguuaucacagaa

SEQ ID NO: 320833 - RNA, 19 nt, Human herpesvirus 5
guguuauucagaaccaugu

SEQ ID NO: 320834 - RNA, 20 nt, Human herpesvirus 5
guguuauucagaaccaugua

SEQ ID NO: 320835 - RNA, 16 nt, Human herpesvirus 5
guguugcuacagggag

SEQ ID NO: 320836 - RNA, 16 nt, Human herpesvirus 5
guguuguauaugugaa

SEQ ID NO: 320837 - RNA, 18 nt, Human herpesvirus 5
guguuucgguccgaugua

SEQ ID NO: 320838 - RNA, 17 nt, Human herpesvirus 5
guguuuucaccgacgug

SEQ ID NO: 320839 - RNA, 16 nt, Human herpesvirus 5
guuaaaaaaaccacgu

SEQ ID NO: 320840 - RNA, 13 nt, Human herpesvirus 5
guuaaacuggaua

SEQ ID NO: 320841 - RNA, 16 nt, Human herpesvirus 5
guuaaucgcacuucca

SEQ ID NO: 320842 - RNA, 16 nt, Human herpesvirus 5
guuaauuggagacaca

SEQ ID NO: 320843 - RNA, 15 nt, Human herpesvirus 5
guuaccuucuugccc

SEQ ID NO: 320844 - RNA, 20 nt, Human herpesvirus 5
guuauaacgacgccagugau

SEQ ID NO: 320845 - RNA, 22 nt, Human herpesvirus 5
guuauaacgacgccagugauaa

SEQ ID NO: 320846 - RNA, 21 nt, Human herpesvirus 5
guuauaagcguggauggucau

SEQ ID NO: 320847 - RNA, 21 nt, Human herpesvirus 5
guuaucagaaagcugcaauca

SEQ ID NO: 320848 - RNA, 22 nt, Human herpesvirus 5
guuauccgaacgaaacccgugu

SEQ ID NO: 320849 - RNA, 18 nt, Human herpesvirus 5
guuaugauaucuacagca

SEQ ID NO: 320850 - RNA, 21 nt, Human herpesvirus 5
guuaugggucugguuacauau

SEQ ID NO: 320851 - RNA, 18 nt, Human herpesvirus 5
guuauguuauuauacuga

SEQ ID NO: 320852 - RNA, 13 nt, Human herpesvirus 5
guuauuauacuga

SEQ ID NO: 320853 - RNA, 22 nt, Human herpesvirus 5
guuauugccagucgcacuaaua

SEQ ID NO: 320854 - RNA, 23 nt, Human herpesvirus 5
guucaaaguccgucaugcuggca

SEQ ID NO: 320855 - RNA, 17 nt, Human herpesvirus 5
guucaauaaucuccuga

SEQ ID NO: 320856 - RNA, 16 nt, Human herpesvirus 5
guucacaacucaggga

SEQ ID NO: 320857 - RNA, 17 nt, Human herpesvirus 5
guucaucgucuacgucg

SEQ ID NO: 320858 - RNA, 16 nt, Human herpesvirus 5
guuccacuccaucaca

SEQ ID NO: 320859 - RNA, 23 nt, Human herpesvirus 5
guuccagaccagcgccaccauag

SEQ ID NO: 320860 - RNA, 19 nt, Human herpesvirus 5
guuccgacgcgagcgaagu

SEQ ID NO: 320861 - RNA, 18 nt, Human herpesvirus 5
guuccguauucuaucgua

SEQ ID NO: 320862 - RNA, 22 nt, Human herpesvirus 5
guuccguggagucgucucauca

SEQ ID NO: 320863 - RNA, 22 nt, Human herpesvirus 5
guuccuauugggaaggguguga

SEQ ID NO: 320864 - RNA, 23 nt, Human herpesvirus 5
guucgagaaugccucuacuugga

SEQ ID NO: 320865 - RNA, 17 nt, Human herpesvirus 5
guucgcccugucugcag

SEQ ID NO: 320866 - RNA, 19 nt, Human herpesvirus 5
guucgcugacgaugagcaa

SEQ ID NO: 320867 - RNA, 23 nt, Human herpesvirus 5
guucggcuccguuagccugguca

SEQ ID NO: 320868 - RNA, 19 nt, Human herpesvirus 5
guucuaugcauaacgucaa

SEQ ID NO: 320869 - RNA, 17 nt, Human herpesvirus 5
guucucaaaaacuguaa

SEQ ID NO: 320870 - RNA, 16 nt, Human herpesvirus 5
guucuguaaucuucca

SEQ ID NO: 320871 - RNA, 15 nt, Human herpesvirus 5
guucuuacaguuuuc

SEQ ID NO: 320872 - RNA, 20 nt, Human herpesvirus 5
guugaagacaccuggaaaga

SEQ ID NO: 320873 - RNA, 22 nt, Human herpesvirus 5
guugaccguuguggggauuuuu

SEQ ID NO: 320874 - RNA, 16 nt, Human herpesvirus 5
guugagaacauauaua

SEQ ID NO: 320875 - RNA, 16 nt, Human herpesvirus 5
guugagacuaccacau

SEQ ID NO: 320876 - RNA, 16 nt, Human herpesvirus 5
guugagucaugacaug

SEQ ID NO: 320877 - RNA, 19 nt, Human herpesvirus 5
guugauaacaaacaaugac

SEQ ID NO: 320878 - RNA, 17 nt, Human herpesvirus 5
guugauacgcuagcaga

SEQ ID NO: 320879 - RNA, 13 nt, Human herpesvirus 5
guugcucuccucu

SEQ ID NO: 320880 - RNA, 20 nt, Human herpesvirus 5
uaccuagaugcuagcaauaa

SEQ ID NO: 320881 - RNA, 15 nt, Human herpesvirus 5
uaccuaucaucacac

SEQ ID NO: 320882 - RNA, 18 nt, Human herpesvirus 5
uaccuccccuaacgucac

SEQ ID NO: 320883 - RNA, 22 nt, Human herpesvirus 5
uaccuccgacuugaguacuuuc

SEQ ID NO: 320884 - RNA, 23 nt, Human herpesvirus 5
uaccucguccgccuccacuuccg

SEQ ID NO: 320885 - RNA, 20 nt, Human herpesvirus 5
uacgaacccgugccacggaa

SEQ ID NO: 320886 - RNA, 23 nt, Human herpesvirus 5
uacgcaauguuacacauuacuac

SEQ ID NO: 320887 - RNA, 16 nt, Human herpesvirus 5
uacgcagucacugcgu

SEQ ID NO: 320888 - RNA, 14 nt, Human herpesvirus 5
uacgcauuacacag

SEQ ID NO: 320889 - RNA, 15 nt, Human herpesvirus 5
uacgccggugcugcc

SEQ ID NO: 320890 - RNA, 16 nt, Human herpesvirus 5
uacgcgaccagcugcu

SEQ ID NO: 320891 - RNA, 11 nt, Human herpesvirus 5
uacgcuaugug

SEQ ID NO: 320892 - RNA, 23 nt, Human herpesvirus 5
uacggaguuuucccucagccucu

SEQ ID NO: 320893 - RNA, 18 nt, Human herpesvirus 5
uacggcguauacaaucau

SEQ ID NO: 320894 - RNA, 18 nt, Human herpesvirus 5
uacgggacuuacaucugc

SEQ ID NO: 320895 - RNA, 18 nt, Human herpesvirus 5
uacgggagucuaccuccu

SEQ ID NO: 320896 - RNA, 21 nt, Human herpesvirus 5
uacgucaauaaguaccucuaa

SEQ ID NO: 320897 - RNA, 22 nt, Human herpesvirus 5
uacguggguaagugacguggau

SEQ ID NO: 320898 - RNA, 16 nt, Human herpesvirus 5
uacuaaacucugugau

SEQ ID NO: 320899 - RNA, 18 nt, Human herpesvirus 5
uacuaccguuaacuauuc

SEQ ID NO: 320900 - RNA, 23 nt, Human herpesvirus 5
uacuacuaccaauacugcaucca

SEQ ID NO: 320901 - RNA, 17 nt, Human herpesvirus 5
uacuacuucgauucucu

SEQ ID NO: 320902 - RNA, 18 nt, Human herpesvirus 5
uacuaguauccacgucac

SEQ ID NO: 320903 - RNA, 20 nt, Human herpesvirus 5
uacucaacgugcgccuucca

SEQ ID NO: 320904 - RNA, 21 nt, Human herpesvirus 5
uacucacaauggaagccauac

SEQ ID NO: 320905 - RNA, 23 nt, Human herpesvirus 5
uacucacguugguguuguagcaa

SEQ ID NO: 320906 - RNA, 18 nt, Human herpesvirus 5
uacuccgugcgguucuca

SEQ ID NO: 320907 - RNA, 16 nt, Human herpesvirus 5
uacucugacuguguag

SEQ ID NO: 320908 - RNA, 12 nt, Human herpesvirus 5
uacucugggaua

SEQ ID NO: 320909 - RNA, 18 nt, Human herpesvirus 5
uacugcauccaucacauc

SEQ ID NO: 320910 - RNA, 15 nt, Human herpesvirus 5
uacuggaagcugcug

SEQ ID NO: 320911 - RNA, 18 nt, Human herpesvirus 5
uacuucagcagcaccucu

SEQ ID NO: 320912 - RNA, 15 nt, Human herpesvirus 5
uacuucaguaugaaa

SEQ ID NO: 320913 - RNA, 19 nt, Human herpesvirus 5
uacuucaugccccgaugaa

SEQ ID NO: 320914 - RNA, 18 nt, Human herpesvirus 5
uacuucccaugcaacuuc

SEQ ID NO: 320915 - RNA, 20 nt, Human herpesvirus 5
uacuucccaugcaacuucuu

SEQ ID NO: 320916 - RNA, 12 nt, Human herpesvirus 5
uacuuucacaac

SEQ ID NO: 320917 - RNA, 18 nt, Human herpesvirus 5
uagaagcacccauuacag

SEQ ID NO: 320918 - RNA, 20 nt, Human herpesvirus 5
uagaagcacccauuacagua

SEQ ID NO: 320919 - RNA, 12 nt, Human herpesvirus 5
uagaaugcugcu

SEQ ID NO: 320920 - RNA, 16 nt, Human herpesvirus 5
uagacacacaccaaaa

SEQ ID NO: 320921 - RNA, 13 nt, Human herpesvirus 5
uagacagauucau

SEQ ID NO: 320922 - RNA, 15 nt, Human herpesvirus 5
uagacaucacaguuc

SEQ ID NO: 320923 - RNA, 16 nt, Human herpesvirus 5
uagacaucacaguuca

SEQ ID NO: 320924 - RNA, 14 nt, Human herpesvirus 5
uagacauuccccac

SEQ ID NO: 320925 - RNA, 23 nt, Human herpesvirus 5
uagaccaaaccggacgcugccuc

SEQ ID NO: 320926 - RNA, 15 nt, Human herpesvirus 5
uagaccccaagccaa

SEQ ID NO: 320927 - RNA, 21 nt, Human herpesvirus 5
uagagcaaaaccuuacagcuu

SEQ ID NO: 320928 - RNA, 16 nt, Human herpesvirus 5
uagaugagcagcaaaa

SEQ ID NO: 320929 - RNA, 15 nt, Human herpesvirus 5
uagaugcuagcaaua

SEQ ID NO: 320930 - RNA, 20 nt, Human herpesvirus 5
uagauuaaugugucgcuaua

SEQ ID NO: 320931 - RNA, 20 nt, Human herpesvirus 5
uagauuuucaugaauccaca

SEQ ID NO: 320932 - RNA, 14 nt, Human herpesvirus 5
uagcaagccagaua

SEQ ID NO: 320933 - RNA, 18 nt, Human herpesvirus 5
uagcaagccagauacuau

SEQ ID NO: 320934 - RNA, 17 nt, Human herpesvirus 5
uagcacagagacaccaa

SEQ ID NO: 320935 - RNA, 22 nt, Human herpesvirus 5
uagcacagagacaccaauugcu

SEQ ID NO: 320936 - RNA, 17 nt, Human herpesvirus 5
uagcacgucagugguga

SEQ ID NO: 320937 - RNA, 15 nt, Human herpesvirus 5
uagcagugacugggu

SEQ ID NO: 320938 - RNA, 20 nt, Human herpesvirus 5
uagcaugcauaagaagccaa

SEQ ID NO: 320939 - RNA, 15 nt, Human herpesvirus 5
uagccaauaaagaga

SEQ ID NO: 320940 - RNA, 20 nt, Human herpesvirus 5
uagccagcgucggcauauga

SEQ ID NO: 320941 - RNA, 12 nt, Human herpesvirus 5
uagccaggugac

SEQ ID NO: 320942 - RNA, 22 nt, Human herpesvirus 5
uagcccggucggucuuccugcu

SEQ ID NO: 320943 - RNA, 14 nt, Human herpesvirus 5
uagccgaugcugau

SEQ ID NO: 320944 - RNA, 16 nt, Human herpesvirus 5
uagccuccggcuguca

SEQ ID NO: 320945 - RNA, 14 nt, Human herpesvirus 5
uagccuucccguga

SEQ ID NO: 320946 - RNA, 18 nt, Human herpesvirus 5
uagcugcacaccaguauu

SEQ ID NO: 320947 - RNA, 21 nt, Human herpesvirus 5
uaggaacacugaaaacaccau

SEQ ID NO: 320948 - RNA, 18 nt, Human herpesvirus 5
uaggcuacucugacugug

SEQ ID NO: 320949 - RNA, 13 nt, Human herpesvirus 5
uaggucagggaug

SEQ ID NO: 320950 - RNA, 14 nt, Human herpesvirus 5
uaguacccacauuu

SEQ ID NO: 320951 - RNA, 16 nt, Human herpesvirus 5
uaguacuucccaugca

SEQ ID NO: 320952 - RNA, 15 nt, Human herpesvirus 5
uaguauccacgucac

SEQ ID NO: 320953 - RNA, 21 nt, Human herpesvirus 5
uagucaauaaagaaaaccaca

SEQ ID NO: 320954 - RNA, 11 nt, Human herpesvirus 5
uagucaucuca

SEQ ID NO: 320955 - RNA, 17 nt, Human herpesvirus 5
uagucaucucauuugcu

SEQ ID NO: 320956 - RNA, 21 nt, Human herpesvirus 5
uagugaauugguguucuuaca

SEQ ID NO: 320957 - RNA, 13 nt, Human herpesvirus 5
uagugagcuuuga

SEQ ID NO: 320958 - RNA, 17 nt, Human herpesvirus 5
uagugcggcgugcugca

SEQ ID NO: 320959 - RNA, 18 nt, Human herpesvirus 5
uaguguguuccacuccau

SEQ ID NO: 320960 - RNA, 11 nt, Human herpesvirus 5
uaguugcagag

SEQ ID NO: 320961 - RNA, 21 nt, Human herpesvirus 5
uauaaaauggucguugcccac

SEQ ID NO: 320962 - RNA, 14 nt, Human herpesvirus 5
uauaaauugcucua

SEQ ID NO: 320963 - RNA, 19 nt, Human herpesvirus 5
uauaagaaaagacaaugaa

SEQ ID NO: 320964 - RNA, 14 nt, Human herpesvirus 5
uauaagaaggccau

SEQ ID NO: 320965 - RNA, 14 nt, Human herpesvirus 5
uauaagacagccuu

SEQ ID NO: 320966 - RNA, 17 nt, Human herpesvirus 5
uauaagcaccguggggu

SEQ ID NO: 320967 - RNA, 19 nt, Human herpesvirus 5
uauaagcguggauggucau

SEQ ID NO: 320968 - RNA, 13 nt, Human herpesvirus 5
uauaaggaggcaa

SEQ ID NO: 320969 - RNA, 16 nt, Human herpesvirus 5
uauacaacaguucuau

SEQ ID NO: 320970 - RNA, 16 nt, Human herpesvirus 5
uauacaucuccgucuc

SEQ ID NO: 320971 - RNA, 21 nt, Human herpesvirus 5
uauacaucuccgucucugguc

SEQ ID NO: 320972 - RNA, 18 nt, Human herpesvirus 5
uauagauagcggcacuuu

SEQ ID NO: 320973 - RNA, 22 nt, Human herpesvirus 5
uauagcaugcauaagaagccaa

SEQ ID NO: 320974 - RNA, 23 nt, Human herpesvirus 5
uauagcaugcauaagaagccaag

SEQ ID NO: 320975 - RNA, 16 nt, Human herpesvirus 5
uauaggcuaagcuaua

SEQ ID NO: 320976 - RNA, 17 nt, Human herpesvirus 5
uauauaaaccguaugca

SEQ ID NO: 320977 - RNA, 18 nt, Human herpesvirus 5
uauauaaaccguaugcac

SEQ ID NO: 320978 - RNA, 22 nt, Human herpesvirus 5
uauauacaaaaacaugcacaua

SEQ ID NO: 320979 - RNA, 13 nt, Human herpesvirus 5
uauauacacaugc

SEQ ID NO: 320980 - RNA, 17 nt, Human herpesvirus 5
uaucaauacaaugacac

SEQ ID NO: 320981 - RNA, 20 nt, Human herpesvirus 5
uaucagaaagcugcaaucaa

SEQ ID NO: 320982 - RNA, 21 nt, Human herpesvirus 5
uaucagaaagcugcaaucaaa

SEQ ID NO: 320983 - RNA, 23 nt, Human herpesvirus 5
uaucaucugcucccgcugcugcu

SEQ ID NO: 320984 - RNA, 21 nt, Human herpesvirus 5
uaucaucuuuauuugcaucau

SEQ ID NO: 320985 - RNA, 13 nt, Human herpesvirus 5
uauccauuggaga

SEQ ID NO: 320986 - RNA, 20 nt, Human herpesvirus 5
uauccauuggagaacagugc

SEQ ID NO: 320987 - RNA, 15 nt, Human herpesvirus 5
uauccgcguuaucag

SEQ ID NO: 320988 - RNA, 14 nt, Human herpesvirus 5
uaucgaugcugcaa

SEQ ID NO: 320989 - RNA, 18 nt, Human herpesvirus 5
uaucuacaacacuacccu

SEQ ID NO: 320990 - RNA, 22 nt, Human herpesvirus 5
uaucuacaacuuaaccacaaga

SEQ ID NO: 320991 - RNA, 11 nt, Human herpesvirus 5
uaucuacauca

SEQ ID NO: 320992 - RNA, 23 nt, Human herpesvirus 5
uaucucacaccgucagcugcgua

SEQ ID NO: 320993 - RNA, 15 nt, Human herpesvirus 5
uaucuccgguuucaa

SEQ ID NO: 320994 - RNA, 13 nt, Human herpesvirus 5
uaucuguacugca

SEQ ID NO: 320995 - RNA, 14 nt, Human herpesvirus 5
uaucuucaaccuca

SEQ ID NO: 320996 - RNA, 20 nt, Human herpesvirus 5
uaucuucaaccucacguuaa

SEQ ID NO: 320997 - RNA, 15 nt, Human herpesvirus 5
guuggaacccaucga

SEQ ID NO: 320998 - RNA, 15 nt, Human herpesvirus 5
guuggccaguauaaa

SEQ ID NO: 320999 - RNA, 22 nt, Human herpesvirus 5
guuguacgcauuacacaggugu

SEQ ID NO: 321000 - RNA, 20 nt, Human herpesvirus 5
guuguggcaaagagccaugu

SEQ ID NO: 321001 - RNA, 23 nt, Human herpesvirus 5
guuuacugaaaaggaaugugcuu

SEQ ID NO: 321002 - RNA, 18 nt, Human herpesvirus 5
guuuaugaacauguaucu

SEQ ID NO: 321003 - RNA, 22 nt, Human herpesvirus 5
guuuauuuuucagcucacuguu

SEQ ID NO: 321004 - RNA, 17 nt, Human herpesvirus 5
guuucaaacagcacauu

SEQ ID NO: 321005 - RNA, 23 nt, Human herpesvirus 5
guuucaaacagcacauuagacac

SEQ ID NO: 321006 - RNA, 20 nt, Human herpesvirus 5
guuucaucgacgccuaccuu

SEQ ID NO: 321007 - RNA, 20 nt, Human herpesvirus 5
guuucgcuguagcugugguu

SEQ ID NO: 321008 - RNA, 20 nt, Human herpesvirus 5
guuucggaguaccgaguaga

SEQ ID NO: 321009 - RNA, 15 nt, Human herpesvirus 5
guuuuacgaguggug

SEQ ID NO: 321010 - RNA, 14 nt, Human herpesvirus 5
guuuugcuuuugca

SEQ ID NO: 321011 - RNA, 12 nt, Human herpesvirus 5
guuuuuaccuac

SEQ ID NO: 321012 - RNA, 21 nt, Human herpesvirus 5
guuuuuauuacccgcuacugu

SEQ ID NO: 321013 - RNA, 23 nt, Human herpesvirus 5
guuuuugcuuccgagcuguguuu

SEQ ID NO: 321014 - RNA, 15 nt, Human herpesvirus 5
guuuuuugaaucaua

SEQ ID NO: 321015 - RNA, 17 nt, Human herpesvirus 5
guuuuuuuauguuacaa

SEQ ID NO: 321016 - RNA, 20 nt, Human herpesvirus 5
guuuuuuuccauccuggcca

SEQ ID NO: 321017 - RNA, 18 nt, Human herpesvirus 5
guuuuuuuuuguuaacaa

SEQ ID NO: 321018 - RNA, 21 nt, Human herpesvirus 5
uaaaaaaaaaaguaugugcuc

SEQ ID NO: 321019 - RNA, 16 nt, Human herpesvirus 5
uaaaaaaagacacuca

SEQ ID NO: 321020 - RNA, 11 nt, Human herpesvirus 5
uaaaaaccacg

SEQ ID NO: 321021 - RNA, 15 nt, Human herpesvirus 5
uaaaaauacagaguc

SEQ ID NO: 321022 - RNA, 16 nt, Human herpesvirus 5
uaaaagcugcaugaaa

SEQ ID NO: 321023 - RNA, 22 nt, Human herpesvirus 5
uaaaaugugcgaauuaggcaac

SEQ ID NO: 321024 - RNA, 16 nt, Human herpesvirus 5
uaaaauuugauuacuc

SEQ ID NO: 321025 - RNA, 16 nt, Human herpesvirus 5
uaaacacgacauccgu

SEQ ID NO: 321026 - RNA, 19 nt, Human herpesvirus 5
uaaacuuuuuuuaaccaau

SEQ ID NO: 321027 - RNA, 23 nt, Human herpesvirus 5
uaaagacaucgucacaccuauca

SEQ ID NO: 321028 - RNA, 17 nt, Human herpesvirus 5
uaaagacgucaaugaca

SEQ ID NO: 321029 - RNA, 22 nt, Human herpesvirus 5
uaaagagaguuguggcaaagag

SEQ ID NO: 321030 - RNA, 15 nt, Human herpesvirus 5
uaaagauaaucugcc

SEQ ID NO: 321031 - RNA, 12 nt, Human herpesvirus 5
uaaagauucacu

SEQ ID NO: 321032 - RNA, 13 nt, Human herpesvirus 5
uaaagauucacuu

SEQ ID NO: 321033 - RNA, 23 nt, Human herpesvirus 5
uaaagccacgcggcguacgucac

SEQ ID NO: 321034 - RNA, 18 nt, Human herpesvirus 5
uaaagcccuuaacauguu

SEQ ID NO: 321035 - RNA, 14 nt, Human herpesvirus 5
uaaaggacgugaug

SEQ ID NO: 321036 - RNA, 16 nt, Human herpesvirus 5
uaaaggacgugaugcg

SEQ ID NO: 321037 - RNA, 18 nt, Human herpesvirus 5
uaaagggcgaacguccuc

SEQ ID NO: 321038 - RNA, 14 nt, Human herpesvirus 5
uaaaucuacacuga

SEQ ID NO: 321039 - RNA, 18 nt, Human herpesvirus 5
uaaaugagaccccauccu

SEQ ID NO: 321040 - RNA, 16 nt, Human herpesvirus 5
uaacaaacaaugacac

SEQ ID NO: 321041 - RNA, 23 nt, Human herpesvirus 5
uaacaaauauauggaguuugugu

SEQ ID NO: 321042 - RNA, 15 nt, Human herpesvirus 5
uaacaccgucaccac

SEQ ID NO: 321043 - RNA, 13 nt, Human herpesvirus 5
uaacacgcaccac

SEQ ID NO: 321044 - RNA, 22 nt, Human herpesvirus 5
uaacacgucgauaguaauguau

SEQ ID NO: 321045 - RNA, 14 nt, Human herpesvirus 5
uaacacuacagcuu

SEQ ID NO: 321046 - RNA, 14 nt, Human herpesvirus 5
uaacacuagccauc

SEQ ID NO: 321047 - RNA, 15 nt, Human herpesvirus 5
uaacagcucaugccu

SEQ ID NO: 321048 - RNA, 14 nt, Human herpesvirus 5
uaacagguauagca

SEQ ID NO: 321049 - RNA, 16 nt, Human herpesvirus 5
uaaccaauaacauguc

SEQ ID NO: 321050 - RNA, 20 nt, Human herpesvirus 5
uaaccacgucgaccaggugc

SEQ ID NO: 321051 - RNA, 18 nt, Human herpesvirus 5
uaaccacguugcgucgug

SEQ ID NO: 321052 - RNA, 14 nt, Human herpesvirus 5
uaacccacaccuau

SEQ ID NO: 321053 - RNA, 16 nt, Human herpesvirus 5
uaaccgcaaaggccac

SEQ ID NO: 321054 - RNA, 22 nt, Human herpesvirus 5
ucaaugguggaaaccagauaca

SEQ ID NO: 321055 - RNA, 17 nt, Human herpesvirus 5
ucacaaaaacaccaauc

SEQ ID NO: 321056 - RNA, 21 nt, Human herpesvirus 5
ucacaauggaagccauacuuc

SEQ ID NO: 321057 - RNA, 19 nt, Human herpesvirus 5
ucacaauugacguggguug

SEQ ID NO: 321058 - RNA, 19 nt, Human herpesvirus 5
ucacacaggccagcugcca

SEQ ID NO: 321059 - RNA, 17 nt, Human herpesvirus 5
ucacaccgucagcugcg

SEQ ID NO: 321060 - RNA, 17 nt, Human herpesvirus 5
ucacacguuacaucaua

SEQ ID NO: 321061 - RNA, 13 nt, Human herpesvirus 5
ucacaucacccaa

SEQ ID NO: 321062 - RNA, 20 nt, Human herpesvirus 5
ucacaucacccaacacugcu

SEQ ID NO: 321063 - RNA, 19 nt, Human herpesvirus 5
ucaccaaggcgagccacuc

SEQ ID NO: 321064 - RNA, 20 nt, Human herpesvirus 5
ucaccaccacgguacaaacc

SEQ ID NO: 321065 - RNA, 11 nt, Human herpesvirus 5
ucaccacuuug

SEQ ID NO: 321066 - RNA, 22 nt, Human herpesvirus 5
ucaccagcaaggucaacuacag

SEQ ID NO: 321067 - RNA, 15 nt, Human herpesvirus 5
ucaccgacgugcuua

SEQ ID NO: 321068 - RNA, 20 nt, Human herpesvirus 5
ucaccgaguccaucauguuc

SEQ ID NO: 321069 - RNA, 17 nt, Human herpesvirus 5
ucaccguaaucaccaaa

SEQ ID NO: 321070 - RNA, 18 nt, Human herpesvirus 5
ucaccguaaucaccaaag

SEQ ID NO: 321071 - RNA, 18 nt, Human herpesvirus 5
ucaccgugaaagugauac

SEQ ID NO: 321072 - RNA, 18 nt, Human herpesvirus 5
ucaccuagacgcaaacgc

SEQ ID NO: 321073 - RNA, 22 nt, Human herpesvirus 5
ucaccucgccuauacuaugugu

SEQ ID NO: 321074 - RNA, 21 nt, Human herpesvirus 5
ucaccugugguagaaugcugc

SEQ ID NO: 321075 - RNA, 18 nt, Human herpesvirus 5
ucacgaaaggcaccggca

SEQ ID NO: 321076 - RNA, 14 nt, Human herpesvirus 5
ucacggugccaugg

SEQ ID NO: 321077 - RNA, 21 nt, Human herpesvirus 5
ucacgucacuacucugggaua

SEQ ID NO: 321078 - RNA, 20 nt, Human herpesvirus 5
ucacgucgggacgauauaaa

SEQ ID NO: 321079 - RNA, 17 nt, Human herpesvirus 5
ucacgucuacuacguca

SEQ ID NO: 321080 - RNA, 20 nt, Human herpesvirus 5
ucacuauagcgggauuuacu

SEQ ID NO: 321081 - RNA, 19 nt, Human herpesvirus 5
ucacuauccgaugguuuca

SEQ ID NO: 321082 - RNA, 19 nt, Human herpesvirus 5
ucacuaucuucaaccucac

SEQ ID NO: 321083 - RNA, 17 nt, Human herpesvirus 5
ucacuauuguauacucu

SEQ ID NO: 321084 - RNA, 19 nt, Human herpesvirus 5
ucacuauuguauacucuau

SEQ ID NO: 321085 - RNA, 14 nt, Human herpesvirus 5
ucacugccaccgac

SEQ ID NO: 321086 - RNA, 19 nt, Human herpesvirus 5
ucacugccaccgacaugga

SEQ ID NO: 321087 - RNA, 16 nt, Human herpesvirus 5
ucacugugaaacgcca

SEQ ID NO: 321088 - RNA, 17 nt, Human herpesvirus 5
ucacuucaaacaucagc

SEQ ID NO: 321089 - RNA, 22 nt, Human herpesvirus 5
ucacuuuuaacagcucaugccu

SEQ ID NO: 321090 - RNA, 22 nt, Human herpesvirus 5
ucagaaagcaccagaacccguc

SEQ ID NO: 321091 - RNA, 20 nt, Human herpesvirus 5
ucagaccgcaacaacagcag

SEQ ID NO: 321092 - RNA, 17 nt, Human herpesvirus 5
ucagacucacgucacac

SEQ ID NO: 321093 - RNA, 14 nt, Human herpesvirus 5
ucagcagcaccucu

SEQ ID NO: 321094 - RNA, 18 nt, Human herpesvirus 5
ucagccucgggugcaccg

SEQ ID NO: 321095 - RNA, 21 nt, Human herpesvirus 5
ucagcguccggccucggguug

SEQ ID NO: 321096 - RNA, 21 nt, Human herpesvirus 5
ucagcuaccgccgcaacagcg

SEQ ID NO: 321097 - RNA, 14 nt, Human herpesvirus 5
ucagcuugauggug

SEQ ID NO: 321098 - RNA, 14 nt, Human herpesvirus 5
ucaggaaucuggga

SEQ ID NO: 321099 - RNA, 17 nt, Human herpesvirus 5
ucaggacgaggagccaa

SEQ ID NO: 321100 - RNA, 23 nt, Human herpesvirus 5
ucaggaguuuauuguguucuccu

SEQ ID NO: 321101 - RNA, 23 nt, Human herpesvirus 5
ucaggauggagggggaggccaca

SEQ ID NO: 321102 - RNA, 13 nt, Human herpesvirus 5
ucagguacauuac

SEQ ID NO: 321103 - RNA, 14 nt, Human herpesvirus 5
ucagguacauuacc

SEQ ID NO: 321104 - RNA, 12 nt, Human herpesvirus 5
ucaguacuuugg

SEQ ID NO: 321105 - RNA, 19 nt, Human herpesvirus 5
ucaguauuuuugugcucaa

SEQ ID NO: 321106 - RNA, 14 nt, Human herpesvirus 5
ucaguccauuguca

SEQ ID NO: 321107 - RNA, 15 nt, Human herpesvirus 5
ucaguccauugucag

SEQ ID NO: 321108 - RNA, 19 nt, Human herpesvirus 5
ucaguguacacgcgcccag

SEQ ID NO: 321109 - RNA, 19 nt, Human herpesvirus 5
ucaguguuguccccuaucc

SEQ ID NO: 321110 - RNA, 18 nt, Human herpesvirus 5
ucauaaacuguaccgucc

SEQ ID NO: 321111 - RNA, 16 nt, Human herpesvirus 5
ucauaaguuuacggga

SEQ ID NO: 321112 - RNA, 22 nt, Human herpesvirus 5
ucauacccgucacgucagugau

SEQ ID NO: 321113 - RNA, 24 nt, Human herpesvirus 5
ucauacccgucacgucagugaucu

SEQ ID NO: 321114 - RNA, 22 nt, Human herpesvirus 5
ucauacgcgccuuuugaucgcc

SEQ ID NO: 321115 - RNA, 12 nt, Human herpesvirus 5
ucauagagccaa

SEQ ID NO: 321116 - RNA, 13 nt, Human herpesvirus 5
ucauagagccaac

SEQ ID NO: 321117 - RNA, 13 nt, Human herpesvirus 5
uggagacauggac

SEQ ID NO: 321118 - RNA, 22 nt, Human herpesvirus 5
uggagaugaacaagguucucca

SEQ ID NO: 321119 - RNA, 12 nt, Human herpesvirus 5
uggagauucuaa

SEQ ID NO: 321120 - RNA, 15 nt, Human herpesvirus 5
uggagcacacugcua

SEQ ID NO: 321121 - RNA, 21 nt, Human herpesvirus 5
uggaggagacuaccucaguca

SEQ ID NO: 321122 - RNA, 19 nt, Human herpesvirus 5
uggauacaagcuugguaca

SEQ ID NO: 321123 - RNA, 13 nt, Human herpesvirus 5
uggauacuaguaa

SEQ ID NO: 321124 - RNA, 20 nt, Human herpesvirus 5
uggauaucuaggugcugcau

SEQ ID NO: 321125 - RNA, 23 nt, Human herpesvirus 5
uggaucaucuguuuuugcugcaa

SEQ ID NO: 321126 - RNA, 18 nt, Human herpesvirus 5
uggaugagggcaucaugg

SEQ ID NO: 321127 - RNA, 22 nt, Human herpesvirus 5
uggaugagggcaucaugguggu

SEQ ID NO: 321128 - RNA, 20 nt, Human herpesvirus 5
uggauguugagagugguggg

SEQ ID NO: 321129 - RNA, 14 nt, Human herpesvirus 5
uggauuugucucuc

SEQ ID NO: 321130 - RNA, 14 nt, Human herpesvirus 5
uggcaaagagccau

SEQ ID NO: 321131 - RNA, 16 nt, Human herpesvirus 5
uggcaagaguucaaag

SEQ ID NO: 321132 - RNA, 15 nt, Human herpesvirus 5
uggcaaggugcugca

SEQ ID NO: 321133 - RNA, 18 nt, Human herpesvirus 5
uggcauauagccaauaaa

SEQ ID NO: 321134 - RNA, 23 nt, Human herpesvirus 5
uggccaccaugcugagcaaguac

SEQ ID NO: 321135 - RNA, 21 nt, Human herpesvirus 5
uggccaguauaaaauggucgu

SEQ ID NO: 321136 - RNA, 23 nt, Human herpesvirus 5
uggcccaggguacggaucuuauu

SEQ ID NO: 321137 - RNA, 17 nt, Human herpesvirus 5
uggcccuggucuggccc

SEQ ID NO: 321138 - RNA, 21 nt, Human herpesvirus 5
uggccgagacggcgugacaca

SEQ ID NO: 321139 - RNA, 22 nt, Human herpesvirus 5
uggccgagacggcgugacacag

SEQ ID NO: 321140 - RNA, 15 nt, Human herpesvirus 5
uggccgccacaccug

SEQ ID NO: 321141 - RNA, 19 nt, Human herpesvirus 5
uggccgucuuggguagcuu

SEQ ID NO: 321142 - RNA, 16 nt, Human herpesvirus 5
uggccucgauccaucc

SEQ ID NO: 321143 - RNA, 20 nt, Human herpesvirus 5
uggccucgauccauccuggg

SEQ ID NO: 321144 - RNA, 14 nt, Human herpesvirus 5
uggccugcaucuuc

SEQ ID NO: 321145 - RNA, 23 nt, Human herpesvirus 5
uggcgcguacgguggacggguuu

SEQ ID NO: 321146 - RNA, 17 nt, Human herpesvirus 5
uggcuauaauaugugcg

SEQ ID NO: 321147 - RNA, 16 nt, Human herpesvirus 5
uggcugccgcuacuga

SEQ ID NO: 321148 - RNA, 16 nt, Human herpesvirus 5
uggcugcuuaaugaca

SEQ ID NO: 321149 - RNA, 17 nt, Human herpesvirus 5
uggcuguagcuauugug

SEQ ID NO: 321150 - RNA, 16 nt, Human herpesvirus 5
ugggaaugacggugau

SEQ ID NO: 321151 - RNA, 16 nt, Human herpesvirus 5
ugggaaugcacguguu

SEQ ID NO: 321152 - RNA, 21 nt, Human herpesvirus 5
ugggaauguccaucucgucaa

SEQ ID NO: 321153 - RNA, 17 nt, Human herpesvirus 5
ugggagauccaguauuc

SEQ ID NO: 321154 - RNA, 18 nt, Human herpesvirus 5
ugggcaugcaaugcaaca

SEQ ID NO: 321155 - RNA, 23 nt, Human herpesvirus 5
uggggaucuacgcggguuccuca

SEQ ID NO: 321156 - RNA, 11 nt, Human herpesvirus 5
uggggcugcug

SEQ ID NO: 321157 - RNA, 20 nt, Human herpesvirus 5
uggguauuacggacaccucu

SEQ ID NO: 321158 - RNA, 19 nt, Human herpesvirus 5
uggguccagccagcaucga

SEQ ID NO: 321159 - RNA, 23 nt, Human herpesvirus 5
ugggucccggcgcgguguuagac

SEQ ID NO: 321160 - RNA, 15 nt, Human herpesvirus 5
ugggucgccaggugu

SEQ ID NO: 321161 - RNA, 16 nt, Human herpesvirus 5
ugggucgggagcacau

SEQ ID NO: 321162 - RNA, 18 nt, Human herpesvirus 5
ugggucgggagcacauac

SEQ ID NO: 321163 - RNA, 14 nt, Human herpesvirus 5
ugggucugguuaca

SEQ ID NO: 321164 - RNA, 19 nt, Human herpesvirus 5
uggguguuucuccgugugu

SEQ ID NO: 321165 - RNA, 19 nt, Human herpesvirus 5
uggguuacgagaaacuggg

SEQ ID NO: 321166 - RNA, 22 nt, Human herpesvirus 5
uggguuacgagaaacugggaua

SEQ ID NO: 321167 - RNA, 15 nt, Human herpesvirus 5
ugguaagucugggaa

SEQ ID NO: 321168 - RNA, 15 nt, Human herpesvirus 5
ugguacagauccagu

SEQ ID NO: 321169 - RNA, 12 nt, Human herpesvirus 5
ugguaccugcaa

SEQ ID NO: 321170 - RNA, 16 nt, Human herpesvirus 5
ugguauaaccagucau

SEQ ID NO: 321171 - RNA, 22 nt, Human herpesvirus 5
ugguauccacgcucguucaaua

SEQ ID NO: 321172 - RNA, 14 nt, Human herpesvirus 5
ugguaucuacauca

SEQ ID NO: 321173 - RNA, 15 nt, Human herpesvirus 5
uggucaacaccaugu

SEQ ID NO: 321174 - RNA, 17 nt, Human herpesvirus 5
uggucaacgcuuuggaa

SEQ ID NO: 321175 - RNA, 22 nt, Human herpesvirus 5
uggucaagggucacggugccau

SEQ ID NO: 321176 - RNA, 22 nt, Human herpesvirus 5
uggucaauaacccacaccuaua

SEQ ID NO: 321177 - RNA, 14 nt, Human herpesvirus 5
ugguccacuccgua

SEQ ID NO: 321178 - RNA, 23 nt, Human herpesvirus 5
uggucccggauaauuguccuucu

SEQ ID NO: 321179 - RNA, 16 nt, Human herpesvirus 5
ugguccgucaugaccg

SEQ ID NO: 321180 - RNA, 13 nt, Human herpesvirus 5
uggucgaugcuga

SEQ ID NO: 321181 - RNA, 14 nt, Human herpesvirus 5
uggucgaugcugau

SEQ ID NO: 321182 - RNA, 24 nt, Human herpesvirus 5
uggucuuuuuaaggagcucugaaa

SEQ ID NO: 321183 - RNA, 14 nt, Human herpesvirus 5
uggugacugagcac

SEQ ID NO: 321184 - RNA, 20 nt, Human herpesvirus 5
uggugacuggggacggugau

SEQ ID NO: 321185 - RNA, 16 nt, Human herpesvirus 5
uggugccccaggauga

SEQ ID NO: 321186 - RNA, 17 nt, Human herpesvirus 5
uggugccccaggaugaa

SEQ ID NO: 321187 - RNA, 21 nt, Human herpesvirus 5
ugguggccgaacagcagcucu

SEQ ID NO: 321188 - RNA, 11 nt, Human herpesvirus 5
uguaagacaga

SEQ ID NO: 321189 - RNA, 14 nt, Human herpesvirus 5
uguaaucauccuaa

SEQ ID NO: 321190 - RNA, 12 nt, Human herpesvirus 5
uguaaucuucca

SEQ ID NO: 321191 - RNA, 12 nt, Human herpesvirus 5
uguaauuauucc

SEQ ID NO: 321192 - RNA, 23 nt, Human herpesvirus 5
uguaccaucauugcugcuacgga

SEQ ID NO: 321193 - RNA, 19 nt, Human herpesvirus 5
uguacccggcacccgagca

SEQ ID NO: 321194 - RNA, 15 nt, Human herpesvirus 5
uguacgcauuacaca

SEQ ID NO: 321195 - RNA, 19 nt, Human herpesvirus 5
ugugaauugcgaagccagc

SEQ ID NO: 321196 - RNA, 17 nt, Human herpesvirus 5
ugugacguggauacuag

SEQ ID NO: 321197 - RNA, 13 nt, Human herpesvirus 5
ugugaggaugaaa

SEQ ID NO: 321198 - RNA, 15 nt, Human herpesvirus 5
ugugaucugcacgua

SEQ ID NO: 321199 - RNA, 17 nt, Human herpesvirus 5
ugugcaaaaacuugucc

SEQ ID NO: 321200 - RNA, 19 nt, Human herpesvirus 5
ugugcacgcacgacaugac

SEQ ID NO: 321201 - RNA, 22 nt, Human herpesvirus 5
ugugccucauuuguauuuacuu

SEQ ID NO: 321202 - RNA, 22 nt, Human herpesvirus 5
ugugcgaauuaggcaacuauca

SEQ ID NO: 321203 - RNA, 12 nt, Human herpesvirus 5
ugugcucaaguu

SEQ ID NO: 321204 - RNA, 22 nt, Human herpesvirus 5
ugugcuugacuguaccaucauu

SEQ ID NO: 321205 - RNA, 17 nt, Human herpesvirus 5
uguggaacuguugcgac

SEQ ID NO: 321206 - RNA, 15 nt, Human herpesvirus 5
uguggcaaagagcca

SEQ ID NO: 321207 - RNA, 13 nt, Human herpesvirus 5
uguggggcugcuc

SEQ ID NO: 321208 - RNA, 16 nt, Human herpesvirus 5
uguggggcugcucaac

SEQ ID NO: 321209 - RNA, 21 nt, Human herpesvirus 5
uguggugagaaugcuguuuaa

SEQ ID NO: 321210 - RNA, 15 nt, Human herpesvirus 5
uguguagaacaauga

SEQ ID NO: 321211 - RNA, 23 nt, Human herpesvirus 5
uguguuaugcggcgacugauuaa

SEQ ID NO: 321212 - RNA, 19 nt, Human herpesvirus 5
uguguuauucagaaccaug

SEQ ID NO: 321213 - RNA, 17 nt, Human herpesvirus 5
uguguuccacuccauca

SEQ ID NO: 321214 - RNA, 20 nt, Human herpesvirus 5
uguguuccacuccaucacac

SEQ ID NO: 321215 - RNA, 21 nt, Human herpesvirus 5
uguguugcuacagggagugaa

SEQ ID NO: 321216 - RNA, 16 nt, Human herpesvirus 5
uguuaaaaaaaccacg

SEQ ID NO: 321217 - RNA, 16 nt, Human herpesvirus 5
uguuacaaugucacug

SEQ ID NO: 321218 - RNA, 22 nt, Human herpesvirus 5
uguuaccagaacucucugccac

SEQ ID NO: 321219 - RNA, 17 nt, Human herpesvirus 5
uguuagguucguuauaa

SEQ ID NO: 321220 - RNA, 13 nt, Human herpesvirus 5
uguuauacucugu

SEQ ID NO: 321221 - RNA, 18 nt, Human herpesvirus 5
uguucucaugcagcacau

SEQ ID NO: 321222 - RNA, 17 nt, Human herpesvirus 5
uguucucccgacgucac

SEQ ID NO: 321223 - RNA, 13 nt, Human herpesvirus 5
uguucuuacaguu

SEQ ID NO: 321224 - RNA, 16 nt, Human herpesvirus 5
uguugaauaacaccaa

SEQ ID NO: 321225 - RNA, 19 nt, Human herpesvirus 5
uguugacccagggcugcuc

SEQ ID NO: 321226 - RNA, 23 nt, Human herpesvirus 5
uguugacccagggcugcuccaac

SEQ ID NO: 321227 - RNA, 15 nt, Human herpesvirus 5
uguugcgaauucaua

SEQ ID NO: 321228 - RNA, 20 nt, Human herpesvirus 5
uguuggaccaaagacugugg

SEQ ID NO: 321229 - RNA, 22 nt, Human herpesvirus 5
uguugucaggacgugcugucgu

SEQ ID NO: 321230 - RNA, 17 nt, Human herpesvirus 5
uguuguuagacuagcac

SEQ ID NO: 321231 - RNA, 15 nt, Human herpesvirus 5
uguuuaaugacaagu

SEQ ID NO: 321232 - RNA, 14 nt, Human herpesvirus 5
uguuucaaacagca

SEQ ID NO: 321233 - RNA, 18 nt, Human herpesvirus 5
uguuucaaacagcacauu

SEQ ID NO: 321234 - RNA, 22 nt, Human herpesvirus 5
uguuugaauaccguaaacauaa

SEQ ID NO: 321235 - RNA, 20 nt, Human herpesvirus 5
uguuugcgcccccguguguc

SEQ ID NO: 321236 - RNA, 22 nt, Human herpesvirus 5
uguuugcgcccccgugugucua

SEQ ID NO: 321237 - RNA, 22 nt, Human herpesvirus 5
uguuuucaccgacgugcuuaau

SEQ ID NO: 321238 - RNA, 16 nt, Human herpesvirus 5
uguuuucguguacuac

SEQ ID NO: 321239 - RNA, 13 nt, Human herpesvirus 5
uguuuuuugugca

SEQ ID NO: 321240 - RNA, 14 nt, Human herpesvirus 5
uuaaaaaaaccacg

SEQ ID NO: 321241 - RNA, 18 nt, Human herpesvirus 5
uuaaacccacgaccauuu

SEQ ID NO: 321242 - RNA, 24 nt, Human herpesvirus 5
uuaaacgucguuguguucuuacuc

SEQ ID NO: 321243 - RNA, 12 nt, Human herpesvirus 5
uuaaacuggaua

SEQ ID NO: 321244 - RNA, 19 nt, Human herpesvirus 5
uuaaaggcgcacuugucau

SEQ ID NO: 321245 - RNA, 19 nt, Human herpesvirus 5
uuaacccaaaaccaugcua

SEQ ID NO: 321246 - RNA, 13 nt, Human herpesvirus 5
uuaagcugcucau

SEQ ID NO: 321247 - RNA, 22 nt, Human herpesvirus 5
uuaauaaaacgccaugaugaca

SEQ ID NO: 321248 - RNA, 16 nt, Human herpesvirus 5
uuaaucuuaccgggga

SEQ ID NO: 321249 - RNA, 21 nt, Human herpesvirus 5
uuaaugugucgcuauacacca

SEQ ID NO: 321250 - RNA, 22 nt, Human herpesvirus 5
uuacagccuugagaaccugcuc

SEQ ID NO: 321251 - RNA, 17 nt, Human herpesvirus 5
uuaccaacguaacagca

SEQ ID NO: 321252 - RNA, 13 nt, Human herpesvirus 5
uuaccccucgcug

SEQ ID NO: 321253 - RNA, 19 nt, Human herpesvirus 5
uuacguguuucaaacagca

SEQ ID NO: 321254 - RNA, 17 nt, Human herpesvirus 5
uuacuaguauccacguc

SEQ ID NO: 321255 - RNA, 19 nt, Human herpesvirus 5
uuacugggacgcgugcucu

SEQ ID NO: 321256 - RNA, 22 nt, Human herpesvirus 5
uuagagcaaaaccuuacagcuu

SEQ ID NO: 321257 - RNA, 12 nt, Human herpesvirus 5
uuagccaccacc

SEQ ID NO: 321258 - RNA, 23 nt, Human herpesvirus 5
uuaguauacuaaacucugugaug

SEQ ID NO: 321259 - RNA, 23 nt, Human herpesvirus 5
uuagugucgauacuuuguaauca

SEQ ID NO: 321260 - RNA, 21 nt, Human herpesvirus 5
uuauaacggaaauuaugaacu

SEQ ID NO: 321261 - RNA, 11 nt, Human herpesvirus 5
uuauacaucuc

SEQ ID NO: 321262 - RNA, 22 nt, Human herpesvirus 5
uuaucagaaagcugcaaucaaa

SEQ ID NO: 321263 - RNA, 15 nt, Human herpesvirus 5
uuauccuguugaaua

SEQ ID NO: 321264 - RNA, 20 nt, Human herpesvirus 5
uuaucuguucuuccaccagc

SEQ ID NO: 321265 - RNA, 19 nt, Human herpesvirus 5
uuaugaguaccccacgcau

SEQ ID NO: 321266 - RNA, 14 nt, Human herpesvirus 5
uuaugccaguugcu

SEQ ID NO: 321267 - RNA, 16 nt, Human herpesvirus 5
uuauguuacaaaacaa

SEQ ID NO: 321268 - RNA, 23 nt, Human herpesvirus 5
uuauuauuuagaaauaaauacag

SEQ ID NO: 321269 - RNA, 15 nt, Human herpesvirus 5
uuauucagaaccaug

SEQ ID NO: 321270 - RNA, 22 nt, Human herpesvirus 5
uuauugacuagcgaaguacaca

SEQ ID NO: 321271 - RNA, 14 nt, Human herpesvirus 5
uuauuguguucucc

SEQ ID NO: 321272 - RNA, 15 nt, Human herpesvirus 5
uuauuugcaucaugu

SEQ ID NO: 321273 - RNA, 17 nt, Human herpesvirus 5
uucaaagggagccccau

SEQ ID NO: 321274 - RNA, 22 nt, Human herpesvirus 5
uucaaaguccgucaugcuggca

SEQ ID NO: 321275 - RNA, 23 nt, Human herpesvirus 5
uucaauaaaaaaaauauguagua

SEQ ID NO: 321276 - RNA, 17 nt, Human herpesvirus 5
uucaauaaaaaccaccg

SEQ ID NO: 321277 - RNA, 22 nt, Human herpesvirus 5
uucaauaaaaaccaccgugucu

SEQ ID NO: 321278 - RNA, 18 nt, Human herpesvirus 5
uucaauaaucuccugaga

SEQ ID NO: 321279 - RNA, 22 nt, Human herpesvirus 5
uucaccauucucgucugugucu

SEQ ID NO: 321280 - RNA, 14 nt, Human herpesvirus 5
uucacgaggaccau

SEQ ID NO: 321281 - RNA, 22 nt, Human herpesvirus 5
uucacucgggcgcaucacccgc

SEQ ID NO: 321282 - RNA, 16 nt, Human herpesvirus 5
uucacuucaaacauca

SEQ ID NO: 321283 - RNA, 14 nt, Human herpesvirus 5
uucagaaucuauaa

SEQ ID NO: 321284 - RNA, 15 nt, Human herpesvirus 5
uucagaccgcaacaa

SEQ ID NO: 321285 - RNA, 19 nt, Human herpesvirus 5
uucagaccgcaacaacagc

SEQ ID NO: 321286 - RNA, 17 nt, Human herpesvirus 5
uucagcguccggccucg

SEQ ID NO: 321287 - RNA, 15 nt, Human herpesvirus 5
uucagcuggcuuuca

SEQ ID NO: 321288 - RNA, 18 nt, Human herpesvirus 5
uucaucgugcaguaccuc

SEQ ID NO: 321289 - RNA, 19 nt, Human herpesvirus 5
uucaucgugcaguaccuca

SEQ ID NO: 321290 - RNA, 16 nt, Human herpesvirus 5
uucaucucuucgugac

SEQ ID NO: 321291 - RNA, 21 nt, Human herpesvirus 5
uucauuaugaguaccccacgc

SEQ ID NO: 321292 - RNA, 12 nt, Human herpesvirus 5
uucauucacugu

SEQ ID NO: 321293 - RNA, 12 nt, Human herpesvirus 5
uuccaacaccac

SEQ ID NO: 321294 - RNA, 13 nt, Human herpesvirus 5
uuccaacucuuuc

SEQ ID NO: 321295 - RNA, 18 nt, Human herpesvirus 5
uuccaugugcagcuggug

SEQ ID NO: 321296 - RNA, 21 nt, Human herpesvirus 5
uuccccacccaguagacagac

SEQ ID NO: 321297 - RNA, 16 nt, Human herpesvirus 5
uuccggucucggcucg

SEQ ID NO: 321298 - RNA, 17 nt, Human herpesvirus 5
uuccucgccaccacuac

SEQ ID NO: 321299 - RNA, 13 nt, Human herpesvirus 5
uuccugcagguac

SEQ ID NO: 321300 - RNA, 16 nt, Human herpesvirus 5
uucgaguccguccucg

SEQ ID NO: 321301 - RNA, 21 nt, Human herpesvirus 5
uucgagugccaguacagcgcc

SEQ ID NO: 321302 - RNA, 19 nt, Human herpesvirus 5
uucgauucucuauacacau

SEQ ID NO: 321303 - RNA, 19 nt, Human herpesvirus 5
uucgcggcgagguggucaa

SEQ ID NO: 321304 - RNA, 11 nt, Human herpesvirus 5
uucgcugccaa

SEQ ID NO: 321305 - RNA, 15 nt, Human herpesvirus 5
uucggccggcugcug

SEQ ID NO: 321306 - RNA, 18 nt, Human herpesvirus 5
uucggccggcugcugcac

SEQ ID NO: 321307 - RNA, 14 nt, Human herpesvirus 5
uucggugaccacaa

SEQ ID NO: 321308 - RNA, 23 nt, Human herpesvirus 5
uucgucgagcacccgucauggua

SEQ ID NO: 321309 - RNA, 13 nt, Human herpesvirus 5
uucuaccaucucc

SEQ ID NO: 321310 - RNA, 18 nt, Human herpesvirus 5
uucuacucguaaacugug

SEQ ID NO: 321311 - RNA, 22 nt, Human herpesvirus 5
uucucuggaugguacgucucua

SEQ ID NO: 321312 - RNA, 20 nt, Human herpesvirus 5
uucugcaaagucaacaugua

SEQ ID NO: 321313 - RNA, 13 nt, Human herpesvirus 5
uucuggcuauaau

SEQ ID NO: 321314 - RNA, 20 nt, Human herpesvirus 5
uucuggucgggcguguggua

SEQ ID NO: 321315 - RNA, 22 nt, Human herpesvirus 5
uucugugugucgcaaauaucgc

SEQ ID NO: 321316 - RNA, 16 nt, Human herpesvirus 5
uucuuacaguuuucau

SEQ ID NO: 321317 - RNA, 19 nt, Human herpesvirus 5
uucuuacuccgucuccaga

SEQ ID NO: 321318 - RNA, 19 nt, Human herpesvirus 5
uucuuauaaggaggcaaau

SEQ ID NO: 321319 - RNA, 20 nt, Human herpesvirus 5
uucuuccaccagcuacuuua

SEQ ID NO: 321320 - RNA, 12 nt, Human herpesvirus 5
uucuucuacuca

SEQ ID NO: 321321 - RNA, 18 nt, Human herpesvirus 5
uucuugccaagcuuuagc

SEQ ID NO: 321322 - RNA, 18 nt, Human herpesvirus 5
uugaaagcuuucuacgug

SEQ ID NO: 321323 - RNA, 15 nt, Human herpesvirus 5
uugaacguaauauca

SEQ ID NO: 321324 - RNA, 22 nt, Human herpesvirus 5
uugacgcacuuuuuuuacuagu

SEQ ID NO: 321325 - RNA, 20 nt, Human herpesvirus 5
uugacuagcgaaguacacag

SEQ ID NO: 321326 - RNA, 16 nt, Human herpesvirus 5
uugacucgcgugccaa

SEQ ID NO: 321327 - RNA, 13 nt, Human herpesvirus 5
uugagaacauaua

SEQ ID NO: 321328 - RNA, 16 nt, Human herpesvirus 5
uugagcacaaacugcg

SEQ ID NO: 321329 - RNA, 17 nt, Human herpesvirus 5
uugagcacaaacugcga

SEQ ID NO: 321330 - RNA, 15 nt, Human herpesvirus 5
uugagcgacagcagc

SEQ ID NO: 321331 - RNA, 22 nt, Human herpesvirus 5
uugagcgagaacuaauauugca

SEQ ID NO: 321332 - RNA, 17 nt, Human herpesvirus 5
uugauacgcuagcagaa

SEQ ID NO: 321333 - RNA, 14 nt, Human herpesvirus 5
uugauguaguacau

SEQ ID NO: 321334 - RNA, 21 nt, Human herpesvirus 5
uugauuucaacaaauaccaac

SEQ ID NO: 321335 - RNA, 17 nt, Human herpesvirus 5
uugcaaaagaagcugcc

SEQ ID NO: 321336 - RNA, 23 nt, Human herpesvirus 5
uugcaaacgguacgcagucacug

SEQ ID NO: 321337 - RNA, 19 nt, Human herpesvirus 5
uugcaacgcgcccgacagc

SEQ ID NO: 321338 - RNA, 18 nt, Human herpesvirus 5
uugcagaucgugccgcga

SEQ ID NO: 321339 - RNA, 16 nt, Human herpesvirus 5
uugccagucgcacuaa

SEQ ID NO: 321340 - RNA, 22 nt, Human herpesvirus 5
uugcccuucuggagcacacugc

SEQ ID NO: 321341 - RNA, 20 nt, Human herpesvirus 5
uugccgcuggacugacacag

SEQ ID NO: 321342 - RNA, 22 nt, Human herpesvirus 5
uugccgcuggacugacacagcu

SEQ ID NO: 321343 - RNA, 18 nt, Human herpesvirus 5
uugccggguaccuaaagc

SEQ ID NO: 321344 - RNA, 21 nt, Human herpesvirus 5
uugcugcgaagcccguucuuc

SEQ ID NO: 321345 - RNA, 18 nt, Human herpesvirus 5
uugcuucguauacaacag

SEQ ID NO: 321346 - RNA, 14 nt, Human herpesvirus 5
uuggaaaagccucc

SEQ ID NO: 321347 - RNA, 16 nt, Human herpesvirus 5
uuggaagccgaugcaa

SEQ ID NO: 321348 - RNA, 15 nt, Human herpesvirus 5
uuggacaauacauca

SEQ ID NO: 321349 - RNA, 15 nt, Human herpesvirus 5
uuggacgaaacguau

SEQ ID NO: 321350 - RNA, 14 nt, Human herpesvirus 5
uuggacugguacau

SEQ ID NO: 321351 - RNA, 14 nt, Human herpesvirus 5
uuggcauauagcca

SEQ ID NO: 321352 - RNA, 21 nt, Human herpesvirus 5
uuggcuuacugccugccgcac

SEQ ID NO: 321353 - RNA, 23 nt, Human herpesvirus 5
uugggcauacgcgauaucuggcg

SEQ ID NO: 321354 - RNA, 16 nt, Human herpesvirus 5
uuggguccagccagca

SEQ ID NO: 321355 - RNA, 17 nt, Human herpesvirus 5
uuggugugugucuauau

SEQ ID NO: 321356 - RNA, 15 nt, Human herpesvirus 5
uuguaacacuacagc

SEQ ID NO: 321357 - RNA, 22 nt, Human herpesvirus 5
uuguaauaaaguacacgccaca

SEQ ID NO: 321358 - RNA, 14 nt, Human herpesvirus 5
uuguaaugcuuauu

SEQ ID NO: 321359 - RNA, 16 nt, Human herpesvirus 5
uuguacccucacgguc

SEQ ID NO: 321360 - RNA, 22 nt, Human herpesvirus 5
uuguacgagcgcccgucaagcu

SEQ ID NO: 321361 - RNA, 15 nt, Human herpesvirus 5
uuguagcaacuggca

SEQ ID NO: 321362 - RNA, 22 nt, Human herpesvirus 5
uuguccucuccuccuucuuccu

SEQ ID NO: 321363 - RNA, 20 nt, Human herpesvirus 5
uugucgcggcccaugaggua

SEQ ID NO: 321364 - RNA, 21 nt, Human herpesvirus 5
uugucuccccggugugucuau

SEQ ID NO: 321365 - RNA, 23 nt, Human herpesvirus 5
uugucuccccggugugucuauua

SEQ ID NO: 321366 - RNA, 17 nt, Human herpesvirus 5
uugucugcgacguggag

SEQ ID NO: 321367 - RNA, 21 nt, Human herpesvirus 5
uugucugugcgccguggugcu

SEQ ID NO: 321368 - RNA, 13 nt, Human herpesvirus 5
uuguguguacgac

SEQ ID NO: 321369 - RNA, 15 nt, Human herpesvirus 5
uuguuaacaaccuau

SEQ ID NO: 321370 - RNA, 12 nt, Human herpesvirus 5
uuguuaccagaa

SEQ ID NO: 321371 - RNA, 21 nt, Human herpesvirus 5
uuguugagcgccuucugcuac

SEQ ID NO: 321372 - RNA, 18 nt, Human herpesvirus 5
uuguuuguggguguugcu

SEQ ID NO: 321373 - RNA, 15 nt, Human herpesvirus 5
uuuaacaagucacua

SEQ ID NO: 321374 - RNA, 21 nt, Human herpesvirus 5
uuuaacccaaaaccaugcuac

SEQ ID NO: 321375 - RNA, 16 nt, Human herpesvirus 5
uuuaaggagcucugaa

SEQ ID NO: 321376 - RNA, 18 nt, Human herpesvirus 5
uuuaccgaggagauccag

SEQ ID NO: 321377 - RNA, 16 nt, Human herpesvirus 5
uuuacuaguauccacg

SEQ ID NO: 321378 - RNA, 13 nt, Human herpesvirus 5
uuuacuuuguaug

SEQ ID NO: 321379 - RNA, 17 nt, Human herpesvirus 5
uuuagccaggugaccag

SEQ ID NO: 321380 - RNA, 18 nt, Human herpesvirus 5
uuuauauauacacaugcc

SEQ ID NO: 321381 - RNA, 13 nt, Human herpesvirus 5
uuuauuaucaucu

SEQ ID NO: 321382 - RNA, 21 nt, Human herpesvirus 5
uuucagaccgcaacaacagca

SEQ ID NO: 321383 - RNA, 22 nt, Human herpesvirus 5
uuucagaccgcaacaacagcag

SEQ ID NO: 321384 - RNA, 23 nt, Human herpesvirus 5
uuucaugguauaaagauucacuu

SEQ ID NO: 321385 - RNA, 15 nt, Human herpesvirus 5
uuucaugucuuacaa

SEQ ID NO: 321386 - RNA, 21 nt, Human herpesvirus 5
uuuccccauaagcuguguacu

SEQ ID NO: 321387 - RNA, 23 nt, Human herpesvirus 5
uuuccccgccccaucaccucgcc

SEQ ID NO: 321388 - RNA, 18 nt, Human herpesvirus 5
uuuccgaugguccgucau

SEQ ID NO: 321389 - RNA, 13 nt, Human herpesvirus 5
uuucgcugggacg

SEQ ID NO: 321390 - RNA, 18 nt, Human herpesvirus 5
uuucggaagccaugccuu

SEQ ID NO: 321391 - RNA, 13 nt, Human herpesvirus 5
uuucuacuccauc

SEQ ID NO: 321392 - RNA, 15 nt, Human herpesvirus 5
uuucucagucugcaa

SEQ ID NO: 321393 - RNA, 17 nt, Human herpesvirus 5
uuucuguguaacugaua

SEQ ID NO: 321394 - RNA, 18 nt, Human herpesvirus 5
uuugaauaccguaaacau

SEQ ID NO: 321395 - RNA, 14 nt, Human herpesvirus 5
uuugacgugcucaa

SEQ ID NO: 321396 - RNA, 15 nt, Human herpesvirus 5
uuugcgacaguugcc

SEQ ID NO: 321397 - RNA, 23 nt, Human herpesvirus 5
uuugguggagguggagcuaauag

SEQ ID NO: 321398 - RNA, 15 nt, Human herpesvirus 5
uuugguugggguucc

SEQ ID NO: 321399 - RNA, 22 nt, Human herpesvirus 5
uccccuaguaauaccaccguca

SEQ ID NO: 321400 - RNA, 16 nt, Human herpesvirus 5
uccccugccaccucag

SEQ ID NO: 321401 - RNA, 21 nt, Human herpesvirus 5
uccccuucuguauccauacuu

SEQ ID NO: 321402 - RNA, 13 nt, Human herpesvirus 5
ucccgucagugac

SEQ ID NO: 321403 - RNA, 22 nt, Human herpesvirus 5
ucccucagccucuguguuccca

SEQ ID NO: 321404 - RNA, 11 nt, Human herpesvirus 5
ucccucucuuu

SEQ ID NO: 321405 - RNA, 19 nt, Human herpesvirus 5
uccgaauaacaacacauca

SEQ ID NO: 321406 - RNA, 20 nt, Human herpesvirus 5
uccgaauaacaacacaucaa

SEQ ID NO: 321407 - RNA, 14 nt, Human herpesvirus 5
uccgagcugcggua

SEQ ID NO: 321408 - RNA, 23 nt, Human herpesvirus 5
uccgccguguuuuugcucgagac

SEQ ID NO: 321409 - RNA, 21 nt, Human herpesvirus 5
uccgcguuuggucgccugccu

SEQ ID NO: 321410 - RNA, 15 nt, Human herpesvirus 5
uccgcuugcugcgaa

SEQ ID NO: 321411 - RNA, 22 nt, Human herpesvirus 5
uccggacggcgaagucugcuac

SEQ ID NO: 321412 - RNA, 15 nt, Human herpesvirus 5
uccgguaacguggac

SEQ ID NO: 321413 - RNA, 12 nt, Human herpesvirus 5
uccuaaaccugg

SEQ ID NO: 321414 - RNA, 15 nt, Human herpesvirus 5
uccuacgacaacauc

SEQ ID NO: 321415 - RNA, 13 nt, Human herpesvirus 5
uccuccaccacgg

SEQ ID NO: 321416 - RNA, 17 nt, Human herpesvirus 5
uccuccagcagcagcug

SEQ ID NO: 321417 - RNA, 16 nt, Human herpesvirus 5
uccucgaagucuucau

SEQ ID NO: 321418 - RNA, 17 nt, Human herpesvirus 5
uccucgggaaugccaga

SEQ ID NO: 321419 - RNA, 15 nt, Human herpesvirus 5
uccucuccguuacca

SEQ ID NO: 321420 - RNA, 16 nt, Human herpesvirus 5
uccugcagaccgaggc

SEQ ID NO: 321421 - RNA, 19 nt, Human herpesvirus 5
uccugcagcugcaccacgg

SEQ ID NO: 321422 - RNA, 22 nt, Human herpesvirus 5
uccuguacggauugcgccaguu

SEQ ID NO: 321423 - RNA, 11 nt, Human herpesvirus 5
uccuguggucc

SEQ ID NO: 321424 - RNA, 22 nt, Human herpesvirus 5
uccuucuuccucggacaccggg

SEQ ID NO: 321425 - RNA, 18 nt, Human herpesvirus 5
uccuuuggguccagccag

SEQ ID NO: 321426 - RNA, 15 nt, Human herpesvirus 5
ucgaaaacaaccaca

SEQ ID NO: 321427 - RNA, 16 nt, Human herpesvirus 5
ucgaaauaaccuacgu

SEQ ID NO: 321428 - RNA, 15 nt, Human herpesvirus 5
ucgaaccaaccaaaa

SEQ ID NO: 321429 - RNA, 16 nt, Human herpesvirus 5
ucgaagguaacuucag

SEQ ID NO: 321430 - RNA, 14 nt, Human herpesvirus 5
ucgacauggacaug

SEQ ID NO: 321431 - RNA, 20 nt, Human herpesvirus 5
ucgaccuugagcgacagcag

SEQ ID NO: 321432 - RNA, 17 nt, Human herpesvirus 5
ucgagggcucgugcgug

SEQ ID NO: 321433 - RNA, 21 nt, Human herpesvirus 5
ucgauaguaauguauacuucc

SEQ ID NO: 321434 - RNA, 23 nt, Human herpesvirus 5
ucgaugcgccuccgguggugcgu

SEQ ID NO: 321435 - RNA, 15 nt, Human herpesvirus 5
ucgauucccaucuca

SEQ ID NO: 321436 - RNA, 13 nt, Human herpesvirus 5
ucgcaacaacagc

SEQ ID NO: 321437 - RNA, 15 nt, Human herpesvirus 5
ucgcaacaacagcaa

SEQ ID NO: 321438 - RNA, 18 nt, Human herpesvirus 5
ucgcaacaacagcaacaa

SEQ ID NO: 321439 - RNA, 19 nt, Human herpesvirus 5
ucgcacggaccuauacuau

SEQ ID NO: 321440 - RNA, 17 nt, Human herpesvirus 5
ucgcaucaucaacagca

SEQ ID NO: 321441 - RNA, 18 nt, Human herpesvirus 5
ucgcaucaucaacagcag

SEQ ID NO: 321442 - RNA, 20 nt, Human herpesvirus 5
ucgcaucaucaacagcagca

SEQ ID NO: 321443 - RNA, 20 nt, Human herpesvirus 5
ucgcaugucgucucaucaca

SEQ ID NO: 321444 - RNA, 19 nt, Human herpesvirus 5
ucgccaccaccgguaccac

SEQ ID NO: 321445 - RNA, 19 nt, Human herpesvirus 5
ucgccacgguuuguggcaa

SEQ ID NO: 321446 - RNA, 11 nt, Human herpesvirus 5
ucgccaggugu

SEQ ID NO: 321447 - RNA, 17 nt, Human herpesvirus 5
ucgccgacuaaauucau

SEQ ID NO: 321448 - RNA, 18 nt, Human herpesvirus 5
ucgccgccgucgcgccuu

SEQ ID NO: 321449 - RNA, 16 nt, Human herpesvirus 5
ucgccugccuauguaa

SEQ ID NO: 321450 - RNA, 18 nt, Human herpesvirus 5
ucgccuuccagcuuaccg

SEQ ID NO: 321451 - RNA, 18 nt, Human herpesvirus 5
ucgcggcgagguggucaa

SEQ ID NO: 321452 - RNA, 17 nt, Human herpesvirus 5
ucgcucaucgucacgcu

SEQ ID NO: 321453 - RNA, 15 nt, Human herpesvirus 5
ucgcucuagguuuga

SEQ ID NO: 321454 - RNA, 19 nt, Human herpesvirus 5
ucgcuuuuuacuuuguaug

SEQ ID NO: 321455 - RNA, 19 nt, Human herpesvirus 5
ucggaaacgacucaccaga

SEQ ID NO: 321456 - RNA, 13 nt, Human herpesvirus 5
ucggagaguauaa

SEQ ID NO: 321457 - RNA, 22 nt, Human herpesvirus 5
ucggcagaggucgccgcugaua

SEQ ID NO: 321458 - RNA, 13 nt, Human herpesvirus 5
ucggccuuuucau

SEQ ID NO: 321459 - RNA, 17 nt, Human herpesvirus 5
ucggucucgggcucgcu

SEQ ID NO: 321460 - RNA, 19 nt, Human herpesvirus 5
ucggugaccacaaccacgu

SEQ ID NO: 321461 - RNA, 14 nt, Human herpesvirus 5
ucgguguuguacuc

SEQ ID NO: 321462 - RNA, 13 nt, Human herpesvirus 5
ucguaguacaaua

SEQ ID NO: 321463 - RNA, 22 nt, Human herpesvirus 5
ucgucaaagccgacaaccugcu

SEQ ID NO: 321464 - RNA, 21 nt, Human herpesvirus 5
ucgucaggcuugucauggucu

SEQ ID NO: 321465 - RNA, 22 nt, Human herpesvirus 5
ucgucgacgcaucugucaucua

SEQ ID NO: 321466 - RNA, 12 nt, Human herpesvirus 6
aaacucacacaa

SEQ ID NO: 321467 - RNA, 16 nt, Human herpesvirus 6
aaacucacacaaccau

SEQ ID NO: 321468 - RNA, 17 nt, Human herpesvirus 6
aaacucacacaaccauc

SEQ ID NO: 321469 - RNA, 18 nt, Human herpesvirus 6
aaacucuuauaacaagca

SEQ ID NO: 321470 - RNA, 20 nt, Human herpesvirus 6
aaacugugaaaaccuuucaa

SEQ ID NO: 321471 - RNA, 11 nt, Human herpesvirus 6
aaacuuacaag

SEQ ID NO: 321472 - RNA, 13 nt, Human herpesvirus 6
aaacuugacacau

SEQ ID NO: 321473 - RNA, 20 nt, Human herpesvirus 6
aaacuuuuaacuucgacaga

SEQ ID NO: 321474 - RNA, 14 nt, Human herpesvirus 6
aaagaagauuuucc

SEQ ID NO: 321475 - RNA, 21 nt, Human herpesvirus 6
aaagaaucgguaaacuucaga

SEQ ID NO: 321476 - RNA, 17 nt, Human herpesvirus 6
aaagacaaacgccucca

SEQ ID NO: 321477 - RNA, 19 nt, Human herpesvirus 6
aaagacauucaacauucca

SEQ ID NO: 321478 - RNA, 19 nt, Human herpesvirus 6
aaagacuuacagagcuuuu

SEQ ID NO: 321479 - RNA, 22 nt, Human herpesvirus 6
aaagaguugacguuccaaagua

SEQ ID NO: 321480 - RNA, 18 nt, Human herpesvirus 6
aaagauguacucauccaa

SEQ ID NO: 321481 - RNA, 12 nt, Human herpesvirus 6
aaccaucaauuu

SEQ ID NO: 321482 - RNA, 17 nt, Human herpesvirus 6
aaccaucuguucaauua

SEQ ID NO: 321483 - RNA, 22 nt, Human herpesvirus 6
aacccagcaugaugaucugccu

SEQ ID NO: 321484 - RNA, 15 nt, Human herpesvirus 6
aacccccgauucaga

SEQ ID NO: 321485 - RNA, 20 nt, Human herpesvirus 6
aaccgccgugcuucuggcac

SEQ ID NO: 321486 - RNA, 14 nt, Human herpesvirus 6
aaccucacuacuga

SEQ ID NO: 321487 - RNA, 18 nt, Human herpesvirus 6
aaccuccucagaugcaau

SEQ ID NO: 321488 - RNA, 18 nt, Human herpesvirus 6
aaccucgcucacaauauu

SEQ ID NO: 321489 - RNA, 14 nt, Human herpesvirus 6
aacgaaaagcaucu

SEQ ID NO: 321490 - RNA, 18 nt, Human herpesvirus 6
aacgagaaccugcagggg

SEQ ID NO: 321491 - RNA, 16 nt, Human herpesvirus 6
aacgaugguacaggcg

SEQ ID NO: 321492 - RNA, 17 nt, Human herpesvirus 6
aacgauuugcaguucuc

SEQ ID NO: 321493 - RNA, 18 nt, Human herpesvirus 6
aacgauuuguaaauacua

SEQ ID NO: 321494 - RNA, 21 nt, Human herpesvirus 6
aacgcacuggacaucaauucc

SEQ ID NO: 321495 - RNA, 20 nt, Human herpesvirus 6
aacgcagcguaaugugcaaa

SEQ ID NO: 321496 - RNA, 24 nt, Human herpesvirus 6
aacgccacagccuguucuugcuac

SEQ ID NO: 321497 - RNA, 18 nt, Human herpesvirus 6
aacgccuccacaugacac

SEQ ID NO: 321498 - RNA, 15 nt, Human herpesvirus 6
aacgcgacaggguga

SEQ ID NO: 321499 - RNA, 22 nt, Human herpesvirus 6
aacgcgacagggugagucacau

SEQ ID NO: 321500 - RNA, 18 nt, Human herpesvirus 6
aacggaaaaaugccucuc

SEQ ID NO: 321501 - RNA, 17 nt, Human herpesvirus 6
aacgggcacagugugau

SEQ ID NO: 321502 - RNA, 16 nt, Human herpesvirus 6
aacgguuuaaucucac

SEQ ID NO: 321503 - RNA, 17 nt, Human herpesvirus 6
aacgguuuaaucucaca

SEQ ID NO: 321504 - RNA, 15 nt, Human herpesvirus 6
aacguacucaaagaa

SEQ ID NO: 321505 - RNA, 17 nt, Human herpesvirus 6
aacgugcucguauaaau

SEQ ID NO: 321506 - RNA, 21 nt, Human herpesvirus 6
aacguuccacgcauagacaaa

SEQ ID NO: 321507 - RNA, 22 nt, Human herpesvirus 6
aacuaaaaaaaaaaacacaaac

SEQ ID NO: 321508 - RNA, 19 nt, Human herpesvirus 6
aacuaauaaaugcuaccca

SEQ ID NO: 321509 - RNA, 22 nt, Human herpesvirus 6
aacuaggugauugggagcucac

SEQ ID NO: 321510 - RNA, 13 nt, Human herpesvirus 6
aacuauauugcug

SEQ ID NO: 321511 - RNA, 15 nt, Human herpesvirus 6
aacuauauugcugcu

SEQ ID NO: 321512 - RNA, 20 nt, Human herpesvirus 6
aacuaugcaaacgaaaccau

SEQ ID NO: 321513 - RNA, 15 nt, Human herpesvirus 6
aacucacacaaccau

SEQ ID NO: 321514 - RNA, 19 nt, Human herpesvirus 6
aacucaucgacuucugucu

SEQ ID NO: 321515 - RNA, 20 nt, Human herpesvirus 6
aacucauguugccucuggac

SEQ ID NO: 321516 - RNA, 14 nt, Human herpesvirus 6
aacugaauuugcau

SEQ ID NO: 321517 - RNA, 14 nt, Human herpesvirus 6
aacugacugacaaa

SEQ ID NO: 321518 - RNA, 22 nt, Human herpesvirus 6
aacugcauacguuugccaaagc

SEQ ID NO: 321519 - RNA, 23 nt, Human herpesvirus 6
aacugcauacguuugccaaagcu

SEQ ID NO: 321520 - RNA, 24 nt, Human herpesvirus 6
aacugcauacguuugccaaagcug

SEQ ID NO: 321521 - RNA, 15 nt, Human herpesvirus 6
aacuggugucugucu

SEQ ID NO: 321522 - RNA, 16 nt, Human herpesvirus 6
aacugguucagaauuu

SEQ ID NO: 321523 - RNA, 16 nt, Human herpesvirus 6
aacugugucuguucaa

SEQ ID NO: 321524 - RNA, 19 nt, Human herpesvirus 6
aacuuagaucuauaugcau

SEQ ID NO: 321525 - RNA, 22 nt, Human herpesvirus 6
aacuucauacccgaaguucucu

SEQ ID NO: 321526 - RNA, 13 nt, Human herpesvirus 6
aacuucugcuauu

SEQ ID NO: 321527 - RNA, 13 nt, Human herpesvirus 6
aacuugaaagccu

SEQ ID NO: 321528 - RNA, 13 nt, Human herpesvirus 6
aacuuuacauuaa

SEQ ID NO: 321529 - RNA, 22 nt, Human herpesvirus 6
aacuuuuagagacuuugcugau

SEQ ID NO: 321530 - RNA, 17 nt, Human herpesvirus 6
aacuuuuugccgucaca

SEQ ID NO: 321531 - RNA, 20 nt, Human herpesvirus 6
aacuuuuuguauuauguaau

SEQ ID NO: 321532 - RNA, 23 nt, Human herpesvirus 6
aagaaaaagaaauuaaucgucuu

SEQ ID NO: 321533 - RNA, 17 nt, Human herpesvirus 6
aagaaacaguaaaucuc

SEQ ID NO: 321534 - RNA, 16 nt, Human herpesvirus 6
aagaaaugaccuggcc

SEQ ID NO: 321535 - RNA, 21 nt, Human herpesvirus 6
aagaaccaacagaaaaaaauc

SEQ ID NO: 321536 - RNA, 14 nt, Human herpesvirus 6
aagaaucaaugaaa

SEQ ID NO: 321537 - RNA, 15 nt, Human herpesvirus 6
aagaaucauuacuuc

SEQ ID NO: 321538 - RNA, 16 nt, Human herpesvirus 6
aagaauccuucguucu

SEQ ID NO: 321539 - RNA, 14 nt, Human herpesvirus 6
aagacaaauuaauu

SEQ ID NO: 321540 - RNA, 11 nt, Human herpesvirus 6
aagacacaauc

SEQ ID NO: 321541 - RNA, 13 nt, Human herpesvirus 6
aagacacaaucuu

SEQ ID NO: 321542 - RNA, 17 nt, Human herpesvirus 6
aagacauguacaucaac

SEQ ID NO: 321543 - RNA, 17 nt, Human herpesvirus 6
aagacguuugcuguuuu

SEQ ID NO: 321544 - RNA, 17 nt, Human herpesvirus 6
aagagcgaaaugcaauc

SEQ ID NO: 321545 - RNA, 18 nt, Human herpesvirus 6
aagagcgaaaugcaaucu

SEQ ID NO: 321546 - RNA, 20 nt, Human herpesvirus 6
aagaggauccauucuagaua

SEQ ID NO: 321547 - RNA, 23 nt, Human herpesvirus 6
aagagucccaucuauacacccug

SEQ ID NO: 321548 - RNA, 23 nt, Human herpesvirus 6
aagagugggaugcauuauacuga

SEQ ID NO: 321549 - RNA, 15 nt, Human herpesvirus 6
aagaguuuucucaca

SEQ ID NO: 321550 - RNA, 15 nt, Human herpesvirus 6
aagaucuaaauuucu

SEQ ID NO: 321551 - RNA, 19 nt, Human herpesvirus 6
aagaucuaaauuucuacaa

SEQ ID NO: 321552 - RNA, 20 nt, Human herpesvirus 6
aagaucuuuauggagggaau

SEQ ID NO: 321553 - RNA, 21 nt, Human herpesvirus 6
aagaugacagcgauacaauaa

SEQ ID NO: 321554 - RNA, 17 nt, Human herpesvirus 6
aagauguacucauccaa

SEQ ID NO: 321555 - RNA, 16 nt, Human herpesvirus 6
aagauguugcaauaaa

SEQ ID NO: 321556 - RNA, 20 nt, Human herpesvirus 6
aagauuacggcaacauaccc

SEQ ID NO: 321557 - RNA, 15 nt, Human herpesvirus 6
aagcacccuacacaa

SEQ ID NO: 321558 - RNA, 16 nt, Human herpesvirus 6
aagcaccuaauuacaa

SEQ ID NO: 321559 - RNA, 19 nt, Human herpesvirus 6
aagcaccuaauuacaauuu

SEQ ID NO: 321560 - RNA, 15 nt, Human herpesvirus 6
aagcaggaacccaga

SEQ ID NO: 321561 - RNA, 14 nt, Human herpesvirus 6
aagcagucaguaau

SEQ ID NO: 321562 - RNA, 18 nt, Human herpesvirus 6
aagcaucccuaugucgau

SEQ ID NO: 321563 - RNA, 20 nt, Human herpesvirus 6
aagccuucguaaucauaaaa

SEQ ID NO: 321564 - RNA, 20 nt, Human herpesvirus 6
aagcgacgguguauccuaua

SEQ ID NO: 321565 - RNA, 23 nt, Human herpesvirus 6
aagcgccaacgaaaagcaucuca

SEQ ID NO: 321566 - RNA, 21 nt, Human herpesvirus 6
aagcugaugcgcaacugauac

SEQ ID NO: 321567 - RNA, 11 nt, Human herpesvirus 6
aagcuguccau

SEQ ID NO: 321568 - RNA, 18 nt, Human herpesvirus 6
aaggacaaaguucaguaa

SEQ ID NO: 321569 - RNA, 23 nt, Human herpesvirus 6
aaggacuaucugagacaguccau

SEQ ID NO: 321570 - RNA, 16 nt, Human herpesvirus 6
aaggagugagaaauuu

SEQ ID NO: 321571 - RNA, 17 nt, Human herpesvirus 6
aaggaugcggacucuga

SEQ ID NO: 321572 - RNA, 14 nt, Human herpesvirus 6
aaggcugccaugaa

SEQ ID NO: 321573 - RNA, 15 nt, Human herpesvirus 6
aaggcugccaugaaa

SEQ ID NO: 321574 - RNA, 21 nt, Human herpesvirus 6
aaggcugccaugaaacaggaa

SEQ ID NO: 321575 - RNA, 17 nt, Human herpesvirus 6
aagggcucuauuacuau

SEQ ID NO: 321576 - RNA, 20 nt, Human herpesvirus 6
aaggguaugaaacuuuauga

SEQ ID NO: 321577 - RNA, 23 nt, Human herpesvirus 6
aagguggaaggcaaucaacuggu

SEQ ID NO: 321578 - RNA, 15 nt, Human herpesvirus 6
aagguggcaucagaa

SEQ ID NO: 321579 - RNA, 22 nt, Human herpesvirus 6
aagguggcaucagaauccagaa

SEQ ID NO: 321580 - RNA, 20 nt, Human herpesvirus 6
aagguggucguagacaguaa

SEQ ID NO: 321581 - RNA, 20 nt, Human herpesvirus 6
aaguaagggcuuuucaagau

SEQ ID NO: 321582 - RNA, 16 nt, Human herpesvirus 6
aaguaguuaccgugau

SEQ ID NO: 321583 - RNA, 22 nt, Human herpesvirus 6
aaguaguugcuaagugugauac

SEQ ID NO: 321584 - RNA, 22 nt, Human herpesvirus 6
aaguauccuuccaccuacauca

SEQ ID NO: 321585 - RNA, 13 nt, Human herpesvirus 6
aagucaucauaua

SEQ ID NO: 321586 - RNA, 14 nt, Human herpesvirus 6
aagucaucucacuc

SEQ ID NO: 321587 - RNA, 15 nt, Human herpesvirus 6
aagucguugugucau

SEQ ID NO: 321588 - RNA, 13 nt, Human herpesvirus 6
aaaaacaguuuac

SEQ ID NO: 321589 - RNA, 15 nt, Human herpesvirus 6
aaaaacgucacguca

SEQ ID NO: 321590 - RNA, 11 nt, Human herpesvirus 6
aaaaacuaauu

SEQ ID NO: 321591 - RNA, 17 nt, Human herpesvirus 6
aaaaacucacacaacca

SEQ ID NO: 321592 - RNA, 22 nt, Human herpesvirus 6
aaaaacugugaaaaccuuucaa

SEQ ID NO: 321593 - RNA, 21 nt, Human herpesvirus 6
aaaaagaguugacguuccaaa

SEQ ID NO: 321594 - RNA, 13 nt, Human herpesvirus 6
aaaaagcuaucgu

SEQ ID NO: 321595 - RNA, 12 nt, Human herpesvirus 6
aaaaagcuuuaa

SEQ ID NO: 321596 - RNA, 17 nt, Human herpesvirus 6
aaaaagugcuuuaucua

SEQ ID NO: 321597 - RNA, 22 nt, Human herpesvirus 6
aaaaaguuugugcgaauugugu

SEQ ID NO: 321598 - RNA, 18 nt, Human herpesvirus 6
aaaaauaaguacauagaa

SEQ ID NO: 321599 - RNA, 17 nt, Human herpesvirus 6
aaaaauauuaauuaccu

SEQ ID NO: 321600 - RNA, 17 nt, Human herpesvirus 6
aaaaaugagacuuagcu

SEQ ID NO: 321601 - RNA, 16 nt, Human herpesvirus 6
aaaaauggcucagaga

SEQ ID NO: 321602 - RNA, 17 nt, Human herpesvirus 6
aaaaauugacaaugagg

SEQ ID NO: 321603 - RNA, 17 nt, Human herpesvirus 6
aaaaauugccuuguaaa

SEQ ID NO: 321604 - RNA, 20 nt, Human herpesvirus 6
aaaaauuuuagccgaugaua

SEQ ID NO: 321605 - RNA, 12 nt, Human herpesvirus 6
aaaacaacgaaa

SEQ ID NO: 321606 - RNA, 16 nt, Human herpesvirus 6
aaaacaacgacuauca

SEQ ID NO: 321607 - RNA, 12 nt, Human herpesvirus 6
aaaacaagaucc

SEQ ID NO: 321608 - RNA, 20 nt, Human herpesvirus 6
aaaacagacuuuacuucuac

SEQ ID NO: 321609 - RNA, 13 nt, Human herpesvirus 6
aaaacaguuuacc

SEQ ID NO: 321610 - RNA, 22 nt, Human herpesvirus 6
aaaaccgguacgcuuuuacuga

SEQ ID NO: 321611 - RNA, 14 nt, Human herpesvirus 6
aaaacgaauagcau

SEQ ID NO: 321612 - RNA, 13 nt, Human herpesvirus 6
aaaacgaccugau

SEQ ID NO: 321613 - RNA, 22 nt, Human herpesvirus 6
aaaacgaccugaucacagagaa

SEQ ID NO: 321614 - RNA, 13 nt, Human herpesvirus 6
aaaacgaguauga

SEQ ID NO: 321615 - RNA, 21 nt, Human herpesvirus 6
aaaacguuccacgcauagaca

SEQ ID NO: 321616 - RNA, 20 nt, Human herpesvirus 6
aaaacuaauucggaacauug

SEQ ID NO: 321617 - RNA, 13 nt, Human herpesvirus 6
aaaacuauugaca

SEQ ID NO: 321618 - RNA, 13 nt, Human herpesvirus 6
aaaacucacacaa

SEQ ID NO: 321619 - RNA, 23 nt, Human herpesvirus 6
aaaacuuaaccgcaaaaaagcgc

SEQ ID NO: 321620 - RNA, 12 nt, Human herpesvirus 6
aaaacuuacuaa

SEQ ID NO: 321621 - RNA, 16 nt, Human herpesvirus 6
aaaacuuucauccuga

SEQ ID NO: 321622 - RNA, 12 nt, Human herpesvirus 6
aaaagcaucuca

SEQ ID NO: 321623 - RNA, 21 nt, Human herpesvirus 6
aaaagcgccugccuacacugc

SEQ ID NO: 321624 - RNA, 16 nt, Human herpesvirus 6
aaaagcugacuauuca

SEQ ID NO: 321625 - RNA, 17 nt, Human herpesvirus 6
aaaaggaguaugacugu

SEQ ID NO: 321626 - RNA, 15 nt, Human herpesvirus 6
aaaagguguuguguu

SEQ ID NO: 321627 - RNA, 15 nt, Human herpesvirus 6
aaaaguauagucuag

SEQ ID NO: 321628 - RNA, 20 nt, Human herpesvirus 6
aaaagugcuuuaucuagcca

SEQ ID NO: 321629 - RNA, 22 nt, Human herpesvirus 6
aaaaguugugauuuugggacaa

SEQ ID NO: 321630 - RNA, 21 nt, Human herpesvirus 6
aaaauaacagcgguucgggcu

SEQ ID NO: 321631 - RNA, 12 nt, Human herpesvirus 6
aaaauaaguaca

SEQ ID NO: 321632 - RNA, 16 nt, Human herpesvirus 6
aaaauaaguacauaga

SEQ ID NO: 321633 - RNA, 18 nt, Human herpesvirus 6
aaaauaaguacauagaau

SEQ ID NO: 321634 - RNA, 16 nt, Human herpesvirus 6
aaaauaauuacauuaa

SEQ ID NO: 321635 - RNA, 22 nt, Human herpesvirus 6
aaaauacugcagcucgacucca

SEQ ID NO: 321636 - RNA, 15 nt, Human herpesvirus 6
aaaauagaagucuca

SEQ ID NO: 321637 - RNA, 20 nt, Human herpesvirus 6
aaaauagccagggcauucgu

SEQ ID NO: 321638 - RNA, 17 nt, Human herpesvirus 6
aaaauaucgccccuguc

SEQ ID NO: 321639 - RNA, 21 nt, Human herpesvirus 6
aaaauaucgcgcaaaccauaa

SEQ ID NO: 321640 - RNA, 17 nt, Human herpesvirus 6
aaaauauuaauuaccua

SEQ ID NO: 321641 - RNA, 14 nt, Human herpesvirus 6
aaaaucagaaucca

SEQ ID NO: 321642 - RNA, 12 nt, Human herpesvirus 6
aaaaucuuguca

SEQ ID NO: 321643 - RNA, 23 nt, Human herpesvirus 6
aaaaugcaacgcaucacacauac

SEQ ID NO: 321644 - RNA, 19 nt, Human herpesvirus 6
aaaaugguuagaaauucua

SEQ ID NO: 321645 - RNA, 12 nt, Human herpesvirus 6
aaaauguugcau

SEQ ID NO: 321646 - RNA, 22 nt, Human herpesvirus 6
aaaauugggcgaagaccuauau

SEQ ID NO: 321647 - RNA, 17 nt, Human herpesvirus 6
aaaauuuuuuacaucac

SEQ ID NO: 321648 - RNA, 14 nt, Human herpesvirus 6
aaacaaaacauauc

SEQ ID NO: 321649 - RNA, 20 nt, Human herpesvirus 6
aaacaaauucuuacauuuug

SEQ ID NO: 321650 - RNA, 17 nt, Human herpesvirus 6
aaacaacgaaacaguuc

SEQ ID NO: 321651 - RNA, 19 nt, Human herpesvirus 6
aaacaacgacuaccacauc

SEQ ID NO: 321652 - RNA, 10 nt, Human herpesvirus 6
aaacaaucag

SEQ ID NO: 321653 - RNA, 13 nt, Human herpesvirus 6
aaacacaaaccau

SEQ ID NO: 321654 - RNA, 15 nt, Human herpesvirus 6
aaacaccucacaauc

SEQ ID NO: 321655 - RNA, 23 nt, Human herpesvirus 6
aaacaccucuaaaacaagacaga

SEQ ID NO: 321656 - RNA, 17 nt, Human herpesvirus 6
aaacacgaaauugcuug

SEQ ID NO: 321657 - RNA, 18 nt, Human herpesvirus 6
aaacacgugauuccucaa

SEQ ID NO: 321658 - RNA, 16 nt, Human herpesvirus 6
aaacacugaguucugu

SEQ ID NO: 321659 - RNA, 15 nt, Human herpesvirus 6
aaacagacagaggaa

SEQ ID NO: 321660 - RNA, 18 nt, Human herpesvirus 6
aaacagauuaaauauacc

SEQ ID NO: 321661 - RNA, 14 nt, Human herpesvirus 6
aaacaggaacaguc

SEQ ID NO: 321662 - RNA, 14 nt, Human herpesvirus 6
aaacaguaaauuca

SEQ ID NO: 321663 - RNA, 20 nt, Human herpesvirus 6
aaacaguucguagaacggaa

SEQ ID NO: 321664 - RNA, 21 nt, Human herpesvirus 6
aaacaguuuaccuauuuacaa

SEQ ID NO: 321665 - RNA, 22 nt, Human herpesvirus 6
aaacaucguaauggcauucacc

SEQ ID NO: 321666 - RNA, 14 nt, Human herpesvirus 6
aaacaugaacauug

SEQ ID NO: 321667 - RNA, 15 nt, Human herpesvirus 6
aaacaugaacauuga

SEQ ID NO: 321668 - RNA, 16 nt, Human herpesvirus 6
aaacaugaacauugaa

SEQ ID NO: 321669 - RNA, 18 nt, Human herpesvirus 6
aaacauuuauaaaaggag

SEQ ID NO: 321670 - RNA, 15 nt, Human herpesvirus 6
aaacauuucuuacac

SEQ ID NO: 321671 - RNA, 11 nt, Human herpesvirus 6
aaaccaaagca

SEQ ID NO: 321672 - RNA, 19 nt, Human herpesvirus 6
aaaccaccggcuaacccua

SEQ ID NO: 321673 - RNA, 20 nt, Human herpesvirus 6
aaaccagcaaguucaucagc

SEQ ID NO: 321674 - RNA, 22 nt, Human herpesvirus 6
aaaccauaaaaaaucuugucac

SEQ ID NO: 321675 - RNA, 23 nt, Human herpesvirus 6
aaaccauagcuguccaugagauu

SEQ ID NO: 321676 - RNA, 22 nt, Human herpesvirus 6
aaaccauagguguuugcagaug

SEQ ID NO: 321677 - RNA, 19 nt, Human herpesvirus 6
aaaccaucaauuuuaucca

SEQ ID NO: 321678 - RNA, 22 nt, Human herpesvirus 6
aaaccguuuaucgaugugcgac

SEQ ID NO: 321679 - RNA, 19 nt, Human herpesvirus 6
aaaccucaaaaaugcacaa

SEQ ID NO: 321680 - RNA, 23 nt, Human herpesvirus 6
aaacgaagucuuuggcuuggcca

SEQ ID NO: 321681 - RNA, 15 nt, Human herpesvirus 6
aaacgaguaugaaua

SEQ ID NO: 321682 - RNA, 19 nt, Human herpesvirus 6
aaacgccguguuucgccaa

SEQ ID NO: 321683 - RNA, 20 nt, Human herpesvirus 6
aaacgccuccacaugacacc

SEQ ID NO: 321684 - RNA, 16 nt, Human herpesvirus 6
aaacguaugcaguuau

SEQ ID NO: 321685 - RNA, 16 nt, Human herpesvirus 6
aaacuaaaacaucaga

SEQ ID NO: 321686 - RNA, 13 nt, Human herpesvirus 6
agagauuaacucc

SEQ ID NO: 321687 - RNA, 18 nt, Human herpesvirus 6
agagcaaauuaugguuau

SEQ ID NO: 321688 - RNA, 15 nt, Human herpesvirus 6
agaggaauugcuuug

SEQ ID NO: 321689 - RNA, 16 nt, Human herpesvirus 6
agaggcguccgaggga

SEQ ID NO: 321690 - RNA, 12 nt, Human herpesvirus 6
agaggugcugau

SEQ ID NO: 321691 - RNA, 13 nt, Human herpesvirus 6
agaggugcugaug

SEQ ID NO: 321692 - RNA, 15 nt, Human herpesvirus 6
agagucuuuccccag

SEQ ID NO: 321693 - RNA, 13 nt, Human herpesvirus 6
agaguggggacaa

SEQ ID NO: 321694 - RNA, 19 nt, Human herpesvirus 6
agaguguuaugaucuagcu

SEQ ID NO: 321695 - RNA, 17 nt, Human herpesvirus 6
agaguugacguuccaaa

SEQ ID NO: 321696 - RNA, 13 nt, Human herpesvirus 6
agauaaauauaac

SEQ ID NO: 321697 - RNA, 21 nt, Human herpesvirus 6
agauaaccucacuacugaaac

SEQ ID NO: 321698 - RNA, 16 nt, Human herpesvirus 6
agauaauaaucauauu

SEQ ID NO: 321699 - RNA, 17 nt, Human herpesvirus 6
agauacauaaacacccc

SEQ ID NO: 321700 - RNA, 15 nt, Human herpesvirus 6
agauacgaaccucau

SEQ ID NO: 321701 - RNA, 15 nt, Human herpesvirus 6
agauacugguuuaca

SEQ ID NO: 321702 - RNA, 23 nt, Human herpesvirus 6
agauagaccuugaucuauguaau

SEQ ID NO: 321703 - RNA, 17 nt, Human herpesvirus 6
agauauggaugaucacu

SEQ ID NO: 321704 - RNA, 21 nt, Human herpesvirus 6
agauauggaugaucacuauca

SEQ ID NO: 321705 - RNA, 19 nt, Human herpesvirus 6
agauauuaacacagucuuc

SEQ ID NO: 321706 - RNA, 17 nt, Human herpesvirus 6
agauccaaucacaacaa

SEQ ID NO: 321707 - RNA, 15 nt, Human herpesvirus 6
agauccgucucucag

SEQ ID NO: 321708 - RNA, 20 nt, Human herpesvirus 6
agaucuuuauggagggaauu

SEQ ID NO: 321709 - RNA, 14 nt, Human herpesvirus 6
agaugaaagacaga

SEQ ID NO: 321710 - RNA, 22 nt, Human herpesvirus 6
agaugaauuuguccguauacag

SEQ ID NO: 321711 - RNA, 13 nt, Human herpesvirus 6
agaugacaucugc

SEQ ID NO: 321712 - RNA, 16 nt, Human herpesvirus 6
agaugacaucugcaaa

SEQ ID NO: 321713 - RNA, 16 nt, Human herpesvirus 6
agaugcaaaucucacu

SEQ ID NO: 321714 - RNA, 17 nt, Human herpesvirus 6
agauggaaaauugcaaa

SEQ ID NO: 321715 - RNA, 15 nt, Human herpesvirus 6
agauguacucaucca

SEQ ID NO: 321716 - RNA, 16 nt, Human herpesvirus 6
agauguacucauccaa

SEQ ID NO: 321717 - RNA, 14 nt, Human herpesvirus 6
agaugugugucuuc

SEQ ID NO: 321718 - RNA, 23 nt, Human herpesvirus 6
agauguugcaauaaaaaauggau

SEQ ID NO: 321719 - RNA, 18 nt, Human herpesvirus 6
agauuaaauauaccugaa

SEQ ID NO: 321720 - RNA, 14 nt, Human herpesvirus 6
agauuaauucuucc

SEQ ID NO: 321721 - RNA, 19 nt, Human herpesvirus 6
agauuagaaauuacauaag

SEQ ID NO: 321722 - RNA, 21 nt, Human herpesvirus 6
agauugcauaugucuguuaua

SEQ ID NO: 321723 - RNA, 20 nt, Human herpesvirus 6
agauuuauugcgauucuaau

SEQ ID NO: 321724 - RNA, 16 nt, Human herpesvirus 6
agauuuguaaggacaa

SEQ ID NO: 321725 - RNA, 21 nt, Human herpesvirus 6
agcaaagacaucgauuugcug

SEQ ID NO: 321726 - RNA, 20 nt, Human herpesvirus 6
agcaaagcacccuacacaaa

SEQ ID NO: 321727 - RNA, 15 nt, Human herpesvirus 6
agcaaauguaacuuu

SEQ ID NO: 321728 - RNA, 19 nt, Human herpesvirus 6
agcaacaauccauguucau

SEQ ID NO: 321729 - RNA, 15 nt, Human herpesvirus 6
agcaaguucaucagc

SEQ ID NO: 321730 - RNA, 14 nt, Human herpesvirus 6
agcaaguuccauuu

SEQ ID NO: 321731 - RNA, 14 nt, Human herpesvirus 6
agcacauaacugca

SEQ ID NO: 321732 - RNA, 14 nt, Human herpesvirus 6
agcaccaucaauaa

SEQ ID NO: 321733 - RNA, 20 nt, Human herpesvirus 6
agcacccuaugcaagcucau

SEQ ID NO: 321734 - RNA, 14 nt, Human herpesvirus 6
agcaccuaauuaca

SEQ ID NO: 321735 - RNA, 15 nt, Human herpesvirus 6
agcaccuaauuacaa

SEQ ID NO: 321736 - RNA, 16 nt, Human herpesvirus 6
agcagaucgcaaaauu

SEQ ID NO: 321737 - RNA, 14 nt, Human herpesvirus 6
agcagcaauaggca

SEQ ID NO: 321738 - RNA, 21 nt, Human herpesvirus 6
agcagcaauaggcaccuaucu

SEQ ID NO: 321739 - RNA, 16 nt, Human herpesvirus 6
agcagucaguaaugau

SEQ ID NO: 321740 - RNA, 22 nt, Human herpesvirus 6
agcauacucaacccaaaaugca

SEQ ID NO: 321741 - RNA, 12 nt, Human herpesvirus 6
agcaucaccugg

SEQ ID NO: 321742 - RNA, 23 nt, Human herpesvirus 6
agcaucauguucggagauaucau

SEQ ID NO: 321743 - RNA, 16 nt, Human herpesvirus 6
agcauuuuuguuguga

SEQ ID NO: 321744 - RNA, 18 nt, Human herpesvirus 6
agccaaacaaggguuuaa

SEQ ID NO: 321745 - RNA, 18 nt, Human herpesvirus 6
agccagauacuacacaaa

SEQ ID NO: 321746 - RNA, 19 nt, Human herpesvirus 6
agccagauacuacacaaac

SEQ ID NO: 321747 - RNA, 14 nt, Human herpesvirus 6
agcccuuacuugaa

SEQ ID NO: 321748 - RNA, 23 nt, Human herpesvirus 6
agccgcgaacucguuaauaguua

SEQ ID NO: 321749 - RNA, 20 nt, Human herpesvirus 6
agccgucgauaauaauucag

SEQ ID NO: 321750 - RNA, 18 nt, Human herpesvirus 6
agccuacuaugacuuuuc

SEQ ID NO: 321751 - RNA, 17 nt, Human herpesvirus 6
agccuucugccugaaaa

SEQ ID NO: 321752 - RNA, 21 nt, Human herpesvirus 6
agccuugcgguaaauggcaua

SEQ ID NO: 321753 - RNA, 14 nt, Human herpesvirus 6
agcgaaccaggaca

SEQ ID NO: 321754 - RNA, 17 nt, Human herpesvirus 6
agcgaauuuguuaagca

SEQ ID NO: 321755 - RNA, 13 nt, Human herpesvirus 6
agcgcaucuuuaa

SEQ ID NO: 321756 - RNA, 19 nt, Human herpesvirus 6
agcgcaucuuuaacauggu

SEQ ID NO: 321757 - RNA, 16 nt, Human herpesvirus 6
agcgccagcauucuua

SEQ ID NO: 321758 - RNA, 16 nt, Human herpesvirus 6
agcggaccaauccaug

SEQ ID NO: 321759 - RNA, 21 nt, Human herpesvirus 6
agcggacgguuuauuuuuaua

SEQ ID NO: 321760 - RNA, 18 nt, Human herpesvirus 6
agcggcgacauuguagaa

SEQ ID NO: 321761 - RNA, 14 nt, Human herpesvirus 6
agcggugugcaguu

SEQ ID NO: 321762 - RNA, 19 nt, Human herpesvirus 6
agcguaagaauuaaugucc

SEQ ID NO: 321763 - RNA, 12 nt, Human herpesvirus 6
agcguaaugugc

SEQ ID NO: 321764 - RNA, 14 nt, Human herpesvirus 6
agcguaaugugcaa

SEQ ID NO: 321765 - RNA, 20 nt, Human herpesvirus 6
agcgugugauucaguaucug

SEQ ID NO: 321766 - RNA, 20 nt, Human herpesvirus 6
agcguuugcaaaacuguuaa

SEQ ID NO: 321767 - RNA, 15 nt, Human herpesvirus 6
agcuaaaacuugaaa

SEQ ID NO: 321768 - RNA, 15 nt, Human herpesvirus 6
agcuaaacaccacuu

SEQ ID NO: 321769 - RNA, 15 nt, Human herpesvirus 6
agcuaauaugaacaa

SEQ ID NO: 321770 - RNA, 17 nt, Human herpesvirus 6
agcuacgccaaaacuac

SEQ ID NO: 321771 - RNA, 13 nt, Human herpesvirus 6
agcuaucgugcug

SEQ ID NO: 321772 - RNA, 20 nt, Human herpesvirus 6
agcuauuaugugaauguuaa

SEQ ID NO: 321773 - RNA, 18 nt, Human herpesvirus 6
agcuauugaaacuaggug

SEQ ID NO: 321774 - RNA, 19 nt, Human herpesvirus 6
agcucaaacaaauggaaac

SEQ ID NO: 321775 - RNA, 18 nt, Human herpesvirus 6
agcugaugcgcaacugau

SEQ ID NO: 321776 - RNA, 21 nt, Human herpesvirus 6
agcugaugcgcaacugauacc

SEQ ID NO: 321777 - RNA, 23 nt, Human herpesvirus 6
agcugcagggguguggucugaga

SEQ ID NO: 321778 - RNA, 19 nt, Human herpesvirus 6
agcugcgcugauccugacu

SEQ ID NO: 321779 - RNA, 20 nt, Human herpesvirus 6
agcuguccaucuucagacau

SEQ ID NO: 321780 - RNA, 21 nt, Human herpesvirus 6
agcuguucgguuuagcuauaa

SEQ ID NO: 321781 - RNA, 20 nt, Human herpesvirus 6
agcuuacggagacggguugg

SEQ ID NO: 321782 - RNA, 13 nt, Human herpesvirus 6
agcuuagggccaa

SEQ ID NO: 321783 - RNA, 16 nt, Human herpesvirus 6
agcuuagggccaaacu

SEQ ID NO: 321784 - RNA, 17 nt, Human herpesvirus 6
agcuuccguaucacacu

SEQ ID NO: 321785 - RNA, 20 nt, Human herpesvirus 6
agcuuguggaucaucuccaa

SEQ ID NO: 321786 - RNA, 23 nt, Human herpesvirus 6
agcuuguggaucaucuccaauaa

SEQ ID NO: 321787 - RNA, 20 nt, Human herpesvirus 6
agcuuguuaggacacuuuca

SEQ ID NO: 321788 - RNA, 15 nt, Human herpesvirus 6
agcuuucauaagcuc

SEQ ID NO: 321789 - RNA, 16 nt, Human herpesvirus 6
agcuuucauccaugaa

SEQ ID NO: 321790 - RNA, 19 nt, Human herpesvirus 6
agcuuuuccucaauaugau

SEQ ID NO: 321791 - RNA, 21 nt, Human herpesvirus 6
aggaaaacccagcaugaugau

SEQ ID NO: 321792 - RNA, 22 nt, Human herpesvirus 6
aggaaagaagauuuuccuagua

SEQ ID NO: 321793 - RNA, 14 nt, Human herpesvirus 6
aggaacuggugaga

SEQ ID NO: 321794 - RNA, 18 nt, Human herpesvirus 6
aggaagaugguaucugaa

SEQ ID NO: 321795 - RNA, 19 nt, Human herpesvirus 6
aggaagauucagagugaau

SEQ ID NO: 321796 - RNA, 17 nt, Human herpesvirus 6
aggaaucuuguguucua

SEQ ID NO: 321797 - RNA, 17 nt, Human herpesvirus 6
aggaccaagacacguca

SEQ ID NO: 321798 - RNA, 15 nt, Human herpesvirus 6
aggagcauucacaua

SEQ ID NO: 321799 - RNA, 23 nt, Human herpesvirus 6
aggagucucggcccgagcgcacu

SEQ ID NO: 321800 - RNA, 20 nt, Human herpesvirus 6
aggaugaagaaaaaaacugu

SEQ ID NO: 321801 - RNA, 22 nt, Human herpesvirus 6
aggauuaucgauugacucugca

SEQ ID NO: 321802 - RNA, 23 nt, Human herpesvirus 6
aggcagaucaucaaaucggacaa

SEQ ID NO: 321803 - RNA, 18 nt, Human herpesvirus 6
aggcaguaaagccgauga

SEQ ID NO: 321804 - RNA, 22 nt, Human herpesvirus 6
aggcauugacuauuaaacuaac

SEQ ID NO: 321805 - RNA, 23 nt, Human herpesvirus 6
aggccgguacccgugugugagau

SEQ ID NO: 321806 - RNA, 17 nt, Human herpesvirus 6
aggccuucaccugucuc

SEQ ID NO: 321807 - RNA, 12 nt, Human herpesvirus 6
aggcguugugcu

SEQ ID NO: 321808 - RNA, 24 nt, Human herpesvirus 6
aggcuauggcuuccggaauaguuc

SEQ ID NO: 321809 - RNA, 14 nt, Human herpesvirus 6
agggaagauuugua

SEQ ID NO: 321810 - RNA, 14 nt, Human herpesvirus 6
agggacucggaaaa

SEQ ID NO: 321811 - RNA, 20 nt, Human herpesvirus 6
agggauacguauauugugua

SEQ ID NO: 321812 - RNA, 19 nt, Human herpesvirus 6
agggauggcagaucuugaa

SEQ ID NO: 321813 - RNA, 19 nt, Human herpesvirus 6
agggccaaacuuguugcaa

SEQ ID NO: 321814 - RNA, 19 nt, Human herpesvirus 6
aggggagacgaaacauagu

SEQ ID NO: 321815 - RNA, 16 nt, Human herpesvirus 6
aggggcggauccgcuc

SEQ ID NO: 321816 - RNA, 18 nt, Human herpesvirus 6
aggguaugaaacuuuaug

SEQ ID NO: 321817 - RNA, 15 nt, Human herpesvirus 6
aggguucgacccuaa

SEQ ID NO: 321818 - RNA, 15 nt, Human herpesvirus 6
agguagcguacaagu

SEQ ID NO: 321819 - RNA, 17 nt, Human herpesvirus 6
aggucaucguccaaucc

SEQ ID NO: 321820 - RNA, 13 nt, Human herpesvirus 6
aggugcugaugau

SEQ ID NO: 321821 - RNA, 16 nt, Human herpesvirus 6
agguggaaggcaauca

SEQ ID NO: 321822 - RNA, 16 nt, Human herpesvirus 6
agguguaaaucaucaa

SEQ ID NO: 321823 - RNA, 23 nt, Human herpesvirus 6
agguguccuuuguauuuuucgag

SEQ ID NO: 321824 - RNA, 16 nt, Human herpesvirus 6
agguuucgaucaauaa

SEQ ID NO: 321825 - RNA, 13 nt, Human herpesvirus 6
aguaaaacuauug

SEQ ID NO: 321826 - RNA, 16 nt, Human herpesvirus 6
aguaaaacuauugaca

SEQ ID NO: 321827 - RNA, 16 nt, Human herpesvirus 6
aguaaauacaauagua

SEQ ID NO: 321828 - RNA, 22 nt, Human herpesvirus 6
aguaaauauuucuaaacacaga

SEQ ID NO: 321829 - RNA, 18 nt, Human herpesvirus 6
aguaacggaaaacgagua

SEQ ID NO: 321830 - RNA, 22 nt, Human herpesvirus 6
aguaacggaaaacgaguaugaa

SEQ ID NO: 321831 - RNA, 14 nt, Human herpesvirus 6
aguaauaacauuaa

SEQ ID NO: 321832 - RNA, 23 nt, Human herpesvirus 6
aguaauacaucauuaaaauauuc

SEQ ID NO: 321833 - RNA, 18 nt, Human herpesvirus 6
aguagaaggucaucaugc

SEQ ID NO: 321834 - RNA, 21 nt, Human herpesvirus 6
aguagaaggucaucaugcugu

SEQ ID NO: 321835 - RNA, 24 nt, Human herpesvirus 6
aguagcacaaaccaaaaugacucu

SEQ ID NO: 321836 - RNA, 18 nt, Human herpesvirus 6
aguagugcuucaacuaaa

SEQ ID NO: 321837 - RNA, 20 nt, Human herpesvirus 6
aguauauaauguguugguca

SEQ ID NO: 321838 - RNA, 18 nt, Human herpesvirus 6
aguauccuaaauaccaau

SEQ ID NO: 321839 - RNA, 16 nt, Human herpesvirus 6
aguaugaaacuuacaa

SEQ ID NO: 321840 - RNA, 17 nt, Human herpesvirus 6
aguaugaauacgaggag

SEQ ID NO: 321841 - RNA, 19 nt, Human herpesvirus 6
aguaugggugagugcauua

SEQ ID NO: 321842 - RNA, 21 nt, Human herpesvirus 6
aguaugggugagugcauuaua

SEQ ID NO: 321843 - RNA, 20 nt, Human herpesvirus 6
aguaugucuccaaacagaga

SEQ ID NO: 321844 - RNA, 15 nt, Human herpesvirus 6
aguauugucugauau

SEQ ID NO: 321845 - RNA, 12 nt, Human herpesvirus 6
agucaauguugu

SEQ ID NO: 321846 - RNA, 16 nt, Human herpesvirus 6
agucacacacagggug

SEQ ID NO: 321847 - RNA, 20 nt, Human herpesvirus 6
agucagaaaucgugucacau

SEQ ID NO: 321848 - RNA, 15 nt, Human herpesvirus 6
agucaguaaugauau

SEQ ID NO: 321849 - RNA, 22 nt, Human herpesvirus 6
agucaucauauaauauuuccau

SEQ ID NO: 321850 - RNA, 23 nt, Human herpesvirus 6
agucggcgugugugcuccgggga

SEQ ID NO: 321851 - RNA, 20 nt, Human herpesvirus 6
agucguugugucaugauuau

SEQ ID NO: 321852 - RNA, 20 nt, Human herpesvirus 6
agucuggcaucugcggcucu

SEQ ID NO: 321853 - RNA, 16 nt, Human herpesvirus 6
agucuuuagaacagcu

SEQ ID NO: 321854 - RNA, 20 nt, Human herpesvirus 6
agugaaggcugccaugaaac

SEQ ID NO: 321855 - RNA, 14 nt, Human herpesvirus 6
agugauugugacaa

SEQ ID NO: 321856 - RNA, 16 nt, Human herpesvirus 6
agugcaacaaaaagcu

SEQ ID NO: 321857 - RNA, 17 nt, Human herpesvirus 6
agugcguccguuugugg

SEQ ID NO: 321858 - RNA, 21 nt, Human herpesvirus 6
agugcuuuaaucacaaugauc

SEQ ID NO: 321859 - RNA, 17 nt, Human herpesvirus 6
agugcuuuaucuagcca

SEQ ID NO: 321860 - RNA, 18 nt, Human herpesvirus 6
aguggacauuggucuuug

SEQ ID NO: 321861 - RNA, 23 nt, Human herpesvirus 6
aguggauuguaucgagucuuuau

SEQ ID NO: 321862 - RNA, 14 nt, Human herpesvirus 6
agugggaccuauaa

SEQ ID NO: 321863 - RNA, 15 nt, Human herpesvirus 6
aguggguacaaugaa

SEQ ID NO: 321864 - RNA, 14 nt, Human herpesvirus 6
agugugauacggaa

SEQ ID NO: 321865 - RNA, 15 nt, Human herpesvirus 6
agugugaucaucaca

SEQ ID NO: 321866 - RNA, 15 nt, Human herpesvirus 6
agugugcaucagcau

SEQ ID NO: 321867 - RNA, 20 nt, Human herpesvirus 6
agugugcaucagcauaugau

SEQ ID NO: 321868 - RNA, 16 nt, Human herpesvirus 6
aguguggauaucucaa

SEQ ID NO: 321869 - RNA, 22 nt, Human herpesvirus 6
aguguuuggugugacauucaaa

SEQ ID NO: 321870 - RNA, 16 nt, Human herpesvirus 6
aguguuuuauggagga

SEQ ID NO: 321871 - RNA, 22 nt, Human herpesvirus 6
aguuaauaagauguugcaauaa

SEQ ID NO: 321872 - RNA, 15 nt, Human herpesvirus 6
aguuaauaggugugg

SEQ ID NO: 321873 - RNA, 15 nt, Human herpesvirus 6
aguuaauuguguugu

SEQ ID NO: 321874 - RNA, 13 nt, Human herpesvirus 6
aguucaguaacau

SEQ ID NO: 321875 - RNA, 14 nt, Human herpesvirus 6
aguucgccuuguca

SEQ ID NO: 321876 - RNA, 21 nt, Human herpesvirus 6
aguucucucacgcgccaacgc

SEQ ID NO: 321877 - RNA, 16 nt, Human herpesvirus 6
aguucuguggccgaag

SEQ ID NO: 321878 - RNA, 16 nt, Human herpesvirus 6
aguucuucaacauauc

SEQ ID NO: 321879 - RNA, 18 nt, Human herpesvirus 6
aguucuucaacauaucac

SEQ ID NO: 321880 - RNA, 14 nt, Human herpesvirus 6
aguugaagaucuuu

SEQ ID NO: 321881 - RNA, 18 nt, Human herpesvirus 6
aguugacguuccaaagua

SEQ ID NO: 321882 - RNA, 19 nt, Human herpesvirus 6
aguugggaucuucugcuaa

SEQ ID NO: 321883 - RNA, 21 nt, Human herpesvirus 6
aguuguguacaaugguuuuac

SEQ ID NO: 321884 - RNA, 20 nt, Human herpesvirus 6
aguuuacauagaaauuacaa

SEQ ID NO: 321885 - RNA, 13 nt, Human herpesvirus 6
aguuuacuaaaaa

SEQ ID NO: 321886 - RNA, 16 nt, Human herpesvirus 6
aguuuacugugauuuc

SEQ ID NO: 321887 - RNA, 22 nt, Human herpesvirus 6
aguuucggcaacugaauuugca

SEQ ID NO: 321888 - RNA, 20 nt, Human herpesvirus 6
aguuucuuacguaugugaag

SEQ ID NO: 321889 - RNA, 15 nt, Human herpesvirus 6
aguuuguguagggug

SEQ ID NO: 321890 - RNA, 22 nt, Human herpesvirus 6
aguuuucacacguuauaucuaa

SEQ ID NO: 321891 - RNA, 12 nt, Human herpesvirus 6
aguuuucucaca

SEQ ID NO: 321892 - RNA, 21 nt, Human herpesvirus 6
aguuuugcguguggaguugaa

SEQ ID NO: 321893 - RNA, 22 nt, Human herpesvirus 6
aguuuuuaucggugauguggua

SEQ ID NO: 321894 - RNA, 20 nt, Human herpesvirus 6
aguuuuuuaagagugcaaca

SEQ ID NO: 321895 - RNA, 16 nt, Human herpesvirus 6
auaaaaaaaagacauc

SEQ ID NO: 321896 - RNA, 19 nt, Human herpesvirus 6
auaaaaacucacacaacca

SEQ ID NO: 321897 - RNA, 21 nt, Human herpesvirus 6
auaaaaacucacacaaccauc

SEQ ID NO: 321898 - RNA, 17 nt, Human herpesvirus 6
auaaaaauacauuuuaa

SEQ ID NO: 321899 - RNA, 13 nt, Human herpesvirus 6
auaaaacaagauc

SEQ ID NO: 321900 - RNA, 20 nt, Human herpesvirus 6
auaaaacguuccacgcauag

SEQ ID NO: 321901 - RNA, 16 nt, Human herpesvirus 6
auaaaaggaguaugac

SEQ ID NO: 321902 - RNA, 12 nt, Human herpesvirus 6
auaaacaccagc

SEQ ID NO: 321903 - RNA, 20 nt, Human herpesvirus 6
auaaacaugauuguaauaaa

SEQ ID NO: 321904 - RNA, 22 nt, Human herpesvirus 6
auaaacguuguagcccgaggau

SEQ ID NO: 321905 - RNA, 19 nt, Human herpesvirus 6
auaaacugugucuguucaa

SEQ ID NO: 321906 - RNA, 14 nt, Human herpesvirus 6
auaaauacuagcua

SEQ ID NO: 321907 - RNA, 13 nt, Human herpesvirus 6
auaaaucaaagac

SEQ ID NO: 321908 - RNA, 15 nt, Human herpesvirus 6
auaaaucgcuuaaag

SEQ ID NO: 321909 - RNA, 16 nt, Human herpesvirus 6
auaaaugguagcuauu

SEQ ID NO: 321910 - RNA, 21 nt, Human herpesvirus 6
auaaauguagcauacgacaaa

SEQ ID NO: 321911 - RNA, 20 nt, Human herpesvirus 6
auaaauucucuggaugcuuu

SEQ ID NO: 321912 - RNA, 16 nt, Human herpesvirus 6
auaaauugguggacaa

SEQ ID NO: 321913 - RNA, 18 nt, Human herpesvirus 6
auaaauugguggacaacg

SEQ ID NO: 321914 - RNA, 16 nt, Human herpesvirus 6
auaaauuuaccaccag

SEQ ID NO: 321915 - RNA, 17 nt, Human herpesvirus 6
auaacaacaacaauaac

SEQ ID NO: 321916 - RNA, 18 nt, Human herpesvirus 6
auaacauagaaaaaugag

SEQ ID NO: 321917 - RNA, 19 nt, Human herpesvirus 6
auaacccccgauaacuuuu

SEQ ID NO: 321918 - RNA, 15 nt, Human herpesvirus 6
auaaccucacuacug

SEQ ID NO: 321919 - RNA, 22 nt, Human herpesvirus 6
aucagaauccaccaaugacacc

SEQ ID NO: 321920 - RNA, 20 nt, Human herpesvirus 6
aucagacggguaagcagcag

SEQ ID NO: 321921 - RNA, 15 nt, Human herpesvirus 6
aucagccugcucaga

SEQ ID NO: 321922 - RNA, 17 nt, Human herpesvirus 6
aucauauaauauuucca

SEQ ID NO: 321923 - RNA, 19 nt, Human herpesvirus 6
aucaucaaaucggacaaug

SEQ ID NO: 321924 - RNA, 16 nt, Human herpesvirus 6
aucauggugucuuugu

SEQ ID NO: 321925 - RNA, 23 nt, Human herpesvirus 6
aucauuuuuuugauuuacaaggc

SEQ ID NO: 321926 - RNA, 12 nt, Human herpesvirus 6
auccaccaauga

SEQ ID NO: 321927 - RNA, 15 nt, Human herpesvirus 6
auccauccaauccaa

SEQ ID NO: 321928 - RNA, 16 nt, Human herpesvirus 6
auccauccaauccaau

SEQ ID NO: 321929 - RNA, 15 nt, Human herpesvirus 6
auccaugcaacacaa

SEQ ID NO: 321930 - RNA, 18 nt, Human herpesvirus 6
aucccuaauaaaugucaa

SEQ ID NO: 321931 - RNA, 13 nt, Human herpesvirus 6
auccuaaauacca

SEQ ID NO: 321932 - RNA, 15 nt, Human herpesvirus 6
auccuaacaagacag

SEQ ID NO: 321933 - RNA, 14 nt, Human herpesvirus 6
auccuagcauuucc

SEQ ID NO: 321934 - RNA, 15 nt, Human herpesvirus 6
auccucgaauaauua

SEQ ID NO: 321935 - RNA, 12 nt, Human herpesvirus 6
auccucuacgua

SEQ ID NO: 321936 - RNA, 20 nt, Human herpesvirus 6
auccugcguguuaaugaaug

SEQ ID NO: 321937 - RNA, 18 nt, Human herpesvirus 6
auccuuccaccuacauca

SEQ ID NO: 321938 - RNA, 15 nt, Human herpesvirus 6
aucgaccauguguau

SEQ ID NO: 321939 - RNA, 14 nt, Human herpesvirus 6
aucgaccuaaaaaa

SEQ ID NO: 321940 - RNA, 15 nt, Human herpesvirus 6
aucgagcaacagcgu

SEQ ID NO: 321941 - RNA, 17 nt, Human herpesvirus 6
aucgagccaaagaaaca

SEQ ID NO: 321942 - RNA, 22 nt, Human herpesvirus 6
aucgauacccggcgaauggaua

SEQ ID NO: 321943 - RNA, 22 nt, Human herpesvirus 6
aucgcuaaguguugacugaucu

SEQ ID NO: 321944 - RNA, 20 nt, Human herpesvirus 6
aucgguuguguuagcuuugc

SEQ ID NO: 321945 - RNA, 19 nt, Human herpesvirus 6
aucgucggaucaacagaug

SEQ ID NO: 321946 - RNA, 15 nt, Human herpesvirus 6
aucgucuacccuauc

SEQ ID NO: 321947 - RNA, 13 nt, Human herpesvirus 6
aucuacugagauc

SEQ ID NO: 321948 - RNA, 12 nt, Human herpesvirus 6
aucuaucacagg

SEQ ID NO: 321949 - RNA, 18 nt, Human herpesvirus 6
aucuaugggagugauugu

SEQ ID NO: 321950 - RNA, 17 nt, Human herpesvirus 6
aucuauuuaaaauggac

SEQ ID NO: 321951 - RNA, 16 nt, Human herpesvirus 6
aucuccgcaaaccacc

SEQ ID NO: 321952 - RNA, 17 nt, Human herpesvirus 6
aucugaaacacugaguu

SEQ ID NO: 321953 - RNA, 16 nt, Human herpesvirus 6
aucugagacaguccau

SEQ ID NO: 321954 - RNA, 20 nt, Human herpesvirus 6
aucugagugaauugugcaag

SEQ ID NO: 321955 - RNA, 17 nt, Human herpesvirus 6
aucugcgucgucuauca

SEQ ID NO: 321956 - RNA, 21 nt, Human herpesvirus 6
aucuuaccuucaaagugauuc

SEQ ID NO: 321957 - RNA, 15 nt, Human herpesvirus 6
aucuuauauuaaaga

SEQ ID NO: 321958 - RNA, 22 nt, Human herpesvirus 6
aucuuauucaaaaauguugcau

SEQ ID NO: 321959 - RNA, 23 nt, Human herpesvirus 6
aucuugaaaagcccuuacuugaa

SEQ ID NO: 321960 - RNA, 15 nt, Human herpesvirus 6
aucuugaaaucuacu

SEQ ID NO: 321961 - RNA, 18 nt, Human herpesvirus 6
aucuugaaaucuacugua

SEQ ID NO: 321962 - RNA, 20 nt, Human herpesvirus 6
aucuugaaaucuacuguaca

SEQ ID NO: 321963 - RNA, 16 nt, Human herpesvirus 6
augaaaauugcucuau

SEQ ID NO: 321964 - RNA, 13 nt, Human herpesvirus 6
augaaaguccuca

SEQ ID NO: 321965 - RNA, 19 nt, Human herpesvirus 6
augaaaguugauacgccag

SEQ ID NO: 321966 - RNA, 17 nt, Human herpesvirus 6
augaagacggcaaaggc

SEQ ID NO: 321967 - RNA, 15 nt, Human herpesvirus 6
augaauguguucaca

SEQ ID NO: 321968 - RNA, 16 nt, Human herpesvirus 6
augaauguguucacag

SEQ ID NO: 321969 - RNA, 23 nt, Human herpesvirus 6
augaauuccaugcgaguagauuc

SEQ ID NO: 321970 - RNA, 14 nt, Human herpesvirus 6
augacaucugcaaa

SEQ ID NO: 321971 - RNA, 16 nt, Human herpesvirus 6
augacaucugcaaaaa

SEQ ID NO: 321972 - RNA, 13 nt, Human herpesvirus 6
augacauuauuaa

SEQ ID NO: 321973 - RNA, 12 nt, Human herpesvirus 6
augacgauucaa

SEQ ID NO: 321974 - RNA, 19 nt, Human herpesvirus 6
augacgauucaaaccgcag

SEQ ID NO: 321975 - RNA, 16 nt, Human herpesvirus 6
augacuuuucuaucac

SEQ ID NO: 321976 - RNA, 21 nt, Human herpesvirus 6
augagacuuagcuagaugugu

SEQ ID NO: 321977 - RNA, 16 nt, Human herpesvirus 6
augagaggacagucaa

SEQ ID NO: 321978 - RNA, 19 nt, Human herpesvirus 6
augaggcgcuugaaaccac

SEQ ID NO: 321979 - RNA, 15 nt, Human herpesvirus 6
augauacaugcaauu

SEQ ID NO: 321980 - RNA, 19 nt, Human herpesvirus 6
augauauaguuuuugcuua

SEQ ID NO: 321981 - RNA, 17 nt, Human herpesvirus 6
augaucuagcuauagcu

SEQ ID NO: 321982 - RNA, 18 nt, Human herpesvirus 6
augaucuagcuauagcua

SEQ ID NO: 321983 - RNA, 13 nt, Human herpesvirus 6
augaugaguaaua

SEQ ID NO: 321984 - RNA, 13 nt, Human herpesvirus 6
augauuaucauag

SEQ ID NO: 321985 - RNA, 18 nt, Human herpesvirus 6
augauuaucauagacaaa

SEQ ID NO: 321986 - RNA, 12 nt, Human herpesvirus 6
augauugcauca

SEQ ID NO: 321987 - RNA, 12 nt, Human herpesvirus 6
augauuuauaga

SEQ ID NO: 321988 - RNA, 17 nt, Human herpesvirus 6
augcaaacccgacaaug

SEQ ID NO: 321989 - RNA, 16 nt, Human herpesvirus 6
augcaaacugacugua

SEQ ID NO: 321990 - RNA, 12 nt, Human herpesvirus 6
augcaacgcauc

SEQ ID NO: 321991 - RNA, 16 nt, Human herpesvirus 6
augcaagccaugacaa

SEQ ID NO: 321992 - RNA, 22 nt, Human herpesvirus 6
augcagaacaacagcauguaau

SEQ ID NO: 321993 - RNA, 15 nt, Human herpesvirus 6
augcagguacugcua

SEQ ID NO: 321994 - RNA, 12 nt, Human herpesvirus 6
augcaucaucaa

SEQ ID NO: 321995 - RNA, 19 nt, Human herpesvirus 6
augcaucucuacuuguuau

SEQ ID NO: 321996 - RNA, 22 nt, Human herpesvirus 6
augcauucacaaggaaugugca

SEQ ID NO: 321997 - RNA, 14 nt, Human herpesvirus 6
augccaaagcuuua

SEQ ID NO: 321998 - RNA, 19 nt, Human herpesvirus 6
augccaacgcgacagggug

SEQ ID NO: 321999 - RNA, 16 nt, Human herpesvirus 6
augcccagauguggaa

SEQ ID NO: 322000 - RNA, 16 nt, Human herpesvirus 6
augccgacaagcuuuu

SEQ ID NO: 322001 - RNA, 22 nt, Human herpesvirus 6
augcgcaggauaauuuauggaa

SEQ ID NO: 322002 - RNA, 23 nt, Human herpesvirus 6
augcgucuguuuauugccaauag

SEQ ID NO: 322003 - RNA, 14 nt, Human herpesvirus 6
augcugaugaauuu

SEQ ID NO: 322004 - RNA, 18 nt, Human herpesvirus 6
augcuuugggaccuucag

SEQ ID NO: 322005 - RNA, 17 nt, Human herpesvirus 6
auggaaauucgcuacua

SEQ ID NO: 322006 - RNA, 21 nt, Human herpesvirus 6
auggagagagcgugcacacaa

SEQ ID NO: 322007 - RNA, 22 nt, Human herpesvirus 6
auggagagagcgugcacacaaa

SEQ ID NO: 322008 - RNA, 15 nt, Human herpesvirus 6
auggagagcuuauau

SEQ ID NO: 322009 - RNA, 19 nt, Human herpesvirus 6
auggagcccgcucggucuc

SEQ ID NO: 322010 - RNA, 14 nt, Human herpesvirus 6
auggaucuugauca

SEQ ID NO: 322011 - RNA, 15 nt, Human herpesvirus 6
auggauguguggaag

SEQ ID NO: 322012 - RNA, 19 nt, Human herpesvirus 6
auggauuugguauuuuaga

SEQ ID NO: 322013 - RNA, 14 nt, Human herpesvirus 6
auggcaugcauuau

SEQ ID NO: 322014 - RNA, 21 nt, Human herpesvirus 6
auggcgcacgcuaaaaaacgg

SEQ ID NO: 322015 - RNA, 19 nt, Human herpesvirus 6
auggcgucgaaguauugua

SEQ ID NO: 322016 - RNA, 20 nt, Human herpesvirus 6
auggcgucgaaguauuguau

SEQ ID NO: 322017 - RNA, 23 nt, Human herpesvirus 6
augggagucugcuuuacaucgaa

SEQ ID NO: 322018 - RNA, 20 nt, Human herpesvirus 6
augggagugauugugacaag

SEQ ID NO: 322019 - RNA, 15 nt, Human herpesvirus 6
augggauugugauuc

SEQ ID NO: 322020 - RNA, 16 nt, Human herpesvirus 6
augggugagugcauua

SEQ ID NO: 322021 - RNA, 13 nt, Human herpesvirus 6
auggugagcaaaa

SEQ ID NO: 322022 - RNA, 19 nt, Human herpesvirus 6
auggugcgaucgagcaaca

SEQ ID NO: 322023 - RNA, 16 nt, Human herpesvirus 6
augguuaucaucacaa

SEQ ID NO: 322024 - RNA, 20 nt, Human herpesvirus 6
auguaaauaaacaccagcau

SEQ ID NO: 322025 - RNA, 22 nt, Human herpesvirus 6
auguaaauaaacaccagcauaa

SEQ ID NO: 322026 - RNA, 14 nt, Human herpesvirus 6
auguacucauccaa

SEQ ID NO: 322027 - RNA, 22 nt, Human herpesvirus 6
auguaguuaaugcugcugcugu

SEQ ID NO: 322028 - RNA, 18 nt, Human herpesvirus 6
augucaauaguuuuacuu

SEQ ID NO: 322029 - RNA, 16 nt, Human herpesvirus 6
augucauuucaucuau

SEQ ID NO: 322030 - RNA, 15 nt, Human herpesvirus 6
augucggaaucuacu

SEQ ID NO: 322031 - RNA, 21 nt, Human herpesvirus 6
augucgugguggucuuguuau

SEQ ID NO: 322032 - RNA, 16 nt, Human herpesvirus 6
augucuagaugcaaau

SEQ ID NO: 322033 - RNA, 13 nt, Human herpesvirus 6
augucuccaaaca

SEQ ID NO: 322034 - RNA, 22 nt, Human herpesvirus 6
augucucgcguugauacauccc

SEQ ID NO: 322035 - RNA, 19 nt, Human herpesvirus 6
augucuucgaauacuuuca

SEQ ID NO: 322036 - RNA, 23 nt, Human herpesvirus 6
augugacucggaacauaauugca

SEQ ID NO: 322037 - RNA, 18 nt, Human herpesvirus 6
augugcgacuauuugaaa

SEQ ID NO: 322038 - RNA, 18 nt, Human herpesvirus 6
auguggagaagaucuaaa

SEQ ID NO: 322039 - RNA, 13 nt, Human herpesvirus 6
auguggugauacg

SEQ ID NO: 322040 - RNA, 19 nt, Human herpesvirus 6
augugucggccgugaugca

SEQ ID NO: 322041 - RNA, 15 nt, Human herpesvirus 6
auguuaaauaacuca

SEQ ID NO: 322042 - RNA, 14 nt, Human herpesvirus 6
auguuaacucaggu

SEQ ID NO: 322043 - RNA, 15 nt, Human herpesvirus 6
auguuaguauacaga

SEQ ID NO: 322044 - RNA, 22 nt, Human herpesvirus 6
auguucaaaauugggcgaagac

SEQ ID NO: 322045 - RNA, 16 nt, Human herpesvirus 6
auguuuucuccucaac

SEQ ID NO: 322046 - RNA, 15 nt, Human herpesvirus 6
auguuuuugacaaau

SEQ ID NO: 322047 - RNA, 14 nt, Human herpesvirus 6
auuaaaacaucagu

SEQ ID NO: 322048 - RNA, 15 nt, Human herpesvirus 6
auuaaauguuacuga

SEQ ID NO: 322049 - RNA, 13 nt, Human herpesvirus 6
auuaacaaugaaa

SEQ ID NO: 322050 - RNA, 16 nt, Human herpesvirus 6
auuaacacguacauaa

SEQ ID NO: 322051 - RNA, 16 nt, Human herpesvirus 6
auuaacuaguugcuug

SEQ ID NO: 322052 - RNA, 17 nt, Human herpesvirus 6
auuaacuaguugcuugu

SEQ ID NO: 322053 - RNA, 21 nt, Human herpesvirus 6
auuaagugcgcuggcuuauua

SEQ ID NO: 322054 - RNA, 20 nt, Human herpesvirus 6
auuaauuacauauagucaau

SEQ ID NO: 322055 - RNA, 19 nt, Human herpesvirus 6
auuaauuaccuauagucaa

SEQ ID NO: 322056 - RNA, 16 nt, Human herpesvirus 6
auuaauuuccugauca

SEQ ID NO: 322057 - RNA, 14 nt, Human herpesvirus 6
auuacaaaacaauc

SEQ ID NO: 322058 - RNA, 17 nt, Human herpesvirus 6
auuacaagguacacaau

SEQ ID NO: 322059 - RNA, 15 nt, Human herpesvirus 6
auuacauauagucaa

SEQ ID NO: 322060 - RNA, 17 nt, Human herpesvirus 6
auuacauauagucaaug

SEQ ID NO: 322061 - RNA, 11 nt, Human herpesvirus 6
auuaccuauag

SEQ ID NO: 322062 - RNA, 18 nt, Human herpesvirus 6
auuaccuauagucaaugu

SEQ ID NO: 322063 - RNA, 16 nt, Human herpesvirus 6
auuacggcaacauacc

SEQ ID NO: 322064 - RNA, 17 nt, Human herpesvirus 6
auuacggcaacauaccc

SEQ ID NO: 322065 - RNA, 19 nt, Human herpesvirus 6
auuacgucuuuuugugcuu

SEQ ID NO: 322066 - RNA, 21 nt, Human herpesvirus 6
auuacuagcgaaugaauuuac

SEQ ID NO: 322067 - RNA, 19 nt, Human herpesvirus 6
auuacuucgugcugugaua

SEQ ID NO: 322068 - RNA, 14 nt, Human herpesvirus 6
auuagaacaauuau

SEQ ID NO: 322069 - RNA, 15 nt, Human herpesvirus 6
auuagcauacagaug

SEQ ID NO: 322070 - RNA, 15 nt, Human herpesvirus 6
auuaguccauuacca

SEQ ID NO: 322071 - RNA, 15 nt, Human herpesvirus 6
auuauaaauguagca

SEQ ID NO: 322072 - RNA, 16 nt, Human herpesvirus 6
auuauaagacacugau

SEQ ID NO: 322073 - RNA, 14 nt, Human herpesvirus 6
auuauagcuucaaa

SEQ ID NO: 322074 - RNA, 17 nt, Human herpesvirus 6
auuauauauuugcauac

SEQ ID NO: 322075 - RNA, 19 nt, Human herpesvirus 6
auuauauauuugcauacau

SEQ ID NO: 322076 - RNA, 17 nt, Human herpesvirus 6
auuaucacaguugauaa

SEQ ID NO: 322077 - RNA, 16 nt, Human herpesvirus 6
auuaucauagacaaac

SEQ ID NO: 322078 - RNA, 23 nt, Human herpesvirus 6
auuauccuauugguuugcauaau

SEQ ID NO: 322079 - RNA, 22 nt, Human herpesvirus 6
auuaugugaauguuaagcaaaa

SEQ ID NO: 322080 - RNA, 21 nt, Human herpesvirus 6
auuauucacggcuaauaugau

SEQ ID NO: 322081 - RNA, 16 nt, Human herpesvirus 6
auuauucugucuugau

SEQ ID NO: 322082 - RNA, 21 nt, Human herpesvirus 6
auucaaaaauguugcauggaa

SEQ ID NO: 322083 - RNA, 21 nt, Human herpesvirus 6
auucaaaauaaauacuagcua

SEQ ID NO: 322084 - RNA, 19 nt, Human herpesvirus 6
auucaccagauucacugac

SEQ ID NO: 322085 - RNA, 18 nt, Human herpesvirus 6
auucagagugaauuccug

SEQ ID NO: 322086 - RNA, 20 nt, Human herpesvirus 6
auuccacgggaucguaggua

SEQ ID NO: 322087 - RNA, 21 nt, Human herpesvirus 6
auuccacgugcuugucucaca

SEQ ID NO: 322088 - RNA, 16 nt, Human herpesvirus 6
auuccagggaacuuga

SEQ ID NO: 322089 - RNA, 16 nt, Human herpesvirus 6
auuccaguuaauaaga

SEQ ID NO: 322090 - RNA, 17 nt, Human herpesvirus 6
auuccaugcgaguagau

SEQ ID NO: 322091 - RNA, 18 nt, Human herpesvirus 6
auucccaugacgauucaa

SEQ ID NO: 322092 - RNA, 19 nt, Human herpesvirus 6
auuccucaaaugaauuuau

SEQ ID NO: 322093 - RNA, 21 nt, Human herpesvirus 6
auuccucguucuaccaugugc

SEQ ID NO: 322094 - RNA, 21 nt, Human herpesvirus 6
auucgcaagacuacagacucc

SEQ ID NO: 322095 - RNA, 19 nt, Human herpesvirus 6
auucggucaccuacauucg

SEQ ID NO: 322096 - RNA, 13 nt, Human herpesvirus 6
auucguuacaauc

SEQ ID NO: 322097 - RNA, 16 nt, Human herpesvirus 6
auucguuuuuuuucuu

SEQ ID NO: 322098 - RNA, 21 nt, Human herpesvirus 6
auucucagacagcuuugcgau

SEQ ID NO: 322099 - RNA, 22 nt, Human herpesvirus 6
auucucaugcgcaguguuauuc

SEQ ID NO: 322100 - RNA, 14 nt, Human herpesvirus 6
auucugucuugaua

SEQ ID NO: 322101 - RNA, 19 nt, Human herpesvirus 6
auucuguucuucaucauca

SEQ ID NO: 322102 - RNA, 16 nt, Human herpesvirus 6
auucuuaaagcgugug

SEQ ID NO: 322103 - RNA, 12 nt, Human herpesvirus 6
auucuuaccaag

SEQ ID NO: 322104 - RNA, 21 nt, Human herpesvirus 6
auucuuccggaauuuugagau

SEQ ID NO: 322105 - RNA, 16 nt, Human herpesvirus 6
auugaaaaaucucuau

SEQ ID NO: 322106 - RNA, 15 nt, Human herpesvirus 6
auugaccagccagau

SEQ ID NO: 322107 - RNA, 12 nt, Human herpesvirus 6
auugacuauuaa

SEQ ID NO: 322108 - RNA, 15 nt, Human herpesvirus 6
auugagugugcauca

SEQ ID NO: 322109 - RNA, 13 nt, Human herpesvirus 6
auugcacccuauc

SEQ ID NO: 322110 - RNA, 18 nt, Human herpesvirus 6
auugcacccuaucaccuu

SEQ ID NO: 322111 - RNA, 12 nt, Human herpesvirus 6
auugccaaaggc

SEQ ID NO: 322112 - RNA, 14 nt, Human herpesvirus 6
auugcugcuagaua

SEQ ID NO: 322113 - RNA, 23 nt, Human herpesvirus 6
auugcugcuagauaauuaugcau

SEQ ID NO: 322114 - RNA, 20 nt, Human herpesvirus 6
auuggcgucuaguaccugua

SEQ ID NO: 322115 - RNA, 19 nt, Human herpesvirus 6
auuggucucuuugcgucuu

SEQ ID NO: 322116 - RNA, 17 nt, Human herpesvirus 6
auugguuaaaaggaaua

SEQ ID NO: 322117 - RNA, 22 nt, Human herpesvirus 6
auugguuuuuuuuaacaguguc

SEQ ID NO: 322118 - RNA, 15 nt, Human herpesvirus 6
auuguaaaagggaag

SEQ ID NO: 322119 - RNA, 17 nt, Human herpesvirus 6
auugucaaauagccaaa

SEQ ID NO: 322120 - RNA, 19 nt, Human herpesvirus 6
auugugauucugcauuuau

SEQ ID NO: 322121 - RNA, 19 nt, Human herpesvirus 6
auuguguucugcucugugu

SEQ ID NO: 322122 - RNA, 17 nt, Human herpesvirus 6
auuguucgcuuguguca

SEQ ID NO: 322123 - RNA, 22 nt, Human herpesvirus 6
auuguuugaauaacaaacuaua

SEQ ID NO: 322124 - RNA, 22 nt, Human herpesvirus 6
auuuaaacaacacagcacauaa

SEQ ID NO: 322125 - RNA, 19 nt, Human herpesvirus 6
auuuacaaaaaaccuuuaa

SEQ ID NO: 322126 - RNA, 23 nt, Human herpesvirus 6
auuuacaccuaacgcgggauauu

SEQ ID NO: 322127 - RNA, 21 nt, Human herpesvirus 6
auuuaccguuuaaacuaugca

SEQ ID NO: 322128 - RNA, 22 nt, Human herpesvirus 6
auuuaccguuuaaacuaugcaa

SEQ ID NO: 322129 - RNA, 14 nt, Human herpesvirus 6
auuuaccuuccuga

SEQ ID NO: 322130 - RNA, 23 nt, Human herpesvirus 6
auuuacuguuucuuugacauuua

SEQ ID NO: 322131 - RNA, 17 nt, Human herpesvirus 6
auuuaucgaccuaaaaa

SEQ ID NO: 322132 - RNA, 22 nt, Human herpesvirus 6
auuucacgugaagauguucaaa

SEQ ID NO: 322133 - RNA, 18 nt, Human herpesvirus 6
auuucacuuaagccagcu

SEQ ID NO: 322134 - RNA, 19 nt, Human herpesvirus 6
auuucagguucuucaaaaa

SEQ ID NO: 322135 - RNA, 20 nt, Human herpesvirus 6
auuucagguucuucaaaaaa

SEQ ID NO: 322136 - RNA, 18 nt, Human herpesvirus 6
auuuccauaaguuaauuc

SEQ ID NO: 322137 - RNA, 16 nt, Human herpesvirus 6
auuuccaugacuguga

SEQ ID NO: 322138 - RNA, 22 nt, Human herpesvirus 6
auuucgauguggagaagaucua

SEQ ID NO: 322139 - RNA, 19 nt, Human herpesvirus 6
auuucgguuucgucgcaaa

SEQ ID NO: 322140 - RNA, 16 nt, Human herpesvirus 6
auuucuccauaccguu

SEQ ID NO: 322141 - RNA, 14 nt, Human herpesvirus 6
auuucuuacacaaa

SEQ ID NO: 322142 - RNA, 20 nt, Human herpesvirus 6
auuucuuccuuucucugcgc

SEQ ID NO: 322143 - RNA, 17 nt, Human herpesvirus 6
auuucuugguuguguau

SEQ ID NO: 322144 - RNA, 18 nt, Human herpesvirus 6
auuugcauacauuccuua

SEQ ID NO: 322145 - RNA, 20 nt, Human herpesvirus 6
auuugccgggaugagcuuua

SEQ ID NO: 322146 - RNA, 14 nt, Human herpesvirus 6
auuugcugaugcga

SEQ ID NO: 322147 - RNA, 15 nt, Human herpesvirus 6
auuuguguucaagaa

SEQ ID NO: 322148 - RNA, 12 nt, Human herpesvirus 6
auuuuacaaaga

SEQ ID NO: 322149 - RNA, 17 nt, Human herpesvirus 6
auuuuacaaagaccuau

SEQ ID NO: 322150 - RNA, 13 nt, Human herpesvirus 6
auuuuagauauau

SEQ ID NO: 322151 - RNA, 17 nt, Human herpesvirus 6
auuuuagauauauacuu

SEQ ID NO: 322152 - RNA, 17 nt, Human herpesvirus 6
auuuuauaacgacaaaa

SEQ ID NO: 322153 - RNA, 18 nt, Human herpesvirus 6
auuuucaaucuguguuuc

SEQ ID NO: 322154 - RNA, 15 nt, Human herpesvirus 6
auuuuccuaguagga

SEQ ID NO: 322155 - RNA, 15 nt, Human herpesvirus 6
auuuucgguguguau

SEQ ID NO: 322156 - RNA, 14 nt, Human herpesvirus 6
auuuugagauuuac

SEQ ID NO: 322157 - RNA, 14 nt, Human herpesvirus 6
auuuugaugccaaa

SEQ ID NO: 322158 - RNA, 17 nt, Human herpesvirus 6
auuuugaugccaaagcu

SEQ ID NO: 322159 - RNA, 14 nt, Human herpesvirus 6
auuuugcaugcauu

SEQ ID NO: 322160 - RNA, 15 nt, Human herpesvirus 6
auuuugggacaagau

SEQ ID NO: 322161 - RNA, 16 nt, Human herpesvirus 6
auuuuuugcaguauua

SEQ ID NO: 322162 - RNA, 20 nt, Human herpesvirus 6
caaaaaccgccaagagauag

SEQ ID NO: 322163 - RNA, 13 nt, Human herpesvirus 6
caaaaauguugca

SEQ ID NO: 322164 - RNA, 17 nt, Human herpesvirus 6
caaaaauguugcaugga

SEQ ID NO: 322165 - RNA, 16 nt, Human herpesvirus 6
caaaacaguugauuau

SEQ ID NO: 322166 - RNA, 18 nt, Human herpesvirus 6
caaaaccuaaauacauuc

SEQ ID NO: 322167 - RNA, 19 nt, Human herpesvirus 6
caaaaccuaaauacauuca

SEQ ID NO: 322168 - RNA, 17 nt, Human herpesvirus 6
caaaacuuucauccuga

SEQ ID NO: 322169 - RNA, 12 nt, Human herpesvirus 6
caaaagauuacg

SEQ ID NO: 322170 - RNA, 21 nt, Human herpesvirus 6
caaaagauuacggcaacauac

SEQ ID NO: 322171 - RNA, 22 nt, Human herpesvirus 6
caaaagauuacggcaacauacc

SEQ ID NO: 322172 - RNA, 12 nt, Human herpesvirus 6
caaaauaaauac

SEQ ID NO: 322173 - RNA, 13 nt, Human herpesvirus 6
caaaaucaaacuc

SEQ ID NO: 322174 - RNA, 19 nt, Human herpesvirus 6
caaaaugaccucaucccuu

SEQ ID NO: 322175 - RNA, 17 nt, Human herpesvirus 6
caaaaugguuaugacaa

SEQ ID NO: 322176 - RNA, 17 nt, Human herpesvirus 6
caaaauuugaaauauca

SEQ ID NO: 322177 - RNA, 14 nt, Human herpesvirus 6
caaacaaauggaaa

SEQ ID NO: 322178 - RNA, 12 nt, Human herpesvirus 6
caaacaaggguu

SEQ ID NO: 322179 - RNA, 12 nt, Human herpesvirus 6
caaacaccucac

SEQ ID NO: 322180 - RNA, 21 nt, Human herpesvirus 6
caaacaccucacaaucuaaua

SEQ ID NO: 322181 - RNA, 21 nt, Human herpesvirus 6
caaacauccuaacaagacaga

SEQ ID NO: 322182 - RNA, 22 nt, Human herpesvirus 6
caaaccauaaaaaaucuuguca

SEQ ID NO: 322183 - RNA, 18 nt, Human herpesvirus 6
caaacgugaauauaucaa

SEQ ID NO: 322184 - RNA, 14 nt, Human herpesvirus 6
caaacuauauugcu

SEQ ID NO: 322185 - RNA, 22 nt, Human herpesvirus 6
caaacucaccgcauauaucaua

SEQ ID NO: 322186 - RNA, 22 nt, Human herpesvirus 6
caaagaaccggcgugugcgauu

SEQ ID NO: 322187 - RNA, 13 nt, Human herpesvirus 6
caaagacauucaa

SEQ ID NO: 322188 - RNA, 16 nt, Human herpesvirus 6
caaagacauucaacau

SEQ ID NO: 322189 - RNA, 21 nt, Human herpesvirus 6
caaagacauucaacauuccaa

SEQ ID NO: 322190 - RNA, 19 nt, Human herpesvirus 6
caaagacgauugcuuuagu

SEQ ID NO: 322191 - RNA, 21 nt, Human herpesvirus 6
caaagauguacucauccaaga

SEQ ID NO: 322192 - RNA, 13 nt, Human herpesvirus 6
caaaggcgaugaa

SEQ ID NO: 322193 - RNA, 14 nt, Human herpesvirus 6
caaaguaaucucgu

SEQ ID NO: 322194 - RNA, 15 nt, Human herpesvirus 6
caaaguauuggugca

SEQ ID NO: 322195 - RNA, 22 nt, Human herpesvirus 6
caaaguauuggugcaucaguga

SEQ ID NO: 322196 - RNA, 18 nt, Human herpesvirus 6
caaagugauuccaguuaa

SEQ ID NO: 322197 - RNA, 19 nt, Human herpesvirus 6
caaaguucaguaacauuua

SEQ ID NO: 322198 - RNA, 20 nt, Human herpesvirus 6
caaaguucaguaacauuuaa

SEQ ID NO: 322199 - RNA, 19 nt, Human herpesvirus 6
caaauaaaaaauucuugaa

SEQ ID NO: 322200 - RNA, 14 nt, Human herpesvirus 6
caaauaaauacaga

SEQ ID NO: 322201 - RNA, 21 nt, Human herpesvirus 6
caaauaauaaaaaguaauaua

SEQ ID NO: 322202 - RNA, 17 nt, Human herpesvirus 6
caaaucuggaucaucaa

SEQ ID NO: 322203 - RNA, 18 nt, Human herpesvirus 6
caaaucuucccuuuuaca

SEQ ID NO: 322204 - RNA, 13 nt, Human herpesvirus 6
caaaugauuuuac

SEQ ID NO: 322205 - RNA, 19 nt, Human herpesvirus 6
caaaugauuuuacaaagac

SEQ ID NO: 322206 - RNA, 22 nt, Human herpesvirus 6
caaauuaugguuaucaucacaa

SEQ ID NO: 322207 - RNA, 12 nt, Human herpesvirus 6
caaauucucucu

SEQ ID NO: 322208 - RNA, 20 nt, Human herpesvirus 6
caaauucuuacauuuuguac

SEQ ID NO: 322209 - RNA, 17 nt, Human herpesvirus 6
caaauugaccagccaga

SEQ ID NO: 322210 - RNA, 19 nt, Human herpesvirus 6
caaauuuaguuaauucuca

SEQ ID NO: 322211 - RNA, 13 nt, Human herpesvirus 6
caacaaccacagc

SEQ ID NO: 322212 - RNA, 21 nt, Human herpesvirus 6
caacaauaacaacaacaauaa

SEQ ID NO: 322213 - RNA, 14 nt, Human herpesvirus 6
caacacaccugccu

SEQ ID NO: 322214 - RNA, 14 nt, Human herpesvirus 6
caacacgccagaca

SEQ ID NO: 322215 - RNA, 22 nt, Human herpesvirus 6
caaccugaaacuccccagagaa

SEQ ID NO: 322216 - RNA, 15 nt, Human herpesvirus 6
caacgaauacuucuc

SEQ ID NO: 322217 - RNA, 19 nt, Human herpesvirus 6
caacgacuaccacaucacc

SEQ ID NO: 322218 - RNA, 14 nt, Human herpesvirus 6
caacgacuaucaaa

SEQ ID NO: 322219 - RNA, 13 nt, Human herpesvirus 6
caacgcaauucca

SEQ ID NO: 322220 - RNA, 15 nt, Human herpesvirus 6
caacgcggagugaac

SEQ ID NO: 322221 - RNA, 18 nt, Human herpesvirus 6
caacgcuaaauauaucaa

SEQ ID NO: 322222 - RNA, 17 nt, Human herpesvirus 6
caacgucaugcaaaaca

SEQ ID NO: 322223 - RNA, 15 nt, Human herpesvirus 6
caacuaaaccauguc

SEQ ID NO: 322224 - RNA, 19 nt, Human herpesvirus 6
caacucguuuuugauugca

SEQ ID NO: 322225 - RNA, 18 nt, Human herpesvirus 6
caacugacuuauaaguca

SEQ ID NO: 322226 - RNA, 21 nt, Human herpesvirus 6
caacuuuugcuuagucuguaa

SEQ ID NO: 322227 - RNA, 19 nt, Human herpesvirus 6
caagacuacagacucccca

SEQ ID NO: 322228 - RNA, 14 nt, Human herpesvirus 6
caagagaacaugau

SEQ ID NO: 322229 - RNA, 21 nt, Human herpesvirus 6
caagagauagaccuugaucua

SEQ ID NO: 322230 - RNA, 22 nt, Human herpesvirus 6
caagagauagaccuugaucuau

SEQ ID NO: 322231 - RNA, 18 nt, Human herpesvirus 6
caagaggauccauucuag

SEQ ID NO: 322232 - RNA, 17 nt, Human herpesvirus 6
caagaguggauggaucg

SEQ ID NO: 322233 - RNA, 16 nt, Human herpesvirus 6
caagauccaaucacaa

SEQ ID NO: 322234 - RNA, 15 nt, Human herpesvirus 6
caagauuguguuucu

SEQ ID NO: 322235 - RNA, 16 nt, Human herpesvirus 6
caagcaccuaauuaca

SEQ ID NO: 322236 - RNA, 18 nt, Human herpesvirus 6
caagcaccuaauuacaau

SEQ ID NO: 322237 - RNA, 16 nt, Human herpesvirus 6
caaggaaagacaugca

SEQ ID NO: 322238 - RNA, 20 nt, Human herpesvirus 6
caagguucgucgagaaccac

SEQ ID NO: 322239 - RNA, 14 nt, Human herpesvirus 6
caaguaagauugca

SEQ ID NO: 322240 - RNA, 18 nt, Human herpesvirus 6
caaguagccaaugauucu

SEQ ID NO: 322241 - RNA, 22 nt, Human herpesvirus 6
caaguguuuggugugacauuca

SEQ ID NO: 322242 - RNA, 23 nt, Human herpesvirus 6
caaguguuuggugugacauucaa

SEQ ID NO: 322243 - RNA, 12 nt, Human herpesvirus 6
caaguucaucag

SEQ ID NO: 322244 - RNA, 21 nt, Human herpesvirus 6
caauaaaaaauggauuuggua

SEQ ID NO: 322245 - RNA, 14 nt, Human herpesvirus 6
caauaaaaacucaa

SEQ ID NO: 322246 - RNA, 16 nt, Human herpesvirus 6
caauaaaacgaauggu

SEQ ID NO: 322247 - RNA, 21 nt, Human herpesvirus 6
caauaaacaugauuguaauaa

SEQ ID NO: 322248 - RNA, 14 nt, Human herpesvirus 6
caauacaacaauaa

SEQ ID NO: 322249 - RNA, 20 nt, Human herpesvirus 6
caauacgggaaaagaucaag

SEQ ID NO: 322250 - RNA, 20 nt, Human herpesvirus 6
caauacgguuugucucgcaa

SEQ ID NO: 322251 - RNA, 22 nt, Human herpesvirus 6
caauauaugauuuucggauuac

SEQ ID NO: 322252 - RNA, 17 nt, Human herpesvirus 6
caaucagaaaacacuau

SEQ ID NO: 322253 - RNA, 17 nt, Human herpesvirus 6
caauccaugcaacacaa

SEQ ID NO: 322254 - RNA, 23 nt, Human herpesvirus 6
caauccaugcaacacaacaaaca

SEQ ID NO: 322255 - RNA, 19 nt, Human herpesvirus 6
caauccauguucauaggac

SEQ ID NO: 322256 - RNA, 20 nt, Human herpesvirus 6
caaucuaccgagagauuuac

SEQ ID NO: 322257 - RNA, 19 nt, Human herpesvirus 6
caaugcagaacaacagcau

SEQ ID NO: 322258 - RNA, 21 nt, Human herpesvirus 6
caaugcagaacaacagcaugu

SEQ ID NO: 322259 - RNA, 17 nt, Human herpesvirus 6
caauguucaauuacuca

SEQ ID NO: 322260 - RNA, 11 nt, Human herpesvirus 6
caauuagucca

SEQ ID NO: 322261 - RNA, 21 nt, Human herpesvirus 6
caauuaugugucaaguuucac

SEQ ID NO: 322262 - RNA, 17 nt, Human herpesvirus 6
caauuuuauccauccaa

SEQ ID NO: 322263 - RNA, 22 nt, Human herpesvirus 6
caauuuuauccauccaauccaa

SEQ ID NO: 322264 - RNA, 19 nt, Human herpesvirus 6
cacaaaucuggaucaucaa

SEQ ID NO: 322265 - RNA, 14 nt, Human herpesvirus 6
cacaauauuucaca

SEQ ID NO: 322266 - RNA, 15 nt, Human herpesvirus 6
cacaauauuucacau

SEQ ID NO: 322267 - RNA, 16 nt, Human herpesvirus 6
cacaaucuaauacaua

SEQ ID NO: 322268 - RNA, 16 nt, Human herpesvirus 6
cacacacaagaacaga

SEQ ID NO: 322269 - RNA, 21 nt, Human herpesvirus 6
cacacauguauuuauucacuc

SEQ ID NO: 322270 - RNA, 23 nt, Human herpesvirus 6
cacaccacucuguuuuuuugcaa

SEQ ID NO: 322271 - RNA, 12 nt, Human herpesvirus 6
cacacccauggc

SEQ ID NO: 322272 - RNA, 19 nt, Human herpesvirus 6
cacaccuuaaacauguaua

SEQ ID NO: 322273 - RNA, 15 nt, Human herpesvirus 6
cacacgcuuacacac

SEQ ID NO: 322274 - RNA, 13 nt, Human herpesvirus 6
cacacucuuaacu

SEQ ID NO: 322275 - RNA, 19 nt, Human herpesvirus 6
cacacucuuaacuacuucu

SEQ ID NO: 322276 - RNA, 23 nt, Human herpesvirus 6
cacaggacacgacaaaacaauca

SEQ ID NO: 322277 - RNA, 20 nt, Human herpesvirus 6
cacaggauuauaaaaacaca

SEQ ID NO: 322278 - RNA, 14 nt, Human herpesvirus 6
cacagugaaacgga

SEQ ID NO: 322279 - RNA, 23 nt, Human herpesvirus 6
cacauaguuucgaauucuuacca

SEQ ID NO: 322280 - RNA, 14 nt, Human herpesvirus 6
cacauauaugaugc

SEQ ID NO: 322281 - RNA, 17 nt, Human herpesvirus 6
cacauauuguguuguaa

SEQ ID NO: 322282 - RNA, 20 nt, Human herpesvirus 6
cacaucaugauuaucauaga

SEQ ID NO: 322283 - RNA, 23 nt, Human herpesvirus 6
cacaugccaugcaauaggccaua

SEQ ID NO: 322284 - RNA, 19 nt, Human herpesvirus 6
cacauguauuuauucacuc

SEQ ID NO: 322285 - RNA, 21 nt, Human herpesvirus 6
caccaaugacaccgauucaga

SEQ ID NO: 322286 - RNA, 12 nt, Human herpesvirus 6
caccagccggua

SEQ ID NO: 322287 - RNA, 13 nt, Human herpesvirus 6
caccgacgguuaa

SEQ ID NO: 322288 - RNA, 20 nt, Human herpesvirus 6
caccggaugucgacuccucc

SEQ ID NO: 322289 - RNA, 15 nt, Human herpesvirus 6
caccggcuaacccua

SEQ ID NO: 322290 - RNA, 15 nt, Human herpesvirus 6
caccuaauuacaauu

SEQ ID NO: 322291 - RNA, 15 nt, Human herpesvirus 6
caccuuaaacaugua

SEQ ID NO: 322292 - RNA, 13 nt, Human herpesvirus 6
caccuuagacuug

SEQ ID NO: 322293 - RNA, 13 nt, Human herpesvirus 6
caccuuuaucgac

SEQ ID NO: 322294 - RNA, 21 nt, Human herpesvirus 6
cacgaacguagacagucacac

SEQ ID NO: 322295 - RNA, 17 nt, Human herpesvirus 6
cacgauguuaacauaaa

SEQ ID NO: 322296 - RNA, 22 nt, Human herpesvirus 6
cacgcgauggaagaaccaaaga

SEQ ID NO: 322297 - RNA, 15 nt, Human herpesvirus 6
cacgcuaaaaacaga

SEQ ID NO: 322298 - RNA, 16 nt, Human herpesvirus 6
cacgcuaaaaacagac

SEQ ID NO: 322299 - RNA, 22 nt, Human herpesvirus 6
cacgcuggagcagcuuccacgc

SEQ ID NO: 322300 - RNA, 18 nt, Human herpesvirus 6
cacguaaccgaugcugau

SEQ ID NO: 322301 - RNA, 14 nt, Human herpesvirus 6
cacguccucgugcu

SEQ ID NO: 322302 - RNA, 13 nt, Human herpesvirus 6
cacguuauaucua

SEQ ID NO: 322303 - RNA, 14 nt, Human herpesvirus 6
cacguucaggcauu

SEQ ID NO: 322304 - RNA, 20 nt, Human herpesvirus 6
cacguuuugggaaaucuggc

SEQ ID NO: 322305 - RNA, 13 nt, Human herpesvirus 6
cacuagccuacua

SEQ ID NO: 322306 - RNA, 18 nt, Human herpesvirus 6
cacugaaucggaaacuga

SEQ ID NO: 322307 - RNA, 17 nt, Human herpesvirus 6
cacugaccguuguaaga

SEQ ID NO: 322308 - RNA, 16 nt, Human herpesvirus 6
cacugauaacucaccc

SEQ ID NO: 322309 - RNA, 16 nt, Human herpesvirus 6
cacugugaauccagac

SEQ ID NO: 322310 - RNA, 23 nt, Human herpesvirus 6
cacuugaaccaagucaacaacgu

SEQ ID NO: 322311 - RNA, 15 nt, Human herpesvirus 6
cacuugcaaugugau

SEQ ID NO: 322312 - RNA, 16 nt, Human herpesvirus 6
cacuugcaaugugauc

SEQ ID NO: 322313 - RNA, 21 nt, Human herpesvirus 6
cagaaaaaaaucagaauccac

SEQ ID NO: 322314 - RNA, 18 nt, Human herpesvirus 6
cagaaaagcaaacaugca

SEQ ID NO: 322315 - RNA, 16 nt, Human herpesvirus 6
cagaaaaguauagucu

SEQ ID NO: 322316 - RNA, 18 nt, Human herpesvirus 6
cagaaaauguuucaucca

SEQ ID NO: 322317 - RNA, 20 nt, Human herpesvirus 6
cagaaaauguuucauccaaa

SEQ ID NO: 322318 - RNA, 14 nt, Human herpesvirus 6
cagaacaacagcau

SEQ ID NO: 322319 - RNA, 16 nt, Human herpesvirus 6
cagaacaacagcaugu

SEQ ID NO: 322320 - RNA, 18 nt, Human herpesvirus 6
cagaacaacagcauguaa

SEQ ID NO: 322321 - RNA, 14 nt, Human herpesvirus 6
cagaacacauccac

SEQ ID NO: 322322 - RNA, 12 nt, Human herpesvirus 6
cagaacaucuca

SEQ ID NO: 322323 - RNA, 13 nt, Human herpesvirus 6
cagaacaucucag

SEQ ID NO: 322324 - RNA, 20 nt, Human herpesvirus 6
cagaaccaucuguucaauua

SEQ ID NO: 322325 - RNA, 14 nt, Human herpesvirus 6
cagaagacuuuaaa

SEQ ID NO: 322326 - RNA, 23 nt, Human herpesvirus 6
cagaaguccuucaugauauucca

SEQ ID NO: 322327 - RNA, 16 nt, Human herpesvirus 6
cagaauccaccaauga

SEQ ID NO: 322328 - RNA, 18 nt, Human herpesvirus 6
cagaauccaccaaugaca

SEQ ID NO: 322329 - RNA, 23 nt, Human herpesvirus 6
cagaauuuguaaaaaaacauucu

SEQ ID NO: 322330 - RNA, 12 nt, Human herpesvirus 6
cagacagugagu

SEQ ID NO: 322331 - RNA, 16 nt, Human herpesvirus 6
cagacagugagugagu

SEQ ID NO: 322332 - RNA, 17 nt, Human herpesvirus 6
cagacagugagugagua

SEQ ID NO: 322333 - RNA, 20 nt, Human herpesvirus 6
cagacagugagugaguacaa

SEQ ID NO: 322334 - RNA, 21 nt, Human herpesvirus 6
cagacagugagugaguacaag

SEQ ID NO: 322335 - RNA, 14 nt, Human herpesvirus 6
cagacauccagaaa

SEQ ID NO: 322336 - RNA, 14 nt, Human herpesvirus 6
cagacgaaucacau

SEQ ID NO: 322337 - RNA, 16 nt, Human herpesvirus 6
cagacgcugaaaucau

SEQ ID NO: 322338 - RNA, 22 nt, Human herpesvirus 6
cagacggauucaaaaaaaauau

SEQ ID NO: 322339 - RNA, 13 nt, Human herpesvirus 6
cagagacgugacc

SEQ ID NO: 322340 - RNA, 22 nt, Human herpesvirus 6
cagagcaaauuaugguuaucau

SEQ ID NO: 322341 - RNA, 15 nt, Human herpesvirus 6
cagauaaccucacua

SEQ ID NO: 322342 - RNA, 20 nt, Human herpesvirus 6
cagauaaccucacuacugaa

SEQ ID NO: 322343 - RNA, 22 nt, Human herpesvirus 6
cagauaccucauuguuucacuu

SEQ ID NO: 322344 - RNA, 15 nt, Human herpesvirus 6
cagauacuacacaaa

SEQ ID NO: 322345 - RNA, 21 nt, Human herpesvirus 6
cagaucggcguuuugauaacc

SEQ ID NO: 322346 - RNA, 13 nt, Human herpesvirus 6
cagaucuaauuca

SEQ ID NO: 322347 - RNA, 13 nt, Human herpesvirus 6
cagaucuaucaca

SEQ ID NO: 322348 - RNA, 14 nt, Human herpesvirus 6
cagaucuaucacag

SEQ ID NO: 322349 - RNA, 17 nt, Human herpesvirus 6
cagaugucaaguauuca

SEQ ID NO: 322350 - RNA, 14 nt, Human herpesvirus 6
cagauucacugacc

SEQ ID NO: 322351 - RNA, 22 nt, Human herpesvirus 6
cagauugcauaugucuguuaua

SEQ ID NO: 322352 - RNA, 19 nt, Human herpesvirus 6
cagauugcggacaugguga

SEQ ID NO: 322353 - RNA, 20 nt, Human herpesvirus 6
cagauuucuuauuaugugac

SEQ ID NO: 322354 - RNA, 15 nt, Human herpesvirus 6
cagcaaguucaucag

SEQ ID NO: 322355 - RNA, 21 nt, Human herpesvirus 6
cagcaaguugcuaccgcuggg

SEQ ID NO: 322356 - RNA, 19 nt, Human herpesvirus 6
cagcaaucaccaccaacac

SEQ ID NO: 322357 - RNA, 17 nt, Human herpesvirus 6
cagcacauaacugcaua

SEQ ID NO: 322358 - RNA, 21 nt, Human herpesvirus 6
cagcacccuaugcaagcucau

SEQ ID NO: 322359 - RNA, 21 nt, Human herpesvirus 6
cagcagaguccggcgcacgca

SEQ ID NO: 322360 - RNA, 15 nt, Human herpesvirus 6
cagcagaugcuuacc

SEQ ID NO: 322361 - RNA, 22 nt, Human herpesvirus 6
cagcauguuuucuccucaacua

SEQ ID NO: 322362 - RNA, 14 nt, Human herpesvirus 6
cagcauuaacuaca

SEQ ID NO: 322363 - RNA, 17 nt, Human herpesvirus 6
cagccgucgauaauaau

SEQ ID NO: 322364 - RNA, 21 nt, Human herpesvirus 6
cagcgacucccggcccagaga

SEQ ID NO: 322365 - RNA, 17 nt, Human herpesvirus 6
cagcggaccaauccaug

SEQ ID NO: 322366 - RNA, 19 nt, Human herpesvirus 6
cagcuaagaguaacaacua

SEQ ID NO: 322367 - RNA, 14 nt, Human herpesvirus 6
caggaagcgccaua

SEQ ID NO: 322368 - RNA, 17 nt, Human herpesvirus 6
caggaaguuaauugugu

SEQ ID NO: 322369 - RNA, 15 nt, Human herpesvirus 6
caggaauccuauuca

SEQ ID NO: 322370 - RNA, 14 nt, Human herpesvirus 6
caggaauucacucu

SEQ ID NO: 322371 - RNA, 19 nt, Human herpesvirus 6
caggacagcuucuauuacu

SEQ ID NO: 322372 - RNA, 22 nt, Human herpesvirus 6
caggaugaagaaaaaaacugug

SEQ ID NO: 322373 - RNA, 22 nt, Human herpesvirus 6
caggauucccuucagacaucca

SEQ ID NO: 322374 - RNA, 20 nt, Human herpesvirus 6
caggcaaccgccgugcuucu

SEQ ID NO: 322375 - RNA, 21 nt, Human herpesvirus 6
caggcauuaaacugaggcaaa

SEQ ID NO: 322376 - RNA, 15 nt, Human herpesvirus 6
cagggucaaaaaacu

SEQ ID NO: 322377 - RNA, 17 nt, Human herpesvirus 6
cagguagaguugcguua

SEQ ID NO: 322378 - RNA, 14 nt, Human herpesvirus 6
cagguugccaauaa

SEQ ID NO: 322379 - RNA, 14 nt, Human herpesvirus 6
caguagauuaccua

SEQ ID NO: 322380 - RNA, 18 nt, Human herpesvirus 6
caguagcacaaaccaaaa

SEQ ID NO: 322381 - RNA, 15 nt, Human herpesvirus 6
caguaugucuccaaa

SEQ ID NO: 322382 - RNA, 22 nt, Human herpesvirus 6
cagucuacacacacgccgguua

SEQ ID NO: 322383 - RNA, 13 nt, Human herpesvirus 6
cagucugacaugg

SEQ ID NO: 322384 - RNA, 21 nt, Human herpesvirus 6
cagugaaggcugccaugaaac

SEQ ID NO: 322385 - RNA, 16 nt, Human herpesvirus 6
cagugcuuaugacugg

SEQ ID NO: 322386 - RNA, 14 nt, Human herpesvirus 6
auaacgagaucuac

SEQ ID NO: 322387 - RNA, 15 nt, Human herpesvirus 6
auaagaaccaacaga

SEQ ID NO: 322388 - RNA, 19 nt, Human herpesvirus 6
auaagacacugauaacuca

SEQ ID NO: 322389 - RNA, 18 nt, Human herpesvirus 6
auaagauguugcaauaaa

SEQ ID NO: 322390 - RNA, 19 nt, Human herpesvirus 6
auaagcaaauguaacuuuu

SEQ ID NO: 322391 - RNA, 16 nt, Human herpesvirus 6
auaagccuaagaaauu

SEQ ID NO: 322392 - RNA, 10 nt, Human herpesvirus 6
auaaguacau

SEQ ID NO: 322393 - RNA, 12 nt, Human herpesvirus 6
auaaguacauag

SEQ ID NO: 322394 - RNA, 15 nt, Human herpesvirus 6
auaaguuaauuccag

SEQ ID NO: 322395 - RNA, 14 nt, Human herpesvirus 6
auaauaaaacaaga

SEQ ID NO: 322396 - RNA, 15 nt, Human herpesvirus 6
auaauaaacauuuau

SEQ ID NO: 322397 - RNA, 19 nt, Human herpesvirus 6
auaauaauggcaugcauua

SEQ ID NO: 322398 - RNA, 23 nt, Human herpesvirus 6
auaaucuacgcauugacggguau

SEQ ID NO: 322399 - RNA, 13 nt, Human herpesvirus 6
auaauggcaugca

SEQ ID NO: 322400 - RNA, 21 nt, Human herpesvirus 6
auaauuccgacuguguuacaa

SEQ ID NO: 322401 - RNA, 17 nt, Human herpesvirus 6
auaauugauacggcagc

SEQ ID NO: 322402 - RNA, 20 nt, Human herpesvirus 6
auaauuuggguuguguugca

SEQ ID NO: 322403 - RNA, 20 nt, Human herpesvirus 6
auaauuuguuuuuccauaaa

SEQ ID NO: 322404 - RNA, 16 nt, Human herpesvirus 6
auacaaaaugaccuca

SEQ ID NO: 322405 - RNA, 11 nt, Human herpesvirus 6
auacaauaaca

SEQ ID NO: 322406 - RNA, 14 nt, Human herpesvirus 6
auacagcaccauca

SEQ ID NO: 322407 - RNA, 17 nt, Human herpesvirus 6
auacauauaaaagcuaa

SEQ ID NO: 322408 - RNA, 15 nt, Human herpesvirus 6
auacaucaacaaaca

SEQ ID NO: 322409 - RNA, 18 nt, Human herpesvirus 6
auacaucccguaugaaau

SEQ ID NO: 322410 - RNA, 21 nt, Human herpesvirus 6
auacauuccuuaagaaugaaa

SEQ ID NO: 322411 - RNA, 15 nt, Human herpesvirus 6
auacauucucguagu

SEQ ID NO: 322412 - RNA, 18 nt, Human herpesvirus 6
auacccgaaguucucuca

SEQ ID NO: 322413 - RNA, 21 nt, Human herpesvirus 6
auaccgaaaucuccugagaag

SEQ ID NO: 322414 - RNA, 18 nt, Human herpesvirus 6
auaccgaucccagcucac

SEQ ID NO: 322415 - RNA, 15 nt, Human herpesvirus 6
auaccguuuacuuaa

SEQ ID NO: 322416 - RNA, 19 nt, Human herpesvirus 6
auaccucauuguuucacuu

SEQ ID NO: 322417 - RNA, 22 nt, Human herpesvirus 6
auacgaaccucaugaguguuua

SEQ ID NO: 322418 - RNA, 17 nt, Human herpesvirus 6
auacguauauuguguac

SEQ ID NO: 322419 - RNA, 22 nt, Human herpesvirus 6
auacgugucggugauagcgucu

SEQ ID NO: 322420 - RNA, 12 nt, Human herpesvirus 6
auacuacacaaa

SEQ ID NO: 322421 - RNA, 13 nt, Human herpesvirus 6
auacuagcuaaaa

SEQ ID NO: 322422 - RNA, 19 nt, Human herpesvirus 6
auacugcagcucgacucca

SEQ ID NO: 322423 - RNA, 20 nt, Human herpesvirus 6
auacugguuuacagcacuuu

SEQ ID NO: 322424 - RNA, 14 nt, Human herpesvirus 6
auacuuucaagugu

SEQ ID NO: 322425 - RNA, 18 nt, Human herpesvirus 6
auagaauuaagaugucuc

SEQ ID NO: 322426 - RNA, 23 nt, Human herpesvirus 6
auagaccgcuuuuaugagaacaa

SEQ ID NO: 322427 - RNA, 21 nt, Human herpesvirus 6
auagacgaaagacguuuucuu

SEQ ID NO: 322428 - RNA, 17 nt, Human herpesvirus 6
auagagcaacucaucaa

SEQ ID NO: 322429 - RNA, 22 nt, Human herpesvirus 6
auagauuguuauuagugauuau

SEQ ID NO: 322430 - RNA, 15 nt, Human herpesvirus 6
auagcaggcauugac

SEQ ID NO: 322431 - RNA, 17 nt, Human herpesvirus 6
auagcaggcauugacua

SEQ ID NO: 322432 - RNA, 21 nt, Human herpesvirus 6
auagcaggcauugacuauuaa

SEQ ID NO: 322433 - RNA, 24 nt, Human herpesvirus 6
auagcauucuguucuucaucauca

SEQ ID NO: 322434 - RNA, 16 nt, Human herpesvirus 6
auagcguucauuccca

SEQ ID NO: 322435 - RNA, 19 nt, Human herpesvirus 6
auagcuguccaugagauuu

SEQ ID NO: 322436 - RNA, 20 nt, Human herpesvirus 6
auaggaaucuuguguucuau

SEQ ID NO: 322437 - RNA, 22 nt, Human herpesvirus 6
auaggaaucuuguguucuauca

SEQ ID NO: 322438 - RNA, 23 nt, Human herpesvirus 6
auaggauaacugagcggaaucua

SEQ ID NO: 322439 - RNA, 12 nt, Human herpesvirus 6
auaggccauaac

SEQ ID NO: 322440 - RNA, 17 nt, Human herpesvirus 6
auagguguuugcagaug

SEQ ID NO: 322441 - RNA, 14 nt, Human herpesvirus 6
auagucaaguaugu

SEQ ID NO: 322442 - RNA, 13 nt, Human herpesvirus 6
auagucaauguug

SEQ ID NO: 322443 - RNA, 19 nt, Human herpesvirus 6
auagucuagcaaccuaaug

SEQ ID NO: 322444 - RNA, 15 nt, Human herpesvirus 6
auaguuacuuugaug

SEQ ID NO: 322445 - RNA, 21 nt, Human herpesvirus 6
auaguucuucaacauaucacu

SEQ ID NO: 322446 - RNA, 15 nt, Human herpesvirus 6
auauaaaagcuaaau

SEQ ID NO: 322447 - RNA, 20 nt, Human herpesvirus 6
auauaaauccgauagccaua

SEQ ID NO: 322448 - RNA, 14 nt, Human herpesvirus 6
auauaacuuuacau

SEQ ID NO: 322449 - RNA, 21 nt, Human herpesvirus 6
auauacauuuguacacuuuau

SEQ ID NO: 322450 - RNA, 14 nt, Human herpesvirus 6
auauacuuacuuga

SEQ ID NO: 322451 - RNA, 18 nt, Human herpesvirus 6
auauagacauugcuuucu

SEQ ID NO: 322452 - RNA, 13 nt, Human herpesvirus 6
auauaucaaagau

SEQ ID NO: 322453 - RNA, 14 nt, Human herpesvirus 6
auauaucuugaaau

SEQ ID NO: 322454 - RNA, 17 nt, Human herpesvirus 6
auauauuggcaugugaa

SEQ ID NO: 322455 - RNA, 13 nt, Human herpesvirus 6
auauauugugauc

SEQ ID NO: 322456 - RNA, 14 nt, Human herpesvirus 6
auauauuugcauac

SEQ ID NO: 322457 - RNA, 17 nt, Human herpesvirus 6
auaucaauuccugugac

SEQ ID NO: 322458 - RNA, 20 nt, Human herpesvirus 6
auaucaucuuuuucuucagg

SEQ ID NO: 322459 - RNA, 14 nt, Human herpesvirus 6
auauccugucgcac

SEQ ID NO: 322460 - RNA, 19 nt, Human herpesvirus 6
auaucgaaauaacgagauc

SEQ ID NO: 322461 - RNA, 15 nt, Human herpesvirus 6
auaucgagccaaaga

SEQ ID NO: 322462 - RNA, 23 nt, Human herpesvirus 6
auaucgagccaaagaaacagaua

SEQ ID NO: 322463 - RNA, 15 nt, Human herpesvirus 6
auaucgauucuguaa

SEQ ID NO: 322464 - RNA, 21 nt, Human herpesvirus 6
auaucuauuuaaaauggacuu

SEQ ID NO: 322465 - RNA, 16 nt, Human herpesvirus 6
auaucucaaauuuucc

SEQ ID NO: 322466 - RNA, 21 nt, Human herpesvirus 6
auaugaggcgcuugaaaccac

SEQ ID NO: 322467 - RNA, 19 nt, Human herpesvirus 6
auaugcaaacugacuguac

SEQ ID NO: 322468 - RNA, 16 nt, Human herpesvirus 6
auaugcagacugcuuc

SEQ ID NO: 322469 - RNA, 22 nt, Human herpesvirus 6
auaugcgucagaccuccgucaa

SEQ ID NO: 322470 - RNA, 20 nt, Human herpesvirus 6
auaugcuuauacuguuguaa

SEQ ID NO: 322471 - RNA, 14 nt, Human herpesvirus 6
auauggaugaucac

SEQ ID NO: 322472 - RNA, 21 nt, Human herpesvirus 6
auauguaaauaaacaccagca

SEQ ID NO: 322473 - RNA, 21 nt, Human herpesvirus 6
auauuaauuacauauagucaa

SEQ ID NO: 322474 - RNA, 22 nt, Human herpesvirus 6
auauuaauuacauauagucaau

SEQ ID NO: 322475 - RNA, 23 nt, Human herpesvirus 6
auauuagccauuuuuuucuuaca

SEQ ID NO: 322476 - RNA, 13 nt, Human herpesvirus 6
auauugcugcuag

SEQ ID NO: 322477 - RNA, 22 nt, Human herpesvirus 6
auauuggcaugugaacggagau

SEQ ID NO: 322478 - RNA, 16 nt, Human herpesvirus 6
auauuguguaacucuu

SEQ ID NO: 322479 - RNA, 18 nt, Human herpesvirus 6
auauuuccaugacuguga

SEQ ID NO: 322480 - RNA, 16 nt, Human herpesvirus 6
auauuugcacuuccuc

SEQ ID NO: 322481 - RNA, 23 nt, Human herpesvirus 6
auauuugcacuuccucacgcaaa

SEQ ID NO: 322482 - RNA, 19 nt, Human herpesvirus 6
auauuuuguagaguguuau

SEQ ID NO: 322483 - RNA, 11 nt, Human herpesvirus 6
aucaaacucac

SEQ ID NO: 322484 - RNA, 16 nt, Human herpesvirus 6
aucaaagaacaaaauc

SEQ ID NO: 322485 - RNA, 19 nt, Human herpesvirus 6
aucaaagacgauugcuuua

SEQ ID NO: 322486 - RNA, 18 nt, Human herpesvirus 6
aucaaagauguacucauc

SEQ ID NO: 322487 - RNA, 20 nt, Human herpesvirus 6
aucaaauccucuacguauga

SEQ ID NO: 322488 - RNA, 16 nt, Human herpesvirus 6
aucaacaaacacguga

SEQ ID NO: 322489 - RNA, 18 nt, Human herpesvirus 6
aucaacagauggugcgau

SEQ ID NO: 322490 - RNA, 14 nt, Human herpesvirus 6
aucaacauucccuu

SEQ ID NO: 322491 - RNA, 17 nt, Human herpesvirus 6
aucaacuacauuaacag

SEQ ID NO: 322492 - RNA, 17 nt, Human herpesvirus 6
aucaacuauuuaacauc

SEQ ID NO: 322493 - RNA, 18 nt, Human herpesvirus 6
aucaacugacuuauaagu

SEQ ID NO: 322494 - RNA, 15 nt, Human herpesvirus 6
aucaagcaucucuuc

SEQ ID NO: 322495 - RNA, 14 nt, Human herpesvirus 6
aucaagggugcuga

SEQ ID NO: 322496 - RNA, 21 nt, Human herpesvirus 6
aucacaaaguuuaaguuuuca

SEQ ID NO: 322497 - RNA, 20 nt, Human herpesvirus 6
aucacaccaauggucacaca

SEQ ID NO: 322498 - RNA, 20 nt, Human herpesvirus 6
aucaccgauaaaaacucaca

SEQ ID NO: 322499 - RNA, 22 nt, Human herpesvirus 6
aucaccgauaaaaacucacaca

SEQ ID NO: 322500 - RNA, 16 nt, Human herpesvirus 6
aucagaauccaccaau

SEQ ID NO: 322501 - RNA, 21 nt, Human herpesvirus 6
aucagaauccaccaaugacac

SEQ ID NO: 322502 - RNA, 14 nt, Human herpesvirus 6
agacugcuucuuag

SEQ ID NO: 322503 - RNA, 15 nt, Human herpesvirus 6
agacuuggugaugau

SEQ ID NO: 322504 - RNA, 16 nt, Human herpesvirus 6
agacuuggugaugaug

SEQ ID NO: 322505 - RNA, 13 nt, Human herpesvirus 6
agacuuuacuucu

SEQ ID NO: 322506 - RNA, 15 nt, Human herpesvirus 6
agagaacgagcuuag

SEQ ID NO: 322507 - RNA, 23 nt, Human herpesvirus 6
agagaagcgcggauagcguucau

SEQ ID NO: 322508 - RNA, 23 nt, Human herpesvirus 6
agagaccaauuuaugucauuuca

SEQ ID NO: 322509 - RNA, 14 nt, Human herpesvirus 6
agagagauuaacuc

SEQ ID NO: 322510 - RNA, 16 nt, Human herpesvirus 6
agagaguggggacaaa

SEQ ID NO: 322511 - RNA, 20 nt, Human herpesvirus 6
agagauaaaaagagaggaaa

SEQ ID NO: 322512 - RNA, 19 nt, Human herpesvirus 6
agagauagaccuugaucua

SEQ ID NO: 322513 - RNA, 22 nt, Human herpesvirus 6
agagaucguaccggucugcaac

SEQ ID NO: 322514 - RNA, 21 nt, Human herpesvirus 6
cagugucguuagaauguggau

SEQ ID NO: 322515 - RNA, 16 nt, Human herpesvirus 6
cagugugaucaucaca

SEQ ID NO: 322516 - RNA, 13 nt, Human herpesvirus 6
caguuaugugcug

SEQ ID NO: 322517 - RNA, 22 nt, Human herpesvirus 6
caguuccggaagggcucuauua

SEQ ID NO: 322518 - RNA, 23 nt, Human herpesvirus 6
caguuuaccuaauaauuacaaua

SEQ ID NO: 322519 - RNA, 17 nt, Human herpesvirus 6
caguuuaccuauuuaca

SEQ ID NO: 322520 - RNA, 18 nt, Human herpesvirus 6
caguuuaccuauuuacaa

SEQ ID NO: 322521 - RNA, 18 nt, Human herpesvirus 6
caguuucucgaaaaaaca

SEQ ID NO: 322522 - RNA, 17 nt, Human herpesvirus 6
cauaaaaaaucuuguca

SEQ ID NO: 322523 - RNA, 19 nt, Human herpesvirus 6
cauaaaaaaucuugucacu

SEQ ID NO: 322524 - RNA, 17 nt, Human herpesvirus 6
cauaacuggaaucauga

SEQ ID NO: 322525 - RNA, 16 nt, Human herpesvirus 6
cauaaguuaauuccag

SEQ ID NO: 322526 - RNA, 20 nt, Human herpesvirus 6
cauaaucugcguuccucucu

SEQ ID NO: 322527 - RNA, 23 nt, Human herpesvirus 6
cauaauucggucaccuacauucg

SEQ ID NO: 322528 - RNA, 17 nt, Human herpesvirus 6
cauaauugcacccuauc

SEQ ID NO: 322529 - RNA, 17 nt, Human herpesvirus 6
cauacaaaaugaccuca

SEQ ID NO: 322530 - RNA, 15 nt, Human herpesvirus 6
cauacacacccagca

SEQ ID NO: 322531 - RNA, 20 nt, Human herpesvirus 6
cauacccgaaguucucucac

SEQ ID NO: 322532 - RNA, 16 nt, Human herpesvirus 6
cauacguuugccaaag

SEQ ID NO: 322533 - RNA, 18 nt, Human herpesvirus 6
cauacguuugccaaagcu

SEQ ID NO: 322534 - RNA, 13 nt, Human herpesvirus 6
cauacucaaccca

SEQ ID NO: 322535 - RNA, 15 nt, Human herpesvirus 6
cauacucaacccaaa

SEQ ID NO: 322536 - RNA, 14 nt, Human herpesvirus 6
cauagaaauuacaa

SEQ ID NO: 322537 - RNA, 15 nt, Human herpesvirus 6
cauagaaauuacaag

SEQ ID NO: 322538 - RNA, 14 nt, Human herpesvirus 6
cauagacaaaccag

SEQ ID NO: 322539 - RNA, 13 nt, Human herpesvirus 6
cauagcagcaaua

SEQ ID NO: 322540 - RNA, 20 nt, Human herpesvirus 6
cauaggaauucuuauuuacc

SEQ ID NO: 322541 - RNA, 20 nt, Human herpesvirus 6
cauauaaaagcuaaaucaaa

SEQ ID NO: 322542 - RNA, 23 nt, Human herpesvirus 6
cauauaaaagcuaaaucaaauga

SEQ ID NO: 322543 - RNA, 19 nt, Human herpesvirus 6
cauauaaauccgauagcca

SEQ ID NO: 322544 - RNA, 16 nt, Human herpesvirus 6
cauauagucaauguug

SEQ ID NO: 322545 - RNA, 17 nt, Human herpesvirus 6
cauauagucaauguugu

SEQ ID NO: 322546 - RNA, 17 nt, Human herpesvirus 6
cauauauuggcauguga

SEQ ID NO: 322547 - RNA, 20 nt, Human herpesvirus 6
cauaugucuguuauaacaca

SEQ ID NO: 322548 - RNA, 18 nt, Human herpesvirus 6
cauauuauuaacaaugaa

SEQ ID NO: 322549 - RNA, 20 nt, Human herpesvirus 6
caucaaaucggacaaugcag

SEQ ID NO: 322550 - RNA, 15 nt, Human herpesvirus 6
caucaacuacauuaa

SEQ ID NO: 322551 - RNA, 17 nt, Human herpesvirus 6
caucaacugacuuauaa

SEQ ID NO: 322552 - RNA, 23 nt, Human herpesvirus 6
caucaaucucuaugagacuguuu

SEQ ID NO: 322553 - RNA, 22 nt, Human herpesvirus 6
caucacauuauaagacacugau

SEQ ID NO: 322554 - RNA, 18 nt, Human herpesvirus 6
caucaccgauaaaaacuc

SEQ ID NO: 322555 - RNA, 17 nt, Human herpesvirus 6
caucagaauccagaaac

SEQ ID NO: 322556 - RNA, 22 nt, Human herpesvirus 6
caucaguaacaccguccuuccu

SEQ ID NO: 322557 - RNA, 22 nt, Human herpesvirus 6
caucaugauuaucauagacaaa

SEQ ID NO: 322558 - RNA, 14 nt, Human herpesvirus 6
caucauuccaggga

SEQ ID NO: 322559 - RNA, 21 nt, Human herpesvirus 6
cauccagaaaagcaaacaugc

SEQ ID NO: 322560 - RNA, 22 nt, Human herpesvirus 6
caucccccuccccggagcacac

SEQ ID NO: 322561 - RNA, 20 nt, Human herpesvirus 6
caucccuaugucgaugugga

SEQ ID NO: 322562 - RNA, 14 nt, Human herpesvirus 6
cauccgucauacaa

SEQ ID NO: 322563 - RNA, 13 nt, Human herpesvirus 6
cauccuaacaaga

SEQ ID NO: 322564 - RNA, 22 nt, Human herpesvirus 6
cauccucgaauaauuauccucu

SEQ ID NO: 322565 - RNA, 15 nt, Human herpesvirus 6
caucguuuguugaau

SEQ ID NO: 322566 - RNA, 17 nt, Human herpesvirus 6
caucuauuauaagcaaa

SEQ ID NO: 322567 - RNA, 18 nt, Human herpesvirus 6
caucuauuauaagcaaac

SEQ ID NO: 322568 - RNA, 23 nt, Human herpesvirus 6
caucuauuauaagcaaacaugua

SEQ ID NO: 322569 - RNA, 15 nt, Human herpesvirus 6
caucucaaaaaacau

SEQ ID NO: 322570 - RNA, 22 nt, Human herpesvirus 6
caucucaaaaaacauauaaaga

SEQ ID NO: 322571 - RNA, 15 nt, Human herpesvirus 6
caucucgugcaaaag

SEQ ID NO: 322572 - RNA, 18 nt, Human herpesvirus 6
caucugcaaaaaacaaau

SEQ ID NO: 322573 - RNA, 16 nt, Human herpesvirus 6
caucugccauaucaca

SEQ ID NO: 322574 - RNA, 13 nt, Human herpesvirus 6
caucuuaccuuca

SEQ ID NO: 322575 - RNA, 14 nt, Human herpesvirus 6
caucuuaccuucaa

SEQ ID NO: 322576 - RNA, 22 nt, Human herpesvirus 6
caucuuuuucuucaggugucuc

SEQ ID NO: 322577 - RNA, 14 nt, Human herpesvirus 6
caugaaacucuuug

SEQ ID NO: 322578 - RNA, 12 nt, Human herpesvirus 6
caugaauuccau

SEQ ID NO: 322579 - RNA, 22 nt, Human herpesvirus 6
caugagcguaagaauuaauguc

SEQ ID NO: 322580 - RNA, 18 nt, Human herpesvirus 6
caugaucucacgucacag

SEQ ID NO: 322581 - RNA, 13 nt, Human herpesvirus 6
caugcaacacaac

SEQ ID NO: 322582 - RNA, 19 nt, Human herpesvirus 6
caugcaauaggccauaacg

SEQ ID NO: 322583 - RNA, 21 nt, Human herpesvirus 6
caugcauaucguggaauggcu

SEQ ID NO: 322584 - RNA, 20 nt, Human herpesvirus 6
caugcauugcgagauuguaa

SEQ ID NO: 322585 - RNA, 15 nt, Human herpesvirus 6
caugcguuguguuac

SEQ ID NO: 322586 - RNA, 17 nt, Human herpesvirus 6
caugcuaauaaaauaua

SEQ ID NO: 322587 - RNA, 13 nt, Human herpesvirus 6
caugguccacaga

SEQ ID NO: 322588 - RNA, 13 nt, Human herpesvirus 6
cauggugaaagac

SEQ ID NO: 322589 - RNA, 14 nt, Human herpesvirus 6
cauguaacuaagca

SEQ ID NO: 322590 - RNA, 16 nt, Human herpesvirus 6
cauguauuuauucacu

SEQ ID NO: 322591 - RNA, 22 nt, Human herpesvirus 6
cauguguagcaucuuaccuuca

SEQ ID NO: 322592 - RNA, 23 nt, Human herpesvirus 6
cauguguagcaucuuaccuucaa

SEQ ID NO: 322593 - RNA, 17 nt, Human herpesvirus 6
cauuaaacugaggcaaa

SEQ ID NO: 322594 - RNA, 16 nt, Human herpesvirus 6
cauucaacauuccaac

SEQ ID NO: 322595 - RNA, 12 nt, Human herpesvirus 6
cauucacauaag

SEQ ID NO: 322596 - RNA, 16 nt, Human herpesvirus 6
cauuccucguucuacc

SEQ ID NO: 322597 - RNA, 15 nt, Human herpesvirus 6
cauucucguugaaua

SEQ ID NO: 322598 - RNA, 18 nt, Human herpesvirus 6
cauuguauagucuaauca

SEQ ID NO: 322599 - RNA, 16 nt, Human herpesvirus 6
cauuguauauguguua

SEQ ID NO: 322600 - RNA, 22 nt, Human herpesvirus 6
cauugugugggguguguaugcg

SEQ ID NO: 322601 - RNA, 21 nt, Human herpesvirus 6
cauuuaauaaagaacauguga

SEQ ID NO: 322602 - RNA, 17 nt, Human herpesvirus 6
cauuucaaauacaccuc

SEQ ID NO: 322603 - RNA, 21 nt, Human herpesvirus 6
cauuuccggagauuaaaacau

SEQ ID NO: 322604 - RNA, 18 nt, Human herpesvirus 6
cauuucuauggaucugag

SEQ ID NO: 322605 - RNA, 20 nt, Human herpesvirus 6
cauuucuugguuguguauau

SEQ ID NO: 322606 - RNA, 16 nt, Human herpesvirus 6
cauuugcugaugcgau

SEQ ID NO: 322607 - RNA, 12 nt, Human herpesvirus 6
ccaaaagauuac

SEQ ID NO: 322608 - RNA, 19 nt, Human herpesvirus 6
ccaaacagagaaggguaug

SEQ ID NO: 322609 - RNA, 19 nt, Human herpesvirus 6
ccaaacuacggaaaaucuc

SEQ ID NO: 322610 - RNA, 14 nt, Human herpesvirus 6
ccaaagacauucaa

SEQ ID NO: 322611 - RNA, 19 nt, Human herpesvirus 6
ccaaagacauucaacauuc

SEQ ID NO: 322612 - RNA, 21 nt, Human herpesvirus 6
ccaaagacauucaacauucca

SEQ ID NO: 322613 - RNA, 16 nt, Human herpesvirus 6
ccaaaggaaaccaccg

SEQ ID NO: 322614 - RNA, 22 nt, Human herpesvirus 6
ccaaaggcacggauuuaaugcg

SEQ ID NO: 322615 - RNA, 21 nt, Human herpesvirus 6
ccaaaguauuggugcaucagu

SEQ ID NO: 322616 - RNA, 16 nt, Human herpesvirus 6
ccaaauacacuuucau

SEQ ID NO: 322617 - RNA, 20 nt, Human herpesvirus 6
ccaacgaaaagcaucucaaa

SEQ ID NO: 322618 - RNA, 17 nt, Human herpesvirus 6
ccaacgcuaaauauauc

SEQ ID NO: 322619 - RNA, 21 nt, Human herpesvirus 6
ccaacggccuuucuguuuuaa

SEQ ID NO: 322620 - RNA, 22 nt, Human herpesvirus 6
ccaacucgacuaaaagacguuu

SEQ ID NO: 322621 - RNA, 19 nt, Human herpesvirus 6
ccaagacauguacaucaac

SEQ ID NO: 322622 - RNA, 17 nt, Human herpesvirus 6
ccaaggaaagacaugca

SEQ ID NO: 322623 - RNA, 13 nt, Human herpesvirus 6
ccaauaaaauauc

SEQ ID NO: 322624 - RNA, 22 nt, Human herpesvirus 6
ccaauccaugcaacacaacaaa

SEQ ID NO: 322625 - RNA, 14 nt, Human herpesvirus 6
ccaaugacuacuaa

SEQ ID NO: 322626 - RNA, 15 nt, Human herpesvirus 6
ccaaugacuacuaaa

SEQ ID NO: 322627 - RNA, 14 nt, Human herpesvirus 6
ccaaugauucuuaa

SEQ ID NO: 322628 - RNA, 17 nt, Human herpesvirus 6
ccaauuaacacauuuua

SEQ ID NO: 322629 - RNA, 23 nt, Human herpesvirus 6
ccacaccaucuucagcucaaaca

SEQ ID NO: 322630 - RNA, 15 nt, Human herpesvirus 6
ccacagcagcagcau

SEQ ID NO: 322631 - RNA, 13 nt, Human herpesvirus 6
ccacauguguauu

SEQ ID NO: 322632 - RNA, 17 nt, Human herpesvirus 6
ccaccaaugacaccgau

SEQ ID NO: 322633 - RNA, 11 nt, Human herpesvirus 6
ccaccagagac

SEQ ID NO: 322634 - RNA, 15 nt, Human herpesvirus 6
ccacccaucuccuca

SEQ ID NO: 322635 - RNA, 21 nt, Human herpesvirus 6
ccaccgagauccccaagagga

SEQ ID NO: 322636 - RNA, 15 nt, Human herpesvirus 6
ccaccuaauaaacug

SEQ ID NO: 322637 - RNA, 13 nt, Human herpesvirus 6
ccacggaagaaga

SEQ ID NO: 322638 - RNA, 15 nt, Human herpesvirus 6
ccacggggauuuagu

SEQ ID NO: 322639 - RNA, 13 nt, Human herpesvirus 6
ccacguacuauuu

SEQ ID NO: 322640 - RNA, 17 nt, Human herpesvirus 6
ccacugcggaguuuuau

SEQ ID NO: 322641 - RNA, 22 nt, Human herpesvirus 6
ccagagaaaauuuuuuacauca

SEQ ID NO: 322642 - RNA, 18 nt, Human herpesvirus 6
ccagauacauaaacaccc

SEQ ID NO: 322643 - RNA, 13 nt, Human herpesvirus 6
ccagauacuacac

SEQ ID NO: 322644 - RNA, 17 nt, Human herpesvirus 6
ccagauacuacacaaac

SEQ ID NO: 322645 - RNA, 20 nt, Human herpesvirus 6
ccagauacuacacaaacgaa

SEQ ID NO: 322646 - RNA, 15 nt, Human herpesvirus 6
ccagauguguacaac

SEQ ID NO: 322647 - RNA, 12 nt, Human herpesvirus 6
ccagcauguuuu

SEQ ID NO: 322648 - RNA, 19 nt, Human herpesvirus 6
ccaggucuuauauuucaga

SEQ ID NO: 322649 - RNA, 19 nt, Human herpesvirus 6
ccaguaaaucuucauuaaa

SEQ ID NO: 322650 - RNA, 20 nt, Human herpesvirus 6
ccaguaaaucuucauuaaaa

SEQ ID NO: 322651 - RNA, 16 nt, Human herpesvirus 6
ccaguagcacaaacca

SEQ ID NO: 322652 - RNA, 18 nt, Human herpesvirus 6
ccagugcuuuaaucacaa

SEQ ID NO: 322653 - RNA, 18 nt, Human herpesvirus 6
ccaguguggauaucucaa

SEQ ID NO: 322654 - RNA, 20 nt, Human herpesvirus 6
ccaguuaauaagauguugca

SEQ ID NO: 322655 - RNA, 21 nt, Human herpesvirus 6
ccaguuaauaagauguugcaa

SEQ ID NO: 322656 - RNA, 23 nt, Human herpesvirus 6
ccaguuuggauucaggcuuuaac

SEQ ID NO: 322657 - RNA, 16 nt, Human herpesvirus 6
ccauaaguuaauucca

SEQ ID NO: 322658 - RNA, 12 nt, Human herpesvirus 6
ccauaauggaag

SEQ ID NO: 322659 - RNA, 18 nt, Human herpesvirus 6
ccauaccguuuacuuaaa

SEQ ID NO: 322660 - RNA, 22 nt, Human herpesvirus 6
ccauacggucgaaugagcucau

SEQ ID NO: 322661 - RNA, 20 nt, Human herpesvirus 6
ccaucaguaugccauaaaga

SEQ ID NO: 322662 - RNA, 14 nt, Human herpesvirus 6
ccaugacgauucaa

SEQ ID NO: 322663 - RNA, 20 nt, Human herpesvirus 6
ccaugacugugagguuauuu

SEQ ID NO: 322664 - RNA, 16 nt, Human herpesvirus 6
ccauggaaaacaaaga

SEQ ID NO: 322665 - RNA, 13 nt, Human herpesvirus 6
ccauguguauauu

SEQ ID NO: 322666 - RNA, 14 nt, Human herpesvirus 6
ccauuaaauccgau

SEQ ID NO: 322667 - RNA, 14 nt, Human herpesvirus 6
ccauucaacauccu

SEQ ID NO: 322668 - RNA, 16 nt, Human herpesvirus 6
ccauuuugaaaaaaca

SEQ ID NO: 322669 - RNA, 23 nt, Human herpesvirus 6
cccaagaacgggaugacuggcca

SEQ ID NO: 322670 - RNA, 15 nt, Human herpesvirus 6
cccaagaggauccau

SEQ ID NO: 322671 - RNA, 20 nt, Human herpesvirus 6
cccaaguucaucagcauuaa

SEQ ID NO: 322672 - RNA, 23 nt, Human herpesvirus 6
cccacgguggccuggcacggugc

SEQ ID NO: 322673 - RNA, 22 nt, Human herpesvirus 6
cccagagaaaauuuuuuacauc

SEQ ID NO: 322674 - RNA, 21 nt, Human herpesvirus 6
cccagagacgguguuuucauc

SEQ ID NO: 322675 - RNA, 14 nt, Human herpesvirus 6
cccagauacauaaa

SEQ ID NO: 322676 - RNA, 17 nt, Human herpesvirus 6
cccagcgggcuccgucg

SEQ ID NO: 322677 - RNA, 16 nt, Human herpesvirus 6
cccagcugaaauagac

SEQ ID NO: 322678 - RNA, 14 nt, Human herpesvirus 6
cccauauuguguaa

SEQ ID NO: 322679 - RNA, 16 nt, Human herpesvirus 6
cccaugacgauucaaa

SEQ ID NO: 322680 - RNA, 15 nt, Human herpesvirus 6
cccaugucuugccuc

SEQ ID NO: 322681 - RNA, 17 nt, Human herpesvirus 6
cccauuccuagaggugc

SEQ ID NO: 322682 - RNA, 23 nt, Human herpesvirus 6
cccauuuccggaguugcagugug

SEQ ID NO: 322683 - RNA, 15 nt, Human herpesvirus 6
ccccggaguacacgu

SEQ ID NO: 322684 - RNA, 20 nt, Human herpesvirus 6
ccccugggaaaagggugaca

SEQ ID NO: 322685 - RNA, 14 nt, Human herpesvirus 6
ccccugucugugau

SEQ ID NO: 322686 - RNA, 13 nt, Human herpesvirus 6
cccgaaauaacac

SEQ ID NO: 322687 - RNA, 21 nt, Human herpesvirus 6
cccgacaauguaaaaguugug

SEQ ID NO: 322688 - RNA, 20 nt, Human herpesvirus 6
cccgauauaucgugauccaa

SEQ ID NO: 322689 - RNA, 13 nt, Human herpesvirus 6
cccggaaauuuca

SEQ ID NO: 322690 - RNA, 22 nt, Human herpesvirus 6
cccuaucgauuugggcuuuauu

SEQ ID NO: 322691 - RNA, 22 nt, Human herpesvirus 6
ccgaggggcggauccgcuccgc

SEQ ID NO: 322692 - RNA, 14 nt, Human herpesvirus 6
cuauuuaacaucca

SEQ ID NO: 322693 - RNA, 15 nt, Human herpesvirus 6
cuauuugacaauaaa

SEQ ID NO: 322694 - RNA, 22 nt, Human herpesvirus 6
cuauuuguuuaaugcauucaca

SEQ ID NO: 322695 - RNA, 20 nt, Human herpesvirus 6
cuauuuuuccgaaaggugaa

SEQ ID NO: 322696 - RNA, 20 nt, Human herpesvirus 6
cuauuuuuuuuaauguugag

SEQ ID NO: 322697 - RNA, 15 nt, Human herpesvirus 6
cucaaaaaugcacaa

SEQ ID NO: 322698 - RNA, 16 nt, Human herpesvirus 6
cucaacacucucagug

SEQ ID NO: 322699 - RNA, 21 nt, Human herpesvirus 6
cucaacgcguaucgauuuaac

SEQ ID NO: 322700 - RNA, 20 nt, Human herpesvirus 6
cucaaugcggguacuauaga

SEQ ID NO: 322701 - RNA, 17 nt, Human herpesvirus 6
cucaauuaauacaaaau

SEQ ID NO: 322702 - RNA, 15 nt, Human herpesvirus 6
cucacaagcugucca

SEQ ID NO: 322703 - RNA, 14 nt, Human herpesvirus 6
cucacaauauuuca

SEQ ID NO: 322704 - RNA, 19 nt, Human herpesvirus 6
cucacacaaccauccagau

SEQ ID NO: 322705 - RNA, 19 nt, Human herpesvirus 6
cucacugucgaaauucacc

SEQ ID NO: 322706 - RNA, 23 nt, Human herpesvirus 6
cucacugucgaaauucaccagau

SEQ ID NO: 322707 - RNA, 19 nt, Human herpesvirus 6
cucagaaccaucuguucaa

SEQ ID NO: 322708 - RNA, 17 nt, Human herpesvirus 6
cucagggucaaaaaacu

SEQ ID NO: 322709 - RNA, 17 nt, Human herpesvirus 6
cucaguaauuuguguaa

SEQ ID NO: 322710 - RNA, 23 nt, Human herpesvirus 6
cucaguaauuuguguaauuuaau

SEQ ID NO: 322711 - RNA, 16 nt, Human herpesvirus 6
cucaguagauuaccua

SEQ ID NO: 322712 - RNA, 17 nt, Human herpesvirus 6
cucauacacaggauuau

SEQ ID NO: 322713 - RNA, 15 nt, Human herpesvirus 6
cucaucaaauccucu

SEQ ID NO: 322714 - RNA, 23 nt, Human herpesvirus 6
cucaucaaauccucuacguauga

SEQ ID NO: 322715 - RNA, 16 nt, Human herpesvirus 6
cucaucgcgacuaaaa

SEQ ID NO: 322716 - RNA, 20 nt, Human herpesvirus 6
cuccauaccguuuacuuaaa

SEQ ID NO: 322717 - RNA, 18 nt, Human herpesvirus 6
cuccccauucaacauccu

SEQ ID NO: 322718 - RNA, 16 nt, Human herpesvirus 6
cucccggcccagagac

SEQ ID NO: 322719 - RNA, 18 nt, Human herpesvirus 6
cucgagcuuucaguauua

SEQ ID NO: 322720 - RNA, 12 nt, Human herpesvirus 6
cucgcaaacagc

SEQ ID NO: 322721 - RNA, 23 nt, Human herpesvirus 6
cucgccuaccuucacuuuuucaa

SEQ ID NO: 322722 - RNA, 15 nt, Human herpesvirus 6
cucgcggaguggagu

SEQ ID NO: 322723 - RNA, 19 nt, Human herpesvirus 6
cucgcgguauaaugcauga

SEQ ID NO: 322724 - RNA, 22 nt, Human herpesvirus 6
cucggauauauacuuacuugag

SEQ ID NO: 322725 - RNA, 19 nt, Human herpesvirus 6
cucggggugaaaucuaucc

SEQ ID NO: 322726 - RNA, 12 nt, Human herpesvirus 6
cucggugggggc

SEQ ID NO: 322727 - RNA, 21 nt, Human herpesvirus 6
cucguuguuucauaaaucaaa

SEQ ID NO: 322728 - RNA, 15 nt, Human herpesvirus 6
cucuaaaaacuaaaa

SEQ ID NO: 322729 - RNA, 14 nt, Human herpesvirus 6
cucuaguagccuag

SEQ ID NO: 322730 - RNA, 23 nt, Human herpesvirus 6
cucucaguaauuuguguaauuua

SEQ ID NO: 322731 - RNA, 22 nt, Human herpesvirus 6
cucuccguggggcacacaugua

SEQ ID NO: 322732 - RNA, 15 nt, Human herpesvirus 6
cucuuaacuacuucu

SEQ ID NO: 322733 - RNA, 20 nt, Human herpesvirus 6
cucuuuauagagcaacucau

SEQ ID NO: 322734 - RNA, 16 nt, Human herpesvirus 6
cucuuuuuaauuccaa

SEQ ID NO: 322735 - RNA, 16 nt, Human herpesvirus 6
cugaaaauaaacaguu

SEQ ID NO: 322736 - RNA, 17 nt, Human herpesvirus 6
cugaaacuccccagaga

SEQ ID NO: 322737 - RNA, 18 nt, Human herpesvirus 6
cugaaacuccccagagaa

SEQ ID NO: 322738 - RNA, 18 nt, Human herpesvirus 6
cugaaacuucacgaucua

SEQ ID NO: 322739 - RNA, 14 nt, Human herpesvirus 6
cugaccaccaaaac

SEQ ID NO: 322740 - RNA, 20 nt, Human herpesvirus 6
cugagaacgggcacacgucc

SEQ ID NO: 322741 - RNA, 16 nt, Human herpesvirus 6
cugagaccuugucaau

SEQ ID NO: 322742 - RNA, 19 nt, Human herpesvirus 6
cugagacucuacgaucuua

SEQ ID NO: 322743 - RNA, 18 nt, Human herpesvirus 6
cugagaguaaauauuucu

SEQ ID NO: 322744 - RNA, 15 nt, Human herpesvirus 6
cugagauucacuccg

SEQ ID NO: 322745 - RNA, 22 nt, Human herpesvirus 6
cugagccuucugccugaaaaug

SEQ ID NO: 322746 - RNA, 14 nt, Human herpesvirus 6
cugagcuacacgau

SEQ ID NO: 322747 - RNA, 22 nt, Human herpesvirus 6
cugagcuacacgauuaacgguu

SEQ ID NO: 322748 - RNA, 22 nt, Human herpesvirus 6
cugaugauggacgucaugugug

SEQ ID NO: 322749 - RNA, 16 nt, Human herpesvirus 6
cugaugcgauguggag

SEQ ID NO: 322750 - RNA, 21 nt, Human herpesvirus 6
cugauuaguuuucacaaagaa

SEQ ID NO: 322751 - RNA, 12 nt, Human herpesvirus 6
cugauuguguca

SEQ ID NO: 322752 - RNA, 22 nt, Human herpesvirus 6
cugauuuuguuuucuacguaga

SEQ ID NO: 322753 - RNA, 13 nt, Human herpesvirus 6
cugcaaaaaacaa

SEQ ID NO: 322754 - RNA, 13 nt, Human herpesvirus 6
cugcacuuucgau

SEQ ID NO: 322755 - RNA, 12 nt, Human herpesvirus 6
cugcauaugcag

SEQ ID NO: 322756 - RNA, 19 nt, Human herpesvirus 6
cugcauaugcagacugcuu

SEQ ID NO: 322757 - RNA, 17 nt, Human herpesvirus 6
cugccauaucacacauc

SEQ ID NO: 322758 - RNA, 20 nt, Human herpesvirus 6
cugcguccgaguuagcagaa

SEQ ID NO: 322759 - RNA, 24 nt, Human herpesvirus 6
cugcuaaaaaucaucucgugcaaa

SEQ ID NO: 322760 - RNA, 20 nt, Human herpesvirus 6
cugcuagauaauuaugcauu

SEQ ID NO: 322761 - RNA, 21 nt, Human herpesvirus 6
cugcuagauaauuaugcauuu

SEQ ID NO: 322762 - RNA, 19 nt, Human herpesvirus 6
cuggaucaucaagcaucuc

SEQ ID NO: 322763 - RNA, 21 nt, Human herpesvirus 6
cuggaugcuuuuagauggaaa

SEQ ID NO: 322764 - RNA, 19 nt, Human herpesvirus 6
cugggagaauaagaucuac

SEQ ID NO: 322765 - RNA, 17 nt, Human herpesvirus 6
cuggguuucgaagaauc

SEQ ID NO: 322766 - RNA, 19 nt, Human herpesvirus 6
cuggucugcuugcaaauau

SEQ ID NO: 322767 - RNA, 22 nt, Human herpesvirus 6
cuguacaaguuugugugccuuu

SEQ ID NO: 322768 - RNA, 13 nt, Human herpesvirus 6
cuguagggaugua

SEQ ID NO: 322769 - RNA, 23 nt, Human herpesvirus 6
cuguauuaaugucacugucgaau

SEQ ID NO: 322770 - RNA, 21 nt, Human herpesvirus 6
cuguccaugagauuuucaauc

SEQ ID NO: 322771 - RNA, 17 nt, Human herpesvirus 6
cuguccgccuguuccac

SEQ ID NO: 322772 - RNA, 13 nt, Human herpesvirus 6
cugucgaauaugu

SEQ ID NO: 322773 - RNA, 17 nt, Human herpesvirus 6
cugugcaaaaacggguu

SEQ ID NO: 322774 - RNA, 13 nt, Human herpesvirus 6
cugugucuguuca

SEQ ID NO: 322775 - RNA, 17 nt, Human herpesvirus 6
cuguguguuauaaggaa

SEQ ID NO: 322776 - RNA, 19 nt, Human herpesvirus 6
cuguguguugaauguuaca

SEQ ID NO: 322777 - RNA, 21 nt, Human herpesvirus 6
cuguuauaacacaacaaguaa

SEQ ID NO: 322778 - RNA, 11 nt, Human herpesvirus 6
cuguucaauua

SEQ ID NO: 322779 - RNA, 23 nt, Human herpesvirus 6
cuguuuuagaaacauuugcugau

SEQ ID NO: 322780 - RNA, 14 nt, Human herpesvirus 6
cuuaaaaaaacaca

SEQ ID NO: 322781 - RNA, 18 nt, Human herpesvirus 6
cuuaaagcguuugcaaaa

SEQ ID NO: 322782 - RNA, 19 nt, Human herpesvirus 6
cuuaaagcguuugcaaaac

SEQ ID NO: 322783 - RNA, 22 nt, Human herpesvirus 6
cuuaauauauuugcacuuccuc

SEQ ID NO: 322784 - RNA, 20 nt, Human herpesvirus 6
cuuacacaaauugaccagcc

SEQ ID NO: 322785 - RNA, 15 nt, Human herpesvirus 6
cuuacacgaugugua

SEQ ID NO: 322786 - RNA, 16 nt, Human herpesvirus 6
cuuaccuucaaaguga

SEQ ID NO: 322787 - RNA, 22 nt, Human herpesvirus 6
cuuacgguguaucggagacuac

SEQ ID NO: 322788 - RNA, 15 nt, Human herpesvirus 6
cuuacguaugugaag

SEQ ID NO: 322789 - RNA, 15 nt, Human herpesvirus 6
cuuacguugaugauu

SEQ ID NO: 322790 - RNA, 16 nt, Human herpesvirus 6
cuuagacuuggugaug

SEQ ID NO: 322791 - RNA, 22 nt, Human herpesvirus 6
cuuagagacgugauacuauaaa

SEQ ID NO: 322792 - RNA, 18 nt, Human herpesvirus 6
cuuagcauauuuuggcaa

SEQ ID NO: 322793 - RNA, 15 nt, Human herpesvirus 6
cuuauaacaagcacu

SEQ ID NO: 322794 - RNA, 18 nt, Human herpesvirus 6
cuuauaagucaucauaua

SEQ ID NO: 322795 - RNA, 13 nt, Human herpesvirus 6
cuuauauuaaaga

SEQ ID NO: 322796 - RNA, 22 nt, Human herpesvirus 6
cuucaaagugauuccaguuaau

SEQ ID NO: 322797 - RNA, 19 nt, Human herpesvirus 6
cuucaaucguugauugaug

SEQ ID NO: 322798 - RNA, 13 nt, Human herpesvirus 6
cuucagacaucca

SEQ ID NO: 322799 - RNA, 19 nt, Human herpesvirus 6
cuucagacauccagaaaag

SEQ ID NO: 322800 - RNA, 23 nt, Human herpesvirus 6
cuucaguagagacuuuacagucu

SEQ ID NO: 322801 - RNA, 14 nt, Human herpesvirus 6
cuucccuuuuacaa

SEQ ID NO: 322802 - RNA, 13 nt, Human herpesvirus 6
cuuccgauaaaga

SEQ ID NO: 322803 - RNA, 15 nt, Human herpesvirus 6
cuuccuuauaacaca

SEQ ID NO: 322804 - RNA, 22 nt, Human herpesvirus 6
cuucgacaacggaccaggacaa

SEQ ID NO: 322805 - RNA, 20 nt, Human herpesvirus 6
cuucgacuucaaacaccuca

SEQ ID NO: 322806 - RNA, 22 nt, Human herpesvirus 6
cuucgcggugcagaacaucuca

SEQ ID NO: 322807 - RNA, 17 nt, Human herpesvirus 6
cuucgcugcuaucgucu

SEQ ID NO: 322808 - RNA, 17 nt, Human herpesvirus 6
cuucggaugcaccuguu

SEQ ID NO: 322809 - RNA, 20 nt, Human herpesvirus 6
cuucuaacaauaauugcauu

SEQ ID NO: 322810 - RNA, 14 nt, Human herpesvirus 6
cuucuuuuuaacua

SEQ ID NO: 322811 - RNA, 16 nt, Human herpesvirus 6
cuugaaaaaguaguug

SEQ ID NO: 322812 - RNA, 20 nt, Human herpesvirus 6
cuugaaaagcccuuacuuga

SEQ ID NO: 322813 - RNA, 18 nt, Human herpesvirus 6
cuugaucaaauaucugaa

SEQ ID NO: 322814 - RNA, 15 nt, Human herpesvirus 6
cuugaucacaacaua

SEQ ID NO: 322815 - RNA, 16 nt, Human herpesvirus 6
cuugauguugaucuga

SEQ ID NO: 322816 - RNA, 14 nt, Human herpesvirus 6
cuugcaaugugauc

SEQ ID NO: 322817 - RNA, 17 nt, Human herpesvirus 6
cuugcgauacauguuug

SEQ ID NO: 322818 - RNA, 20 nt, Human herpesvirus 6
cuugcgauuguucugcgaua

SEQ ID NO: 322819 - RNA, 22 nt, Human herpesvirus 6
cuuggaaaauaacgauggagua

SEQ ID NO: 322820 - RNA, 17 nt, Human herpesvirus 6
cuuggagaugacggguu

SEQ ID NO: 322821 - RNA, 18 nt, Human herpesvirus 6
cuuggagcuuccgucaca

SEQ ID NO: 322822 - RNA, 20 nt, Human herpesvirus 6
cuuggccuucgguacaguga

SEQ ID NO: 322823 - RNA, 18 nt, Human herpesvirus 6
cuuggcuaucgcaaugau

SEQ ID NO: 322824 - RNA, 18 nt, Human herpesvirus 6
cuuggcucgugauccuac

SEQ ID NO: 322825 - RNA, 16 nt, Human herpesvirus 6
cuugggacauguauau

SEQ ID NO: 322826 - RNA, 15 nt, Human herpesvirus 6
cuugggugugcauug

SEQ ID NO: 322827 - RNA, 20 nt, Human herpesvirus 6
cuugggugugcauugugaca

SEQ ID NO: 322828 - RNA, 15 nt, Human herpesvirus 6
cuuguacaaauucau

SEQ ID NO: 322829 - RNA, 20 nt, Human herpesvirus 6
cuugucgggcuuugugaaau

SEQ ID NO: 322830 - RNA, 15 nt, Human herpesvirus 6
cuuguguaucuguga

SEQ ID NO: 322831 - RNA, 16 nt, Human herpesvirus 6
cuuguguaucugugaa

SEQ ID NO: 322832 - RNA, 18 nt, Human herpesvirus 6
cuuguguaucugugaaca

SEQ ID NO: 322833 - RNA, 21 nt, Human herpesvirus 6
cuugugucauguuuacugcau

SEQ ID NO: 322834 - RNA, 15 nt, Human herpesvirus 6
cuuguugaguuucag

SEQ ID NO: 322835 - RNA, 21 nt, Human herpesvirus 6
cuuuaacuacaacauuaucaa

SEQ ID NO: 322836 - RNA, 16 nt, Human herpesvirus 6
cuuuacagucuuuaaa

SEQ ID NO: 322837 - RNA, 22 nt, Human herpesvirus 6
cuuuagaacagcuuagggccaa

SEQ ID NO: 322838 - RNA, 16 nt, Human herpesvirus 6
cuuuauaagauuuaca

SEQ ID NO: 322839 - RNA, 17 nt, Human herpesvirus 6
cuuuaucgauguagaua

SEQ ID NO: 322840 - RNA, 14 nt, Human herpesvirus 6
cuuuaucuagccaa

SEQ ID NO: 322841 - RNA, 18 nt, Human herpesvirus 6
cuuuaucuagccaauuca

SEQ ID NO: 322842 - RNA, 21 nt, Human herpesvirus 6
cuuuauguacccuaagugaaa

SEQ ID NO: 322843 - RNA, 15 nt, Human herpesvirus 6
cuuucaguauuaacu

SEQ ID NO: 322844 - RNA, 22 nt, Human herpesvirus 6
cuuucaguucaaacgcagacua

SEQ ID NO: 322845 - RNA, 13 nt, Human herpesvirus 6
cuuucaugauucu

SEQ ID NO: 322846 - RNA, 14 nt, Human herpesvirus 6
cuuucuaaaaucaa

SEQ ID NO: 322847 - RNA, 18 nt, Human herpesvirus 6
cuuucucuuuuuaauucc

SEQ ID NO: 322848 - RNA, 13 nt, Human herpesvirus 6
cuuugacauuuau

SEQ ID NO: 322849 - RNA, 22 nt, Human herpesvirus 6
cuuuggcuucuauauccaaaga

SEQ ID NO: 322850 - RNA, 18 nt, Human herpesvirus 6
cuuugggaacauguaacu

SEQ ID NO: 322851 - RNA, 21 nt, Human herpesvirus 6
cuuugucgcaugcuuauuuca

SEQ ID NO: 322852 - RNA, 16 nt, Human herpesvirus 6
cuuuuaaaacaggaag

SEQ ID NO: 322853 - RNA, 12 nt, Human herpesvirus 6
cuuuuaacuucg

SEQ ID NO: 322854 - RNA, 20 nt, Human herpesvirus 6
cuuuuaauuguuucacggau

SEQ ID NO: 322855 - RNA, 18 nt, Human herpesvirus 6
cuuuuacaauacacagaa

SEQ ID NO: 322856 - RNA, 23 nt, Human herpesvirus 6
cuuuuagauggaaaauugcaaau

SEQ ID NO: 322857 - RNA, 21 nt, Human herpesvirus 6
cuuuuaugagaacaagugacc

SEQ ID NO: 322858 - RNA, 17 nt, Human herpesvirus 6
cuuuuccucaauaugau

SEQ ID NO: 322859 - RNA, 16 nt, Human herpesvirus 6
cuuuucuaucacucau

SEQ ID NO: 322860 - RNA, 17 nt, Human herpesvirus 6
cuuuugcuuagucugua

SEQ ID NO: 322861 - RNA, 12 nt, Human herpesvirus 6
cuuuuuaauucc

SEQ ID NO: 322862 - RNA, 21 nt, Human herpesvirus 6
cuuuuucaagagcgagaucua

SEQ ID NO: 322863 - RNA, 22 nt, Human herpesvirus 6
cuuuuucuguguuuuaucuucc

SEQ ID NO: 322864 - RNA, 19 nt, Human herpesvirus 6
cuuuuugccgucacacucu

SEQ ID NO: 322865 - RNA, 16 nt, Human herpesvirus 6
gaaaaaaaaaauauca

SEQ ID NO: 322866 - RNA, 23 nt, Human herpesvirus 6
gaaaaaaaaauaaguacauagaa

SEQ ID NO: 322867 - RNA, 20 nt, Human herpesvirus 6
gaaaaaacaacgacuaucaa

SEQ ID NO: 322868 - RNA, 21 nt, Human herpesvirus 6
gaaaaaguaguugcuaagugu

SEQ ID NO: 322869 - RNA, 15 nt, Human herpesvirus 6
gaaaaauaaaaucca

SEQ ID NO: 322870 - RNA, 13 nt, Human herpesvirus 6
gaaaaaugagacu

SEQ ID NO: 322871 - RNA, 17 nt, Human herpesvirus 6
gaaaacaaagaaucaau

SEQ ID NO: 322872 - RNA, 15 nt, Human herpesvirus 6
gaaaacacuaucugu

SEQ ID NO: 322873 - RNA, 21 nt, Human herpesvirus 6
gaaaacgacacagaacacauc

SEQ ID NO: 322874 - RNA, 21 nt, Human herpesvirus 6
uagagcauggcgcacgcuaaa

SEQ ID NO: 322875 - RNA, 20 nt, Human herpesvirus 6
uagauaaacaacgcuccaua

SEQ ID NO: 322876 - RNA, 19 nt, Human herpesvirus 6
uagauggaaaauugcaaau

SEQ ID NO: 322877 - RNA, 16 nt, Human herpesvirus 6
uagcagaagaacagcu

SEQ ID NO: 322878 - RNA, 18 nt, Human herpesvirus 6
uagcagaaguuuacauag

SEQ ID NO: 322879 - RNA, 20 nt, Human herpesvirus 6
uagcagaaguuuacauagaa

SEQ ID NO: 322880 - RNA, 17 nt, Human herpesvirus 6
uagcagcaaucagcaac

SEQ ID NO: 322881 - RNA, 14 nt, Human herpesvirus 6
uagcaggcauugac

SEQ ID NO: 322882 - RNA, 17 nt, Human herpesvirus 6
uagcaucuuaccuucaa

SEQ ID NO: 322883 - RNA, 12 nt, Human herpesvirus 6
uagccaaacaag

SEQ ID NO: 322884 - RNA, 23 nt, Human herpesvirus 6
uagcccuaauguuaaauaacuca

SEQ ID NO: 322885 - RNA, 19 nt, Human herpesvirus 6
uagcgaaccaggacagcuu

SEQ ID NO: 322886 - RNA, 12 nt, Human herpesvirus 6
uagcgaauuuga

SEQ ID NO: 322887 - RNA, 16 nt, Human herpesvirus 6
uagcgucuuugcauau

SEQ ID NO: 322888 - RNA, 15 nt, Human herpesvirus 6
uagcuaaaacuugaa

SEQ ID NO: 322889 - RNA, 16 nt, Human herpesvirus 6
uagcuauuaugugaau

SEQ ID NO: 322890 - RNA, 16 nt, Human herpesvirus 6
uagcuguaaauauuca

SEQ ID NO: 322891 - RNA, 13 nt, Human herpesvirus 6
uaggaacuaugaa

SEQ ID NO: 322892 - RNA, 18 nt, Human herpesvirus 6
uaggacguacagaaccag

SEQ ID NO: 322893 - RNA, 14 nt, Human herpesvirus 6
uaggaugaucgauu

SEQ ID NO: 322894 - RNA, 17 nt, Human herpesvirus 6
uaggccuucaccugucu

SEQ ID NO: 322895 - RNA, 21 nt, Human herpesvirus 6
uagggauacguauauugugua

SEQ ID NO: 322896 - RNA, 16 nt, Human herpesvirus 6
uaguacaguaugucuc

SEQ ID NO: 322897 - RNA, 19 nt, Human herpesvirus 6
uaguccauuaccacacgcu

SEQ ID NO: 322898 - RNA, 17 nt, Human herpesvirus 6
uagucuagcaaccuaau

SEQ ID NO: 322899 - RNA, 23 nt, Human herpesvirus 6
uagucuguaaguuuugggugcua

SEQ ID NO: 322900 - RNA, 18 nt, Human herpesvirus 6
uagugagguuaucuggau

SEQ ID NO: 322901 - RNA, 22 nt, Human herpesvirus 6
uagugaucacaaaagagaagga

SEQ ID NO: 322902 - RNA, 19 nt, Human herpesvirus 6
uaguuacggggaagaucua

SEQ ID NO: 322903 - RNA, 19 nt, Human herpesvirus 6
uaguucuucaacauaucac

SEQ ID NO: 322904 - RNA, 20 nt, Human herpesvirus 6
uauaaaaaaagcaaauacua

SEQ ID NO: 322905 - RNA, 13 nt, Human herpesvirus 6
uauaaaaacacac

SEQ ID NO: 322906 - RNA, 22 nt, Human herpesvirus 6
uauaaaaauagugggaggcauu

SEQ ID NO: 322907 - RNA, 20 nt, Human herpesvirus 6
uauaaaaggaguaugacugu

SEQ ID NO: 322908 - RNA, 19 nt, Human herpesvirus 6
uauaaaauuuaauaaggaa

SEQ ID NO: 322909 - RNA, 15 nt, Human herpesvirus 6
uauaaagagaccaau

SEQ ID NO: 322910 - RNA, 20 nt, Human herpesvirus 6
uauaaauguagcauacgaca

SEQ ID NO: 322911 - RNA, 16 nt, Human herpesvirus 6
uauaagaaccaacaga

SEQ ID NO: 322912 - RNA, 13 nt, Human herpesvirus 6
uauaagauaggca

SEQ ID NO: 322913 - RNA, 20 nt, Human herpesvirus 6
uauacagaauaaaaauuuua

SEQ ID NO: 322914 - RNA, 13 nt, Human herpesvirus 6
uauaccauuccca

SEQ ID NO: 322915 - RNA, 21 nt, Human herpesvirus 6
uauagacuuuccccauauugu

SEQ ID NO: 322916 - RNA, 14 nt, Human herpesvirus 6
uauagaugacugaa

SEQ ID NO: 322917 - RNA, 21 nt, Human herpesvirus 6
uauaguaauggaucuugauca

SEQ ID NO: 322918 - RNA, 18 nt, Human herpesvirus 6
uauagucuagcaaccuaa

SEQ ID NO: 322919 - RNA, 16 nt, Human herpesvirus 6
uauauaaaaaacugca

SEQ ID NO: 322920 - RNA, 20 nt, Human herpesvirus 6
uauauaaaaaacugcauggu

SEQ ID NO: 322921 - RNA, 22 nt, Human herpesvirus 6
uauauauuugcauacauuccuu

SEQ ID NO: 322922 - RNA, 11 nt, Human herpesvirus 6
uauaucagagc

SEQ ID NO: 322923 - RNA, 16 nt, Human herpesvirus 6
uauaucuaaagucaga

SEQ ID NO: 322924 - RNA, 14 nt, Human herpesvirus 6
uauauugcugcuag

SEQ ID NO: 322925 - RNA, 17 nt, Human herpesvirus 6
uauauugcugcuagaua

SEQ ID NO: 322926 - RNA, 18 nt, Human herpesvirus 6
uauauuuaaaugaagaua

SEQ ID NO: 322927 - RNA, 16 nt, Human herpesvirus 6
uauauuugcacuuccu

SEQ ID NO: 322928 - RNA, 19 nt, Human herpesvirus 6
uauauuuuuaccgaaccau

SEQ ID NO: 322929 - RNA, 23 nt, Human herpesvirus 6
uaucacaguugauaaacauuaau

SEQ ID NO: 322930 - RNA, 17 nt, Human herpesvirus 6
uaucaccuuacaaauaa

SEQ ID NO: 322931 - RNA, 18 nt, Human herpesvirus 6
uaucaccuuacaaauaau

SEQ ID NO: 322932 - RNA, 12 nt, Human herpesvirus 6
uaucauaaucug

SEQ ID NO: 322933 - RNA, 15 nt, Human herpesvirus 6
uauccauccaaucca

SEQ ID NO: 322934 - RNA, 19 nt, Human herpesvirus 6
uaucccuaauaaaugucaa

SEQ ID NO: 322935 - RNA, 21 nt, Human herpesvirus 6
uauccgugaauccccgcagag

SEQ ID NO: 322936 - RNA, 15 nt, Human herpesvirus 6
uauccuagcauuucc

SEQ ID NO: 322937 - RNA, 14 nt, Human herpesvirus 6
uauccucagaacca

SEQ ID NO: 322938 - RNA, 15 nt, Human herpesvirus 6
uauccucucuggaaa

SEQ ID NO: 322939 - RNA, 18 nt, Human herpesvirus 6
uaucgaccauguguauau

SEQ ID NO: 322940 - RNA, 12 nt, Human herpesvirus 6
uaucgcaaugau

SEQ ID NO: 322941 - RNA, 14 nt, Human herpesvirus 6
uaucgcaaugauuu

SEQ ID NO: 322942 - RNA, 23 nt, Human herpesvirus 6
uaucgcccccauacacacccagc

SEQ ID NO: 322943 - RNA, 15 nt, Human herpesvirus 6
uaucgucuacccuau

SEQ ID NO: 322944 - RNA, 14 nt, Human herpesvirus 6
uaucgucuauaaca

SEQ ID NO: 322945 - RNA, 17 nt, Human herpesvirus 6
uaucguggaauggcugc

SEQ ID NO: 322946 - RNA, 16 nt, Human herpesvirus 6
uaucuaaagucagaga

SEQ ID NO: 322947 - RNA, 14 nt, Human herpesvirus 6
uaugaacaaugaca

SEQ ID NO: 322948 - RNA, 19 nt, Human herpesvirus 6
uaugaguaugaaacuuaca

SEQ ID NO: 322949 - RNA, 14 nt, Human herpesvirus 6
uaugauccgguaua

SEQ ID NO: 322950 - RNA, 17 nt, Human herpesvirus 6
uaugauuuucggauuac

SEQ ID NO: 322951 - RNA, 16 nt, Human herpesvirus 6
uaugcaaacugacugu

SEQ ID NO: 322952 - RNA, 18 nt, Human herpesvirus 6
uaugccacacccauuucc

SEQ ID NO: 322953 - RNA, 14 nt, Human herpesvirus 6
uaugcuacauuuau

SEQ ID NO: 322954 - RNA, 12 nt, Human herpesvirus 6
uauggaucugag

SEQ ID NO: 322955 - RNA, 14 nt, Human herpesvirus 6
uauggcuacaacag

SEQ ID NO: 322956 - RNA, 13 nt, Human herpesvirus 6
uaugggagugauu

SEQ ID NO: 322957 - RNA, 16 nt, Human herpesvirus 6
uaugggugagugcauu

SEQ ID NO: 322958 - RNA, 18 nt, Human herpesvirus 6
uauggugaguaccuguac

SEQ ID NO: 322959 - RNA, 17 nt, Human herpesvirus 6
uaugguuaucaucacaa

SEQ ID NO: 322960 - RNA, 19 nt, Human herpesvirus 6
uaugucguucuuaacucau

SEQ ID NO: 322961 - RNA, 14 nt, Human herpesvirus 6
uaugucugugcaaa

SEQ ID NO: 322962 - RNA, 22 nt, Human herpesvirus 6
uaugucuguuauaacacaacaa

SEQ ID NO: 322963 - RNA, 14 nt, Human herpesvirus 6
uaugugugaugcgu

SEQ ID NO: 322964 - RNA, 21 nt, Human herpesvirus 6
uauuaacgacuucgacuucaa

SEQ ID NO: 322965 - RNA, 15 nt, Human herpesvirus 6
uauuaaguagugcuu

SEQ ID NO: 322966 - RNA, 18 nt, Human herpesvirus 6
uauuaaguagugcuucaa

SEQ ID NO: 322967 - RNA, 20 nt, Human herpesvirus 6
uauuaauuaccuauagucaa

SEQ ID NO: 322968 - RNA, 18 nt, Human herpesvirus 6
uauuacauuuuuggaugg

SEQ ID NO: 322969 - RNA, 23 nt, Human herpesvirus 6
uauucaaaaauguugcauggaaa

SEQ ID NO: 322970 - RNA, 20 nt, Human herpesvirus 6
uauucagaggugcugaugau

SEQ ID NO: 322971 - RNA, 12 nt, Human herpesvirus 6
uauucauaacag

SEQ ID NO: 322972 - RNA, 20 nt, Human herpesvirus 6
uauuccccagcuguguuuac

SEQ ID NO: 322973 - RNA, 20 nt, Human herpesvirus 6
uauucuccuaccauguugcu

SEQ ID NO: 322974 - RNA, 17 nt, Human herpesvirus 6
uauucucggucuugcua

SEQ ID NO: 322975 - RNA, 23 nt, Human herpesvirus 6
uauugaauuguauauauagcugu

SEQ ID NO: 322976 - RNA, 17 nt, Human herpesvirus 6
uauugcacguucaggca

SEQ ID NO: 322977 - RNA, 14 nt, Human herpesvirus 6
uauuggcaugugaa

SEQ ID NO: 322978 - RNA, 13 nt, Human herpesvirus 6
uauugguuugcau

SEQ ID NO: 322979 - RNA, 22 nt, Human herpesvirus 6
uauugucaaauagccaaaaaau

SEQ ID NO: 322980 - RNA, 15 nt, Human herpesvirus 6
uauuuacgguuucag

SEQ ID NO: 322981 - RNA, 22 nt, Human herpesvirus 6
uauuuagguuuugucguuugua

SEQ ID NO: 322982 - RNA, 16 nt, Human herpesvirus 6
uauuuagucaguuuaa

SEQ ID NO: 322983 - RNA, 13 nt, Human herpesvirus 6
uauuucacauauu

SEQ ID NO: 322984 - RNA, 14 nt, Human herpesvirus 6
gacauugcuuucuc

SEQ ID NO: 322985 - RNA, 19 nt, Human herpesvirus 6
gacccugccuauacaggca

SEQ ID NO: 322986 - RNA, 15 nt, Human herpesvirus 6
gaccggagaaaauca

SEQ ID NO: 322987 - RNA, 17 nt, Human herpesvirus 6
gaccuaugcgcuuuuau

SEQ ID NO: 322988 - RNA, 13 nt, Human herpesvirus 6
gaccuggcggaca

SEQ ID NO: 322989 - RNA, 18 nt, Human herpesvirus 6
gacgaaagaggacgggaa

SEQ ID NO: 322990 - RNA, 17 nt, Human herpesvirus 6
gacgauaguguucucug

SEQ ID NO: 322991 - RNA, 16 nt, Human herpesvirus 6
gacgccuugauguuuc

SEQ ID NO: 322992 - RNA, 18 nt, Human herpesvirus 6
gacggacagggggaucga

SEQ ID NO: 322993 - RNA, 22 nt, Human herpesvirus 6
gacggccuccggccccagagac

SEQ ID NO: 322994 - RNA, 20 nt, Human herpesvirus 6
gacggcgggcagaucuauca

SEQ ID NO: 322995 - RNA, 22 nt, Human herpesvirus 6
gacgguuagguuuaauaguuuu

SEQ ID NO: 322996 - RNA, 17 nt, Human herpesvirus 6
gacguaauagccaaaca

SEQ ID NO: 322997 - RNA, 18 nt, Human herpesvirus 6
gacguuugcuguuuucac

SEQ ID NO: 322998 - RNA, 16 nt, Human herpesvirus 6
gacuacucuggcugaa

SEQ ID NO: 322999 - RNA, 18 nt, Human herpesvirus 6
gacuacucuggcugaaag

SEQ ID NO: 323000 - RNA, 18 nt, Human herpesvirus 6
gacuaggauuagaacaau

SEQ ID NO: 323001 - RNA, 17 nt, Human herpesvirus 6
gacuauauuaucuuuca

SEQ ID NO: 323002 - RNA, 18 nt, Human herpesvirus 6
gacucccggcccagagac

SEQ ID NO: 323003 - RNA, 16 nt, Human herpesvirus 6
gacucgccgcugcaga

SEQ ID NO: 323004 - RNA, 17 nt, Human herpesvirus 6
gacucgcggaguggagu

SEQ ID NO: 323005 - RNA, 21 nt, Human herpesvirus 6
gacugcccgcuaccaacaggu

SEQ ID NO: 323006 - RNA, 21 nt, Human herpesvirus 6
gacugguauccaauuaacaca

SEQ ID NO: 323007 - RNA, 22 nt, Human herpesvirus 6
gacugguauccaauuaacacau

SEQ ID NO: 323008 - RNA, 18 nt, Human herpesvirus 6
gacuuacagagcuuuuaa

SEQ ID NO: 323009 - RNA, 22 nt, Human herpesvirus 6
gacuuuucuaucacucauacac

SEQ ID NO: 323010 - RNA, 21 nt, Human herpesvirus 6
gagaacaagugacccggccgg

SEQ ID NO: 323011 - RNA, 16 nt, Human herpesvirus 6
gagaaccaccagagac

SEQ ID NO: 323012 - RNA, 17 nt, Human herpesvirus 6
gagaaccaccagagaca

SEQ ID NO: 323013 - RNA, 17 nt, Human herpesvirus 6
gagaagagcgaaaugca

SEQ ID NO: 323014 - RNA, 22 nt, Human herpesvirus 6
gagaagcuggaaaaauucaauc

SEQ ID NO: 323015 - RNA, 16 nt, Human herpesvirus 6
gagacagauugaucau

SEQ ID NO: 323016 - RNA, 20 nt, Human herpesvirus 6
gagacugccgguaacgcugu

SEQ ID NO: 323017 - RNA, 16 nt, Human herpesvirus 6
gagagacguuguuuga

SEQ ID NO: 323018 - RNA, 20 nt, Human herpesvirus 6
gagagaggagcauucacaua

SEQ ID NO: 323019 - RNA, 15 nt, Human herpesvirus 6
gagagauuuacuguu

SEQ ID NO: 323020 - RNA, 19 nt, Human herpesvirus 6
uaaggccgucaaagacauu

SEQ ID NO: 323021 - RNA, 14 nt, Human herpesvirus 6
uaaguacauagaau

SEQ ID NO: 323022 - RNA, 21 nt, Human herpesvirus 6
uaaguacauagaauuucuaac

SEQ ID NO: 323023 - RNA, 21 nt, Human herpesvirus 6
uaagucguugugucaugauua

SEQ ID NO: 323024 - RNA, 19 nt, Human herpesvirus 6
uaagucuuuagaacagcuu

SEQ ID NO: 323025 - RNA, 18 nt, Human herpesvirus 6
uaaguuuugggugcuauu

SEQ ID NO: 323026 - RNA, 17 nt, Human herpesvirus 6
uaauaaaacaagaucca

SEQ ID NO: 323027 - RNA, 18 nt, Human herpesvirus 6
aagucguugugucaugau

SEQ ID NO: 323028 - RNA, 22 nt, Human herpesvirus 6
aagugcgcuggcuuauuaacgc

SEQ ID NO: 323029 - RNA, 15 nt, Human herpesvirus 6
aagugcugugcucuu

SEQ ID NO: 323030 - RNA, 14 nt, Human herpesvirus 6
aagugcuuuaucua

SEQ ID NO: 323031 - RNA, 11 nt, Human herpesvirus 6
cggaacauaau

SEQ ID NO: 323032 - RNA, 19 nt, Human herpesvirus 6
cggaacugcuggcugagau

SEQ ID NO: 323033 - RNA, 22 nt, Human herpesvirus 6
cggaauaguucuucaacauauc

SEQ ID NO: 323034 - RNA, 13 nt, Human herpesvirus 6
cggaaucuaacuc

SEQ ID NO: 323035 - RNA, 16 nt, Human herpesvirus 6
cggaaucuacugagau

SEQ ID NO: 323036 - RNA, 17 nt, Human herpesvirus 6
cggacacgcgcagugga

SEQ ID NO: 323037 - RNA, 13 nt, Human herpesvirus 6
cggaccaauccau

SEQ ID NO: 323038 - RNA, 16 nt, Human herpesvirus 6
cggagagcgagucuug

SEQ ID NO: 323039 - RNA, 20 nt, Human herpesvirus 6
cggagugccguugagugccu

SEQ ID NO: 323040 - RNA, 20 nt, Human herpesvirus 6
cggaucguaaggcaguaaag

SEQ ID NO: 323041 - RNA, 18 nt, Human herpesvirus 6
cggccggagugccguuga

SEQ ID NO: 323042 - RNA, 18 nt, Human herpesvirus 6
cggcuacgacacgcugga

SEQ ID NO: 323043 - RNA, 12 nt, Human herpesvirus 6
cgggacaaaacc

SEQ ID NO: 323044 - RNA, 16 nt, Human herpesvirus 6
cgggagcaacuauaau

SEQ ID NO: 323045 - RNA, 17 nt, Human herpesvirus 6
cgggaucguagguaauu

SEQ ID NO: 323046 - RNA, 16 nt, Human herpesvirus 6
cgguaacguggauaaa

SEQ ID NO: 323047 - RNA, 15 nt, Human herpesvirus 6
cggucagacagugag

SEQ ID NO: 323048 - RNA, 16 nt, Human herpesvirus 6
cggucagacagugagu

SEQ ID NO: 323049 - RNA, 18 nt, Human herpesvirus 6
cgguccaaggauuaugau

SEQ ID NO: 323050 - RNA, 21 nt, Human herpesvirus 6
cgguccguuuuucucugcaaa

SEQ ID NO: 323051 - RNA, 22 nt, Human herpesvirus 6
cggugauagcgucuuugcauau

SEQ ID NO: 323052 - RNA, 20 nt, Human herpesvirus 6
cggugcagaacaucucagau

SEQ ID NO: 323053 - RNA, 19 nt, Human herpesvirus 6
cgguuggaugccugcauau

SEQ ID NO: 323054 - RNA, 19 nt, Human herpesvirus 6
cguaaguggguacaaugaa

SEQ ID NO: 323055 - RNA, 15 nt, Human herpesvirus 6
cguaauaauuugggu

SEQ ID NO: 323056 - RNA, 13 nt, Human herpesvirus 6
cguaaugugcaaa

SEQ ID NO: 323057 - RNA, 14 nt, Human herpesvirus 6
cguagacaguaaaa

SEQ ID NO: 323058 - RNA, 19 nt, Human herpesvirus 6
cguagacaguaaaaugugu

SEQ ID NO: 323059 - RNA, 16 nt, Human herpesvirus 6
cguaugaaaguccuca

SEQ ID NO: 323060 - RNA, 16 nt, Human herpesvirus 6
cguaugugaagaucac

SEQ ID NO: 323061 - RNA, 19 nt, Human herpesvirus 6
cgucgagaaccaccagaga

SEQ ID NO: 323062 - RNA, 14 nt, Human herpesvirus 6
cgucucguauccag

SEQ ID NO: 323063 - RNA, 20 nt, Human herpesvirus 6
cgugaauauaucaaauuuac

SEQ ID NO: 323064 - RNA, 14 nt, Human herpesvirus 6
cgugccaguucaca

SEQ ID NO: 323065 - RNA, 15 nt, Human herpesvirus 6
cgugccaguucacac

SEQ ID NO: 323066 - RNA, 16 nt, Human herpesvirus 6
cgugcucguauaaaua

SEQ ID NO: 323067 - RNA, 16 nt, Human herpesvirus 6
cgugcuugucucacaa

SEQ ID NO: 323068 - RNA, 17 nt, Human herpesvirus 6
cguggccgucuguugua

SEQ ID NO: 323069 - RNA, 16 nt, Human herpesvirus 6
cguguaucggcagugu

SEQ ID NO: 323070 - RNA, 12 nt, Human herpesvirus 6
cgugucugugua

SEQ ID NO: 323071 - RNA, 17 nt, Human herpesvirus 6
cguguuagaauguauac

SEQ ID NO: 323072 - RNA, 19 nt, Human herpesvirus 6
cguuaaaaaaaaugugucu

SEQ ID NO: 323073 - RNA, 21 nt, Human herpesvirus 6
cguuaaaaaaaaugugucuua

SEQ ID NO: 323074 - RNA, 24 nt, Human herpesvirus 6
cguuaacaauaauacgcaguuguc

SEQ ID NO: 323075 - RNA, 20 nt, Human herpesvirus 6
cguuagguguaaaucaucaa

SEQ ID NO: 323076 - RNA, 20 nt, Human herpesvirus 6
cguuccacgcauagacaaac

SEQ ID NO: 323077 - RNA, 22 nt, Human herpesvirus 6
cguuccacgcauagacaaacca

SEQ ID NO: 323078 - RNA, 17 nt, Human herpesvirus 6
cguuccccaugucuugc

SEQ ID NO: 323079 - RNA, 17 nt, Human herpesvirus 6
cguucguuguaugugug

SEQ ID NO: 323080 - RNA, 14 nt, Human herpesvirus 6
cguucugucugcag

SEQ ID NO: 323081 - RNA, 18 nt, Human herpesvirus 6
cguuuaugcgaaucugcc

SEQ ID NO: 323082 - RNA, 21 nt, Human herpesvirus 6
cguuugaguugggacuuggaa

SEQ ID NO: 323083 - RNA, 21 nt, Human herpesvirus 6
cguuugcuguuuucaccauca

SEQ ID NO: 323084 - RNA, 21 nt, Human herpesvirus 6
cuaaaaaaguguaacauccca

SEQ ID NO: 323085 - RNA, 12 nt, Human herpesvirus 6
cuaaaaagaguc

SEQ ID NO: 323086 - RNA, 22 nt, Human herpesvirus 6
cuaaaaaucaucucgugcaaaa

SEQ ID NO: 323087 - RNA, 20 nt, Human herpesvirus 6
cuaaacacagaugguuuuaa

SEQ ID NO: 323088 - RNA, 16 nt, Human herpesvirus 6
cuaaacaccacuugau

SEQ ID NO: 323089 - RNA, 20 nt, Human herpesvirus 6
cuaaacaccacuugaucaca

SEQ ID NO: 323090 - RNA, 16 nt, Human herpesvirus 6
cuaaauacauucacau

SEQ ID NO: 323091 - RNA, 13 nt, Human herpesvirus 6
cuaaauuggucuc

SEQ ID NO: 323092 - RNA, 18 nt, Human herpesvirus 6
cuaaauuucuacaaaaau

SEQ ID NO: 323093 - RNA, 19 nt, Human herpesvirus 6
cuaacauagcgaauuugaa

SEQ ID NO: 323094 - RNA, 16 nt, Human herpesvirus 6
cuaacccuaacccuaa

SEQ ID NO: 323095 - RNA, 19 nt, Human herpesvirus 6
uauuuuauaauacacuauu

SEQ ID NO: 323096 - RNA, 20 nt, Human herpesvirus 6
uauuuuccuguuguguuuac

SEQ ID NO: 323097 - RNA, 18 nt, Human herpesvirus 6
uauuuucguuaucggaga

SEQ ID NO: 323098 - RNA, 21 nt, Human herpesvirus 6
uauuuuggcaaaaaaacccca

SEQ ID NO: 323099 - RNA, 22 nt, Human herpesvirus 6
ucaaaaaaauucccauguugau

SEQ ID NO: 323100 - RNA, 19 nt, Human herpesvirus 6
ucaaaaauguugcauggaa

SEQ ID NO: 323101 - RNA, 21 nt, Human herpesvirus 6
ucaaaauaaauacuagcuaaa

SEQ ID NO: 323102 - RNA, 17 nt, Human herpesvirus 6
ucaaagaaacaguaaau

SEQ ID NO: 323103 - RNA, 12 nt, Human herpesvirus 6
ucaaagaaaguu

SEQ ID NO: 323104 - RNA, 19 nt, Human herpesvirus 6
ucaaauugauuaugauuuc

SEQ ID NO: 323105 - RNA, 18 nt, Human herpesvirus 6
ucaacaacgucaugcaaa

SEQ ID NO: 323106 - RNA, 17 nt, Human herpesvirus 6
ucaacacucucagugua

SEQ ID NO: 323107 - RNA, 21 nt, Human herpesvirus 6
ucaacauaucacuuguauuaa

SEQ ID NO: 323108 - RNA, 15 nt, Human herpesvirus 6
ucaacgugucuauaa

SEQ ID NO: 323109 - RNA, 17 nt, Human herpesvirus 6
ucaacuaaaccaugucu

SEQ ID NO: 323110 - RNA, 21 nt, Human herpesvirus 6
ucaacuaaaccaugucuugca

SEQ ID NO: 323111 - RNA, 21 nt, Human herpesvirus 6
ucaagcaaguuccauuuucaa

SEQ ID NO: 323112 - RNA, 23 nt, Human herpesvirus 6
ucaaguguuuggugugacauuca

SEQ ID NO: 323113 - RNA, 15 nt, Human herpesvirus 6
ucaauaaaaacucaa

SEQ ID NO: 323114 - RNA, 22 nt, Human herpesvirus 6
ucaauaagccgaguuuggcaau

SEQ ID NO: 323115 - RNA, 20 nt, Human herpesvirus 6
ucaaucccuuucaguucaaa

SEQ ID NO: 323116 - RNA, 16 nt, Human herpesvirus 6
ucaaucuguguuucca

SEQ ID NO: 323117 - RNA, 12 nt, Human herpesvirus 6
ucaauuaauaca

SEQ ID NO: 323118 - RNA, 15 nt, Human herpesvirus 6
ucaauuccugugacg

SEQ ID NO: 323119 - RNA, 13 nt, Human herpesvirus 6
ucacaacaaaaau

SEQ ID NO: 323120 - RNA, 14 nt, Human herpesvirus 6
ucacaagcugucca

SEQ ID NO: 323121 - RNA, 17 nt, Human herpesvirus 6
ucacaagcuguccaucu

SEQ ID NO: 323122 - RNA, 22 nt, Human herpesvirus 6
ucacaagcuguccaucuucaga

SEQ ID NO: 323123 - RNA, 21 nt, Human herpesvirus 6
ucacacauucuacuuguacaa

SEQ ID NO: 323124 - RNA, 23 nt, Human herpesvirus 6
ucacaugcgagcaaaaaauaguc

SEQ ID NO: 323125 - RNA, 12 nt, Human herpesvirus 6
ucacauguucuu

SEQ ID NO: 323126 - RNA, 15 nt, Human herpesvirus 6
ucaccagauucacug

SEQ ID NO: 323127 - RNA, 17 nt, Human herpesvirus 6
ucaccagauucacugac

SEQ ID NO: 323128 - RNA, 14 nt, Human herpesvirus 6
ucaccaucaaucuc

SEQ ID NO: 323129 - RNA, 22 nt, Human herpesvirus 6
ucaccgauaaaaacucacacaa

SEQ ID NO: 323130 - RNA, 13 nt, Human herpesvirus 6
ucaccuacauucg

SEQ ID NO: 323131 - RNA, 23 nt, Human herpesvirus 6
ucaccuuagacuuggugaugaug

SEQ ID NO: 323132 - RNA, 17 nt, Human herpesvirus 6
ucacggcuaauaugauc

SEQ ID NO: 323133 - RNA, 16 nt, Human herpesvirus 6
ucacgggcagcugcau

SEQ ID NO: 323134 - RNA, 22 nt, Human herpesvirus 6
ucacuaucaggguuuuguggaa

SEQ ID NO: 323135 - RNA, 18 nt, Human herpesvirus 6
ucacucauacacaggauu

SEQ ID NO: 323136 - RNA, 14 nt, Human herpesvirus 6
ucacuuaagccagc

SEQ ID NO: 323137 - RNA, 21 nt, Human herpesvirus 6
ucagaauccaccaaugacacc

SEQ ID NO: 323138 - RNA, 14 nt, Human herpesvirus 6
ucagaauccagaaa

SEQ ID NO: 323139 - RNA, 13 nt, Human herpesvirus 6
ucagacagugagu

SEQ ID NO: 323140 - RNA, 21 nt, Human herpesvirus 6
ucagagcgggcuauaaucaca

SEQ ID NO: 323141 - RNA, 14 nt, Human herpesvirus 6
ucagaguagaaacu

SEQ ID NO: 323142 - RNA, 14 nt, Human herpesvirus 6
ucagagugaauucc

SEQ ID NO: 323143 - RNA, 22 nt, Human herpesvirus 6
ucagagugaauuccuggacaug

SEQ ID NO: 323144 - RNA, 15 nt, Human herpesvirus 6
ucagaucgagaauuu

SEQ ID NO: 323145 - RNA, 16 nt, Human herpesvirus 6
ucagcacccuaugcaa

SEQ ID NO: 323146 - RNA, 22 nt, Human herpesvirus 6
ucagcacccuaugcaagcucau

SEQ ID NO: 323147 - RNA, 17 nt, Human herpesvirus 6
ucagcccccagcugaaa

SEQ ID NO: 323148 - RNA, 17 nt, Human herpesvirus 6
ucagcuuccguaucaca

SEQ ID NO: 323149 - RNA, 16 nt, Human herpesvirus 6
ucagcuuucauaagcu

SEQ ID NO: 323150 - RNA, 17 nt, Human herpesvirus 6
ucagcuuucauaagcuc

SEQ ID NO: 323151 - RNA, 15 nt, Human herpesvirus 6
ucagucugcuaaaaa

SEQ ID NO: 323152 - RNA, 19 nt, Human herpesvirus 6
ucaguucaaacgcagacua

SEQ ID NO: 323153 - RNA, 13 nt, Human herpesvirus 6
ucauaaacagaca

SEQ ID NO: 323154 - RNA, 19 nt, Human herpesvirus 6
ucauaaacagacagaggaa

SEQ ID NO: 323155 - RNA, 18 nt, Human herpesvirus 6
ucauaaaugguagcuauu

SEQ ID NO: 323156 - RNA, 18 nt, Human herpesvirus 6
ucauacaaaaugaccuca

SEQ ID NO: 323157 - RNA, 20 nt, Human herpesvirus 6
ucauacccgaaguucucuca

SEQ ID NO: 323158 - RNA, 23 nt, Human herpesvirus 6
ucauacccgaaguucucucacgc

SEQ ID NO: 323159 - RNA, 21 nt, Human herpesvirus 6
ucauacuguauggcaaaagca

SEQ ID NO: 323160 - RNA, 18 nt, Human herpesvirus 6
ucauagauuguuauuagu

SEQ ID NO: 323161 - RNA, 20 nt, Human herpesvirus 6
ucauagauuguuauuaguga

SEQ ID NO: 323162 - RNA, 20 nt, Human herpesvirus 6
ucauagauuucauacuguau

SEQ ID NO: 323163 - RNA, 20 nt, Human herpesvirus 6
ucauauggugcguguacaag

SEQ ID NO: 323164 - RNA, 14 nt, Human herpesvirus 6
ucaucacaugccau

SEQ ID NO: 323165 - RNA, 13 nt, Human herpesvirus 6
ucaucagcauuaa

SEQ ID NO: 323166 - RNA, 19 nt, Human herpesvirus 6
ucaucauauaauauuucca

SEQ ID NO: 323167 - RNA, 22 nt, Human herpesvirus 6
ucaucauauaauauuuccauaa

SEQ ID NO: 323168 - RNA, 18 nt, Human herpesvirus 6
ucauccaaauacacuuuc

SEQ ID NO: 323169 - RNA, 19 nt, Human herpesvirus 6
ucaucgccuuuuacuuaca

SEQ ID NO: 323170 - RNA, 16 nt, Human herpesvirus 6
ucaugagagccuucag

SEQ ID NO: 323171 - RNA, 20 nt, Human herpesvirus 6
ucaugaguguuuaacgcuca

SEQ ID NO: 323172 - RNA, 18 nt, Human herpesvirus 6
ucaugauauuccagacaa

SEQ ID NO: 323173 - RNA, 20 nt, Human herpesvirus 6
ucaugauauuccagacaaua

SEQ ID NO: 323174 - RNA, 15 nt, Human herpesvirus 6
ucauggugucuuugu

SEQ ID NO: 323175 - RNA, 23 nt, Human herpesvirus 6
ucauguguagcaucuuaccuuca

SEQ ID NO: 323176 - RNA, 15 nt, Human herpesvirus 6
ucauguucggagaua

SEQ ID NO: 323177 - RNA, 15 nt, Human herpesvirus 6
ucauguuuacugcau

SEQ ID NO: 323178 - RNA, 17 nt, Human herpesvirus 6
ucauuaccaguagcaca

SEQ ID NO: 323179 - RNA, 23 nt, Human herpesvirus 6
ucauucgcuaguaauauaggauu

SEQ ID NO: 323180 - RNA, 18 nt, Human herpesvirus 6
ucauuguuucacuucuag

SEQ ID NO: 323181 - RNA, 17 nt, Human herpesvirus 6
ucauuguuuuugcaugu

SEQ ID NO: 323182 - RNA, 13 nt, Human herpesvirus 6
uccaaaagauuac

SEQ ID NO: 323183 - RNA, 24 nt, Human herpesvirus 6
uccaaaguauuggugcaucaguga

SEQ ID NO: 323184 - RNA, 17 nt, Human herpesvirus 6
uccaaauacacuuucau

SEQ ID NO: 323185 - RNA, 17 nt, Human herpesvirus 6
uccaacacagcaugcau

SEQ ID NO: 323186 - RNA, 15 nt, Human herpesvirus 6
ucccggcccagagac

SEQ ID NO: 323187 - RNA, 19 nt, Human herpesvirus 6
ucccuaugucgauguggau

SEQ ID NO: 323188 - RNA, 22 nt, Human herpesvirus 6
ucccuuaaaaaaacacaguauu

SEQ ID NO: 323189 - RNA, 20 nt, Human herpesvirus 6
ucccuuaauguaugcaucau

SEQ ID NO: 323190 - RNA, 12 nt, Human herpesvirus 6
ucccuuuuacaa

SEQ ID NO: 323191 - RNA, 20 nt, Human herpesvirus 6
uccgaaaggugaaaugaaug

SEQ ID NO: 323192 - RNA, 17 nt, Human herpesvirus 6
uccgagcggugugcagu

SEQ ID NO: 323193 - RNA, 21 nt, Human herpesvirus 6
uccgauacagcaccaucaaua

SEQ ID NO: 323194 - RNA, 22 nt, Human herpesvirus 6
uccgcauaucgcccccauacac

SEQ ID NO: 323195 - RNA, 18 nt, Human herpesvirus 6
uccggggggaaaccucaa

SEQ ID NO: 323196 - RNA, 17 nt, Human herpesvirus 6
uccguggggcacacaug

SEQ ID NO: 323197 - RNA, 15 nt, Human herpesvirus 6
uccguuccaaccucc

SEQ ID NO: 323198 - RNA, 21 nt, Human herpesvirus 6
uccguuucucggcauaucuuc

SEQ ID NO: 323199 - RNA, 18 nt, Human herpesvirus 6
uccguuuuucucugcaaa

SEQ ID NO: 323200 - RNA, 21 nt, Human herpesvirus 6
uccuagaggugccgaugaauu

SEQ ID NO: 323201 - RNA, 22 nt, Human herpesvirus 6
uccuauaaaaaaagcaaauacu

SEQ ID NO: 323202 - RNA, 16 nt, Human herpesvirus 6
uccuauaaauacugaa

SEQ ID NO: 323203 - RNA, 23 nt, Human herpesvirus 6
uccuaugucaauaguuuuacuuc

SEQ ID NO: 323204 - RNA, 20 nt, Human herpesvirus 6
uccuauucagaggugcugau

SEQ ID NO: 323205 - RNA, 17 nt, Human herpesvirus 6
uccucaauaugauauau

SEQ ID NO: 323206 - RNA, 15 nt, Human herpesvirus 6
uccucagaaccaucu

SEQ ID NO: 323207 - RNA, 17 nt, Human herpesvirus 6
uccugacuacgauccau

SEQ ID NO: 323208 - RNA, 14 nt, Human herpesvirus 6
uccugagaguaaau

SEQ ID NO: 323209 - RNA, 15 nt, Human herpesvirus 6
uccuuauaacacaca

SEQ ID NO: 323210 - RNA, 19 nt, Human herpesvirus 6
uccuuccuuuuuucgcaaa

SEQ ID NO: 323211 - RNA, 18 nt, Human herpesvirus 6
uccuucggccgacagcaa

SEQ ID NO: 323212 - RNA, 19 nt, Human herpesvirus 6
ucgaaaacagucuacaugu

SEQ ID NO: 323213 - RNA, 13 nt, Human herpesvirus 6
ucgaaagagauau

SEQ ID NO: 323214 - RNA, 18 nt, Human herpesvirus 6
ucgaaaguucaucuuuca

SEQ ID NO: 323215 - RNA, 15 nt, Human herpesvirus 6
ucgaaugagcucauu

SEQ ID NO: 323216 - RNA, 19 nt, Human herpesvirus 6
ucgaaugcccacaccaucu

SEQ ID NO: 323217 - RNA, 14 nt, Human herpesvirus 6
ucgaccauguguau

SEQ ID NO: 323218 - RNA, 16 nt, Human herpesvirus 6
ucgaccauguguauau

SEQ ID NO: 323219 - RNA, 21 nt, Human herpesvirus 6
ucgagaauacgcuguguuuac

SEQ ID NO: 323220 - RNA, 23 nt, Human herpesvirus 6
ucgagaauacgcuguguuuacau

SEQ ID NO: 323221 - RNA, 17 nt, Human herpesvirus 6
ucgagaccgacaguauu

SEQ ID NO: 323222 - RNA, 13 nt, Human herpesvirus 6
ucgagccaaagaa

SEQ ID NO: 323223 - RNA, 22 nt, Human herpesvirus 6
ucgauaaacgguuuaaucucac

SEQ ID NO: 323224 - RNA, 15 nt, Human herpesvirus 6
ucgaucgcaccaucu

SEQ ID NO: 323225 - RNA, 21 nt, Human herpesvirus 6
ucgaugucggaaucuacugag

SEQ ID NO: 323226 - RNA, 20 nt, Human herpesvirus 6
ucgaugucuugcuauuugca

SEQ ID NO: 323227 - RNA, 13 nt, Human herpesvirus 6
ucgauugugaugu

SEQ ID NO: 323228 - RNA, 13 nt, Human herpesvirus 6
ucgauuucacuua

SEQ ID NO: 323229 - RNA, 17 nt, Human herpesvirus 6
ucgcaaacagcuuuauu

SEQ ID NO: 323230 - RNA, 14 nt, Human herpesvirus 6
ucgcaagcuaucau

SEQ ID NO: 323231 - RNA, 11 nt, Human herpesvirus 6
ucgcaaugauu

SEQ ID NO: 323232 - RNA, 19 nt, Human herpesvirus 6
ucgcaccucugaaacacug

SEQ ID NO: 323233 - RNA, 14 nt, Human herpesvirus 6
ucgcacgcacauau

SEQ ID NO: 323234 - RNA, 20 nt, Human herpesvirus 6
ucgcauuagaaaaucuucca

SEQ ID NO: 323235 - RNA, 14 nt, Human herpesvirus 6
ucgccuaccuucac

SEQ ID NO: 323236 - RNA, 21 nt, Human herpesvirus 6
ucgccuugucaucaugugugc

SEQ ID NO: 323237 - RNA, 18 nt, Human herpesvirus 6
ucgccuuuuacuuacauc

SEQ ID NO: 323238 - RNA, 19 nt, Human herpesvirus 6
ucgcuuaaagcguuugcaa

SEQ ID NO: 323239 - RNA, 16 nt, Human herpesvirus 6
ucggaagacauuucua

SEQ ID NO: 323240 - RNA, 15 nt, Human herpesvirus 6
ucggcgaugcaucug

SEQ ID NO: 323241 - RNA, 20 nt, Human herpesvirus 6
ucgggcuuugugaaauaucg

SEQ ID NO: 323242 - RNA, 18 nt, Human herpesvirus 6
ucgguaaacuuaccauau

SEQ ID NO: 323243 - RNA, 17 nt, Human herpesvirus 6
ucggucaccuacauucg

SEQ ID NO: 323244 - RNA, 17 nt, Human herpesvirus 6
ucggucagacagugagu

SEQ ID NO: 323245 - RNA, 14 nt, Human herpesvirus 6
ucgguccaaggauu

SEQ ID NO: 323246 - RNA, 23 nt, Human herpesvirus 6
ucgguccguuuuucucugcaaaa

SEQ ID NO: 323247 - RNA, 20 nt, Human herpesvirus 6
ucggucuugcuaagggugcc

SEQ ID NO: 323248 - RNA, 19 nt, Human herpesvirus 6
ucggugauuauagauagcu

SEQ ID NO: 323249 - RNA, 19 nt, Human herpesvirus 6
ucgguugcuuauaugcagc

SEQ ID NO: 323250 - RNA, 18 nt, Human herpesvirus 6
ucguaaccauucugcaaa

SEQ ID NO: 323251 - RNA, 17 nt, Human herpesvirus 6
ucgucaaaggcgaugaa

SEQ ID NO: 323252 - RNA, 17 nt, Human herpesvirus 6
ucgucgccuccccgggu

SEQ ID NO: 323253 - RNA, 15 nt, Human herpesvirus 6
ucgucuccuacauuc

SEQ ID NO: 323254 - RNA, 20 nt, Human herpesvirus 6
ucgugaucaccgugaucauc

SEQ ID NO: 323255 - RNA, 22 nt, Human herpesvirus 6
ucgugauccaaauccugacuac

SEQ ID NO: 323256 - RNA, 22 nt, Human herpesvirus 6
ucgugcucgccguauaagucua

SEQ ID NO: 323257 - RNA, 14 nt, Human herpesvirus 6
ucguggacaaugau

SEQ ID NO: 323258 - RNA, 15 nt, Human herpesvirus 6
ucguggacaaugaua

SEQ ID NO: 323259 - RNA, 16 nt, Human herpesvirus 6
ucguuaacaauaauac

SEQ ID NO: 323260 - RNA, 20 nt, Human herpesvirus 6
ucguuccccaugucuugccu

SEQ ID NO: 323261 - RNA, 13 nt, Human herpesvirus 6
ucuaaaaucaaaa

SEQ ID NO: 323262 - RNA, 21 nt, Human herpesvirus 6
ucuaauaucguuagguuuugu

SEQ ID NO: 323263 - RNA, 11 nt, Human herpesvirus 6
ucuaauucaca

SEQ ID NO: 323264 - RNA, 21 nt, Human herpesvirus 6
ucuacguaugaaaguccucaa

SEQ ID NO: 323265 - RNA, 12 nt, Human herpesvirus 6
ucuacugagauc

SEQ ID NO: 323266 - RNA, 14 nt, Human herpesvirus 6
ucuacugagaucau

SEQ ID NO: 323267 - RNA, 18 nt, Human herpesvirus 6
ucuacuuguacaaauuca

SEQ ID NO: 323268 - RNA, 17 nt, Human herpesvirus 6
ucuagaauaucugcuaa

SEQ ID NO: 323269 - RNA, 18 nt, Human herpesvirus 6
ucuagacucgccgaugaa

SEQ ID NO: 323270 - RNA, 23 nt, Human herpesvirus 6
ucuagauacggugucacacagca

SEQ ID NO: 323271 - RNA, 17 nt, Human herpesvirus 6
ucuagaugcaaaucuca

SEQ ID NO: 323272 - RNA, 14 nt, Human herpesvirus 6
uuucuaaacacaga

SEQ ID NO: 323273 - RNA, 15 nt, Human herpesvirus 6
uuucuccgcacguua

SEQ ID NO: 323274 - RNA, 14 nt, Human herpesvirus 6
uuucucugcaaaac

SEQ ID NO: 323275 - RNA, 17 nt, Human herpesvirus 6
uuucucugcaaaacaaa

SEQ ID NO: 323276 - RNA, 12 nt, Human herpesvirus 6
uuucuuacaaca

SEQ ID NO: 323277 - RNA, 18 nt, Human herpesvirus 6
uuucuuugcagagaugua

SEQ ID NO: 323278 - RNA, 20 nt, Human herpesvirus 6
uuugaaaaaacaguuuaccu

SEQ ID NO: 323279 - RNA, 21 nt, Human herpesvirus 6
uuugacauugcugaaccauac

SEQ ID NO: 323280 - RNA, 17 nt, Human herpesvirus 6
uuugauuuuguacagua

SEQ ID NO: 323281 - RNA, 13 nt, Human herpesvirus 6
uuugcaaaacugu

SEQ ID NO: 323282 - RNA, 18 nt, Human herpesvirus 6
uuugcaaaacuguuaaaa

SEQ ID NO: 323283 - RNA, 19 nt, Human herpesvirus 6
uuugcaaaacuguuaaaag

SEQ ID NO: 323284 - RNA, 23 nt, Human herpesvirus 6
uuugcauaauaauggcaugcauu

SEQ ID NO: 323285 - RNA, 21 nt, Human herpesvirus 6
uuugcauauuauuaacaauga

SEQ ID NO: 323286 - RNA, 15 nt, Human herpesvirus 6
uuuggcuucuauauc

SEQ ID NO: 323287 - RNA, 13 nt, Human herpesvirus 6
uuugggugcuauu

SEQ ID NO: 323288 - RNA, 14 nt, Human herpesvirus 6
uuuguagaguguua

SEQ ID NO: 323289 - RNA, 23 nt, Human herpesvirus 6
uuugucggcagguauaagaacug

SEQ ID NO: 323290 - RNA, 13 nt, Human herpesvirus 6
uuugugaaauauc

SEQ ID NO: 323291 - RNA, 13 nt, Human herpesvirus 6
uuuguguccuuga

SEQ ID NO: 323292 - RNA, 14 nt, Human herpesvirus 6
uuuguguccuugaa

SEQ ID NO: 323293 - RNA, 14 nt, Human herpesvirus 6
uuuuaauacauuuc

SEQ ID NO: 323294 - RNA, 14 nt, Human herpesvirus 6
uuuuacaucacgac

SEQ ID NO: 323295 - RNA, 13 nt, Human herpesvirus 6
uuuuacuugauaa

SEQ ID NO: 323296 - RNA, 15 nt, Human herpesvirus 6
uuuuagucuauccau

SEQ ID NO: 323297 - RNA, 19 nt, Human herpesvirus 6
uuuuauccauccaauccaa

SEQ ID NO: 323298 - RNA, 20 nt, Human herpesvirus 6
uuuuauccauccaauccaau

SEQ ID NO: 323299 - RNA, 20 nt, Human herpesvirus 6
uuuuaugaucgacauuugua

SEQ ID NO: 323300 - RNA, 20 nt, Human herpesvirus 6
uuuuauuccaaccucuaaau

SEQ ID NO: 323301 - RNA, 19 nt, Human herpesvirus 6
uuuuauuucuuacuaggaa

SEQ ID NO: 323302 - RNA, 20 nt, Human herpesvirus 6
uuuucaagagcgagaucuau

SEQ ID NO: 323303 - RNA, 12 nt, Human herpesvirus 6
uuuuccauaaag

SEQ ID NO: 323304 - RNA, 18 nt, Human herpesvirus 6
uuuucgcgcgcgugugug

SEQ ID NO: 323305 - RNA, 17 nt, Human herpesvirus 6
uuuucggugcacaugga

SEQ ID NO: 323306 - RNA, 21 nt, Human herpesvirus 6
uuuucuaucacucauacacag

SEQ ID NO: 323307 - RNA, 15 nt, Human herpesvirus 6
uuuugcaugugauaa

SEQ ID NO: 323308 - RNA, 19 nt, Human herpesvirus 6
uuuuggcuauuugacaaua

SEQ ID NO: 323309 - RNA, 12 nt, Human herpesvirus 6
uuuuuaauucca

SEQ ID NO: 323310 - RNA, 17 nt, Human herpesvirus 6
uuuuuaccgaaccauaa

SEQ ID NO: 323311 - RNA, 15 nt, Human herpesvirus 6
uuuuuauucugcuau

SEQ ID NO: 323312 - RNA, 23 nt, Human herpesvirus 6
uuuuuccgauacagcaccaucaa

SEQ ID NO: 323313 - RNA, 18 nt, Human herpesvirus 6
uuuuucggaaaacagcuc

SEQ ID NO: 323314 - RNA, 13 nt, Human herpesvirus 6
uuuuugcauguga

SEQ ID NO: 323315 - RNA, 16 nt, Human herpesvirus 6
gaaaacuaugugcauu

SEQ ID NO: 323316 - RNA, 12 nt, Human herpesvirus 6
gaaaacuauuaa

SEQ ID NO: 323317 - RNA, 22 nt, Human herpesvirus 6
gaaaagaugagcgucagaguac

SEQ ID NO: 323318 - RNA, 19 nt, Human herpesvirus 6
gaaaagcaucucaaaaaac

SEQ ID NO: 323319 - RNA, 17 nt, Human herpesvirus 6
gaaaagcccuuacuuga

SEQ ID NO: 323320 - RNA, 17 nt, Human herpesvirus 6
gaaaauaacgauggagu

SEQ ID NO: 323321 - RNA, 19 nt, Human herpesvirus 6
gaaaauguuucauccaaau

SEQ ID NO: 323322 - RNA, 20 nt, Human herpesvirus 6
gaaaauguuucauccaaaua

SEQ ID NO: 323323 - RNA, 14 nt, Human herpesvirus 6
gaaaauguuuuuca

SEQ ID NO: 323324 - RNA, 15 nt, Human herpesvirus 6
gaaaauugaugaugu

SEQ ID NO: 323325 - RNA, 17 nt, Human herpesvirus 6
gaaaauugcagaucuaa

SEQ ID NO: 323326 - RNA, 19 nt, Human herpesvirus 6
gaaacaacgacuaccacau

SEQ ID NO: 323327 - RNA, 23 nt, Human herpesvirus 6
gaaacagauaguguuuucugauu

SEQ ID NO: 323328 - RNA, 18 nt, Human herpesvirus 6
gaaacaggaacagucuga

SEQ ID NO: 323329 - RNA, 11 nt, Human herpesvirus 6
gaaacaguaaa

SEQ ID NO: 323330 - RNA, 17 nt, Human herpesvirus 6
gaaacaugaacauugaa

SEQ ID NO: 323331 - RNA, 14 nt, Human herpesvirus 6
gaaacauuugcuga

SEQ ID NO: 323332 - RNA, 15 nt, Human herpesvirus 6
gaaacauuugcugau

SEQ ID NO: 323333 - RNA, 20 nt, Human herpesvirus 6
gaaaccuauuagguguccuu

SEQ ID NO: 323334 - RNA, 16 nt, Human herpesvirus 6
gaaacgaagucuuugg

SEQ ID NO: 323335 - RNA, 14 nt, Human herpesvirus 6
gaaacgacaaagaa

SEQ ID NO: 323336 - RNA, 18 nt, Human herpesvirus 6
gaaacgaucgacccacuc

SEQ ID NO: 323337 - RNA, 23 nt, Human herpesvirus 6
gaaacggcgcggagcccaagaag

SEQ ID NO: 323338 - RNA, 16 nt, Human herpesvirus 6
gaaacuccccagagaa

SEQ ID NO: 323339 - RNA, 19 nt, Human herpesvirus 6
gaaacucuuauaacaagca

SEQ ID NO: 323340 - RNA, 17 nt, Human herpesvirus 6
gaaagaccguagcaaaa

SEQ ID NO: 323341 - RNA, 15 nt, Human herpesvirus 6
gaaagccggugaccg

SEQ ID NO: 323342 - RNA, 18 nt, Human herpesvirus 6
gaaaggccguuggaucca

SEQ ID NO: 323343 - RNA, 18 nt, Human herpesvirus 6
gaaaggugaaaugaaugu

SEQ ID NO: 323344 - RNA, 22 nt, Human herpesvirus 6
gaaaguuucguacuggagaaua

SEQ ID NO: 323345 - RNA, 16 nt, Human herpesvirus 6
gaaauaaaaaauauua

SEQ ID NO: 323346 - RNA, 22 nt, Human herpesvirus 6
gaaaucuacuguacaaaaucaa

SEQ ID NO: 323347 - RNA, 23 nt, Human herpesvirus 6
gaaaucugaauuuaaugcaaaau

SEQ ID NO: 323348 - RNA, 17 nt, Human herpesvirus 6
gaaaugaaugccgacau

SEQ ID NO: 323349 - RNA, 22 nt, Human herpesvirus 6
gaaaugaugaguaauacaucau

SEQ ID NO: 323350 - RNA, 22 nt, Human herpesvirus 6
gaaaugcaaucuucugcuucuu

SEQ ID NO: 323351 - RNA, 14 nt, Human herpesvirus 6
gaaauucuauguac

SEQ ID NO: 323352 - RNA, 20 nt, Human herpesvirus 6
gaaauuugagaaaguuguac

SEQ ID NO: 323353 - RNA, 14 nt, Human herpesvirus 6
gaacaauuaucaca

SEQ ID NO: 323354 - RNA, 21 nt, Human herpesvirus 6
gaacaauuaucacaguugaua

SEQ ID NO: 323355 - RNA, 19 nt, Human herpesvirus 6
ugacggaggcgacgaaaga

SEQ ID NO: 323356 - RNA, 20 nt, Human herpesvirus 6
ugacguauccucagaaccau

SEQ ID NO: 323357 - RNA, 15 nt, Human herpesvirus 6
ugacuacagcugcag

SEQ ID NO: 323358 - RNA, 16 nt, Human herpesvirus 6
ugacuguguguugaau

SEQ ID NO: 323359 - RNA, 14 nt, Human herpesvirus 6
ugacuuauaaguca

SEQ ID NO: 323360 - RNA, 15 nt, Human herpesvirus 6
ugagaaagccgguga

SEQ ID NO: 323361 - RNA, 19 nt, Human herpesvirus 6
ugagacacuguaucuguug

SEQ ID NO: 323362 - RNA, 22 nt, Human herpesvirus 6
ugagacucuacgaucuuauaug

SEQ ID NO: 323363 - RNA, 20 nt, Human herpesvirus 6
ugagccagauucgguugcuu

SEQ ID NO: 323364 - RNA, 15 nt, Human herpesvirus 6
ugagccgcacuguug

SEQ ID NO: 323365 - RNA, 18 nt, Human herpesvirus 6
ugagcuuguggaucaucu

SEQ ID NO: 323366 - RNA, 20 nt, Human herpesvirus 6
ugagcuuguggaucaucucc

SEQ ID NO: 323367 - RNA, 14 nt, Human herpesvirus 6
ugaggaaaucugaa

SEQ ID NO: 323368 - RNA, 21 nt, Human herpesvirus 6
ugagggguaugucugugcaaa

SEQ ID NO: 323369 - RNA, 13 nt, Human herpesvirus 6
ugagguauaucuc

SEQ ID NO: 323370 - RNA, 20 nt, Human herpesvirus 6
ugagguuuccgucucgccua

SEQ ID NO: 323371 - RNA, 14 nt, Human herpesvirus 6
ugaguauauaaaaa

SEQ ID NO: 323372 - RNA, 13 nt, Human herpesvirus 6
ugagugaguacaa

SEQ ID NO: 323373 - RNA, 22 nt, Human herpesvirus 6
ugauaaauugaugaaauuguga

SEQ ID NO: 323374 - RNA, 23 nt, Human herpesvirus 6
ugauaaucugaucgaaauacuuc

SEQ ID NO: 323375 - RNA, 11 nt, Human herpesvirus 6
ugauacauccc

SEQ ID NO: 323376 - RNA, 18 nt, Human herpesvirus 6
ugauacuauaaacaauug

SEQ ID NO: 323377 - RNA, 16 nt, Human herpesvirus 6
ugauaucauucucaag

SEQ ID NO: 323378 - RNA, 18 nt, Human herpesvirus 6
ugauauuccagacaauaa

SEQ ID NO: 323379 - RNA, 14 nt, Human herpesvirus 6
ugaucucacgucac

SEQ ID NO: 323380 - RNA, 15 nt, Human herpesvirus 6
ugaucugcuugauau

SEQ ID NO: 323381 - RNA, 15 nt, Human herpesvirus 6
ugaucuuuacaaaag

SEQ ID NO: 323382 - RNA, 19 nt, Human herpesvirus 6
ugaugaaagcuucauuuau

SEQ ID NO: 323383 - RNA, 12 nt, Human herpesvirus 6
ugaugaucugcc

SEQ ID NO: 323384 - RNA, 14 nt, Human herpesvirus 6
ugaugcgaugugga

SEQ ID NO: 323385 - RNA, 22 nt, Human herpesvirus 6
ugauggaguuauuggaccacga

SEQ ID NO: 323386 - RNA, 20 nt, Human herpesvirus 6
ugauuaguuuucacaaagaa

SEQ ID NO: 323387 - RNA, 18 nt, Human herpesvirus 6
ugauuaucauagacaaac

SEQ ID NO: 323388 - RNA, 20 nt, Human herpesvirus 6
ugauuauucugucuugauaa

SEQ ID NO: 323389 - RNA, 15 nt, Human herpesvirus 6
ugauuccucaaauga

SEQ ID NO: 323390 - RNA, 19 nt, Human herpesvirus 6
ugauucgacaaaucaucac

SEQ ID NO: 323391 - RNA, 19 nt, Human herpesvirus 6
ugauuguaauaaaguguca

SEQ ID NO: 323392 - RNA, 17 nt, Human herpesvirus 6
uucucuuuuuaauucca

SEQ ID NO: 323393 - RNA, 18 nt, Human herpesvirus 6
uucucuuuuuaauuccaa

SEQ ID NO: 323394 - RNA, 21 nt, Human herpesvirus 6
uucuggcacaggcauagcagc

SEQ ID NO: 323395 - RNA, 15 nt, Human herpesvirus 6
uucuguccaaugacu

SEQ ID NO: 323396 - RNA, 19 nt, Human herpesvirus 6
uucuguccaaugacuacua

SEQ ID NO: 323397 - RNA, 12 nt, Human herpesvirus 6
uucugucugcag

SEQ ID NO: 323398 - RNA, 12 nt, Human herpesvirus 6
uucugugacuau

SEQ ID NO: 323399 - RNA, 16 nt, Human herpesvirus 6
uucuguugaauuccag

SEQ ID NO: 323400 - RNA, 21 nt, Human herpesvirus 6
uucuuauuuaccuuccugaga

SEQ ID NO: 323401 - RNA, 17 nt, Human herpesvirus 6
uucuucaggugucucaa

SEQ ID NO: 323402 - RNA, 17 nt, Human herpesvirus 6
uucuugaaaaaccuuau

SEQ ID NO: 323403 - RNA, 14 nt, Human herpesvirus 6
uucuugauuagaga

SEQ ID NO: 323404 - RNA, 18 nt, Human herpesvirus 6
uucuugcuaccgacucca

SEQ ID NO: 323405 - RNA, 13 nt, Human herpesvirus 6
uucuuucuaaaau

SEQ ID NO: 323406 - RNA, 23 nt, Human herpesvirus 6
uucuuucuacgguaggcagggaa

SEQ ID NO: 323407 - RNA, 21 nt, Human herpesvirus 6
uugaaaaaccuuauacagaug

SEQ ID NO: 323408 - RNA, 18 nt, Human herpesvirus 6
uugaaaauguuuuucaua

SEQ ID NO: 323409 - RNA, 15 nt, Human herpesvirus 6
uugaaaccacugacc

SEQ ID NO: 323410 - RNA, 14 nt, Human herpesvirus 6
uugaaacuagguga

SEQ ID NO: 323411 - RNA, 15 nt, Human herpesvirus 6
uugaaaucuacugua

SEQ ID NO: 323412 - RNA, 19 nt, Human herpesvirus 6
uugaacuuuguaaagaagu

SEQ ID NO: 323413 - RNA, 22 nt, Human herpesvirus 6
uugaagauauggaugaucacua

SEQ ID NO: 323414 - RNA, 17 nt, Human herpesvirus 6
uugaauaauaagccuaa

SEQ ID NO: 323415 - RNA, 19 nt, Human herpesvirus 6
uugaaugaacgcacuggac

SEQ ID NO: 323416 - RNA, 22 nt, Human herpesvirus 6
uugaauuguauauauagcugua

SEQ ID NO: 323417 - RNA, 23 nt, Human herpesvirus 6
uugacagauauuaacacagucuu

SEQ ID NO: 323418 - RNA, 13 nt, Human herpesvirus 6
uugaccagccaga

SEQ ID NO: 323419 - RNA, 17 nt, Human herpesvirus 6
uugacguauccucagaa

SEQ ID NO: 323420 - RNA, 17 nt, Human herpesvirus 6
uugagauuuacaccaaa

SEQ ID NO: 323421 - RNA, 19 nt, Human herpesvirus 6
uugagugccucagagguga

SEQ ID NO: 323422 - RNA, 15 nt, Human herpesvirus 6
uugaguuuccugcaa

SEQ ID NO: 323423 - RNA, 15 nt, Human herpesvirus 6
uugauaaacuguaug

SEQ ID NO: 323424 - RNA, 20 nt, Human herpesvirus 6
uugauaaacuguaugcaaua

SEQ ID NO: 323425 - RNA, 15 nt, Human herpesvirus 6
uugauccccccaaaa

SEQ ID NO: 323426 - RNA, 17 nt, Human herpesvirus 6
uugaugauuuacaccua

SEQ ID NO: 323427 - RNA, 20 nt, Human herpesvirus 6
uugcacucgaaaacagucua

SEQ ID NO: 323428 - RNA, 18 nt, Human herpesvirus 6
uugcagaucuaauucaca

SEQ ID NO: 323429 - RNA, 19 nt, Human herpesvirus 6
uugcagaucuaauucacau

SEQ ID NO: 323430 - RNA, 20 nt, Human herpesvirus 6
uugcauauuauuaacaauga

SEQ ID NO: 323431 - RNA, 12 nt, Human herpesvirus 6
uugcauggaaaa

SEQ ID NO: 323432 - RNA, 20 nt, Human herpesvirus 6
uugcaugugauaaauucgau

SEQ ID NO: 323433 - RNA, 23 nt, Human herpesvirus 6
uugccaaggaaagacaugcauuu

SEQ ID NO: 323434 - RNA, 19 nt, Human herpesvirus 6
uuggacaccgguaaccucg

SEQ ID NO: 323435 - RNA, 19 nt, Human herpesvirus 6
uuggagagacguuguuuga

SEQ ID NO: 323436 - RNA, 15 nt, Human herpesvirus 6
uuggcauugauaaug

SEQ ID NO: 323437 - RNA, 23 nt, Human herpesvirus 6
uuggcugugacgaagauggaugu

SEQ ID NO: 323438 - RNA, 15 nt, Human herpesvirus 6
uugggacauguauau

SEQ ID NO: 323439 - RNA, 13 nt, Human herpesvirus 6
uugggacuaggaa

SEQ ID NO: 323440 - RNA, 17 nt, Human herpesvirus 6
uuucucgaaaaaacaac

SEQ ID NO: 323441 - RNA, 17 nt, Human herpesvirus 6
uuucucggcauaucuuc

SEQ ID NO: 323442 - RNA, 15 nt, Human herpesvirus 6
uuucugacucucuca

SEQ ID NO: 323443 - RNA, 21 nt, Human herpesvirus 6
uuucuguccaaugacuacuaa

SEQ ID NO: 323444 - RNA, 15 nt, Human herpesvirus 6
uuucuguuacugcga

SEQ ID NO: 323445 - RNA, 17 nt, Human herpesvirus 6
uuucuguugaauuccag

SEQ ID NO: 323446 - RNA, 18 nt, Human herpesvirus 6
uuucuuacaacaggcuug

SEQ ID NO: 323447 - RNA, 18 nt, Human herpesvirus 6
uuucuugguuguguauau

SEQ ID NO: 323448 - RNA, 22 nt, Human herpesvirus 6
uuucuuuaccgaguagguaaaa

SEQ ID NO: 323449 - RNA, 14 nt, Human herpesvirus 6
uuucuuuugaggga

SEQ ID NO: 323450 - RNA, 18 nt, Human herpesvirus 6
uuugaauucucauuugaa

SEQ ID NO: 323451 - RNA, 14 nt, Human herpesvirus 6
uuugacauugcuga

SEQ ID NO: 323452 - RNA, 17 nt, Human herpesvirus 6
uuugacugauacuugaa

SEQ ID NO: 323453 - RNA, 16 nt, Human herpesvirus 6
uuugaggcaggaucag

SEQ ID NO: 323454 - RNA, 20 nt, Human herpesvirus 6
uuugaggcaggaucagauuu

SEQ ID NO: 323455 - RNA, 19 nt, Human herpesvirus 6
uuugauuuuguacaguaga

SEQ ID NO: 323456 - RNA, 15 nt, Human herpesvirus 6
uuugcaaaacuguua

SEQ ID NO: 323457 - RNA, 15 nt, Human herpesvirus 6
uuugcagagauguau

SEQ ID NO: 323458 - RNA, 16 nt, Human herpesvirus 6
uuugcauacauuccuu

SEQ ID NO: 323459 - RNA, 16 nt, Human herpesvirus 6
uuugccgucacacucu

SEQ ID NO: 323460 - RNA, 20 nt, Human herpesvirus 6
uuugcugaugcgauguggag

SEQ ID NO: 323461 - RNA, 18 nt, Human herpesvirus 6
uuuggauaagcagaagag

SEQ ID NO: 323462 - RNA, 14 nt, Human herpesvirus 6
uuuggauauaaaga

SEQ ID NO: 323463 - RNA, 19 nt, Human herpesvirus 6
uuugggauacauaauaucu

SEQ ID NO: 323464 - RNA, 22 nt, Human herpesvirus 6
uuugggauacauaauaucuauc

SEQ ID NO: 323465 - RNA, 14 nt, Human herpesvirus 6
uuuggugaacacca

SEQ ID NO: 323466 - RNA, 18 nt, Human herpesvirus 6
uuuguaaauacuaaaugu

SEQ ID NO: 323467 - RNA, 15 nt, Human herpesvirus 6
uuuguuuucuacauu

SEQ ID NO: 323468 - RNA, 19 nt, Human herpesvirus 6
uuuuaaaagauuugaucca

SEQ ID NO: 323469 - RNA, 16 nt, Human herpesvirus 6
uuuuaaagcacauaag

SEQ ID NO: 323470 - RNA, 17 nt, Human herpesvirus 6
uuuuaacaguacuauga

SEQ ID NO: 323471 - RNA, 19 nt, Human herpesvirus 6
uuuuaacaguacuaugauu

SEQ ID NO: 323472 - RNA, 18 nt, Human herpesvirus 6
uuuuaagucguuguguca

SEQ ID NO: 323473 - RNA, 20 nt, Human herpesvirus 6
uuuuaaucaugauugcauca

SEQ ID NO: 323474 - RNA, 19 nt, Human herpesvirus 6
uuuuaauccauauuuggaa

SEQ ID NO: 323475 - RNA, 17 nt, Human herpesvirus 6
uuuuaauuacggaacaa

SEQ ID NO: 323476 - RNA, 16 nt, Human herpesvirus 6
uuuuacaauacacaga

SEQ ID NO: 323477 - RNA, 19 nt, Human herpesvirus 6
uuuuaccgguuugguggua

SEQ ID NO: 323478 - RNA, 15 nt, Human herpesvirus 6
uuuuaugguugggua

SEQ ID NO: 323479 - RNA, 19 nt, Human herpesvirus 6
uuuucaccaucaaucucua

SEQ ID NO: 323480 - RNA, 13 nt, Human herpesvirus 6
uuuucacuuggag

SEQ ID NO: 323481 - RNA, 23 nt, Human herpesvirus 6
uuuucauaaaugguagcuauuau

SEQ ID NO: 323482 - RNA, 23 nt, Human herpesvirus 6
uuuuccuguuguguuuacauaua

SEQ ID NO: 323483 - RNA, 17 nt, Human herpesvirus 6
uuuucgcuugaugcaug

SEQ ID NO: 323484 - RNA, 15 nt, Human herpesvirus 6
uuuucggauuuugaa

SEQ ID NO: 323485 - RNA, 15 nt, Human herpesvirus 6
uuuucuaucacucau

SEQ ID NO: 323486 - RNA, 13 nt, Human herpesvirus 6
uuuucucugcaaa

SEQ ID NO: 323487 - RNA, 21 nt, Human herpesvirus 6
uuuugaaaugucgaaucucaa

SEQ ID NO: 323488 - RNA, 13 nt, Human herpesvirus 6
uuuugcaugcauu

SEQ ID NO: 323489 - RNA, 16 nt, Human herpesvirus 6
uuuugcaugugauaaa

SEQ ID NO: 323490 - RNA, 14 nt, Human herpesvirus 6
uuuuguaccagcau

SEQ ID NO: 323491 - RNA, 16 nt, Human herpesvirus 6
uuuuguagaguguuau

SEQ ID NO: 323492 - RNA, 12 nt, Human herpesvirus 6
uuuuguugguua

SEQ ID NO: 323493 - RNA, 12 nt, Human herpesvirus 6
uuuuuaacuaau

SEQ ID NO: 323494 - RNA, 12 nt, Human herpesvirus 6
uuuuuuaugcaa

SEQ ID NO: 323495 - RNA, 17 nt, Human herpesvirus 6
aauugauacaaacguga

SEQ ID NO: 323496 - RNA, 22 nt, Human herpesvirus 6
aauugcguuaccgugucuuuaa

SEQ ID NO: 323497 - RNA, 23 nt, Human herpesvirus 6
aauugguuuuuuuuaacaguguc

SEQ ID NO: 323498 - RNA, 19 nt, Human herpesvirus 6
aauugugcaagcuguauga

SEQ ID NO: 323499 - RNA, 21 nt, Human herpesvirus 6
aauuguguccuuugccuguau

SEQ ID NO: 323500 - RNA, 15 nt, Human herpesvirus 6
aauuuaccguuuaaa

SEQ ID NO: 323501 - RNA, 19 nt, Human herpesvirus 6
aauuuaccguuuaaacuau

SEQ ID NO: 323502 - RNA, 22 nt, Human herpesvirus 6
aauuuagccuauuaagcagccg

SEQ ID NO: 323503 - RNA, 18 nt, Human herpesvirus 6
aauuuaucgcagcaucau

SEQ ID NO: 323504 - RNA, 19 nt, Human herpesvirus 6
aauuuaucgcagcaucaug

SEQ ID NO: 323505 - RNA, 12 nt, Human herpesvirus 6
aauuucauagac

SEQ ID NO: 323506 - RNA, 17 nt, Human herpesvirus 6
aauuuccugaucacaga

SEQ ID NO: 323507 - RNA, 19 nt, Human herpesvirus 6
aauuucuuguugaguuuca

SEQ ID NO: 323508 - RNA, 15 nt, Human herpesvirus 6
aauuugaacguauga

SEQ ID NO: 323509 - RNA, 18 nt, Human herpesvirus 6
uuaacgcagcaacaaucc

SEQ ID NO: 323510 - RNA, 22 nt, Human herpesvirus 6
uuaacggagaucuggugaaugu

SEQ ID NO: 323511 - RNA, 19 nt, Human herpesvirus 6
uuaacuacaucaacuacau

SEQ ID NO: 323512 - RNA, 13 nt, Human herpesvirus 6
uuaacuauggagu

SEQ ID NO: 323513 - RNA, 15 nt, Human herpesvirus 6
uuaacuucgacagac

SEQ ID NO: 323514 - RNA, 16 nt, Human herpesvirus 6
uuaaguagugcuucaa

SEQ ID NO: 323515 - RNA, 23 nt, Human herpesvirus 6
uuaauaaauugguuuuuuuuaac

SEQ ID NO: 323516 - RNA, 16 nt, Human herpesvirus 6
uuaauaguuacuuuga

SEQ ID NO: 323517 - RNA, 16 nt, Human herpesvirus 6
uuaauguccagugaua

SEQ ID NO: 323518 - RNA, 17 nt, Human herpesvirus 6
uuaauuacauauaguca

SEQ ID NO: 323519 - RNA, 19 nt, Human herpesvirus 6
uuaauuacauauagucaau

SEQ ID NO: 323520 - RNA, 10 nt, Human herpesvirus 6
uuaauuccaa

SEQ ID NO: 323521 - RNA, 17 nt, Human herpesvirus 6
uuaauuccagcuuucuu

SEQ ID NO: 323522 - RNA, 20 nt, Human herpesvirus 6
uuaauuccagcuuucuuaga

SEQ ID NO: 323523 - RNA, 16 nt, Human herpesvirus 6
uuaauucuaaauacga

SEQ ID NO: 323524 - RNA, 15 nt, Human herpesvirus 6
uuaauugcgcaggaa

SEQ ID NO: 323525 - RNA, 19 nt, Human herpesvirus 6
uuacaaaagacacaaucuu

SEQ ID NO: 323526 - RNA, 18 nt, Human herpesvirus 6
uuacaaaucuucccuuuu

SEQ ID NO: 323527 - RNA, 18 nt, Human herpesvirus 6
uuacaacugaaacuucac

SEQ ID NO: 323528 - RNA, 14 nt, Human herpesvirus 6
uuacaauacacaga

SEQ ID NO: 323529 - RNA, 20 nt, Human herpesvirus 6
uuacaauguuuuugacaaau

SEQ ID NO: 323530 - RNA, 18 nt, Human herpesvirus 6
uuacaauuuaauauaucu

SEQ ID NO: 323531 - RNA, 21 nt, Human herpesvirus 6
uuacaccuaacgcgggauauu

SEQ ID NO: 323532 - RNA, 13 nt, Human herpesvirus 6
uuacauauacauu

SEQ ID NO: 323533 - RNA, 13 nt, Human herpesvirus 6
uuacauauaguca

SEQ ID NO: 323534 - RNA, 14 nt, Human herpesvirus 6
uuacauauagucaa

SEQ ID NO: 323535 - RNA, 18 nt, Human herpesvirus 6
uuacauuaaacacuaaau

SEQ ID NO: 323536 - RNA, 15 nt, Human herpesvirus 6
uuacauuaugaaguc

SEQ ID NO: 323537 - RNA, 20 nt, Human herpesvirus 6
uuaccacacgcuuacacaca

SEQ ID NO: 323538 - RNA, 23 nt, Human herpesvirus 6
uuaccaccagaaaaguauagucu

SEQ ID NO: 323539 - RNA, 14 nt, Human herpesvirus 6
uuaccuauagucaa

SEQ ID NO: 323540 - RNA, 15 nt, Human herpesvirus 6
uuacggcaacauacc

SEQ ID NO: 323541 - RNA, 21 nt, Human herpesvirus 6
uuacuaccucuaaacccagac

SEQ ID NO: 323542 - RNA, 14 nt, Human herpesvirus 6
uuacuacggagaac

SEQ ID NO: 323543 - RNA, 14 nt, Human herpesvirus 6
uuacuauguggcau

SEQ ID NO: 323544 - RNA, 21 nt, Human herpesvirus 6
uuacugaacuuuguccuuaca

SEQ ID NO: 323545 - RNA, 15 nt, Human herpesvirus 6
uuacuuacaucgauc

SEQ ID NO: 323546 - RNA, 17 nt, Human herpesvirus 6
uuacuucgugcugugau

SEQ ID NO: 323547 - RNA, 12 nt, Human herpesvirus 6
uuacuugauaaa

SEQ ID NO: 323548 - RNA, 19 nt, Human herpesvirus 6
uuacuugauaaacuguaug

SEQ ID NO: 323549 - RNA, 20 nt, Human herpesvirus 6
uuacuugauaaacuguaugc

SEQ ID NO: 323550 - RNA, 15 nt, Human herpesvirus 6
uuagaaaaucuucca

SEQ ID NO: 323551 - RNA, 20 nt, Human herpesvirus 6
uuagaaauuacacaccuuaa

SEQ ID NO: 323552 - RNA, 18 nt, Human herpesvirus 6
uuagaaccgaucugugag

SEQ ID NO: 323553 - RNA, 21 nt, Human herpesvirus 6
uuagaagacagaccacacccc

SEQ ID NO: 323554 - RNA, 13 nt, Human herpesvirus 6
uuagaauguuugg

SEQ ID NO: 323555 - RNA, 14 nt, Human herpesvirus 6
uuagacacgcuaaa

SEQ ID NO: 323556 - RNA, 17 nt, Human herpesvirus 6
uuagagaaaagugcaag

SEQ ID NO: 323557 - RNA, 18 nt, Human herpesvirus 6
uuagagacgugauacuau

SEQ ID NO: 323558 - RNA, 18 nt, Human herpesvirus 6
uuagauauauacuuucaa

SEQ ID NO: 323559 - RNA, 21 nt, Human herpesvirus 6
uuagcauauuuuggcaaaaaa

SEQ ID NO: 323560 - RNA, 15 nt, Human herpesvirus 6
uuagcuuuacccugg

SEQ ID NO: 323561 - RNA, 18 nt, Human herpesvirus 6
uuaggggagagacaucca

SEQ ID NO: 323562 - RNA, 20 nt, Human herpesvirus 6
uuagugaaaaagguggcauc

SEQ ID NO: 323563 - RNA, 14 nt, Human herpesvirus 6
uuauaagauuuaca

SEQ ID NO: 323564 - RNA, 21 nt, Human herpesvirus 6
uuauaagcaaacauguauccu

SEQ ID NO: 323565 - RNA, 19 nt, Human herpesvirus 6
uuauaauacggagagcuau

SEQ ID NO: 323566 - RNA, 21 nt, Human herpesvirus 6
uuauagauagcggcacguuga

SEQ ID NO: 323567 - RNA, 13 nt, Human herpesvirus 6
uuauagaugacug

SEQ ID NO: 323568 - RNA, 21 nt, Human herpesvirus 6
uuauauauuugcauacauucc

SEQ ID NO: 323569 - RNA, 20 nt, Human herpesvirus 6
uuauauucguggauaacguc

SEQ ID NO: 323570 - RNA, 17 nt, Human herpesvirus 6
uuaucacaguugauaaa

SEQ ID NO: 323571 - RNA, 15 nt, Human herpesvirus 6
uuaucauagacaaac

SEQ ID NO: 323572 - RNA, 15 nt, Human herpesvirus 6
uuaucgaccaugugu

SEQ ID NO: 323573 - RNA, 20 nt, Human herpesvirus 6
uuaucgcaacacacagugaa

SEQ ID NO: 323574 - RNA, 16 nt, Human herpesvirus 6
uuaugaucuagcuaua

SEQ ID NO: 323575 - RNA, 17 nt, Human herpesvirus 6
uuauguaauacaucaac

SEQ ID NO: 323576 - RNA, 21 nt, Human herpesvirus 6
uuauguaugcauuguuaucac

SEQ ID NO: 323577 - RNA, 14 nt, Human herpesvirus 6
uuauuaacuguaaa

SEQ ID NO: 323578 - RNA, 18 nt, Human herpesvirus 6
uuauuauccaaacauacg

SEQ ID NO: 323579 - RNA, 19 nt, Human herpesvirus 6
uuauucacggcuaauauga

SEQ ID NO: 323580 - RNA, 22 nt, Human herpesvirus 6
uuauucacggcuaauaugaucc

SEQ ID NO: 323581 - RNA, 17 nt, Human herpesvirus 6
uuauucugucuugauaa

SEQ ID NO: 323582 - RNA, 15 nt, Human herpesvirus 6
uuauugcacguucag

SEQ ID NO: 323583 - RNA, 15 nt, Human herpesvirus 6
uuauuggcaaccuga

SEQ ID NO: 323584 - RNA, 16 nt, Human herpesvirus 6
uuauuggcauugauaa

SEQ ID NO: 323585 - RNA, 17 nt, Human herpesvirus 6
uuauuguuaacauguac

SEQ ID NO: 323586 - RNA, 19 nt, Human herpesvirus 6
uucaaaaauguugcaugga

SEQ ID NO: 323587 - RNA, 20 nt, Human herpesvirus 6
uucaaaauaaauacuagcua

SEQ ID NO: 323588 - RNA, 23 nt, Human herpesvirus 6
uucaaaauaaauacuagcuaaaa

SEQ ID NO: 323589 - RNA, 21 nt, Human herpesvirus 6
uucaaaauugggcgaagaccu

SEQ ID NO: 323590 - RNA, 20 nt, Human herpesvirus 6
uucaaacaccucacaaucua

SEQ ID NO: 323591 - RNA, 22 nt, Human herpesvirus 6
uucaaagucuaaugguugaaaa

SEQ ID NO: 323592 - RNA, 13 nt, Human herpesvirus 6
uucaaaugcagua

SEQ ID NO: 323593 - RNA, 14 nt, Human herpesvirus 6
uucaacauuacucu

SEQ ID NO: 323594 - RNA, 17 nt, Human herpesvirus 6
uucaaccuguuuccaga

SEQ ID NO: 323595 - RNA, 14 nt, Human herpesvirus 6
uucaauauaugauu

SEQ ID NO: 323596 - RNA, 20 nt, Human herpesvirus 6
uucaaucuguguuuccaaaa

SEQ ID NO: 323597 - RNA, 13 nt, Human herpesvirus 6
uucaauuacucaa

SEQ ID NO: 323598 - RNA, 16 nt, Human herpesvirus 6
uucacacguuauaucu

SEQ ID NO: 323599 - RNA, 17 nt, Human herpesvirus 6
uucacacguuauaucua

SEQ ID NO: 323600 - RNA, 15 nt, Human herpesvirus 6
uucacuuaagccagc

SEQ ID NO: 323601 - RNA, 18 nt, Human herpesvirus 6
uucagaccguuauuggca

SEQ ID NO: 323602 - RNA, 14 nt, Human herpesvirus 6
uucagccugagaac

SEQ ID NO: 323603 - RNA, 15 nt, Human herpesvirus 6
uucaguaacauuuaa

SEQ ID NO: 323604 - RNA, 16 nt, Human herpesvirus 6
uucaguaacauuuaau

SEQ ID NO: 323605 - RNA, 16 nt, Human herpesvirus 6
uucagucuucaauaaa

SEQ ID NO: 323606 - RNA, 23 nt, Human herpesvirus 6
uucagucuucaauaaaaacucaa

SEQ ID NO: 323607 - RNA, 19 nt, Human herpesvirus 6
uucauaaaugguagcuauu

SEQ ID NO: 323608 - RNA, 20 nt, Human herpesvirus 6
uucauaaaugguagcuauua

SEQ ID NO: 323609 - RNA, 12 nt, Human herpesvirus 6
uucauacuguau

SEQ ID NO: 323610 - RNA, 13 nt, Human herpesvirus 6
uucauaugucucg

SEQ ID NO: 323611 - RNA, 20 nt, Human herpesvirus 6
uucauuguuuuugcauguga

SEQ ID NO: 323612 - RNA, 17 nt, Human herpesvirus 6
uuccacgcauagacaaa

SEQ ID NO: 323613 - RNA, 18 nt, Human herpesvirus 6
uuccacgcauagacaaac

SEQ ID NO: 323614 - RNA, 16 nt, Human herpesvirus 6
uuccagggaacuugau

SEQ ID NO: 323615 - RNA, 18 nt, Human herpesvirus 6
uuccagugagaacguaua

SEQ ID NO: 323616 - RNA, 16 nt, Human herpesvirus 6
uuccauaaaguuaaag

SEQ ID NO: 323617 - RNA, 18 nt, Human herpesvirus 6
uuccccaugucuugccuc

SEQ ID NO: 323618 - RNA, 20 nt, Human herpesvirus 6
uuccccugggaaaaggguga

SEQ ID NO: 323619 - RNA, 14 nt, Human herpesvirus 6
uuccgauacagcac

SEQ ID NO: 323620 - RNA, 20 nt, Human herpesvirus 6
uuccgauacagcaccaucaa

SEQ ID NO: 323621 - RNA, 21 nt, Human herpesvirus 6
uuccgauacagcaccaucaau

SEQ ID NO: 323622 - RNA, 14 nt, Human herpesvirus 6
uuccgccugcagug

SEQ ID NO: 323623 - RNA, 20 nt, Human herpesvirus 6
uuccggagauuaaaacauca

SEQ ID NO: 323624 - RNA, 20 nt, Human herpesvirus 6
uuccgucacaacauuuggca

SEQ ID NO: 323625 - RNA, 22 nt, Human herpesvirus 6
uuccuagaggugccgaugaauu

SEQ ID NO: 323626 - RNA, 18 nt, Human herpesvirus 6
uuccuuaauucuaaauac

SEQ ID NO: 323627 - RNA, 21 nt, Human herpesvirus 6
uucgaauacuuucaugauucu

SEQ ID NO: 323628 - RNA, 21 nt, Human herpesvirus 6
uucgaugucggaaucuacuga

SEQ ID NO: 323629 - RNA, 20 nt, Human herpesvirus 6
uucgauguggagaagaucua

SEQ ID NO: 323630 - RNA, 19 nt, Human herpesvirus 6
uucgcaaaacuuaaccgca

SEQ ID NO: 323631 - RNA, 18 nt, Human herpesvirus 6
uucgcagauuaauucuuc

SEQ ID NO: 323632 - RNA, 13 nt, Human herpesvirus 6
uucgccuguaaag

SEQ ID NO: 323633 - RNA, 21 nt, Human herpesvirus 6
uucgccuguaaagucugaaug

SEQ ID NO: 323634 - RNA, 22 nt, Human herpesvirus 6
uucgcucacguggcagucugcu

SEQ ID NO: 323635 - RNA, 16 nt, Human herpesvirus 6
uucggaaaauguaaac

SEQ ID NO: 323636 - RNA, 19 nt, Human herpesvirus 6
uucguuacgacgaacaaua

SEQ ID NO: 323637 - RNA, 13 nt, Human herpesvirus 6
uucuaaacacaga

SEQ ID NO: 323638 - RNA, 14 nt, Human herpesvirus 6
uucuaugaguauau

SEQ ID NO: 323639 - RNA, 14 nt, Human herpesvirus 6
uucuauggaucuga

SEQ ID NO: 323640 - RNA, 19 nt, Human herpesvirus 6
uucuauggaucugagugaa

SEQ ID NO: 323641 - RNA, 11 nt, Human herpesvirus 6
uucucugcaaa

SEQ ID NO: 323642 - RNA, 17 nt, Human herpesvirus 6
uucugacucucucagua

SEQ ID NO: 323643 - RNA, 19 nt, Human herpesvirus 6
uucugacucucucaguaau

SEQ ID NO: 323644 - RNA, 22 nt, Human herpesvirus 6
uucugagccuucugccugaaaa

SEQ ID NO: 323645 - RNA, 17 nt, Human herpesvirus 6
uucugcagaaugaaugu

SEQ ID NO: 323646 - RNA, 19 nt, Human herpesvirus 6
uucuggaucggacggugau

SEQ ID NO: 323647 - RNA, 15 nt, Human herpesvirus 6
uucuguguauuguaa

SEQ ID NO: 323648 - RNA, 13 nt, Human herpesvirus 6
uucuuacaacagg

SEQ ID NO: 323649 - RNA, 21 nt, Human herpesvirus 6
uucuuacaacaggcuugugaa

SEQ ID NO: 323650 - RNA, 17 nt, Human herpesvirus 6
uucuuacguaugugaag

SEQ ID NO: 323651 - RNA, 20 nt, Human herpesvirus 6
uucuuagaaccgaucuguga

SEQ ID NO: 323652 - RNA, 23 nt, Human herpesvirus 6
uucuucaggugucucaaccuuca

SEQ ID NO: 323653 - RNA, 16 nt, Human herpesvirus 6
uucuugggacuaggaa

SEQ ID NO: 323654 - RNA, 18 nt, Human herpesvirus 6
uugaaaaaacaguuuacc

SEQ ID NO: 323655 - RNA, 13 nt, Human herpesvirus 6
uugaaaaaucucu

SEQ ID NO: 323656 - RNA, 19 nt, Human herpesvirus 6
uugaaauaguuguauuuau

SEQ ID NO: 323657 - RNA, 13 nt, Human herpesvirus 6
uugaaauugaaag

SEQ ID NO: 323658 - RNA, 13 nt, Human herpesvirus 6
uugaacauuguaa

SEQ ID NO: 323659 - RNA, 22 nt, Human herpesvirus 6
uugaagaaaauugcagaucuaa

SEQ ID NO: 323660 - RNA, 15 nt, Human herpesvirus 6
uugaaucuuauucaa

SEQ ID NO: 323661 - RNA, 17 nt, Human herpesvirus 6
uugacuauuaaacuaac

SEQ ID NO: 323662 - RNA, 16 nt, Human herpesvirus 6
uugagcuuguggauca

SEQ ID NO: 323663 - RNA, 21 nt, Human herpesvirus 6
uugaguaauugaacauuguaa

SEQ ID NO: 323664 - RNA, 13 nt, Human herpesvirus 6
uugauaaacugua

SEQ ID NO: 323665 - RNA, 14 nt, Human herpesvirus 6
uugauaaacuguau

SEQ ID NO: 323666 - RNA, 21 nt, Human herpesvirus 6
uugauagacggcgggcagauc

SEQ ID NO: 323667 - RNA, 19 nt, Human herpesvirus 6
uugauguggacguucuguc

SEQ ID NO: 323668 - RNA, 15 nt, Human herpesvirus 6
uugcaaaacuguuaa

SEQ ID NO: 323669 - RNA, 13 nt, Human herpesvirus 6
uugcaaugugauc

SEQ ID NO: 323670 - RNA, 14 nt, Human herpesvirus 6
uugcacccuaucac

SEQ ID NO: 323671 - RNA, 22 nt, Human herpesvirus 6
uugcacuacuugucuuacacuc

SEQ ID NO: 323672 - RNA, 12 nt, Human herpesvirus 6
uugcacuuccuc

SEQ ID NO: 323673 - RNA, 11 nt, Human herpesvirus 6
uugcaugugau

SEQ ID NO: 323674 - RNA, 14 nt, Human herpesvirus 6
uugcaugugauaaa

SEQ ID NO: 323675 - RNA, 18 nt, Human herpesvirus 6
uugccaguaaaucuucau

SEQ ID NO: 323676 - RNA, 17 nt, Human herpesvirus 6
uugccucuggacacggu

SEQ ID NO: 323677 - RNA, 16 nt, Human herpesvirus 6
uugcuccuggauuuga

SEQ ID NO: 323678 - RNA, 15 nt, Human herpesvirus 6
uugcuuagucuguaa

SEQ ID NO: 323679 - RNA, 23 nt, Human herpesvirus 6
uugcuugucgggcuuugugaaau

SEQ ID NO: 323680 - RNA, 22 nt, Human herpesvirus 6
uugcuuucucuuuuuaauucca

SEQ ID NO: 323681 - RNA, 22 nt, Human herpesvirus 6
uuggaaaauauuuccaugacug

SEQ ID NO: 323682 - RNA, 21 nt, Human herpesvirus 6
uugggcuccgcgccguuucaa

SEQ ID NO: 323683 - RNA, 15 nt, Human herpesvirus 6
uugggguuauacaua

SEQ ID NO: 323684 - RNA, 20 nt, Human herpesvirus 6
uugggugugcauugugacag

SEQ ID NO: 323685 - RNA, 16 nt, Human herpesvirus 6
uuggugugacauucaa

SEQ ID NO: 323686 - RNA, 18 nt, Human herpesvirus 6
uuguaaaaaaacauucua

SEQ ID NO: 323687 - RNA, 13 nt, Human herpesvirus 6
uuguaagaagaaa

SEQ ID NO: 323688 - RNA, 19 nt, Human herpesvirus 6
uuguagaguguuaugaucu

SEQ ID NO: 323689 - RNA, 22 nt, Human herpesvirus 6
uuguauagucuaaucaucagag

SEQ ID NO: 323690 - RNA, 18 nt, Human herpesvirus 6
uuguauauauagcuguaa

SEQ ID NO: 323691 - RNA, 19 nt, Human herpesvirus 6
uuguauuucaacgugaauc

SEQ ID NO: 323692 - RNA, 15 nt, Human herpesvirus 6
uugucagauacugau

SEQ ID NO: 323693 - RNA, 14 nt, Human herpesvirus 6
uuguccuucagggg

SEQ ID NO: 323694 - RNA, 14 nt, Human herpesvirus 6
uugucgaagaaccc

SEQ ID NO: 323695 - RNA, 20 nt, Human herpesvirus 6
uugucgcaugcuuauuucaa

SEQ ID NO: 323696 - RNA, 23 nt, Human herpesvirus 6
uugucggcgaugcaucugccaua

SEQ ID NO: 323697 - RNA, 16 nt, Human herpesvirus 6
uugucucgcaaacagc

SEQ ID NO: 323698 - RNA, 13 nt, Human herpesvirus 6
uugugacaaggaa

SEQ ID NO: 323699 - RNA, 16 nt, Human herpesvirus 6
uugugacgauaguguu

SEQ ID NO: 323700 - RNA, 23 nt, Human herpesvirus 6
uugugacuacguuuuguguuaaa

SEQ ID NO: 323701 - RNA, 14 nt, Human herpesvirus 6
uuguguaucuguga

SEQ ID NO: 323702 - RNA, 21 nt, Human herpesvirus 6
uuguucuuggagaugacgggu

SEQ ID NO: 323703 - RNA, 16 nt, Human herpesvirus 6
uuuaaaaaaacacuag

SEQ ID NO: 323704 - RNA, 16 nt, Human herpesvirus 6
uuuaaacaacacagca

SEQ ID NO: 323705 - RNA, 15 nt, Human herpesvirus 6
uuuaaaugaagauaa

SEQ ID NO: 323706 - RNA, 12 nt, Human herpesvirus 6
uuuaacaguguc

SEQ ID NO: 323707 - RNA, 21 nt, Human herpesvirus 6
uuuaauaaagaacaugugaca

SEQ ID NO: 323708 - RNA, 12 nt, Human herpesvirus 6
uuuaauauaucu

SEQ ID NO: 323709 - RNA, 23 nt, Human herpesvirus 6
uuuaauguugaguaauugaacau

SEQ ID NO: 323710 - RNA, 14 nt, Human herpesvirus 6
uuuaauuuaucgca

SEQ ID NO: 323711 - RNA, 19 nt, Human herpesvirus 6
uuuacaaaagacacaaucu

SEQ ID NO: 323712 - RNA, 20 nt, Human herpesvirus 6
uuuacaaaagacacaaucuu

SEQ ID NO: 323713 - RNA, 21 nt, Human herpesvirus 6
uuuacaaugagcccgguuuaa

SEQ ID NO: 323714 - RNA, 18 nt, Human herpesvirus 6
uuuacauagaaauuacaa

SEQ ID NO: 323715 - RNA, 22 nt, Human herpesvirus 6
uuuacccuggcccgaggauuau

SEQ ID NO: 323716 - RNA, 20 nt, Human herpesvirus 6
uuuacgguauaggagacaac

SEQ ID NO: 323717 - RNA, 14 nt, Human herpesvirus 6
uuuagauuccguaa

SEQ ID NO: 323718 - RNA, 17 nt, Human herpesvirus 6
uuuaguaugggugagug

SEQ ID NO: 323719 - RNA, 13 nt, Human herpesvirus 6
uuuagucuaucca

SEQ ID NO: 323720 - RNA, 22 nt, Human herpesvirus 6
uuuauaaacuuaaaacaaucaa

SEQ ID NO: 323721 - RNA, 16 nt, Human herpesvirus 6
uuuaucgauguagaua

SEQ ID NO: 323722 - RNA, 14 nt, Human herpesvirus 6
uuuaucuagccaau

SEQ ID NO: 323723 - RNA, 14 nt, Human herpesvirus 6
uuuauugccaauag

SEQ ID NO: 323724 - RNA, 21 nt, Human herpesvirus 6
uuuauuuacaaaaaaccuuua

SEQ ID NO: 323725 - RNA, 14 nt, Human herpesvirus 6
uuucaauauaugau

SEQ ID NO: 323726 - RNA, 15 nt, Human herpesvirus 6
uuucaauauaugauu

SEQ ID NO: 323727 - RNA, 23 nt, Human herpesvirus 6
uuucaccaucaaucucuaugaga

SEQ ID NO: 323728 - RNA, 23 nt, Human herpesvirus 6
uuucauagacugcacgcugggcu

SEQ ID NO: 323729 - RNA, 18 nt, Human herpesvirus 6
uuuccagagcauacauaa

SEQ ID NO: 323730 - RNA, 13 nt, Human herpesvirus 6
uuuccaugcauau

SEQ ID NO: 323731 - RNA, 20 nt, Human herpesvirus 6
uuuccgauacagcaccauca

SEQ ID NO: 323732 - RNA, 20 nt, Human herpesvirus 6
uuuccuuuaugauacaugca

SEQ ID NO: 323733 - RNA, 21 nt, Human herpesvirus 6
uuucgaauucuuaccaagaaa

SEQ ID NO: 323734 - RNA, 21 nt, Human herpesvirus 6
uuucuauguaaacuucugcua

SEQ ID NO: 323735 - RNA, 20 nt, Human herpesvirus 6
uuucuccauaccguuuacuu

SEQ ID NO: 323736 - RNA, 19 nt, Human herpesvirus 6
gauagaccgcuuuuaugag

SEQ ID NO: 323737 - RNA, 14 nt, Human herpesvirus 6
gauagcagaucgca

SEQ ID NO: 323738 - RNA, 18 nt, Human herpesvirus 6
gauagcgucuuugcauau

SEQ ID NO: 323739 - RNA, 20 nt, Human herpesvirus 6
gauagcgucuuugcauauua

SEQ ID NO: 323740 - RNA, 20 nt, Human herpesvirus 6
gauaucagcacccuaugcaa

SEQ ID NO: 323741 - RNA, 17 nt, Human herpesvirus 6
gauauuaacgacuucga

SEQ ID NO: 323742 - RNA, 15 nt, Human herpesvirus 6
gauauuccagacaau

SEQ ID NO: 323743 - RNA, 16 nt, Human herpesvirus 6
gauccaaauccugacu

SEQ ID NO: 323744 - RNA, 13 nt, Human herpesvirus 6
gauccagauuucu

SEQ ID NO: 323745 - RNA, 15 nt, Human herpesvirus 6
gaucgagcaacagcg

SEQ ID NO: 323746 - RNA, 14 nt, Human herpesvirus 6
gaucugccaucccu

SEQ ID NO: 323747 - RNA, 20 nt, Human herpesvirus 6
gaugaauuuguccguauaca

SEQ ID NO: 323748 - RNA, 17 nt, Human herpesvirus 6
gaugacaucugcaaaaa

SEQ ID NO: 323749 - RNA, 22 nt, Human herpesvirus 6
gaugacaucugcaaaaaacaaa

SEQ ID NO: 323750 - RNA, 20 nt, Human herpesvirus 6
gaugacggaauaugguucca

SEQ ID NO: 323751 - RNA, 15 nt, Human herpesvirus 6
gaugacuggccauau

SEQ ID NO: 323752 - RNA, 13 nt, Human herpesvirus 6
gaugagcuuuaau

SEQ ID NO: 323753 - RNA, 15 nt, Human herpesvirus 6
gaugcaaaucucacu

SEQ ID NO: 323754 - RNA, 20 nt, Human herpesvirus 6
gaugcaccgccgcucuauag

SEQ ID NO: 323755 - RNA, 17 nt, Human herpesvirus 6
gaugccugcauaugcag

SEQ ID NO: 323756 - RNA, 18 nt, Human herpesvirus 6
gaugccugcauaugcaga

SEQ ID NO: 323757 - RNA, 21 nt, Human herpesvirus 6
gauggugcgaucgagcaacag

SEQ ID NO: 323758 - RNA, 20 nt, Human herpesvirus 6
gauggugcggcgggauuaau

SEQ ID NO: 323759 - RNA, 17 nt, Human herpesvirus 6
gauguagcuggauauac

SEQ ID NO: 323760 - RNA, 18 nt, Human herpesvirus 6
gauguagguuucgaucaa

SEQ ID NO: 323761 - RNA, 17 nt, Human herpesvirus 6
gauguggagcggaaaca

SEQ ID NO: 323762 - RNA, 14 nt, Human herpesvirus 6
gauguugcaauaaa

SEQ ID NO: 323763 - RNA, 17 nt, Human herpesvirus 6
gauguuguguugauuac

SEQ ID NO: 323764 - RNA, 19 nt, Human herpesvirus 6
gauuacaagggaaauccua

SEQ ID NO: 323765 - RNA, 19 nt, Human herpesvirus 6
gauuaguuuucacaaagaa

SEQ ID NO: 323766 - RNA, 17 nt, Human herpesvirus 6
gauuauauauuugcaua

SEQ ID NO: 323767 - RNA, 18 nt, Human herpesvirus 6
gauuauauauuugcauac

SEQ ID NO: 323768 - RNA, 14 nt, Human herpesvirus 6
gauuaucauagaca

SEQ ID NO: 323769 - RNA, 16 nt, Human herpesvirus 6
gauuaucauagacaaa

SEQ ID NO: 323770 - RNA, 20 nt, Human herpesvirus 6
gauucccuucagacauccag

SEQ ID NO: 323771 - RNA, 15 nt, Human herpesvirus 6
gauucuaaugauaaa

SEQ ID NO: 323772 - RNA, 20 nt, Human herpesvirus 6
gauucuccggguuuuagaga

SEQ ID NO: 323773 - RNA, 14 nt, Human herpesvirus 6
gauucugcauuuau

SEQ ID NO: 323774 - RNA, 15 nt, Human herpesvirus 6
gauugcagacgcuga

SEQ ID NO: 323775 - RNA, 20 nt, Human herpesvirus 6
gauugcagacgcugaaauca

SEQ ID NO: 323776 - RNA, 13 nt, Human herpesvirus 6
gauugccaaaggc

SEQ ID NO: 323777 - RNA, 16 nt, Human herpesvirus 6
gauuguaauaaagugu

SEQ ID NO: 323778 - RNA, 13 nt, Human herpesvirus 6
gauugugcaguua

SEQ ID NO: 323779 - RNA, 19 nt, Human herpesvirus 6
gauuguuaauauuagccau

SEQ ID NO: 323780 - RNA, 23 nt, Human herpesvirus 6
gauuuacuguuucuuugacauuu

SEQ ID NO: 323781 - RNA, 24 nt, Human herpesvirus 6
gauuuaguacaguaugucuccaaa

SEQ ID NO: 323782 - RNA, 19 nt, Human herpesvirus 6
gauuucaagauauauuaaa

SEQ ID NO: 323783 - RNA, 17 nt, Human herpesvirus 6
gauuucacuuaagccag

SEQ ID NO: 323784 - RNA, 20 nt, Human herpesvirus 6
gauuucgguuucgucgcaaa

SEQ ID NO: 323785 - RNA, 19 nt, Human herpesvirus 6
gauuugggcuuuauuccga

SEQ ID NO: 323786 - RNA, 15 nt, Human herpesvirus 6
gcaaaacagacuuua

SEQ ID NO: 323787 - RNA, 12 nt, Human herpesvirus 6
gcaaaacuguua

SEQ ID NO: 323788 - RNA, 22 nt, Human herpesvirus 6
gcaaaacuguuaaaagagaaua

SEQ ID NO: 323789 - RNA, 13 nt, Human herpesvirus 6
gcaaaccauaaaa

SEQ ID NO: 323790 - RNA, 18 nt, Human herpesvirus 6
gcaaaccauaaaaaaucu

SEQ ID NO: 323791 - RNA, 14 nt, Human herpesvirus 6
gcaaagagaccaau

SEQ ID NO: 323792 - RNA, 13 nt, Human herpesvirus 6
gcaaauguaacuu

SEQ ID NO: 323793 - RNA, 20 nt, Human herpesvirus 6
gcaacauccugcguguuaau

SEQ ID NO: 323794 - RNA, 22 nt, Human herpesvirus 6
gcaaccugaaacuccccagaga

SEQ ID NO: 323795 - RNA, 16 nt, Human herpesvirus 6
gcaacgcaucacacau

SEQ ID NO: 323796 - RNA, 20 nt, Human herpesvirus 6
gcaacuacuuuuucaaguaa

SEQ ID NO: 323797 - RNA, 18 nt, Human herpesvirus 6
gcaagaacugcgacucaa

SEQ ID NO: 323798 - RNA, 17 nt, Human herpesvirus 6
gcaagacuacagacucc

SEQ ID NO: 323799 - RNA, 22 nt, Human herpesvirus 6
gcaaucuucugcuucuucagua

SEQ ID NO: 323800 - RNA, 15 nt, Human herpesvirus 6
gcacaaaaccaggaa

SEQ ID NO: 323801 - RNA, 16 nt, Human herpesvirus 6
gcacacauguauuuau

SEQ ID NO: 323802 - RNA, 15 nt, Human herpesvirus 6
gcacccuacaaucug

SEQ ID NO: 323803 - RNA, 23 nt, Human herpesvirus 6
gcacccuacaaucuguccagcuu

SEQ ID NO: 323804 - RNA, 22 nt, Human herpesvirus 6
gcacccuaugcaagcucaugaa

SEQ ID NO: 323805 - RNA, 18 nt, Human herpesvirus 6
gcaccuaucuagaucaau

SEQ ID NO: 323806 - RNA, 16 nt, Human herpesvirus 6
gcaccuuagcccuaau

SEQ ID NO: 323807 - RNA, 14 nt, Human herpesvirus 6
gcacggugccaaag

SEQ ID NO: 323808 - RNA, 21 nt, Human herpesvirus 6
gcacuuccgcgauacccagcg

SEQ ID NO: 323809 - RNA, 15 nt, Human herpesvirus 6
gcagaaaauguuuca

SEQ ID NO: 323810 - RNA, 17 nt, Human herpesvirus 6
gcagaacaacagcaugu

SEQ ID NO: 323811 - RNA, 13 nt, Human herpesvirus 6
gcagaaguuuaca

SEQ ID NO: 323812 - RNA, 17 nt, Human herpesvirus 6
gcagaggggaagggaau

SEQ ID NO: 323813 - RNA, 13 nt, Human herpesvirus 6
gcagaucaucaaa

SEQ ID NO: 323814 - RNA, 21 nt, Human herpesvirus 6
gcagauuuauugcgauucuaa

SEQ ID NO: 323815 - RNA, 14 nt, Human herpesvirus 6
gcagcaacaaucca

SEQ ID NO: 323816 - RNA, 18 nt, Human herpesvirus 6
gcaggcauugacuauuaa

SEQ ID NO: 323817 - RNA, 20 nt, Human herpesvirus 6
gcaguaaaugaauguguuca

SEQ ID NO: 323818 - RNA, 21 nt, Human herpesvirus 6
gcagucugcuggaugcugaug

SEQ ID NO: 323819 - RNA, 16 nt, Human herpesvirus 6
gcauaccuacauccuu

SEQ ID NO: 323820 - RNA, 15 nt, Human herpesvirus 6
gcauagcagcaauag

SEQ ID NO: 323821 - RNA, 22 nt, Human herpesvirus 6
gcaugagggguaugucugugca

SEQ ID NO: 323822 - RNA, 21 nt, Human herpesvirus 6
gcauuagaaaaucuuccacug

SEQ ID NO: 323823 - RNA, 12 nt, Human herpesvirus 6
gcauuagucaca

SEQ ID NO: 323824 - RNA, 18 nt, Human herpesvirus 6
gcauuccucguucuacca

SEQ ID NO: 323825 - RNA, 14 nt, Human herpesvirus 6
gcauugacuauuaa

SEQ ID NO: 323826 - RNA, 19 nt, Human herpesvirus 6
gcauugcgagauuguaaua

SEQ ID NO: 323827 - RNA, 21 nt, Human herpesvirus 6
gccaaaaaaauacaguauaua

SEQ ID NO: 323828 - RNA, 20 nt, Human herpesvirus 6
gccaaaggaaaccaccggcu

SEQ ID NO: 323829 - RNA, 22 nt, Human herpesvirus 6
gccaaaggaaaccaccggcuaa

SEQ ID NO: 323830 - RNA, 15 nt, Human herpesvirus 6
gccaaccucuuccua

SEQ ID NO: 323831 - RNA, 16 nt, Human herpesvirus 6
gccaauagauggugcu

SEQ ID NO: 323832 - RNA, 21 nt, Human herpesvirus 6
gccacuugcaaugugaucaac

SEQ ID NO: 323833 - RNA, 14 nt, Human herpesvirus 6
gccagaagaauuua

SEQ ID NO: 323834 - RNA, 14 nt, Human herpesvirus 6
gccagagacgugac

SEQ ID NO: 323835 - RNA, 17 nt, Human herpesvirus 6
gccagauacuacacaaa

SEQ ID NO: 323836 - RNA, 18 nt, Human herpesvirus 6
gccagcauucuuaucaaa

SEQ ID NO: 323837 - RNA, 19 nt, Human herpesvirus 6
gccauauccuagcauuucc

SEQ ID NO: 323838 - RNA, 21 nt, Human herpesvirus 6
gccauuauugauagcauuauu

SEQ ID NO: 323839 - RNA, 21 nt, Human herpesvirus 6
gcccauccaccuucccuccca

SEQ ID NO: 323840 - RNA, 20 nt, Human herpesvirus 6
gcccccauacacacccagca

SEQ ID NO: 323841 - RNA, 20 nt, Human herpesvirus 6
gcccgacaaguaagauugca

SEQ ID NO: 323842 - RNA, 13 nt, Human herpesvirus 6
gcccgagcgcacu

SEQ ID NO: 323843 - RNA, 18 nt, Human herpesvirus 6
gccgacagaugugugucu

SEQ ID NO: 323844 - RNA, 19 nt, Human herpesvirus 6
gccgcagccgucgauaaua

SEQ ID NO: 323845 - RNA, 18 nt, Human herpesvirus 6
gccggaucguaaggcagu

SEQ ID NO: 323846 - RNA, 18 nt, Human herpesvirus 6
gccguucugcuuagcaua

SEQ ID NO: 323847 - RNA, 18 nt, Human herpesvirus 6
gccuaaauaccauuuuau

SEQ ID NO: 323848 - RNA, 18 nt, Human herpesvirus 6
gccuccccgggugcuccg

SEQ ID NO: 323849 - RNA, 20 nt, Human herpesvirus 6
gccucgacguccaccuggaa

SEQ ID NO: 323850 - RNA, 16 nt, Human herpesvirus 6
gguacgguccggcuga

SEQ ID NO: 323851 - RNA, 16 nt, Human herpesvirus 6
gguauccaauuaacac

SEQ ID NO: 323852 - RNA, 16 nt, Human herpesvirus 6
ggucauugguguuuau

SEQ ID NO: 323853 - RNA, 19 nt, Human herpesvirus 6
gguccguuuuucucugcaa

SEQ ID NO: 323854 - RNA, 22 nt, Human herpesvirus 6
ggucgagaauacgcuguguuua

SEQ ID NO: 323855 - RNA, 16 nt, Human herpesvirus 6
ggucguacacgcauuu

SEQ ID NO: 323856 - RNA, 15 nt, Human herpesvirus 6
ggucuugcuaagggu

SEQ ID NO: 323857 - RNA, 13 nt, Human herpesvirus 6
ggugagugcauua

SEQ ID NO: 323858 - RNA, 15 nt, Human herpesvirus 6
ggugagugcauuaua

SEQ ID NO: 323859 - RNA, 15 nt, Human herpesvirus 6
ggugcagaacaucuc

SEQ ID NO: 323860 - RNA, 14 nt, Human herpesvirus 6
ggugcgaaccuaga

SEQ ID NO: 323861 - RNA, 19 nt, Human herpesvirus 6
gguggauuaugaguaugaa

SEQ ID NO: 323862 - RNA, 22 nt, Human herpesvirus 6
ggugucugucuauuaucuggcc

SEQ ID NO: 323863 - RNA, 17 nt, Human herpesvirus 6
gguugaaaucacaccaa

SEQ ID NO: 323864 - RNA, 15 nt, Human herpesvirus 6
gguuggaugccugca

SEQ ID NO: 323865 - RNA, 22 nt, Human herpesvirus 6
gguuggaugccugcauaugcag

SEQ ID NO: 323866 - RNA, 20 nt, Human herpesvirus 6
gguuugcauaauaauggcau

SEQ ID NO: 323867 - RNA, 16 nt, Human herpesvirus 6
guaaaaaaacauucua

SEQ ID NO: 323868 - RNA, 19 nt, Human herpesvirus 6
guaaaagggaagauuugua

SEQ ID NO: 323869 - RNA, 15 nt, Human herpesvirus 6
guaaacaaauucuua

SEQ ID NO: 323870 - RNA, 16 nt, Human herpesvirus 6
guaaacgauaucaauu

SEQ ID NO: 323871 - RNA, 11 nt, Human herpesvirus 6
guaaaguuaua

SEQ ID NO: 323872 - RNA, 20 nt, Human herpesvirus 6
guaaauaaacaccagcauaa

SEQ ID NO: 323873 - RNA, 22 nt, Human herpesvirus 6
guaaauacccugggguguucgu

SEQ ID NO: 323874 - RNA, 14 nt, Human herpesvirus 6
guaaauauucauau

SEQ ID NO: 323875 - RNA, 19 nt, Human herpesvirus 6
guaagaauuaauguccagu

SEQ ID NO: 323876 - RNA, 13 nt, Human herpesvirus 6
guaagauugcaga

SEQ ID NO: 323877 - RNA, 13 nt, Human herpesvirus 6
guaauagccaaac

SEQ ID NO: 323878 - RNA, 22 nt, Human herpesvirus 6
guaauauauuuuuuaacaguac

SEQ ID NO: 323879 - RNA, 17 nt, Human herpesvirus 6
guaaucucguugggaua

SEQ ID NO: 323880 - RNA, 18 nt, Human herpesvirus 6
guaaucucguugggauag

SEQ ID NO: 323881 - RNA, 21 nt, Human herpesvirus 6
guaauggaucuugaucaaaua

SEQ ID NO: 323882 - RNA, 16 nt, Human herpesvirus 6
guaauugaacauugua

SEQ ID NO: 323883 - RNA, 12 nt, Human herpesvirus 6
guaauuguuaaa

SEQ ID NO: 323884 - RNA, 23 nt, Human herpesvirus 6
guacaaaaucaaacucaccgcau

SEQ ID NO: 323885 - RNA, 23 nt, Human herpesvirus 6
guacacuuuaucgauguagauaa

SEQ ID NO: 323886 - RNA, 14 nt, Human herpesvirus 6
guacagaaccagau

SEQ ID NO: 323887 - RNA, 19 nt, Human herpesvirus 6
guacuauagacgccauaau

SEQ ID NO: 323888 - RNA, 15 nt, Human herpesvirus 6
guacuaugauuuaua

SEQ ID NO: 323889 - RNA, 16 nt, Human herpesvirus 6
guacucauccaagacu

SEQ ID NO: 323890 - RNA, 20 nt, Human herpesvirus 6
guagaauuacuauguggcau

SEQ ID NO: 323891 - RNA, 22 nt, Human herpesvirus 6
guagaucuccugcgcgucuaua

SEQ ID NO: 323892 - RNA, 17 nt, Human herpesvirus 6
guagcuauuaugugaau

SEQ ID NO: 323893 - RNA, 16 nt, Human herpesvirus 6
guagugaugauuuguc

SEQ ID NO: 323894 - RNA, 18 nt, Human herpesvirus 6
guauacagcuaaacgccg

SEQ ID NO: 323895 - RNA, 12 nt, Human herpesvirus 6
guauaccauucc

SEQ ID NO: 323896 - RNA, 11 nt, Human herpesvirus 6
guauagacauu

SEQ ID NO: 323897 - RNA, 13 nt, Human herpesvirus 6
guauagauuuauu

SEQ ID NO: 323898 - RNA, 20 nt, Human herpesvirus 6
guauaggaaucuuguguucu

SEQ ID NO: 323899 - RNA, 16 nt, Human herpesvirus 6
guauauauagcuguaa

SEQ ID NO: 323900 - RNA, 12 nt, Human herpesvirus 6
guauauguuaac

SEQ ID NO: 323901 - RNA, 20 nt, Human herpesvirus 6
guauauugaauuguauauau

SEQ ID NO: 323902 - RNA, 20 nt, Human herpesvirus 6
guaucaguggauaggaugau

SEQ ID NO: 323903 - RNA, 23 nt, Human herpesvirus 6
guauccuaaauaccaauuccuua

SEQ ID NO: 323904 - RNA, 10 nt, Human herpesvirus 6
guaugacugu

SEQ ID NO: 323905 - RNA, 15 nt, Human herpesvirus 6
guaugccgauuaaug

SEQ ID NO: 323906 - RNA, 16 nt, Human herpesvirus 6
guauuaaugucuucga

SEQ ID NO: 323907 - RNA, 22 nt, Human herpesvirus 6
guauuaaugucuucgaauacuu

SEQ ID NO: 323908 - RNA, 14 nt, Human herpesvirus 6
guauuauguaauac

SEQ ID NO: 323909 - RNA, 19 nt, Human herpesvirus 6
guauuauguaauacaucaa

SEQ ID NO: 323910 - RNA, 21 nt, Human herpesvirus 6
guauugaagaaaauugcagau

SEQ ID NO: 323911 - RNA, 17 nt, Human herpesvirus 6
guauuuuuaauuugaau

SEQ ID NO: 323912 - RNA, 20 nt, Human herpesvirus 6
guauuuuuuaagagugggau

SEQ ID NO: 323913 - RNA, 15 nt, Human herpesvirus 6
gucaaaggcgaugaa

SEQ ID NO: 323914 - RNA, 15 nt, Human herpesvirus 6
gucaacgugucuaua

SEQ ID NO: 323915 - RNA, 16 nt, Human herpesvirus 6
gucacacacagggugc

SEQ ID NO: 323916 - RNA, 16 nt, Human herpesvirus 6
gucacacguguuaaau

SEQ ID NO: 323917 - RNA, 19 nt, Human herpesvirus 6
gucacacucuuaacuacuu

SEQ ID NO: 323918 - RNA, 15 nt, Human herpesvirus 6
gucaccuguauagau

SEQ ID NO: 323919 - RNA, 14 nt, Human herpesvirus 6
gucagacagugagu

SEQ ID NO: 323920 - RNA, 18 nt, Human herpesvirus 6
gucagugcuuaugacugg

SEQ ID NO: 323921 - RNA, 22 nt, Human herpesvirus 6
gucauaaccucaucgcgacuaa

SEQ ID NO: 323922 - RNA, 21 nt, Human herpesvirus 6
gucaucauauaauauuuccau

SEQ ID NO: 323923 - RNA, 15 nt, Human herpesvirus 6
guccaaccccuccca

SEQ ID NO: 323924 - RNA, 19 nt, Human herpesvirus 6
guccauacaguuguguaca

SEQ ID NO: 323925 - RNA, 12 nt, Human herpesvirus 6
guccauuaccac

SEQ ID NO: 323926 - RNA, 14 nt, Human herpesvirus 6
guccauuaccacac

SEQ ID NO: 323927 - RNA, 17 nt, Human herpesvirus 6
guccauuagguugcuag

SEQ ID NO: 323928 - RNA, 17 nt, Human herpesvirus 6
gucccaucuauacaccc

SEQ ID NO: 323929 - RNA, 22 nt, Human herpesvirus 6
gucccaucuauacacccugccg

SEQ ID NO: 323930 - RNA, 14 nt, Human herpesvirus 6
guccgcaaguaaaa

SEQ ID NO: 323931 - RNA, 22 nt, Human herpesvirus 6
guccuauucagaggugcugaug

SEQ ID NO: 323932 - RNA, 22 nt, Human herpesvirus 6
guccuuucgcacgcacauaugc

SEQ ID NO: 323933 - RNA, 20 nt, Human herpesvirus 6
guccuuuuuuacuaguuuuc

SEQ ID NO: 323934 - RNA, 21 nt, Human herpesvirus 6
guccuuuuuuacuaguuuuca

SEQ ID NO: 323935 - RNA, 15 nt, Human herpesvirus 6
gucgggaauguguca

SEQ ID NO: 323936 - RNA, 11 nt, Human herpesvirus 6
uauaacaagca

SEQ ID NO: 323937 - RNA, 20 nt, Human herpesvirus 6
uauaagauaggcaaaccaua

SEQ ID NO: 323938 - RNA, 15 nt, Human herpesvirus 6
uauaaggaagauuca

SEQ ID NO: 323939 - RNA, 18 nt, Human herpesvirus 6
uauaagucaucauauaau

SEQ ID NO: 323940 - RNA, 15 nt, Human herpesvirus 6
uauaauacacuauua

SEQ ID NO: 323941 - RNA, 23 nt, Human herpesvirus 6
uauaaucccgucuccucauggag

SEQ ID NO: 323942 - RNA, 17 nt, Human herpesvirus 6
uauaaucuacgcauuga

SEQ ID NO: 323943 - RNA, 22 nt, Human herpesvirus 6
uauaauuaaaauagaagucuca

SEQ ID NO: 323944 - RNA, 21 nt, Human herpesvirus 6
uauacgaaaauaaaaaaaaca

SEQ ID NO: 323945 - RNA, 21 nt, Human herpesvirus 6
uauacgccuugggacauguau

SEQ ID NO: 323946 - RNA, 20 nt, Human herpesvirus 6
uauacuuacuugagugaugg

SEQ ID NO: 323947 - RNA, 18 nt, Human herpesvirus 6
uauagacauugcuuucuc

SEQ ID NO: 323948 - RNA, 17 nt, Human herpesvirus 6
uauagagcaacucauca

SEQ ID NO: 323949 - RNA, 22 nt, Human herpesvirus 6
uauagauuagaaauuacauaag

SEQ ID NO: 323950 - RNA, 18 nt, Human herpesvirus 6
uauagcuguaaauauuca

SEQ ID NO: 323951 - RNA, 13 nt, Human herpesvirus 6
uauaggaguuaca

SEQ ID NO: 323952 - RNA, 13 nt, Human herpesvirus 6
uauagucaauguu

SEQ ID NO: 323953 - RNA, 16 nt, Human herpesvirus 6
uauauagcuguaaaua

SEQ ID NO: 323954 - RNA, 20 nt, Human herpesvirus 6
uauauaguuuuuugauggaa

SEQ ID NO: 323955 - RNA, 17 nt, Human herpesvirus 6
ucggcaacugaauuugc

SEQ ID NO: 323956 - RNA, 20 nt, Human herpesvirus 6
ucggcgugugugcuccgggg

SEQ ID NO: 323957 - RNA, 18 nt, Human herpesvirus 6
ucgggaaauaaaaaauau

SEQ ID NO: 323958 - RNA, 20 nt, Human herpesvirus 6
ucgggaaauaaaaaauauua

SEQ ID NO: 323959 - RNA, 23 nt, Human herpesvirus 6
ucggugauagcgucuuugcauau

SEQ ID NO: 323960 - RNA, 22 nt, Human herpesvirus 6
ucggugauuauagauagcucca

SEQ ID NO: 323961 - RNA, 15 nt, Human herpesvirus 6
ucgguuuugucccga

SEQ ID NO: 323962 - RNA, 15 nt, Human herpesvirus 6
ucguacguacuacag

SEQ ID NO: 323963 - RNA, 16 nt, Human herpesvirus 6
ucguagacaguaaaau

SEQ ID NO: 323964 - RNA, 16 nt, Human herpesvirus 6
ucgucacuccaaucca

SEQ ID NO: 323965 - RNA, 21 nt, Human herpesvirus 6
ucguccauacaguuguguaca

SEQ ID NO: 323966 - RNA, 18 nt, Human herpesvirus 6
ucgugaagaggauggauc

SEQ ID NO: 323967 - RNA, 19 nt, Human herpesvirus 6
ucguggucauugguguuua

SEQ ID NO: 323968 - RNA, 22 nt, Human herpesvirus 6
ucguuguucuugggugugcauu

SEQ ID NO: 323969 - RNA, 22 nt, Human herpesvirus 6
ucguuuacuccgauuuucuuag

SEQ ID NO: 323970 - RNA, 17 nt, Human herpesvirus 6
ucuaaaacaagacagac

SEQ ID NO: 323971 - RNA, 22 nt, Human herpesvirus 6
ucuaauacauauaaaagcuaaa

SEQ ID NO: 323972 - RNA, 23 nt, Human herpesvirus 6
ucuaauacauauaaaagcuaaau

SEQ ID NO: 323973 - RNA, 18 nt, Human herpesvirus 6
ucuaauaucguuagguuu

SEQ ID NO: 323974 - RNA, 14 nt, Human herpesvirus 6
ucuacccuaucgau

SEQ ID NO: 323975 - RNA, 20 nt, Human herpesvirus 6
ucuacguaugaaaguccuca

SEQ ID NO: 323976 - RNA, 15 nt, Human herpesvirus 6
ucuacuguacaaaau

SEQ ID NO: 323977 - RNA, 17 nt, Human herpesvirus 6
ucuacuguacaaaauca

SEQ ID NO: 323978 - RNA, 19 nt, Human herpesvirus 6
ucuagaauaucugcuaagu

SEQ ID NO: 323979 - RNA, 21 nt, Human herpesvirus 6
ucuagaauaucugcuaagucu

SEQ ID NO: 323980 - RNA, 16 nt, Human herpesvirus 6
ucuagugcguauucca

SEQ ID NO: 323981 - RNA, 13 nt, Human herpesvirus 6
ucuauaugcaucu

SEQ ID NO: 323982 - RNA, 17 nt, Human herpesvirus 6
ucuaucacucauacaca

SEQ ID NO: 323983 - RNA, 18 nt, Human herpesvirus 6
ucuauccaugaaacucuu

SEQ ID NO: 323984 - RNA, 16 nt, Human herpesvirus 6
ucuauuauaagcaaac

SEQ ID NO: 323985 - RNA, 14 nt, Human herpesvirus 6
ucucaaaaaacaua

SEQ ID NO: 323986 - RNA, 21 nt, Human herpesvirus 6
ucucaagcacaaaaccaggaa

SEQ ID NO: 323987 - RNA, 20 nt, Human herpesvirus 6
ucucacucgugccaguucac

SEQ ID NO: 323988 - RNA, 21 nt, Human herpesvirus 6
ucucacugucgaaauucacca

SEQ ID NO: 323989 - RNA, 13 nt, Human herpesvirus 6
ucucaguagauua

SEQ ID NO: 323990 - RNA, 10 nt, Human herpesvirus 6
ucuccauccu

SEQ ID NO: 323991 - RNA, 13 nt, Human herpesvirus 6
ucucccuuaaaga

SEQ ID NO: 323992 - RNA, 12 nt, Human herpesvirus 6
ucuccucaugga

SEQ ID NO: 323993 - RNA, 21 nt, Human herpesvirus 6
ucuccucgcaauccccacgaa

SEQ ID NO: 323994 - RNA, 19 nt, Human herpesvirus 6
ucucgagcuagagugacau

SEQ ID NO: 323995 - RNA, 18 nt, Human herpesvirus 6
ucucgccgaccugucauu

SEQ ID NO: 323996 - RNA, 19 nt, Human herpesvirus 6
ucucggauauauacuuacu

SEQ ID NO: 323997 - RNA, 22 nt, Human herpesvirus 6
ucucucagaucgagaauuuugu

SEQ ID NO: 323998 - RNA, 21 nt, Human herpesvirus 6
ucucucagcuggcugacagga

SEQ ID NO: 323999 - RNA, 23 nt, Human herpesvirus 6
ucucucaguaauuuguguaauuu

SEQ ID NO: 324000 - RNA, 18 nt, Human herpesvirus 6
ucucucgcuuaccguuca

SEQ ID NO: 324001 - RNA, 22 nt, Human herpesvirus 6
ucucuggaugcuuuuagaugga

SEQ ID NO: 324002 - RNA, 22 nt, Human herpesvirus 6
ucucuuuauagagcaacucauc

SEQ ID NO: 324003 - RNA, 19 nt, Human herpesvirus 6
ucucuuuuuaauuccaaga

SEQ ID NO: 324004 - RNA, 23 nt, Human herpesvirus 6
ucugacauggaagacaaauuaau

SEQ ID NO: 324005 - RNA, 23 nt, Human herpesvirus 6
ucugacuauuucaaaagaguuac

SEQ ID NO: 324006 - RNA, 20 nt, Human herpesvirus 6
ucugagaugacaucugcaaa

SEQ ID NO: 324007 - RNA, 15 nt, Human herpesvirus 6
ucugcaaaacaaagg

SEQ ID NO: 324008 - RNA, 21 nt, Human herpesvirus 6
ucugccgaucucucucagauc

SEQ ID NO: 324009 - RNA, 22 nt, Human herpesvirus 6
ucugccucgguuuugucccgaa

SEQ ID NO: 324010 - RNA, 18 nt, Human herpesvirus 6
ucugccugaaaaugaaga

SEQ ID NO: 324011 - RNA, 20 nt, Human herpesvirus 6
ucugcggaaauaaaaaauau

SEQ ID NO: 324012 - RNA, 16 nt, Human herpesvirus 6
ucugcgugaacguguu

SEQ ID NO: 324013 - RNA, 14 nt, Human herpesvirus 6
ucugcuuagcauau

SEQ ID NO: 324014 - RNA, 22 nt, Human herpesvirus 6
ucuggcacaggcauagcagcaa

SEQ ID NO: 324015 - RNA, 18 nt, Human herpesvirus 6
ucugucuuuaauggcgcc

SEQ ID NO: 324016 - RNA, 18 nt, Human herpesvirus 6
ucuguucaauuauaucau

SEQ ID NO: 324017 - RNA, 16 nt, Human herpesvirus 6
ucuguucgauguacag

SEQ ID NO: 324018 - RNA, 14 nt, Human herpesvirus 6
ucuguuuuaauuaa

SEQ ID NO: 324019 - RNA, 12 nt, Human herpesvirus 6
ucuuaacuacuu

SEQ ID NO: 324020 - RNA, 17 nt, Human herpesvirus 6
ucuuaaggugcuuuuaa

SEQ ID NO: 324021 - RNA, 11 nt, Human herpesvirus 6
ucuuacaacag

SEQ ID NO: 324022 - RNA, 17 nt, Human herpesvirus 6
ucuuagagacgugauac

SEQ ID NO: 324023 - RNA, 22 nt, Human herpesvirus 6
ucuuauuaauuuccugaucaca

SEQ ID NO: 324024 - RNA, 14 nt, Human herpesvirus 6
ucuucgccuguaaa

SEQ ID NO: 324025 - RNA, 18 nt, Human herpesvirus 6
ucuucggauucgcaagcu

SEQ ID NO: 324026 - RNA, 12 nt, Human herpesvirus 6
ucuucuguaaau

SEQ ID NO: 324027 - RNA, 20 nt, Human herpesvirus 6
ucuugaaaucuacuguacaa

SEQ ID NO: 324028 - RNA, 16 nt, Human herpesvirus 6
ucuugaucaaauaucu

SEQ ID NO: 324029 - RNA, 18 nt, Human herpesvirus 6
ucuugaucaaauaucuga

SEQ ID NO: 324030 - RNA, 13 nt, Human herpesvirus 6
ucuugcaacucgu

SEQ ID NO: 324031 - RNA, 15 nt, Human herpesvirus 6
ucuugguucuauaag

SEQ ID NO: 324032 - RNA, 18 nt, Human herpesvirus 6
ucuugguucuauaagcuc

SEQ ID NO: 324033 - RNA, 15 nt, Human herpesvirus 6
ucuuguugaguuuca

SEQ ID NO: 324034 - RNA, 14 nt, Human herpesvirus 6
ucuuuagaacagcu

SEQ ID NO: 324035 - RNA, 22 nt, Human herpesvirus 6
ucuuuauuaaauguuacugaac

SEQ ID NO: 324036 - RNA, 13 nt, Human herpesvirus 6
ucuuuauuuuucc

SEQ ID NO: 324037 - RNA, 17 nt, Human herpesvirus 6
ucuuugcgucuucuaua

SEQ ID NO: 324038 - RNA, 16 nt, Human herpesvirus 6
ugaaaaaaaaugaagg

SEQ ID NO: 324039 - RNA, 17 nt, Human herpesvirus 6
ugaaaaaaaauugccuu

SEQ ID NO: 324040 - RNA, 22 nt, Human herpesvirus 6
ugaaaaaaaauugccuuguaaa

SEQ ID NO: 324041 - RNA, 14 nt, Human herpesvirus 6
ugaaaccacugacc

SEQ ID NO: 324042 - RNA, 17 nt, Human herpesvirus 6
ugaaacuccccagagaa

SEQ ID NO: 324043 - RNA, 19 nt, Human herpesvirus 6
ugaaacuucacgaucuaca

SEQ ID NO: 324044 - RNA, 19 nt, Human herpesvirus 6
ugaaaguauuuuacuuuau

SEQ ID NO: 324045 - RNA, 18 nt, Human herpesvirus 6
ugaaaguugauacgccag

SEQ ID NO: 324046 - RNA, 19 nt, Human herpesvirus 6
ugaaaucuauccucccauu

SEQ ID NO: 324047 - RNA, 18 nt, Human herpesvirus 6
ugaacgcaagucacgggc

SEQ ID NO: 324048 - RNA, 20 nt, Human herpesvirus 6
ugaacgcgucgguaaacaau

SEQ ID NO: 324049 - RNA, 14 nt, Human herpesvirus 6
ugaacguaugagga

SEQ ID NO: 324050 - RNA, 20 nt, Human herpesvirus 6
ugaagaacagaaugcuauuc

SEQ ID NO: 324051 - RNA, 21 nt, Human herpesvirus 6
ugaagaggugcgaaugcucaa

SEQ ID NO: 324052 - RNA, 15 nt, Human herpesvirus 6
ugaagauuugacauu

SEQ ID NO: 324053 - RNA, 21 nt, Human herpesvirus 6
ugaagauuugacauugcugaa

SEQ ID NO: 324054 - RNA, 15 nt, Human herpesvirus 6
ugaauaauaagccua

SEQ ID NO: 324055 - RNA, 19 nt, Human herpesvirus 6
ugaauccagacuagacgca

SEQ ID NO: 324056 - RNA, 21 nt, Human herpesvirus 6
ugaaucgucaaaggcgaugaa

SEQ ID NO: 324057 - RNA, 23 nt, Human herpesvirus 6
ugaaucuuccuuauaacacacag

SEQ ID NO: 324058 - RNA, 16 nt, Human herpesvirus 6
ugaauguguaaugucu

SEQ ID NO: 324059 - RNA, 16 nt, Human herpesvirus 6
ugaauguguucacaga

SEQ ID NO: 324060 - RNA, 21 nt, Human herpesvirus 6
ugaauuuguccguauacagcu

SEQ ID NO: 324061 - RNA, 22 nt, Human herpesvirus 6
ugacaaccuccgcauaucgccc

SEQ ID NO: 324062 - RNA, 15 nt, Human herpesvirus 6
ugacaccucaauuaa

SEQ ID NO: 324063 - RNA, 20 nt, Human herpesvirus 6
ugacaccucaauuaauacaa

SEQ ID NO: 324064 - RNA, 15 nt, Human herpesvirus 6
ugacagcgauacaau

SEQ ID NO: 324065 - RNA, 17 nt, Human herpesvirus 6
ugaccaccaaaacgaca

SEQ ID NO: 324066 - RNA, 23 nt, Human herpesvirus 6
ugaccgcagaggaucuguuuaug

SEQ ID NO: 324067 - RNA, 16 nt, Human herpesvirus 6
ugacgauucaaaccgc

SEQ ID NO: 324068 - RNA, 19 nt, Human herpesvirus 6
ugacgauucaaaccgcaga

SEQ ID NO: 324069 - RNA, 14 nt, Human herpesvirus 6
uggagacaccucag

SEQ ID NO: 324070 - RNA, 22 nt, Human herpesvirus 6
uggagcccgcucggucucgcac

SEQ ID NO: 324071 - RNA, 20 nt, Human herpesvirus 6
uggauauacggaaaagaugu

SEQ ID NO: 324072 - RNA, 16 nt, Human herpesvirus 6
uggaugaucacuauca

SEQ ID NO: 324073 - RNA, 18 nt, Human herpesvirus 6
uggaugccugcauaugca

SEQ ID NO: 324074 - RNA, 19 nt, Human herpesvirus 6
uggaugccugcauaugcag

SEQ ID NO: 324075 - RNA, 19 nt, Human herpesvirus 6
uggaugcugaugaauuuau

SEQ ID NO: 324076 - RNA, 14 nt, Human herpesvirus 6
uggauggaucggaa

SEQ ID NO: 324077 - RNA, 20 nt, Human herpesvirus 6
uggcaauuucuuuugaggga

SEQ ID NO: 324078 - RNA, 16 nt, Human herpesvirus 6
uggcacggugccaaag

SEQ ID NO: 324079 - RNA, 17 nt, Human herpesvirus 6
uggcagaucuugaaaag

SEQ ID NO: 324080 - RNA, 18 nt, Human herpesvirus 6
uggcagguaaccaaaaaa

SEQ ID NO: 324081 - RNA, 22 nt, Human herpesvirus 6
uggcaucggcuuggauagaaau

SEQ ID NO: 324082 - RNA, 23 nt, Human herpesvirus 6
uggcaugugaacggagauauaau

SEQ ID NO: 324083 - RNA, 18 nt, Human herpesvirus 6
uggcauugauaaugauau

SEQ ID NO: 324084 - RNA, 19 nt, Human herpesvirus 6
uggccuggcacggugccaa

SEQ ID NO: 324085 - RNA, 22 nt, Human herpesvirus 6
uggcugugacgaagauggaugu

SEQ ID NO: 324086 - RNA, 19 nt, Human herpesvirus 6
uggcuucuauauccaaaga

SEQ ID NO: 324087 - RNA, 14 nt, Human herpesvirus 6
ugggacauguauau

SEQ ID NO: 324088 - RNA, 19 nt, Human herpesvirus 6
ugggaggagugaacauaca

SEQ ID NO: 324089 - RNA, 14 nt, Human herpesvirus 6
ugggaucuucugcu

SEQ ID NO: 324090 - RNA, 13 nt, Human herpesvirus 6
ugggcacaaaaca

SEQ ID NO: 324091 - RNA, 22 nt, Human herpesvirus 6
ugggccuuuucgcgauagucau

SEQ ID NO: 324092 - RNA, 23 nt, Human herpesvirus 6
ugggcgaagaccuauauguguug

SEQ ID NO: 324093 - RNA, 11 nt, Human herpesvirus 6
ugggcuuuauu

SEQ ID NO: 324094 - RNA, 20 nt, Human herpesvirus 6
ugggguguucguaaugugca

SEQ ID NO: 324095 - RNA, 23 nt, Human herpesvirus 6
ugggucguacacgcauuugcaau

SEQ ID NO: 324096 - RNA, 15 nt, Human herpesvirus 6
ugggugagugcauua

SEQ ID NO: 324097 - RNA, 12 nt, Human herpesvirus 6
ugggugugcauu

SEQ ID NO: 324098 - RNA, 14 nt, Human herpesvirus 6
uggugaguaccugu

SEQ ID NO: 324099 - RNA, 16 nt, Human herpesvirus 6
uggugauacgugaauu

SEQ ID NO: 324100 - RNA, 15 nt, Human herpesvirus 6
uggugcggcgggauu

SEQ ID NO: 324101 - RNA, 22 nt, Human herpesvirus 6
ugguguuguguucguggacaau

SEQ ID NO: 324102 - RNA, 15 nt, Human herpesvirus 6
ugguuaaaaggaaua

SEQ ID NO: 324103 - RNA, 17 nt, Human herpesvirus 6
ugguugaaaucacacca

SEQ ID NO: 324104 - RNA, 15 nt, Human herpesvirus 6
ugguuuacagcacuu

SEQ ID NO: 324105 - RNA, 13 nt, Human herpesvirus 6
uguaaaggauaau

SEQ ID NO: 324106 - RNA, 19 nt, Human herpesvirus 6
uguaaguuuugggugcuau

SEQ ID NO: 324107 - RNA, 18 nt, Human herpesvirus 6
uguaauuaggugcuuggu

SEQ ID NO: 324108 - RNA, 15 nt, Human herpesvirus 6
uguaauuucuaugua

SEQ ID NO: 324109 - RNA, 18 nt, Human herpesvirus 6
uguacaaaaucaaacuca

SEQ ID NO: 324110 - RNA, 15 nt, Human herpesvirus 6
uguacaaccgaaugu

SEQ ID NO: 324111 - RNA, 20 nt, Human herpesvirus 6
uguacaaccgaauguucuca

SEQ ID NO: 324112 - RNA, 21 nt, Human herpesvirus 6
uguacccuaagugaaauucaa

SEQ ID NO: 324113 - RNA, 14 nt, Human herpesvirus 6
uguaccuagcagca

SEQ ID NO: 324114 - RNA, 23 nt, Human herpesvirus 6
uguaccuuguaauuucuauguaa

SEQ ID NO: 324115 - RNA, 22 nt, Human herpesvirus 6
uguagaaagaucgcuuuugaaa

SEQ ID NO: 324116 - RNA, 18 nt, Human herpesvirus 6
uguagaguguuaugaucu

SEQ ID NO: 324117 - RNA, 19 nt, Human herpesvirus 6
uguagcaaaaacagguuuc

SEQ ID NO: 324118 - RNA, 19 nt, Human herpesvirus 6
uguauacgccuugggacau

SEQ ID NO: 324119 - RNA, 17 nt, Human herpesvirus 6
uguaucgagucuuuaua

SEQ ID NO: 324120 - RNA, 21 nt, Human herpesvirus 6
uguauugauuauauauuugca

SEQ ID NO: 324121 - RNA, 23 nt, Human herpesvirus 6
ugucacacagcaugaacucucac

SEQ ID NO: 324122 - RNA, 16 nt, Human herpesvirus 6
ugucacacguguuaaa

SEQ ID NO: 324123 - RNA, 18 nt, Human herpesvirus 6
ugucgaaauucaccagau

SEQ ID NO: 324124 - RNA, 15 nt, Human herpesvirus 6
ugucgauguggauau

SEQ ID NO: 324125 - RNA, 19 nt, Human herpesvirus 6
ugucggucagacagugagu

SEQ ID NO: 324126 - RNA, 16 nt, Human herpesvirus 6
ugucgucuucccgcca

SEQ ID NO: 324127 - RNA, 14 nt, Human herpesvirus 6
ugucucaaccuuca

SEQ ID NO: 324128 - RNA, 14 nt, Human herpesvirus 6
ugucuccaaacaga

SEQ ID NO: 324129 - RNA, 19 nt, Human herpesvirus 6
ugucucgcaaacagcuuua

SEQ ID NO: 324130 - RNA, 12 nt, Human herpesvirus 6
ugucugugauuu

SEQ ID NO: 324131 - RNA, 13 nt, Human herpesvirus 6
ugugaauccagac

SEQ ID NO: 324132 - RNA, 19 nt, Human herpesvirus 6
ugugacacgauuucugacu

SEQ ID NO: 324133 - RNA, 15 nt, Human herpesvirus 6
ugugacgccuugaug

SEQ ID NO: 324134 - RNA, 15 nt, Human herpesvirus 6
ugugauaagugcugc

SEQ ID NO: 324135 - RNA, 23 nt, Human herpesvirus 6
ugugaucaucacaugccaugcaa

SEQ ID NO: 324136 - RNA, 22 nt, Human herpesvirus 6
ugugauucugcauuuauaucaa

SEQ ID NO: 324137 - RNA, 16 nt, Human herpesvirus 6
ugugauuuugggacaa

SEQ ID NO: 324138 - RNA, 16 nt, Human herpesvirus 6
ugugccaggaaagugu

SEQ ID NO: 324139 - RNA, 16 nt, Human herpesvirus 6
ugugcucggcucuuug

SEQ ID NO: 324140 - RNA, 13 nt, Human herpesvirus 6
uguggagacaccu

SEQ ID NO: 324141 - RNA, 16 nt, Human herpesvirus 6
uguguagcaaaaacag

SEQ ID NO: 324142 - RNA, 21 nt, Human herpesvirus 6
uguguagcaucuuaccuucaa

SEQ ID NO: 324143 - RNA, 22 nt, Human herpesvirus 6
uguguauauuuuaauacauuuc

SEQ ID NO: 324144 - RNA, 14 nt, Human herpesvirus 6
uguguaucugugaa

SEQ ID NO: 324145 - RNA, 13 nt, Human herpesvirus 6
ugugucuccgccu

SEQ ID NO: 324146 - RNA, 17 nt, Human herpesvirus 6
uguguuagcuuugcgau

SEQ ID NO: 324147 - RNA, 15 nt, Human herpesvirus 6
uguguuauaaggaag

SEQ ID NO: 324148 - RNA, 15 nt, Human herpesvirus 6
uguguucaagaacac

SEQ ID NO: 324149 - RNA, 15 nt, Human herpesvirus 6
uguguucuaucacau

SEQ ID NO: 324150 - RNA, 19 nt, Human herpesvirus 6
uguguuuccaaaauuggga

SEQ ID NO: 324151 - RNA, 17 nt, Human herpesvirus 6
uguuaauauuagccauu

SEQ ID NO: 324152 - RNA, 13 nt, Human herpesvirus 6
uguuagcuuuuac

SEQ ID NO: 324153 - RNA, 22 nt, Human herpesvirus 6
uguuauaacacaacaaguaaau

SEQ ID NO: 324154 - RNA, 19 nt, Human herpesvirus 6
uguucauaggacuaggauu

SEQ ID NO: 324155 - RNA, 16 nt, Human herpesvirus 6
uguucguggacaauga

SEQ ID NO: 324156 - RNA, 13 nt, Human herpesvirus 6
uguucuaaaggau

SEQ ID NO: 324157 - RNA, 17 nt, Human herpesvirus 6
uguugaaucuuauucaa

SEQ ID NO: 324158 - RNA, 13 nt, Human herpesvirus 6
uguugaaugcaua

SEQ ID NO: 324159 - RNA, 15 nt, Human herpesvirus 6
uguuguauuccacag

SEQ ID NO: 324160 - RNA, 15 nt, Human herpesvirus 6
uguugugaucuuuac

SEQ ID NO: 324161 - RNA, 20 nt, Human herpesvirus 6
uguuguguuuacauauacau

SEQ ID NO: 324162 - RNA, 19 nt, Human herpesvirus 6
uguuuaaaguuuugugauc

SEQ ID NO: 324163 - RNA, 19 nt, Human herpesvirus 6
uguuuaaguaaaacaaaac

SEQ ID NO: 324164 - RNA, 13 nt, Human herpesvirus 6
uguuuagccuuua

SEQ ID NO: 324165 - RNA, 18 nt, Human herpesvirus 6
uguuuccagagcauacau

SEQ ID NO: 324166 - RNA, 15 nt, Human herpesvirus 6
uguuucgcagaggac

SEQ ID NO: 324167 - RNA, 18 nt, Human herpesvirus 6
uguuuuagaaacauuugc

SEQ ID NO: 324168 - RNA, 22 nt, Human herpesvirus 6
uguuuuuacuugauaaacugua

SEQ ID NO: 324169 - RNA, 23 nt, Human herpesvirus 6
uuaaaacaggaagcgccauaaaa

SEQ ID NO: 324170 - RNA, 16 nt, Human herpesvirus 6
uuaaaagaccacuuuu

SEQ ID NO: 324171 - RNA, 15 nt, Human herpesvirus 6
uuaaaaggaauagca

SEQ ID NO: 324172 - RNA, 16 nt, Human herpesvirus 6
uuaaaccucuguagau

SEQ ID NO: 324173 - RNA, 16 nt, Human herpesvirus 6
uuaaacuaacauagcg

SEQ ID NO: 324174 - RNA, 13 nt, Human herpesvirus 6
uuaaagaaucugc

SEQ ID NO: 324175 - RNA, 17 nt, Human herpesvirus 6
uuaaagaguuuucucac

SEQ ID NO: 324176 - RNA, 21 nt, Human herpesvirus 6
gugaucuuuacaaaagacaca

SEQ ID NO: 324177 - RNA, 16 nt, Human herpesvirus 6
gugauuaugccaaaug

SEQ ID NO: 324178 - RNA, 21 nt, Human herpesvirus 6
gugauuuuucggaaaacagcu

SEQ ID NO: 324179 - RNA, 15 nt, Human herpesvirus 6
gugcagaacaucuca

SEQ ID NO: 324180 - RNA, 18 nt, Human herpesvirus 6
gugcguauuccacgggau

SEQ ID NO: 324181 - RNA, 14 nt, Human herpesvirus 6
gugcuugucucaca

SEQ ID NO: 324182 - RNA, 14 nt, Human herpesvirus 6
gugcuuugaggcag

SEQ ID NO: 324183 - RNA, 17 nt, Human herpesvirus 6
guggacgcuagugauca

SEQ ID NO: 324184 - RNA, 14 nt, Human herpesvirus 6
guggaucaucucca

SEQ ID NO: 324185 - RNA, 22 nt, Human herpesvirus 6
guggauuguaucgagucuuuau

SEQ ID NO: 324186 - RNA, 14 nt, Human herpesvirus 6
guggcagucugcuc

SEQ ID NO: 324187 - RNA, 21 nt, Human herpesvirus 6
gugggaggagugaacauacaa

SEQ ID NO: 324188 - RNA, 13 nt, Human herpesvirus 6
gugguuguuguua

SEQ ID NO: 324189 - RNA, 13 nt, Human herpesvirus 6
guguaaaucauca

SEQ ID NO: 324190 - RNA, 22 nt, Human herpesvirus 6
guguaacucuuuuuguugcuau

SEQ ID NO: 324191 - RNA, 12 nt, Human herpesvirus 6
guguacaaugac

SEQ ID NO: 324192 - RNA, 20 nt, Human herpesvirus 6
guguauauugaauuguauau

SEQ ID NO: 324193 - RNA, 19 nt, Human herpesvirus 6
gugucaaguuucaccaugu

SEQ ID NO: 324194 - RNA, 13 nt, Human herpesvirus 6
gugucacacagca

SEQ ID NO: 324195 - RNA, 16 nt, Human herpesvirus 6
gugucacacagcauga

SEQ ID NO: 324196 - RNA, 12 nt, Human herpesvirus 6
gugucuguucaa

SEQ ID NO: 324197 - RNA, 18 nt, Human herpesvirus 6
gugucuguucaacgucuu

SEQ ID NO: 324198 - RNA, 13 nt, Human herpesvirus 6
gugugacauucaa

SEQ ID NO: 324199 - RNA, 19 nt, Human herpesvirus 6
guguggaacauacuggugg

SEQ ID NO: 324200 - RNA, 14 nt, Human herpesvirus 6
guguguuauaagga

SEQ ID NO: 324201 - RNA, 23 nt, Human herpesvirus 6
guguuauaaggaagauucagagu

SEQ ID NO: 324202 - RNA, 17 nt, Human herpesvirus 6
guguucguggacaauga

SEQ ID NO: 324203 - RNA, 13 nt, Human herpesvirus 6
guguucuaucaca

SEQ ID NO: 324204 - RNA, 20 nt, Human herpesvirus 6
guguugaauguuacagauac

SEQ ID NO: 324205 - RNA, 20 nt, Human herpesvirus 6
guguuguuguauauguuaac

SEQ ID NO: 324206 - RNA, 15 nt, Human herpesvirus 6
guguuuacauauaca

SEQ ID NO: 324207 - RNA, 23 nt, Human herpesvirus 6
guguuuacauauacauuuguaca

SEQ ID NO: 324208 - RNA, 16 nt, Human herpesvirus 6
guuaaaguuucagagg

SEQ ID NO: 324209 - RNA, 15 nt, Human herpesvirus 6
guuaauauuagccau

SEQ ID NO: 324210 - RNA, 23 nt, Human herpesvirus 6
guuacaagaaaagaaacaaugcu

SEQ ID NO: 324211 - RNA, 21 nt, Human herpesvirus 6
guuacagauacauagauuuua

SEQ ID NO: 324212 - RNA, 18 nt, Human herpesvirus 6
guuagaaauucuauguac

SEQ ID NO: 324213 - RNA, 16 nt, Human herpesvirus 6
guuaucaucacaaagu

SEQ ID NO: 324214 - RNA, 17 nt, Human herpesvirus 6
guuauguaaagaaauaa

SEQ ID NO: 324215 - RNA, 15 nt, Human herpesvirus 6
guucaagaacacagg

SEQ ID NO: 324216 - RNA, 16 nt, Human herpesvirus 6
guucaguaacauuuaa

SEQ ID NO: 324217 - RNA, 17 nt, Human herpesvirus 6
guuccacgcauagacaa

SEQ ID NO: 324218 - RNA, 19 nt, Human herpesvirus 6
guuccacgcauagacaaac

SEQ ID NO: 324219 - RNA, 19 nt, Human herpesvirus 6
guuccccaugucuugccuc

SEQ ID NO: 324220 - RNA, 21 nt, Human herpesvirus 6
guucgucgagaaccaccagag

SEQ ID NO: 324221 - RNA, 15 nt, Human herpesvirus 6
guucguggacaauga

SEQ ID NO: 324222 - RNA, 17 nt, Human herpesvirus 6
guucugccacgacgugc

SEQ ID NO: 324223 - RNA, 23 nt, Human herpesvirus 6
guucuuacaauguuuuugacaaa

SEQ ID NO: 324224 - RNA, 22 nt, Human herpesvirus 6
guucuuuacguuuuccauguga

SEQ ID NO: 324225 - RNA, 20 nt, Human herpesvirus 6
guugcaauaaaaaauggauu

SEQ ID NO: 324226 - RNA, 13 nt, Human herpesvirus 6
guuggaugccugc

SEQ ID NO: 324227 - RNA, 21 nt, Human herpesvirus 6
guuggaugccugcauaugcag

SEQ ID NO: 324228 - RNA, 14 nt, Human herpesvirus 6
guuggcgcguuuau

SEQ ID NO: 324229 - RNA, 16 nt, Human herpesvirus 6
guugugaucuuuacaa

SEQ ID NO: 324230 - RNA, 17 nt, Human herpesvirus 6
guuguguugcaguugua

SEQ ID NO: 324231 - RNA, 21 nt, Human herpesvirus 6
guuuaacccucgaugcguuau

SEQ ID NO: 324232 - RNA, 12 nt, Human herpesvirus 6
guuuacauagaa

SEQ ID NO: 324233 - RNA, 11 nt, Human herpesvirus 6
guuuacauaua

SEQ ID NO: 324234 - RNA, 14 nt, Human herpesvirus 6
guuuacauauacau

SEQ ID NO: 324235 - RNA, 16 nt, Human herpesvirus 6
guuuaccuauuuacaa

SEQ ID NO: 324236 - RNA, 17 nt, Human herpesvirus 6
guuucggaaaauguaaa

SEQ ID NO: 324237 - RNA, 18 nt, Human herpesvirus 6
guuucuguccaaugacua

SEQ ID NO: 324238 - RNA, 17 nt, Human herpesvirus 6
guuucuuugacauuuau

SEQ ID NO: 324239 - RNA, 20 nt, Human herpesvirus 6
guuugaauaacaaacuauau

SEQ ID NO: 324240 - RNA, 17 nt, Human herpesvirus 6
guuugucucgcaaacag

SEQ ID NO: 324241 - RNA, 20 nt, Human herpesvirus 6
guuuuauuucuuacuaggaa

SEQ ID NO: 324242 - RNA, 9 nt, Human herpesvirus 6
guuuuccau

SEQ ID NO: 324243 - RNA, 13 nt, Human herpesvirus 6
guuuuguggcucu

SEQ ID NO: 324244 - RNA, 16 nt, Human herpesvirus 6
guuuuucucugcaaaa

SEQ ID NO: 324245 - RNA, 14 nt, Human herpesvirus 6
guuuuuuggaauau

SEQ ID NO: 324246 - RNA, 18 nt, Human herpesvirus 6
uaaaaaauggauuuggua

SEQ ID NO: 324247 - RNA, 13 nt, Human herpesvirus 6
uaaaaaauucuug

SEQ ID NO: 324248 - RNA, 11 nt, Human herpesvirus 6
uaaaaacucac

SEQ ID NO: 324249 - RNA, 20 nt, Human herpesvirus 6
uaaaaacucacacaaccauc

SEQ ID NO: 324250 - RNA, 15 nt, Human herpesvirus 6
uaaaaagugcuuuau

SEQ ID NO: 324251 - RNA, 18 nt, Human herpesvirus 6
uaaaaagugcuuuaucua

SEQ ID NO: 324252 - RNA, 19 nt, Human herpesvirus 6
uaaaaagugcuuuaucuag

SEQ ID NO: 324253 - RNA, 23 nt, Human herpesvirus 6
uaaaaaguuugugcgaauugugu

SEQ ID NO: 324254 - RNA, 19 nt, Human herpesvirus 6
uaaaaauuuuagccgauga

SEQ ID NO: 324255 - RNA, 21 nt, Human herpesvirus 6
uaaaacaagauccaaucacaa

SEQ ID NO: 324256 - RNA, 18 nt, Human herpesvirus 6
uaaaacaggaagcgccau

SEQ ID NO: 324257 - RNA, 20 nt, Human herpesvirus 6
uaaaacaggaagcgccauaa

SEQ ID NO: 324258 - RNA, 15 nt, Human herpesvirus 6
uaaaacaucagauga

SEQ ID NO: 324259 - RNA, 20 nt, Human herpesvirus 6
uaaaacaucaguaacaccgu

SEQ ID NO: 324260 - RNA, 22 nt, Human herpesvirus 6
uaaaacuuacuaauguggauuc

SEQ ID NO: 324261 - RNA, 23 nt, Human herpesvirus 6
uaaaagcauuuuuguugugauug

SEQ ID NO: 324262 - RNA, 14 nt, Human herpesvirus 6
uaaaauacacgucu

SEQ ID NO: 324263 - RNA, 17 nt, Human herpesvirus 6
uaaaauaccgacaagaa

SEQ ID NO: 324264 - RNA, 16 nt, Human herpesvirus 6
uaaaauagaagucuca

SEQ ID NO: 324265 - RNA, 23 nt, Human herpesvirus 6
uaaaauccuccuagggaauuuaa

SEQ ID NO: 324266 - RNA, 23 nt, Human herpesvirus 6
uaaaauguuuuuuguaccagcau

SEQ ID NO: 324267 - RNA, 13 nt, Human herpesvirus 6
uaaacaacacagc

SEQ ID NO: 324268 - RNA, 17 nt, Human herpesvirus 6
uaaacaacacagcacau

SEQ ID NO: 324269 - RNA, 17 nt, Human herpesvirus 6
uaaacaauuauguguca

SEQ ID NO: 324270 - RNA, 15 nt, Human herpesvirus 6
uaaacaccagcauaa

SEQ ID NO: 324271 - RNA, 17 nt, Human herpesvirus 6
uaaacacuaaauuacca

SEQ ID NO: 324272 - RNA, 16 nt, Human herpesvirus 6
uaaacaguuauacugg

SEQ ID NO: 324273 - RNA, 22 nt, Human herpesvirus 6
uaaacuaugcaaacgaaaccau

SEQ ID NO: 324274 - RNA, 20 nt, Human herpesvirus 6
uaaacuuagaucuauaugca

SEQ ID NO: 324275 - RNA, 22 nt, Human herpesvirus 6
uaaagaaauaaaguuaauucaa

SEQ ID NO: 324276 - RNA, 13 nt, Human herpesvirus 6
uaaagaacaugug

SEQ ID NO: 324277 - RNA, 16 nt, Human herpesvirus 6
uaaagaacaugugaca

SEQ ID NO: 324278 - RNA, 16 nt, Human herpesvirus 6
uaaagaaucugcagau

SEQ ID NO: 324279 - RNA, 18 nt, Human herpesvirus 6
uaaagaugggaaauuuau

SEQ ID NO: 324280 - RNA, 23 nt, Human herpesvirus 6
uaaaguuaaauugauaguacuua

SEQ ID NO: 324281 - RNA, 18 nt, Human herpesvirus 6
uaaaguuuaaagaugugu

SEQ ID NO: 324282 - RNA, 16 nt, Human herpesvirus 6
uaaaguuuacugugau

SEQ ID NO: 324283 - RNA, 16 nt, Human herpesvirus 6
uaaaguuuugugaucc

SEQ ID NO: 324284 - RNA, 23 nt, Human herpesvirus 6
uaaauaaacaccagcauaacugg

SEQ ID NO: 324285 - RNA, 15 nt, Human herpesvirus 6
uaaauacuagcuaaa

SEQ ID NO: 324286 - RNA, 15 nt, Human herpesvirus 6
uaaauauaucaaaga

SEQ ID NO: 324287 - RNA, 23 nt, Human herpesvirus 6
uaaauauaucaaagauguacuca

SEQ ID NO: 324288 - RNA, 15 nt, Human herpesvirus 6
uaaauaugcuuauac

SEQ ID NO: 324289 - RNA, 20 nt, Human herpesvirus 6
uaaauaugguaauuuucaau

SEQ ID NO: 324290 - RNA, 20 nt, Human herpesvirus 6
uaaauauguugaaucuuauu

SEQ ID NO: 324291 - RNA, 13 nt, Human herpesvirus 6
uaaaucaaagacg

SEQ ID NO: 324292 - RNA, 22 nt, Human herpesvirus 6
uaaaucaaagacgauugcuuua

SEQ ID NO: 324293 - RNA, 16 nt, Human herpesvirus 6
uaaaucaucaacguaa

SEQ ID NO: 324294 - RNA, 21 nt, Human herpesvirus 6
uaaaugaauagauaauaauca

SEQ ID NO: 324295 - RNA, 14 nt, Human herpesvirus 6
uaaauggcauacau

SEQ ID NO: 324296 - RNA, 20 nt, Human herpesvirus 6
uaaauggcauugaagaugac

SEQ ID NO: 324297 - RNA, 22 nt, Human herpesvirus 6
uaaaugguagcuauuaugugaa

SEQ ID NO: 324298 - RNA, 22 nt, Human herpesvirus 6
uaaauguagcauacgacaaaua

SEQ ID NO: 324299 - RNA, 17 nt, Human herpesvirus 6
uaaauugauaguacuua

SEQ ID NO: 324300 - RNA, 21 nt, Human herpesvirus 6
uaacaacaacaauaacaacaa

SEQ ID NO: 324301 - RNA, 16 nt, Human herpesvirus 6
uaacaacaaccacagc

SEQ ID NO: 324302 - RNA, 13 nt, Human herpesvirus 6
uaacaagcacuga

SEQ ID NO: 324303 - RNA, 19 nt, Human herpesvirus 6
uaacaagcacugaauuaga

SEQ ID NO: 324304 - RNA, 21 nt, Human herpesvirus 6
uaacaauuauucaacauuacu

SEQ ID NO: 324305 - RNA, 15 nt, Human herpesvirus 6
uaacacaacaaguaa

SEQ ID NO: 324306 - RNA, 21 nt, Human herpesvirus 6
uaacagacgaggacggaauca

SEQ ID NO: 324307 - RNA, 19 nt, Human herpesvirus 6
uaacaucccagauacauaa

SEQ ID NO: 324308 - RNA, 20 nt, Human herpesvirus 6
uaacaucccagauacauaaa

SEQ ID NO: 324309 - RNA, 21 nt, Human herpesvirus 6
uaaccaaaaaaacguaugugu

SEQ ID NO: 324310 - RNA, 18 nt, Human herpesvirus 6
uaacgacaaaagacaaaa

SEQ ID NO: 324311 - RNA, 20 nt, Human herpesvirus 6
uaacgagccaagccauggaa

SEQ ID NO: 324312 - RNA, 17 nt, Human herpesvirus 6
uaacgauggaguauuug

SEQ ID NO: 324313 - RNA, 15 nt, Human herpesvirus 6
uaacgcagcaacaau

SEQ ID NO: 324314 - RNA, 16 nt, Human herpesvirus 6
uaacggaaaaauuuua

SEQ ID NO: 324315 - RNA, 19 nt, Human herpesvirus 6
uaacgucgggaauguguca

SEQ ID NO: 324316 - RNA, 15 nt, Human herpesvirus 6
uaacuaagauugugc

SEQ ID NO: 324317 - RNA, 19 nt, Human herpesvirus 6
uaacuacuucuuucuaaaa

SEQ ID NO: 324318 - RNA, 13 nt, Human herpesvirus 6
uaacuaguugcuu

SEQ ID NO: 324319 - RNA, 16 nt, Human herpesvirus 6
uaacuaguugcuugua

SEQ ID NO: 324320 - RNA, 21 nt, Human herpesvirus 6
uaacuauggaguccuugucag

SEQ ID NO: 324321 - RNA, 21 nt, Human herpesvirus 6
uaacucuuuuuguugcuauag

SEQ ID NO: 324322 - RNA, 17 nt, Human herpesvirus 6
uaacugguucagaauuu

SEQ ID NO: 324323 - RNA, 14 nt, Human herpesvirus 6
uaacuguaaaaagu

SEQ ID NO: 324324 - RNA, 14 nt, Human herpesvirus 6
uaacuuuacauuaa

SEQ ID NO: 324325 - RNA, 13 nt, Human herpesvirus 6
uaagaaagcaguu

SEQ ID NO: 324326 - RNA, 19 nt, Human herpesvirus 6
uaagaaauuuugcaugcau

SEQ ID NO: 324327 - RNA, 20 nt, Human herpesvirus 6
uaagaauuaauguccaguga

SEQ ID NO: 324328 - RNA, 13 nt, Human herpesvirus 6
uaagacacugaua

SEQ ID NO: 324329 - RNA, 12 nt, Human herpesvirus 6
uaagagugcaac

SEQ ID NO: 324330 - RNA, 13 nt, Human herpesvirus 6
uaagagugcaaca

SEQ ID NO: 324331 - RNA, 19 nt, Human herpesvirus 6
uaagagugcaacaaaaagc

SEQ ID NO: 324332 - RNA, 22 nt, Human herpesvirus 6
uaagaugucucgggggcauuag

SEQ ID NO: 324333 - RNA, 23 nt, Human herpesvirus 6
uaagauugcagacgcugaaauca

SEQ ID NO: 324334 - RNA, 22 nt, Human herpesvirus 6
uaagauuuucggugcacaugga

SEQ ID NO: 324335 - RNA, 11 nt, Human herpesvirus 6
uaagcaaaaac

SEQ ID NO: 324336 - RNA, 21 nt, Human herpesvirus 6
uaagcaaauguaacuuuuugu

SEQ ID NO: 324337 - RNA, 15 nt, Human herpesvirus 6
uaagcagcagaacaa

SEQ ID NO: 324338 - RNA, 16 nt, Human herpesvirus 6
uaagccuaagaaauuu

SEQ ID NO: 324339 - RNA, 15 nt, Human herpesvirus 6
uaagggucuaucgca

SEQ ID NO: 324340 - RNA, 13 nt, Human herpesvirus 6
uaaguacauagaa

SEQ ID NO: 324341 - RNA, 16 nt, Human herpesvirus 6
uaagucaucauauaau

SEQ ID NO: 324342 - RNA, 14 nt, Human herpesvirus 6
uaaguuaauuccag

SEQ ID NO: 324343 - RNA, 17 nt, Human herpesvirus 6
uaaguuuugggugcuau

SEQ ID NO: 324344 - RNA, 14 nt, Human herpesvirus 6
uaauaaacauuuau

SEQ ID NO: 324345 - RNA, 13 nt, Human herpesvirus 6
uaauaaacugugu

SEQ ID NO: 324346 - RNA, 17 nt, Human herpesvirus 6
uaauaagauguugcaau

SEQ ID NO: 324347 - RNA, 15 nt, Human herpesvirus 6
uaauaauggcaugca

SEQ ID NO: 324348 - RNA, 17 nt, Human herpesvirus 6
uaauaauggcaugcauu

SEQ ID NO: 324349 - RNA, 11 nt, Human herpesvirus 6
uaauacaucaa

SEQ ID NO: 324350 - RNA, 11 nt, Human herpesvirus 6
uaauacauuuc

SEQ ID NO: 324351 - RNA, 16 nt, Human herpesvirus 6
uaauaggaacuaugaa

SEQ ID NO: 324352 - RNA, 14 nt, Human herpesvirus 6
uaauauuagccauu

SEQ ID NO: 324353 - RNA, 16 nt, Human herpesvirus 6
uaaucacaaugaucaa

SEQ ID NO: 324354 - RNA, 19 nt, Human herpesvirus 6
uaaucaugauugcaucaaa

SEQ ID NO: 324355 - RNA, 21 nt, Human herpesvirus 6
uaaucgcgguccaacacagca

SEQ ID NO: 324356 - RNA, 21 nt, Human herpesvirus 6
uaaucuagaauaucugcuaag

SEQ ID NO: 324357 - RNA, 20 nt, Human herpesvirus 6
uaaugaguuuuucgcaauuu

SEQ ID NO: 324358 - RNA, 20 nt, Human herpesvirus 6
uaaugcccagauguggaauu

SEQ ID NO: 324359 - RNA, 19 nt, Human herpesvirus 6
uaaugcgguucgacagaga

SEQ ID NO: 324360 - RNA, 15 nt, Human herpesvirus 6
uaauguugaguaauu

SEQ ID NO: 324361 - RNA, 22 nt, Human herpesvirus 6
uaauuaagugcgcuggcuuauu

SEQ ID NO: 324362 - RNA, 17 nt, Human herpesvirus 6
uaauuacauauagucaa

SEQ ID NO: 324363 - RNA, 16 nt, Human herpesvirus 6
uaauuaccuauaguca

SEQ ID NO: 324364 - RNA, 18 nt, Human herpesvirus 6
uaauuaccuauagucaau

SEQ ID NO: 324365 - RNA, 15 nt, Human herpesvirus 6
uaauucggaacauug

SEQ ID NO: 324366 - RNA, 21 nt, Human herpesvirus 6
uaauucggucaccuacauucg

SEQ ID NO: 324367 - RNA, 19 nt, Human herpesvirus 6
uaauucuuaaagcguguga

SEQ ID NO: 324368 - RNA, 18 nt, Human herpesvirus 6
uaauugcgcaggaacaaa

SEQ ID NO: 324369 - RNA, 16 nt, Human herpesvirus 6
uaauuguggauuuuca

SEQ ID NO: 324370 - RNA, 13 nt, Human herpesvirus 6
uaauuucuaugua

SEQ ID NO: 324371 - RNA, 14 nt, Human herpesvirus 6
uaauuucuauguaa

SEQ ID NO: 324372 - RNA, 18 nt, Human herpesvirus 6
uaauuuuauuaacuguaa

SEQ ID NO: 324373 - RNA, 11 nt, Human herpesvirus 6
uacaaaaucaa

SEQ ID NO: 324374 - RNA, 15 nt, Human herpesvirus 6
uacaaaaugaccuca

SEQ ID NO: 324375 - RNA, 16 nt, Human herpesvirus 6
uacaaaaugaccucau

SEQ ID NO: 324376 - RNA, 17 nt, Human herpesvirus 6
uacaaaccaacguguca

SEQ ID NO: 324377 - RNA, 22 nt, Human herpesvirus 6
uacaaacgacaaaaccuaaaua

SEQ ID NO: 324378 - RNA, 20 nt, Human herpesvirus 6
uacaaagugaaagagacucu

SEQ ID NO: 324379 - RNA, 21 nt, Human herpesvirus 6
uacaaauaauaaaaaguaaua

SEQ ID NO: 324380 - RNA, 20 nt, Human herpesvirus 6
uacaacaggcuugugaaaga

SEQ ID NO: 324381 - RNA, 18 nt, Human herpesvirus 6
uacaacccccgauucaga

SEQ ID NO: 324382 - RNA, 23 nt, Human herpesvirus 6
uacaacccccgauucagaccuca

SEQ ID NO: 324383 - RNA, 19 nt, Human herpesvirus 6
uacaacugaaacuucacga

SEQ ID NO: 324384 - RNA, 17 nt, Human herpesvirus 6
uacaauaacaauuauuc

SEQ ID NO: 324385 - RNA, 15 nt, Human herpesvirus 6
uacaauagucauuaa

SEQ ID NO: 324386 - RNA, 20 nt, Human herpesvirus 6
uacaaugacugggagaauaa

SEQ ID NO: 324387 - RNA, 16 nt, Human herpesvirus 6
uacaauuuaauauauc

SEQ ID NO: 324388 - RNA, 17 nt, Human herpesvirus 6
uacaauuuaauauaucu

SEQ ID NO: 324389 - RNA, 21 nt, Human herpesvirus 6
uacacaaauugaccagccaga

SEQ ID NO: 324390 - RNA, 19 nt, Human herpesvirus 6
uacacacaggacacgacaa

SEQ ID NO: 324391 - RNA, 16 nt, Human herpesvirus 6
uacacaccgucuucaa

SEQ ID NO: 324392 - RNA, 21 nt, Human herpesvirus 6
uacacaccgucuucaaccugu

SEQ ID NO: 324393 - RNA, 22 nt, Human herpesvirus 6
uacacaccgucuucaaccuguu

SEQ ID NO: 324394 - RNA, 23 nt, Human herpesvirus 6
uacagaaguuucggcaacugaau

SEQ ID NO: 324395 - RNA, 13 nt, Human herpesvirus 6
uacagcaccauca

SEQ ID NO: 324396 - RNA, 17 nt, Human herpesvirus 6
uacagcaccaucaauaa

SEQ ID NO: 324397 - RNA, 20 nt, Human herpesvirus 6
uacaguuucucgaaaaaaca

SEQ ID NO: 324398 - RNA, 12 nt, Human herpesvirus 6
uacauaagcaaa

SEQ ID NO: 324399 - RNA, 16 nt, Human herpesvirus 6
uacauaauaucuaucu

SEQ ID NO: 324400 - RNA, 16 nt, Human herpesvirus 6
uacauagaaauuacaa

SEQ ID NO: 324401 - RNA, 12 nt, Human herpesvirus 6
uacauauaguca

SEQ ID NO: 324402 - RNA, 17 nt, Human herpesvirus 6
uacauuuccaugcauau

SEQ ID NO: 324403 - RNA, 14 nt, Human herpesvirus 6
uaccaagaaaucau

SEQ ID NO: 324404 - RNA, 18 nt, Human herpesvirus 6
uacccgaaguucucucac

SEQ ID NO: 324405 - RNA, 19 nt, Human herpesvirus 6
uaccguaaacaaauucuua

SEQ ID NO: 324406 - RNA, 23 nt, Human herpesvirus 6
cuuagaagacagaccacaccccu

SEQ ID NO: 324407 - RNA, 15 nt, Human herpesvirus 6
cuuagagacgugaua

SEQ ID NO: 324408 - RNA, 17 nt, Human herpesvirus 6
cuuagcuagaugugucu

SEQ ID NO: 324409 - RNA, 17 nt, Human herpesvirus 6
cuuauaacaagcacuga

SEQ ID NO: 324410 - RNA, 20 nt, Human herpesvirus 6
cuuauaauaggaacuaugaa

SEQ ID NO: 324411 - RNA, 14 nt, Human herpesvirus 6
cuuauuaauuuccu

SEQ ID NO: 324412 - RNA, 23 nt, Human herpesvirus 6
cuuauuaauuuccugaucacaga

SEQ ID NO: 324413 - RNA, 21 nt, Human herpesvirus 6
cuuauucaaaaauguugcaug

SEQ ID NO: 324414 - RNA, 22 nt, Human herpesvirus 6
cuuauucaaaaauguugcaugg

SEQ ID NO: 324415 - RNA, 18 nt, Human herpesvirus 6
cuuauuucaaugcguuuc

SEQ ID NO: 324416 - RNA, 15 nt, Human herpesvirus 6
cuucaaacaccucac

SEQ ID NO: 324417 - RNA, 21 nt, Human herpesvirus 6
cuucaaacaccucacaaucua

SEQ ID NO: 324418 - RNA, 11 nt, Human herpesvirus 6
cuucaccuguc

SEQ ID NO: 324419 - RNA, 23 nt, Human herpesvirus 6
cuucaccugucucugcuuuaugg

SEQ ID NO: 324420 - RNA, 14 nt, Human herpesvirus 6
cuucagacauccag

SEQ ID NO: 324421 - RNA, 17 nt, Human herpesvirus 6
cuucagacauccagaaa

SEQ ID NO: 324422 - RNA, 12 nt, Human herpesvirus 6
cuucagcucaaa

SEQ ID NO: 324423 - RNA, 21 nt, Human herpesvirus 6
cuucagcucaaacaaauggaa

SEQ ID NO: 324424 - RNA, 18 nt, Human herpesvirus 6
cuuccgcgauacccagcg

SEQ ID NO: 324425 - RNA, 19 nt, Human herpesvirus 6
cuuccguaucacacuuagc

SEQ ID NO: 324426 - RNA, 16 nt, Human herpesvirus 6
cuucgcggugcagaac

SEQ ID NO: 324427 - RNA, 15 nt, Human herpesvirus 6
cuucucucgaugaaa

SEQ ID NO: 324428 - RNA, 14 nt, Human herpesvirus 6
cuucugcuaauuca

SEQ ID NO: 324429 - RNA, 19 nt, Human herpesvirus 6
cuucuuuuagucuuuacca

SEQ ID NO: 324430 - RNA, 20 nt, Human herpesvirus 6
cuugauaaacuguaugcaau

SEQ ID NO: 324431 - RNA, 20 nt, Human herpesvirus 6
cuugauauaaucccgucucc

SEQ ID NO: 324432 - RNA, 23 nt, Human herpesvirus 6
cuugauauaaucccgucuccuca

SEQ ID NO: 324433 - RNA, 15 nt, Human herpesvirus 6
cuugaucaaauaucu

SEQ ID NO: 324434 - RNA, 15 nt, Human herpesvirus 6
cuugcaaauauuauu

SEQ ID NO: 324435 - RNA, 14 nt, Human herpesvirus 6
cuugggacauguau

SEQ ID NO: 324436 - RNA, 18 nt, Human herpesvirus 6
cuugguguggaacauacu

SEQ ID NO: 324437 - RNA, 17 nt, Human herpesvirus 6
cuuguaauuucuaugua

SEQ ID NO: 324438 - RNA, 12 nt, Human herpesvirus 6
cuugugaaagac

SEQ ID NO: 324439 - RNA, 15 nt, Human herpesvirus 6
cuuguguucuaucac

SEQ ID NO: 324440 - RNA, 19 nt, Human herpesvirus 6
cuuguuaucuuauguauau

SEQ ID NO: 324441 - RNA, 14 nt, Human herpesvirus 6
cuuguugaguuuca

SEQ ID NO: 324442 - RNA, 16 nt, Human herpesvirus 6
cuuuaaaugaggcuau

SEQ ID NO: 324443 - RNA, 19 nt, Human herpesvirus 6
cuuuaaucacaaugaucaa

SEQ ID NO: 324444 - RNA, 16 nt, Human herpesvirus 6
cuuuacauuaaacacu

SEQ ID NO: 324445 - RNA, 16 nt, Human herpesvirus 6
cuuuaccgaguaggua

SEQ ID NO: 324446 - RNA, 20 nt, Human herpesvirus 6
cuuuauuguguguacaauga

SEQ ID NO: 324447 - RNA, 14 nt, Human herpesvirus 6
cuuucaaaagcaug

SEQ ID NO: 324448 - RNA, 16 nt, Human herpesvirus 6
cuuucaguauuaacua

SEQ ID NO: 324449 - RNA, 13 nt, Human herpesvirus 6
cuuucauccugac

SEQ ID NO: 324450 - RNA, 16 nt, Human herpesvirus 6
cuuucuaaaaucaaaa

SEQ ID NO: 324451 - RNA, 21 nt, Human herpesvirus 6
cuuucucuuuuuaauuccaag

SEQ ID NO: 324452 - RNA, 18 nt, Human herpesvirus 6
cuuugcgcccauaccugu

SEQ ID NO: 324453 - RNA, 18 nt, Human herpesvirus 6
cuuugguuucaguaguga

SEQ ID NO: 324454 - RNA, 15 nt, Human herpesvirus 6
cuuuguccuuacaaa

SEQ ID NO: 324455 - RNA, 23 nt, Human herpesvirus 6
cuuuuaaaacaggaagcgccaua

SEQ ID NO: 324456 - RNA, 14 nt, Human herpesvirus 6
cuuuuacuuacauc

SEQ ID NO: 324457 - RNA, 22 nt, Human herpesvirus 6
cuuuuagucuuuaccauuugac

SEQ ID NO: 324458 - RNA, 22 nt, Human herpesvirus 6
cuuuuugccgucacacucuuaa

SEQ ID NO: 324459 - RNA, 19 nt, Human herpesvirus 6
gaaaaaaaaauaaguacau

SEQ ID NO: 324460 - RNA, 13 nt, Human herpesvirus 6
gaaaaaaaaucua

SEQ ID NO: 324461 - RNA, 14 nt, Human herpesvirus 6
gaaaaaaaaucuau

SEQ ID NO: 324462 - RNA, 16 nt, Human herpesvirus 6
gaaaaaaaaugaaggg

SEQ ID NO: 324463 - RNA, 21 nt, Human herpesvirus 6
gaaaaaaaauugccuuguaaa

SEQ ID NO: 324464 - RNA, 16 nt, Human herpesvirus 6
gaaaaaaacugugaaa

SEQ ID NO: 324465 - RNA, 23 nt, Human herpesvirus 6
gaaaaagguggcaucagaaucca

SEQ ID NO: 324466 - RNA, 22 nt, Human herpesvirus 6
gaaaaaguauccuaaauaccaa

SEQ ID NO: 324467 - RNA, 14 nt, Human herpesvirus 6
gaaaagcuauugaa

SEQ ID NO: 324468 - RNA, 13 nt, Human herpesvirus 6
gaaaagcuggaaa

SEQ ID NO: 324469 - RNA, 22 nt, Human herpesvirus 6
gaaaauauuuccaugacuguga

SEQ ID NO: 324470 - RNA, 17 nt, Human herpesvirus 6
gaaacaacgacuaccac

SEQ ID NO: 324471 - RNA, 20 nt, Human herpesvirus 6
gaaacaacgacuaccacauc

SEQ ID NO: 324472 - RNA, 12 nt, Human herpesvirus 6
gaaacaugaaca

SEQ ID NO: 324473 - RNA, 16 nt, Human herpesvirus 6
gaaacauuugcugaug

SEQ ID NO: 324474 - RNA, 12 nt, Human herpesvirus 6
gaaaccaaagca

SEQ ID NO: 324475 - RNA, 19 nt, Human herpesvirus 6
gaaaccaaagcauacucaa

SEQ ID NO: 324476 - RNA, 22 nt, Human herpesvirus 6
gaaaccauagcuguccaugaga

SEQ ID NO: 324477 - RNA, 23 nt, Human herpesvirus 6
gaaaccauagcuguccaugagau

SEQ ID NO: 324478 - RNA, 19 nt, Human herpesvirus 6
gaaagaaacgaagucuuug

SEQ ID NO: 324479 - RNA, 15 nt, Human herpesvirus 6
gaaagaauuacgcag

SEQ ID NO: 324480 - RNA, 13 nt, Human herpesvirus 6
gaaagaguguuug

SEQ ID NO: 324481 - RNA, 15 nt, Human herpesvirus 6
gaaauccuauauuac

SEQ ID NO: 324482 - RNA, 15 nt, Human herpesvirus 6
gaaaucuacuguaca

SEQ ID NO: 324483 - RNA, 19 nt, Human herpesvirus 6
gaaaugaaugccgacaucu

SEQ ID NO: 324484 - RNA, 20 nt, Human herpesvirus 6
gaaauuacaagguacacaau

SEQ ID NO: 324485 - RNA, 12 nt, Human herpesvirus 6
gaaauucuaugu

SEQ ID NO: 324486 - RNA, 13 nt, Human herpesvirus 6
gaaauucuaugua

SEQ ID NO: 324487 - RNA, 15 nt, Human herpesvirus 6
gaaauuuaauaagaa

SEQ ID NO: 324488 - RNA, 17 nt, Human herpesvirus 6
gaaauuuuugacugaua

SEQ ID NO: 324489 - RNA, 14 nt, Human herpesvirus 6
gaacaaaaucuucu

SEQ ID NO: 324490 - RNA, 12 nt, Human herpesvirus 6
gaacaaggccaa

SEQ ID NO: 324491 - RNA, 19 nt, Human herpesvirus 6
gaacaauauagaagacgca

SEQ ID NO: 324492 - RNA, 17 nt, Human herpesvirus 6
gaacaaugacauuauua

SEQ ID NO: 324493 - RNA, 21 nt, Human herpesvirus 6
gaacacauccacccaccuguc

SEQ ID NO: 324494 - RNA, 18 nt, Human herpesvirus 6
gaacaugauuauaucgca

SEQ ID NO: 324495 - RNA, 13 nt, Human herpesvirus 6
gaacauuguucua

SEQ ID NO: 324496 - RNA, 18 nt, Human herpesvirus 6
gaaccaaagacauucaac

SEQ ID NO: 324497 - RNA, 14 nt, Human herpesvirus 6
gaaccaccagagac

SEQ ID NO: 324498 - RNA, 14 nt, Human herpesvirus 6
gaaccagauaucuc

SEQ ID NO: 324499 - RNA, 14 nt, Human herpesvirus 6
gaaccaucuguuca

SEQ ID NO: 324500 - RNA, 15 nt, Human herpesvirus 6
gaaccgaucugugag

SEQ ID NO: 324501 - RNA, 16 nt, Human herpesvirus 6
gaaccgaucugugagc

SEQ ID NO: 324502 - RNA, 18 nt, Human herpesvirus 6
gaaccucaugaguguuua

SEQ ID NO: 324503 - RNA, 12 nt, Human herpesvirus 6
gaaccuccaguu

SEQ ID NO: 324504 - RNA, 16 nt, Human herpesvirus 6
gaaccugaaaucugag

SEQ ID NO: 324505 - RNA, 21 nt, Human herpesvirus 6
gaacgcaacgcggagugaacu

SEQ ID NO: 324506 - RNA, 15 nt, Human herpesvirus 6
gaacgggcacacguc

SEQ ID NO: 324507 - RNA, 13 nt, Human herpesvirus 6
gaacuacauauaa

SEQ ID NO: 324508 - RNA, 21 nt, Human herpesvirus 6
gaacucauguugccucuggac

SEQ ID NO: 324509 - RNA, 22 nt, Human herpesvirus 6
gaacugcuggcugagauucacu

SEQ ID NO: 324510 - RNA, 20 nt, Human herpesvirus 6
gaacuggugagaaauaacuu

SEQ ID NO: 324511 - RNA, 15 nt, Human herpesvirus 6
gaagacgacauacgu

SEQ ID NO: 324512 - RNA, 15 nt, Human herpesvirus 6
gaagacgcaaagaga

SEQ ID NO: 324513 - RNA, 16 nt, Human herpesvirus 6
gaagaggauggauccc

SEQ ID NO: 324514 - RNA, 16 nt, Human herpesvirus 6
gaagaucugcgugaac

SEQ ID NO: 324515 - RNA, 20 nt, Human herpesvirus 6
gaagauuugacauugcugaa

SEQ ID NO: 324516 - RNA, 20 nt, Human herpesvirus 6
gaagcgccauaaaaauaucg

SEQ ID NO: 324517 - RNA, 19 nt, Human herpesvirus 6
gaagcgucaacggcuucaa

SEQ ID NO: 324518 - RNA, 16 nt, Human herpesvirus 6
gaagcuucaagucuaa

SEQ ID NO: 324519 - RNA, 19 nt, Human herpesvirus 6
gaaggcuaucacuuagaca

SEQ ID NO: 324520 - RNA, 22 nt, Human herpesvirus 6
gaagggauggcagaucuugaaa

SEQ ID NO: 324521 - RNA, 13 nt, Human herpesvirus 6
gaagggcucuauu

SEQ ID NO: 324522 - RNA, 16 nt, Human herpesvirus 6
gaagggcucuauuacu

SEQ ID NO: 324523 - RNA, 18 nt, Human herpesvirus 6
gaaguuuccuuuguguga

SEQ ID NO: 324524 - RNA, 15 nt, Human herpesvirus 6
gaauaauaagccuaa

SEQ ID NO: 324525 - RNA, 16 nt, Human herpesvirus 6
gaauaauuauccucuc

SEQ ID NO: 324526 - RNA, 20 nt, Human herpesvirus 6
gaauacuacagugacuuuca

SEQ ID NO: 324527 - RNA, 22 nt, Human herpesvirus 6
gaauaguucuucaacauaucac

SEQ ID NO: 324528 - RNA, 14 nt, Human herpesvirus 6
gaauauguuuucaa

SEQ ID NO: 324529 - RNA, 15 nt, Human herpesvirus 6
gaaucauggugucuu

SEQ ID NO: 324530 - RNA, 17 nt, Human herpesvirus 6
gaaucuacugagaucau

SEQ ID NO: 324531 - RNA, 17 nt, Human herpesvirus 6
gaaucuuauucaaaaau

SEQ ID NO: 324532 - RNA, 17 nt, Human herpesvirus 6
gaaugaacgcacuggac

SEQ ID NO: 324533 - RNA, 11 nt, Human herpesvirus 6
gaaugugcuga

SEQ ID NO: 324534 - RNA, 13 nt, Human herpesvirus 6
gaaugugcugaug

SEQ ID NO: 324535 - RNA, 23 nt, Human herpesvirus 6
gaaugugucaguucaacgcuguc

SEQ ID NO: 324536 - RNA, 17 nt, Human herpesvirus 6
gaauguuaagcaaaaac

SEQ ID NO: 324537 - RNA, 20 nt, Human herpesvirus 6
gaauguuuguuuuugucaga

SEQ ID NO: 324538 - RNA, 15 nt, Human herpesvirus 6
gaauucuucugugac

SEQ ID NO: 324539 - RNA, 21 nt, Human herpesvirus 6
gaauuguaucuuuguuccaga

SEQ ID NO: 324540 - RNA, 14 nt, Human herpesvirus 6
gaauuuauuuucaa

SEQ ID NO: 324541 - RNA, 22 nt, Human herpesvirus 6
gaauuuguaaaaaaacauucua

SEQ ID NO: 324542 - RNA, 14 nt, Human herpesvirus 6
gacaaaaccuaaau

SEQ ID NO: 324543 - RNA, 17 nt, Human herpesvirus 6
gacaaaaccuaaauaca

SEQ ID NO: 324544 - RNA, 21 nt, Human herpesvirus 6
gacaaaguucaguaacauuua

SEQ ID NO: 324545 - RNA, 19 nt, Human herpesvirus 6
gacaacaaaggagugagaa

SEQ ID NO: 324546 - RNA, 16 nt, Human herpesvirus 6
gacaacacgccagaca

SEQ ID NO: 324547 - RNA, 19 nt, Human herpesvirus 6
gacaaguaagauugcagac

SEQ ID NO: 324548 - RNA, 21 nt, Human herpesvirus 6
gacaaugcagaacaacagcau

SEQ ID NO: 324549 - RNA, 23 nt, Human herpesvirus 6
gacagaauucuucugugacuaua

SEQ ID NO: 324550 - RNA, 22 nt, Human herpesvirus 6
gacagaccgucaaaucucgccg

SEQ ID NO: 324551 - RNA, 18 nt, Human herpesvirus 6
gacagaucggcguuuuga

SEQ ID NO: 324552 - RNA, 20 nt, Human herpesvirus 6
gacagucaacacccauggaa

SEQ ID NO: 324553 - RNA, 23 nt, Human herpesvirus 6
gacauggaagacaaauuaauuaa

SEQ ID NO: 324554 - RNA, 15 nt, Human herpesvirus 6
gacauguacaucaac

SEQ ID NO: 324555 - RNA, 12 nt, Human herpesvirus 6
gacauguauauu

SEQ ID NO: 324556 - RNA, 15 nt, Human herpesvirus 6
gacauuggucuuugc

SEQ ID NO: 324557 - RNA, 21 nt, Human herpesvirus 6
gaccaauuuaugucauuucau

SEQ ID NO: 324558 - RNA, 19 nt, Human herpesvirus 6
gaccauacguagugaugau

SEQ ID NO: 324559 - RNA, 23 nt, Human herpesvirus 6
gaccauggcccuacuacagugga

SEQ ID NO: 324560 - RNA, 12 nt, Human herpesvirus 6
gaccauguguau

SEQ ID NO: 324561 - RNA, 13 nt, Human herpesvirus 6
gaccauguguaua

SEQ ID NO: 324562 - RNA, 15 nt, Human herpesvirus 6
gaccauguguauauu

SEQ ID NO: 324563 - RNA, 18 nt, Human herpesvirus 6
gaccuauaaaaaauuuca

SEQ ID NO: 324564 - RNA, 23 nt, Human herpesvirus 6
gaccuugucaauaaacauuucau

SEQ ID NO: 324565 - RNA, 22 nt, Human herpesvirus 6
gacgaaagcaguuuuacaucau

SEQ ID NO: 324566 - RNA, 20 nt, Human herpesvirus 6
gacgacucgcggaguggagu

SEQ ID NO: 324567 - RNA, 14 nt, Human herpesvirus 6
gacgauaguguucu

SEQ ID NO: 324568 - RNA, 13 nt, Human herpesvirus 6
gacgccacgggca

SEQ ID NO: 324569 - RNA, 17 nt, Human herpesvirus 6
gacgccuugauguuucc

SEQ ID NO: 324570 - RNA, 14 nt, Human herpesvirus 6
gacuaccacaucac

SEQ ID NO: 324571 - RNA, 20 nt, Human herpesvirus 6
gacuaucugagacaguccau

SEQ ID NO: 324572 - RNA, 23 nt, Human herpesvirus 6
gacuauuaaacuaacauagcgaa

SEQ ID NO: 324573 - RNA, 19 nt, Human herpesvirus 6
gacucugacgaaguuuuua

SEQ ID NO: 324574 - RNA, 19 nt, Human herpesvirus 6
gacugaagaugagcagcuu

SEQ ID NO: 324575 - RNA, 20 nt, Human herpesvirus 6
gacugaagaugagcagcuuu

SEQ ID NO: 324576 - RNA, 19 nt, Human herpesvirus 6
gacugccgguaacgcuguc

SEQ ID NO: 324577 - RNA, 22 nt, Human herpesvirus 6
gacuggaaaacuaugugcauuc

SEQ ID NO: 324578 - RNA, 17 nt, Human herpesvirus 6
gacuuacagagcuuuua

SEQ ID NO: 324579 - RNA, 18 nt, Human herpesvirus 6
gacuucaaacaccucaca

SEQ ID NO: 324580 - RNA, 15 nt, Human herpesvirus 6
gacuucgacuucaaa

SEQ ID NO: 324581 - RNA, 17 nt, Human herpesvirus 6
gacuuuuuguagaacuu

SEQ ID NO: 324582 - RNA, 19 nt, Human herpesvirus 6
gagaaaaaacaaagcuuua

SEQ ID NO: 324583 - RNA, 13 nt, Human herpesvirus 6
gagaaaguuucug

SEQ ID NO: 324584 - RNA, 15 nt, Human herpesvirus 6
gagaaaugaucaaua

SEQ ID NO: 324585 - RNA, 19 nt, Human herpesvirus 6
gagaacaaaaugaggggaa

SEQ ID NO: 324586 - RNA, 12 nt, Human herpesvirus 6
gagaacgggcac

SEQ ID NO: 324587 - RNA, 19 nt, Human herpesvirus 6
gagaagagcgaaaugcaau

SEQ ID NO: 324588 - RNA, 20 nt, Human herpesvirus 6
gagaagagcgaaaugcaauc

SEQ ID NO: 324589 - RNA, 15 nt, Human herpesvirus 6
gagacaguccauuuc

SEQ ID NO: 324590 - RNA, 14 nt, Human herpesvirus 6
gagacguuguuuga

SEQ ID NO: 324591 - RNA, 16 nt, Human herpesvirus 6
gagacguuguuugacc

SEQ ID NO: 324592 - RNA, 22 nt, Human herpesvirus 6
gagacuggaaaacuaugugcau

SEQ ID NO: 324593 - RNA, 16 nt, Human herpesvirus 6
gagagacauccauuga

SEQ ID NO: 324594 - RNA, 13 nt, Human herpesvirus 6
gagaggacaguca

SEQ ID NO: 324595 - RNA, 16 nt, Human herpesvirus 6
gagauaaaaaacucaa

SEQ ID NO: 324596 - RNA, 16 nt, Human herpesvirus 6
gagauaucauaaucug

SEQ ID NO: 324597 - RNA, 13 nt, Human herpesvirus 6
cucaguagauuac

SEQ ID NO: 324598 - RNA, 14 nt, Human herpesvirus 6
cucaguagauuacc

SEQ ID NO: 324599 - RNA, 18 nt, Human herpesvirus 6
cucaguagauuaccuauc

SEQ ID NO: 324600 - RNA, 23 nt, Human herpesvirus 6
cucaucgcgacuaaaaauacgga

SEQ ID NO: 324601 - RNA, 22 nt, Human herpesvirus 6
cucaucuucagucuucaauaaa

SEQ ID NO: 324602 - RNA, 15 nt, Human herpesvirus 6
cucaugaguguuuaa

SEQ ID NO: 324603 - RNA, 22 nt, Human herpesvirus 6
cucauuguuucacuucuagugu

SEQ ID NO: 324604 - RNA, 22 nt, Human herpesvirus 6
cuccaauccaacgaauacuucu

SEQ ID NO: 324605 - RNA, 18 nt, Human herpesvirus 6
cucccaucccccuccccg

SEQ ID NO: 324606 - RNA, 16 nt, Human herpesvirus 6
cucccauguaugcauu

SEQ ID NO: 324607 - RNA, 18 nt, Human herpesvirus 6
cucccccggaguacacgu

SEQ ID NO: 324608 - RNA, 16 nt, Human herpesvirus 6
cuccccgggugcuccg

SEQ ID NO: 324609 - RNA, 21 nt, Human herpesvirus 6
cuccccuguccccucggucca

SEQ ID NO: 324610 - RNA, 20 nt, Human herpesvirus 6
cuccgauuuucuuaguaauu

SEQ ID NO: 324611 - RNA, 20 nt, Human herpesvirus 6
cuccgcacguuaucaaugau

SEQ ID NO: 324612 - RNA, 14 nt, Human herpesvirus 6
cuccgccaccaccg

SEQ ID NO: 324613 - RNA, 16 nt, Human herpesvirus 6
cuccggccccagagac

SEQ ID NO: 324614 - RNA, 23 nt, Human herpesvirus 6
cuccggggggaaaccucaaaaau

SEQ ID NO: 324615 - RNA, 13 nt, Human herpesvirus 6
cuccuacauucuc

SEQ ID NO: 324616 - RNA, 19 nt, Human herpesvirus 6
cuccuauuuacgguuucag

SEQ ID NO: 324617 - RNA, 23 nt, Human herpesvirus 6
cuccuggauuugagagcuaauau

SEQ ID NO: 324618 - RNA, 23 nt, Human herpesvirus 6
cucgaaaaaacaacgacuaucaa

SEQ ID NO: 324619 - RNA, 17 nt, Human herpesvirus 6
cucgaauaauuauccuc

SEQ ID NO: 324620 - RNA, 16 nt, Human herpesvirus 6
cucgccguauaagucu

SEQ ID NO: 324621 - RNA, 13 nt, Human herpesvirus 6
cucgcucacaaua

SEQ ID NO: 324622 - RNA, 23 nt, Human herpesvirus 6
cucggauauauacuuacuugagu

SEQ ID NO: 324623 - RNA, 16 nt, Human herpesvirus 6
cucgguuuugucccga

SEQ ID NO: 324624 - RNA, 18 nt, Human herpesvirus 6
cucguggucauugguguu

SEQ ID NO: 324625 - RNA, 21 nt, Human herpesvirus 6
cucguuccccaugucuugccu

SEQ ID NO: 324626 - RNA, 17 nt, Human herpesvirus 6
cucuaaaacaagacaga

SEQ ID NO: 324627 - RNA, 11 nt, Human herpesvirus 6
cucuagaaacg

SEQ ID NO: 324628 - RNA, 20 nt, Human herpesvirus 6
cucuauggugaguaccugua

SEQ ID NO: 324629 - RNA, 23 nt, Human herpesvirus 6
cucuauggugaguaccuguacaa

SEQ ID NO: 324630 - RNA, 13 nt, Human herpesvirus 6
cucuccacucuac

SEQ ID NO: 324631 - RNA, 17 nt, Human herpesvirus 6
cucucgauuucacuuaa

SEQ ID NO: 324632 - RNA, 20 nt, Human herpesvirus 6
cucucucggcugacaacaaa

SEQ ID NO: 324633 - RNA, 16 nt, Human herpesvirus 6
cucugcaaaacaaagg

SEQ ID NO: 324634 - RNA, 18 nt, Human herpesvirus 6
cucuucccacaaaccauc

SEQ ID NO: 324635 - RNA, 19 nt, Human herpesvirus 6
cucuuuauagagcaacuca

SEQ ID NO: 324636 - RNA, 22 nt, Human herpesvirus 6
cucuuuauagagcaacucauca

SEQ ID NO: 324637 - RNA, 15 nt, Human herpesvirus 6
cucuuuuuaauucca

SEQ ID NO: 324638 - RNA, 23 nt, Human herpesvirus 6
cugaaagaaucgguaaacuucag

SEQ ID NO: 324639 - RNA, 23 nt, Human herpesvirus 6
cugaagcaaagcacccuacacaa

SEQ ID NO: 324640 - RNA, 19 nt, Human herpesvirus 6
cugaaucuuccuuauaaca

SEQ ID NO: 324641 - RNA, 22 nt, Human herpesvirus 6
cugacauggaagacaaauuaau

SEQ ID NO: 324642 - RNA, 22 nt, Human herpesvirus 6
cugacugguauccaauuaacac

SEQ ID NO: 324643 - RNA, 15 nt, Human herpesvirus 6
cugagaccuugucaa

SEQ ID NO: 324644 - RNA, 22 nt, Human herpesvirus 6
cugagaguaaauauuucuaaac

SEQ ID NO: 324645 - RNA, 19 nt, Human herpesvirus 6
cugagaugacaucugcaaa

SEQ ID NO: 324646 - RNA, 22 nt, Human herpesvirus 6
cugagaugacaucugcaaaaaa

SEQ ID NO: 324647 - RNA, 19 nt, Human herpesvirus 6
cugagccuucugccugaaa

SEQ ID NO: 324648 - RNA, 22 nt, Human herpesvirus 6
cugauggcagguaaccaaaaaa

SEQ ID NO: 324649 - RNA, 19 nt, Human herpesvirus 6
cugauuuuguuuucuacgu

SEQ ID NO: 324650 - RNA, 12 nt, Human herpesvirus 6
cugcaaaacaaa

SEQ ID NO: 324651 - RNA, 22 nt, Human herpesvirus 6
cugcaacucuccaaguuagaaa

SEQ ID NO: 324652 - RNA, 16 nt, Human herpesvirus 6
cugcagugauauggaa

SEQ ID NO: 324653 - RNA, 13 nt, Human herpesvirus 6
cugcauaguguag

SEQ ID NO: 324654 - RNA, 14 nt, Human herpesvirus 6
cugcauaugcagac

SEQ ID NO: 324655 - RNA, 17 nt, Human herpesvirus 6
cugcaugguccacagau

SEQ ID NO: 324656 - RNA, 22 nt, Human herpesvirus 6
cugcccgcuaccaacagguuug

SEQ ID NO: 324657 - RNA, 14 nt, Human herpesvirus 6
cugcuaauucauag

SEQ ID NO: 324658 - RNA, 19 nt, Human herpesvirus 6
cugcuggcugagauucacu

SEQ ID NO: 324659 - RNA, 19 nt, Human herpesvirus 6
cugcuuagcauauuuuggc

SEQ ID NO: 324660 - RNA, 13 nt, Human herpesvirus 6
cuggaaaauaaca

SEQ ID NO: 324661 - RNA, 18 nt, Human herpesvirus 6
cuggaaagagaacgagcu

SEQ ID NO: 324662 - RNA, 13 nt, Human herpesvirus 6
cuggaguacaaga

SEQ ID NO: 324663 - RNA, 17 nt, Human herpesvirus 6
cuggcacggugccaaag

SEQ ID NO: 324664 - RNA, 19 nt, Human herpesvirus 6
cuggcacggugccaaagga

SEQ ID NO: 324665 - RNA, 20 nt, Human herpesvirus 6
cuggcccgaggauuaucgau

SEQ ID NO: 324666 - RNA, 12 nt, Human herpesvirus 6
aaaaaaacugug

SEQ ID NO: 324667 - RNA, 13 nt, Human herpesvirus 6
aaaaaaauuccca

SEQ ID NO: 324668 - RNA, 18 nt, Human herpesvirus 6
aaaaaacacaaaucugga

SEQ ID NO: 324669 - RNA, 12 nt, Human herpesvirus 6
aaaaaacugcau

SEQ ID NO: 324670 - RNA, 19 nt, Human herpesvirus 6
aaaaacaaaaaacaacuuu

SEQ ID NO: 324671 - RNA, 13 nt, Human herpesvirus 6
aaaaacacaaacc

SEQ ID NO: 324672 - RNA, 22 nt, Human herpesvirus 6
aaaaacacuagccuacuaugac

SEQ ID NO: 324673 - RNA, 12 nt, Human herpesvirus 6
aaaaacauucua

SEQ ID NO: 324674 - RNA, 21 nt, Human herpesvirus 6
aaaaagcagaucgaguuacau

SEQ ID NO: 324675 - RNA, 16 nt, Human herpesvirus 6
aaaaaguaguugcuaa

SEQ ID NO: 324676 - RNA, 18 nt, Human herpesvirus 6
aaaaaguauccuaaauac

SEQ ID NO: 324677 - RNA, 21 nt, Human herpesvirus 6
aaaaagugcuuuaucuagcca

SEQ ID NO: 324678 - RNA, 13 nt, Human herpesvirus 6
aaaaaguguaaca

SEQ ID NO: 324679 - RNA, 17 nt, Human herpesvirus 6
aaaaauaaguacauaga

SEQ ID NO: 324680 - RNA, 14 nt, Human herpesvirus 6
aaaaauaucacgga

SEQ ID NO: 324681 - RNA, 23 nt, Human herpesvirus 6
aaaaauaucgaaauaacgagauc

SEQ ID NO: 324682 - RNA, 14 nt, Human herpesvirus 6
aaaaauauuaauua

SEQ ID NO: 324683 - RNA, 17 nt, Human herpesvirus 6
aaaaauauuaauuacau

SEQ ID NO: 324684 - RNA, 16 nt, Human herpesvirus 6
aaaaaugcacaauuua

SEQ ID NO: 324685 - RNA, 18 nt, Human herpesvirus 6
aaaaauggcucagagaaa

SEQ ID NO: 324686 - RNA, 16 nt, Human herpesvirus 6
aaaaauguugcaugga

SEQ ID NO: 324687 - RNA, 17 nt, Human herpesvirus 6
aaaaauuuugaugccaa

SEQ ID NO: 324688 - RNA, 18 nt, Human herpesvirus 6
aaaaauuuugaugccaaa

SEQ ID NO: 324689 - RNA, 18 nt, Human herpesvirus 6
aaaacaacgaaacaguuc

SEQ ID NO: 324690 - RNA, 13 nt, Human herpesvirus 6
aaaacaagacaga

SEQ ID NO: 324691 - RNA, 13 nt, Human herpesvirus 6
aaaacaagaucca

SEQ ID NO: 324692 - RNA, 18 nt, Human herpesvirus 6
aaaacaagucaucucacu

SEQ ID NO: 324693 - RNA, 17 nt, Human herpesvirus 6
aaaacacuagccuacua

SEQ ID NO: 324694 - RNA, 19 nt, Human herpesvirus 6
aaaacagacgaaucacauc

SEQ ID NO: 324695 - RNA, 20 nt, Human herpesvirus 6
aaaacagacgaaucacaucc

SEQ ID NO: 324696 - RNA, 15 nt, Human herpesvirus 6
aaaacagacuuuacu

SEQ ID NO: 324697 - RNA, 20 nt, Human herpesvirus 6
aaaacaguugauuauuuagu

SEQ ID NO: 324698 - RNA, 15 nt, Human herpesvirus 6
aaaacaguuuaccua

SEQ ID NO: 324699 - RNA, 21 nt, Human herpesvirus 6
aaaacaguuuaccuauuuaca

SEQ ID NO: 324700 - RNA, 20 nt, Human herpesvirus 6
aaaacauauaaagagaccaa

SEQ ID NO: 324701 - RNA, 19 nt, Human herpesvirus 6
aaaacauuucuuacacaaa

SEQ ID NO: 324702 - RNA, 21 nt, Human herpesvirus 6
aaaacggccaaccucuuccua

SEQ ID NO: 324703 - RNA, 19 nt, Human herpesvirus 6
aaaacuuacuaauguggau

SEQ ID NO: 324704 - RNA, 15 nt, Human herpesvirus 6
aaaagaaucauuguu

SEQ ID NO: 324705 - RNA, 20 nt, Human herpesvirus 6
aaaagaaugggauugugauu

SEQ ID NO: 324706 - RNA, 14 nt, Human herpesvirus 6
aaaagacuuacuca

SEQ ID NO: 324707 - RNA, 20 nt, Human herpesvirus 6
aaaagagucccaucuauaca

SEQ ID NO: 324708 - RNA, 22 nt, Human herpesvirus 6
aaaagagucccaucuauacacc

SEQ ID NO: 324709 - RNA, 20 nt, Human herpesvirus 6
aaaagauguacgaugaacua

SEQ ID NO: 324710 - RNA, 17 nt, Human herpesvirus 6
aaaagcugacuauucag

SEQ ID NO: 324711 - RNA, 23 nt, Human herpesvirus 6
aaaagguggucguagacaguaaa

SEQ ID NO: 324712 - RNA, 18 nt, Human herpesvirus 6
aaaaguauagucuagcaa

SEQ ID NO: 324713 - RNA, 22 nt, Human herpesvirus 6
aaaaguauagucuagcaaccua

SEQ ID NO: 324714 - RNA, 23 nt, Human herpesvirus 6
aaaaguauagucuagcaaccuaa

SEQ ID NO: 324715 - RNA, 20 nt, Human herpesvirus 6
aaaaguauccuaaauaccaa

SEQ ID NO: 324716 - RNA, 22 nt, Human herpesvirus 6
aaaaguuagcggggagucucca

SEQ ID NO: 324717 - RNA, 19 nt, Human herpesvirus 6
aaaauaaauacuagcuaaa

SEQ ID NO: 324718 - RNA, 14 nt, Human herpesvirus 6
aaaauagaagucuc

SEQ ID NO: 324719 - RNA, 19 nt, Human herpesvirus 6
aaaauagcagaaguuuaca

SEQ ID NO: 324720 - RNA, 13 nt, Human herpesvirus 6
aaaaucaaacuca

SEQ ID NO: 324721 - RNA, 16 nt, Human herpesvirus 6
aaaaucuugucacucu

SEQ ID NO: 324722 - RNA, 13 nt, Human herpesvirus 6
aaaaugaccucau

SEQ ID NO: 324723 - RNA, 15 nt, Human herpesvirus 6
aaaaugcaacgcauc

SEQ ID NO: 324724 - RNA, 19 nt, Human herpesvirus 6
aaaaugcaacgcaucacac

SEQ ID NO: 324725 - RNA, 18 nt, Human herpesvirus 6
aaaaugccucuccuauaa

SEQ ID NO: 324726 - RNA, 19 nt, Human herpesvirus 6
aaaaugccucuccuauaaa

SEQ ID NO: 324727 - RNA, 23 nt, Human herpesvirus 6
aaaauguuuuucauaaaugguag

SEQ ID NO: 324728 - RNA, 16 nt, Human herpesvirus 6
aaaauucgccaauuaa

SEQ ID NO: 324729 - RNA, 12 nt, Human herpesvirus 6
aaaauucuugaa

SEQ ID NO: 324730 - RNA, 16 nt, Human herpesvirus 6
aaaauugcagaucuaa

SEQ ID NO: 324731 - RNA, 15 nt, Human herpesvirus 6
aaaauugcucuauug

SEQ ID NO: 324732 - RNA, 19 nt, Human herpesvirus 6
aaaauugggaaucaugugu

SEQ ID NO: 324733 - RNA, 19 nt, Human herpesvirus 6
aaaauuuuagccgaugaua

SEQ ID NO: 324734 - RNA, 17 nt, Human herpesvirus 6
aaaauuuugaugccaaa

SEQ ID NO: 324735 - RNA, 19 nt, Human herpesvirus 6
aaaauuuuuuacaucacga

SEQ ID NO: 324736 - RNA, 15 nt, Human herpesvirus 6
aaacaacgacuacca

SEQ ID NO: 324737 - RNA, 16 nt, Human herpesvirus 6
aaacaacgacuaucaa

SEQ ID NO: 324738 - RNA, 12 nt, Human herpesvirus 6
aaacaagacaga

SEQ ID NO: 324739 - RNA, 15 nt, Human herpesvirus 6
aaacaagucaucuca

SEQ ID NO: 324740 - RNA, 16 nt, Human herpesvirus 6
aaacaagucaucucac

SEQ ID NO: 324741 - RNA, 17 nt, Human herpesvirus 6
aaacacaccaccacaac

SEQ ID NO: 324742 - RNA, 21 nt, Human herpesvirus 6
aaacaccagcauaacuggaau

SEQ ID NO: 324743 - RNA, 21 nt, Human herpesvirus 6
aaacaccucacaaucuaauac

SEQ ID NO: 324744 - RNA, 22 nt, Human herpesvirus 6
aaacaccucacaaucuaauaca

SEQ ID NO: 324745 - RNA, 17 nt, Human herpesvirus 6
aaacacuagccuacuau

SEQ ID NO: 324746 - RNA, 19 nt, Human herpesvirus 6
aaacacugugaauccagac

SEQ ID NO: 324747 - RNA, 17 nt, Human herpesvirus 6
aaacagcuuuauuccca

SEQ ID NO: 324748 - RNA, 15 nt, Human herpesvirus 6
aaacagcuuuuccuc

SEQ ID NO: 324749 - RNA, 17 nt, Human herpesvirus 6
aaacaggaacagucuga

SEQ ID NO: 324750 - RNA, 20 nt, Human herpesvirus 6
aaacagggagugauugauga

SEQ ID NO: 324751 - RNA, 13 nt, Human herpesvirus 6
aaacaguugauua

SEQ ID NO: 324752 - RNA, 14 nt, Human herpesvirus 6
aaacaucaguaaca

SEQ ID NO: 324753 - RNA, 18 nt, Human herpesvirus 6
aaacaugcguuguguuac

SEQ ID NO: 324754 - RNA, 19 nt, Human herpesvirus 6
aaacauuuauaaaaggagu

SEQ ID NO: 324755 - RNA, 18 nt, Human herpesvirus 6
aaaccaaagcauacucaa

SEQ ID NO: 324756 - RNA, 18 nt, Human herpesvirus 6
aaaccaccccaaccgaaa

SEQ ID NO: 324757 - RNA, 21 nt, Human herpesvirus 6
aaaccauagguguuugcagau

SEQ ID NO: 324758 - RNA, 13 nt, Human herpesvirus 6
aaaccaucaauuu

SEQ ID NO: 324759 - RNA, 22 nt, Human herpesvirus 6
aaaccaucgucauaaccucauc

SEQ ID NO: 324760 - RNA, 17 nt, Human herpesvirus 6
aaaccuaaauacauuca

SEQ ID NO: 324761 - RNA, 19 nt, Human herpesvirus 6
aaacgacaaagaaccggcg

SEQ ID NO: 324762 - RNA, 19 nt, Human herpesvirus 6
aaacgaucgacccacuccu

SEQ ID NO: 324763 - RNA, 23 nt, Human herpesvirus 6
aaacguugcacuacuugucuuac

SEQ ID NO: 324764 - RNA, 13 nt, Human herpesvirus 6
aaacuaacauagc

SEQ ID NO: 324765 - RNA, 23 nt, Human herpesvirus 6
aaacuaacauagcgaauuugaac

SEQ ID NO: 324766 - RNA, 23 nt, Human herpesvirus 6
aaacuaggugauugggagcucac

SEQ ID NO: 324767 - RNA, 20 nt, Human herpesvirus 6
aaacucgcaccucugaaaca

SEQ ID NO: 324768 - RNA, 12 nt, Human herpesvirus 6
aaacugacugua

SEQ ID NO: 324769 - RNA, 13 nt, Human herpesvirus 6
aaacugaggcaaa

SEQ ID NO: 324770 - RNA, 14 nt, Human herpesvirus 6
aaacuguaugcaau

SEQ ID NO: 324771 - RNA, 23 nt, Human herpesvirus 6
aaacuuuaugaggaacuggugag

SEQ ID NO: 324772 - RNA, 22 nt, Human herpesvirus 6
aaagaaacucuuauaacaagca

SEQ ID NO: 324773 - RNA, 14 nt, Human herpesvirus 6
aaagaacaugugac

SEQ ID NO: 324774 - RNA, 15 nt, Human herpesvirus 6
aaagaaucugcagau

SEQ ID NO: 324775 - RNA, 23 nt, Human herpesvirus 6
aaagacaugcauuuuguauuuau

SEQ ID NO: 324776 - RNA, 12 nt, Human herpesvirus 6
aaagacauucaa

SEQ ID NO: 324777 - RNA, 21 nt, Human herpesvirus 6
aaagagauaaaaagagaggaa

SEQ ID NO: 324778 - RNA, 17 nt, Human herpesvirus 6
aaagauguacucaucca

SEQ ID NO: 324779 - RNA, 14 nt, Human herpesvirus 6
aaagcauacucaac

SEQ ID NO: 324780 - RNA, 22 nt, Human herpesvirus 6
aaagcuaaaucaaaugauuuua

SEQ ID NO: 324781 - RNA, 19 nt, Human herpesvirus 6
aaagcuuuauguacccuaa

SEQ ID NO: 324782 - RNA, 15 nt, Human herpesvirus 6
aaaggaguaugacug

SEQ ID NO: 324783 - RNA, 15 nt, Human herpesvirus 6
aaaguaagcaccuua

SEQ ID NO: 324784 - RNA, 18 nt, Human herpesvirus 6
aaaguaguugcuaagugu

SEQ ID NO: 324785 - RNA, 16 nt, Human herpesvirus 6
aaaguauccuaaauac

SEQ ID NO: 324786 - RNA, 17 nt, Human herpesvirus 6
aaaguauccuaaauacc

SEQ ID NO: 324787 - RNA, 15 nt, Human herpesvirus 6
aaagucagagauuau

SEQ ID NO: 324788 - RNA, 18 nt, Human herpesvirus 6
aaagucuaaugguugaaa

SEQ ID NO: 324789 - RNA, 16 nt, Human herpesvirus 6
aaagugucacucguuu

SEQ ID NO: 324790 - RNA, 14 nt, Human herpesvirus 6
aaaguucaguaaca

SEQ ID NO: 324791 - RNA, 16 nt, Human herpesvirus 6
aaaguuuaaguuuuca

SEQ ID NO: 324792 - RNA, 23 nt, Human herpesvirus 6
aaaguuugugcgaauuguguugc

SEQ ID NO: 324793 - RNA, 15 nt, Human herpesvirus 6
aaaguuuugugaucc

SEQ ID NO: 324794 - RNA, 17 nt, Human herpesvirus 6
aaauaaacaccagcaua

SEQ ID NO: 324795 - RNA, 11 nt, Human herpesvirus 6
aaauaaauacu

SEQ ID NO: 324796 - RNA, 18 nt, Human herpesvirus 6
aaauacauucacauuacc

SEQ ID NO: 324797 - RNA, 22 nt, Human herpesvirus 6
aaauagcagaaguuuacauaga

SEQ ID NO: 324798 - RNA, 23 nt, Human herpesvirus 6
aaauagcagaaguuuacauagaa

SEQ ID NO: 324799 - RNA, 17 nt, Human herpesvirus 6
aaauagguaaacuguuu

SEQ ID NO: 324800 - RNA, 16 nt, Human herpesvirus 6
aaauagugcugagacu

SEQ ID NO: 324801 - RNA, 16 nt, Human herpesvirus 6
aaauaguuguauuuau

SEQ ID NO: 324802 - RNA, 17 nt, Human herpesvirus 6
aaauauaauuucggguu

SEQ ID NO: 324803 - RNA, 13 nt, Human herpesvirus 6
aaauauaucaaag

SEQ ID NO: 324804 - RNA, 14 nt, Human herpesvirus 6
aaauauaucaaaga

SEQ ID NO: 324805 - RNA, 16 nt, Human herpesvirus 6
aaauaucgccauuaaa

SEQ ID NO: 324806 - RNA, 21 nt, Human herpesvirus 6
aaauaucgccccugucuguga

SEQ ID NO: 324807 - RNA, 22 nt, Human herpesvirus 6
aaauaucgccccugucugugau

SEQ ID NO: 324808 - RNA, 19 nt, Human herpesvirus 6
aaauaucgcgcaaaccaua

SEQ ID NO: 324809 - RNA, 21 nt, Human herpesvirus 6
aaauauuauuuucccacagau

SEQ ID NO: 324810 - RNA, 18 nt, Human herpesvirus 6
aaaucaaaugauuuuaca

SEQ ID NO: 324811 - RNA, 21 nt, Human herpesvirus 6
aaaucaguucuccgggcuugc

SEQ ID NO: 324812 - RNA, 16 nt, Human herpesvirus 6
aaaucaucucgugcaa

SEQ ID NO: 324813 - RNA, 19 nt, Human herpesvirus 6
aaaucaucucgugcaaaag

SEQ ID NO: 324814 - RNA, 14 nt, Human herpesvirus 6
aaauccuauauuac

SEQ ID NO: 324815 - RNA, 23 nt, Human herpesvirus 6
aaauccuccuagggaauuuaauc

SEQ ID NO: 324816 - RNA, 21 nt, Human herpesvirus 6
aaaucggacaaugcagaacaa

SEQ ID NO: 324817 - RNA, 22 nt, Human herpesvirus 6
aaaucuacuguacaaaaucaaa

SEQ ID NO: 324818 - RNA, 19 nt, Human herpesvirus 6
aaaucucgccgaacuagaa

SEQ ID NO: 324819 - RNA, 13 nt, Human herpesvirus 6
aaaucuugucacu

SEQ ID NO: 324820 - RNA, 20 nt, Human herpesvirus 6
aaaugaugaguaauacauca

SEQ ID NO: 324821 - RNA, 23 nt, Human herpesvirus 6
aaaugaugaguaauacaucauua

SEQ ID NO: 324822 - RNA, 20 nt, Human herpesvirus 6
aaaugcaacgcaucacacau

SEQ ID NO: 324823 - RNA, 13 nt, Human herpesvirus 6
aaauguaacuuuu

SEQ ID NO: 324824 - RNA, 16 nt, Human herpesvirus 6
aaauguugcauggaaa

SEQ ID NO: 324825 - RNA, 14 nt, Human herpesvirus 6
aaauguuucaucca

SEQ ID NO: 324826 - RNA, 22 nt, Human herpesvirus 6
aaauuacuaguaauaacauuaa

SEQ ID NO: 324827 - RNA, 21 nt, Human herpesvirus 6
aaauuauccuggcgaugcaga

SEQ ID NO: 324828 - RNA, 20 nt, Human herpesvirus 6
aaauuaugguuaucaucaca

SEQ ID NO: 324829 - RNA, 21 nt, Human herpesvirus 6
aaauucaaucaggucgcuaua

SEQ ID NO: 324830 - RNA, 16 nt, Human herpesvirus 6
aaauucaccagauuca

SEQ ID NO: 324831 - RNA, 19 nt, Human herpesvirus 6
aaauucgauggguuaguga

SEQ ID NO: 324832 - RNA, 14 nt, Human herpesvirus 6
aaauugaugauguu

SEQ ID NO: 324833 - RNA, 20 nt, Human herpesvirus 6
aaauugccuuguaaaucaaa

SEQ ID NO: 324834 - RNA, 14 nt, Human herpesvirus 6
aaauuguaacuuca

SEQ ID NO: 324835 - RNA, 14 nt, Human herpesvirus 6
aaauuuaucacaaa

SEQ ID NO: 324836 - RNA, 22 nt, Human herpesvirus 6
aaauuuucucuggggaguuuca

SEQ ID NO: 324837 - RNA, 16 nt, Human herpesvirus 6
aaauuuugcaugcauu

SEQ ID NO: 324838 - RNA, 21 nt, Human herpesvirus 6
aaauuuuuuucaugaucucac

SEQ ID NO: 324839 - RNA, 20 nt, Human herpesvirus 6
aacaaacacgugauuccuca

SEQ ID NO: 324840 - RNA, 16 nt, Human herpesvirus 6
aacaaagaaucaauga

SEQ ID NO: 324841 - RNA, 17 nt, Human herpesvirus 6
aacaaauucuuacauuu

SEQ ID NO: 324842 - RNA, 15 nt, Human herpesvirus 6
aacaacaacaauaac

SEQ ID NO: 324843 - RNA, 15 nt, Human herpesvirus 6
aacaacgacuaccac

SEQ ID NO: 324844 - RNA, 15 nt, Human herpesvirus 6
aacaacgacuaucaa

SEQ ID NO: 324845 - RNA, 17 nt, Human herpesvirus 6
aacaacgucaugcaaaa

SEQ ID NO: 324846 - RNA, 12 nt, Human herpesvirus 6
aacaagcacuga

SEQ ID NO: 324847 - RNA, 14 nt, Human herpesvirus 6
aacaaguaaauucc

SEQ ID NO: 324848 - RNA, 15 nt, Human herpesvirus 6
aacaagucaucucac

SEQ ID NO: 324849 - RNA, 18 nt, Human herpesvirus 6
aacaaucagccugcucag

SEQ ID NO: 324850 - RNA, 15 nt, Human herpesvirus 6
aacaauccauguuca

SEQ ID NO: 324851 - RNA, 13 nt, Human herpesvirus 6
aacacacagugaa

SEQ ID NO: 324852 - RNA, 21 nt, Human herpesvirus 6
aacacagcacauaacugcaua

SEQ ID NO: 324853 - RNA, 14 nt, Human herpesvirus 6
aacacagcaugcau

SEQ ID NO: 324854 - RNA, 15 nt, Human herpesvirus 6
aacacccauggaauu

SEQ ID NO: 324855 - RNA, 21 nt, Human herpesvirus 6
aacaccccgaguuuacuaaaa

SEQ ID NO: 324856 - RNA, 16 nt, Human herpesvirus 6
aacacgaagacgaaga

SEQ ID NO: 324857 - RNA, 18 nt, Human herpesvirus 6
aacacuaaauuaccacca

SEQ ID NO: 324858 - RNA, 22 nt, Human herpesvirus 6
aacagagaaggguaugaaacuu

SEQ ID NO: 324859 - RNA, 18 nt, Human herpesvirus 6
aacagcuuagggccaaac

SEQ ID NO: 324860 - RNA, 23 nt, Human herpesvirus 6
aacagcuuuauucccaugacgau

SEQ ID NO: 324861 - RNA, 22 nt, Human herpesvirus 6
aacaggcuugugaaagaccgua

SEQ ID NO: 324862 - RNA, 19 nt, Human herpesvirus 6
aacaguaauuuuagggaug

SEQ ID NO: 324863 - RNA, 11 nt, Human herpesvirus 6
aacaguuuacc

SEQ ID NO: 324864 - RNA, 23 nt, Human herpesvirus 6
aacaguuuaccuauuuacaaugu

SEQ ID NO: 324865 - RNA, 14 nt, Human herpesvirus 6
aacauaaaaauaca

SEQ ID NO: 324866 - RNA, 14 nt, Human herpesvirus 6
aacauaaaacaaca

SEQ ID NO: 324867 - RNA, 15 nt, Human herpesvirus 6
aacauaaaacaacaa

SEQ ID NO: 324868 - RNA, 16 nt, Human herpesvirus 6
aacauaaaacaacaac

SEQ ID NO: 324869 - RNA, 13 nt, Human herpesvirus 6
aacauaauugcac

SEQ ID NO: 324870 - RNA, 18 nt, Human herpesvirus 6
aacauagaaaaaugagac

SEQ ID NO: 324871 - RNA, 18 nt, Human herpesvirus 6
aacauagcgaauuugaac

SEQ ID NO: 324872 - RNA, 13 nt, Human herpesvirus 6
aacauagucaagu

SEQ ID NO: 324873 - RNA, 18 nt, Human herpesvirus 6
aacauaucgagccaaaga

SEQ ID NO: 324874 - RNA, 17 nt, Human herpesvirus 6
aacaucaguaacaccgu

SEQ ID NO: 324875 - RNA, 16 nt, Human herpesvirus 6
aacauccuauugagau

SEQ ID NO: 324876 - RNA, 21 nt, Human herpesvirus 6
aacaugauuguaauaaagugu

SEQ ID NO: 324877 - RNA, 13 nt, Human herpesvirus 6
aacauguacaaac

SEQ ID NO: 324878 - RNA, 17 nt, Human herpesvirus 6
aacauugaaaaaucucu

SEQ ID NO: 324879 - RNA, 23 nt, Human herpesvirus 6
aacauuuaauaaagaacauguga

SEQ ID NO: 324880 - RNA, 13 nt, Human herpesvirus 6
aacauuucuuaca

SEQ ID NO: 324881 - RNA, 17 nt, Human herpesvirus 6
aaccaaaaugacucuaa

SEQ ID NO: 324882 - RNA, 15 nt, Human herpesvirus 6
aaccaaagacauuca

SEQ ID NO: 324883 - RNA, 23 nt, Human herpesvirus 6
aaccaaagacauucaacauucca

SEQ ID NO: 324884 - RNA, 13 nt, Human herpesvirus 6
aaccagauaucuc

SEQ ID NO: 324885 - RNA, 18 nt, Human herpesvirus 6
aaccaggacagcuucuau

SEQ ID NO: 324886 - RNA, 18 nt, Human herpesvirus 6
aaccaucaauuuuaucca

SEQ ID NO: 324887 - RNA, 23 nt, Human herpesvirus 6
aaccaucuguucaauuauaucau

SEQ ID NO: 324888 - RNA, 14 nt, Human herpesvirus 6
aaccauucugcaaa

SEQ ID NO: 324889 - RNA, 13 nt, Human herpesvirus 6
aacccaaguucau

SEQ ID NO: 324890 - RNA, 15 nt, Human herpesvirus 6
aacccaaguucauca

SEQ ID NO: 324891 - RNA, 22 nt, Human herpesvirus 6
aacccaaguucaucagcauuaa

SEQ ID NO: 324892 - RNA, 16 nt, Human herpesvirus 6
aaccccucccaucccc

SEQ ID NO: 324893 - RNA, 14 nt, Human herpesvirus 6
aacccgacaaugua

SEQ ID NO: 324894 - RNA, 13 nt, Human herpesvirus 6
aacccuaacccua

SEQ ID NO: 324895 - RNA, 18 nt, Human herpesvirus 6
acauagaaauuacaaggu

SEQ ID NO: 324896 - RNA, 15 nt, Human herpesvirus 6
acauagcgaauuuga

SEQ ID NO: 324897 - RNA, 13 nt, Human herpesvirus 6
acauagucaagua

SEQ ID NO: 324898 - RNA, 22 nt, Human herpesvirus 6
acauaguuucgaauucuuacca

SEQ ID NO: 324899 - RNA, 21 nt, Human herpesvirus 6
acauauaaaagcuaaaucaaa

SEQ ID NO: 324900 - RNA, 16 nt, Human herpesvirus 6
acauauacauuuguac

SEQ ID NO: 324901 - RNA, 19 nt, Human herpesvirus 6
acauaucgagccaaagaaa

SEQ ID NO: 324902 - RNA, 19 nt, Human herpesvirus 6
acauauuguguuguaagau

SEQ ID NO: 324903 - RNA, 23 nt, Human herpesvirus 6
acaucaccgauaaaaacucacac

SEQ ID NO: 324904 - RNA, 16 nt, Human herpesvirus 6
acaucccguaugaaau

SEQ ID NO: 324905 - RNA, 14 nt, Human herpesvirus 6
acauccuaacaaga

SEQ ID NO: 324906 - RNA, 12 nt, Human herpesvirus 6
acaucugcaaaa

SEQ ID NO: 324907 - RNA, 20 nt, Human herpesvirus 6
acaucugcaaaaaacaaaug

SEQ ID NO: 324908 - RNA, 22 nt, Human herpesvirus 6
acauggaaaauucgccaauuaa

SEQ ID NO: 324909 - RNA, 17 nt, Human herpesvirus 6
acauggugaaagacuua

SEQ ID NO: 324910 - RNA, 20 nt, Human herpesvirus 6
acauuaaacacuaaauuacc

SEQ ID NO: 324911 - RNA, 13 nt, Human herpesvirus 6
acauuaacagacg

SEQ ID NO: 324912 - RNA, 23 nt, Human herpesvirus 6
acauuauuaaggccgucaaagac

SEQ ID NO: 324913 - RNA, 22 nt, Human herpesvirus 6
acauuguaaauagguaaacugu

SEQ ID NO: 324914 - RNA, 20 nt, Human herpesvirus 6
acauuuaauaaagaacaugu

SEQ ID NO: 324915 - RNA, 16 nt, Human herpesvirus 6
acauuucuauggaucu

SEQ ID NO: 324916 - RNA, 19 nt, Human herpesvirus 6
acauuuuguacaaacuuuu

SEQ ID NO: 324917 - RNA, 14 nt, Human herpesvirus 6
accaaagacauuca

SEQ ID NO: 324918 - RNA, 15 nt, Human herpesvirus 6
accaacacaccugcc

SEQ ID NO: 324919 - RNA, 18 nt, Human herpesvirus 6
accaacacaccugccuag

SEQ ID NO: 324920 - RNA, 15 nt, Human herpesvirus 6
accaagcaccuaauu

SEQ ID NO: 324921 - RNA, 19 nt, Human herpesvirus 6
accaauuccuuaauucuaa

SEQ ID NO: 324922 - RNA, 20 nt, Human herpesvirus 6
accaauuccuuaauucuaaa

SEQ ID NO: 324923 - RNA, 18 nt, Human herpesvirus 6
accaauuuaugucauuuc

SEQ ID NO: 324924 - RNA, 19 nt, Human herpesvirus 6
accaauuuaugucauuuca

SEQ ID NO: 324925 - RNA, 17 nt, Human herpesvirus 6
accacagcagcagcauu

SEQ ID NO: 324926 - RNA, 16 nt, Human herpesvirus 6
accaccggcuaacccu

SEQ ID NO: 324927 - RNA, 17 nt, Human herpesvirus 6
accacugugauaugcaa

SEQ ID NO: 324928 - RNA, 16 nt, Human herpesvirus 6
accacuuuuaaaauac

SEQ ID NO: 324929 - RNA, 21 nt, Human herpesvirus 6
accagccagauacuacacaaa

SEQ ID NO: 324930 - RNA, 14 nt, Human herpesvirus 6
accaguagcacaaa

SEQ ID NO: 324931 - RNA, 19 nt, Human herpesvirus 6
accauaaaaaaucuuguca

SEQ ID NO: 324932 - RNA, 16 nt, Human herpesvirus 6
accaucuucagcucaa

SEQ ID NO: 324933 - RNA, 21 nt, Human herpesvirus 6
accaugaucaacggccuggag

SEQ ID NO: 324934 - RNA, 23 nt, Human herpesvirus 6
accauggcccuacuacaguggau

SEQ ID NO: 324935 - RNA, 11 nt, Human herpesvirus 6
accauguguau

SEQ ID NO: 324936 - RNA, 22 nt, Human herpesvirus 6
acccaaaaugcaacgcaucaca

SEQ ID NO: 324937 - RNA, 24 nt, Human herpesvirus 6
acccacgguggccuggcacggugc

SEQ ID NO: 324938 - RNA, 19 nt, Human herpesvirus 6
acccagcgggcuccgucgc

SEQ ID NO: 324939 - RNA, 12 nt, Human herpesvirus 6
acccuaacccua

SEQ ID NO: 324940 - RNA, 14 nt, Human herpesvirus 6
acccuaacccuaac

SEQ ID NO: 324941 - RNA, 17 nt, Human herpesvirus 6
acccuaacccuaacccu

SEQ ID NO: 324942 - RNA, 20 nt, Human herpesvirus 6
acccuaagugaaauucaaaa

SEQ ID NO: 324943 - RNA, 23 nt, Human herpesvirus 6
acccuaagugaaauucaaaauaa

SEQ ID NO: 324944 - RNA, 14 nt, Human herpesvirus 6
acccuacaaucugu

SEQ ID NO: 324945 - RNA, 18 nt, Human herpesvirus 6
acccuacaaucuguccag

SEQ ID NO: 324946 - RNA, 20 nt, Human herpesvirus 6
acccuagcuuuucauaugaa

SEQ ID NO: 324947 - RNA, 17 nt, Human herpesvirus 6
acccuaugcaagcucau

SEQ ID NO: 324948 - RNA, 17 nt, Human herpesvirus 6
accgacgguuaaauuua

SEQ ID NO: 324949 - RNA, 19 nt, Human herpesvirus 6
accgauaaaaacucacaca

SEQ ID NO: 324950 - RNA, 11 nt, Human herpesvirus 6
accgcaaaaaa

SEQ ID NO: 324951 - RNA, 15 nt, Human herpesvirus 6
accgcagagcaaauu

SEQ ID NO: 324952 - RNA, 20 nt, Human herpesvirus 6
accgccgugcuucuggcaca

SEQ ID NO: 324953 - RNA, 18 nt, Human herpesvirus 6
accggaaaaaugaaauuu

SEQ ID NO: 324954 - RNA, 16 nt, Human herpesvirus 6
accguucaucauucca

SEQ ID NO: 324955 - RNA, 17 nt, Human herpesvirus 6
accguucaucauuccag

SEQ ID NO: 324956 - RNA, 20 nt, Human herpesvirus 6
accguuuaaacuaugcaaac

SEQ ID NO: 324957 - RNA, 15 nt, Human herpesvirus 6
accuaaauacauuca

SEQ ID NO: 324958 - RNA, 21 nt, Human herpesvirus 6
accuaaauacauucacauuac

SEQ ID NO: 324959 - RNA, 16 nt, Human herpesvirus 6
accuaauaauuacaau

SEQ ID NO: 324960 - RNA, 24 nt, Human herpesvirus 6
accuagacccugccuauacaggca

SEQ ID NO: 324961 - RNA, 23 nt, Human herpesvirus 6
accuagauucauuguuuuugcau

SEQ ID NO: 324962 - RNA, 16 nt, Human herpesvirus 6
accuagcagcaaauaa

SEQ ID NO: 324963 - RNA, 13 nt, Human herpesvirus 6
accuauagucaau

SEQ ID NO: 324964 - RNA, 17 nt, Human herpesvirus 6
accuauagucaauguug

SEQ ID NO: 324965 - RNA, 18 nt, Human herpesvirus 6
accuauagucaauguugu

SEQ ID NO: 324966 - RNA, 23 nt, Human herpesvirus 6
accuauauuuuuaccgaaccaua

SEQ ID NO: 324967 - RNA, 16 nt, Human herpesvirus 6
accuaucuagaucaau

SEQ ID NO: 324968 - RNA, 15 nt, Human herpesvirus 6
accuauuuacaaugu

SEQ ID NO: 324969 - RNA, 19 nt, Human herpesvirus 6
accuauuuacaauguucaa

SEQ ID NO: 324970 - RNA, 16 nt, Human herpesvirus 6
accucauuguuucacu

SEQ ID NO: 324971 - RNA, 15 nt, Human herpesvirus 6
accuccaguuuggau

SEQ ID NO: 324972 - RNA, 17 nt, Human herpesvirus 6
accucuaaaacaagaca

SEQ ID NO: 324973 - RNA, 20 nt, Human herpesvirus 6
accuggaaaaacugacugac

SEQ ID NO: 324974 - RNA, 14 nt, Human herpesvirus 6
accuuaaacaugua

SEQ ID NO: 324975 - RNA, 16 nt, Human herpesvirus 6
accuuacggggagcuu

SEQ ID NO: 324976 - RNA, 18 nt, Human herpesvirus 6
accuugaucuauguaaua

SEQ ID NO: 324977 - RNA, 18 nt, Human herpesvirus 6
accuuguaauuucuaugu

SEQ ID NO: 324978 - RNA, 15 nt, Human herpesvirus 6
accuuuggaaaauau

SEQ ID NO: 324979 - RNA, 21 nt, Human herpesvirus 6
acgaaaaagaaaaccaguauu

SEQ ID NO: 324980 - RNA, 14 nt, Human herpesvirus 6
acgaaaaagcuauc

SEQ ID NO: 324981 - RNA, 20 nt, Human herpesvirus 6
acgaaaauugaugauguucu

SEQ ID NO: 324982 - RNA, 22 nt, Human herpesvirus 6
acgaaauaaaugaagcuuucau

SEQ ID NO: 324983 - RNA, 20 nt, Human herpesvirus 6
acgaauccggaaaaccggua

SEQ ID NO: 324984 - RNA, 17 nt, Human herpesvirus 6
acgacaacacgccagac

SEQ ID NO: 324985 - RNA, 19 nt, Human herpesvirus 6
acgacaacacgccagacau

SEQ ID NO: 324986 - RNA, 18 nt, Human herpesvirus 6
acgaggaggggagacgaa

SEQ ID NO: 324987 - RNA, 18 nt, Human herpesvirus 6
acgauagcagcucugcaa

SEQ ID NO: 324988 - RNA, 20 nt, Human herpesvirus 6
acgauauauaaaaaacugca

SEQ ID NO: 324989 - RNA, 21 nt, Human herpesvirus 6
acgauaucaauuccugugacg

SEQ ID NO: 324990 - RNA, 17 nt, Human herpesvirus 6
acgcaacgcggagugaa

SEQ ID NO: 324991 - RNA, 15 nt, Human herpesvirus 6
acgcaacucuaccug

SEQ ID NO: 324992 - RNA, 17 nt, Human herpesvirus 6
acgcacccuacaaucug

SEQ ID NO: 324993 - RNA, 19 nt, Human herpesvirus 6
acgcacgacaacacgccag

SEQ ID NO: 324994 - RNA, 17 nt, Human herpesvirus 6
acgcagcguaaugugca

SEQ ID NO: 324995 - RNA, 18 nt, Human herpesvirus 6
acgcagcguaaugugcaa

SEQ ID NO: 324996 - RNA, 17 nt, Human herpesvirus 6
acgcauaccuacauccu

SEQ ID NO: 324997 - RNA, 13 nt, Human herpesvirus 6
acgcaucacacau

SEQ ID NO: 324998 - RNA, 15 nt, Human herpesvirus 6
acgcaucacacauac

SEQ ID NO: 324999 - RNA, 15 nt, Human herpesvirus 6
acgccaaaacuacaa

SEQ ID NO: 325000 - RNA, 14 nt, Human herpesvirus 6
acgccaguguggau

SEQ ID NO: 325001 - RNA, 22 nt, Human herpesvirus 6
acgccgccgccguccuauucag

SEQ ID NO: 325002 - RNA, 22 nt, Human herpesvirus 6
acgcgacagggugagucacaua

SEQ ID NO: 325003 - RNA, 16 nt, Human herpesvirus 6
acgcgaucuaauaacc

SEQ ID NO: 325004 - RNA, 18 nt, Human herpesvirus 6
acgcgauuuaaacaacac

SEQ ID NO: 325005 - RNA, 15 nt, Human herpesvirus 6
acgcgucaacaaaca

SEQ ID NO: 325006 - RNA, 14 nt, Human herpesvirus 6
acgcucaugaagac

SEQ ID NO: 325007 - RNA, 19 nt, Human herpesvirus 6
acgcuggagcagcuuccac

SEQ ID NO: 325008 - RNA, 16 nt, Human herpesvirus 6
acgcuuacacacagga

SEQ ID NO: 325009 - RNA, 19 nt, Human herpesvirus 6
agacgaaagcaguuuuaca

SEQ ID NO: 325010 - RNA, 18 nt, Human herpesvirus 6
agacuaauccauaugaaa

SEQ ID NO: 325011 - RNA, 16 nt, Human herpesvirus 6
agacuccccaccgaga

SEQ ID NO: 325012 - RNA, 19 nt, Human herpesvirus 6
agacuuacagagcuuuuaa

SEQ ID NO: 325013 - RNA, 13 nt, Human herpesvirus 6
agacuuuccccau

SEQ ID NO: 325014 - RNA, 15 nt, Human herpesvirus 6
agagaaaagugcaag

SEQ ID NO: 325015 - RNA, 17 nt, Human herpesvirus 6
agagaaacggaacugcu

SEQ ID NO: 325016 - RNA, 18 nt, Human herpesvirus 6
agagaagagcgaaaugca

SEQ ID NO: 325017 - RNA, 17 nt, Human herpesvirus 6
agagaagagucaccuua

SEQ ID NO: 325018 - RNA, 18 nt, Human herpesvirus 6
agagaccaauuuauguca

SEQ ID NO: 325019 - RNA, 23 nt, Human herpesvirus 6
agagacgaaagcaguuuuacauc

SEQ ID NO: 325020 - RNA, 23 nt, Human herpesvirus 6
agagacgacucgcggaguggagu

SEQ ID NO: 325021 - RNA, 21 nt, Human herpesvirus 6
agagcuaauaugaacaaugac

SEQ ID NO: 325022 - RNA, 21 nt, Human herpesvirus 6
agagcuaucgugcugagcgga

SEQ ID NO: 325023 - RNA, 15 nt, Human herpesvirus 6
agaggacgggaagaa

SEQ ID NO: 325024 - RNA, 15 nt, Human herpesvirus 6
agaggagaaaugauc

SEQ ID NO: 325025 - RNA, 17 nt, Human herpesvirus 6
agagguacuuuccauua

SEQ ID NO: 325026 - RNA, 17 nt, Human herpesvirus 6
agaggugcgaaugcuca

SEQ ID NO: 325027 - RNA, 20 nt, Human herpesvirus 6
agagucccaucuauacaccc

SEQ ID NO: 325028 - RNA, 17 nt, Human herpesvirus 6
agagugcaacaaaaagc

SEQ ID NO: 325029 - RNA, 16 nt, Human herpesvirus 6
agaguguuaugaucua

SEQ ID NO: 325030 - RNA, 22 nt, Human herpesvirus 6
agaguguuaugaucuagcuaua

SEQ ID NO: 325031 - RNA, 12 nt, Human herpesvirus 6
agauaaacaacg

SEQ ID NO: 325032 - RNA, 20 nt, Human herpesvirus 6
agauaaccucacuacugaaa

SEQ ID NO: 325033 - RNA, 15 nt, Human herpesvirus 6
agauacauaaacacc

SEQ ID NO: 325034 - RNA, 13 nt, Human herpesvirus 6
agauacgagaaca

SEQ ID NO: 325035 - RNA, 14 nt, Human herpesvirus 6
agauacgagaacaa

SEQ ID NO: 325036 - RNA, 14 nt, Human herpesvirus 6
agauacuacacaaa

SEQ ID NO: 325037 - RNA, 16 nt, Human herpesvirus 6
agauaggcaaaccaua

SEQ ID NO: 325038 - RNA, 23 nt, Human herpesvirus 6
agauauaauuccgacuguguuac

SEQ ID NO: 325039 - RNA, 16 nt, Human herpesvirus 6
agauauggaugaucac

SEQ ID NO: 325040 - RNA, 23 nt, Human herpesvirus 6
agaucaucaaaucggacaaugca

SEQ ID NO: 325041 - RNA, 21 nt, Human herpesvirus 6
agauccccaagaggauccauu

SEQ ID NO: 325042 - RNA, 17 nt, Human herpesvirus 6
agauccgucucucagcu

SEQ ID NO: 325043 - RNA, 17 nt, Human herpesvirus 6
agaucgcauuagucaca

SEQ ID NO: 325044 - RNA, 18 nt, Human herpesvirus 6
agaucgcauuagucacag

SEQ ID NO: 325045 - RNA, 23 nt, Human herpesvirus 6
agaucuaaauuucuacaaaaaua

SEQ ID NO: 325046 - RNA, 13 nt, Human herpesvirus 6
agaucuaauucac

SEQ ID NO: 325047 - RNA, 17 nt, Human herpesvirus 6
agaucuguucgaaaaag

SEQ ID NO: 325048 - RNA, 13 nt, Human herpesvirus 6
agauguguauuau

SEQ ID NO: 325049 - RNA, 13 nt, Human herpesvirus 6
agauguugcaaua

SEQ ID NO: 325050 - RNA, 14 nt, Human herpesvirus 6
agauuaaaacauca

SEQ ID NO: 325051 - RNA, 21 nt, Human herpesvirus 6
agauuaacuccggauuguuaa

SEQ ID NO: 325052 - RNA, 15 nt, Human herpesvirus 6
agauuacggcaacau

SEQ ID NO: 325053 - RNA, 21 nt, Human herpesvirus 6
agauuacuucgugcugugaua

SEQ ID NO: 325054 - RNA, 22 nt, Human herpesvirus 6
agauuaggggagagacauccau

SEQ ID NO: 325055 - RNA, 12 nt, Human herpesvirus 6
agauucacuccg

SEQ ID NO: 325056 - RNA, 13 nt, Human herpesvirus 6
agauucacugacc

SEQ ID NO: 325057 - RNA, 15 nt, Human herpesvirus 6
agauucuaaugauaa

SEQ ID NO: 325058 - RNA, 22 nt, Human herpesvirus 6
agauugcauaugucuguuauaa

SEQ ID NO: 325059 - RNA, 14 nt, Human herpesvirus 6
agauugugcaguua

SEQ ID NO: 325060 - RNA, 17 nt, Human herpesvirus 6
agauugugcaguuauua

SEQ ID NO: 325061 - RNA, 15 nt, Human herpesvirus 6
agauuuacaccaaac

SEQ ID NO: 325062 - RNA, 15 nt, Human herpesvirus 6
agauuuggcauuaaa

SEQ ID NO: 325063 - RNA, 17 nt, Human herpesvirus 6
agauuuguaaggacaaa

SEQ ID NO: 325064 - RNA, 18 nt, Human herpesvirus 6
agauuuguaaggacaaag

SEQ ID NO: 325065 - RNA, 12 nt, Human herpesvirus 6
agcaaacaugca

SEQ ID NO: 325066 - RNA, 14 nt, Human herpesvirus 6
agcaaagaaaugac

SEQ ID NO: 325067 - RNA, 23 nt, Human herpesvirus 6
agcaaucaccaccaacacaccug

SEQ ID NO: 325068 - RNA, 14 nt, Human herpesvirus 6
agcacgguccacac

SEQ ID NO: 325069 - RNA, 13 nt, Human herpesvirus 6
agcagaaguuuac

SEQ ID NO: 325070 - RNA, 15 nt, Human herpesvirus 6
agcagaaguuuacau

SEQ ID NO: 325071 - RNA, 11 nt, Human herpesvirus 6
agcagcaauag

SEQ ID NO: 325072 - RNA, 16 nt, Human herpesvirus 6
agcagcaauaggcacc

SEQ ID NO: 325073 - RNA, 17 nt, Human herpesvirus 6
agcagcauuaacuacau

SEQ ID NO: 325074 - RNA, 22 nt, Human herpesvirus 6
agcagcuggcgaaaagugcugu

SEQ ID NO: 325075 - RNA, 23 nt, Human herpesvirus 6
agcagcuuuggcaaacguaugca

SEQ ID NO: 325076 - RNA, 14 nt, Human herpesvirus 6
agcaggaacccaga

SEQ ID NO: 325077 - RNA, 14 nt, Human herpesvirus 6
agcaucgguugugu

SEQ ID NO: 325078 - RNA, 17 nt, Human herpesvirus 6
agcauuaacuacaucaa

SEQ ID NO: 325079 - RNA, 19 nt, Human herpesvirus 6
agcauucacauaagacuua

SEQ ID NO: 325080 - RNA, 23 nt, Human herpesvirus 6
agcauucuguucuucaucaucac

SEQ ID NO: 325081 - RNA, 23 nt, Human herpesvirus 6
agccaaaaaaguuuauuuaguca

SEQ ID NO: 325082 - RNA, 21 nt, Human herpesvirus 6
agccaaugauucuuaauucuu

SEQ ID NO: 325083 - RNA, 15 nt, Human herpesvirus 6
agccaauucauugua

SEQ ID NO: 325084 - RNA, 16 nt, Human herpesvirus 6
agccagauacuacaca

SEQ ID NO: 325085 - RNA, 13 nt, Human herpesvirus 6
agccaugacaaga

SEQ ID NO: 325086 - RNA, 23 nt, Human herpesvirus 6
agccaugacaagaaagguauuga

SEQ ID NO: 325087 - RNA, 16 nt, Human herpesvirus 6
agccgaugauaauauu

SEQ ID NO: 325088 - RNA, 12 nt, Human herpesvirus 6
agccggugaccg

SEQ ID NO: 325089 - RNA, 17 nt, Human herpesvirus 6
agccggugaccggccau

SEQ ID NO: 325090 - RNA, 16 nt, Human herpesvirus 6
agccugagaacgggca

SEQ ID NO: 325091 - RNA, 18 nt, Human herpesvirus 6
agcgauuaguuuguguag

SEQ ID NO: 325092 - RNA, 22 nt, Human herpesvirus 6
agcgccaacgaaaagcaucuca

SEQ ID NO: 325093 - RNA, 23 nt, Human herpesvirus 6
agcgccaacgaaaagcaucucaa

SEQ ID NO: 325094 - RNA, 20 nt, Human herpesvirus 6
agcgcgucguucgcuucuua

SEQ ID NO: 325095 - RNA, 17 nt, Human herpesvirus 6
agcguacaagucgacaa

SEQ ID NO: 325096 - RNA, 16 nt, Human herpesvirus 6
agcgucuuugcauauu

SEQ ID NO: 325097 - RNA, 20 nt, Human herpesvirus 6
agcguguuauuucgggacaa

SEQ ID NO: 325098 - RNA, 13 nt, Human herpesvirus 6
agcuaauaugaac

SEQ ID NO: 325099 - RNA, 17 nt, Human herpesvirus 6
agcuaauggcgcauaac

SEQ ID NO: 325100 - RNA, 20 nt, Human herpesvirus 6
agcuauaaaaacacacauca

SEQ ID NO: 325101 - RNA, 18 nt, Human herpesvirus 6
agcuaucgucuacccuau

SEQ ID NO: 325102 - RNA, 13 nt, Human herpesvirus 6
agcugacuauuca

SEQ ID NO: 325103 - RNA, 21 nt, Human herpesvirus 6
agcugucgaguaauuguggau

SEQ ID NO: 325104 - RNA, 17 nt, Human herpesvirus 6
agcuuccgucacaacau

SEQ ID NO: 325105 - RNA, 19 nt, Human herpesvirus 6
agcuuccgucacaacauuu

SEQ ID NO: 325106 - RNA, 18 nt, Human herpesvirus 6
agcuuguggaucaucucc

SEQ ID NO: 325107 - RNA, 17 nt, Human herpesvirus 6
agcuuuauguacccuaa

SEQ ID NO: 325108 - RNA, 15 nt, Human herpesvirus 6
aggaaagacaugcau

SEQ ID NO: 325109 - RNA, 22 nt, Human herpesvirus 6
aggaacccagauuuguguucaa

SEQ ID NO: 325110 - RNA, 16 nt, Human herpesvirus 6
aggaacgauaugcugc

SEQ ID NO: 325111 - RNA, 23 nt, Human herpesvirus 6
aggaacuggugagaaauaacuua

SEQ ID NO: 325112 - RNA, 18 nt, Human herpesvirus 6
aggaagaagauacgagaa

SEQ ID NO: 325113 - RNA, 20 nt, Human herpesvirus 6
aggaagauagcagaauagag

SEQ ID NO: 325114 - RNA, 20 nt, Human herpesvirus 6
aggaauagcaggcauugacu

SEQ ID NO: 325115 - RNA, 22 nt, Human herpesvirus 6
aggaauccuauucauaacagau

SEQ ID NO: 325116 - RNA, 13 nt, Human herpesvirus 6
aggacuaggauua

SEQ ID NO: 325117 - RNA, 17 nt, Human herpesvirus 6
aggauagagagauagau

SEQ ID NO: 325118 - RNA, 21 nt, Human herpesvirus 6
auaaucccgucuccucaugga

SEQ ID NO: 325119 - RNA, 22 nt, Human herpesvirus 6
auaaugaguuuuucgcaauuug

SEQ ID NO: 325120 - RNA, 19 nt, Human herpesvirus 6
auaaugcccagauguggaa

SEQ ID NO: 325121 - RNA, 17 nt, Human herpesvirus 6
auaauggcaugcauuau

SEQ ID NO: 325122 - RNA, 14 nt, Human herpesvirus 6
auaauuacaauaca

SEQ ID NO: 325123 - RNA, 19 nt, Human herpesvirus 6
auaauuuguuuuuccauaa

SEQ ID NO: 325124 - RNA, 16 nt, Human herpesvirus 6
auacaaaaacgaccug

SEQ ID NO: 325125 - RNA, 13 nt, Human herpesvirus 6
auacacacccagc

SEQ ID NO: 325126 - RNA, 23 nt, Human herpesvirus 6
auacacaggauuauaaaaacaca

SEQ ID NO: 325127 - RNA, 22 nt, Human herpesvirus 6
auacagauguguauuauguaaa

SEQ ID NO: 325128 - RNA, 23 nt, Human herpesvirus 6
auacaucaacaaacacgugauuc

SEQ ID NO: 325129 - RNA, 24 nt, Human herpesvirus 6
auacaucauuaaaauauucuacuu

SEQ ID NO: 325130 - RNA, 20 nt, Human herpesvirus 6
auacauucacauuaccucug

SEQ ID NO: 325131 - RNA, 18 nt, Human herpesvirus 6
auacauuuguacacuuua

SEQ ID NO: 325132 - RNA, 23 nt, Human herpesvirus 6
auacauuuuaacuauccauuuua

SEQ ID NO: 325133 - RNA, 18 nt, Human herpesvirus 6
auaccaacgugagggaaa

SEQ ID NO: 325134 - RNA, 16 nt, Human herpesvirus 6
auacccgaaguucucu

SEQ ID NO: 325135 - RNA, 20 nt, Human herpesvirus 6
auacgccuugggacauguau

SEQ ID NO: 325136 - RNA, 15 nt, Human herpesvirus 6
auacgguuugucucg

SEQ ID NO: 325137 - RNA, 16 nt, Human herpesvirus 6
auacguuugccaaagc

SEQ ID NO: 325138 - RNA, 17 nt, Human herpesvirus 6
auacguuugccaaagcu

SEQ ID NO: 325139 - RNA, 21 nt, Human herpesvirus 6
auacuauaaacaauuguauuc

SEQ ID NO: 325140 - RNA, 20 nt, Human herpesvirus 6
auacuauauaugcaagccau

SEQ ID NO: 325141 - RNA, 13 nt, Human herpesvirus 6
auagaaauuacaa

SEQ ID NO: 325142 - RNA, 15 nt, Human herpesvirus 6
auagacaaaccagca

SEQ ID NO: 325143 - RNA, 17 nt, Human herpesvirus 6
auagagagauagauaug

SEQ ID NO: 325144 - RNA, 13 nt, Human herpesvirus 6
auagauggugcua

SEQ ID NO: 325145 - RNA, 14 nt, Human herpesvirus 6
auagauggugcuau

SEQ ID NO: 325146 - RNA, 21 nt, Human herpesvirus 6
auagcagaaaauguuucaucc

SEQ ID NO: 325147 - RNA, 15 nt, Human herpesvirus 6
auagcagaaguuuac

SEQ ID NO: 325148 - RNA, 12 nt, Human herpesvirus 6
auagcagcaaua

SEQ ID NO: 325149 - RNA, 15 nt, Human herpesvirus 6
auaggaaguaaauac

SEQ ID NO: 325150 - RNA, 15 nt, Human herpesvirus 6
auagguguuugcaga

SEQ ID NO: 325151 - RNA, 13 nt, Human herpesvirus 6
auagugcguuauc

SEQ ID NO: 325152 - RNA, 14 nt, Human herpesvirus 6
auaguggcuaugaa

SEQ ID NO: 325153 - RNA, 21 nt, Human herpesvirus 6
auaguugggaucuucugcuaa

SEQ ID NO: 325154 - RNA, 23 nt, Human herpesvirus 6
auauaaaaaacuaaaacaucaga

SEQ ID NO: 325155 - RNA, 17 nt, Human herpesvirus 6
auauaaaaaacugcaug

SEQ ID NO: 325156 - RNA, 20 nt, Human herpesvirus 6
auauaaauugguggacaacg

SEQ ID NO: 325157 - RNA, 20 nt, Human herpesvirus 6
auauaacuuuacauuaaaca

SEQ ID NO: 325158 - RNA, 17 nt, Human herpesvirus 6
auauaagaaccaacaga

SEQ ID NO: 325159 - RNA, 22 nt, Human herpesvirus 6
auauacauuuguacacuuuauc

SEQ ID NO: 325160 - RNA, 15 nt, Human herpesvirus 6
auauacuuacuugag

SEQ ID NO: 325161 - RNA, 14 nt, Human herpesvirus 6
auauagacuuuccc

SEQ ID NO: 325162 - RNA, 15 nt, Human herpesvirus 6
auauagucaauguug

SEQ ID NO: 325163 - RNA, 21 nt, Human herpesvirus 6
auauauuuaacaacaucuuaa

SEQ ID NO: 325164 - RNA, 19 nt, Human herpesvirus 6
auauauuugcacuuccuca

SEQ ID NO: 325165 - RNA, 19 nt, Human herpesvirus 6
auaucagcacccuaugcaa

SEQ ID NO: 325166 - RNA, 20 nt, Human herpesvirus 6
auaucagcacccuaugcaag

SEQ ID NO: 325167 - RNA, 14 nt, Human herpesvirus 6
auaucauucucaag

SEQ ID NO: 325168 - RNA, 12 nt, Human herpesvirus 6
auauccaaagac

SEQ ID NO: 325169 - RNA, 15 nt, Human herpesvirus 6
auauccaaagacuca

SEQ ID NO: 325170 - RNA, 16 nt, Human herpesvirus 6
auauccuagcauuucc

SEQ ID NO: 325171 - RNA, 14 nt, Human herpesvirus 6
auaucucggacuca

SEQ ID NO: 325172 - RNA, 18 nt, Human herpesvirus 6
auaucugaaacacugagu

SEQ ID NO: 325173 - RNA, 22 nt, Human herpesvirus 6
auaugaggcgcuugaaaccacu

SEQ ID NO: 325174 - RNA, 17 nt, Human herpesvirus 6
auaugcaagccaugaca

SEQ ID NO: 325175 - RNA, 15 nt, Human herpesvirus 6
auauggaugaucacu

SEQ ID NO: 325176 - RNA, 13 nt, Human herpesvirus 6
auauggugcgugu

SEQ ID NO: 325177 - RNA, 16 nt, Human herpesvirus 6
auauuaauuacauaua

SEQ ID NO: 325178 - RNA, 23 nt, Human herpesvirus 6
auauuaauuacauauagucaaug

SEQ ID NO: 325179 - RNA, 16 nt, Human herpesvirus 6
auauuaauuaccuaua

SEQ ID NO: 325180 - RNA, 21 nt, Human herpesvirus 6
auauuaauuaccuauagucaa

SEQ ID NO: 325181 - RNA, 22 nt, Human herpesvirus 6
auauuaauuaccuauagucaau

SEQ ID NO: 325182 - RNA, 23 nt, Human herpesvirus 6
auauuaauuaccuauagucaaug

SEQ ID NO: 325183 - RNA, 13 nt, Human herpesvirus 6
auauuccagacaa

SEQ ID NO: 325184 - RNA, 16 nt, Human herpesvirus 6
auauugcugcuagaua

SEQ ID NO: 325185 - RNA, 17 nt, Human herpesvirus 6
auauuguguaacucuuu

SEQ ID NO: 325186 - RNA, 23 nt, Human herpesvirus 6
auauuuccauaaguuaauuccag

SEQ ID NO: 325187 - RNA, 14 nt, Human herpesvirus 6
auauuuccaugacu

SEQ ID NO: 325188 - RNA, 14 nt, Human herpesvirus 6
aucaaauccucuac

SEQ ID NO: 325189 - RNA, 14 nt, Human herpesvirus 6
aucaaaucggacaa

SEQ ID NO: 325190 - RNA, 16 nt, Human herpesvirus 6
aucaaaucggacaaug

SEQ ID NO: 325191 - RNA, 13 nt, Human herpesvirus 6
aucaagggugcug

SEQ ID NO: 325192 - RNA, 17 nt, Human herpesvirus 6
aucaauacauuuuucaa

SEQ ID NO: 325193 - RNA, 15 nt, Human herpesvirus 6
aucaauuuuauccau

SEQ ID NO: 325194 - RNA, 15 nt, Human herpesvirus 6
aucacaugccaugca

SEQ ID NO: 325195 - RNA, 23 nt, Human herpesvirus 6
aucaccgauaaaaacucacacaa

SEQ ID NO: 325196 - RNA, 19 nt, Human herpesvirus 6
aucacgauguuaacauaaa

SEQ ID NO: 325197 - RNA, 13 nt, Human herpesvirus 6
aucagaauccacc

SEQ ID NO: 325198 - RNA, 18 nt, Human herpesvirus 6
aucagaauccaccaauga

SEQ ID NO: 325199 - RNA, 16 nt, Human herpesvirus 6
aucaguaugccauaaa

SEQ ID NO: 325200 - RNA, 19 nt, Human herpesvirus 6
aucagugaaggcugccaug

SEQ ID NO: 325201 - RNA, 19 nt, Human herpesvirus 6
aucauaaauaaaugaauag

SEQ ID NO: 325202 - RNA, 21 nt, Human herpesvirus 6
aucaucaaaucggacaaugca

SEQ ID NO: 325203 - RNA, 13 nt, Human herpesvirus 6
aucaucaccaagu

SEQ ID NO: 325204 - RNA, 17 nt, Human herpesvirus 6
aucaucaccaagucuaa

SEQ ID NO: 325205 - RNA, 15 nt, Human herpesvirus 6
aucaucuccaauaaa

SEQ ID NO: 325206 - RNA, 16 nt, Human herpesvirus 6
aucauguucggagaua

SEQ ID NO: 325207 - RNA, 21 nt, Human herpesvirus 6
aucauuaaaauauucuacuuu

SEQ ID NO: 325208 - RNA, 12 nt, Human herpesvirus 6
aucauuaccagu

SEQ ID NO: 325209 - RNA, 15 nt, Human herpesvirus 6
auccaccaaugacac

SEQ ID NO: 325210 - RNA, 22 nt, Human herpesvirus 6
auccaggucuuauauuucagau

SEQ ID NO: 325211 - RNA, 12 nt, Human herpesvirus 6
auccauguucau

SEQ ID NO: 325212 - RNA, 22 nt, Human herpesvirus 6
auccauugagugugcaucagca

SEQ ID NO: 325213 - RNA, 23 nt, Human herpesvirus 6
aucccaauaaauauauuuauuga

SEQ ID NO: 325214 - RNA, 18 nt, Human herpesvirus 6
aucccagcucaccaccau

SEQ ID NO: 325215 - RNA, 17 nt, Human herpesvirus 6
auccccaagaggaucca

SEQ ID NO: 325216 - RNA, 16 nt, Human herpesvirus 6
auccgcuaaaacgacu

SEQ ID NO: 325217 - RNA, 15 nt, Human herpesvirus 6
auccgucauacaaaa

SEQ ID NO: 325218 - RNA, 14 nt, Human herpesvirus 6
auccuaacaagaca

SEQ ID NO: 325219 - RNA, 21 nt, Human herpesvirus 6
auccuaauucaagacuugucg

SEQ ID NO: 325220 - RNA, 21 nt, Human herpesvirus 6
auccucagaaccaucuguuca

SEQ ID NO: 325221 - RNA, 17 nt, Human herpesvirus 6
aucgaaaucguauacgu

SEQ ID NO: 325222 - RNA, 12 nt, Human herpesvirus 6
aucgacauuugu

SEQ ID NO: 325223 - RNA, 13 nt, Human herpesvirus 6
aucgaccaugugu

SEQ ID NO: 325224 - RNA, 16 nt, Human herpesvirus 6
aucgaccauguguaua

SEQ ID NO: 325225 - RNA, 14 nt, Human herpesvirus 6
aucgagcaacagcg

SEQ ID NO: 325226 - RNA, 20 nt, Human herpesvirus 6
aucgagccaaagaaacagau

SEQ ID NO: 325227 - RNA, 19 nt, Human herpesvirus 6
aucgauugacucugcauag

SEQ ID NO: 325228 - RNA, 12 nt, Human herpesvirus 6
aucgcaccaucu

SEQ ID NO: 325229 - RNA, 13 nt, Human herpesvirus 6
aucgccuuuuacu

SEQ ID NO: 325230 - RNA, 16 nt, Human herpesvirus 6
aucggagauagggcug

SEQ ID NO: 325231 - RNA, 19 nt, Human herpesvirus 6
aucguagguaauuuuuauu

SEQ ID NO: 325232 - RNA, 19 nt, Human herpesvirus 6
aucguccaauccuauaaaa

SEQ ID NO: 325233 - RNA, 19 nt, Human herpesvirus 6
aaaaaacaacgacuaucaa

SEQ ID NO: 325234 - RNA, 22 nt, Human herpesvirus 6
aaaaaacacuagccuacuauga

SEQ ID NO: 325235 - RNA, 13 nt, Human herpesvirus 6
aaaaaacggccaa

SEQ ID NO: 325236 - RNA, 19 nt, Human herpesvirus 6
aaaaaaugaaugugcugau

SEQ ID NO: 325237 - RNA, 15 nt, Human herpesvirus 6
aauuuguggaacaau

SEQ ID NO: 325238 - RNA, 20 nt, Human herpesvirus 6
aauuuuauccauccaaucca

SEQ ID NO: 325239 - RNA, 17 nt, Human herpesvirus 6
aauuuuauuaacuguaa

SEQ ID NO: 325240 - RNA, 19 nt, Human herpesvirus 6
aauuuuuuucaugaucuca

SEQ ID NO: 325241 - RNA, 22 nt, Human herpesvirus 6
acaaaaacgaccugaucacaga

SEQ ID NO: 325242 - RNA, 14 nt, Human herpesvirus 6
acaaaacaaucuau

SEQ ID NO: 325243 - RNA, 20 nt, Human herpesvirus 6
acaaaaccuaaauacauuca

SEQ ID NO: 325244 - RNA, 18 nt, Human herpesvirus 6
acaaaauuugaaauauca

SEQ ID NO: 325245 - RNA, 17 nt, Human herpesvirus 6
acaaacaugcguugugu

SEQ ID NO: 325246 - RNA, 17 nt, Human herpesvirus 6
acaaaccaaaaugacuc

SEQ ID NO: 325247 - RNA, 15 nt, Human herpesvirus 6
acaaaccaucaauuu

SEQ ID NO: 325248 - RNA, 14 nt, Human herpesvirus 6
acaaaccaucagcc

SEQ ID NO: 325249 - RNA, 17 nt, Human herpesvirus 6
acaaacuauauugcugc

SEQ ID NO: 325250 - RNA, 23 nt, Human herpesvirus 6
acaaacuauauugcugcuagaua

SEQ ID NO: 325251 - RNA, 18 nt, Human herpesvirus 6
acaaauacgagagcugac

SEQ ID NO: 325252 - RNA, 13 nt, Human herpesvirus 6
acaaauucuuaca

SEQ ID NO: 325253 - RNA, 13 nt, Human herpesvirus 6
acaacaacaauaa

SEQ ID NO: 325254 - RNA, 19 nt, Human herpesvirus 6
acaacaggcuugugaaaga

SEQ ID NO: 325255 - RNA, 16 nt, Human herpesvirus 6
acaacauuaucaauua

SEQ ID NO: 325256 - RNA, 22 nt, Human herpesvirus 6
acaaccauccagauaaccucac

SEQ ID NO: 325257 - RNA, 13 nt, Human herpesvirus 6
acaacgacuauca

SEQ ID NO: 325258 - RNA, 15 nt, Human herpesvirus 6
acaacgucaugcaaa

SEQ ID NO: 325259 - RNA, 15 nt, Human herpesvirus 6
acaacugaaacuuca

SEQ ID NO: 325260 - RNA, 16 nt, Human herpesvirus 6
acaacuuuuaaccauu

SEQ ID NO: 325261 - RNA, 14 nt, Human herpesvirus 6
acaagaacagagag

SEQ ID NO: 325262 - RNA, 17 nt, Human herpesvirus 6
acaaguaagauugcaga

SEQ ID NO: 325263 - RNA, 18 nt, Human herpesvirus 6
acaaguagcucguaauaa

SEQ ID NO: 325264 - RNA, 15 nt, Human herpesvirus 6
acaagucgacaaauu

SEQ ID NO: 325265 - RNA, 15 nt, Human herpesvirus 6
acaauaauugcauuc

SEQ ID NO: 325266 - RNA, 12 nt, Human herpesvirus 6
acaauacacaga

SEQ ID NO: 325267 - RNA, 22 nt, Human herpesvirus 6
acaaucgucggaucaacagaug

SEQ ID NO: 325268 - RNA, 12 nt, Human herpesvirus 6
acaaucuaauac

SEQ ID NO: 325269 - RNA, 22 nt, Human herpesvirus 6
acaaugauacuaaguguaaugu

SEQ ID NO: 325270 - RNA, 18 nt, Human herpesvirus 6
acaaugcagaacaacagc

SEQ ID NO: 325271 - RNA, 22 nt, Human herpesvirus 6
acaaugcagaacaacagcaugu

SEQ ID NO: 325272 - RNA, 19 nt, Human herpesvirus 6
acaauguucaauuacucaa

SEQ ID NO: 325273 - RNA, 19 nt, Human herpesvirus 6
acaauguuuuugacaaaua

SEQ ID NO: 325274 - RNA, 22 nt, Human herpesvirus 6
acaauuaucacaguugauaaac

SEQ ID NO: 325275 - RNA, 14 nt, Human herpesvirus 6
acaauuauguguca

SEQ ID NO: 325276 - RNA, 15 nt, Human herpesvirus 6
acaauuuagccuauu

SEQ ID NO: 325277 - RNA, 20 nt, Human herpesvirus 6
acacaaaaaauugacaauga

SEQ ID NO: 325278 - RNA, 14 nt, Human herpesvirus 6
acacaaaccaucaa

SEQ ID NO: 325279 - RNA, 22 nt, Human herpesvirus 6
acacaaucagaaaacacuaucu

SEQ ID NO: 325280 - RNA, 12 nt, Human herpesvirus 6
acacaaucuucg

SEQ ID NO: 325281 - RNA, 16 nt, Human herpesvirus 6
acacaauuaguccauu

SEQ ID NO: 325282 - RNA, 21 nt, Human herpesvirus 6
acacacagcuaaacaccacuu

SEQ ID NO: 325283 - RNA, 13 nt, Human herpesvirus 6
acacacagggugc

SEQ ID NO: 325284 - RNA, 14 nt, Human herpesvirus 6
acacacagugaaac

SEQ ID NO: 325285 - RNA, 13 nt, Human herpesvirus 6
acacacccagcag

SEQ ID NO: 325286 - RNA, 21 nt, Human herpesvirus 6
acacagagcgcaucuuuaaca

SEQ ID NO: 325287 - RNA, 15 nt, Human herpesvirus 6
acacagcaugcauuu

SEQ ID NO: 325288 - RNA, 14 nt, Human herpesvirus 6
acacauguauuuau

SEQ ID NO: 325289 - RNA, 21 nt, Human herpesvirus 6
acaccuuaaacauguauauaa

SEQ ID NO: 325290 - RNA, 21 nt, Human herpesvirus 6
acacgaaaaacauuucuuaca

SEQ ID NO: 325291 - RNA, 16 nt, Human herpesvirus 6
acacgacaaaacaauc

SEQ ID NO: 325292 - RNA, 17 nt, Human herpesvirus 6
acacgccgacuccgucc

SEQ ID NO: 325293 - RNA, 22 nt, Human herpesvirus 6
acacgcgauggaagaaccaaag

SEQ ID NO: 325294 - RNA, 15 nt, Human herpesvirus 6
acacgggucgggggu

SEQ ID NO: 325295 - RNA, 17 nt, Human herpesvirus 6
acacuagccuacuauga

SEQ ID NO: 325296 - RNA, 16 nt, Human herpesvirus 6
acacucuccacucuac

SEQ ID NO: 325297 - RNA, 15 nt, Human herpesvirus 6
acacugauaacucac

SEQ ID NO: 325298 - RNA, 18 nt, Human herpesvirus 6
acacuuagcaacuacuuu

SEQ ID NO: 325299 - RNA, 13 nt, Human herpesvirus 6
acagaacacaucc

SEQ ID NO: 325300 - RNA, 21 nt, Human herpesvirus 6
acagaaccagauaucucuucc

SEQ ID NO: 325301 - RNA, 21 nt, Human herpesvirus 6
acagaccgucaaaucucgccg

SEQ ID NO: 325302 - RNA, 15 nt, Human herpesvirus 6
acagacgaaucacau

SEQ ID NO: 325303 - RNA, 20 nt, Human herpesvirus 6
acagacgaaucacauccgcu

SEQ ID NO: 325304 - RNA, 14 nt, Human herpesvirus 6
acagacuuuacuuc

SEQ ID NO: 325305 - RNA, 16 nt, Human herpesvirus 6
acagacuuuacuucua

SEQ ID NO: 325306 - RNA, 20 nt, Human herpesvirus 6
acagagagaggagcauucac

SEQ ID NO: 325307 - RNA, 22 nt, Human herpesvirus 6
acagagagaggagcauucacau

SEQ ID NO: 325308 - RNA, 15 nt, Human herpesvirus 6
acagagcauccuguu

SEQ ID NO: 325309 - RNA, 19 nt, Human herpesvirus 6
acagcaaguugcuaccgcu

SEQ ID NO: 325310 - RNA, 13 nt, Human herpesvirus 6
acagcgauacaau

SEQ ID NO: 325311 - RNA, 17 nt, Human herpesvirus 6
acagcuaaacaccacuu

SEQ ID NO: 325312 - RNA, 22 nt, Human herpesvirus 6
acagcuuuuccucaauaugaua

SEQ ID NO: 325313 - RNA, 15 nt, Human herpesvirus 6
acaggaacagucuga

SEQ ID NO: 325314 - RNA, 16 nt, Human herpesvirus 6
acaggaaguuaauugu

SEQ ID NO: 325315 - RNA, 18 nt, Human herpesvirus 6
acaggauuauaaaaacac

SEQ ID NO: 325316 - RNA, 19 nt, Human herpesvirus 6
acaggauuauaaaaacaca

SEQ ID NO: 325317 - RNA, 14 nt, Human herpesvirus 6
acaggcggggaucg

SEQ ID NO: 325318 - RNA, 16 nt, Human herpesvirus 6
acagguggagcugugu

SEQ ID NO: 325319 - RNA, 21 nt, Human herpesvirus 6
acaguagauuucaagauauau

SEQ ID NO: 325320 - RNA, 22 nt, Human herpesvirus 6
acaguagauuucaagauauauu

SEQ ID NO: 325321 - RNA, 22 nt, Human herpesvirus 6
acaguaugucuccaaacagaga

SEQ ID NO: 325322 - RNA, 16 nt, Human herpesvirus 6
acagucuuuaaaugag

SEQ ID NO: 325323 - RNA, 16 nt, Human herpesvirus 6
acagugugaucaucac

SEQ ID NO: 325324 - RNA, 20 nt, Human herpesvirus 6
acaguuauacuggcaaagca

SEQ ID NO: 325325 - RNA, 11 nt, Human herpesvirus 6
acaguuuaccu

SEQ ID NO: 325326 - RNA, 18 nt, Human herpesvirus 6
acaguuuaccuauuuaca

SEQ ID NO: 325327 - RNA, 19 nt, Human herpesvirus 6
acaguuuaccuauuuacaa

SEQ ID NO: 325328 - RNA, 14 nt, Human herpesvirus 6
acauaaaacaacaa

SEQ ID NO: 325329 - RNA, 22 nt, Human herpesvirus 6
acauaaacuuagaucuauaugc

SEQ ID NO: 325330 - RNA, 12 nt, Human herpesvirus 6
acauaagacuua

SEQ ID NO: 325331 - RNA, 21 nt, Human herpesvirus 6
acauaagacuuauaauauucc

SEQ ID NO: 325332 - RNA, 23 nt, Human herpesvirus 6
acauaaggcgcgaguuggugcua

SEQ ID NO: 325333 - RNA, 14 nt, Human herpesvirus 6
acauagaauuucua

SEQ ID NO: 325334 - RNA, 16 nt, Human herpesvirus 6
acauauaaauccgaua

SEQ ID NO: 325335 - RNA, 14 nt, Human herpesvirus 6
acauauacauuugu

SEQ ID NO: 325336 - RNA, 13 nt, Human herpesvirus 6
acauauagucaau

SEQ ID NO: 325337 - RNA, 14 nt, Human herpesvirus 6
acauaucacuugua

SEQ ID NO: 325338 - RNA, 15 nt, Human herpesvirus 6
acauaucgagccaaa

SEQ ID NO: 325339 - RNA, 23 nt, Human herpesvirus 6
acauaugccgaggcuuacuacgg

SEQ ID NO: 325340 - RNA, 18 nt, Human herpesvirus 6
acaucaacaaacacguga

SEQ ID NO: 325341 - RNA, 16 nt, Human herpesvirus 6
acaucaacuacauuaa

SEQ ID NO: 325342 - RNA, 20 nt, Human herpesvirus 6
acaucaugauuaucauagac

SEQ ID NO: 325343 - RNA, 17 nt, Human herpesvirus 6
acaucccguaugaaaua

SEQ ID NO: 325344 - RNA, 11 nt, Human herpesvirus 6
acaucugcaaa

SEQ ID NO: 325345 - RNA, 23 nt, Human herpesvirus 6
acaucuuaaaagaccacuuuuaa

SEQ ID NO: 325346 - RNA, 22 nt, Human herpesvirus 6
acaugaaaucacguacuaucuu

SEQ ID NO: 325347 - RNA, 18 nt, Human herpesvirus 6
acauggaagacaaauuaa

SEQ ID NO: 325348 - RNA, 13 nt, Human herpesvirus 6
acauggugaaaga

SEQ ID NO: 325349 - RNA, 19 nt, Human herpesvirus 6
acaugguuaggacaauuag

SEQ ID NO: 325350 - RNA, 19 nt, Human herpesvirus 6
acauuauaagauaggcaaa

SEQ ID NO: 325351 - RNA, 22 nt, Human herpesvirus 6
acauucaaagucuaaugguuga

SEQ ID NO: 325352 - RNA, 18 nt, Human herpesvirus 6
acauucccuuaauguaug

SEQ ID NO: 325353 - RNA, 22 nt, Human herpesvirus 6
acauucuaucgcgaauaucgca

SEQ ID NO: 325354 - RNA, 14 nt, Human herpesvirus 6
acauuggucuuugc

SEQ ID NO: 325355 - RNA, 16 nt, Human herpesvirus 6
acauuguagaaagauc

SEQ ID NO: 325356 - RNA, 20 nt, Human herpesvirus 6
acauuucuauggaucugagu

SEQ ID NO: 325357 - RNA, 22 nt, Human herpesvirus 6
acauuugccgggaugagcuuua

SEQ ID NO: 325358 - RNA, 13 nt, Human herpesvirus 6
acauuugcugaug

SEQ ID NO: 325359 - RNA, 12 nt, Human herpesvirus 6
accaaagacauu

SEQ ID NO: 325360 - RNA, 14 nt, Human herpesvirus 6
accaacacaccugc

SEQ ID NO: 325361 - RNA, 23 nt, Human herpesvirus 6
accaacgugucacacguguuaaa

SEQ ID NO: 325362 - RNA, 22 nt, Human herpesvirus 6
accaagacacgucaacgugucu

SEQ ID NO: 325363 - RNA, 13 nt, Human herpesvirus 6
accaagcaccuaa

SEQ ID NO: 325364 - RNA, 18 nt, Human herpesvirus 6
accaagucaacaacguca

SEQ ID NO: 325365 - RNA, 24 nt, Human herpesvirus 6
accaagucaacaacgucaugcaaa

SEQ ID NO: 325366 - RNA, 23 nt, Human herpesvirus 6
accaauaaaauuuuuugcaguau

SEQ ID NO: 325367 - RNA, 14 nt, Human herpesvirus 6
accaauccaugcaa

SEQ ID NO: 325368 - RNA, 23 nt, Human herpesvirus 6
accaauuccuuaauucuaaauac

SEQ ID NO: 325369 - RNA, 16 nt, Human herpesvirus 6
accaccaaaacgacag

SEQ ID NO: 325370 - RNA, 16 nt, Human herpesvirus 6
accaccaacacaccug

SEQ ID NO: 325371 - RNA, 19 nt, Human herpesvirus 6
accaccaacacaccugccu

SEQ ID NO: 325372 - RNA, 17 nt, Human herpesvirus 6
accaccggcuaacccua

SEQ ID NO: 325373 - RNA, 19 nt, Human herpesvirus 6
accaccggcuaacccuaac

SEQ ID NO: 325374 - RNA, 21 nt, Human herpesvirus 6
accacggggauuuaguacagu

SEQ ID NO: 325375 - RNA, 12 nt, Human herpesvirus 6
accagauucacu

SEQ ID NO: 325376 - RNA, 17 nt, Human herpesvirus 6
accauacguagugauga

SEQ ID NO: 325377 - RNA, 18 nt, Human herpesvirus 6
accaucaaucucuaugag

SEQ ID NO: 325378 - RNA, 18 nt, Human herpesvirus 6
accaucgucauaaccuca

SEQ ID NO: 325379 - RNA, 22 nt, Human herpesvirus 6
accauggcccuacuacagugga

SEQ ID NO: 325380 - RNA, 17 nt, Human herpesvirus 6
acccaaguucaucagca

SEQ ID NO: 325381 - RNA, 19 nt, Human herpesvirus 6
acccacaugaaaucacgua

SEQ ID NO: 325382 - RNA, 20 nt, Human herpesvirus 6
acccagcaugaugaucugcc

SEQ ID NO: 325383 - RNA, 20 nt, Human herpesvirus 6
acccaucuccucaacacucu

SEQ ID NO: 325384 - RNA, 15 nt, Human herpesvirus 6
acccauggcgagaaa

SEQ ID NO: 325385 - RNA, 20 nt, Human herpesvirus 6
accccgaguuuacuaaaaag

SEQ ID NO: 325386 - RNA, 14 nt, Human herpesvirus 6
acccgaaguucucu

SEQ ID NO: 325387 - RNA, 21 nt, Human herpesvirus 6
acccuaaacccuaccauccuu

SEQ ID NO: 325388 - RNA, 13 nt, Human herpesvirus 6
acccuaacccuaa

SEQ ID NO: 325389 - RNA, 18 nt, Human herpesvirus 6
acccuaagugaaauucaa

SEQ ID NO: 325390 - RNA, 15 nt, Human herpesvirus 6
acccuacaaucuguc

SEQ ID NO: 325391 - RNA, 23 nt, Human herpesvirus 6
acccuucaccgucucugaagcaa

SEQ ID NO: 325392 - RNA, 22 nt, Human herpesvirus 6
accgagagauuuacuguuucuu

SEQ ID NO: 325393 - RNA, 14 nt, Human herpesvirus 6
accgaucugugagc

SEQ ID NO: 325394 - RNA, 15 nt, Human herpesvirus 6
accggcuaacccuaa

SEQ ID NO: 325395 - RNA, 15 nt, Human herpesvirus 6
accgucaaccgccac

SEQ ID NO: 325396 - RNA, 19 nt, Human herpesvirus 6
accguuuaucgaugugcga

SEQ ID NO: 325397 - RNA, 14 nt, Human herpesvirus 6
accuaauaaacugu

SEQ ID NO: 325398 - RNA, 16 nt, Human herpesvirus 6
accuaauuacaauuua

SEQ ID NO: 325399 - RNA, 23 nt, Human herpesvirus 6
accuaauuacaauuuaauauauc

SEQ ID NO: 325400 - RNA, 15 nt, Human herpesvirus 6
accuauuagcuauaa

SEQ ID NO: 325401 - RNA, 16 nt, Human herpesvirus 6
accucaauuaauacaa

SEQ ID NO: 325402 - RNA, 20 nt, Human herpesvirus 6
accucauauaagaaccaaca

SEQ ID NO: 325403 - RNA, 22 nt, Human herpesvirus 6
accucaucgcgacuaaaaauac

SEQ ID NO: 325404 - RNA, 11 nt, Human herpesvirus 6
accucaugagu

SEQ ID NO: 325405 - RNA, 17 nt, Human herpesvirus 6
accucauuguuucacuu

SEQ ID NO: 325406 - RNA, 15 nt, Human herpesvirus 6
accuccuuuguaugu

SEQ ID NO: 325407 - RNA, 22 nt, Human herpesvirus 6
accucgcucacaauauuucaca

SEQ ID NO: 325408 - RNA, 16 nt, Human herpesvirus 6
accucugaaacacugu

SEQ ID NO: 325409 - RNA, 13 nt, Human herpesvirus 6
accucugcaauag

SEQ ID NO: 325410 - RNA, 11 nt, Human herpesvirus 6
accuucacuuu

SEQ ID NO: 325411 - RNA, 16 nt, Human herpesvirus 6
acgaaaaagaaaacca

SEQ ID NO: 325412 - RNA, 15 nt, Human herpesvirus 6
acgaaaagcaucuca

SEQ ID NO: 325413 - RNA, 22 nt, Human herpesvirus 6
acgaaacauagucaaguaugug

SEQ ID NO: 325414 - RNA, 20 nt, Human herpesvirus 6
acgaaagcaguuuuacauca

SEQ ID NO: 325415 - RNA, 22 nt, Human herpesvirus 6
acgaaauaauugauacggcagc

SEQ ID NO: 325416 - RNA, 11 nt, Human herpesvirus 6
acgaauacuuc

SEQ ID NO: 325417 - RNA, 18 nt, Human herpesvirus 6
acgacaaaaccuaaauac

SEQ ID NO: 325418 - RNA, 13 nt, Human herpesvirus 6
acgauaugucucu

SEQ ID NO: 325419 - RNA, 22 nt, Human herpesvirus 6
acgauuuaauuuuaucaugccc

SEQ ID NO: 325420 - RNA, 20 nt, Human herpesvirus 6
acgcacuggacaucaauucc

SEQ ID NO: 325421 - RNA, 15 nt, Human herpesvirus 6
acgcauuugcaauug

SEQ ID NO: 325422 - RNA, 16 nt, Human herpesvirus 6
acgcauuugcaauugu

SEQ ID NO: 325423 - RNA, 20 nt, Human herpesvirus 6
acgcgauuuaaacaacacag

SEQ ID NO: 325424 - RNA, 16 nt, Human herpesvirus 6
acgcuaaauauaucaa

SEQ ID NO: 325425 - RNA, 23 nt, Human herpesvirus 6
acgcuuuuacugauuaguuuuca

SEQ ID NO: 325426 - RNA, 19 nt, Human herpesvirus 6
acggaaaaaaaaucuaucc

SEQ ID NO: 325427 - RNA, 15 nt, Human herpesvirus 6
acggaacgauuugca

SEQ ID NO: 325428 - RNA, 14 nt, Human herpesvirus 6
acggaagcugaaaa

SEQ ID NO: 325429 - RNA, 19 nt, Human herpesvirus 6
acggagaacgggcaacucc

SEQ ID NO: 325430 - RNA, 14 nt, Human herpesvirus 6
acggcaacauaccc

SEQ ID NO: 325431 - RNA, 19 nt, Human herpesvirus 6
acggcagcggaagugaaag

SEQ ID NO: 325432 - RNA, 21 nt, Human herpesvirus 6
acggccuggaguacaagacca

SEQ ID NO: 325433 - RNA, 21 nt, Human herpesvirus 6
acggcuucaagaaugccguga

SEQ ID NO: 325434 - RNA, 21 nt, Human herpesvirus 6
acgggcauuccucguucuacc

SEQ ID NO: 325435 - RNA, 18 nt, Human herpesvirus 6
acggguauuuuacauugu

SEQ ID NO: 325436 - RNA, 23 nt, Human herpesvirus 6
acgggucacguauaccauuccca

SEQ ID NO: 325437 - RNA, 23 nt, Human herpesvirus 6
acggucgaaaguucaucuuucaa

SEQ ID NO: 325438 - RNA, 14 nt, Human herpesvirus 6
acggugccaaagga

SEQ ID NO: 325439 - RNA, 17 nt, Human herpesvirus 6
acguagacagucacaca

SEQ ID NO: 325440 - RNA, 14 nt, Human herpesvirus 6
acguagugaugauu

SEQ ID NO: 325441 - RNA, 23 nt, Human herpesvirus 6
acguaucaaccccgcacgcauac

SEQ ID NO: 325442 - RNA, 19 nt, Human herpesvirus 6
acguaugaaaguccucaaa

SEQ ID NO: 325443 - RNA, 16 nt, Human herpesvirus 6
acgugcuugucucaca

SEQ ID NO: 325444 - RNA, 20 nt, Human herpesvirus 6
acgugcuugucucacaagcu

SEQ ID NO: 325445 - RNA, 19 nt, Human herpesvirus 6
acgugguuuuuuuuuucuu

SEQ ID NO: 325446 - RNA, 15 nt, Human herpesvirus 6
acgugucacacgugu

SEQ ID NO: 325447 - RNA, 14 nt, Human herpesvirus 6
acguuaaauaucua

SEQ ID NO: 325448 - RNA, 15 nt, Human herpesvirus 6
acguuaucaaugaua

SEQ ID NO: 325449 - RNA, 23 nt, Human herpesvirus 6
acguuucuguccaaugacuacua

SEQ ID NO: 325450 - RNA, 15 nt, Human herpesvirus 6
acguuugccaaagcu

SEQ ID NO: 325451 - RNA, 20 nt, Human herpesvirus 6
acguuugcuguuuucaccau

SEQ ID NO: 325452 - RNA, 13 nt, Human herpesvirus 6
acuaaaacaucag

SEQ ID NO: 325453 - RNA, 14 nt, Human herpesvirus 6
acuaaaacaucaga

SEQ ID NO: 325454 - RNA, 17 nt, Human herpesvirus 6
acuaaaacaucagauga

SEQ ID NO: 325455 - RNA, 22 nt, Human herpesvirus 6
acuaagcaggaacccagauuug

SEQ ID NO: 325456 - RNA, 15 nt, Human herpesvirus 6
acuaauaaaugcuac

SEQ ID NO: 325457 - RNA, 21 nt, Human herpesvirus 6
acuaauucggaacauuguucu

SEQ ID NO: 325458 - RNA, 16 nt, Human herpesvirus 6
acuacaacauuaucaa

SEQ ID NO: 325459 - RNA, 18 nt, Human herpesvirus 6
acuacaacauuaucaauu

SEQ ID NO: 325460 - RNA, 18 nt, Human herpesvirus 6
acuacagcugcaggggug

SEQ ID NO: 325461 - RNA, 13 nt, Human herpesvirus 6
acuaccacaucac

SEQ ID NO: 325462 - RNA, 19 nt, Human herpesvirus 6
acuaccucuaaacccagac

SEQ ID NO: 325463 - RNA, 21 nt, Human herpesvirus 6
acuacugaaaccaaagcauac

SEQ ID NO: 325464 - RNA, 22 nt, Human herpesvirus 6
acuacuucuuucuaaaaucaaa

SEQ ID NO: 325465 - RNA, 13 nt, Human herpesvirus 6
acuagcaguuacc

SEQ ID NO: 325466 - RNA, 17 nt, Human herpesvirus 6
acuaggauuagaacaau

SEQ ID NO: 325467 - RNA, 19 nt, Human herpesvirus 6
acuaggauuagaacaauua

SEQ ID NO: 325468 - RNA, 23 nt, Human herpesvirus 6
acuaggugauugggagcucacug

SEQ ID NO: 325469 - RNA, 14 nt, Human herpesvirus 6
acuaguuuucacac

SEQ ID NO: 325470 - RNA, 12 nt, Human herpesvirus 6
aaagcauacuca

SEQ ID NO: 325471 - RNA, 21 nt, Human herpesvirus 6
aaagcguuugcaaaacuguua

SEQ ID NO: 325472 - RNA, 15 nt, Human herpesvirus 6
aaagcugacuauuca

SEQ ID NO: 325473 - RNA, 17 nt, Human herpesvirus 6
aaagcugcucaucuuca

SEQ ID NO: 325474 - RNA, 19 nt, Human herpesvirus 6
aaagcuggaaaacuauuaa

SEQ ID NO: 325475 - RNA, 23 nt, Human herpesvirus 6
aaaggaaaccaccggcuaacccu

SEQ ID NO: 325476 - RNA, 22 nt, Human herpesvirus 6
aaaggaauagcaggcauugacu

SEQ ID NO: 325477 - RNA, 18 nt, Human herpesvirus 6
aaaggccguuggauccaa

SEQ ID NO: 325478 - RNA, 19 nt, Human herpesvirus 6
aaagggagaugaaacauaa

SEQ ID NO: 325479 - RNA, 18 nt, Human herpesvirus 6
aaaguauagucuagcaac

SEQ ID NO: 325480 - RNA, 13 nt, Human herpesvirus 6
aaaguauccuaaa

SEQ ID NO: 325481 - RNA, 17 nt, Human herpesvirus 6
aaaguauuggugcauca

SEQ ID NO: 325482 - RNA, 18 nt, Human herpesvirus 6
aaagugaaagagacucua

SEQ ID NO: 325483 - RNA, 13 nt, Human herpesvirus 6
aaaguuaauucaa

SEQ ID NO: 325484 - RNA, 16 nt, Human herpesvirus 6
aaaguucaucuuucaa

SEQ ID NO: 325485 - RNA, 17 nt, Human herpesvirus 6
aaaguuuaaguuuucac

SEQ ID NO: 325486 - RNA, 22 nt, Human herpesvirus 6
aaaguuucuguugaauuccaga

SEQ ID NO: 325487 - RNA, 22 nt, Human herpesvirus 6
aaaguuuucggcuucgcugcua

SEQ ID NO: 325488 - RNA, 14 nt, Human herpesvirus 6
aaaguuuugugauc

SEQ ID NO: 325489 - RNA, 12 nt, Human herpesvirus 6
aaauaaacaguu

SEQ ID NO: 325490 - RNA, 15 nt, Human herpesvirus 6
aaauaacgauggagu

SEQ ID NO: 325491 - RNA, 13 nt, Human herpesvirus 6
aaauaaguacaua

SEQ ID NO: 325492 - RNA, 16 nt, Human herpesvirus 6
aaauaaguacauagaa

SEQ ID NO: 325493 - RNA, 15 nt, Human herpesvirus 6
aaauaauuacauuaa

SEQ ID NO: 325494 - RNA, 17 nt, Human herpesvirus 6
aaauaccaauuccuuaa

SEQ ID NO: 325495 - RNA, 16 nt, Human herpesvirus 6
aaauacgagagcugac

SEQ ID NO: 325496 - RNA, 22 nt, Human herpesvirus 6
aaauacggaaaaaguauccuaa

SEQ ID NO: 325497 - RNA, 15 nt, Human herpesvirus 6
aaauacggaccgaga

SEQ ID NO: 325498 - RNA, 13 nt, Human herpesvirus 6
aaauacuagcuaa

SEQ ID NO: 325499 - RNA, 17 nt, Human herpesvirus 6
aaauacuagcuaaaacu

SEQ ID NO: 325500 - RNA, 20 nt, Human herpesvirus 6
aaauacugcagcucgacucc

SEQ ID NO: 325501 - RNA, 17 nt, Human herpesvirus 6
aaauagucuuaauucag

SEQ ID NO: 325502 - RNA, 21 nt, Human herpesvirus 6
aaauauguugaaucuuauuca

SEQ ID NO: 325503 - RNA, 16 nt, Human herpesvirus 6
aaauauuaauuaccua

SEQ ID NO: 325504 - RNA, 19 nt, Human herpesvirus 6
aaauauuucuaaacacaga

SEQ ID NO: 325505 - RNA, 20 nt, Human herpesvirus 6
aaauauuuuguagaguguua

SEQ ID NO: 325506 - RNA, 14 nt, Human herpesvirus 6
aaaucaaacucacc

SEQ ID NO: 325507 - RNA, 11 nt, Human herpesvirus 6
aaaucaaagac

SEQ ID NO: 325508 - RNA, 14 nt, Human herpesvirus 6
aaaucacaccaaug

SEQ ID NO: 325509 - RNA, 20 nt, Human herpesvirus 6
aaaucacaccaauggucaca

SEQ ID NO: 325510 - RNA, 20 nt, Human herpesvirus 6
aaaucauuaccaguagcaca

SEQ ID NO: 325511 - RNA, 21 nt, Human herpesvirus 6
aaaucauuaccaguagcacaa

SEQ ID NO: 325512 - RNA, 18 nt, Human herpesvirus 6
aaaucauuuugaaauguc

SEQ ID NO: 325513 - RNA, 19 nt, Human herpesvirus 6
aaauccgauagccauacca

SEQ ID NO: 325514 - RNA, 21 nt, Human herpesvirus 6
aaauccuccuagggaauuuaa

SEQ ID NO: 325515 - RNA, 22 nt, Human herpesvirus 6
aaaucgcuuaaagcguuugcaa

SEQ ID NO: 325516 - RNA, 19 nt, Human herpesvirus 6
aaaugaaauuuaauaagaa

SEQ ID NO: 325517 - RNA, 19 nt, Human herpesvirus 6
aaaugaaggggaaccucca

SEQ ID NO: 325518 - RNA, 17 nt, Human herpesvirus 6
aaaugaauguguucaca

SEQ ID NO: 325519 - RNA, 14 nt, Human herpesvirus 6
aaaugagacuuagc

SEQ ID NO: 325520 - RNA, 17 nt, Human herpesvirus 6
aaaugauuuuacaaaga

SEQ ID NO: 325521 - RNA, 16 nt, Human herpesvirus 6
aaaugcaacgcaucac

SEQ ID NO: 325522 - RNA, 21 nt, Human herpesvirus 6
aaaugcaacgcaucacacaua

SEQ ID NO: 325523 - RNA, 24 nt, Human herpesvirus 6
aaaugcaacgcaucacacauacaa

SEQ ID NO: 325524 - RNA, 15 nt, Human herpesvirus 6
aaaugcccauucuca

SEQ ID NO: 325525 - RNA, 21 nt, Human herpesvirus 6
aaauggaugucauauggugcg

SEQ ID NO: 325526 - RNA, 14 nt, Human herpesvirus 6
aaauggcauacauu

SEQ ID NO: 325527 - RNA, 14 nt, Human herpesvirus 6
aaaugguagcuauu

SEQ ID NO: 325528 - RNA, 16 nt, Human herpesvirus 6
aaauguuuauuaucca

SEQ ID NO: 325529 - RNA, 23 nt, Human herpesvirus 6
aaauuacacaccuuaaacaugua

SEQ ID NO: 325530 - RNA, 17 nt, Human herpesvirus 6
aaauuauggcgaugacc

SEQ ID NO: 325531 - RNA, 20 nt, Human herpesvirus 6
aaauucuuacauuuuguaca

SEQ ID NO: 325532 - RNA, 16 nt, Human herpesvirus 6
aaauugacuacagcug

SEQ ID NO: 325533 - RNA, 16 nt, Human herpesvirus 6
aaauugauaguacuua

SEQ ID NO: 325534 - RNA, 16 nt, Human herpesvirus 6
aacaaaaaacaacuuu

SEQ ID NO: 325535 - RNA, 15 nt, Human herpesvirus 6
aacaaaaagcuuuaa

SEQ ID NO: 325536 - RNA, 14 nt, Human herpesvirus 6
aacaaaacuuucau

SEQ ID NO: 325537 - RNA, 21 nt, Human herpesvirus 6
aacaaacacgugauuccucaa

SEQ ID NO: 325538 - RNA, 24 nt, Human herpesvirus 6
aacaaacuauauugcugcuagaua

SEQ ID NO: 325539 - RNA, 14 nt, Human herpesvirus 6
aacaaagcuuuacu

SEQ ID NO: 325540 - RNA, 13 nt, Human herpesvirus 6
aacaaaucuccaa

SEQ ID NO: 325541 - RNA, 15 nt, Human herpesvirus 6
aacaaaucuccaaaa

SEQ ID NO: 325542 - RNA, 18 nt, Human herpesvirus 6
aacaacaauaacaacaac

SEQ ID NO: 325543 - RNA, 13 nt, Human herpesvirus 6
aacaacagcaugu

SEQ ID NO: 325544 - RNA, 15 nt, Human herpesvirus 6
aacaacagcauguaa

SEQ ID NO: 325545 - RNA, 14 nt, Human herpesvirus 6
aacaacgacuacca

SEQ ID NO: 325546 - RNA, 16 nt, Human herpesvirus 6
aacaacgucaugcaaa

SEQ ID NO: 325547 - RNA, 13 nt, Human herpesvirus 6
aacaagcacugaa

SEQ ID NO: 325548 - RNA, 14 nt, Human herpesvirus 6
aacaauaacaacaa

SEQ ID NO: 325549 - RNA, 16 nt, Human herpesvirus 6
aacaauaauugcauuc

SEQ ID NO: 325550 - RNA, 15 nt, Human herpesvirus 6
aacaauuauguguca

SEQ ID NO: 325551 - RNA, 23 nt, Human herpesvirus 6
aacaauuucuuguugaguuucag

SEQ ID NO: 325552 - RNA, 17 nt, Human herpesvirus 6
aacacaaaaacagggag

SEQ ID NO: 325553 - RNA, 14 nt, Human herpesvirus 6
aacacaaaccauca

SEQ ID NO: 325554 - RNA, 14 nt, Human herpesvirus 6
aacacacagugaaa

SEQ ID NO: 325555 - RNA, 15 nt, Human herpesvirus 6
aacacagcaugcauu

SEQ ID NO: 325556 - RNA, 13 nt, Human herpesvirus 6
aacaccagcauaa

SEQ ID NO: 325557 - RNA, 15 nt, Human herpesvirus 6
aacacuaaauuacca

SEQ ID NO: 325558 - RNA, 13 nt, Human herpesvirus 6
aacagacuuuacu

SEQ ID NO: 325559 - RNA, 15 nt, Human herpesvirus 6
aacagacuuuacuuc

SEQ ID NO: 325560 - RNA, 22 nt, Human herpesvirus 6
aacagagagaggagcauucaca

SEQ ID NO: 325561 - RNA, 12 nt, Human herpesvirus 6
aacagcauguaa

SEQ ID NO: 325562 - RNA, 21 nt, Human herpesvirus 6
aacaggauucccuucagacau

SEQ ID NO: 325563 - RNA, 14 nt, Human herpesvirus 6
aacaguaauuuuag

SEQ ID NO: 325564 - RNA, 13 nt, Human herpesvirus 6
aacagucugacau

SEQ ID NO: 325565 - RNA, 16 nt, Human herpesvirus 6
aacagucugacaugga

SEQ ID NO: 325566 - RNA, 13 nt, Human herpesvirus 6
aacauaaacuuag

SEQ ID NO: 325567 - RNA, 18 nt, Human herpesvirus 6
aacauaauugcacccuau

SEQ ID NO: 325568 - RNA, 17 nt, Human herpesvirus 6
aacauagcgaauuugaa

SEQ ID NO: 325569 - RNA, 18 nt, Human herpesvirus 6
aacaucccagauacauaa

SEQ ID NO: 325570 - RNA, 19 nt, Human herpesvirus 6
aacauccuaacaagacaga

SEQ ID NO: 325571 - RNA, 19 nt, Human herpesvirus 6
aacaucguaauggcauuca

SEQ ID NO: 325572 - RNA, 14 nt, Human herpesvirus 6
aacaugaacauuga

SEQ ID NO: 325573 - RNA, 20 nt, Human herpesvirus 6
aaguuagcggggagucucca

SEQ ID NO: 325574 - RNA, 20 nt, Human herpesvirus 6
aaguuuauuuugucagucaa

SEQ ID NO: 325575 - RNA, 19 nt, Human herpesvirus 6
aaguuuccuuugugugaua

SEQ ID NO: 325576 - RNA, 19 nt, Human herpesvirus 6
aaguuucuguugaauucca

SEQ ID NO: 325577 - RNA, 19 nt, Human herpesvirus 6
aaguuugugcgaauugugu

SEQ ID NO: 325578 - RNA, 17 nt, Human herpesvirus 6
aaguuuugggugcuauu

SEQ ID NO: 325579 - RNA, 13 nt, Human herpesvirus 6
aauaaacauuuau

SEQ ID NO: 325580 - RNA, 18 nt, Human herpesvirus 6
aauaaaguaagcaccuua

SEQ ID NO: 325581 - RNA, 21 nt, Human herpesvirus 6
aauaaaguuaaauugauagua

SEQ ID NO: 325582 - RNA, 19 nt, Human herpesvirus 6
aauaaaguuugucacacca

SEQ ID NO: 325583 - RNA, 14 nt, Human herpesvirus 6
aauaaguacauaga

SEQ ID NO: 325584 - RNA, 15 nt, Human herpesvirus 6
aauaauggcaugcau

SEQ ID NO: 325585 - RNA, 20 nt, Human herpesvirus 6
aauaauuauccucucuggaa

SEQ ID NO: 325586 - RNA, 20 nt, Human herpesvirus 6
aauaauuuguuuuuccauaa

SEQ ID NO: 325587 - RNA, 21 nt, Human herpesvirus 6
aauaauuuuauuaacuguaaa

SEQ ID NO: 325588 - RNA, 15 nt, Human herpesvirus 6
aauacaacaauaaaa

SEQ ID NO: 325589 - RNA, 21 nt, Human herpesvirus 6
aauacacuaacaggauucccu

SEQ ID NO: 325590 - RNA, 16 nt, Human herpesvirus 6
aauacauauaaaagcu

SEQ ID NO: 325591 - RNA, 10 nt, Human herpesvirus 6
aauacaucaa

SEQ ID NO: 325592 - RNA, 19 nt, Human herpesvirus 6
aauacauuuccaugcauau

SEQ ID NO: 325593 - RNA, 17 nt, Human herpesvirus 6
aauacauuuuucaauaa

SEQ ID NO: 325594 - RNA, 20 nt, Human herpesvirus 6
aauaccaauuccuuaauucu

SEQ ID NO: 325595 - RNA, 14 nt, Human herpesvirus 6
aauacggaaaaagu

SEQ ID NO: 325596 - RNA, 12 nt, Human herpesvirus 6
aauagucuuaau

SEQ ID NO: 325597 - RNA, 18 nt, Human herpesvirus 6
aauaguucuucaacauau

SEQ ID NO: 325598 - RNA, 20 nt, Human herpesvirus 6
aauauaacgcuucuaacaau

SEQ ID NO: 325599 - RNA, 14 nt, Human herpesvirus 6
aauauaacuuuaca

SEQ ID NO: 325600 - RNA, 12 nt, Human herpesvirus 6
aauaugaacaau

SEQ ID NO: 325601 - RNA, 23 nt, Human herpesvirus 6
aauauuaauuacauauagucaau

SEQ ID NO: 325602 - RNA, 21 nt, Human herpesvirus 6
aauauugugguugccaguaaa

SEQ ID NO: 325603 - RNA, 13 nt, Human herpesvirus 6
aaucaaucaaggu

SEQ ID NO: 325604 - RNA, 23 nt, Human herpesvirus 6
aaucacaacaaaaaugcuuuuau

SEQ ID NO: 325605 - RNA, 15 nt, Human herpesvirus 6
aaucacaaugaucaa

SEQ ID NO: 325606 - RNA, 18 nt, Human herpesvirus 6
aaucacaccaauggucac

SEQ ID NO: 325607 - RNA, 14 nt, Human herpesvirus 6
aaucagaauccacc

SEQ ID NO: 325608 - RNA, 22 nt, Human herpesvirus 6
aaucagacggguaagcagcaga

SEQ ID NO: 325609 - RNA, 21 nt, Human herpesvirus 6
aaucaucagaggcaccuugug

SEQ ID NO: 325610 - RNA, 18 nt, Human herpesvirus 6
aauccaacgaauacuucu

SEQ ID NO: 325611 - RNA, 14 nt, Human herpesvirus 6
aauccaccaaugac

SEQ ID NO: 325612 - RNA, 19 nt, Human herpesvirus 6
aauccacugcauuucauuc

SEQ ID NO: 325613 - RNA, 21 nt, Human herpesvirus 6
aauccacugcauuucauuccc

SEQ ID NO: 325614 - RNA, 12 nt, Human herpesvirus 6
aauccuaauuca

SEQ ID NO: 325615 - RNA, 18 nt, Human herpesvirus 6
aauccuauaaaaaaagca

SEQ ID NO: 325616 - RNA, 23 nt, Human herpesvirus 6
aauccuguuuuguaccauuguau

SEQ ID NO: 325617 - RNA, 17 nt, Human herpesvirus 6
aaucgcaaaaacauguu

SEQ ID NO: 325618 - RNA, 20 nt, Human herpesvirus 6
aaucgcgguccaacacagca

SEQ ID NO: 325619 - RNA, 20 nt, Human herpesvirus 6
aaucgucggaucaacagaug

SEQ ID NO: 325620 - RNA, 16 nt, Human herpesvirus 6
aaucuacugagaucau

SEQ ID NO: 325621 - RNA, 13 nt, Human herpesvirus 6
aaucuacuguaca

SEQ ID NO: 325622 - RNA, 15 nt, Human herpesvirus 6
aaucuacuguacaaa

SEQ ID NO: 325623 - RNA, 20 nt, Human herpesvirus 6
aaucuauccgcuaaaacgac

SEQ ID NO: 325624 - RNA, 21 nt, Human herpesvirus 6
aaucuaucuccgcaaaccacc

SEQ ID NO: 325625 - RNA, 22 nt, Human herpesvirus 6
aaucuauugucgaagaacccga

SEQ ID NO: 325626 - RNA, 18 nt, Human herpesvirus 6
aaucugaauuuaaugcaa

SEQ ID NO: 325627 - RNA, 21 nt, Human herpesvirus 6
aaucuguguuuccaaaauugg

SEQ ID NO: 325628 - RNA, 19 nt, Human herpesvirus 6
aaugaaaaaaaaugaaggg

SEQ ID NO: 325629 - RNA, 22 nt, Human herpesvirus 6
aaugaacgcagcguaaugugca

SEQ ID NO: 325630 - RNA, 20 nt, Human herpesvirus 6
aaugaauagauaauaaucau

SEQ ID NO: 325631 - RNA, 13 nt, Human herpesvirus 6
aaugaaugugcug

SEQ ID NO: 325632 - RNA, 15 nt, Human herpesvirus 6
aaugaauguguucac

SEQ ID NO: 325633 - RNA, 22 nt, Human herpesvirus 6
aaugaauuuauuuucaauauca

SEQ ID NO: 325634 - RNA, 20 nt, Human herpesvirus 6
aaugaccucaucccuuaaaa

SEQ ID NO: 325635 - RNA, 18 nt, Human herpesvirus 6
aaugauacuaaguguaau

SEQ ID NO: 325636 - RNA, 16 nt, Human herpesvirus 6
aaugauauauugugau

SEQ ID NO: 325637 - RNA, 17 nt, Human herpesvirus 6
aaugaucaauuuuacaa

SEQ ID NO: 325638 - RNA, 21 nt, Human herpesvirus 6
aaugcaacauccugcguguua

SEQ ID NO: 325639 - RNA, 13 nt, Human herpesvirus 6
aaugcaugauggu

SEQ ID NO: 325640 - RNA, 23 nt, Human herpesvirus 6
aaugcaugucgaacagcuuuuca

SEQ ID NO: 325641 - RNA, 22 nt, Human herpesvirus 6
aaugcccauucucagacagcuu

SEQ ID NO: 325642 - RNA, 15 nt, Human herpesvirus 6
aaugcucaaccuaau

SEQ ID NO: 325643 - RNA, 18 nt, Human herpesvirus 6
aaugcucaaccuaaugac

SEQ ID NO: 325644 - RNA, 18 nt, Human herpesvirus 6
aaugcugcugcugugguu

SEQ ID NO: 325645 - RNA, 22 nt, Human herpesvirus 6
aaugcuggcgcugcauagacug

SEQ ID NO: 325646 - RNA, 23 nt, Human herpesvirus 6
aauggaccaagcaccuaauuaca

SEQ ID NO: 325647 - RNA, 15 nt, Human herpesvirus 6
aauguaaaguuauau

SEQ ID NO: 325648 - RNA, 16 nt, Human herpesvirus 6
aauguaaaguuauauu

SEQ ID NO: 325649 - RNA, 21 nt, Human herpesvirus 6
aauguaugccgauuaaugugu

SEQ ID NO: 325650 - RNA, 22 nt, Human herpesvirus 6
aaugucuguauuuuucuuugca

SEQ ID NO: 325651 - RNA, 23 nt, Human herpesvirus 6
aaugucuguauuuuucuuugcag

SEQ ID NO: 325652 - RNA, 12 nt, Human herpesvirus 6
aauguguucaca

SEQ ID NO: 325653 - RNA, 23 nt, Human herpesvirus 6
aauguguuuuucuuuuacaggaa

SEQ ID NO: 325654 - RNA, 23 nt, Human herpesvirus 6
aauguuaagcaaaaacagauuaa

SEQ ID NO: 325655 - RNA, 14 nt, Human herpesvirus 6
aauguugcauggaa

SEQ ID NO: 325656 - RNA, 19 nt, Human herpesvirus 6
aauguuucauccaaauaca

SEQ ID NO: 325657 - RNA, 15 nt, Human herpesvirus 6
aauuaaaaaaagagg

SEQ ID NO: 325658 - RNA, 17 nt, Human herpesvirus 6
aauuacauauagucaau

SEQ ID NO: 325659 - RNA, 19 nt, Human herpesvirus 6
aauuacauauagucaaugu

SEQ ID NO: 325660 - RNA, 15 nt, Human herpesvirus 6
aauuacucaacauua

SEQ ID NO: 325661 - RNA, 14 nt, Human herpesvirus 6
aauuaggugcuugg

SEQ ID NO: 325662 - RNA, 21 nt, Human herpesvirus 6
aauuaugguuaucaucacaaa

SEQ ID NO: 325663 - RNA, 19 nt, Human herpesvirus 6
aauuaugugucaaguuuca

SEQ ID NO: 325664 - RNA, 15 nt, Human herpesvirus 6
aauucaggaacauaa

SEQ ID NO: 325665 - RNA, 19 nt, Human herpesvirus 6
aauuccacgugcuugucuc

SEQ ID NO: 325666 - RNA, 20 nt, Human herpesvirus 6
aauuccacgugcuugucuca

SEQ ID NO: 325667 - RNA, 22 nt, Human herpesvirus 6
aauuccacgugcuugucucaca

SEQ ID NO: 325668 - RNA, 22 nt, Human herpesvirus 6
aauuccggccuaggacguacag

SEQ ID NO: 325669 - RNA, 18 nt, Human herpesvirus 6
aauucugcuccuuuaucu

SEQ ID NO: 325670 - RNA, 20 nt, Human herpesvirus 6
aauucuuacauuuuguacaa

SEQ ID NO: 325671 - RNA, 17 nt, Human herpesvirus 6
aauucuucugugacuau

SEQ ID NO: 325672 - RNA, 14 nt, Human herpesvirus 6
aauugacuacagcu

SEQ ID NO: 325673 - RNA, 17 nt, Human herpesvirus 6
aauugauaauaaguccu

SEQ ID NO: 325674 - RNA, 15 nt, Human herpesvirus 6
aauugauaguacuua

SEQ ID NO: 325675 - RNA, 13 nt, Human herpesvirus 6
aauugcauccaaa

SEQ ID NO: 325676 - RNA, 21 nt, Human herpesvirus 6
aauuggcgucuaguaccugua

SEQ ID NO: 325677 - RNA, 14 nt, Human herpesvirus 6
aauugggaagcaua

SEQ ID NO: 325678 - RNA, 16 nt, Human herpesvirus 6
aauuggucucuuugcg

SEQ ID NO: 325679 - RNA, 13 nt, Human herpesvirus 6
aauuguaucuuug

SEQ ID NO: 325680 - RNA, 17 nt, Human herpesvirus 6
aauuuaauaagagccaa

SEQ ID NO: 325681 - RNA, 24 nt, Human herpesvirus 6
aauuuaccguuuaaacuaugcaaa

SEQ ID NO: 325682 - RNA, 15 nt, Human herpesvirus 6
aauuuccugaucaca

SEQ ID NO: 325683 - RNA, 19 nt, Human herpesvirus 6
aauuuccugaucacagagc

SEQ ID NO: 325684 - RNA, 20 nt, Human herpesvirus 6
aauuuggguuguguugcagu

SEQ ID NO: 325685 - RNA, 18 nt, Human herpesvirus 6
acuaugacuuuucuauca

SEQ ID NO: 325686 - RNA, 19 nt, Human herpesvirus 6
acuaugcaaacgaaaccau

SEQ ID NO: 325687 - RNA, 21 nt, Human herpesvirus 6
acuauuuguuuaaugcauuca

SEQ ID NO: 325688 - RNA, 23 nt, Human herpesvirus 6
acuauuuguuuaaugcauucaca

SEQ ID NO: 325689 - RNA, 24 nt, Human herpesvirus 6
acuauuuguuuaaugcauucacaa

SEQ ID NO: 325690 - RNA, 22 nt, Human herpesvirus 6
acuauuuuagucacacauucua

SEQ ID NO: 325691 - RNA, 15 nt, Human herpesvirus 6
acucaacccaaaaug

SEQ ID NO: 325692 - RNA, 18 nt, Human herpesvirus 6
acucaccgcauauaucau

SEQ ID NO: 325693 - RNA, 17 nt, Human herpesvirus 6
acucauacacaggauua

SEQ ID NO: 325694 - RNA, 14 nt, Human herpesvirus 6
acucauccaagacu

SEQ ID NO: 325695 - RNA, 13 nt, Human herpesvirus 6
acuccaauccaac

SEQ ID NO: 325696 - RNA, 21 nt, Human herpesvirus 6
acuccagugcuuuaaucacaa

SEQ ID NO: 325697 - RNA, 12 nt, Human herpesvirus 6
acuccccagaga

SEQ ID NO: 325698 - RNA, 14 nt, Human herpesvirus 6
acuccccauucaac

SEQ ID NO: 325699 - RNA, 12 nt, Human herpesvirus 6
acuccuacaaua

SEQ ID NO: 325700 - RNA, 19 nt, Human herpesvirus 6
acucugacgaaguuuuuac

SEQ ID NO: 325701 - RNA, 20 nt, Human herpesvirus 6
acucuuauaacaagcacuga

SEQ ID NO: 325702 - RNA, 15 nt, Human herpesvirus 6
acucuucggcauaaa

SEQ ID NO: 325703 - RNA, 15 nt, Human herpesvirus 6
acucuuugaacuuuu

SEQ ID NO: 325704 - RNA, 14 nt, Human herpesvirus 6
acugaaaccaaagc

SEQ ID NO: 325705 - RNA, 15 nt, Human herpesvirus 6
acugaaacuucacga

SEQ ID NO: 325706 - RNA, 21 nt, Human herpesvirus 6
acugaaacuucacgaucuaca

SEQ ID NO: 325707 - RNA, 11 nt, Human herpesvirus 6
acugaauuugc

SEQ ID NO: 325708 - RNA, 19 nt, Human herpesvirus 6
acugacgguuagguuuaau

SEQ ID NO: 325709 - RNA, 12 nt, Human herpesvirus 6
acugauacuuga

SEQ ID NO: 325710 - RNA, 17 nt, Human herpesvirus 6
acugcagcucgacucca

SEQ ID NO: 325711 - RNA, 15 nt, Human herpesvirus 6
acugcaguccagaag

SEQ ID NO: 325712 - RNA, 21 nt, Human herpesvirus 6
acugcauggugagcaaaauaa

SEQ ID NO: 325713 - RNA, 15 nt, Human herpesvirus 6
acugcuaguuuuuuu

SEQ ID NO: 325714 - RNA, 18 nt, Human herpesvirus 6
acugguuuacagcacuuu

SEQ ID NO: 325715 - RNA, 13 nt, Human herpesvirus 6
acuguaugcaaua

SEQ ID NO: 325716 - RNA, 15 nt, Human herpesvirus 6
acugucgaaauucac

SEQ ID NO: 325717 - RNA, 17 nt, Human herpesvirus 6
acugucgaaauucacca

SEQ ID NO: 325718 - RNA, 15 nt, Human herpesvirus 6
acugugucuguucaa

SEQ ID NO: 325719 - RNA, 13 nt, Human herpesvirus 6
acuuaagccagcu

SEQ ID NO: 325720 - RNA, 12 nt, Human herpesvirus 6
acuuagcaacua

SEQ ID NO: 325721 - RNA, 17 nt, Human herpesvirus 6
acuuauuuuuuuuucug

SEQ ID NO: 325722 - RNA, 20 nt, Human herpesvirus 6
acuuauuuuuuuuucugugu

SEQ ID NO: 325723 - RNA, 15 nt, Human herpesvirus 6
acuucaaacaccuca

SEQ ID NO: 325724 - RNA, 15 nt, Human herpesvirus 6
acuucgacaacggac

SEQ ID NO: 325725 - RNA, 19 nt, Human herpesvirus 6
acuucguuuauucaggaug

SEQ ID NO: 325726 - RNA, 21 nt, Human herpesvirus 6
acuugaaaaaguaguugcuaa

SEQ ID NO: 325727 - RNA, 12 nt, Human herpesvirus 6
acuugaaagccu

SEQ ID NO: 325728 - RNA, 12 nt, Human herpesvirus 6
acuugagugaug

SEQ ID NO: 325729 - RNA, 18 nt, Human herpesvirus 6
acuugagugauggaguua

SEQ ID NO: 325730 - RNA, 16 nt, Human herpesvirus 6
acuugauaaacuguau

SEQ ID NO: 325731 - RNA, 21 nt, Human herpesvirus 6
acuugauaaacuguaugcaau

SEQ ID NO: 325732 - RNA, 19 nt, Human herpesvirus 6
acuugcacucgaaaacagu

SEQ ID NO: 325733 - RNA, 16 nt, Human herpesvirus 6
acuuguacaaauucau

SEQ ID NO: 325734 - RNA, 19 nt, Human herpesvirus 6
acuugucggcgaugcaucu

SEQ ID NO: 325735 - RNA, 21 nt, Human herpesvirus 6
acuuucaugauucuuugucua

SEQ ID NO: 325736 - RNA, 18 nt, Human herpesvirus 6
acuuuuaaaagauuugau

SEQ ID NO: 325737 - RNA, 21 nt, Human herpesvirus 6
acuuuuaaaagauuugaucca

SEQ ID NO: 325738 - RNA, 23 nt, Human herpesvirus 6
acuuuucuaucacucauacacag

SEQ ID NO: 325739 - RNA, 18 nt, Human herpesvirus 6
acuuuuuguagaacuuuu

SEQ ID NO: 325740 - RNA, 14 nt, Human herpesvirus 6
acuuuuuguauuau

SEQ ID NO: 325741 - RNA, 14 nt, Human herpesvirus 6
agaaaaaaacugug

SEQ ID NO: 325742 - RNA, 21 nt, Human herpesvirus 6
agaaaaacaacgaaacaguuc

SEQ ID NO: 325743 - RNA, 20 nt, Human herpesvirus 6
agaaaaacaucguaauggca

SEQ ID NO: 325744 - RNA, 17 nt, Human herpesvirus 6
agaaaaaugagacuuag

SEQ ID NO: 325745 - RNA, 14 nt, Human herpesvirus 6
agaaaacacuaucu

SEQ ID NO: 325746 - RNA, 21 nt, Human herpesvirus 6
agaaaaggacauucgcuuucu

SEQ ID NO: 325747 - RNA, 19 nt, Human herpesvirus 6
agaaaaguauagucuagca

SEQ ID NO: 325748 - RNA, 16 nt, Human herpesvirus 6
agaaaagugcaagggu

SEQ ID NO: 325749 - RNA, 23 nt, Human herpesvirus 6
agaaaauaaaaaaaagacaucac

SEQ ID NO: 325750 - RNA, 16 nt, Human herpesvirus 6
agaaaaucuuccacug

SEQ ID NO: 325751 - RNA, 19 nt, Human herpesvirus 6
agaaacaaugcuuugggac

SEQ ID NO: 325752 - RNA, 15 nt, Human herpesvirus 6
agaaacagauagugu

SEQ ID NO: 325753 - RNA, 17 nt, Human herpesvirus 6
agaaacauuugcugaug

SEQ ID NO: 325754 - RNA, 18 nt, Human herpesvirus 6
agaaacauuugcugaugc

SEQ ID NO: 325755 - RNA, 14 nt, Human herpesvirus 6
agaaacgcccugaa

SEQ ID NO: 325756 - RNA, 23 nt, Human herpesvirus 6
agaaacguugcacuacuugucuu

SEQ ID NO: 325757 - RNA, 18 nt, Human herpesvirus 6
agaaauuacauaagcaaa

SEQ ID NO: 325758 - RNA, 14 nt, Human herpesvirus 6
agaacaauuaucac

SEQ ID NO: 325759 - RNA, 20 nt, Human herpesvirus 6
agaacaauuaucacaguuga

SEQ ID NO: 325760 - RNA, 12 nt, Human herpesvirus 6
agaacaucucag

SEQ ID NO: 325761 - RNA, 18 nt, Human herpesvirus 6
agaaccaaagacauucaa

SEQ ID NO: 325762 - RNA, 21 nt, Human herpesvirus 6
agaacgggcacacgucccuau

SEQ ID NO: 325763 - RNA, 20 nt, Human herpesvirus 6
agaagaaaagaaaaagcagc

SEQ ID NO: 325764 - RNA, 15 nt, Human herpesvirus 6
agaagacuucgacaa

SEQ ID NO: 325765 - RNA, 14 nt, Human herpesvirus 6
agaaguuuacauag

SEQ ID NO: 325766 - RNA, 16 nt, Human herpesvirus 6
agaaguuuacauagaa

SEQ ID NO: 325767 - RNA, 14 nt, Human herpesvirus 6
agaauaaugccuaa

SEQ ID NO: 325768 - RNA, 12 nt, Human herpesvirus 6
agaauaucugcu

SEQ ID NO: 325769 - RNA, 18 nt, Human herpesvirus 6
agaauaucugcuaagucu

SEQ ID NO: 325770 - RNA, 15 nt, Human herpesvirus 6
agaauccaccaauga

SEQ ID NO: 325771 - RNA, 21 nt, Human herpesvirus 6
agaaugacuguacacaagagc

SEQ ID NO: 325772 - RNA, 17 nt, Human herpesvirus 6
agaaugcaacauccugc

SEQ ID NO: 325773 - RNA, 21 nt, Human herpesvirus 6
agaauguuugggagaacugag

SEQ ID NO: 325774 - RNA, 21 nt, Human herpesvirus 6
agaauuaauguccagugauaa

SEQ ID NO: 325775 - RNA, 13 nt, Human herpesvirus 6
agaauucaaaaac

SEQ ID NO: 325776 - RNA, 15 nt, Human herpesvirus 6
agaauuuauguucag

SEQ ID NO: 325777 - RNA, 15 nt, Human herpesvirus 6
agaauuucuaaccau

SEQ ID NO: 325778 - RNA, 12 nt, Human herpesvirus 6
agacaauaauca

SEQ ID NO: 325779 - RNA, 16 nt, Human herpesvirus 6
agacacgcuaaaaaca

SEQ ID NO: 325780 - RNA, 15 nt, Human herpesvirus 6
agacacuguaucugu

SEQ ID NO: 325781 - RNA, 21 nt, Human herpesvirus 6
agacagaggaaauaaaaacac

SEQ ID NO: 325782 - RNA, 23 nt, Human herpesvirus 6
agacauccauugagugugcauca

SEQ ID NO: 325783 - RNA, 18 nt, Human herpesvirus 6
agacauucaacauuccaa

SEQ ID NO: 325784 - RNA, 14 nt, Human herpesvirus 6
agaccgacaguauu

SEQ ID NO: 325785 - RNA, 17 nt, Human herpesvirus 6
agaccuucuuuuagucu

SEQ ID NO: 325786 - RNA, 13 nt, Human herpesvirus 6
agaccuugaucua

SEQ ID NO: 325787 - RNA, 16 nt, Human herpesvirus 6
agacgaaaauuguaac

SEQ ID NO: 325788 - RNA, 20 nt, Human herpesvirus 6
agacgaaaauuguaacuuca

SEQ ID NO: 325789 - RNA, 19 nt, Human herpesvirus 6
agacguuugcuguuuucac

SEQ ID NO: 325790 - RNA, 20 nt, Human herpesvirus 6
ccgauacagcaccaucaaua

SEQ ID NO: 325791 - RNA, 14 nt, Human herpesvirus 6
ccgaugaauucugg

SEQ ID NO: 325792 - RNA, 20 nt, Human herpesvirus 6
ccgauuaauguguuuuucuu

SEQ ID NO: 325793 - RNA, 23 nt, Human herpesvirus 6
ccgccuuuucuuauauuuuucug

SEQ ID NO: 325794 - RNA, 15 nt, Human herpesvirus 6
ccgcgccguuucaaa

SEQ ID NO: 325795 - RNA, 15 nt, Human herpesvirus 6
ccggaacacggugau

SEQ ID NO: 325796 - RNA, 14 nt, Human herpesvirus 6
ccggaguugcagug

SEQ ID NO: 325797 - RNA, 15 nt, Human herpesvirus 6
ccggcccauccaccu

SEQ ID NO: 325798 - RNA, 14 nt, Human herpesvirus 6
ccggccccagagac

SEQ ID NO: 325799 - RNA, 17 nt, Human herpesvirus 6
ccggcgaacugagauug

SEQ ID NO: 325800 - RNA, 16 nt, Human herpesvirus 6
ccggcgugugcgauuu

SEQ ID NO: 325801 - RNA, 22 nt, Human herpesvirus 6
ccggcugagcggaguggagaua

SEQ ID NO: 325802 - RNA, 12 nt, Human herpesvirus 6
ccgggugcuccg

SEQ ID NO: 325803 - RNA, 20 nt, Human herpesvirus 6
ccguaaacaaauucuuacau

SEQ ID NO: 325804 - RNA, 22 nt, Human herpesvirus 6
ccguaauggaaacgacaaagaa

SEQ ID NO: 325805 - RNA, 15 nt, Human herpesvirus 6
ccgugauguuuuccu

SEQ ID NO: 325806 - RNA, 23 nt, Human herpesvirus 6
ccguugagugccucagaggugag

SEQ ID NO: 325807 - RNA, 18 nt, Human herpesvirus 6
ccguuuaaacuaugcaaa

SEQ ID NO: 325808 - RNA, 14 nt, Human herpesvirus 6
ccuaaauacauuca

SEQ ID NO: 325809 - RNA, 12 nt, Human herpesvirus 6
ccuagcauuucc

SEQ ID NO: 325810 - RNA, 15 nt, Human herpesvirus 6
ccuauaaauacugaa

SEQ ID NO: 325811 - RNA, 16 nt, Human herpesvirus 6
ccuaucuagaucaaua

SEQ ID NO: 325812 - RNA, 15 nt, Human herpesvirus 6
ccuauugguuugcau

SEQ ID NO: 325813 - RNA, 16 nt, Human herpesvirus 6
ccuauugguuugcaua

SEQ ID NO: 325814 - RNA, 22 nt, Human herpesvirus 6
ccucaaaaaugcacaauuuagc

SEQ ID NO: 325815 - RNA, 12 nt, Human herpesvirus 6
ccucacuacuga

SEQ ID NO: 325816 - RNA, 15 nt, Human herpesvirus 6
ccucagaggugagua

SEQ ID NO: 325817 - RNA, 18 nt, Human herpesvirus 6
ccucagggucaaaaaacu

SEQ ID NO: 325818 - RNA, 22 nt, Human herpesvirus 6
ccuccaguuuggauucaggcuu

SEQ ID NO: 325819 - RNA, 21 nt, Human herpesvirus 6
ccuccccgagcacgguccaca

SEQ ID NO: 325820 - RNA, 18 nt, Human herpesvirus 6
ccuccuuuguauguucac

SEQ ID NO: 325821 - RNA, 15 nt, Human herpesvirus 6
ccucguggaguaaaa

SEQ ID NO: 325822 - RNA, 19 nt, Human herpesvirus 6
ccucuccuauaaauacuga

SEQ ID NO: 325823 - RNA, 13 nt, Human herpesvirus 6
ccucugaaacacu

SEQ ID NO: 325824 - RNA, 22 nt, Human herpesvirus 6
ccugcagugauauggaaacacu

SEQ ID NO: 325825 - RNA, 12 nt, Human herpesvirus 6
ccugcauaugca

SEQ ID NO: 325826 - RNA, 15 nt, Human herpesvirus 6
ccugcauaugcagac

SEQ ID NO: 325827 - RNA, 21 nt, Human herpesvirus 6
ccugccuauacaggcaaccgc

SEQ ID NO: 325828 - RNA, 19 nt, Human herpesvirus 6
ccuggaaaaacugacugac

SEQ ID NO: 325829 - RNA, 14 nt, Human herpesvirus 6
ccuggcacggugcc

SEQ ID NO: 325830 - RNA, 22 nt, Human herpesvirus 6
ccugggugaguuuuaucacuuu

SEQ ID NO: 325831 - RNA, 13 nt, Human herpesvirus 6
ccugucguaucuu

SEQ ID NO: 325832 - RNA, 20 nt, Human herpesvirus 6
ccugugugccaggaaagugu

SEQ ID NO: 325833 - RNA, 16 nt, Human herpesvirus 6
ccuguuacucuagaaa

SEQ ID NO: 325834 - RNA, 18 nt, Human herpesvirus 6
ccuguuaucuuacggugu

SEQ ID NO: 325835 - RNA, 20 nt, Human herpesvirus 6
ccuguuguguuuacauauac

SEQ ID NO: 325836 - RNA, 21 nt, Human herpesvirus 6
ccuuaauguaugcaucaucaa

SEQ ID NO: 325837 - RNA, 18 nt, Human herpesvirus 6
ccuugggacauguauauu

SEQ ID NO: 325838 - RNA, 18 nt, Human herpesvirus 6
ccuuugugugauaucauu

SEQ ID NO: 325839 - RNA, 23 nt, Human herpesvirus 6
ccuuugugugauaucauucucaa

SEQ ID NO: 325840 - RNA, 16 nt, Human herpesvirus 6
ccuuuuacaauacaca

SEQ ID NO: 325841 - RNA, 15 nt, Human herpesvirus 6
ccuuuuacuuacauc

SEQ ID NO: 325842 - RNA, 22 nt, Human herpesvirus 6
ccuuuuuuacuaguuuucacac

SEQ ID NO: 325843 - RNA, 23 nt, Human herpesvirus 6
cgaaaaacauuucuuacacaaau

SEQ ID NO: 325844 - RNA, 22 nt, Human herpesvirus 6
cgaaaaagaauugggauuucaa

SEQ ID NO: 325845 - RNA, 22 nt, Human herpesvirus 6
gauuuaauuuuaucaugcccga

SEQ ID NO: 325846 - RNA, 15 nt, Human herpesvirus 6
gauuucaaggcuuca

SEQ ID NO: 325847 - RNA, 18 nt, Human herpesvirus 6
gauuucacuuaagccagc

SEQ ID NO: 325848 - RNA, 22 nt, Human herpesvirus 6
gauuugcuugucgggcuuugug

SEQ ID NO: 325849 - RNA, 13 nt, Human herpesvirus 6
gauuuuagacaaa

SEQ ID NO: 325850 - RNA, 15 nt, Human herpesvirus 6
gauuuuuauucugcu

SEQ ID NO: 325851 - RNA, 12 nt, Human herpesvirus 6
gcaaaaacagau

SEQ ID NO: 325852 - RNA, 17 nt, Human herpesvirus 6
gcaaaaacggguuuauu

SEQ ID NO: 325853 - RNA, 12 nt, Human herpesvirus 6
gcaaaacagacu

SEQ ID NO: 325854 - RNA, 14 nt, Human herpesvirus 6
gcaaaacuguuaaa

SEQ ID NO: 325855 - RNA, 18 nt, Human herpesvirus 6
gcaaaagcugacuauuca

SEQ ID NO: 325856 - RNA, 15 nt, Human herpesvirus 6
gcaaaauugacuaca

SEQ ID NO: 325857 - RNA, 14 nt, Human herpesvirus 6
gcaaacgaaaccau

SEQ ID NO: 325858 - RNA, 15 nt, Human herpesvirus 6
gcaaacgaaaccauc

SEQ ID NO: 325859 - RNA, 17 nt, Human herpesvirus 6
gcaaacguaugcaguua

SEQ ID NO: 325860 - RNA, 18 nt, Human herpesvirus 6
gcaaacgugaauauauca

SEQ ID NO: 325861 - RNA, 19 nt, Human herpesvirus 6
gcaaauacuauuuuaguca

SEQ ID NO: 325862 - RNA, 13 nt, Human herpesvirus 6
gcaacaauccaug

SEQ ID NO: 325863 - RNA, 19 nt, Human herpesvirus 6
gcaacaauccauguucaua

SEQ ID NO: 325864 - RNA, 14 nt, Human herpesvirus 6
gcaacacacaguga

SEQ ID NO: 325865 - RNA, 20 nt, Human herpesvirus 6
gcaaccuaauggaccaagca

SEQ ID NO: 325866 - RNA, 23 nt, Human herpesvirus 6
gcaacucguuuuugauugcaauc

SEQ ID NO: 325867 - RNA, 22 nt, Human herpesvirus 6
gcaacucuaccuggaaacaacg

SEQ ID NO: 325868 - RNA, 15 nt, Human herpesvirus 6
gcaacugaauuugca

SEQ ID NO: 325869 - RNA, 18 nt, Human herpesvirus 6
gcaagacgccacgggcau

SEQ ID NO: 325870 - RNA, 15 nt, Human herpesvirus 6
gcaaguagccaauga

SEQ ID NO: 325871 - RNA, 18 nt, Human herpesvirus 6
gcaagucacgggcagcug

SEQ ID NO: 325872 - RNA, 18 nt, Human herpesvirus 6
gcaaucaccaccaacaca

SEQ ID NO: 325873 - RNA, 16 nt, Human herpesvirus 6
gcaauuuccugucaug

SEQ ID NO: 325874 - RNA, 21 nt, Human herpesvirus 6
gcacaaaacaguugauuauuu

SEQ ID NO: 325875 - RNA, 17 nt, Human herpesvirus 6
gcaccucugaaacacug

SEQ ID NO: 325876 - RNA, 23 nt, Human herpesvirus 6
gcacgguccacacgccaguccgu

SEQ ID NO: 325877 - RNA, 23 nt, Human herpesvirus 6
gcacggugccaaaggaaaccacc

SEQ ID NO: 325878 - RNA, 19 nt, Human herpesvirus 6
gcacuugggcaaucgcaaa

SEQ ID NO: 325879 - RNA, 19 nt, Human herpesvirus 6
gcacuuugcgcccauaccu

SEQ ID NO: 325880 - RNA, 13 nt, Human herpesvirus 6
gcagaacaucuca

SEQ ID NO: 325881 - RNA, 14 nt, Human herpesvirus 6
gcagaacaucucag

SEQ ID NO: 325882 - RNA, 19 nt, Human herpesvirus 6
gcagaaguuuacauagaaa

SEQ ID NO: 325883 - RNA, 17 nt, Human herpesvirus 6
gcagagguacuuuccau

SEQ ID NO: 325884 - RNA, 15 nt, Human herpesvirus 6
gcagcuuccacgcga

SEQ ID NO: 325885 - RNA, 24 nt, Human herpesvirus 6
gcagguacugcuaaaagcuaugua

SEQ ID NO: 325886 - RNA, 20 nt, Human herpesvirus 6
gcagguauaagaacuggugu

SEQ ID NO: 325887 - RNA, 19 nt, Human herpesvirus 6
gcagugauauggaaacacu

SEQ ID NO: 325888 - RNA, 14 nt, Human herpesvirus 6
gcaguuaugugcug

SEQ ID NO: 325889 - RNA, 16 nt, Human herpesvirus 6
gcaguuuuacaucauc

SEQ ID NO: 325890 - RNA, 20 nt, Human herpesvirus 6
gcauaauaauggcaugcauu

SEQ ID NO: 325891 - RNA, 18 nt, Human herpesvirus 6
gcauacagaaaucaaaga

SEQ ID NO: 325892 - RNA, 16 nt, Human herpesvirus 6
gcauacagauguguau

SEQ ID NO: 325893 - RNA, 19 nt, Human herpesvirus 6
gcauauuauuaacaaugaa

SEQ ID NO: 325894 - RNA, 14 nt, Human herpesvirus 6
gcaucacacauaca

SEQ ID NO: 325895 - RNA, 14 nt, Human herpesvirus 6
gcaucagaauccag

SEQ ID NO: 325896 - RNA, 19 nt, Human herpesvirus 6
gcaucagaauccagaaacu

SEQ ID NO: 325897 - RNA, 21 nt, Human herpesvirus 6
gcaucagugaaggcugccaug

SEQ ID NO: 325898 - RNA, 15 nt, Human herpesvirus 6
gcaucugccauauca

SEQ ID NO: 325899 - RNA, 21 nt, Human herpesvirus 6
gcauuaacuacaucaacuaca

SEQ ID NO: 325900 - RNA, 23 nt, Human herpesvirus 6
gcauuaacuacaucaacuacauu

SEQ ID NO: 325901 - RNA, 13 nt, Human herpesvirus 6
gcauuagucacag

SEQ ID NO: 325902 - RNA, 18 nt, Human herpesvirus 6
gcauuagucuuaaucaac

SEQ ID NO: 325903 - RNA, 22 nt, Human herpesvirus 6
gcauuccgagcuuuuguuuucu

SEQ ID NO: 325904 - RNA, 21 nt, Human herpesvirus 6
gcauucuguucuucaucauca

SEQ ID NO: 325905 - RNA, 16 nt, Human herpesvirus 6
gcauugaagaugacag

SEQ ID NO: 325906 - RNA, 17 nt, Human herpesvirus 6
gcauugguugauuuuug

SEQ ID NO: 325907 - RNA, 22 nt, Human herpesvirus 6
gcauuucuugguuguguauauu

SEQ ID NO: 325908 - RNA, 18 nt, Human herpesvirus 6
gccaaaacuacaaaguga

SEQ ID NO: 325909 - RNA, 23 nt, Human herpesvirus 6
gccaaagaaacagauaguguuuu

SEQ ID NO: 325910 - RNA, 23 nt, Human herpesvirus 6
gccaacgaaaagcaucucaaaaa

SEQ ID NO: 325911 - RNA, 18 nt, Human herpesvirus 6
gccaacgcgacaggguga

SEQ ID NO: 325912 - RNA, 22 nt, Human herpesvirus 6
gccaaggaaagacaugcauuuu

SEQ ID NO: 325913 - RNA, 15 nt, Human herpesvirus 6
gccaccgucugggac

SEQ ID NO: 325914 - RNA, 20 nt, Human herpesvirus 6
gccacgacgugcugcaaggc

SEQ ID NO: 325915 - RNA, 20 nt, Human herpesvirus 6
gccacguaaccgaugcugau

SEQ ID NO: 325916 - RNA, 14 nt, Human herpesvirus 6
gccagggcauucgu

SEQ ID NO: 325917 - RNA, 18 nt, Human herpesvirus 6
gccauauccuagcauuuc

SEQ ID NO: 325918 - RNA, 17 nt, Human herpesvirus 6
gccaucaguaugccaua

SEQ ID NO: 325919 - RNA, 22 nt, Human herpesvirus 6
gccaucaguaugccauaaagaa

SEQ ID NO: 325920 - RNA, 14 nt, Human herpesvirus 6
gcccagauguggaa

SEQ ID NO: 325921 - RNA, 18 nt, Human herpesvirus 6
gcccggggacggacaggg

SEQ ID NO: 325922 - RNA, 22 nt, Human herpesvirus 6
gccgcgaacucguuaauaguua

SEQ ID NO: 325923 - RNA, 14 nt, Human herpesvirus 6
gccgcguacacgaa

SEQ ID NO: 325924 - RNA, 16 nt, Human herpesvirus 6
gccggcaccuuagccc

SEQ ID NO: 325925 - RNA, 22 nt, Human herpesvirus 6
gccguauaagucuaaugcaaag

SEQ ID NO: 325926 - RNA, 14 nt, Human herpesvirus 6
gccguccuauucag

SEQ ID NO: 325927 - RNA, 17 nt, Human herpesvirus 6
gccuacggcgccacaaa

SEQ ID NO: 325928 - RNA, 20 nt, Human herpesvirus 6
gccuauacaggcaaccgccg

SEQ ID NO: 325929 - RNA, 17 nt, Human herpesvirus 6
gccucccauguaugcau

SEQ ID NO: 325930 - RNA, 16 nt, Human herpesvirus 6
gccuccggccccagag

SEQ ID NO: 325931 - RNA, 23 nt, Human herpesvirus 6
gccuggaguacaagaccaucugc

SEQ ID NO: 325932 - RNA, 19 nt, Human herpesvirus 6
gccuggcacggugccaaag

SEQ ID NO: 325933 - RNA, 23 nt, Human herpesvirus 6
gccuggcacggugccaaaggaaa

SEQ ID NO: 325934 - RNA, 17 nt, Human herpesvirus 6
gccuucgguacagugaa

SEQ ID NO: 325935 - RNA, 19 nt, Human herpesvirus 6
gccuuguauuucaacguga

SEQ ID NO: 325936 - RNA, 18 nt, Human herpesvirus 6
gcgaaucugccgaucucu

SEQ ID NO: 325937 - RNA, 22 nt, Human herpesvirus 6
gcgaauggauaaacgugucuga

SEQ ID NO: 325938 - RNA, 12 nt, Human herpesvirus 6
gcgacaggguga

SEQ ID NO: 325939 - RNA, 19 nt, Human herpesvirus 6
gcgacucccggcccagaga

SEQ ID NO: 325940 - RNA, 15 nt, Human herpesvirus 6
gcgauuuaaacaaca

SEQ ID NO: 325941 - RNA, 22 nt, Human herpesvirus 6
gcgccauauccuagcauuuccg

SEQ ID NO: 325942 - RNA, 20 nt, Human herpesvirus 6
gcgccggaucguaaggcagu

SEQ ID NO: 325943 - RNA, 22 nt, Human herpesvirus 6
gcgcgagacagcggacagcggg

SEQ ID NO: 325944 - RNA, 21 nt, Human herpesvirus 6
gcgcgucgacgggcagucccu

SEQ ID NO: 325945 - RNA, 17 nt, Human herpesvirus 6
gcgcugcauagacugaa

SEQ ID NO: 325946 - RNA, 15 nt, Human herpesvirus 6
gcgcuggcuuauuaa

SEQ ID NO: 325947 - RNA, 21 nt, Human herpesvirus 6
gcggaauguuuguuuuuguca

SEQ ID NO: 325948 - RNA, 14 nt, Human herpesvirus 6
gcggaggggcgcga

SEQ ID NO: 325949 - RNA, 15 nt, Human herpesvirus 6
gcgggaccuggcgga

SEQ ID NO: 325950 - RNA, 22 nt, Human herpesvirus 6
gcgggacgaaacgaucgaccca

SEQ ID NO: 325951 - RNA, 21 nt, Human herpesvirus 6
gcgguuggaugccugcauaug

SEQ ID NO: 325952 - RNA, 11 nt, Human herpesvirus 6
gcguccuccau

SEQ ID NO: 325953 - RNA, 22 nt, Human herpesvirus 6
gcgucucuacgcgcguccgcuc

SEQ ID NO: 325954 - RNA, 16 nt, Human herpesvirus 6
gcgucuuugcauauua

SEQ ID NO: 325955 - RNA, 22 nt, Human herpesvirus 6
gcguggaauuuguggaacaaua

SEQ ID NO: 325956 - RNA, 20 nt, Human herpesvirus 6
gcguguacaaguagcucgua

SEQ ID NO: 325957 - RNA, 16 nt, Human herpesvirus 6
gcguugauacaucccg

SEQ ID NO: 325958 - RNA, 13 nt, Human herpesvirus 6
gcguugugcugag

SEQ ID NO: 325959 - RNA, 17 nt, Human herpesvirus 6
gcuaaacaccacuugau

SEQ ID NO: 325960 - RNA, 13 nt, Human herpesvirus 6
gcuaaaucaaaug

SEQ ID NO: 325961 - RNA, 15 nt, Human herpesvirus 6
aacaugaacauugaa

SEQ ID NO: 325962 - RNA, 19 nt, Human herpesvirus 6
aacauguauauaaauuggu

SEQ ID NO: 325963 - RNA, 17 nt, Human herpesvirus 6
aacauuccaacuuucgu

SEQ ID NO: 325964 - RNA, 22 nt, Human herpesvirus 6
aacauuuaauaaagaacaugug

SEQ ID NO: 325965 - RNA, 17 nt, Human herpesvirus 6
aacauuucuuacacaaa

SEQ ID NO: 325966 - RNA, 16 nt, Human herpesvirus 6
aaccaaagacauucaa

SEQ ID NO: 325967 - RNA, 14 nt, Human herpesvirus 6
aaccaggacagcuu

SEQ ID NO: 325968 - RNA, 20 nt, Human herpesvirus 6
aaccauagcuguccaugaga

SEQ ID NO: 325969 - RNA, 20 nt, Human herpesvirus 6
aaccauagguguuugcagau

SEQ ID NO: 325970 - RNA, 14 nt, Human herpesvirus 6
cgaaaaucgccagg

SEQ ID NO: 325971 - RNA, 16 nt, Human herpesvirus 6
cgaaaauugaugaugu

SEQ ID NO: 325972 - RNA, 17 nt, Human herpesvirus 6
cgaaacgaaagcugaug

SEQ ID NO: 325973 - RNA, 17 nt, Human herpesvirus 6
cgaaaguucaucuuuca

SEQ ID NO: 325974 - RNA, 16 nt, Human herpesvirus 6
cgaaccuagauucauu

SEQ ID NO: 325975 - RNA, 16 nt, Human herpesvirus 6
cgaaggagauuucagg

SEQ ID NO: 325976 - RNA, 12 nt, Human herpesvirus 6
cgaagucuuugg

SEQ ID NO: 325977 - RNA, 14 nt, Human herpesvirus 6
cgaagugaagaauu

SEQ ID NO: 325978 - RNA, 22 nt, Human herpesvirus 6
cgaauggauaaacgugucugaa

SEQ ID NO: 325979 - RNA, 15 nt, Human herpesvirus 6
cgacaaaacaaucag

SEQ ID NO: 325980 - RNA, 20 nt, Human herpesvirus 6
cgagaauacgcuguguuuac

SEQ ID NO: 325981 - RNA, 11 nt, Human herpesvirus 6
cgaggggacag

SEQ ID NO: 325982 - RNA, 19 nt, Human herpesvirus 6
cgauaaacuccuuacucau

SEQ ID NO: 325983 - RNA, 16 nt, Human herpesvirus 6
cgauacaccccguuga

SEQ ID NO: 325984 - RNA, 19 nt, Human herpesvirus 6
cgauauauaaaaaacugca

SEQ ID NO: 325985 - RNA, 17 nt, Human herpesvirus 6
cgaucuuauauuaaaga

SEQ ID NO: 325986 - RNA, 22 nt, Human herpesvirus 6
cgaugauuauucugucuugaua

SEQ ID NO: 325987 - RNA, 20 nt, Human herpesvirus 6
cgaugccaacgcgacagggu

SEQ ID NO: 325988 - RNA, 18 nt, Human herpesvirus 6
cgauggaagaaccaaaga

SEQ ID NO: 325989 - RNA, 14 nt, Human herpesvirus 6
cgauucagaccuca

SEQ ID NO: 325990 - RNA, 14 nt, Human herpesvirus 6
cgauugccaaaggc

SEQ ID NO: 325991 - RNA, 15 nt, Human herpesvirus 6
cgauuguucugcgau

SEQ ID NO: 325992 - RNA, 22 nt, Human herpesvirus 6
cgauuuuagaggagaaaugauc

SEQ ID NO: 325993 - RNA, 23 nt, Human herpesvirus 6
cgcaaacgugaauauaucaaauu

SEQ ID NO: 325994 - RNA, 15 nt, Human herpesvirus 6
cgcaacucuaccugg

SEQ ID NO: 325995 - RNA, 15 nt, Human herpesvirus 6
cgcaauccccacgaa

SEQ ID NO: 325996 - RNA, 16 nt, Human herpesvirus 6
cgcacacgcuaacuaa

SEQ ID NO: 325997 - RNA, 23 nt, Human herpesvirus 6
cgcaccuccuuuguauguucacu

SEQ ID NO: 325998 - RNA, 22 nt, Human herpesvirus 6
cgcacgacauccguuaguaaau

SEQ ID NO: 325999 - RNA, 12 nt, Human herpesvirus 6
cgcagacuaauc

SEQ ID NO: 326000 - RNA, 15 nt, Human herpesvirus 6
cgcauaccuacaucc

SEQ ID NO: 326001 - RNA, 22 nt, Human herpesvirus 6
cgcauaggugggucagugcuua

SEQ ID NO: 326002 - RNA, 14 nt, Human herpesvirus 6
cgcaucacacauac

SEQ ID NO: 326003 - RNA, 19 nt, Human herpesvirus 6
cgccaaaaaaauacaguau

SEQ ID NO: 326004 - RNA, 18 nt, Human herpesvirus 6
cgccaacgaaaagcaucu

SEQ ID NO: 326005 - RNA, 19 nt, Human herpesvirus 6
cgccaauuaaaguuuucau

SEQ ID NO: 326006 - RNA, 14 nt, Human herpesvirus 6
cgcccgauccgccc

SEQ ID NO: 326007 - RNA, 15 nt, Human herpesvirus 6
cgcccgauccgcccc

SEQ ID NO: 326008 - RNA, 12 nt, Human herpesvirus 6
cgccuguuccac

SEQ ID NO: 326009 - RNA, 14 nt, Human herpesvirus 6
cgccuguuccacgc

SEQ ID NO: 326010 - RNA, 14 nt, Human herpesvirus 6
cgccuuguguaucu

SEQ ID NO: 326011 - RNA, 20 nt, Human herpesvirus 6
cgcgacagggugagucacau

SEQ ID NO: 326012 - RNA, 14 nt, Human herpesvirus 6
cgcgagacaaauca

SEQ ID NO: 326013 - RNA, 17 nt, Human herpesvirus 6
cgcgcgcgacgugccac

SEQ ID NO: 326014 - RNA, 18 nt, Human herpesvirus 6
cgcggaguggaguccagu

SEQ ID NO: 326015 - RNA, 14 nt, Human herpesvirus 6
cgcguacacgaaaa

SEQ ID NO: 326016 - RNA, 13 nt, Human herpesvirus 6
cgcuccauaaccg

SEQ ID NO: 326017 - RNA, 19 nt, Human herpesvirus 6
cgcucugaaauuugagaaa

SEQ ID NO: 326018 - RNA, 15 nt, Human herpesvirus 6
cgcugcauagacuga

SEQ ID NO: 326019 - RNA, 21 nt, Human herpesvirus 6
cgcuguccgccuguuccacgc

SEQ ID NO: 326020 - RNA, 19 nt, Human herpesvirus 6
cgcuuaaagcguuugcaaa

SEQ ID NO: 326021 - RNA, 17 nt, Human herpesvirus 6
cggaaaacgaguaugaa

SEQ ID NO: 326022 - RNA, 19 nt, Human herpesvirus 6
cggaaacugaggacguucu

SEQ ID NO: 326023 - RNA, 16 nt, Human herpesvirus 6
cuaacgaaaauugaug

SEQ ID NO: 326024 - RNA, 23 nt, Human herpesvirus 6
cuaacuuuuuuuuuucuuacaac

SEQ ID NO: 326025 - RNA, 15 nt, Human herpesvirus 6
cuaagaaauuuugca

SEQ ID NO: 326026 - RNA, 23 nt, Human herpesvirus 6
cuaagugaaauucaaaauaaaua

SEQ ID NO: 326027 - RNA, 14 nt, Human herpesvirus 6
cuaauaaacugugu

SEQ ID NO: 326028 - RNA, 21 nt, Human herpesvirus 6
cuaauaaacugugucuguuca

SEQ ID NO: 326029 - RNA, 20 nt, Human herpesvirus 6
cuaauaaaugcuacccacau

SEQ ID NO: 326030 - RNA, 16 nt, Human herpesvirus 6
cuaauaauuacaauac

SEQ ID NO: 326031 - RNA, 14 nt, Human herpesvirus 6
cuaauacauauaaa

SEQ ID NO: 326032 - RNA, 21 nt, Human herpesvirus 6
cuaauacauauaaaagcuaaa

SEQ ID NO: 326033 - RNA, 21 nt, Human herpesvirus 6
cuaauuacaauuuaauauauc

SEQ ID NO: 326034 - RNA, 13 nt, Human herpesvirus 6
cuaauucacauau

SEQ ID NO: 326035 - RNA, 18 nt, Human herpesvirus 6
cuaauuucgacaauccua

SEQ ID NO: 326036 - RNA, 16 nt, Human herpesvirus 6
cuacacaccgucuuca

SEQ ID NO: 326037 - RNA, 14 nt, Human herpesvirus 6
cuacagacucccca

SEQ ID NO: 326038 - RNA, 13 nt, Human herpesvirus 6
cuaccauguugcu

SEQ ID NO: 326039 - RNA, 13 nt, Human herpesvirus 6
cuacccacaugaa

SEQ ID NO: 326040 - RNA, 18 nt, Human herpesvirus 6
cuacgccaaaacuacaaa

SEQ ID NO: 326041 - RNA, 15 nt, Human herpesvirus 6
cuacguagauauaaa

SEQ ID NO: 326042 - RNA, 22 nt, Human herpesvirus 6
cuacuaugacuuuucuaucacu

SEQ ID NO: 326043 - RNA, 17 nt, Human herpesvirus 6
cuacugaaaccaaagca

SEQ ID NO: 326044 - RNA, 20 nt, Human herpesvirus 6
cuacuucuuucuaaaaucaa

SEQ ID NO: 326045 - RNA, 15 nt, Human herpesvirus 6
cuagaugcaaaucuc

SEQ ID NO: 326046 - RNA, 12 nt, Human herpesvirus 6
cuagaugugucu

SEQ ID NO: 326047 - RNA, 15 nt, Human herpesvirus 6
cuagccuacuaugac

SEQ ID NO: 326048 - RNA, 23 nt, Human herpesvirus 6
cuaggaagaugguaucugaagac

SEQ ID NO: 326049 - RNA, 21 nt, Human herpesvirus 6
cuaggacguacagaaccagau

SEQ ID NO: 326050 - RNA, 17 nt, Human herpesvirus 6
cuaggauuagaacaauu

SEQ ID NO: 326051 - RNA, 16 nt, Human herpesvirus 6
cuaggcagaucaucaa

SEQ ID NO: 326052 - RNA, 15 nt, Human herpesvirus 6
cuagugugccuauua

SEQ ID NO: 326053 - RNA, 22 nt, Human herpesvirus 6
cuaguguuauucggaguuuuca

SEQ ID NO: 326054 - RNA, 22 nt, Human herpesvirus 6
cuauaaacaauuguauucuuga

SEQ ID NO: 326055 - RNA, 21 nt, Human herpesvirus 6
cuauaaauucucuggaugcuu

SEQ ID NO: 326056 - RNA, 16 nt, Human herpesvirus 6
cuauagucaauguugu

SEQ ID NO: 326057 - RNA, 17 nt, Human herpesvirus 6
cuauauccaaagacuca

SEQ ID NO: 326058 - RNA, 17 nt, Human herpesvirus 6
cuauccgcuaaaacgac

SEQ ID NO: 326059 - RNA, 19 nt, Human herpesvirus 6
cuaucgucuacccuaucga

SEQ ID NO: 326060 - RNA, 17 nt, Human herpesvirus 6
cuaucuuuuucuguguu

SEQ ID NO: 326061 - RNA, 14 nt, Human herpesvirus 6
cuaugaagauuuga

SEQ ID NO: 326062 - RNA, 18 nt, Human herpesvirus 6
cuaugcaaacgaaaccau

SEQ ID NO: 326063 - RNA, 19 nt, Human herpesvirus 6
cuaugcaaacgaaaccauc

SEQ ID NO: 326064 - RNA, 19 nt, Human herpesvirus 6
cuaugucguucuuaacuca

SEQ ID NO: 326065 - RNA, 22 nt, Human herpesvirus 6
cuaugucuagaugcaaaucuca

SEQ ID NO: 326066 - RNA, 15 nt, Human herpesvirus 6
cuaugugcauuccga

SEQ ID NO: 326067 - RNA, 14 nt, Human herpesvirus 6
cuauuaacacguac

SEQ ID NO: 326068 - RNA, 18 nt, Human herpesvirus 6
cuauuaacacguacauaa

SEQ ID NO: 326069 - RNA, 18 nt, Human herpesvirus 6
cuauuacuauauauugga

SEQ ID NO: 326070 - RNA, 20 nt, Human herpesvirus 6
cuauuacuauauauuggaau

SEQ ID NO: 326071 - RNA, 21 nt, Human herpesvirus 6
cuauuauaagcaaacauguau

SEQ ID NO: 326072 - RNA, 21 nt, Human herpesvirus 6
cuauugacauaggaauucuua

SEQ ID NO: 326073 - RNA, 16 nt, Human herpesvirus 6
gagagauuuacuguuu

SEQ ID NO: 326074 - RNA, 13 nt, Human herpesvirus 6
gagagcgugcaca

SEQ ID NO: 326075 - RNA, 19 nt, Human herpesvirus 6
gagaggagcauucacauaa

SEQ ID NO: 326076 - RNA, 20 nt, Human herpesvirus 6
gagauguuaguauacagaau

SEQ ID NO: 326077 - RNA, 17 nt, Human herpesvirus 6
gagauguucuaaaggau

SEQ ID NO: 326078 - RNA, 18 nt, Human herpesvirus 6
gagcccucguccaaauca

SEQ ID NO: 326079 - RNA, 14 nt, Human herpesvirus 6
gagcgaaaugcaau

SEQ ID NO: 326080 - RNA, 15 nt, Human herpesvirus 6
gagcgaaaugcaauc

SEQ ID NO: 326081 - RNA, 13 nt, Human herpesvirus 6
gagcgagaucuau

SEQ ID NO: 326082 - RNA, 20 nt, Human herpesvirus 6
gagcuacgccaaaacuacaa

SEQ ID NO: 326083 - RNA, 17 nt, Human herpesvirus 6
gagcuuucaguauuaac

SEQ ID NO: 326084 - RNA, 21 nt, Human herpesvirus 6
gagcuuuuaaagaaucauuac

SEQ ID NO: 326085 - RNA, 18 nt, Human herpesvirus 6
gaggaaauaaaaacaccu

SEQ ID NO: 326086 - RNA, 24 nt, Human herpesvirus 6
gaggaacuggugagaaauaacuua

SEQ ID NO: 326087 - RNA, 18 nt, Human herpesvirus 6
gaggauccauucuagaua

SEQ ID NO: 326088 - RNA, 23 nt, Human herpesvirus 6
gaggggaacacgccggggaccga

SEQ ID NO: 326089 - RNA, 12 nt, Human herpesvirus 6
gaggugcugaug

SEQ ID NO: 326090 - RNA, 14 nt, Human herpesvirus 6
gagguuaucuggau

SEQ ID NO: 326091 - RNA, 19 nt, Human herpesvirus 6
gaguaaaacgcucacauca

SEQ ID NO: 326092 - RNA, 15 nt, Human herpesvirus 6
gaguaauacaucauu

SEQ ID NO: 326093 - RNA, 16 nt, Human herpesvirus 6
gaguauauaaaaaacu

SEQ ID NO: 326094 - RNA, 22 nt, Human herpesvirus 6
gaguauauaaaaaacuaaaaca

SEQ ID NO: 326095 - RNA, 16 nt, Human herpesvirus 6
gaguaugaaacuuaca

SEQ ID NO: 326096 - RNA, 20 nt, Human herpesvirus 6
gaguaugacuguguguugaa

SEQ ID NO: 326097 - RNA, 14 nt, Human herpesvirus 6
gagugauugaugaa

SEQ ID NO: 326098 - RNA, 22 nt, Human herpesvirus 6
gagugcaacaaaaagcuuuaaa

SEQ ID NO: 326099 - RNA, 13 nt, Human herpesvirus 6
gaguggagauaga

SEQ ID NO: 326100 - RNA, 15 nt, Human herpesvirus 6
gaguguuaugaucua

SEQ ID NO: 326101 - RNA, 16 nt, Human herpesvirus 6
gaguugacguuccaaa

SEQ ID NO: 326102 - RNA, 12 nt, Human herpesvirus 6
gaguuucagguu

SEQ ID NO: 326103 - RNA, 17 nt, Human herpesvirus 6
gaguuuuuaucggugau

SEQ ID NO: 326104 - RNA, 17 nt, Human herpesvirus 6
gauaaacuguaugcaau

SEQ ID NO: 326105 - RNA, 15 nt, Human herpesvirus 6
gauaauuaugcauuu

SEQ ID NO: 326106 - RNA, 20 nt, Human herpesvirus 6
gauacaauaacaauuauuca

SEQ ID NO: 326107 - RNA, 13 nt, Human herpesvirus 6
gauacaugcaauu

SEQ ID NO: 326108 - RNA, 22 nt, Human herpesvirus 6
gauacauguuuguugugaucuu

SEQ ID NO: 326109 - RNA, 15 nt, Human herpesvirus 6
gauacguauauugug

SEQ ID NO: 326110 - RNA, 13 nt, Human herpesvirus 6
gauacuacacaaa

SEQ ID NO: 326111 - RNA, 13 nt, Human herpesvirus 6
gauagccauacca

SEQ ID NO: 326112 - RNA, 22 nt, Human herpesvirus 6
gauauaauuccgacuguguuac

SEQ ID NO: 326113 - RNA, 17 nt, Human herpesvirus 6
gauauaguuuuugcuua

SEQ ID NO: 326114 - RNA, 15 nt, Human herpesvirus 6
gauauauacuuucaa

SEQ ID NO: 326115 - RNA, 15 nt, Human herpesvirus 6
gauauggaugaucac

SEQ ID NO: 326116 - RNA, 16 nt, Human herpesvirus 6
gauauggaugaucacu

SEQ ID NO: 326117 - RNA, 20 nt, Human herpesvirus 6
gauauuauuguugucgugau

SEQ ID NO: 326118 - RNA, 16 nt, Human herpesvirus 6
gaucaacagauggugc

SEQ ID NO: 326119 - RNA, 22 nt, Human herpesvirus 6
gaucaauauaucgucuacggca

SEQ ID NO: 326120 - RNA, 23 nt, Human herpesvirus 6
gaucagauugcggacauggugaa

SEQ ID NO: 326121 - RNA, 22 nt, Human herpesvirus 6
gaucaucaaaucggacaaugca

SEQ ID NO: 326122 - RNA, 15 nt, Human herpesvirus 6
gauccaaaagauuac

SEQ ID NO: 326123 - RNA, 13 nt, Human herpesvirus 6
gaucgcaccaucu

SEQ ID NO: 326124 - RNA, 15 nt, Human herpesvirus 6
gaucgcaccaucugu

SEQ ID NO: 326125 - RNA, 20 nt, Human herpesvirus 6
gaucuaaauuucuacaaaaa

SEQ ID NO: 326126 - RNA, 17 nt, Human herpesvirus 6
gaucuaugggagugauu

SEQ ID NO: 326127 - RNA, 12 nt, Human herpesvirus 6
gaucuauuucuc

SEQ ID NO: 326128 - RNA, 16 nt, Human herpesvirus 6
gaucucaguagauuac

SEQ ID NO: 326129 - RNA, 14 nt, Human herpesvirus 6
gaucugcuugauau

SEQ ID NO: 326130 - RNA, 18 nt, Human herpesvirus 6
gaugacagcgauacaaua

SEQ ID NO: 326131 - RNA, 21 nt, Human herpesvirus 6
gaugacagcgauacaauaaca

SEQ ID NO: 326132 - RNA, 14 nt, Human herpesvirus 6
gaugagcgucagag

SEQ ID NO: 326133 - RNA, 17 nt, Human herpesvirus 6
gaugaguaauacaucau

SEQ ID NO: 326134 - RNA, 23 nt, Human herpesvirus 6
gaugauuugucgaaucagaucac

SEQ ID NO: 326135 - RNA, 16 nt, Human herpesvirus 6
gaugcaucugccauau

SEQ ID NO: 326136 - RNA, 18 nt, Human herpesvirus 6
gaugcaucugccauauca

SEQ ID NO: 326137 - RNA, 12 nt, Human herpesvirus 6
gaugcugaugaa

SEQ ID NO: 326138 - RNA, 18 nt, Human herpesvirus 6
gauguacucauccaagac

SEQ ID NO: 326139 - RNA, 20 nt, Human herpesvirus 6
gauguauggagauguuagua

SEQ ID NO: 326140 - RNA, 22 nt, Human herpesvirus 6
gaugucucgggggcauuagucu

SEQ ID NO: 326141 - RNA, 18 nt, Human herpesvirus 6
gauuacaaaacaaucuau

SEQ ID NO: 326142 - RNA, 20 nt, Human herpesvirus 6
gauuacacuuucuuguagua

SEQ ID NO: 326143 - RNA, 17 nt, Human herpesvirus 6
gauuacggcaacauacc

SEQ ID NO: 326144 - RNA, 21 nt, Human herpesvirus 6
gauuacgucuuuuugugcuuu

SEQ ID NO: 326145 - RNA, 19 nt, Human herpesvirus 6
gauuauaucgcaagcaaaa

SEQ ID NO: 326146 - RNA, 15 nt, Human herpesvirus 6
gauuaucauagacaa

SEQ ID NO: 326147 - RNA, 17 nt, Human herpesvirus 6
gauucagaaaguucuau

SEQ ID NO: 326148 - RNA, 15 nt, Human herpesvirus 6
gauucagagugaauu

SEQ ID NO: 326149 - RNA, 15 nt, Human herpesvirus 6
gauucgguaucgguu

SEQ ID NO: 326150 - RNA, 16 nt, Human herpesvirus 6
gauucugcauuuauau

SEQ ID NO: 326151 - RNA, 17 nt, Human herpesvirus 6
gauugcggacaugguga

SEQ ID NO: 326152 - RNA, 15 nt, Human herpesvirus 6
gauuguaauauucaa

SEQ ID NO: 326153 - RNA, 18 nt, Human herpesvirus 6
gauuguuaauauuagcca

SEQ ID NO: 326154 - RNA, 15 nt, Human herpesvirus 6
gcuaaauugauaaua

SEQ ID NO: 326155 - RNA, 22 nt, Human herpesvirus 6
gcuaccgcuuuuuagcacguua

SEQ ID NO: 326156 - RNA, 17 nt, Human herpesvirus 6
gcucaaccuaaugacua

SEQ ID NO: 326157 - RNA, 14 nt, Human herpesvirus 6
gcucacaauauuuc

SEQ ID NO: 326158 - RNA, 18 nt, Human herpesvirus 6
gcuccgcgccccucgccc

SEQ ID NO: 326159 - RNA, 12 nt, Human herpesvirus 6
gcucgcauuucu

SEQ ID NO: 326160 - RNA, 15 nt, Human herpesvirus 6
gcugaacuguuucca

SEQ ID NO: 326161 - RNA, 13 nt, Human herpesvirus 6
gcugacuauucag

SEQ ID NO: 326162 - RNA, 23 nt, Human herpesvirus 6
gcugauccugacugguauccaau

SEQ ID NO: 326163 - RNA, 12 nt, Human herpesvirus 6
gcuggaugcuga

SEQ ID NO: 326164 - RNA, 20 nt, Human herpesvirus 6
gcuguaaauauucauauuau

SEQ ID NO: 326165 - RNA, 19 nt, Human herpesvirus 6
gcugugacgaagauggaug

SEQ ID NO: 326166 - RNA, 13 nt, Human herpesvirus 6
gcuguguuuacau

SEQ ID NO: 326167 - RNA, 13 nt, Human herpesvirus 6
gcuuagucuguaa

SEQ ID NO: 326168 - RNA, 21 nt, Human herpesvirus 6
gcuucgcaagacgccacgggc

SEQ ID NO: 326169 - RNA, 17 nt, Human herpesvirus 6
gcuucuauauccaaaga

SEQ ID NO: 326170 - RNA, 23 nt, Human herpesvirus 6
gcuucuuagaaccgaucugugag

SEQ ID NO: 326171 - RNA, 18 nt, Human herpesvirus 6
gcuugaugcauguggcaa

SEQ ID NO: 326172 - RNA, 15 nt, Human herpesvirus 6
gcuugcgauacaugu

SEQ ID NO: 326173 - RNA, 22 nt, Human herpesvirus 6
gcuuggccuucgguacagugaa

SEQ ID NO: 326174 - RNA, 17 nt, Human herpesvirus 6
gcuuguggaucaucucc

SEQ ID NO: 326175 - RNA, 19 nt, Human herpesvirus 6
gcuuuaucuagccaauuca

SEQ ID NO: 326176 - RNA, 17 nt, Human herpesvirus 6
gcuuuauucccaugacg

SEQ ID NO: 326177 - RNA, 23 nt, Human herpesvirus 6
gcuuucaaaaccgucaaccgcca

SEQ ID NO: 326178 - RNA, 14 nt, Human herpesvirus 6
gcuuucaguauuaa

SEQ ID NO: 326179 - RNA, 15 nt, Human herpesvirus 6
gcuuucauccaugaa

SEQ ID NO: 326180 - RNA, 21 nt, Human herpesvirus 6
gcuuucucuuuuuaauuccaa

SEQ ID NO: 326181 - RNA, 23 nt, Human herpesvirus 6
gcuuuuccucaauaugauauaug

SEQ ID NO: 326182 - RNA, 23 nt, Human herpesvirus 6
gcuuuuuaaaaaaacacuagccu

SEQ ID NO: 326183 - RNA, 15 nt, Human herpesvirus 6
ggaaaaaugaaauuu

SEQ ID NO: 326184 - RNA, 12 nt, Human herpesvirus 6
ggaaaacuauua

SEQ ID NO: 326185 - RNA, 13 nt, Human herpesvirus 6
ggaaaauugcaaa

SEQ ID NO: 326186 - RNA, 14 nt, Human herpesvirus 6
ggaaacaugaacau

SEQ ID NO: 326187 - RNA, 23 nt, Human herpesvirus 6
ggaaacgacggaacgauuugcag

SEQ ID NO: 326188 - RNA, 16 nt, Human herpesvirus 6
ggaaagacaugcauuu

SEQ ID NO: 326189 - RNA, 18 nt, Human herpesvirus 6
ggaaauaaaaaauauuaa

SEQ ID NO: 326190 - RNA, 17 nt, Human herpesvirus 6
ggaaauaaaaacaccuc

SEQ ID NO: 326191 - RNA, 21 nt, Human herpesvirus 6
ggaacauaaacuuagaucuau

SEQ ID NO: 326192 - RNA, 14 nt, Human herpesvirus 6
ggaacauaauugca

SEQ ID NO: 326193 - RNA, 16 nt, Human herpesvirus 6
ggaacgauaugcugcc

SEQ ID NO: 326194 - RNA, 11 nt, Human herpesvirus 6
ggaacugcugg

SEQ ID NO: 326195 - RNA, 21 nt, Human herpesvirus 6
ggaacugcuggcugagauuca

SEQ ID NO: 326196 - RNA, 21 nt, Human herpesvirus 6
ggaagaaacggacacgcgcag

SEQ ID NO: 326197 - RNA, 23 nt, Human herpesvirus 6
ggaagaacacgaagacgaagagg

SEQ ID NO: 326198 - RNA, 12 nt, Human herpesvirus 6
ggaagaagauac

SEQ ID NO: 326199 - RNA, 13 nt, Human herpesvirus 6
ggaagggcucuau

SEQ ID NO: 326200 - RNA, 14 nt, Human herpesvirus 6
ggaagggcucuauu

SEQ ID NO: 326201 - RNA, 16 nt, Human herpesvirus 6
ggaauacguuaguuuu

SEQ ID NO: 326202 - RNA, 23 nt, Human herpesvirus 6
ggaauguuuguuuuugucagaua

SEQ ID NO: 326203 - RNA, 21 nt, Human herpesvirus 6
ggacaaaguucaguaacauuu

SEQ ID NO: 326204 - RNA, 16 nt, Human herpesvirus 6
ggacacgcgcagugga

SEQ ID NO: 326205 - RNA, 22 nt, Human herpesvirus 6
ggacagugauuagaauguuugg

SEQ ID NO: 326206 - RNA, 16 nt, Human herpesvirus 6
ggaccaagcaccuaau

SEQ ID NO: 326207 - RNA, 13 nt, Human herpesvirus 6
ggaccaggacaau

SEQ ID NO: 326208 - RNA, 14 nt, Human herpesvirus 6
ggacccacaggcgg

SEQ ID NO: 326209 - RNA, 13 nt, Human herpesvirus 6
ggacggggacgac

SEQ ID NO: 326210 - RNA, 13 nt, Human herpesvirus 6
ggagaacgggcaa

SEQ ID NO: 326211 - RNA, 17 nt, Human herpesvirus 6
ggagcauucacauaaga

SEQ ID NO: 326212 - RNA, 22 nt, Human herpesvirus 6
ggagggagugaagagauguuuc

SEQ ID NO: 326213 - RNA, 21 nt, Human herpesvirus 6
ggaguaaaacgcucacaucau

SEQ ID NO: 326214 - RNA, 22 nt, Human herpesvirus 6
ggaguaugacuguguguugaau

SEQ ID NO: 326215 - RNA, 14 nt, Human herpesvirus 6
ggagugauugugac

SEQ ID NO: 326216 - RNA, 15 nt, Human herpesvirus 6
ggaguggaguccagu

SEQ ID NO: 326217 - RNA, 12 nt, Human herpesvirus 6
ggaguugcagug

SEQ ID NO: 326218 - RNA, 13 nt, Human herpesvirus 6
ggaucgaacucuu

SEQ ID NO: 326219 - RNA, 20 nt, Human herpesvirus 6
ggaucgggcccggggacgga

SEQ ID NO: 326220 - RNA, 15 nt, Human herpesvirus 6
ggaucguaaggcagu

SEQ ID NO: 326221 - RNA, 14 nt, Human herpesvirus 6
ggaucugagugaau

SEQ ID NO: 326222 - RNA, 22 nt, Human herpesvirus 6
ggaugaagaaaaaaacugugaa

SEQ ID NO: 326223 - RNA, 13 nt, Human herpesvirus 6
ggaugagcuuuaa

SEQ ID NO: 326224 - RNA, 22 nt, Human herpesvirus 6
ggaugucggucagacagugagu

SEQ ID NO: 326225 - RNA, 12 nt, Human herpesvirus 6
ggcaacauaccc

SEQ ID NO: 326226 - RNA, 15 nt, Human herpesvirus 6
ggcaaccugaaacuc

SEQ ID NO: 326227 - RNA, 13 nt, Human herpesvirus 6
ggcaacugaauuu

SEQ ID NO: 326228 - RNA, 15 nt, Human herpesvirus 6
ggcacacauguauuu

SEQ ID NO: 326229 - RNA, 15 nt, Human herpesvirus 6
ggcauagcagcaaua

SEQ ID NO: 326230 - RNA, 18 nt, Human herpesvirus 6
ggcaucagaauccagaaa

SEQ ID NO: 326231 - RNA, 17 nt, Human herpesvirus 6
ggcauuacauuaugaag

SEQ ID NO: 326232 - RNA, 21 nt, Human herpesvirus 6
ggcccagagacgguguuuuca

SEQ ID NO: 326233 - RNA, 23 nt, Human herpesvirus 6
ggcccauccaccuucccucccac

SEQ ID NO: 326234 - RNA, 17 nt, Human herpesvirus 6
ggccuccgccacugcga

SEQ ID NO: 326235 - RNA, 18 nt, Human herpesvirus 6
ggccuucgguacagugaa

SEQ ID NO: 326236 - RNA, 21 nt, Human herpesvirus 6
ggcgauacguuucuguccaau

SEQ ID NO: 326237 - RNA, 20 nt, Human herpesvirus 6
ggcgaugaccgcuaaauuga

SEQ ID NO: 326238 - RNA, 13 nt, Human herpesvirus 6
ggcggcgaccgca

SEQ ID NO: 326239 - RNA, 19 nt, Human herpesvirus 6
ggcgguauaacuuccggaa

SEQ ID NO: 326240 - RNA, 16 nt, Human herpesvirus 6
ggcuaucgcaaugauu

SEQ ID NO: 326241 - RNA, 20 nt, Human herpesvirus 6
ggcucgugauccuacaaggg

SEQ ID NO: 326242 - RNA, 20 nt, Human herpesvirus 6
ggcucuaugaagauuugaca

SEQ ID NO: 326243 - RNA, 13 nt, Human herpesvirus 6
ggcugcagccuaa

SEQ ID NO: 326244 - RNA, 17 nt, Human herpesvirus 6
ggcuuaauaagucuuua

SEQ ID NO: 326245 - RNA, 20 nt, Human herpesvirus 6
ggcuucaagaaugccgugaa

SEQ ID NO: 326246 - RNA, 18 nt, Human herpesvirus 6
gggcacaucuauguguau

SEQ ID NO: 326247 - RNA, 14 nt, Human herpesvirus 6
gggcggggcggacg

SEQ ID NO: 326248 - RNA, 22 nt, Human herpesvirus 6
gggcuuuaaaacuuacuaaugu

SEQ ID NO: 326249 - RNA, 24 nt, Human herpesvirus 6
ggggaacuacauauaaauccgaua

SEQ ID NO: 326250 - RNA, 13 nt, Human herpesvirus 6
ggggcauuagucu

SEQ ID NO: 326251 - RNA, 12 nt, Human herpesvirus 6
gggggacgggcg

SEQ ID NO: 326252 - RNA, 16 nt, Human herpesvirus 6
gggugugcauugugac

SEQ ID NO: 326253 - RNA, 20 nt, Human herpesvirus 6
ggguuuguuuucuacauuuu

SEQ ID NO: 326254 - RNA, 22 nt, Human herpesvirus 6
ggguuuuagagaaaagugcaag

SEQ ID NO: 326255 - RNA, 20 nt, Human herpesvirus 6
gguaagcagcagaacaacuu

SEQ ID NO: 326256 - RNA, 14 nt, Human herpesvirus 6
gguacacaauauac

SEQ ID NO: 326257 - RNA, 20 nt, Human herpesvirus 6
ggucacguauaccauuccca

SEQ ID NO: 326258 - RNA, 15 nt, Human herpesvirus 6
ggucagacagugagu

SEQ ID NO: 326259 - RNA, 15 nt, Human herpesvirus 6
ggucagauaguugau

SEQ ID NO: 326260 - RNA, 14 nt, Human herpesvirus 6
gguccaaggauuau

SEQ ID NO: 326261 - RNA, 11 nt, Human herpesvirus 6
ggucuugcuaa

SEQ ID NO: 326262 - RNA, 12 nt, Human herpesvirus 6
ggugaaaugaau

SEQ ID NO: 326263 - RNA, 13 nt, Human herpesvirus 6
ggugaaaugaaug

SEQ ID NO: 326264 - RNA, 12 nt, Human herpesvirus 6
ggugccaaagga

SEQ ID NO: 326265 - RNA, 21 nt, Human herpesvirus 6
ggugcgaucgagcaacagcgu

SEQ ID NO: 326266 - RNA, 16 nt, Human herpesvirus 6
ggugcgucuggaugaa

SEQ ID NO: 326267 - RNA, 17 nt, Human herpesvirus 6
ggugcuauuucuguuac

SEQ ID NO: 326268 - RNA, 19 nt, Human herpesvirus 6
gguggcaucagaauccaga

SEQ ID NO: 326269 - RNA, 19 nt, Human herpesvirus 6
gguggguuauagaugacug

SEQ ID NO: 326270 - RNA, 20 nt, Human herpesvirus 6
gguuagguuuaauaguuuua

SEQ ID NO: 326271 - RNA, 22 nt, Human herpesvirus 6
guugaagaucuuuauggaggga

SEQ ID NO: 326272 - RNA, 14 nt, Human herpesvirus 6
guugacguuccaaa

SEQ ID NO: 326273 - RNA, 17 nt, Human herpesvirus 6
guugacguuccaaagua

SEQ ID NO: 326274 - RNA, 22 nt, Human herpesvirus 6
guugacuuuuaaaagauuugau

SEQ ID NO: 326275 - RNA, 17 nt, Human herpesvirus 6
guugagaaugauuuuaa

SEQ ID NO: 326276 - RNA, 15 nt, Human herpesvirus 6
guugaugauuuacac

SEQ ID NO: 326277 - RNA, 12 nt, Human herpesvirus 6
guugcacuacuu

SEQ ID NO: 326278 - RNA, 19 nt, Human herpesvirus 6
guugccaguaaaucuucau

SEQ ID NO: 326279 - RNA, 14 nt, Human herpesvirus 6
guugcuuauaugca

SEQ ID NO: 326280 - RNA, 22 nt, Human herpesvirus 6
guuggaugccugcauaugcaga

SEQ ID NO: 326281 - RNA, 12 nt, Human herpesvirus 6
guuguacaggag

SEQ ID NO: 326282 - RNA, 14 nt, Human herpesvirus 6
guuguaugugugau

SEQ ID NO: 326283 - RNA, 15 nt, Human herpesvirus 6
guugugucaugauua

SEQ ID NO: 326284 - RNA, 11 nt, Human herpesvirus 6
guuguguuaca

SEQ ID NO: 326285 - RNA, 15 nt, Human herpesvirus 6
guuguguuuacauau

SEQ ID NO: 326286 - RNA, 13 nt, Human herpesvirus 6
guuguucuugggu

SEQ ID NO: 326287 - RNA, 23 nt, Human herpesvirus 6
guuuaacguagcgaaccaggaca

SEQ ID NO: 326288 - RNA, 13 nt, Human herpesvirus 6
guuuacugugauu

SEQ ID NO: 326289 - RNA, 13 nt, Human herpesvirus 6
guuuauugcacgu

SEQ ID NO: 326290 - RNA, 17 nt, Human herpesvirus 6
guuuauugccaauagau

SEQ ID NO: 326291 - RNA, 23 nt, Human herpesvirus 6
guuuauuuugucagucaacgcaa

SEQ ID NO: 326292 - RNA, 18 nt, Human herpesvirus 6
guuucaaauagucgcaca

SEQ ID NO: 326293 - RNA, 18 nt, Human herpesvirus 6
guuucuguugaauuccag

SEQ ID NO: 326294 - RNA, 18 nt, Human herpesvirus 6
guuucuuacguaugugaa

SEQ ID NO: 326295 - RNA, 13 nt, Human herpesvirus 6
guuugccaaagcu

SEQ ID NO: 326296 - RNA, 17 nt, Human herpesvirus 6
guuuggugugacauuca

SEQ ID NO: 326297 - RNA, 20 nt, Human herpesvirus 6
guuugucucgcaaacagcuu

SEQ ID NO: 326298 - RNA, 16 nt, Human herpesvirus 6
guuuuagaaacauuug

SEQ ID NO: 326299 - RNA, 17 nt, Human herpesvirus 6
guuuuagaaacauuugc

SEQ ID NO: 326300 - RNA, 14 nt, Human herpesvirus 6
guuuucacaaagaa

SEQ ID NO: 326301 - RNA, 23 nt, Human herpesvirus 6
guuuucccaccuaauaaacugug

SEQ ID NO: 326302 - RNA, 15 nt, Human herpesvirus 6
guuuuccgaaaucaa

SEQ ID NO: 326303 - RNA, 19 nt, Human herpesvirus 6
guuuucgcuugaugcaugu

SEQ ID NO: 326304 - RNA, 18 nt, Human herpesvirus 6
guuuugggaaaucuggca

SEQ ID NO: 326305 - RNA, 22 nt, Human herpesvirus 6
guuuuuacuugauaaacuguau

SEQ ID NO: 326306 - RNA, 22 nt, Human herpesvirus 6
guuuuuguguucagucuaugca

SEQ ID NO: 326307 - RNA, 20 nt, Human herpesvirus 6
guuuuuuaacgaaaaccauu

SEQ ID NO: 326308 - RNA, 15 nt, Human herpesvirus 6
guuuuuuaugcaaac

SEQ ID NO: 326309 - RNA, 17 nt, Human herpesvirus 6
guuuuuuguaccagcau

SEQ ID NO: 326310 - RNA, 18 nt, Human herpesvirus 6
guuuuuuuuaacaguguc

SEQ ID NO: 326311 - RNA, 15 nt, Human herpesvirus 6
uaaaaaaacauucua

SEQ ID NO: 326312 - RNA, 13 nt, Human herpesvirus 6
uaaaaaacugcau

SEQ ID NO: 326313 - RNA, 16 nt, Human herpesvirus 6
uaaaaaaucuugucac

SEQ ID NO: 326314 - RNA, 23 nt, Human herpesvirus 6
uaaaaacuaauucggaacauugu

SEQ ID NO: 326315 - RNA, 19 nt, Human herpesvirus 6
uaaaaagggagaugaaaca

SEQ ID NO: 326316 - RNA, 22 nt, Human herpesvirus 6
uaaaaagugcuuuaucuagcca

SEQ ID NO: 326317 - RNA, 23 nt, Human herpesvirus 6
uaaaaagugcuuuaucuagccaa

SEQ ID NO: 326318 - RNA, 23 nt, Human herpesvirus 6
uaaaaauaucgcgcaaaccauaa

SEQ ID NO: 326319 - RNA, 22 nt, Human herpesvirus 6
uaaaaauuauccuggcgaugca

SEQ ID NO: 326320 - RNA, 21 nt, Human herpesvirus 6
uaaaaauuuuagccgaugaua

SEQ ID NO: 326321 - RNA, 16 nt, Human herpesvirus 6
uaaaacaaaacauauc

SEQ ID NO: 326322 - RNA, 12 nt, Human herpesvirus 6
uaaaacaagaca

SEQ ID NO: 326323 - RNA, 14 nt, Human herpesvirus 6
uaaaacaagacaga

SEQ ID NO: 326324 - RNA, 15 nt, Human herpesvirus 6
uaaaacaagacagac

SEQ ID NO: 326325 - RNA, 16 nt, Human herpesvirus 6
uaaaacaucagaugaa

SEQ ID NO: 326326 - RNA, 16 nt, Human herpesvirus 6
uaaaacgcucacauca

SEQ ID NO: 326327 - RNA, 19 nt, Human herpesvirus 6
uaaaacuauugacauagga

SEQ ID NO: 326328 - RNA, 13 nt, Human herpesvirus 6
uaaaagcuaaauc

SEQ ID NO: 326329 - RNA, 14 nt, Human herpesvirus 6
uaaaaggaauagca

SEQ ID NO: 326330 - RNA, 14 nt, Human herpesvirus 6
uaaaagggaagauu

SEQ ID NO: 326331 - RNA, 18 nt, Human herpesvirus 6
uaaaauaauuacauuaaa

SEQ ID NO: 326332 - RNA, 15 nt, Human herpesvirus 6
uaaaauggcugugcu

SEQ ID NO: 326333 - RNA, 16 nt, Human herpesvirus 6
uaaaauguguaguggu

SEQ ID NO: 326334 - RNA, 18 nt, Human herpesvirus 6
uaaaauuuauggacaauu

SEQ ID NO: 326335 - RNA, 18 nt, Human herpesvirus 6
uaaacauuaauuuauuaa

SEQ ID NO: 326336 - RNA, 21 nt, Human herpesvirus 6
uaaacggaauuaacaauucuc

SEQ ID NO: 326337 - RNA, 15 nt, Human herpesvirus 6
uaaacuaacauagcg

SEQ ID NO: 326338 - RNA, 14 nt, Human herpesvirus 6
uaaacuguaugcaa

SEQ ID NO: 326339 - RNA, 14 nt, Human herpesvirus 6
uaaacuuaaaacaa

SEQ ID NO: 326340 - RNA, 21 nt, Human herpesvirus 6
uaaagaacaugugacacgauu

SEQ ID NO: 326341 - RNA, 21 nt, Human herpesvirus 6
uaaagauagaauaaugccuaa

SEQ ID NO: 326342 - RNA, 16 nt, Human herpesvirus 6
uaaagcgugugauuca

SEQ ID NO: 326343 - RNA, 16 nt, Human herpesvirus 6
uaaagucagagauuau

SEQ ID NO: 326344 - RNA, 16 nt, Human herpesvirus 6
uaaaguuauauucuuc

SEQ ID NO: 326345 - RNA, 15 nt, Human herpesvirus 6
uaaauaaaugaauag

SEQ ID NO: 326346 - RNA, 21 nt, Human herpesvirus 6
uaaauacauucacauuaccuc

SEQ ID NO: 326347 - RNA, 13 nt, Human herpesvirus 6
uaaauacuagcua

SEQ ID NO: 326348 - RNA, 20 nt, Human herpesvirus 6
uaaauaggugaaauggcuaa

SEQ ID NO: 326349 - RNA, 13 nt, Human herpesvirus 6
uaaauauguugaa

SEQ ID NO: 326350 - RNA, 17 nt, Human herpesvirus 6
uaaaucaucaacguaag

SEQ ID NO: 326351 - RNA, 18 nt, Human herpesvirus 6
uaaaucgcgccauauccu

SEQ ID NO: 326352 - RNA, 12 nt, Human herpesvirus 6
uaaaucuucauu

SEQ ID NO: 326353 - RNA, 23 nt, Human herpesvirus 6
uaaaugcuacccacaugaaauca

SEQ ID NO: 326354 - RNA, 17 nt, Human herpesvirus 6
uaaauggcauacauuuu

SEQ ID NO: 326355 - RNA, 14 nt, Human herpesvirus 6
uaaaugguagcuau

SEQ ID NO: 326356 - RNA, 18 nt, Human herpesvirus 6
uaaaugguagcuauuaug

SEQ ID NO: 326357 - RNA, 20 nt, Human herpesvirus 6
uaaauguagcauacgacaaa

SEQ ID NO: 326358 - RNA, 15 nt, Human herpesvirus 6
uaaaugucaaagaaa

SEQ ID NO: 326359 - RNA, 15 nt, Human herpesvirus 6
uaaauugguggacaa

SEQ ID NO: 326360 - RNA, 18 nt, Human herpesvirus 6
uaaauuuaccaccaguca

SEQ ID NO: 326361 - RNA, 20 nt, Human herpesvirus 6
uaacaaaaugguuaugacaa

SEQ ID NO: 326362 - RNA, 17 nt, Human herpesvirus 6
uaacaacaaccacagca

SEQ ID NO: 326363 - RNA, 14 nt, Human herpesvirus 6
uaacaagcacugaa

SEQ ID NO: 326364 - RNA, 22 nt, Human herpesvirus 6
uaacaauuauucaacauuacuc

SEQ ID NO: 326365 - RNA, 14 nt, Human herpesvirus 6
uaacacgugugaca

SEQ ID NO: 326366 - RNA, 18 nt, Human herpesvirus 6
uaacaguacuaugauuua

SEQ ID NO: 326367 - RNA, 22 nt, Human herpesvirus 6
uaacauagaaaaaugagacuua

SEQ ID NO: 326368 - RNA, 22 nt, Human herpesvirus 6
uaacauccaaaauacacuaaca

SEQ ID NO: 326369 - RNA, 18 nt, Human herpesvirus 6
uaacauuaaaauagccag

SEQ ID NO: 326370 - RNA, 22 nt, Human herpesvirus 6
uaaccauucugcaaaaggugga

SEQ ID NO: 326371 - RNA, 16 nt, Human herpesvirus 6
uaacccuaacccuaac

SEQ ID NO: 326372 - RNA, 20 nt, Human herpesvirus 6
uaaccggaaaaaugaaauuu

SEQ ID NO: 326373 - RNA, 23 nt, Human herpesvirus 6
uaaccggaaaagagaaguuuaca

SEQ ID NO: 326374 - RNA, 21 nt, Human herpesvirus 6
uaaccucaucgcgacuaaaaa

SEQ ID NO: 326375 - RNA, 15 nt, Human herpesvirus 6
uaacgaaaauugaug

SEQ ID NO: 326376 - RNA, 16 nt, Human herpesvirus 6
uaacgcagcaacaauc

SEQ ID NO: 326377 - RNA, 15 nt, Human herpesvirus 6
uaacuacaucaacua

SEQ ID NO: 326378 - RNA, 21 nt, Human herpesvirus 6
uaacuacuucuuucuaaaauc

SEQ ID NO: 326379 - RNA, 16 nt, Human herpesvirus 6
uaacucgcgagacaaa

SEQ ID NO: 326380 - RNA, 13 nt, Human herpesvirus 6
uaacucuuuuugu

SEQ ID NO: 326381 - RNA, 18 nt, Human herpesvirus 6
uaacucuuuuuguugcua

SEQ ID NO: 326382 - RNA, 23 nt, Human herpesvirus 6
uaagaaugaaaaaaaaaauauca

SEQ ID NO: 326383 - RNA, 19 nt, Human herpesvirus 6
uaagacuuauaauauuccu

SEQ ID NO: 326384 - RNA, 15 nt, Human herpesvirus 6
uaagaguaacaacua

SEQ ID NO: 326385 - RNA, 16 nt, Human herpesvirus 6
uaagaguaacaacuac

SEQ ID NO: 326386 - RNA, 23 nt, Human herpesvirus 6
uaagauuuucggugcacauggaa

SEQ ID NO: 326387 - RNA, 21 nt, Human herpesvirus 6
uaaggacaaaguucaguaaca

SEQ ID NO: 326388 - RNA, 20 nt, Human herpesvirus 6
uaauaaacugugucuguuca

SEQ ID NO: 326389 - RNA, 20 nt, Human herpesvirus 6
uaauaaacuuuuaaaacagg

SEQ ID NO: 326390 - RNA, 24 nt, Human herpesvirus 6
uaauaaagaacaugugacacgauu

SEQ ID NO: 326391 - RNA, 23 nt, Human herpesvirus 6
uaauaaauugguuuuuuuuaaca

SEQ ID NO: 326392 - RNA, 22 nt, Human herpesvirus 6
uaauaagucuuuagaacagcuu

SEQ ID NO: 326393 - RNA, 23 nt, Human herpesvirus 6
uaauacaaaauuugaaauaucag

SEQ ID NO: 326394 - RNA, 21 nt, Human herpesvirus 6
uaauacauauaaaagcuaaau

SEQ ID NO: 326395 - RNA, 24 nt, Human herpesvirus 6
uaauacauauaaaagcuaaaucaa

SEQ ID NO: 326396 - RNA, 20 nt, Human herpesvirus 6
uaauacauuuccaugcauau

SEQ ID NO: 326397 - RNA, 12 nt, Human herpesvirus 6
uaauaguuuuaa

SEQ ID NO: 326398 - RNA, 17 nt, Human herpesvirus 6
uaauaugaacaaugaca

SEQ ID NO: 326399 - RNA, 17 nt, Human herpesvirus 6
uaauauuugucguugua

SEQ ID NO: 326400 - RNA, 16 nt, Human herpesvirus 6
uaauauuuuuucagcu

SEQ ID NO: 326401 - RNA, 14 nt, Human herpesvirus 6
uaaucacaaugauc

SEQ ID NO: 326402 - RNA, 23 nt, Human herpesvirus 6
uaaucacaaugaucaauuuuaca

SEQ ID NO: 326403 - RNA, 21 nt, Human herpesvirus 6
uaauccauaugaaaguugaua

SEQ ID NO: 326404 - RNA, 20 nt, Human herpesvirus 6
uaaucccgucuccucaugga

SEQ ID NO: 326405 - RNA, 19 nt, Human herpesvirus 6
uaaucuagaauaucugcua

SEQ ID NO: 326406 - RNA, 19 nt, Human herpesvirus 6
uaauggaaacgacaaagaa

SEQ ID NO: 326407 - RNA, 21 nt, Human herpesvirus 6
uaauggaucuugaucaaauau

SEQ ID NO: 326408 - RNA, 21 nt, Human herpesvirus 6
uaauggguuuguuuucuacau

SEQ ID NO: 326409 - RNA, 22 nt, Human herpesvirus 6
uaaugguugaaaauguuuuuca

SEQ ID NO: 326410 - RNA, 17 nt, Human herpesvirus 6
uaauguaugcaucauca

SEQ ID NO: 326411 - RNA, 16 nt, Human herpesvirus 6
uaauuacauauaguca

SEQ ID NO: 326412 - RNA, 17 nt, Human herpesvirus 6
uaauuaccuauagucaa

SEQ ID NO: 326413 - RNA, 16 nt, Human herpesvirus 6
uaauuacgcuguccgc

SEQ ID NO: 326414 - RNA, 18 nt, Human herpesvirus 6
uaauucaaaugcaguaaa

SEQ ID NO: 326415 - RNA, 13 nt, Human herpesvirus 6
uaauugaacauug

SEQ ID NO: 326416 - RNA, 15 nt, Human herpesvirus 6
uaauugaacauugua

SEQ ID NO: 326417 - RNA, 16 nt, Human herpesvirus 6
uaauugaacauuguaa

SEQ ID NO: 326418 - RNA, 14 nt, Human herpesvirus 6
uaauugcacccuau

SEQ ID NO: 326419 - RNA, 11 nt, Human herpesvirus 6
uaauuggugcg

SEQ ID NO: 326420 - RNA, 18 nt, Human herpesvirus 6
uaauuguggauuuucaga

SEQ ID NO: 326421 - RNA, 18 nt, Human herpesvirus 6
uaauuguuuuuuacuucc

SEQ ID NO: 326422 - RNA, 19 nt, Human herpesvirus 6
uaauuuuuuugcgugugug

SEQ ID NO: 326423 - RNA, 17 nt, Human herpesvirus 6
uacaaaacaaucuaucu

SEQ ID NO: 326424 - RNA, 13 nt, Human herpesvirus 6
uacaaacaugcgu

SEQ ID NO: 326425 - RNA, 13 nt, Human herpesvirus 6
uacaaagugaaag

SEQ ID NO: 326426 - RNA, 19 nt, Human herpesvirus 6
uacaaauucauugugguca

SEQ ID NO: 326427 - RNA, 16 nt, Human herpesvirus 6
uacaagucgacaaauu

SEQ ID NO: 326428 - RNA, 12 nt, Human herpesvirus 6
uacaauacacag

SEQ ID NO: 326429 - RNA, 22 nt, Human herpesvirus 6
uacaauacgguuugucucgcaa

SEQ ID NO: 326430 - RNA, 20 nt, Human herpesvirus 6
uacacaggauuauaaaaaca

SEQ ID NO: 326431 - RNA, 21 nt, Human herpesvirus 6
uacaccuaacgcgggauauuu

SEQ ID NO: 326432 - RNA, 20 nt, Human herpesvirus 6
uacacguauguacuccgggg

SEQ ID NO: 326433 - RNA, 14 nt, Human herpesvirus 6
uacacuuuaucgau

SEQ ID NO: 326434 - RNA, 21 nt, Human herpesvirus 6
uacacuuuaucgauguagaua

SEQ ID NO: 326435 - RNA, 22 nt, Human herpesvirus 6
uacagaaguuucggcaacugaa

SEQ ID NO: 326436 - RNA, 15 nt, Human herpesvirus 6
uacagaugucaagua

SEQ ID NO: 326437 - RNA, 14 nt, Human herpesvirus 6
uacauaaacacccc

SEQ ID NO: 326438 - RNA, 12 nt, Human herpesvirus 6
uacauaauaucu

SEQ ID NO: 326439 - RNA, 13 nt, Human herpesvirus 6
uacauauagucaa

SEQ ID NO: 326440 - RNA, 14 nt, Human herpesvirus 6
uacauauagucaau

SEQ ID NO: 326441 - RNA, 21 nt, Human herpesvirus 6
uacaucagagccgaucagauu

SEQ ID NO: 326442 - RNA, 24 nt, Human herpesvirus 6
uacaucaucgccuuuuacuuacau

SEQ ID NO: 326443 - RNA, 17 nt, Human herpesvirus 6
uacaucgaauuucacau

SEQ ID NO: 326444 - RNA, 16 nt, Human herpesvirus 6
uacauuaaacacuaaa

SEQ ID NO: 326445 - RNA, 17 nt, Human herpesvirus 6
uacauuaugaagucuug

SEQ ID NO: 326446 - RNA, 16 nt, Human herpesvirus 6
uacauucggaauuucu

SEQ ID NO: 326447 - RNA, 20 nt, Human herpesvirus 6
uacauucucguaguugcauu

SEQ ID NO: 326448 - RNA, 18 nt, Human herpesvirus 6
uacauuuguacacuuuau

SEQ ID NO: 326449 - RNA, 22 nt, Human herpesvirus 6
uaccacggggauuuaguacagu

SEQ ID NO: 326450 - RNA, 21 nt, Human herpesvirus 6
uaccagcauguuuucuccuca

SEQ ID NO: 326451 - RNA, 23 nt, Human herpesvirus 6
uaccaguagcacaaaccaaaaug

SEQ ID NO: 326452 - RNA, 17 nt, Human herpesvirus 6
uaccaugugcggagaaa

SEQ ID NO: 326453 - RNA, 23 nt, Human herpesvirus 6
uaccauuugacuccaacgcacac

SEQ ID NO: 326454 - RNA, 18 nt, Human herpesvirus 6
uacccggggauguguuca

SEQ ID NO: 326455 - RNA, 14 nt, Human herpesvirus 6
uacccuaagugaaa

SEQ ID NO: 326456 - RNA, 19 nt, Human herpesvirus 6
uacccuaagugaaauucaa

SEQ ID NO: 326457 - RNA, 18 nt, Human herpesvirus 6
uaccgacgcguucaauaa

SEQ ID NO: 326458 - RNA, 15 nt, Human herpesvirus 6
uaccgagagauuuac

SEQ ID NO: 326459 - RNA, 23 nt, Human herpesvirus 6
uaccgcugcguccgaguuagcag

SEQ ID NO: 326460 - RNA, 16 nt, Human herpesvirus 6
uaccguucaucauucc

SEQ ID NO: 326461 - RNA, 15 nt, Human herpesvirus 6
uaccguuuaaacuau

SEQ ID NO: 326462 - RNA, 18 nt, Human herpesvirus 6
uaccuagcagcaaauaaa

SEQ ID NO: 326463 - RNA, 14 nt, Human herpesvirus 6
uaccuauagucaau

SEQ ID NO: 326464 - RNA, 19 nt, Human herpesvirus 6
uaccucauuguuucacuuc

SEQ ID NO: 326465 - RNA, 22 nt, Human herpesvirus 6
uaccuggaaacaacgacuacca

SEQ ID NO: 326466 - RNA, 16 nt, Human herpesvirus 6
uacgaaccucaugagu

SEQ ID NO: 326467 - RNA, 18 nt, Human herpesvirus 6
uacgacgaaaacuuuuaa

SEQ ID NO: 326468 - RNA, 15 nt, Human herpesvirus 6
uacgcgcauacguau

SEQ ID NO: 326469 - RNA, 22 nt, Human herpesvirus 6
uacggaaaagaugagcgucaga

SEQ ID NO: 326470 - RNA, 23 nt, Human herpesvirus 6
uacguuucuguccaaugacuacu

SEQ ID NO: 326471 - RNA, 16 nt, Human herpesvirus 6
uacguuugccaaagcu

SEQ ID NO: 326472 - RNA, 22 nt, Human herpesvirus 6
uacuaaaaagagucccaucuau

SEQ ID NO: 326473 - RNA, 16 nt, Human herpesvirus 6
uacuaaauguuaugaa

SEQ ID NO: 326474 - RNA, 18 nt, Human herpesvirus 6
uacuagcuaaaacuugaa

SEQ ID NO: 326475 - RNA, 14 nt, Human herpesvirus 6
uacuaucguuuaua

SEQ ID NO: 326476 - RNA, 11 nt, Human herpesvirus 6
uacucauccaa

SEQ ID NO: 326477 - RNA, 19 nt, Human herpesvirus 6
uacugacgguuagguuuaa

SEQ ID NO: 326478 - RNA, 23 nt, Human herpesvirus 6
uacugauuaguuuucacaaagaa

SEQ ID NO: 326479 - RNA, 15 nt, Human herpesvirus 6
uacugcaugcuaaua

SEQ ID NO: 326480 - RNA, 21 nt, Human herpesvirus 6
uacuuacaacugaaacuucac

SEQ ID NO: 326481 - RNA, 17 nt, Human herpesvirus 6
uacuucgugcugugaua

SEQ ID NO: 326482 - RNA, 20 nt, Human herpesvirus 6
uacuugauaaacuguaugca

SEQ ID NO: 326483 - RNA, 18 nt, Human herpesvirus 6
uacuugucuuacacucuc

SEQ ID NO: 326484 - RNA, 22 nt, Human herpesvirus 6
uagaaaaacaacgaaacaguuc

SEQ ID NO: 326485 - RNA, 21 nt, Human herpesvirus 6
uagaaauuacaagguacacaa

SEQ ID NO: 326486 - RNA, 14 nt, Human herpesvirus 6
uagaaauuuuaccu

SEQ ID NO: 326487 - RNA, 20 nt, Human herpesvirus 6
uagaacagcuuagggccaaa

SEQ ID NO: 326488 - RNA, 15 nt, Human herpesvirus 6
uagaauaaugccuaa

SEQ ID NO: 326489 - RNA, 14 nt, Human herpesvirus 6
uagaauuucuaacc

SEQ ID NO: 326490 - RNA, 18 nt, Human herpesvirus 6
uagacaagaaaaacagcu

SEQ ID NO: 326491 - RNA, 13 nt, Human herpesvirus 6
uagacagucacac

SEQ ID NO: 326492 - RNA, 14 nt, Human herpesvirus 6
uagaccuugaucua

SEQ ID NO: 326493 - RNA, 17 nt, Human herpesvirus 6
uagacugaacacaaaaa

SEQ ID NO: 326494 - RNA, 16 nt, Human herpesvirus 6
uagagaaaagugcaag

SEQ ID NO: 326495 - RNA, 18 nt, Human herpesvirus 6
uagagacgcacccuacaa

SEQ ID NO: 326496 - RNA, 16 nt, Human herpesvirus 6
uagagagauagauaug

SEQ ID NO: 326497 - RNA, 23 nt, Human herpesvirus 6
gguucuuaaagaguuuucucaca

SEQ ID NO: 326498 - RNA, 14 nt, Human herpesvirus 6
gguuuaaucucaca

SEQ ID NO: 326499 - RNA, 13 nt, Human herpesvirus 6
gguuuauugcacg

SEQ ID NO: 326500 - RNA, 15 nt, Human herpesvirus 6
gguuuucuuacacau

SEQ ID NO: 326501 - RNA, 17 nt, Human herpesvirus 6
guaaaaaaacauucuau

SEQ ID NO: 326502 - RNA, 21 nt, Human herpesvirus 6
guaaaacuauugacauaggaa

SEQ ID NO: 326503 - RNA, 18 nt, Human herpesvirus 6
guaaauaaacaccagcau

SEQ ID NO: 326504 - RNA, 23 nt, Human herpesvirus 6
guaacggagcccgugcacguccc

SEQ ID NO: 326505 - RNA, 19 nt, Human herpesvirus 6
guaagcagcagaacaacuu

SEQ ID NO: 326506 - RNA, 14 nt, Human herpesvirus 6
guaagcaucugcug

SEQ ID NO: 326507 - RNA, 19 nt, Human herpesvirus 6
guaaguuuugggugcuauu

SEQ ID NO: 326508 - RNA, 13 nt, Human herpesvirus 6
guaauacaucaac

SEQ ID NO: 326509 - RNA, 17 nt, Human herpesvirus 6
guaauaucuucuuugag

SEQ ID NO: 326510 - RNA, 22 nt, Human herpesvirus 6
guaauauuuuuucagcuuucau

SEQ ID NO: 326511 - RNA, 20 nt, Human herpesvirus 6
guaauggcauucaccgguga

SEQ ID NO: 326512 - RNA, 14 nt, Human herpesvirus 6
guaauuucuaugua

SEQ ID NO: 326513 - RNA, 15 nt, Human herpesvirus 6
guaauuucuauguaa

SEQ ID NO: 326514 - RNA, 22 nt, Human herpesvirus 6
guaauuuucaaucuguguuucc

SEQ ID NO: 326515 - RNA, 22 nt, Human herpesvirus 6
guacaaguuugugugccuuugu

SEQ ID NO: 326516 - RNA, 21 nt, Human herpesvirus 6
guaccuuguaauuucuaugua

SEQ ID NO: 326517 - RNA, 22 nt, Human herpesvirus 6
guaccuuguaauuucuauguaa

SEQ ID NO: 326518 - RNA, 13 nt, Human herpesvirus 6
guacucauccaag

SEQ ID NO: 326519 - RNA, 18 nt, Human herpesvirus 6
guagcaucuuaccuucaa

SEQ ID NO: 326520 - RNA, 15 nt, Human herpesvirus 6
guaguauccuuaacg

SEQ ID NO: 326521 - RNA, 22 nt, Human herpesvirus 6
guauacgccuugggacauguau

SEQ ID NO: 326522 - RNA, 14 nt, Human herpesvirus 6
guauagucuagcaa

SEQ ID NO: 326523 - RNA, 21 nt, Human herpesvirus 6
guauaucgagaaaaggacauu

SEQ ID NO: 326524 - RNA, 19 nt, Human herpesvirus 6
guauauuuuaauacauuuc

SEQ ID NO: 326525 - RNA, 22 nt, Human herpesvirus 6
guauauuuuccuguuguguuua

SEQ ID NO: 326526 - RNA, 22 nt, Human herpesvirus 6
guaucacgucuccuuuauugcc

SEQ ID NO: 326527 - RNA, 15 nt, Human herpesvirus 6
guaucuaguguuucg

SEQ ID NO: 326528 - RNA, 14 nt, Human herpesvirus 6
guaugaggaaaucu

SEQ ID NO: 326529 - RNA, 19 nt, Human herpesvirus 6
guaugcauuguuaucacga

SEQ ID NO: 326530 - RNA, 21 nt, Human herpesvirus 6
guauugauuauauauuugcau

SEQ ID NO: 326531 - RNA, 22 nt, Human herpesvirus 6
guauuuuagauauauacuuuca

SEQ ID NO: 326532 - RNA, 17 nt, Human herpesvirus 6
guauuuuuuuguuguug

SEQ ID NO: 326533 - RNA, 16 nt, Human herpesvirus 6
gucaaauagccaaaaa

SEQ ID NO: 326534 - RNA, 16 nt, Human herpesvirus 6
gucaacacccauggaa

SEQ ID NO: 326535 - RNA, 13 nt, Human herpesvirus 6
gucaaguuucacc

SEQ ID NO: 326536 - RNA, 17 nt, Human herpesvirus 6
gucacguauaccauucc

SEQ ID NO: 326537 - RNA, 16 nt, Human herpesvirus 6
gucaggaaaaaguuaa

SEQ ID NO: 326538 - RNA, 20 nt, Human herpesvirus 6
gucagucaacgcaauuccac

SEQ ID NO: 326539 - RNA, 13 nt, Human herpesvirus 6
gucaguggguguu

SEQ ID NO: 326540 - RNA, 16 nt, Human herpesvirus 6
gucaguucaacgcugu

SEQ ID NO: 326541 - RNA, 16 nt, Human herpesvirus 6
gucauguuuacugcau

SEQ ID NO: 326542 - RNA, 20 nt, Human herpesvirus 6
guccaaccccucccaucccc

SEQ ID NO: 326543 - RNA, 15 nt, Human herpesvirus 6
guccaaugacuacua

SEQ ID NO: 326544 - RNA, 16 nt, Human herpesvirus 6
guccaaugacuacuaa

SEQ ID NO: 326545 - RNA, 16 nt, Human herpesvirus 6
guccacacgccagucc

SEQ ID NO: 326546 - RNA, 21 nt, Human herpesvirus 6
guccguuuuucucugcaaaac

SEQ ID NO: 326547 - RNA, 20 nt, Human herpesvirus 6
gucgaaauucaccagauuca

SEQ ID NO: 326548 - RNA, 22 nt, Human herpesvirus 6
gucgauauagauuauacgaaau

SEQ ID NO: 326549 - RNA, 21 nt, Human herpesvirus 6
gucgcacacacaagaacagag

SEQ ID NO: 326550 - RNA, 17 nt, Human herpesvirus 6
gucggaaucuacugaga

SEQ ID NO: 326551 - RNA, 21 nt, Human herpesvirus 6
gucgggaaauaaaaaauauua

SEQ ID NO: 326552 - RNA, 19 nt, Human herpesvirus 6
gucgguaaacuuaccauau

SEQ ID NO: 326553 - RNA, 23 nt, Human herpesvirus 6
gucgguccguuuuucucugcaaa

SEQ ID NO: 326554 - RNA, 20 nt, Human herpesvirus 6
gucgucaccgaaguacccau

SEQ ID NO: 326555 - RNA, 15 nt, Human herpesvirus 6
gucguugugucauga

SEQ ID NO: 326556 - RNA, 14 nt, Human herpesvirus 6
gucuagaugcaaau

SEQ ID NO: 326557 - RNA, 18 nt, Human herpesvirus 6
gucuagaugcaaaucuca

SEQ ID NO: 326558 - RNA, 22 nt, Human herpesvirus 6
gucuaucauuuuuuugauuuac

SEQ ID NO: 326559 - RNA, 23 nt, Human herpesvirus 6
gucuauccaugaaacucuuugaa

SEQ ID NO: 326560 - RNA, 16 nt, Human herpesvirus 6
gucucgcccagcgugg

SEQ ID NO: 326561 - RNA, 16 nt, Human herpesvirus 6
gucugaaaccuagaaa

SEQ ID NO: 326562 - RNA, 13 nt, Human herpesvirus 6
gucuuacuguauu

SEQ ID NO: 326563 - RNA, 19 nt, Human herpesvirus 6
gucuucuugggacuaggaa

SEQ ID NO: 326564 - RNA, 14 nt, Human herpesvirus 6
gucuuuagaacagc

SEQ ID NO: 326565 - RNA, 16 nt, Human herpesvirus 6
gucuuuagaacagcuu

SEQ ID NO: 326566 - RNA, 16 nt, Human herpesvirus 6
gugaaacuugacacau

SEQ ID NO: 326567 - RNA, 13 nt, Human herpesvirus 6
gugaauugugcaa

SEQ ID NO: 326568 - RNA, 21 nt, Human herpesvirus 6
gugacagaauucuucugugac

SEQ ID NO: 326569 - RNA, 24 nt, Human herpesvirus 6
gugacagaauucuucugugacuau

SEQ ID NO: 326570 - RNA, 18 nt, Human herpesvirus 6
gugacgccuugauguuuc

SEQ ID NO: 326571 - RNA, 17 nt, Human herpesvirus 6
gugaguaccuguacaag

SEQ ID NO: 326572 - RNA, 13 nt, Human herpesvirus 6
gugagugcauuau

SEQ ID NO: 326573 - RNA, 22 nt, Human herpesvirus 6
gugccguuuaugcgaaucugcc

SEQ ID NO: 326574 - RNA, 18 nt, Human herpesvirus 6
gugcgaucgagcaacagc

SEQ ID NO: 326575 - RNA, 12 nt, Human herpesvirus 6
gugcguauucca

SEQ ID NO: 326576 - RNA, 23 nt, Human herpesvirus 6
gugcguuaucgaccauguguaua

SEQ ID NO: 326577 - RNA, 22 nt, Human herpesvirus 6
gugcuauuucuguuacugcgag

SEQ ID NO: 326578 - RNA, 14 nt, Human herpesvirus 6
gugcugagacucua

SEQ ID NO: 326579 - RNA, 18 nt, Human herpesvirus 6
guggaacauacuggugga

SEQ ID NO: 326580 - RNA, 22 nt, Human herpesvirus 6
guggaacauacugguggauuau

SEQ ID NO: 326581 - RNA, 17 nt, Human herpesvirus 6
guggauuaugaguauga

SEQ ID NO: 326582 - RNA, 19 nt, Human herpesvirus 6
guggauuaugaguaugaaa

SEQ ID NO: 326583 - RNA, 14 nt, Human herpesvirus 6
gugggaaugcugag

SEQ ID NO: 326584 - RNA, 14 nt, Human herpesvirus 6
gugggaugcauuau

SEQ ID NO: 326585 - RNA, 22 nt, Human herpesvirus 6
guggucugagaugacaucugca

SEQ ID NO: 326586 - RNA, 14 nt, Human herpesvirus 6
guguagcaaaaaca

SEQ ID NO: 326587 - RNA, 22 nt, Human herpesvirus 6
guguauauuuuaauacauuucc

SEQ ID NO: 326588 - RNA, 12 nt, Human herpesvirus 6
guguauuguaaa

SEQ ID NO: 326589 - RNA, 14 nt, Human herpesvirus 6
guguggaacauacu

SEQ ID NO: 326590 - RNA, 16 nt, Human herpesvirus 6
guguggauaucucaaa

SEQ ID NO: 326591 - RNA, 15 nt, Human herpesvirus 6
guguuacugauggca

SEQ ID NO: 326592 - RNA, 18 nt, Human herpesvirus 6
guguuagcuuugcgauau

SEQ ID NO: 326593 - RNA, 22 nt, Human herpesvirus 6
guguuaugaaugagauguucua

SEQ ID NO: 326594 - RNA, 16 nt, Human herpesvirus 6
guguuaugaucuagcu

SEQ ID NO: 326595 - RNA, 20 nt, Human herpesvirus 6
guguuuacauauacauuugu

SEQ ID NO: 326596 - RNA, 18 nt, Human herpesvirus 6
guuaaauugauaguacuu

SEQ ID NO: 326597 - RNA, 15 nt, Human herpesvirus 6
guuacaauagucauu

SEQ ID NO: 326598 - RNA, 23 nt, Human herpesvirus 6
guuacugaacuuuguccuuacaa

SEQ ID NO: 326599 - RNA, 15 nt, Human herpesvirus 6
guuauaacacaacaa

SEQ ID NO: 326600 - RNA, 17 nt, Human herpesvirus 6
guuaucgaccaugugua

SEQ ID NO: 326601 - RNA, 14 nt, Human herpesvirus 6
guuaugaaugagau

SEQ ID NO: 326602 - RNA, 12 nt, Human herpesvirus 6
guuaugugcugu

SEQ ID NO: 326603 - RNA, 16 nt, Human herpesvirus 6
guuauuagugauuaug

SEQ ID NO: 326604 - RNA, 13 nt, Human herpesvirus 6
guuauuguuguug

SEQ ID NO: 326605 - RNA, 14 nt, Human herpesvirus 6
guucaucauuccag

SEQ ID NO: 326606 - RNA, 22 nt, Human herpesvirus 6
guuccaaaguaguuaccgugau

SEQ ID NO: 326607 - RNA, 18 nt, Human herpesvirus 6
guuccacgcauagacaaa

SEQ ID NO: 326608 - RNA, 17 nt, Human herpesvirus 6
guuccccaugucuugcc

SEQ ID NO: 326609 - RNA, 23 nt, Human herpesvirus 6
guuccccaugucuugccucuccg

SEQ ID NO: 326610 - RNA, 18 nt, Human herpesvirus 6
guucucuuuccagcccua

SEQ ID NO: 326611 - RNA, 16 nt, Human herpesvirus 6
guucuuaacucaucga

SEQ ID NO: 326612 - RNA, 19 nt, Human herpesvirus 6
guucuucaacauaucacuu

SEQ ID NO: 326613 - RNA, 21 nt, Human herpesvirus 6
uauuucacauauuguguugua

SEQ ID NO: 326614 - RNA, 20 nt, Human herpesvirus 6
uauuuccauaaguuaauucc

SEQ ID NO: 326615 - RNA, 20 nt, Human herpesvirus 6
uauuuccaugacugugaggu

SEQ ID NO: 326616 - RNA, 22 nt, Human herpesvirus 6
uauuucgaaagagauauagccu

SEQ ID NO: 326617 - RNA, 10 nt, Human herpesvirus 6
uauuugcaua

SEQ ID NO: 326618 - RNA, 19 nt, Human herpesvirus 6
uauuuuaauacauuuccau

SEQ ID NO: 326619 - RNA, 18 nt, Human herpesvirus 6
uauuuuagucacacauuc

SEQ ID NO: 326620 - RNA, 18 nt, Human herpesvirus 6
gaacagucugacauggaa

SEQ ID NO: 326621 - RNA, 15 nt, Human herpesvirus 6
gaacauaauugcacc

SEQ ID NO: 326622 - RNA, 22 nt, Human herpesvirus 6
gaaccaucuguucaauuauauc

SEQ ID NO: 326623 - RNA, 18 nt, Human herpesvirus 6
gaacccuagacacacaaa

SEQ ID NO: 326624 - RNA, 18 nt, Human herpesvirus 6
gaacgcaagucacgggca

SEQ ID NO: 326625 - RNA, 22 nt, Human herpesvirus 6
gaacgcagcguaaugugcaaag

SEQ ID NO: 326626 - RNA, 22 nt, Human herpesvirus 6
gaacgcccgccggcccauccac

SEQ ID NO: 326627 - RNA, 17 nt, Human herpesvirus 6
gaacgcgguaacgccac

SEQ ID NO: 326628 - RNA, 18 nt, Human herpesvirus 6
gaacguagacagucacac

SEQ ID NO: 326629 - RNA, 18 nt, Human herpesvirus 6
gaacuuuguccuuacaaa

SEQ ID NO: 326630 - RNA, 24 nt, Human herpesvirus 6
gaacuuuuuuaaaccucuguagau

SEQ ID NO: 326631 - RNA, 20 nt, Human herpesvirus 6
gaacuuuuuucggauuuuga

SEQ ID NO: 326632 - RNA, 14 nt, Human herpesvirus 6
gaagaaccaaagac

SEQ ID NO: 326633 - RNA, 19 nt, Human herpesvirus 6
gaagaacccgaaguuuccu

SEQ ID NO: 326634 - RNA, 15 nt, Human herpesvirus 6
gaagauagcagaaua

SEQ ID NO: 326635 - RNA, 16 nt, Human herpesvirus 6
gaagauagcagaauag

SEQ ID NO: 326636 - RNA, 16 nt, Human herpesvirus 6
gaagaucuaaauuucu

SEQ ID NO: 326637 - RNA, 18 nt, Human herpesvirus 6
gaagcaucccuaugucga

SEQ ID NO: 326638 - RNA, 16 nt, Human herpesvirus 6
gaagccuucaacuuuu

SEQ ID NO: 326639 - RNA, 13 nt, Human herpesvirus 6
gaagcgccauaaa

SEQ ID NO: 326640 - RNA, 23 nt, Human herpesvirus 6
gaaggacuaucugagacagucca

SEQ ID NO: 326641 - RNA, 13 nt, Human herpesvirus 6
gaaggagauuuca

SEQ ID NO: 326642 - RNA, 19 nt, Human herpesvirus 6
gaagguaucaaagaacaaa

SEQ ID NO: 326643 - RNA, 19 nt, Human herpesvirus 6
gaaggucaucaugcuguga

SEQ ID NO: 326644 - RNA, 20 nt, Human herpesvirus 6
gaaggucaucaugcugugag

SEQ ID NO: 326645 - RNA, 12 nt, Human herpesvirus 6
gaaguaaauaca

SEQ ID NO: 326646 - RNA, 14 nt, Human herpesvirus 6
gaagugaagaauuu

SEQ ID NO: 326647 - RNA, 13 nt, Human herpesvirus 6
gaagugcuucucu

SEQ ID NO: 326648 - RNA, 17 nt, Human herpesvirus 6
gaaguuagaaauuuuac

SEQ ID NO: 326649 - RNA, 16 nt, Human herpesvirus 6
gaaguuuacauagaaa

SEQ ID NO: 326650 - RNA, 15 nt, Human herpesvirus 6
gaaguuuccuuugug

SEQ ID NO: 326651 - RNA, 18 nt, Human herpesvirus 6
gaauaauaagccuaagaa

SEQ ID NO: 326652 - RNA, 19 nt, Human herpesvirus 6
gaauaucugcuaagucuuu

SEQ ID NO: 326653 - RNA, 20 nt, Human herpesvirus 6
gaauaucugcuaagucuuug

SEQ ID NO: 326654 - RNA, 22 nt, Human herpesvirus 6
gaaucaaugaaaaaaaaugaag

SEQ ID NO: 326655 - RNA, 22 nt, Human herpesvirus 6
gaaucagaucacucagauuuca

SEQ ID NO: 326656 - RNA, 18 nt, Human herpesvirus 6
gaaucauggugucuuugu

SEQ ID NO: 326657 - RNA, 15 nt, Human herpesvirus 6
gaaucauguguagca

SEQ ID NO: 326658 - RNA, 21 nt, Human herpesvirus 6
gaauccaccaaugacaccgau

SEQ ID NO: 326659 - RNA, 21 nt, Human herpesvirus 6
gaauccagaaacuugcuccug

SEQ ID NO: 326660 - RNA, 12 nt, Human herpesvirus 6
gaaucuuauuca

SEQ ID NO: 326661 - RNA, 21 nt, Human herpesvirus 6
gaaucuuccuuauaacacaca

SEQ ID NO: 326662 - RNA, 21 nt, Human herpesvirus 6
gaaucuuguguucuaucacau

SEQ ID NO: 326663 - RNA, 17 nt, Human herpesvirus 6
gaaugaauuuacuguuu

SEQ ID NO: 326664 - RNA, 22 nt, Human herpesvirus 6
gaaugcgagucgcgaagugcuu

SEQ ID NO: 326665 - RNA, 12 nt, Human herpesvirus 6
gaaugugauuau

SEQ ID NO: 326666 - RNA, 17 nt, Human herpesvirus 6
gaaugugauuaugccaa

SEQ ID NO: 326667 - RNA, 12 nt, Human herpesvirus 6
gaaugugcugau

SEQ ID NO: 326668 - RNA, 19 nt, Human herpesvirus 6
gaauguguucacagagcau

SEQ ID NO: 326669 - RNA, 20 nt, Human herpesvirus 6
gaauuccuggacauggugaa

SEQ ID NO: 326670 - RNA, 21 nt, Human herpesvirus 6
gaauucuuaccaagaaaucau

SEQ ID NO: 326671 - RNA, 23 nt, Human herpesvirus 6
gacaaaaaaaaaacgucacguca

SEQ ID NO: 326672 - RNA, 22 nt, Human herpesvirus 6
gacaaaguucaguaacauuuaa

SEQ ID NO: 326673 - RNA, 17 nt, Human herpesvirus 6
gacaaauaaaagcauuu

SEQ ID NO: 326674 - RNA, 12 nt, Human herpesvirus 6
gacaacaaagga

SEQ ID NO: 326675 - RNA, 19 nt, Human herpesvirus 6
gacaacgugcucguauaaa

SEQ ID NO: 326676 - RNA, 15 nt, Human herpesvirus 6
gacaaggaaugaaau

SEQ ID NO: 326677 - RNA, 16 nt, Human herpesvirus 6
gacaaguaagauugca

SEQ ID NO: 326678 - RNA, 23 nt, Human herpesvirus 6
gacaaucgucggaucaacagaug

SEQ ID NO: 326679 - RNA, 14 nt, Human herpesvirus 6
gacaaugauacuaa

SEQ ID NO: 326680 - RNA, 21 nt, Human herpesvirus 6
gacaaugauacuaaguguaau

SEQ ID NO: 326681 - RNA, 20 nt, Human herpesvirus 6
gacacacaaaaaauugacaa

SEQ ID NO: 326682 - RNA, 19 nt, Human herpesvirus 6
gacaccucagggucaaaaa

SEQ ID NO: 326683 - RNA, 18 nt, Human herpesvirus 6
gacacgauuucugacucu

SEQ ID NO: 326684 - RNA, 16 nt, Human herpesvirus 6
gacagaagacgacaua

SEQ ID NO: 326685 - RNA, 23 nt, Human herpesvirus 6
gacagaggaaauaaaaacaccuc

SEQ ID NO: 326686 - RNA, 15 nt, Human herpesvirus 6
gacagggugagucac

SEQ ID NO: 326687 - RNA, 17 nt, Human herpesvirus 6
gacagggugagucacau

SEQ ID NO: 326688 - RNA, 14 nt, Human herpesvirus 6
gacagugauuagaa

SEQ ID NO: 326689 - RNA, 22 nt, Human herpesvirus 6
gacauaggaauucuuauuuacc

SEQ ID NO: 326690 - RNA, 21 nt, Human herpesvirus 6
gacaucacggccguauaucua

SEQ ID NO: 326691 - RNA, 19 nt, Human herpesvirus 6
gacaucgcgcgcgacgugc

SEQ ID NO: 326692 - RNA, 21 nt, Human herpesvirus 6
gacaucgucuccuacauucuc

SEQ ID NO: 326693 - RNA, 20 nt, Human herpesvirus 6
gacauggugaaacuugacac

SEQ ID NO: 326694 - RNA, 14 nt, Human herpesvirus 6
gacauggugaaaga

SEQ ID NO: 326695 - RNA, 14 nt, Human herpesvirus 6
gacauguacaucaa

SEQ ID NO: 326696 - RNA, 23 nt, Human herpesvirus 6
uccaacgcacacgcuaacuaaau

SEQ ID NO: 326697 - RNA, 19 nt, Human herpesvirus 6
uccaacggagaaaacuaua

SEQ ID NO: 326698 - RNA, 20 nt, Human herpesvirus 6
uccaagacauguacaucaac

SEQ ID NO: 326699 - RNA, 13 nt, Human herpesvirus 6
uccaauuaacaca

SEQ ID NO: 326700 - RNA, 15 nt, Human herpesvirus 6
uccacacgccagucc

SEQ ID NO: 326701 - RNA, 14 nt, Human herpesvirus 6
uccaccaaugacac

SEQ ID NO: 326702 - RNA, 18 nt, Human herpesvirus 6
uccaccaaugacaccgau

SEQ ID NO: 326703 - RNA, 23 nt, Human herpesvirus 6
uccacgaacguagacagucacac

SEQ ID NO: 326704 - RNA, 13 nt, Human herpesvirus 6
uccacgcauagac

SEQ ID NO: 326705 - RNA, 21 nt, Human herpesvirus 6
uccagaaaagcaaacaugcaa

SEQ ID NO: 326706 - RNA, 21 nt, Human herpesvirus 6
uccaggcggcaugaauuccau

SEQ ID NO: 326707 - RNA, 21 nt, Human herpesvirus 6
uccauacaguuguguacaaug

SEQ ID NO: 326708 - RNA, 19 nt, Human herpesvirus 6
uccauaccguuuacuuaaa

SEQ ID NO: 326709 - RNA, 21 nt, Human herpesvirus 6
uccauccaauccaauauaacu

SEQ ID NO: 326710 - RNA, 16 nt, Human herpesvirus 6
uccauccgucauacaa

SEQ ID NO: 326711 - RNA, 22 nt, Human herpesvirus 6
uccaucggaacgauaugucucu

SEQ ID NO: 326712 - RNA, 15 nt, Human herpesvirus 6
uccaucuucagacau

SEQ ID NO: 326713 - RNA, 17 nt, Human herpesvirus 6
uccaugcaacacaacaa

SEQ ID NO: 326714 - RNA, 13 nt, Human herpesvirus 6
uccauuaccacac

SEQ ID NO: 326715 - RNA, 16 nt, Human herpesvirus 6
ucccaauuuguguuua

SEQ ID NO: 326716 - RNA, 22 nt, Human herpesvirus 6
ucccagauacauaaacaccccg

SEQ ID NO: 326717 - RNA, 16 nt, Human herpesvirus 6
uccccaugucuugccu

SEQ ID NO: 326718 - RNA, 16 nt, Human herpesvirus 6
uccccauucaacaucc

SEQ ID NO: 326719 - RNA, 17 nt, Human herpesvirus 6
ucccccggaguacacgu

SEQ ID NO: 326720 - RNA, 15 nt, Human herpesvirus 6
ucccggaaauuucac

SEQ ID NO: 326721 - RNA, 19 nt, Human herpesvirus 6
ucuagaugcaaaucucacu

SEQ ID NO: 326722 - RNA, 20 nt, Human herpesvirus 6
ucuagaugcaaaucucacug

SEQ ID NO: 326723 - RNA, 15 nt, Human herpesvirus 6
ucuagauucuaauga

SEQ ID NO: 326724 - RNA, 20 nt, Human herpesvirus 6
ucuagcaaccuaauggacca

SEQ ID NO: 326725 - RNA, 13 nt, Human herpesvirus 6
ucuaguagccuag

SEQ ID NO: 326726 - RNA, 19 nt, Human herpesvirus 6
ucuauccaugaaacucuuu

SEQ ID NO: 326727 - RNA, 22 nt, Human herpesvirus 6
ucuaucuccgcaaaccacccca

SEQ ID NO: 326728 - RNA, 18 nt, Human herpesvirus 6
ucuauggaucugagugaa

SEQ ID NO: 326729 - RNA, 14 nt, Human herpesvirus 6
ucuauguaaacuuc

SEQ ID NO: 326730 - RNA, 18 nt, Human herpesvirus 6
ucuauuccccauuccuag

SEQ ID NO: 326731 - RNA, 21 nt, Human herpesvirus 6
ucuauugguuaaaaggaauag

SEQ ID NO: 326732 - RNA, 18 nt, Human herpesvirus 6
ucuauugucgaagaaccc

SEQ ID NO: 326733 - RNA, 18 nt, Human herpesvirus 6
ucucaagcacaaaaccag

SEQ ID NO: 326734 - RNA, 14 nt, Human herpesvirus 6
ucucagacagcuuu

SEQ ID NO: 326735 - RNA, 14 nt, Human herpesvirus 6
ucucaguagauuac

SEQ ID NO: 326736 - RNA, 15 nt, Human herpesvirus 6
ucuccaaacagagaa

SEQ ID NO: 326737 - RNA, 21 nt, Human herpesvirus 6
ucucccccuacgcuaacgaac

SEQ ID NO: 326738 - RNA, 22 nt, Human herpesvirus 6
ucucccccuacgcuaacgaaca

SEQ ID NO: 326739 - RNA, 13 nt, Human herpesvirus 6
ucuccggguuuua

SEQ ID NO: 326740 - RNA, 22 nt, Human herpesvirus 6
ucuccguggggcacacauguau

SEQ ID NO: 326741 - RNA, 17 nt, Human herpesvirus 6
ucuccugcgcgucuaua

SEQ ID NO: 326742 - RNA, 12 nt, Human herpesvirus 6
ucuccuguaaaa

SEQ ID NO: 326743 - RNA, 17 nt, Human herpesvirus 6
ucucgaaaaaacaacga

SEQ ID NO: 326744 - RNA, 19 nt, Human herpesvirus 6
ucucgccuaccuucacuuu

SEQ ID NO: 326745 - RNA, 21 nt, Human herpesvirus 6
ucucggacucauagauuucau

SEQ ID NO: 326746 - RNA, 19 nt, Human herpesvirus 6
ucucggcugacaacaaagg

SEQ ID NO: 326747 - RNA, 20 nt, Human herpesvirus 6
ucucgggagaggaccaagac

SEQ ID NO: 326748 - RNA, 18 nt, Human herpesvirus 6
ucucgggggcauuagucu

SEQ ID NO: 326749 - RNA, 15 nt, Human herpesvirus 6
ucucguaguugcauu

SEQ ID NO: 326750 - RNA, 22 nt, Human herpesvirus 6
ucucguuccccaugucuugccu

SEQ ID NO: 326751 - RNA, 18 nt, Human herpesvirus 6
ugauuuauagaauuaaga

SEQ ID NO: 326752 - RNA, 15 nt, Human herpesvirus 6
ugauuuuagacaaaa

SEQ ID NO: 326753 - RNA, 14 nt, Human herpesvirus 6
ugauuuugggacaa

SEQ ID NO: 326754 - RNA, 23 nt, Human herpesvirus 6
ugcaaaaaacaaaugaaagucuc

SEQ ID NO: 326755 - RNA, 14 nt, Human herpesvirus 6
ugcaaaacuguuaa

SEQ ID NO: 326756 - RNA, 15 nt, Human herpesvirus 6
ugcaaacgauuugua

SEQ ID NO: 326757 - RNA, 17 nt, Human herpesvirus 6
ugcaagcuguaugauua

SEQ ID NO: 326758 - RNA, 20 nt, Human herpesvirus 6
ugcacauggaaaauucgcca

SEQ ID NO: 326759 - RNA, 14 nt, Human herpesvirus 6
ugcacuugggcaau

SEQ ID NO: 326760 - RNA, 21 nt, Human herpesvirus 6
ugcagaaaaacggcagcuaua

SEQ ID NO: 326761 - RNA, 16 nt, Human herpesvirus 6
ugcagaacaacagcau

SEQ ID NO: 326762 - RNA, 13 nt, Human herpesvirus 6
ugcagacgcugaa

SEQ ID NO: 326763 - RNA, 17 nt, Human herpesvirus 6
ugcagaucuaauucaca

SEQ ID NO: 326764 - RNA, 22 nt, Human herpesvirus 6
ugcagcguuucauuucaucuug

SEQ ID NO: 326765 - RNA, 23 nt, Human herpesvirus 6
ugcaguaaaugaauguguucaca

SEQ ID NO: 326766 - RNA, 21 nt, Human herpesvirus 6
ugcagugauauggaaacacuu

SEQ ID NO: 326767 - RNA, 17 nt, Human herpesvirus 6
ugcaguuacaauuacua

SEQ ID NO: 326768 - RNA, 15 nt, Human herpesvirus 6
ugcauaauaauggca

SEQ ID NO: 326769 - RNA, 21 nt, Human herpesvirus 6
ugcauaucguggaauggcugc

SEQ ID NO: 326770 - RNA, 14 nt, Human herpesvirus 6
ugcaucugccauau

SEQ ID NO: 326771 - RNA, 16 nt, Human herpesvirus 6
ugcaucugccauauca

SEQ ID NO: 326772 - RNA, 22 nt, Human herpesvirus 6
ugcaucugccauaucacacauc

SEQ ID NO: 326773 - RNA, 15 nt, Human herpesvirus 6
ugcaugguccacaga

SEQ ID NO: 326774 - RNA, 22 nt, Human herpesvirus 6
ugcauucgugcucgcauuucuc

SEQ ID NO: 326775 - RNA, 20 nt, Human herpesvirus 6
ugcauuuguagagacgaaag

SEQ ID NO: 326776 - RNA, 19 nt, Human herpesvirus 6
ugccaccgucugggaccca

SEQ ID NO: 326777 - RNA, 17 nt, Human herpesvirus 6
ugccaguaaaucuucau

SEQ ID NO: 326778 - RNA, 14 nt, Human herpesvirus 6
ugccaucauuauug

SEQ ID NO: 326779 - RNA, 16 nt, Human herpesvirus 6
ugcccgcuaccaacag

SEQ ID NO: 326780 - RNA, 15 nt, Human herpesvirus 6
ugccguugagugccu

SEQ ID NO: 326781 - RNA, 14 nt, Human herpesvirus 6
ugccuauacaggca

SEQ ID NO: 326782 - RNA, 12 nt, Human herpesvirus 6
ugccucagaggu

SEQ ID NO: 326783 - RNA, 21 nt, Human herpesvirus 6
ugcgaaugcucaaccuaauga

SEQ ID NO: 326784 - RNA, 18 nt, Human herpesvirus 6
ugcgaucgagcaacagcg

SEQ ID NO: 326785 - RNA, 14 nt, Human herpesvirus 6
ugcgauucuaauaa

SEQ ID NO: 326786 - RNA, 19 nt, Human herpesvirus 6
ugcgcaauucuucucuaca

SEQ ID NO: 326787 - RNA, 15 nt, Human herpesvirus 6
ugcggacauggugaa

SEQ ID NO: 326788 - RNA, 12 nt, Human herpesvirus 6
ugcguuaucgac

SEQ ID NO: 326789 - RNA, 12 nt, Human herpesvirus 6
ugcguuccucuc

SEQ ID NO: 326790 - RNA, 13 nt, Human herpesvirus 6
ugcucaaccuaau

SEQ ID NO: 326791 - RNA, 18 nt, Human herpesvirus 6
ugcuccuuuaucuuuauu

SEQ ID NO: 326792 - RNA, 20 nt, Human herpesvirus 6
ugcugcuagauaauuaugca

SEQ ID NO: 326793 - RNA, 16 nt, Human herpesvirus 6
ugcugguaaauuuuau

SEQ ID NO: 326794 - RNA, 19 nt, Human herpesvirus 6
ugcuguauauguaaauaaa

SEQ ID NO: 326795 - RNA, 15 nt, Human herpesvirus 6
ugcugugauagcuau

SEQ ID NO: 326796 - RNA, 18 nt, Human herpesvirus 6
ugcuguuagagauaucug

SEQ ID NO: 326797 - RNA, 18 nt, Human herpesvirus 6
ugcuuaacuugcacucga

SEQ ID NO: 326798 - RNA, 22 nt, Human herpesvirus 6
ugcuucuucaguagagacuuua

SEQ ID NO: 326799 - RNA, 21 nt, Human herpesvirus 6
ugcuuuacaucgaauuucaca

SEQ ID NO: 326800 - RNA, 23 nt, Human herpesvirus 6
ugcuuuuagauggaaaauugcaa

SEQ ID NO: 326801 - RNA, 14 nt, Human herpesvirus 6
uggaaaacuauuaa

SEQ ID NO: 326802 - RNA, 13 nt, Human herpesvirus 6
uggaaaucaguuc

SEQ ID NO: 326803 - RNA, 20 nt, Human herpesvirus 6
uggaaauucgcuacuaucgu

SEQ ID NO: 326804 - RNA, 22 nt, Human herpesvirus 6
uggaagaaccaaagacauucaa

SEQ ID NO: 326805 - RNA, 15 nt, Human herpesvirus 6
uggagaagaucuaaa

SEQ ID NO: 326806 - RNA, 15 nt, Human herpesvirus 6
uggagagaacugucu

SEQ ID NO: 326807 - RNA, 17 nt, Human herpesvirus 6
uggagcggaaacaugaa

SEQ ID NO: 326808 - RNA, 18 nt, Human herpesvirus 6
uggagcugugucgauguc

SEQ ID NO: 326809 - RNA, 18 nt, Human herpesvirus 6
uggaguauuuguuuuauu

SEQ ID NO: 326810 - RNA, 17 nt, Human herpesvirus 6
uggauaaaauugauggu

SEQ ID NO: 326811 - RNA, 17 nt, Human herpesvirus 6
uggaucggaagacauuu

SEQ ID NO: 326812 - RNA, 23 nt, Human herpesvirus 6
uggaucuugaucaaauaucugaa

SEQ ID NO: 326813 - RNA, 16 nt, Human herpesvirus 6
uggaugcuuuuagaug

SEQ ID NO: 326814 - RNA, 22 nt, Human herpesvirus 6
uggauuugguauuuuagauaua

SEQ ID NO: 326815 - RNA, 22 nt, Human herpesvirus 6
uggauuuuuuuaauuggugcga

SEQ ID NO: 326816 - RNA, 17 nt, Human herpesvirus 6
uggcaaccugaaacucc

SEQ ID NO: 326817 - RNA, 22 nt, Human herpesvirus 6
uggcaaccugaaacuccccaga

SEQ ID NO: 326818 - RNA, 16 nt, Human herpesvirus 6
uggcaauugcugguac

SEQ ID NO: 326819 - RNA, 15 nt, Human herpesvirus 6
uggcacggugccaaa

SEQ ID NO: 326820 - RNA, 18 nt, Human herpesvirus 6
uggcacggugccaaagga

SEQ ID NO: 326821 - RNA, 15 nt, Human herpesvirus 6
uggcaucagaaucca

SEQ ID NO: 326822 - RNA, 23 nt, Human herpesvirus 6
uggcauucaccggugaugaacug

SEQ ID NO: 326823 - RNA, 19 nt, Human herpesvirus 6
uggcgccgaaacugccauc

SEQ ID NO: 326824 - RNA, 14 nt, Human herpesvirus 6
uggcggagaaaguu

SEQ ID NO: 326825 - RNA, 16 nt, Human herpesvirus 6
uggcuucuauauccaa

SEQ ID NO: 326826 - RNA, 23 nt, Human herpesvirus 6
uggcuucuauauccaaagacuca

SEQ ID NO: 326827 - RNA, 22 nt, Human herpesvirus 6
ugggacccacgguggccuggca

SEQ ID NO: 326828 - RNA, 15 nt, Human herpesvirus 6
ugggaccuauaaaaa

SEQ ID NO: 326829 - RNA, 21 nt, Human herpesvirus 6
ugggaccuauaaaaaauuuca

SEQ ID NO: 326830 - RNA, 16 nt, Human herpesvirus 6
ugggaccuucaggaac

SEQ ID NO: 326831 - RNA, 13 nt, Human herpesvirus 6
ugggauguccauu

SEQ ID NO: 326832 - RNA, 14 nt, Human herpesvirus 6
ugggauugugauuc

SEQ ID NO: 326833 - RNA, 21 nt, Human herpesvirus 6
ugggguuccaggcggcaugaa

SEQ ID NO: 326834 - RNA, 17 nt, Human herpesvirus 6
ugguagcuauuauguga

SEQ ID NO: 326835 - RNA, 23 nt, Human herpesvirus 6
ugguagcuauuaugugaauguua

SEQ ID NO: 326836 - RNA, 18 nt, Human herpesvirus 6
ugguauccaauuaacaca

SEQ ID NO: 326837 - RNA, 20 nt, Human herpesvirus 6
ugguauccaauuaacacauu

SEQ ID NO: 326838 - RNA, 14 nt, Human herpesvirus 6
ugguaucugaagac

SEQ ID NO: 326839 - RNA, 16 nt, Human herpesvirus 6
ugguauuuuagauaua

SEQ ID NO: 326840 - RNA, 20 nt, Human herpesvirus 6
ugguauuuuagauauauacu

SEQ ID NO: 326841 - RNA, 21 nt, Human herpesvirus 6
uggucaugaucugcuugauau

SEQ ID NO: 326842 - RNA, 21 nt, Human herpesvirus 6
uggucguaaccauucugcaaa

SEQ ID NO: 326843 - RNA, 16 nt, Human herpesvirus 6
uggucugagaugacau

SEQ ID NO: 326844 - RNA, 23 nt, Human herpesvirus 6
uggucugagaugacaucugcaaa

SEQ ID NO: 326845 - RNA, 15 nt, Human herpesvirus 6
uggugcaucagugaa

SEQ ID NO: 326846 - RNA, 15 nt, Human herpesvirus 6
uggugugggugugau

SEQ ID NO: 326847 - RNA, 15 nt, Human herpesvirus 6
ugguuaucaucacaa

SEQ ID NO: 326848 - RNA, 17 nt, Human herpesvirus 6
ugguuuacagcacuuug

SEQ ID NO: 326849 - RNA, 14 nt, Human herpesvirus 6
uguaaaguuauauu

SEQ ID NO: 326850 - RNA, 18 nt, Human herpesvirus 6
uguaaauaaacaccagca

SEQ ID NO: 326851 - RNA, 19 nt, Human herpesvirus 6
uguaaauaaacaccagcau

SEQ ID NO: 326852 - RNA, 12 nt, Human herpesvirus 6
uguaaauaugcu

SEQ ID NO: 326853 - RNA, 13 nt, Human herpesvirus 6
uguaaaucaucaa

SEQ ID NO: 326854 - RNA, 18 nt, Human herpesvirus 6
uguaaaucaucaacguaa

SEQ ID NO: 326855 - RNA, 22 nt, Human herpesvirus 6
uguaacaucccagauacauaaa

SEQ ID NO: 326856 - RNA, 23 nt, Human herpesvirus 6
uguaauacaucaacaaacacgug

SEQ ID NO: 326857 - RNA, 14 nt, Human herpesvirus 6
uguaauuucuaugu

SEQ ID NO: 326858 - RNA, 21 nt, Human herpesvirus 6
uguacaaguuugugugccuuu

SEQ ID NO: 326859 - RNA, 21 nt, Human herpesvirus 6
uguacaucaacugacuuauaa

SEQ ID NO: 326860 - RNA, 15 nt, Human herpesvirus 6
uguaccuuguaauuu

SEQ ID NO: 326861 - RNA, 19 nt, Human herpesvirus 6
uguagcaucuuaccuucaa

SEQ ID NO: 326862 - RNA, 18 nt, Human herpesvirus 6
uguaguuuguguccuuga

SEQ ID NO: 326863 - RNA, 21 nt, Human herpesvirus 6
uguaguuuguguccuugaauu

SEQ ID NO: 326864 - RNA, 15 nt, Human herpesvirus 6
uguauagucuaauca

SEQ ID NO: 326865 - RNA, 14 nt, Human herpesvirus 6
uguaugugugaugc

SEQ ID NO: 326866 - RNA, 18 nt, Human herpesvirus 6
uguauuuaucgaccuaaa

SEQ ID NO: 326867 - RNA, 14 nt, Human herpesvirus 6
ucucuacuuguuau

SEQ ID NO: 326868 - RNA, 12 nt, Human herpesvirus 6
ucucucgaugaa

SEQ ID NO: 326869 - RNA, 14 nt, Human herpesvirus 6
ucucucgaugaaag

SEQ ID NO: 326870 - RNA, 22 nt, Human herpesvirus 6
ucucucggcugacaacaaagga

SEQ ID NO: 326871 - RNA, 17 nt, Human herpesvirus 6
ucucugcaaaacaaagg

SEQ ID NO: 326872 - RNA, 20 nt, Human herpesvirus 6
ucucuucccacaaaccauca

SEQ ID NO: 326873 - RNA, 20 nt, Human herpesvirus 6
ucucuuuauagagcaacuca

SEQ ID NO: 326874 - RNA, 19 nt, Human herpesvirus 6
ucugacauggaagacaaau

SEQ ID NO: 326875 - RNA, 13 nt, Human herpesvirus 6
ucugagaugacau

SEQ ID NO: 326876 - RNA, 21 nt, Human herpesvirus 6
ucugagaugacaucugcaaaa

SEQ ID NO: 326877 - RNA, 22 nt, Human herpesvirus 6
ucugcggaaauaaaaaauauua

SEQ ID NO: 326878 - RNA, 13 nt, Human herpesvirus 6
ucugcuaauucau

SEQ ID NO: 326879 - RNA, 17 nt, Human herpesvirus 6
ucugcuauuuuuuucac

SEQ ID NO: 326880 - RNA, 18 nt, Human herpesvirus 6
ucugcuauuuuuuucacu

SEQ ID NO: 326881 - RNA, 12 nt, Human herpesvirus 6
ucugcucugugu

SEQ ID NO: 326882 - RNA, 13 nt, Human herpesvirus 6
ucuggaucucagu

SEQ ID NO: 326883 - RNA, 20 nt, Human herpesvirus 6
ucuggaugaagaggauucac

SEQ ID NO: 326884 - RNA, 15 nt, Human herpesvirus 6
ucugucugcagcuua

SEQ ID NO: 326885 - RNA, 17 nt, Human herpesvirus 6
ucuguucuucaucauca

SEQ ID NO: 326886 - RNA, 16 nt, Human herpesvirus 6
ucuguuuauugccaau

SEQ ID NO: 326887 - RNA, 19 nt, Human herpesvirus 6
ucuuaaagcgugugauuca

SEQ ID NO: 326888 - RNA, 16 nt, Human herpesvirus 6
ucuuacaacaggcuug

SEQ ID NO: 326889 - RNA, 22 nt, Human herpesvirus 6
ucuuacacgauguguagcaaaa

SEQ ID NO: 326890 - RNA, 13 nt, Human herpesvirus 6
ucuuacguugaug

SEQ ID NO: 326891 - RNA, 16 nt, Human herpesvirus 6
ucuuauuaugugacuc

SEQ ID NO: 326892 - RNA, 22 nt, Human herpesvirus 6
ucuuauucaaaaauguugcaug

SEQ ID NO: 326893 - RNA, 15 nt, Human herpesvirus 6
ucuucagcucaaaca

SEQ ID NO: 326894 - RNA, 20 nt, Human herpesvirus 6
ucuucgaauacuuucaugau

SEQ ID NO: 326895 - RNA, 22 nt, Human herpesvirus 6
ucuucgaauacuuucaugauuc

SEQ ID NO: 326896 - RNA, 22 nt, Human herpesvirus 6
ucuucggauucgcaagcuauca

SEQ ID NO: 326897 - RNA, 11 nt, Human herpesvirus 6
ucuugaucaaa

SEQ ID NO: 326898 - RNA, 16 nt, Human herpesvirus 6
ucuugccgaauugugc

SEQ ID NO: 326899 - RNA, 16 nt, Human herpesvirus 6
ucuugguuguguauau

SEQ ID NO: 326900 - RNA, 16 nt, Human herpesvirus 6
ucuugucacucucgau

SEQ ID NO: 326901 - RNA, 21 nt, Human herpesvirus 6
ucuuguguucuaucacauagu

SEQ ID NO: 326902 - RNA, 16 nt, Human herpesvirus 6
ucuuguugaguuucag

SEQ ID NO: 326903 - RNA, 13 nt, Human herpesvirus 6
ucuuuaaaugagg

SEQ ID NO: 326904 - RNA, 21 nt, Human herpesvirus 6
ucuuuacaaaagacacaaucu

SEQ ID NO: 326905 - RNA, 15 nt, Human herpesvirus 6
ucuuuaccauuugac

SEQ ID NO: 326906 - RNA, 21 nt, Human herpesvirus 6
ucuuuauuaaauguuacugaa

SEQ ID NO: 326907 - RNA, 20 nt, Human herpesvirus 6
ucuuuccccagcacacccca

SEQ ID NO: 326908 - RNA, 17 nt, Human herpesvirus 6
ucuuucuaaaaucaaaa

SEQ ID NO: 326909 - RNA, 15 nt, Human herpesvirus 6
ucuuuuauugcugcg

SEQ ID NO: 326910 - RNA, 17 nt, Human herpesvirus 6
ucuuuuuaauuccaaga

SEQ ID NO: 326911 - RNA, 18 nt, Human herpesvirus 6
ugaaaaaaaaaauaucac

SEQ ID NO: 326912 - RNA, 18 nt, Human herpesvirus 6
ugaaaaaguaguugcuaa

SEQ ID NO: 326913 - RNA, 19 nt, Human herpesvirus 6
ugaaaaaguaguugcuaag

SEQ ID NO: 326914 - RNA, 14 nt, Human herpesvirus 6
ugaaaaccuuucaa

SEQ ID NO: 326915 - RNA, 16 nt, Human herpesvirus 6
ugaaaagacuuacuca

SEQ ID NO: 326916 - RNA, 18 nt, Human herpesvirus 6
ugaaaauaaacaguuaua

SEQ ID NO: 326917 - RNA, 20 nt, Human herpesvirus 6
ugaaaccaaagcauacucaa

SEQ ID NO: 326918 - RNA, 23 nt, Human herpesvirus 6
ugaaacggcgcggagcccaagaa

SEQ ID NO: 326919 - RNA, 20 nt, Human herpesvirus 6
ugaaacuccccagagaaaau

SEQ ID NO: 326920 - RNA, 15 nt, Human herpesvirus 6
ugaaaguauuuuacu

SEQ ID NO: 326921 - RNA, 15 nt, Human herpesvirus 6
ugaaauaucagaaau

SEQ ID NO: 326922 - RNA, 19 nt, Human herpesvirus 6
ugaaaucacguacuaucuu

SEQ ID NO: 326923 - RNA, 15 nt, Human herpesvirus 6
ugaaaucuacuguac

SEQ ID NO: 326924 - RNA, 18 nt, Human herpesvirus 6
ugaaauucaaaauaaaua

SEQ ID NO: 326925 - RNA, 23 nt, Human herpesvirus 6
ugaaccgcguauguuuuaucgag

SEQ ID NO: 326926 - RNA, 17 nt, Human herpesvirus 6
ugaacgcagcguaaugu

SEQ ID NO: 326927 - RNA, 21 nt, Human herpesvirus 6
ugaacgcgucgguaaacaauu

SEQ ID NO: 326928 - RNA, 19 nt, Human herpesvirus 6
ugaagaaaaaaacugugaa

SEQ ID NO: 326929 - RNA, 21 nt, Human herpesvirus 6
ugaagaaaauugcagaucuaa

SEQ ID NO: 326930 - RNA, 22 nt, Human herpesvirus 6
ugaagaaaauugcagaucuaau

SEQ ID NO: 326931 - RNA, 19 nt, Human herpesvirus 6
ugaagaaguuaacuaugga

SEQ ID NO: 326932 - RNA, 14 nt, Human herpesvirus 6
ugaagaggugcgaa

SEQ ID NO: 326933 - RNA, 18 nt, Human herpesvirus 6
ugaagaucacgcccauau

SEQ ID NO: 326934 - RNA, 20 nt, Human herpesvirus 6
ugaagauuugacauugcuga

SEQ ID NO: 326935 - RNA, 16 nt, Human herpesvirus 6
ugaaggcugccaugaa

SEQ ID NO: 326936 - RNA, 17 nt, Human herpesvirus 6
ugaaggcugccaugaaa

SEQ ID NO: 326937 - RNA, 14 nt, Human herpesvirus 6
ugaauguguucaca

SEQ ID NO: 326938 - RNA, 20 nt, Human herpesvirus 6
ugaauugugcaagcuguaug

SEQ ID NO: 326939 - RNA, 11 nt, Human herpesvirus 6
ugaauuuaccg

SEQ ID NO: 326940 - RNA, 19 nt, Human herpesvirus 6
ugacagaauucuucuguga

SEQ ID NO: 326941 - RNA, 21 nt, Human herpesvirus 6
ugacagcgauacaauaacaau

SEQ ID NO: 326942 - RNA, 13 nt, Human herpesvirus 6
ugacaucugcaaa

SEQ ID NO: 326943 - RNA, 15 nt, Human herpesvirus 6
ugacauggaagacaa

SEQ ID NO: 326944 - RNA, 12 nt, Human herpesvirus 6
ugacauugcuga

SEQ ID NO: 326945 - RNA, 13 nt, Human herpesvirus 6
ugaccggccauca

SEQ ID NO: 326946 - RNA, 23 nt, Human herpesvirus 6
ugaccuuacggggagcuuggaag

SEQ ID NO: 326947 - RNA, 16 nt, Human herpesvirus 6
uguauuuuucuuugca

SEQ ID NO: 326948 - RNA, 16 nt, Human herpesvirus 6
ugucaaauagccaaaa

SEQ ID NO: 326949 - RNA, 13 nt, Human herpesvirus 6
ugucaaguuucac

SEQ ID NO: 326950 - RNA, 21 nt, Human herpesvirus 6
uguccagugauaacgaugcuu

SEQ ID NO: 326951 - RNA, 17 nt, Human herpesvirus 6
ugucccggggggaaucg

SEQ ID NO: 326952 - RNA, 15 nt, Human herpesvirus 6
ugucgcacuccgugu

SEQ ID NO: 326953 - RNA, 16 nt, Human herpesvirus 6
ugucggccgugaugca

SEQ ID NO: 326954 - RNA, 21 nt, Human herpesvirus 6
ugucggcgaugcaucugccau

SEQ ID NO: 326955 - RNA, 22 nt, Human herpesvirus 6
ugucgguaaacuuaccauauau

SEQ ID NO: 326956 - RNA, 16 nt, Human herpesvirus 6
ugucgucacuccaauc

SEQ ID NO: 326957 - RNA, 15 nt, Human herpesvirus 6
ugucucgcaaacagc

SEQ ID NO: 326958 - RNA, 22 nt, Human herpesvirus 6
ugucucgggggcauuagucuua

SEQ ID NO: 326959 - RNA, 13 nt, Human herpesvirus 6
ugucuggcagcua

SEQ ID NO: 326960 - RNA, 16 nt, Human herpesvirus 6
ugucuugauaacggcu

SEQ ID NO: 326961 - RNA, 21 nt, Human herpesvirus 6
ugugaacggagauauaaucua

SEQ ID NO: 326962 - RNA, 14 nt, Human herpesvirus 6
ugugacgauagugu

SEQ ID NO: 326963 - RNA, 18 nt, Human herpesvirus 6
ugugauuaaaaaaccgcu

SEQ ID NO: 326964 - RNA, 21 nt, Human herpesvirus 6
ugugauuuuagacaaaacugu

SEQ ID NO: 326965 - RNA, 14 nt, Human herpesvirus 6
ugugcaagcuguau

SEQ ID NO: 326966 - RNA, 17 nt, Human herpesvirus 6
ugugcaucagcauauga

SEQ ID NO: 326967 - RNA, 18 nt, Human herpesvirus 6
ugugcaucagcauaugau

SEQ ID NO: 326968 - RNA, 14 nt, Human herpesvirus 6
uguggauaucucaa

SEQ ID NO: 326969 - RNA, 21 nt, Human herpesvirus 6
ugugguugccaguaaaucuuc

SEQ ID NO: 326970 - RNA, 14 nt, Human herpesvirus 6
uguguagcaucuua

SEQ ID NO: 326971 - RNA, 13 nt, Human herpesvirus 6
uguguaucuguga

SEQ ID NO: 326972 - RNA, 16 nt, Human herpesvirus 6
uguguaucugugaaca

SEQ ID NO: 326973 - RNA, 20 nt, Human herpesvirus 6
ugugucaugauuaugccguc

SEQ ID NO: 326974 - RNA, 12 nt, Human herpesvirus 6
ugugugauauca

SEQ ID NO: 326975 - RNA, 18 nt, Human herpesvirus 6
uguguuagcuuugcgaua

SEQ ID NO: 326976 - RNA, 13 nt, Human herpesvirus 6
uguguucagucua

SEQ ID NO: 326977 - RNA, 17 nt, Human herpesvirus 6
uguguuuacauauacau

SEQ ID NO: 326978 - RNA, 14 nt, Human herpesvirus 6
uguuacugauggca

SEQ ID NO: 326979 - RNA, 16 nt, Human herpesvirus 6
uguuaguauacagaau

SEQ ID NO: 326980 - RNA, 18 nt, Human herpesvirus 6
uguuauaacacaacaagu

SEQ ID NO: 326981 - RNA, 19 nt, Human herpesvirus 6
uguuauaaggaagauucag

SEQ ID NO: 326982 - RNA, 17 nt, Human herpesvirus 6
uguuaugaucuagcuau

SEQ ID NO: 326983 - RNA, 18 nt, Human herpesvirus 6
uguuauguaaagaaauaa

SEQ ID NO: 326984 - RNA, 19 nt, Human herpesvirus 6
uguuauuucgggacaaaac

SEQ ID NO: 326985 - RNA, 21 nt, Human herpesvirus 6
uguucccggggcccacagcau

SEQ ID NO: 326986 - RNA, 13 nt, Human herpesvirus 6
uguucgaaaaagu

SEQ ID NO: 326987 - RNA, 14 nt, Human herpesvirus 6
uguucgaugauuau

SEQ ID NO: 326988 - RNA, 15 nt, Human herpesvirus 6
uguucgguuuagcua

SEQ ID NO: 326989 - RNA, 13 nt, Human herpesvirus 6
uguucuaucacau

SEQ ID NO: 326990 - RNA, 16 nt, Human herpesvirus 6
uguucuugggugugca

SEQ ID NO: 326991 - RNA, 20 nt, Human herpesvirus 6
uguucuuuauuaaauguuac

SEQ ID NO: 326992 - RNA, 13 nt, Human herpesvirus 6
uguugaguuucag

SEQ ID NO: 326993 - RNA, 16 nt, Human herpesvirus 6
uguuucauccaaauac

SEQ ID NO: 326994 - RNA, 16 nt, Human herpesvirus 6
uguuugcagaugagcc

SEQ ID NO: 326995 - RNA, 20 nt, Human herpesvirus 6
uguuuguaaauggcauugaa

SEQ ID NO: 326996 - RNA, 22 nt, Human herpesvirus 6
uguuuuagaaacauuugcugau

SEQ ID NO: 326997 - RNA, 20 nt, Human herpesvirus 6
uguuuuagucuauccaugaa

SEQ ID NO: 326998 - RNA, 15 nt, Human herpesvirus 6
uguuuuuagauuccg

SEQ ID NO: 326999 - RNA, 15 nt, Human herpesvirus 6
uuaaaaaaaauagca

SEQ ID NO: 327000 - RNA, 22 nt, Human herpesvirus 6
uuaaaaagaaugggauugugau

SEQ ID NO: 327001 - RNA, 22 nt, Human herpesvirus 6
uuaaaacaggaagcgccauaaa

SEQ ID NO: 327002 - RNA, 20 nt, Human herpesvirus 6
uuaaaauaauuacauuaaaa

SEQ ID NO: 327003 - RNA, 17 nt, Human herpesvirus 6
uuaaaauagaagucuca

SEQ ID NO: 327004 - RNA, 18 nt, Human herpesvirus 6
uuaaaauucgagauaaaa

SEQ ID NO: 327005 - RNA, 21 nt, Human herpesvirus 6
uuaaacaacacagcacauaac

SEQ ID NO: 327006 - RNA, 13 nt, Human herpesvirus 6
uuaaacacuaaau

SEQ ID NO: 327007 - RNA, 15 nt, Human herpesvirus 6
uuaaagaaacagauu

SEQ ID NO: 327008 - RNA, 21 nt, Human herpesvirus 6
uuaaaggaugcggacucugac

SEQ ID NO: 327009 - RNA, 15 nt, Human herpesvirus 6
uuaacaguacuauga

SEQ ID NO: 327010 - RNA, 22 nt, Human herpesvirus 6
uuaacgcgaucguagacguuua

SEQ ID NO: 327011 - RNA, 21 nt, Human herpesvirus 6
uuaacuaagauugugcaguua

SEQ ID NO: 327012 - RNA, 15 nt, Human herpesvirus 6
uuaagaaaacaugag

SEQ ID NO: 327013 - RNA, 22 nt, Human herpesvirus 6
uuaagagugcaacaaaaagcuu

SEQ ID NO: 327014 - RNA, 13 nt, Human herpesvirus 6
uuaagcaaaaaca

SEQ ID NO: 327015 - RNA, 20 nt, Human herpesvirus 6
uuaauaagucuuuagaacag

SEQ ID NO: 327016 - RNA, 13 nt, Human herpesvirus 6
uuaaucuaauaaa

SEQ ID NO: 327017 - RNA, 18 nt, Human herpesvirus 6
uuaaugauauauugugau

SEQ ID NO: 327018 - RNA, 23 nt, Human herpesvirus 6
uuaauuacauauagucaauguug

SEQ ID NO: 327019 - RNA, 17 nt, Human herpesvirus 6
uuaauuaccuauaguca

SEQ ID NO: 327020 - RNA, 19 nt, Human herpesvirus 6
uuaauuaccuauagucaau

SEQ ID NO: 327021 - RNA, 23 nt, Human herpesvirus 6
uuaauuaccuauagucaauguug

SEQ ID NO: 327022 - RNA, 14 nt, Human herpesvirus 6
uuaauuccaagaca

SEQ ID NO: 327023 - RNA, 18 nt, Human herpesvirus 6
uuacaaaagacacaaucu

SEQ ID NO: 327024 - RNA, 17 nt, Human herpesvirus 6
uuacaacugaaacuuca

SEQ ID NO: 327025 - RNA, 15 nt, Human herpesvirus 6
uuacagcacuuugcg

SEQ ID NO: 327026 - RNA, 14 nt, Human herpesvirus 6
uuacaguguuucca

SEQ ID NO: 327027 - RNA, 17 nt, Human herpesvirus 6
uuacauagaaauuacaa

SEQ ID NO: 327028 - RNA, 16 nt, Human herpesvirus 6
uuacauauagucaaug

SEQ ID NO: 327029 - RNA, 18 nt, Human herpesvirus 6
uuacauauagucaauguu

SEQ ID NO: 327030 - RNA, 18 nt, Human herpesvirus 6
uuaccguaaacaaauucu

SEQ ID NO: 327031 - RNA, 20 nt, Human herpesvirus 6
uuaccguaaacaaauucuua

SEQ ID NO: 327032 - RNA, 19 nt, Human herpesvirus 6
uuaccguuuaaacuaugca

SEQ ID NO: 327033 - RNA, 13 nt, Human herpesvirus 6
uuaccuauaguca

SEQ ID NO: 327034 - RNA, 18 nt, Human herpesvirus 6
uuaccuauagucaauguu

SEQ ID NO: 327035 - RNA, 13 nt, Human herpesvirus 6
uuaccuaucgucc

SEQ ID NO: 327036 - RNA, 21 nt, Human herpesvirus 6
uuaccuucaaagugauuccag

SEQ ID NO: 327037 - RNA, 16 nt, Human herpesvirus 6
uuacggcaacauaccc

SEQ ID NO: 327038 - RNA, 18 nt, Human herpesvirus 6
uuacuaccucuaaaccca

SEQ ID NO: 327039 - RNA, 22 nt, Human herpesvirus 6
uuacuguuucuuugacauuuau

SEQ ID NO: 327040 - RNA, 22 nt, Human herpesvirus 6
uuacuugauaaacuguaugcaa

SEQ ID NO: 327041 - RNA, 13 nt, Human herpesvirus 6
uuagaaauuacau

SEQ ID NO: 327042 - RNA, 13 nt, Human herpesvirus 6
uuagaaauucuau

SEQ ID NO: 327043 - RNA, 16 nt, Human herpesvirus 6
uuagaaauucuaugua

SEQ ID NO: 327044 - RNA, 22 nt, Human herpesvirus 6
uuagagacgcacccuacaaucu

SEQ ID NO: 327045 - RNA, 23 nt, Human herpesvirus 6
uuagagacgcacccuacaaucug

SEQ ID NO: 327046 - RNA, 21 nt, Human herpesvirus 6
uuagagacgugauacuauaaa

SEQ ID NO: 327047 - RNA, 16 nt, Human herpesvirus 6
uuagagcuacgccaaa

SEQ ID NO: 327048 - RNA, 17 nt, Human herpesvirus 6
uuagcaaucauuagcau

SEQ ID NO: 327049 - RNA, 23 nt, Human herpesvirus 6
uuagcgcuguauguuauguaauu

SEQ ID NO: 327050 - RNA, 15 nt, Human herpesvirus 6
uuaggacacuuucaa

SEQ ID NO: 327051 - RNA, 21 nt, Human herpesvirus 6
uuaggcugcagccccaaaaca

SEQ ID NO: 327052 - RNA, 22 nt, Human herpesvirus 6
uuagggauacguauauugugua

SEQ ID NO: 327053 - RNA, 21 nt, Human herpesvirus 6
uuaguaugggugagugcauua

SEQ ID NO: 327054 - RNA, 21 nt, Human herpesvirus 6
uuagucgcacacacaagaaca

SEQ ID NO: 327055 - RNA, 23 nt, Human herpesvirus 6
uuauaaacccauaggugauuuca

SEQ ID NO: 327056 - RNA, 14 nt, Human herpesvirus 6
uuauaagcaaacau

SEQ ID NO: 327057 - RNA, 16 nt, Human herpesvirus 6
uuauaagucaucauau

SEQ ID NO: 327058 - RNA, 14 nt, Human herpesvirus 6
uuauaauauuccug

SEQ ID NO: 327059 - RNA, 13 nt, Human herpesvirus 6
uuauagauagcuc

SEQ ID NO: 327060 - RNA, 18 nt, Human herpesvirus 6
uuauaugcgucagaccuc

SEQ ID NO: 327061 - RNA, 12 nt, Human herpesvirus 6
uuaucaaugaua

SEQ ID NO: 327062 - RNA, 13 nt, Human herpesvirus 6
uuaucaaugauac

SEQ ID NO: 327063 - RNA, 10 nt, Human herpesvirus 6
uuauccaucc

SEQ ID NO: 327064 - RNA, 16 nt, Human herpesvirus 6
uuaucgaccaugugua

SEQ ID NO: 327065 - RNA, 19 nt, Human herpesvirus 6
uuaucgaccauguguauau

SEQ ID NO: 327066 - RNA, 20 nt, Human herpesvirus 6
uuaucgauguagauaaauau

SEQ ID NO: 327067 - RNA, 17 nt, Human herpesvirus 6
uuaugaucuagcuauag

SEQ ID NO: 327068 - RNA, 20 nt, Human herpesvirus 6
uuaugugucaaguuucacca

SEQ ID NO: 327069 - RNA, 14 nt, Human herpesvirus 6
uuauuaacaaugaa

SEQ ID NO: 327070 - RNA, 12 nt, Human herpesvirus 6
uuauucugcuau

SEQ ID NO: 327071 - RNA, 14 nt, Human herpesvirus 6
uuauuggaccacga

SEQ ID NO: 327072 - RNA, 15 nt, Human herpesvirus 6
uuauuuucaauauca

SEQ ID NO: 327073 - RNA, 18 nt, Human herpesvirus 6
uuauuuugggauacauaa

SEQ ID NO: 327074 - RNA, 22 nt, Human herpesvirus 6
uucaaaaaccgccaagagauag

SEQ ID NO: 327075 - RNA, 13 nt, Human herpesvirus 6
uucaaaaugguua

SEQ ID NO: 327076 - RNA, 21 nt, Human herpesvirus 6
uucaagagcgagaucuauuuc

SEQ ID NO: 327077 - RNA, 22 nt, Human herpesvirus 6
uucaaguaagggcuuuucaaga

SEQ ID NO: 327078 - RNA, 17 nt, Human herpesvirus 6
uucaauaaaaacucaau

SEQ ID NO: 327079 - RNA, 17 nt, Human herpesvirus 6
uucaaucuguguuucca

SEQ ID NO: 327080 - RNA, 21 nt, Human herpesvirus 6
uucacauaagacuuauaauau

SEQ ID NO: 327081 - RNA, 17 nt, Human herpesvirus 6
uucacauauaugaugcu

SEQ ID NO: 327082 - RNA, 21 nt, Human herpesvirus 6
uucaccacugugauaugcaaa

SEQ ID NO: 327083 - RNA, 13 nt, Human herpesvirus 6
uucaccagauuca

SEQ ID NO: 327084 - RNA, 11 nt, Human herpesvirus 6
uucacgugcac

SEQ ID NO: 327085 - RNA, 14 nt, Human herpesvirus 6
uucagaaaguucua

SEQ ID NO: 327086 - RNA, 22 nt, Human herpesvirus 6
uucagaagagaugaaagacaga

SEQ ID NO: 327087 - RNA, 23 nt, Human herpesvirus 6
uucagaagagaugaaagacagag

SEQ ID NO: 327088 - RNA, 13 nt, Human herpesvirus 6
uucagacauccag

SEQ ID NO: 327089 - RNA, 14 nt, Human herpesvirus 6
uucagacauccaga

SEQ ID NO: 327090 - RNA, 12 nt, Human herpesvirus 6
uucagagugaau

SEQ ID NO: 327091 - RNA, 14 nt, Human herpesvirus 6
uucaucagcauuaa

SEQ ID NO: 327092 - RNA, 12 nt, Human herpesvirus 6
uucaucaguuuc

SEQ ID NO: 327093 - RNA, 16 nt, Human herpesvirus 6
uucaucaucaccaagu

SEQ ID NO: 327094 - RNA, 13 nt, Human herpesvirus 6
uucaucauuccag

SEQ ID NO: 327095 - RNA, 12 nt, Human herpesvirus 6
uucauccaugaa

SEQ ID NO: 327096 - RNA, 14 nt, Human herpesvirus 6
uucauccaugaaau

SEQ ID NO: 327097 - RNA, 16 nt, Human herpesvirus 6
uucaugauauuccaga

SEQ ID NO: 327098 - RNA, 16 nt, Human herpesvirus 6
uucauucgcuaguaau

SEQ ID NO: 327099 - RNA, 19 nt, Human herpesvirus 6
uucauuucuccauaccguu

SEQ ID NO: 327100 - RNA, 17 nt, Human herpesvirus 6
uuccaagacauguacau

SEQ ID NO: 327101 - RNA, 22 nt, Human herpesvirus 6
uuccacgggaucguagguaauu

SEQ ID NO: 327102 - RNA, 19 nt, Human herpesvirus 6
uuccagacaauaaucauua

SEQ ID NO: 327103 - RNA, 21 nt, Human herpesvirus 6
uuccagggaacuugauguuga

SEQ ID NO: 327104 - RNA, 17 nt, Human herpesvirus 6
uuccaguauugaagaaa

SEQ ID NO: 327105 - RNA, 18 nt, Human herpesvirus 6
uuccauaaguuaauucca

SEQ ID NO: 327106 - RNA, 19 nt, Human herpesvirus 6
uuccauaaguuaauuccag

SEQ ID NO: 327107 - RNA, 17 nt, Human herpesvirus 6
uucccuucagacaucca

SEQ ID NO: 327108 - RNA, 22 nt, Human herpesvirus 6
uucccuuuaaccccacgaaaaa

SEQ ID NO: 327109 - RNA, 23 nt, Human herpesvirus 6
uucccuuuaaccccacgaaaaau

SEQ ID NO: 327110 - RNA, 16 nt, Human herpesvirus 6
uuccgcgauacccagc

SEQ ID NO: 327111 - RNA, 21 nt, Human herpesvirus 6
uuccgucucgccuaccuucac

SEQ ID NO: 327112 - RNA, 21 nt, Human herpesvirus 6
uuccuaugucaauaguuuuac

SEQ ID NO: 327113 - RNA, 15 nt, Human herpesvirus 6
uuccucaaaugaauu

SEQ ID NO: 327114 - RNA, 17 nt, Human herpesvirus 6
uuccuggacauggugaa

SEQ ID NO: 327115 - RNA, 13 nt, Human herpesvirus 6
uuccuuaauucua

SEQ ID NO: 327116 - RNA, 21 nt, Human herpesvirus 6
uucgauguggagaagaucuaa

SEQ ID NO: 327117 - RNA, 16 nt, Human herpesvirus 6
uucgccuuguauuuca

SEQ ID NO: 327118 - RNA, 23 nt, Human herpesvirus 6
uucgcggugcagaacaucucaga

SEQ ID NO: 327119 - RNA, 14 nt, Human herpesvirus 6
uucggaacauuguu

SEQ ID NO: 327120 - RNA, 18 nt, Human herpesvirus 6
uucgguuucgucgcaaaa

SEQ ID NO: 327121 - RNA, 15 nt, Human herpesvirus 6
uucgucgagaaccac

SEQ ID NO: 327122 - RNA, 22 nt, Human herpesvirus 6
uucgucgagaaccaccagagac

SEQ ID NO: 327123 - RNA, 14 nt, Human herpesvirus 6
uucgucuccuggga

SEQ ID NO: 327124 - RNA, 17 nt, Human herpesvirus 6
uucgugcucgcauuucu

SEQ ID NO: 327125 - RNA, 20 nt, Human herpesvirus 6
uucgugcugugauagcuaug

SEQ ID NO: 327126 - RNA, 21 nt, Human herpesvirus 6
uucguuaaaaaaaaugugucu

SEQ ID NO: 327127 - RNA, 12 nt, Human herpesvirus 6
uucuauauccaa

SEQ ID NO: 327128 - RNA, 18 nt, Human herpesvirus 6
uucucaugcgcaguguua

SEQ ID NO: 327129 - RNA, 16 nt, Human herpesvirus 6
uucucguaguugcauu

SEQ ID NO: 327130 - RNA, 17 nt, Human herpesvirus 6
uucucguuuacuccgau

SEQ ID NO: 327131 - RNA, 12 nt, Human herpesvirus 6
uucucugcaaaa

SEQ ID NO: 327132 - RNA, 17 nt, Human herpesvirus 6
uucucuuuccagcccua

SEQ ID NO: 327133 - RNA, 14 nt, Human herpesvirus 6
uugggcgaagaccu

SEQ ID NO: 327134 - RNA, 12 nt, Human herpesvirus 6
uuggguauuuau

SEQ ID NO: 327135 - RNA, 21 nt, Human herpesvirus 6
uuggucucuuugcgucuucua

SEQ ID NO: 327136 - RNA, 12 nt, Human herpesvirus 6
uuggugugacau

SEQ ID NO: 327137 - RNA, 17 nt, Human herpesvirus 6
uugguguggaacauacu

SEQ ID NO: 327138 - RNA, 23 nt, Human herpesvirus 6
uugguguggaacauacuggugga

SEQ ID NO: 327139 - RNA, 16 nt, Human herpesvirus 6
uuguaauuucuaugua

SEQ ID NO: 327140 - RNA, 21 nt, Human herpesvirus 6
uuguauauguguuaugaauga

SEQ ID NO: 327141 - RNA, 16 nt, Human herpesvirus 6
uuguaucacgucuccu

SEQ ID NO: 327142 - RNA, 15 nt, Human herpesvirus 6
uuguauuauguaaua

SEQ ID NO: 327143 - RNA, 18 nt, Human herpesvirus 6
uuguauuuuuaauuugaa

SEQ ID NO: 327144 - RNA, 21 nt, Human herpesvirus 6
uugucagucaacgcaauucca

SEQ ID NO: 327145 - RNA, 20 nt, Human herpesvirus 6
uugucgaagucuucuugggc

SEQ ID NO: 327146 - RNA, 16 nt, Human herpesvirus 6
uugucggcgaugcauc

SEQ ID NO: 327147 - RNA, 22 nt, Human herpesvirus 6
uugucggcgaugcaucugccau

SEQ ID NO: 327148 - RNA, 23 nt, Human herpesvirus 6
uugucgggaaauaaaaaauauua

SEQ ID NO: 327149 - RNA, 22 nt, Human herpesvirus 6
uugucuaauuucgacaauccua

SEQ ID NO: 327150 - RNA, 16 nt, Human herpesvirus 6
uugugcaagcuguaug

SEQ ID NO: 327151 - RNA, 17 nt, Human herpesvirus 6
uugugcaagcuguauga

SEQ ID NO: 327152 - RNA, 14 nt, Human herpesvirus 6
uuguguagggugcu

SEQ ID NO: 327153 - RNA, 15 nt, Human herpesvirus 6
uuguguaucugugaa

SEQ ID NO: 327154 - RNA, 15 nt, Human herpesvirus 6
uugugucaugauuau

SEQ ID NO: 327155 - RNA, 19 nt, Human herpesvirus 6
uugugucauguuuacugca

SEQ ID NO: 327156 - RNA, 16 nt, Human herpesvirus 6
uuguguucaagaacac

SEQ ID NO: 327157 - RNA, 20 nt, Human herpesvirus 6
uuguguucguggacaaugau

SEQ ID NO: 327158 - RNA, 20 nt, Human herpesvirus 6
uuguguuuauuugcccugag

SEQ ID NO: 327159 - RNA, 16 nt, Human herpesvirus 6
uuguuuaaugcauuca

SEQ ID NO: 327160 - RNA, 17 nt, Human herpesvirus 6
uuuaaaccucuguagau

SEQ ID NO: 327161 - RNA, 22 nt, Human herpesvirus 6
uuuaaagauagaauaaugccua

SEQ ID NO: 327162 - RNA, 16 nt, Human herpesvirus 6
uuuaaaguuuugugau

SEQ ID NO: 327163 - RNA, 15 nt, Human herpesvirus 6
uuuaaaugaggcuau

SEQ ID NO: 327164 - RNA, 14 nt, Human herpesvirus 6
uuuaacuugaugua

SEQ ID NO: 327165 - RNA, 15 nt, Human herpesvirus 6
uuuaacuugauguau

SEQ ID NO: 327166 - RNA, 14 nt, Human herpesvirus 6
uuuaauacauuucc

SEQ ID NO: 327167 - RNA, 16 nt, Human herpesvirus 6
uuuaauaguuugccau

SEQ ID NO: 327168 - RNA, 11 nt, Human herpesvirus 6
uuuaaucucac

SEQ ID NO: 327169 - RNA, 22 nt, Human herpesvirus 6
uuuacaauguucaauuacucaa

SEQ ID NO: 327170 - RNA, 15 nt, Human herpesvirus 6
uuuaccgaaccauaa

SEQ ID NO: 327171 - RNA, 20 nt, Human herpesvirus 6
uuuaccguuuaaacuaugca

SEQ ID NO: 327172 - RNA, 22 nt, Human herpesvirus 6
uuuacugacgguuagguuuaau

SEQ ID NO: 327173 - RNA, 18 nt, Human herpesvirus 6
uuuagagaaaagugcaag

SEQ ID NO: 327174 - RNA, 18 nt, Human herpesvirus 6
uuuagauauauacuuuca

SEQ ID NO: 327175 - RNA, 21 nt, Human herpesvirus 6
uuuaguacaguaugucuccaa

SEQ ID NO: 327176 - RNA, 22 nt, Human herpesvirus 6
uuuauaaugaguuuuucgcaau

SEQ ID NO: 327177 - RNA, 21 nt, Human herpesvirus 6
uuuauagagcaacucaucaaa

SEQ ID NO: 327178 - RNA, 23 nt, Human herpesvirus 6
uuuaucccccguacaagcuuaau

SEQ ID NO: 327179 - RNA, 21 nt, Human herpesvirus 6
uuuaucgcaacacacagugaa

SEQ ID NO: 327180 - RNA, 16 nt, Human herpesvirus 6
uuuaucgcagcaucau

SEQ ID NO: 327181 - RNA, 18 nt, Human herpesvirus 6
uuuaugaggaacugguga

SEQ ID NO: 327182 - RNA, 15 nt, Human herpesvirus 6
uuuauuuuuauauuc

SEQ ID NO: 327183 - RNA, 13 nt, Human herpesvirus 6
uuucaagauauau

SEQ ID NO: 327184 - RNA, 13 nt, Human herpesvirus 6
uuucaauauauga

SEQ ID NO: 327185 - RNA, 15 nt, Human herpesvirus 6
uuucacauauaugau

SEQ ID NO: 327186 - RNA, 20 nt, Human herpesvirus 6
uuucacauauaugaugcugu

SEQ ID NO: 327187 - RNA, 18 nt, Human herpesvirus 6
uuucagguugccaauaaa

SEQ ID NO: 327188 - RNA, 12 nt, Human herpesvirus 6
uuucaguauuaa

SEQ ID NO: 327189 - RNA, 17 nt, Human herpesvirus 6
uuucaucauuuacaaaa

SEQ ID NO: 327190 - RNA, 15 nt, Human herpesvirus 6
uuucaugaucucacg

SEQ ID NO: 327191 - RNA, 18 nt, Human herpesvirus 6
uuuccauaaguuaauucc

SEQ ID NO: 327192 - RNA, 13 nt, Human herpesvirus 6
uuuccaugugaau

SEQ ID NO: 327193 - RNA, 19 nt, Human herpesvirus 6
uuucccaauuuguguuuau

SEQ ID NO: 327194 - RNA, 18 nt, Human herpesvirus 6
uuuccccagcacacccca

SEQ ID NO: 327195 - RNA, 13 nt, Human herpesvirus 6
uuucccucagggu

SEQ ID NO: 327196 - RNA, 22 nt, Human herpesvirus 6
uuuccuuugugugauaucauuc

SEQ ID NO: 327197 - RNA, 17 nt, Human herpesvirus 6
uuucggugcacauggaa

SEQ ID NO: 327198 - RNA, 15 nt, Human herpesvirus 6
uuucuaaaaggcucu

SEQ ID NO: 327199 - RNA, 19 nt, Human herpesvirus 6
cuggccgaguuuggacaua

SEQ ID NO: 327200 - RNA, 24 nt, Human herpesvirus 6
cugggguguucguaaugugcagau

SEQ ID NO: 327201 - RNA, 18 nt, Human herpesvirus 6
cugguaaauuuuaucgaa

SEQ ID NO: 327202 - RNA, 19 nt, Human herpesvirus 6
cugguauccaauuaacaca

SEQ ID NO: 327203 - RNA, 14 nt, Human herpesvirus 6
cuguacaaaaucaa

SEQ ID NO: 327204 - RNA, 15 nt, Human herpesvirus 6
cuguauggcaaaagc

SEQ ID NO: 327205 - RNA, 17 nt, Human herpesvirus 6
cuguccaucuucagaca

SEQ ID NO: 327206 - RNA, 14 nt, Human herpesvirus 6
cuguccucuuugaa

SEQ ID NO: 327207 - RNA, 15 nt, Human herpesvirus 6
cugucgaaauucacc

SEQ ID NO: 327208 - RNA, 19 nt, Human herpesvirus 6
cugucgaguaauuguggau

SEQ ID NO: 327209 - RNA, 19 nt, Human herpesvirus 6
cugucucggauauauacuu

SEQ ID NO: 327210 - RNA, 22 nt, Human herpesvirus 6
cugucucggauauauacuuacu

SEQ ID NO: 327211 - RNA, 14 nt, Human herpesvirus 6
cugucuugauaacg

SEQ ID NO: 327212 - RNA, 17 nt, Human herpesvirus 6
cugucuugauaacggcu

SEQ ID NO: 327213 - RNA, 17 nt, Human herpesvirus 6
cugugacgccuugaugu

SEQ ID NO: 327214 - RNA, 12 nt, Human herpesvirus 6
cugugauaugca

SEQ ID NO: 327215 - RNA, 13 nt, Human herpesvirus 6
cugugauaugcaa

SEQ ID NO: 327216 - RNA, 14 nt, Human herpesvirus 6
cugugauaugcaaa

SEQ ID NO: 327217 - RNA, 13 nt, Human herpesvirus 6
cuguguauuguaa

SEQ ID NO: 327218 - RNA, 22 nt, Human herpesvirus 6
cuguguguuauaaggaagauuc

SEQ ID NO: 327219 - RNA, 18 nt, Human herpesvirus 6
cuguucaacgucuucaaa

SEQ ID NO: 327220 - RNA, 15 nt, Human herpesvirus 6
cuguugaauuccaga

SEQ ID NO: 327221 - RNA, 17 nt, Human herpesvirus 6
cuguugaauuccagagg

SEQ ID NO: 327222 - RNA, 22 nt, Human herpesvirus 6
cuguuguguuuacauauacauu

SEQ ID NO: 327223 - RNA, 16 nt, Human herpesvirus 6
cuguuguuuuugggua

SEQ ID NO: 327224 - RNA, 16 nt, Human herpesvirus 6
cuguuuacgaaugaug

SEQ ID NO: 327225 - RNA, 16 nt, Human herpesvirus 6
cuguuuauugccaaua

SEQ ID NO: 327226 - RNA, 23 nt, Human herpesvirus 6
cuguuuucaccaucaaucucuau

SEQ ID NO: 327227 - RNA, 22 nt, Human herpesvirus 6
cuguuuuggugaacaccaauaa

SEQ ID NO: 327228 - RNA, 16 nt, Human herpesvirus 6
cuguuuuuuucuuaag

SEQ ID NO: 327229 - RNA, 15 nt, Human herpesvirus 6
cuuaaaaaaacacag

SEQ ID NO: 327230 - RNA, 20 nt, Human herpesvirus 6
cuuaaaaaaacacaguauuu

SEQ ID NO: 327231 - RNA, 15 nt, Human herpesvirus 6
cuuaaaacaaucaaa

SEQ ID NO: 327232 - RNA, 13 nt, Human herpesvirus 6
cuuaaacauguau

SEQ ID NO: 327233 - RNA, 18 nt, Human herpesvirus 6
cuuaaagcgugugauuca

SEQ ID NO: 327234 - RNA, 14 nt, Human herpesvirus 6
cuuaacuugcacuc

SEQ ID NO: 327235 - RNA, 14 nt, Human herpesvirus 6
cuuaauaucugacc

SEQ ID NO: 327236 - RNA, 15 nt, Human herpesvirus 6
cuuaauucuaaauac

SEQ ID NO: 327237 - RNA, 12 nt, Human herpesvirus 6
cuuacacgaugu

SEQ ID NO: 327238 - RNA, 15 nt, Human herpesvirus 6
cuuacaucgauccaa

SEQ ID NO: 327239 - RNA, 17 nt, Human herpesvirus 6
cuuacauuuuguacaaa

SEQ ID NO: 327240 - RNA, 22 nt, Human herpesvirus 6
cuuaccuucaaagugauuccag

SEQ ID NO: 327241 - RNA, 14 nt, Human herpesvirus 6
cuuacguaugugaa

SEQ ID NO: 327242 - RNA, 20 nt, Human herpesvirus 6
gagaugacaucugcaaaaaa

SEQ ID NO: 327243 - RNA, 22 nt, Human herpesvirus 6
gagauguauggagagcuuauau

SEQ ID NO: 327244 - RNA, 18 nt, Human herpesvirus 6
gagcaaagaaaugaccug

SEQ ID NO: 327245 - RNA, 22 nt, Human herpesvirus 6
gagcaacucaucaaauccucua

SEQ ID NO: 327246 - RNA, 16 nt, Human herpesvirus 6
gagccaagccauggaa

SEQ ID NO: 327247 - RNA, 17 nt, Human herpesvirus 6
gagccacuugcaaugug

SEQ ID NO: 327248 - RNA, 16 nt, Human herpesvirus 6
gagccuguggacgugc

SEQ ID NO: 327249 - RNA, 15 nt, Human herpesvirus 6
gagcggugugcaguu

SEQ ID NO: 327250 - RNA, 18 nt, Human herpesvirus 6
gagcuuguggaucaucuc

SEQ ID NO: 327251 - RNA, 19 nt, Human herpesvirus 6
gagcuuguggaucaucucc

SEQ ID NO: 327252 - RNA, 15 nt, Human herpesvirus 6
gagcuuuggcuguga

SEQ ID NO: 327253 - RNA, 22 nt, Human herpesvirus 6
gaggaacuggugagaaauaacu

SEQ ID NO: 327254 - RNA, 18 nt, Human herpesvirus 6
gaggaagauagcagaaua

SEQ ID NO: 327255 - RNA, 14 nt, Human herpesvirus 6
gaggaggaggaaga

SEQ ID NO: 327256 - RNA, 18 nt, Human herpesvirus 6
gaggagugaacauacaaa

SEQ ID NO: 327257 - RNA, 20 nt, Human herpesvirus 6
gaguaauugaacauuguaaa

SEQ ID NO: 327258 - RNA, 17 nt, Human herpesvirus 6
gaguacaagaccaucug

SEQ ID NO: 327259 - RNA, 19 nt, Human herpesvirus 6
gaguauauaaaaaacuaaa

SEQ ID NO: 327260 - RNA, 19 nt, Human herpesvirus 6
gagucccaucuauacaccc

SEQ ID NO: 327261 - RNA, 13 nt, Human herpesvirus 6
gagucgcuucuag

SEQ ID NO: 327262 - RNA, 14 nt, Human herpesvirus 6
gagucuugugugaa

SEQ ID NO: 327263 - RNA, 15 nt, Human herpesvirus 6
gagugauugugacaa

SEQ ID NO: 327264 - RNA, 12 nt, Human herpesvirus 6
gagugcauuaua

SEQ ID NO: 327265 - RNA, 21 nt, Human herpesvirus 6
gagugccucagaggugaguag

SEQ ID NO: 327266 - RNA, 19 nt, Human herpesvirus 6
gaguggacauuggucuuug

SEQ ID NO: 327267 - RNA, 16 nt, Human herpesvirus 6
gaguggaguccaguua

SEQ ID NO: 327268 - RNA, 21 nt, Human herpesvirus 6
gagugggaugcauuauacuga

SEQ ID NO: 327269 - RNA, 21 nt, Human herpesvirus 6
gaguucuguggccgaagaaga

SEQ ID NO: 327270 - RNA, 12 nt, Human herpesvirus 6
gaguuuggcaau

SEQ ID NO: 327271 - RNA, 15 nt, Human herpesvirus 6
gauaaaaacucacac

SEQ ID NO: 327272 - RNA, 22 nt, Human herpesvirus 6
gauaauauuugucguuguaguu

SEQ ID NO: 327273 - RNA, 19 nt, Human herpesvirus 6
gauacaauaacaauuauuc

SEQ ID NO: 327274 - RNA, 19 nt, Human herpesvirus 6
gauacauaauaucuaucuu

SEQ ID NO: 327275 - RNA, 17 nt, Human herpesvirus 6
gauacaucguuuguuga

SEQ ID NO: 327276 - RNA, 20 nt, Human herpesvirus 6
gauacguauauuguguaccu

SEQ ID NO: 327277 - RNA, 15 nt, Human herpesvirus 6
gauacuaaguguaau

SEQ ID NO: 327278 - RNA, 23 nt, Human herpesvirus 6
gccucuaaccguuguucuuggag

SEQ ID NO: 327279 - RNA, 21 nt, Human herpesvirus 6
gccucuccuauaaauacugaa

SEQ ID NO: 327280 - RNA, 14 nt, Human herpesvirus 6
gccugcauaugcag

SEQ ID NO: 327281 - RNA, 18 nt, Human herpesvirus 6
gccuggcacggugccaaa

SEQ ID NO: 327282 - RNA, 19 nt, Human herpesvirus 6
gccuugucaucaugugugc

SEQ ID NO: 327283 - RNA, 18 nt, Human herpesvirus 6
gccuuuuacuuacaucga

SEQ ID NO: 327284 - RNA, 13 nt, Human herpesvirus 6
gcgaaaugcaauc

SEQ ID NO: 327285 - RNA, 14 nt, Human herpesvirus 6
gcgaaccaggacag

SEQ ID NO: 327286 - RNA, 19 nt, Human herpesvirus 6
gcgaauuuguuaagcaacu

SEQ ID NO: 327287 - RNA, 19 nt, Human herpesvirus 6
gcgagauuguaauauucaa

SEQ ID NO: 327288 - RNA, 13 nt, Human herpesvirus 6
gcgaguagacuca

SEQ ID NO: 327289 - RNA, 14 nt, Human herpesvirus 6
gcgauacaauaaca

SEQ ID NO: 327290 - RNA, 12 nt, Human herpesvirus 6
gcgauuuacugg

SEQ ID NO: 327291 - RNA, 14 nt, Human herpesvirus 6
gcgcgacgugccac

SEQ ID NO: 327292 - RNA, 13 nt, Human herpesvirus 6
gcgcgcgugugug

SEQ ID NO: 327293 - RNA, 19 nt, Human herpesvirus 6
gcggaaauaaaaaauauua

SEQ ID NO: 327294 - RNA, 23 nt, Human herpesvirus 6
gcggaaauaaaaaauauuaauua

SEQ ID NO: 327295 - RNA, 17 nt, Human herpesvirus 6
gcggaguggaguccagu

SEQ ID NO: 327296 - RNA, 17 nt, Human herpesvirus 6
gcguagucgcuauagca

SEQ ID NO: 327297 - RNA, 14 nt, Human herpesvirus 6
gcgucaacaaacaa

SEQ ID NO: 327298 - RNA, 17 nt, Human herpesvirus 6
gcguguggaguugaaga

SEQ ID NO: 327299 - RNA, 14 nt, Human herpesvirus 6
gcgugugugcuccg

SEQ ID NO: 327300 - RNA, 19 nt, Human herpesvirus 6
gcguuagguguaaaucauc

SEQ ID NO: 327301 - RNA, 19 nt, Human herpesvirus 6
gcguuccgacucgauuuga

SEQ ID NO: 327302 - RNA, 14 nt, Human herpesvirus 6
gcguugugugauaa

SEQ ID NO: 327303 - RNA, 13 nt, Human herpesvirus 6
gcguuugcaaaac

SEQ ID NO: 327304 - RNA, 16 nt, Human herpesvirus 6
gcuagagaaaauuaua

SEQ ID NO: 327305 - RNA, 23 nt, Human herpesvirus 6
gcuaggacuucguucuugacaga

SEQ ID NO: 327306 - RNA, 15 nt, Human herpesvirus 6
gcuaucgucuacccu

SEQ ID NO: 327307 - RNA, 17 nt, Human herpesvirus 6
gcuaucgucuacccuau

SEQ ID NO: 327308 - RNA, 14 nt, Human herpesvirus 6
gcuaucugauuuug

SEQ ID NO: 327309 - RNA, 22 nt, Human herpesvirus 6
gcuaucuuggugugggugugau

SEQ ID NO: 327310 - RNA, 20 nt, Human herpesvirus 6
gcuauuguaccuagcagcaa

SEQ ID NO: 327311 - RNA, 14 nt, Human herpesvirus 6
gcuauuucuguuac

SEQ ID NO: 327312 - RNA, 15 nt, Human herpesvirus 6
gcuccuccccugucc

SEQ ID NO: 327313 - RNA, 16 nt, Human herpesvirus 6
gcucguucucuuucca

SEQ ID NO: 327314 - RNA, 15 nt, Human herpesvirus 6
gcucuauuacuauau

SEQ ID NO: 327315 - RNA, 21 nt, Human herpesvirus 6
gcucuggcggagaaaguuucu

SEQ ID NO: 327316 - RNA, 20 nt, Human herpesvirus 6
gcugagcugcagucucggga

SEQ ID NO: 327317 - RNA, 16 nt, Human herpesvirus 6
gcuggaaaacuauuaa

SEQ ID NO: 327318 - RNA, 17 nt, Human herpesvirus 6
gcuguaaauauucauau

SEQ ID NO: 327319 - RNA, 16 nt, Human herpesvirus 6
gcuguuuacgaaugau

SEQ ID NO: 327320 - RNA, 21 nt, Human herpesvirus 6
gcuuaccguucaucauuccag

SEQ ID NO: 327321 - RNA, 13 nt, Human herpesvirus 6
gcuuauaagcaaa

SEQ ID NO: 327322 - RNA, 16 nt, Human herpesvirus 6
gcuucuggcacaggca

SEQ ID NO: 327323 - RNA, 13 nt, Human herpesvirus 6
gcuucuuauauag

SEQ ID NO: 327324 - RNA, 22 nt, Human herpesvirus 6
gcuugugaaagaccguagcaaa

SEQ ID NO: 327325 - RNA, 15 nt, Human herpesvirus 6
gcuuuaucuagccaa

SEQ ID NO: 327326 - RNA, 16 nt, Human herpesvirus 6
gcuuucaguauuaacu

SEQ ID NO: 327327 - RNA, 18 nt, Human herpesvirus 6
gcuuucucgauugugaug

SEQ ID NO: 327328 - RNA, 17 nt, Human herpesvirus 6
gcuuugacgguuuauau

SEQ ID NO: 327329 - RNA, 21 nt, Human herpesvirus 6
gcuuuuacugauuaguuuuca

SEQ ID NO: 327330 - RNA, 15 nt, Human herpesvirus 6
ggaaaaaaaaucuau

SEQ ID NO: 327331 - RNA, 19 nt, Human herpesvirus 6
ggaaaacaaagaaucaaug

SEQ ID NO: 327332 - RNA, 12 nt, Human herpesvirus 6
ggaaaacagcuc

SEQ ID NO: 327333 - RNA, 22 nt, Human herpesvirus 6
ggaaaacccagcaugaugaucu

SEQ ID NO: 327334 - RNA, 17 nt, Human herpesvirus 6
ggaaaacucgcaccucu

SEQ ID NO: 327335 - RNA, 19 nt, Human herpesvirus 6
ggaaaauauuuccaugacu

SEQ ID NO: 327336 - RNA, 14 nt, Human herpesvirus 6
ggaaacgacaaaga

SEQ ID NO: 327337 - RNA, 21 nt, Human herpesvirus 6
ggaaauaaaaaauauuaauua

SEQ ID NO: 327338 - RNA, 14 nt, Human herpesvirus 6
ggaaaucugaauuu

SEQ ID NO: 327339 - RNA, 22 nt, Human herpesvirus 6
ggaacccagauuuguguucaag

SEQ ID NO: 327340 - RNA, 22 nt, Human herpesvirus 6
ggaagaacaggcggaagaacac

SEQ ID NO: 327341 - RNA, 12 nt, Human herpesvirus 6
ggaauuucuucc

SEQ ID NO: 327342 - RNA, 20 nt, Human herpesvirus 6
ggacaaugcagaacaacagc

SEQ ID NO: 327343 - RNA, 18 nt, Human herpesvirus 6
ggacacccgcguccucca

SEQ ID NO: 327344 - RNA, 15 nt, Human herpesvirus 6
ggacacgacaaaaca

SEQ ID NO: 327345 - RNA, 17 nt, Human herpesvirus 6
ggacagcuucuauuacu

SEQ ID NO: 327346 - RNA, 15 nt, Human herpesvirus 6
ggacauggugaaaga

SEQ ID NO: 327347 - RNA, 14 nt, Human herpesvirus 6
ggacgacacguggg

SEQ ID NO: 327348 - RNA, 22 nt, Human herpesvirus 6
ggacgcuagugaucacaaaaga

SEQ ID NO: 327349 - RNA, 13 nt, Human herpesvirus 6
ggagaagaucuaa

SEQ ID NO: 327350 - RNA, 13 nt, Human herpesvirus 6
ggagaggaccaag

SEQ ID NO: 327351 - RNA, 14 nt, Human herpesvirus 6
ggagaggaccaaga

SEQ ID NO: 327352 - RNA, 14 nt, Human herpesvirus 6
ggaggagugaacau

SEQ ID NO: 327353 - RNA, 19 nt, Human herpesvirus 6
ggaggccuucaugagccag

SEQ ID NO: 327354 - RNA, 15 nt, Human herpesvirus 6
ggauaauuuauggaa

SEQ ID NO: 327355 - RNA, 17 nt, Human herpesvirus 6
ggauacauaauaucuau

SEQ ID NO: 327356 - RNA, 17 nt, Human herpesvirus 6
ggauacguauauugugu

SEQ ID NO: 327357 - RNA, 20 nt, Human herpesvirus 6
ggaucugagugaauugugca

SEQ ID NO: 327358 - RNA, 15 nt, Human herpesvirus 6
ggaugcggacucuga

SEQ ID NO: 327359 - RNA, 16 nt, Human herpesvirus 6
ggaugcggacucugac

SEQ ID NO: 327360 - RNA, 22 nt, Human herpesvirus 6
ggauguuuucgcuugaugcaug

SEQ ID NO: 327361 - RNA, 21 nt, Human herpesvirus 6
ggauuaauaaaggauguuugu

SEQ ID NO: 327362 - RNA, 21 nt, Human herpesvirus 6
ggauuggaggcgaacguagaa

SEQ ID NO: 327363 - RNA, 19 nt, Human herpesvirus 6
ggauuguaucgagucuuua

SEQ ID NO: 327364 - RNA, 16 nt, Human herpesvirus 6
ggauugugauucugca

SEQ ID NO: 327365 - RNA, 21 nt, Human herpesvirus 6
ggauugugauucugcauuuau

SEQ ID NO: 327366 - RNA, 21 nt, Human herpesvirus 6
ggcacagugugaucaucacau

SEQ ID NO: 327367 - RNA, 15 nt, Human herpesvirus 6
ggcacaucuaugugu

SEQ ID NO: 327368 - RNA, 14 nt, Human herpesvirus 6
ggcacggugccaaa

SEQ ID NO: 327369 - RNA, 19 nt, Human herpesvirus 6
ggcagcugcaugguccaca

SEQ ID NO: 327370 - RNA, 20 nt, Human herpesvirus 6
ggcauagcagcaauaggcac

SEQ ID NO: 327371 - RNA, 22 nt, Human herpesvirus 6
ggccagccacugcggaguuuua

SEQ ID NO: 327372 - RNA, 16 nt, Human herpesvirus 6
ggccucccauguaugc

SEQ ID NO: 327373 - RNA, 19 nt, Human herpesvirus 6
ggccuggaguacaagacca

SEQ ID NO: 327374 - RNA, 20 nt, Human herpesvirus 6
ggcgauacguuucuguccaa

SEQ ID NO: 327375 - RNA, 21 nt, Human herpesvirus 6
ggcgcauaacggaaaaaugcc

SEQ ID NO: 327376 - RNA, 15 nt, Human herpesvirus 6
ggcuauaaucacaaa

SEQ ID NO: 327377 - RNA, 22 nt, Human herpesvirus 6
ggcuauuugacaauaaacauga

SEQ ID NO: 327378 - RNA, 22 nt, Human herpesvirus 6
ggcuauuuuuccgaaaggugaa

SEQ ID NO: 327379 - RNA, 15 nt, Human herpesvirus 6
ggcucgugauccuac

SEQ ID NO: 327380 - RNA, 13 nt, Human herpesvirus 6
ggcugccaugaaa

SEQ ID NO: 327381 - RNA, 15 nt, Human herpesvirus 6
gggaaucaugguguc

SEQ ID NO: 327382 - RNA, 16 nt, Human herpesvirus 6
gggcgcgagacagcgg

SEQ ID NO: 327383 - RNA, 17 nt, Human herpesvirus 6
ggggacugugaaguaaa

SEQ ID NO: 327384 - RNA, 13 nt, Human herpesvirus 6
ggggagacagauu

SEQ ID NO: 327385 - RNA, 16 nt, Human herpesvirus 6
ggggagagacauccau

SEQ ID NO: 327386 - RNA, 13 nt, Human herpesvirus 6
ggggagggaccca

SEQ ID NO: 327387 - RNA, 13 nt, Human herpesvirus 6
ggggauguguuca

SEQ ID NO: 327388 - RNA, 22 nt, Human herpesvirus 6
ggggauuuaguacaguaugucu

SEQ ID NO: 327389 - RNA, 17 nt, Human herpesvirus 6
ggggcggacggggacga

SEQ ID NO: 327390 - RNA, 17 nt, Human herpesvirus 6
gggggaucgacgggcag

SEQ ID NO: 327391 - RNA, 20 nt, Human herpesvirus 6
ggggugucggacgacgggcg

SEQ ID NO: 327392 - RNA, 18 nt, Human herpesvirus 6
gguaaauggcauacauuu

SEQ ID NO: 327393 - RNA, 15 nt, Human herpesvirus 6
uauauauagcuguaa

SEQ ID NO: 327394 - RNA, 19 nt, Human herpesvirus 6
uauauaugcaagccaugac

SEQ ID NO: 327395 - RNA, 15 nt, Human herpesvirus 6
uauauauuugcauac

SEQ ID NO: 327396 - RNA, 16 nt, Human herpesvirus 6
uauauauuugcauaca

SEQ ID NO: 327397 - RNA, 13 nt, Human herpesvirus 6
uauauccugucgc

SEQ ID NO: 327398 - RNA, 20 nt, Human herpesvirus 6
uauauuuuuaccgaaccaua

SEQ ID NO: 327399 - RNA, 21 nt, Human herpesvirus 6
uauauuuuuuaacaguacuau

SEQ ID NO: 327400 - RNA, 17 nt, Human herpesvirus 6
uaucacgauguuaacau

SEQ ID NO: 327401 - RNA, 20 nt, Human herpesvirus 6
uaucacgauguuaacauaaa

SEQ ID NO: 327402 - RNA, 22 nt, Human herpesvirus 6
uaucacgucuccuuuauugcca

SEQ ID NO: 327403 - RNA, 16 nt, Human herpesvirus 6
uaucacucauacacag

SEQ ID NO: 327404 - RNA, 16 nt, Human herpesvirus 6
uauccaauuaacacau

SEQ ID NO: 327405 - RNA, 19 nt, Human herpesvirus 6
uauccauccaauccaauau

SEQ ID NO: 327406 - RNA, 20 nt, Human herpesvirus 6
uaucccuaauaaaugucaaa

SEQ ID NO: 327407 - RNA, 17 nt, Human herpesvirus 6
uauccgcuaaaacgacu

SEQ ID NO: 327408 - RNA, 20 nt, Human herpesvirus 6
uauccuaaauaccaauuccu

SEQ ID NO: 327409 - RNA, 19 nt, Human herpesvirus 6
uauccuuccaccuacauca

SEQ ID NO: 327410 - RNA, 19 nt, Human herpesvirus 6
uaucgcgcaaaccauaaaa

SEQ ID NO: 327411 - RNA, 15 nt, Human herpesvirus 6
uaucuagccaauuca

SEQ ID NO: 327412 - RNA, 20 nt, Human herpesvirus 6
uaucugaccaccaaaacgac

SEQ ID NO: 327413 - RNA, 23 nt, Human herpesvirus 6
uaucugcauacagaaaucaaaga

SEQ ID NO: 327414 - RNA, 19 nt, Human herpesvirus 6
uaucuggaugguuguguga

SEQ ID NO: 327415 - RNA, 17 nt, Human herpesvirus 6
uaucuucgccuuguauu

SEQ ID NO: 327416 - RNA, 21 nt, Human herpesvirus 6
uaugacuuuucuaucacucau

SEQ ID NO: 327417 - RNA, 15 nt, Human herpesvirus 6
uaugagaacaaguga

SEQ ID NO: 327418 - RNA, 18 nt, Human herpesvirus 6
uaugaggaugaaguuuca

SEQ ID NO: 327419 - RNA, 21 nt, Human herpesvirus 6
uaugaggcgcuugaaaccacu

SEQ ID NO: 327420 - RNA, 15 nt, Human herpesvirus 6
uaugaucuagcuaua

SEQ ID NO: 327421 - RNA, 17 nt, Human herpesvirus 6
uaugcauuguuaucacg

SEQ ID NO: 327422 - RNA, 13 nt, Human herpesvirus 6
uaugccugagcuu

SEQ ID NO: 327423 - RNA, 19 nt, Human herpesvirus 6
uauggaugaucacuaucag

SEQ ID NO: 327424 - RNA, 15 nt, Human herpesvirus 6
uaugggugagugcau

SEQ ID NO: 327425 - RNA, 16 nt, Human herpesvirus 6
uauguacccuaaguga

SEQ ID NO: 327426 - RNA, 24 nt, Human herpesvirus 6
uaugugacucggaacauaauugca

SEQ ID NO: 327427 - RNA, 12 nt, Human herpesvirus 6
uaugugugaugc

SEQ ID NO: 327428 - RNA, 16 nt, Human herpesvirus 6
uauguuaaccaguaga

SEQ ID NO: 327429 - RNA, 20 nt, Human herpesvirus 6
uauuaauuacauauagucaa

SEQ ID NO: 327430 - RNA, 17 nt, Human herpesvirus 6
uauuauccaaacauacg

SEQ ID NO: 327431 - RNA, 23 nt, Human herpesvirus 6
uauuaugugacucggaacauaau

SEQ ID NO: 327432 - RNA, 19 nt, Human herpesvirus 6
uauucacggcuaauaugau

SEQ ID NO: 327433 - RNA, 16 nt, Human herpesvirus 6
uauuccagacaauaau

SEQ ID NO: 327434 - RNA, 19 nt, Human herpesvirus 6
uauucccaugacgauucaa

SEQ ID NO: 327435 - RNA, 20 nt, Human herpesvirus 6
uauucccaugacgauucaaa

SEQ ID NO: 327436 - RNA, 19 nt, Human herpesvirus 6
uauuccccagcuguguuua

SEQ ID NO: 327437 - RNA, 18 nt, Human herpesvirus 6
uauuccgggguuguauac

SEQ ID NO: 327438 - RNA, 15 nt, Human herpesvirus 6
uauucugucuugaua

SEQ ID NO: 327439 - RNA, 13 nt, Human herpesvirus 6
uauugaagacuga

SEQ ID NO: 327440 - RNA, 20 nt, Human herpesvirus 6
uauugucaaauagccaaaaa

SEQ ID NO: 327441 - RNA, 15 nt, Human herpesvirus 6
uauuguccaacacuu

SEQ ID NO: 327442 - RNA, 18 nt, Human herpesvirus 6
uauuguguguacaaugac

SEQ ID NO: 327443 - RNA, 14 nt, Human herpesvirus 6
uauuguugucguga

SEQ ID NO: 327444 - RNA, 17 nt, Human herpesvirus 6
uauuuaugaaaauugcu

SEQ ID NO: 327445 - RNA, 14 nt, Human herpesvirus 6
uauuucacauauug

SEQ ID NO: 327446 - RNA, 17 nt, Human herpesvirus 6
uauuuccacguacuauu

SEQ ID NO: 327447 - RNA, 21 nt, Human herpesvirus 6
uauuuccauaaguuaauucca

SEQ ID NO: 327448 - RNA, 17 nt, Human herpesvirus 6
uauuuccaugacuguga

SEQ ID NO: 327449 - RNA, 14 nt, Human herpesvirus 6
uauuucgggacaaa

SEQ ID NO: 327450 - RNA, 20 nt, Human herpesvirus 6
uauuucguuugggaugucca

SEQ ID NO: 327451 - RNA, 16 nt, Human herpesvirus 6
uauuucuaaacacaga

SEQ ID NO: 327452 - RNA, 14 nt, Human herpesvirus 6
uauuucucguucuc

SEQ ID NO: 327453 - RNA, 18 nt, Human herpesvirus 6
uauuucuuacuaggaaag

SEQ ID NO: 327454 - RNA, 21 nt, Human herpesvirus 6
uauuuuuuuucgccgugugug

SEQ ID NO: 327455 - RNA, 18 nt, Human herpesvirus 6
ucaaaaaccgccaagaga

SEQ ID NO: 327456 - RNA, 14 nt, Human herpesvirus 6
ucaaaaaugcacaa

SEQ ID NO: 327457 - RNA, 18 nt, Human herpesvirus 6
ucaaaaauguugcaugga

SEQ ID NO: 327458 - RNA, 21 nt, Human herpesvirus 6
ucaaaacggaggcugaaauuu

SEQ ID NO: 327459 - RNA, 13 nt, Human herpesvirus 6
ucaaaagcaugaa

SEQ ID NO: 327460 - RNA, 20 nt, Human herpesvirus 6
ucaaaauugggcgaagaccu

SEQ ID NO: 327461 - RNA, 19 nt, Human herpesvirus 6
ucaaacaaauggaaacugg

SEQ ID NO: 327462 - RNA, 20 nt, Human herpesvirus 6
ucaaacaaauggaaacugga

SEQ ID NO: 327463 - RNA, 20 nt, Human herpesvirus 6
ucaaagaaacaguaaaucuc

SEQ ID NO: 327464 - RNA, 19 nt, Human herpesvirus 6
ucaaagauguacucaucca

SEQ ID NO: 327465 - RNA, 17 nt, Human herpesvirus 6
ucaaaucggacaaugca

SEQ ID NO: 327466 - RNA, 18 nt, Human herpesvirus 6
ucaacaaacacgugauuc

SEQ ID NO: 327467 - RNA, 20 nt, Human herpesvirus 6
ucaacaaacacgugauuccu

SEQ ID NO: 327468 - RNA, 22 nt, Human herpesvirus 6
ucaacaacgucaugcaaaacag

SEQ ID NO: 327469 - RNA, 17 nt, Human herpesvirus 6
ucaacacacagucauac

SEQ ID NO: 327470 - RNA, 15 nt, Human herpesvirus 6
ucaacacccauggaa

SEQ ID NO: 327471 - RNA, 18 nt, Human herpesvirus 6
ucaacacucucaguguaa

SEQ ID NO: 327472 - RNA, 22 nt, Human herpesvirus 6
ucaaccccgcacgcauaccuac

SEQ ID NO: 327473 - RNA, 11 nt, Human herpesvirus 6
ucaaccuucau

SEQ ID NO: 327474 - RNA, 15 nt, Human herpesvirus 6
ucaacgcaauuccac

SEQ ID NO: 327475 - RNA, 19 nt, Human herpesvirus 6
ucaacggccuggaguacaa

SEQ ID NO: 327476 - RNA, 20 nt, Human herpesvirus 6
ucaagauauauuaaauugua

SEQ ID NO: 327477 - RNA, 19 nt, Human herpesvirus 6
ucaagugguguuuagcugu

SEQ ID NO: 327478 - RNA, 11 nt, Human herpesvirus 6
ucaaguuucac

SEQ ID NO: 327479 - RNA, 21 nt, Human herpesvirus 6
ucaauacauuuuucaauaaug

SEQ ID NO: 327480 - RNA, 23 nt, Human herpesvirus 6
ucaauagauuuuauaacgacaaa

SEQ ID NO: 327481 - RNA, 13 nt, Human herpesvirus 6
ucaauuaauacaa

SEQ ID NO: 327482 - RNA, 13 nt, Human herpesvirus 6
ucaauuacucaac

SEQ ID NO: 327483 - RNA, 20 nt, Human herpesvirus 6
ucacaagcuguccaucuuca

SEQ ID NO: 327484 - RNA, 13 nt, Human herpesvirus 6
ucacaaucuaaua

SEQ ID NO: 327485 - RNA, 13 nt, Human herpesvirus 6
ucacaaugaucaa

SEQ ID NO: 327486 - RNA, 16 nt, Human herpesvirus 6
ucacacguuauaucua

SEQ ID NO: 327487 - RNA, 20 nt, Human herpesvirus 6
ucacauauaugaugcuguag

SEQ ID NO: 327488 - RNA, 15 nt, Human herpesvirus 6
ucacauuauaagaca

SEQ ID NO: 327489 - RNA, 16 nt, Human herpesvirus 6
ucacauuauaagacac

SEQ ID NO: 327490 - RNA, 21 nt, Human herpesvirus 6
ucacauuauaagacacugaua

SEQ ID NO: 327491 - RNA, 15 nt, Human herpesvirus 6
ucaccgcauauauca

SEQ ID NO: 327492 - RNA, 12 nt, Human herpesvirus 6
ucaccuacauuc

SEQ ID NO: 327493 - RNA, 22 nt, Human herpesvirus 6
ucacggucgaaaguucaucuuu

SEQ ID NO: 327494 - RNA, 14 nt, Human herpesvirus 6
ucacucauacacag

SEQ ID NO: 327495 - RNA, 15 nt, Human herpesvirus 6
ucacuccaauccaac

SEQ ID NO: 327496 - RNA, 15 nt, Human herpesvirus 6
ucacucucgauuuca

SEQ ID NO: 327497 - RNA, 22 nt, Human herpesvirus 6
ucacugucgaaauucaccagau

SEQ ID NO: 327498 - RNA, 13 nt, Human herpesvirus 6
ucacuuggagcuu

SEQ ID NO: 327499 - RNA, 13 nt, Human herpesvirus 6
ucacuuguauuaa

SEQ ID NO: 327500 - RNA, 21 nt, Human herpesvirus 6
ucagaaccaucuguucaauua

SEQ ID NO: 327501 - RNA, 12 nt, Human herpesvirus 6
ucagaauccacc

SEQ ID NO: 327502 - RNA, 17 nt, Human herpesvirus 6
ucagaauccaccaauga

SEQ ID NO: 327503 - RNA, 19 nt, Human herpesvirus 6
ucagaauccaccaaugaca

SEQ ID NO: 327504 - RNA, 17 nt, Human herpesvirus 6
ucagacagugagugagu

SEQ ID NO: 327505 - RNA, 21 nt, Human herpesvirus 6
ucagagaaacggaacugcuug

SEQ ID NO: 327506 - RNA, 23 nt, Human herpesvirus 6
ucagauaccucauuguuucacuu

SEQ ID NO: 327507 - RNA, 12 nt, Human herpesvirus 6
ucagauacugau

SEQ ID NO: 327508 - RNA, 16 nt, Human herpesvirus 6
ucagauacugaucguu

SEQ ID NO: 327509 - RNA, 13 nt, Human herpesvirus 6
ucagaucuagauc

SEQ ID NO: 327510 - RNA, 20 nt, Human herpesvirus 6
ucagauugcggacaugguga

SEQ ID NO: 327511 - RNA, 13 nt, Human herpesvirus 6
ucagccugagaac

SEQ ID NO: 327512 - RNA, 22 nt, Human herpesvirus 6
ucagcuuccguaucacacuuag

SEQ ID NO: 327513 - RNA, 14 nt, Human herpesvirus 6
ucagggucaaaaaa

SEQ ID NO: 327514 - RNA, 14 nt, Human herpesvirus 6
ucaguaacauuuaa

SEQ ID NO: 327515 - RNA, 12 nt, Human herpesvirus 6
ucaguagauuac

SEQ ID NO: 327516 - RNA, 13 nt, Human herpesvirus 6
ucaguaugccaua

SEQ ID NO: 327517 - RNA, 18 nt, Human herpesvirus 6
ucagugaaggcugccaug

SEQ ID NO: 327518 - RNA, 12 nt, Human herpesvirus 6
ucauaaacagac

SEQ ID NO: 327519 - RNA, 20 nt, Human herpesvirus 6
ucauaaaugguagcuauuau

SEQ ID NO: 327520 - RNA, 19 nt, Human herpesvirus 6
ucauacaaaaugaccucau

SEQ ID NO: 327521 - RNA, 16 nt, Human herpesvirus 6
ucauagacaaaccgcc

SEQ ID NO: 327522 - RNA, 22 nt, Human herpesvirus 6
ucauagauuguuauuagugauu

SEQ ID NO: 327523 - RNA, 22 nt, Human herpesvirus 6
ucauaggacuaggauuagaaca

SEQ ID NO: 327524 - RNA, 15 nt, Human herpesvirus 6
ucauaguuaugcguc

SEQ ID NO: 327525 - RNA, 13 nt, Human herpesvirus 6
ucauauaagaacc

SEQ ID NO: 327526 - RNA, 21 nt, Human herpesvirus 6
ucauauggugcguguacaagu

SEQ ID NO: 327527 - RNA, 13 nt, Human herpesvirus 6
ucaucaaauccuc

SEQ ID NO: 327528 - RNA, 17 nt, Human herpesvirus 6
ucaucaccaagucuaag

SEQ ID NO: 327529 - RNA, 21 nt, Human herpesvirus 6
ucaucaugugugccuacuuug

SEQ ID NO: 327530 - RNA, 17 nt, Human herpesvirus 6
ucaucgcgacuaaaaau

SEQ ID NO: 327531 - RNA, 20 nt, Human herpesvirus 6
ucaucggcaucauaauacua

SEQ ID NO: 327532 - RNA, 17 nt, Human herpesvirus 6
ucaucuauuauaagcaa

SEQ ID NO: 327533 - RNA, 19 nt, Human herpesvirus 6
ucaucuauuauaagcaaac

SEQ ID NO: 327534 - RNA, 19 nt, Human herpesvirus 6
ucaucuccaauaaaauauc

SEQ ID NO: 327535 - RNA, 13 nt, Human herpesvirus 6
ucaucucgugcaa

SEQ ID NO: 327536 - RNA, 16 nt, Human herpesvirus 6
ucaucuucagucuuca

SEQ ID NO: 327537 - RNA, 14 nt, Human herpesvirus 6
ucaugaguguuuaa

SEQ ID NO: 327538 - RNA, 17 nt, Human herpesvirus 6
ucaugauauuccagaca

SEQ ID NO: 327539 - RNA, 12 nt, Human herpesvirus 6
ucaugaucucac

SEQ ID NO: 327540 - RNA, 19 nt, Human herpesvirus 6
ucaugauuaucauagacaa

SEQ ID NO: 327541 - RNA, 17 nt, Human herpesvirus 6
ucaugcccgaaugugau

SEQ ID NO: 327542 - RNA, 22 nt, Human herpesvirus 6
ucaugugacggcgucucguauc

SEQ ID NO: 327543 - RNA, 19 nt, Human herpesvirus 6
ucauguucggagauaucau

SEQ ID NO: 327544 - RNA, 22 nt, Human herpesvirus 6
ucauucgcuaguaauauaggau

SEQ ID NO: 327545 - RNA, 20 nt, Human herpesvirus 6
ucauuguuuuugcaugugau

SEQ ID NO: 327546 - RNA, 17 nt, Human herpesvirus 6
uccaaaguauuggugca

SEQ ID NO: 327547 - RNA, 14 nt, Human herpesvirus 6
uccaacacuuuuac

SEQ ID NO: 327548 - RNA, 14 nt, Human herpesvirus 6
uccaagacauguac

SEQ ID NO: 327549 - RNA, 17 nt, Human herpesvirus 6
uccaaggauuaugauca

SEQ ID NO: 327550 - RNA, 15 nt, Human herpesvirus 6
uccaaucacaacaaa

SEQ ID NO: 327551 - RNA, 17 nt, Human herpesvirus 6
uccaaugacuacuaaau

SEQ ID NO: 327552 - RNA, 23 nt, Human herpesvirus 6
uccacccaucuccucaacacucu

SEQ ID NO: 327553 - RNA, 19 nt, Human herpesvirus 6
uccaccuggaaaaacugac

SEQ ID NO: 327554 - RNA, 16 nt, Human herpesvirus 6
uccagaaguccuucau

SEQ ID NO: 327555 - RNA, 19 nt, Human herpesvirus 6
uccagacuagacgcacuaa

SEQ ID NO: 327556 - RNA, 19 nt, Human herpesvirus 6
uccaggcggcaugaauucc

SEQ ID NO: 327557 - RNA, 18 nt, Human herpesvirus 6
uccagugcuuuaaucaca

SEQ ID NO: 327558 - RNA, 19 nt, Human herpesvirus 6
uccagugcuuuaaucacaa

SEQ ID NO: 327559 - RNA, 19 nt, Human herpesvirus 6
uccauuaacgaugguacag

SEQ ID NO: 327560 - RNA, 18 nt, Human herpesvirus 6
uccauuagguugcuagac

SEQ ID NO: 327561 - RNA, 19 nt, Human herpesvirus 6
uccauucuagauacggugu

SEQ ID NO: 327562 - RNA, 14 nt, Human herpesvirus 6
ucccaauaaauaua

SEQ ID NO: 327563 - RNA, 13 nt, Human herpesvirus 6
ucccacaaaccau

SEQ ID NO: 327564 - RNA, 18 nt, Human herpesvirus 6
ucccaccuaauaaacugu

SEQ ID NO: 327565 - RNA, 14 nt, Human herpesvirus 6
ucccagauacauaa

SEQ ID NO: 327566 - RNA, 21 nt, Human herpesvirus 6
ucccauacggucgaaugagcu

SEQ ID NO: 327567 - RNA, 18 nt, Human herpesvirus 6
ucccaucuauacacccug

SEQ ID NO: 327568 - RNA, 11 nt, Human herpesvirus 6
uccccagagaa

SEQ ID NO: 327569 - RNA, 16 nt, Human herpesvirus 6
uccccagcuguguuua

SEQ ID NO: 327570 - RNA, 17 nt, Human herpesvirus 6
uccccaugucuugccuc

SEQ ID NO: 327571 - RNA, 15 nt, Human herpesvirus 6
uccccgggugcuccg

SEQ ID NO: 327572 - RNA, 17 nt, Human herpesvirus 6
ucccgucuccucaugga

SEQ ID NO: 327573 - RNA, 19 nt, Human herpesvirus 6
uccgagcggugugcaguua

SEQ ID NO: 327574 - RNA, 23 nt, Human herpesvirus 6
uccgccugcagugauauggaaac

SEQ ID NO: 327575 - RNA, 21 nt, Human herpesvirus 6
uccgcuguuggguaugcucac

SEQ ID NO: 327576 - RNA, 17 nt, Human herpesvirus 6
uccggaagggcucuauu

SEQ ID NO: 327577 - RNA, 21 nt, Human herpesvirus 6
uccggaauuuugagauuuaca

SEQ ID NO: 327578 - RNA, 15 nt, Human herpesvirus 6
uccggccccagagac

SEQ ID NO: 327579 - RNA, 14 nt, Human herpesvirus 6
uccgucacaacauu

SEQ ID NO: 327580 - RNA, 18 nt, Human herpesvirus 6
uccgucauacaaaaugac

SEQ ID NO: 327581 - RNA, 19 nt, Human herpesvirus 6
uccgucucgccuaccuuca

SEQ ID NO: 327582 - RNA, 18 nt, Human herpesvirus 6
uccguugucgaagucuuc

SEQ ID NO: 327583 - RNA, 19 nt, Human herpesvirus 6
uccguuuuucucugcaaaa

SEQ ID NO: 327584 - RNA, 15 nt, Human herpesvirus 6
uccuaaauaccaauu

SEQ ID NO: 327585 - RNA, 18 nt, Human herpesvirus 6
uccuaccauguugcuuau

SEQ ID NO: 327586 - RNA, 22 nt, Human herpesvirus 6
uccuagaaggagcuuucaucca

SEQ ID NO: 327587 - RNA, 23 nt, Human herpesvirus 6
uccuauucagaggugcugaugau

SEQ ID NO: 327588 - RNA, 15 nt, Human herpesvirus 6
uccuauucauaacag

SEQ ID NO: 327589 - RNA, 16 nt, Human herpesvirus 6
uccuauucauaacaga

SEQ ID NO: 327590 - RNA, 17 nt, Human herpesvirus 6
uccuauugguuugcaua

SEQ ID NO: 327591 - RNA, 18 nt, Human herpesvirus 6
uccuauugguuugcauaa

SEQ ID NO: 327592 - RNA, 13 nt, Human herpesvirus 6
uccucaacuaaac

SEQ ID NO: 327593 - RNA, 21 nt, Human herpesvirus 6
uccuccuagggaauuuaaucc

SEQ ID NO: 327594 - RNA, 18 nt, Human herpesvirus 6
uccucgaucguaggcaga

SEQ ID NO: 327595 - RNA, 13 nt, Human herpesvirus 6
uccucucuggaaa

SEQ ID NO: 327596 - RNA, 20 nt, Human herpesvirus 6
uccugaucacagagcagaga

SEQ ID NO: 327597 - RNA, 19 nt, Human herpesvirus 6
uccuuccaccuacaucaga

SEQ ID NO: 327598 - RNA, 20 nt, Human herpesvirus 6
uccuuucagaguagaaacua

SEQ ID NO: 327599 - RNA, 17 nt, Human herpesvirus 6
uccuuugccuguauuaa

SEQ ID NO: 327600 - RNA, 16 nt, Human herpesvirus 6
uccuuuuuuacuaguu

SEQ ID NO: 327601 - RNA, 22 nt, Human herpesvirus 6
uccuuuuuuacuaguuuucaca

SEQ ID NO: 327602 - RNA, 22 nt, Human herpesvirus 6
ucgacaacggaccaggacaauc

SEQ ID NO: 327603 - RNA, 22 nt, Human herpesvirus 6
ucgaccccuuuauaagauuuac

SEQ ID NO: 327604 - RNA, 23 nt, Human herpesvirus 6
ucgacuccagugcuuuaaucaca

SEQ ID NO: 327605 - RNA, 19 nt, Human herpesvirus 6
ucgaggcgaaggagauuuc

SEQ ID NO: 327606 - RNA, 17 nt, Human herpesvirus 6
ucgauccaaaagauuac

SEQ ID NO: 327607 - RNA, 14 nt, Human herpesvirus 6
ucgcaaaacuuaac

SEQ ID NO: 327608 - RNA, 16 nt, Human herpesvirus 6
ucgcaaauucucucua

SEQ ID NO: 327609 - RNA, 19 nt, Human herpesvirus 6
ucgcaauccccacgaacua

SEQ ID NO: 327610 - RNA, 20 nt, Human herpesvirus 6
ucgcaccucugaaacacugu

SEQ ID NO: 327611 - RNA, 15 nt, Human herpesvirus 6
ucgcauuagucacag

SEQ ID NO: 327612 - RNA, 19 nt, Human herpesvirus 6
ucgcgcaccgccuccgcca

SEQ ID NO: 327613 - RNA, 19 nt, Human herpesvirus 6
ucgcgccgcguacacgaaa

SEQ ID NO: 327614 - RNA, 14 nt, Human herpesvirus 6
ucgcggaguggagu

SEQ ID NO: 327615 - RNA, 19 nt, Human herpesvirus 6
ucgcggaguggaguccagu

SEQ ID NO: 327616 - RNA, 23 nt, Human herpesvirus 6
ucgcuaagcucguucucuuucca

SEQ ID NO: 327617 - RNA, 13 nt, Human herpesvirus 6
ucgcuaguaauau

SEQ ID NO: 327618 - RNA, 19 nt, Human herpesvirus 6
ucgcucacaauauuucaca

SEQ ID NO: 327619 - RNA, 20 nt, Human herpesvirus 6
ucggaacgccguuuuaucca

SEQ ID NO: 327620 - RNA, 15 nt, Human herpesvirus 6
ucggaauuucuuccu

SEQ ID NO: 327621 - RNA, 21 nt, Human herpesvirus 6
ugacggaauaugguuccacuu

SEQ ID NO: 327622 - RNA, 23 nt, Human herpesvirus 6
ugacggccuccggccccagagac

SEQ ID NO: 327623 - RNA, 21 nt, Human herpesvirus 6
ugacuauuaaacuaacauagc

SEQ ID NO: 327624 - RNA, 11 nt, Human herpesvirus 6
ugacucgccuu

SEQ ID NO: 327625 - RNA, 17 nt, Human herpesvirus 6
ugacucucucaguaauu

SEQ ID NO: 327626 - RNA, 20 nt, Human herpesvirus 6
ugacucugcauaguguagaa

SEQ ID NO: 327627 - RNA, 19 nt, Human herpesvirus 6
ugacuggagcagucugcug

SEQ ID NO: 327628 - RNA, 14 nt, Human herpesvirus 6
ugagaacguauaaa

SEQ ID NO: 327629 - RNA, 14 nt, Human herpesvirus 6
ugagaccuugucaa

SEQ ID NO: 327630 - RNA, 20 nt, Human herpesvirus 6
ugagagcuaauaugaacaau

SEQ ID NO: 327631 - RNA, 16 nt, Human herpesvirus 6
ugagaguaaauauuuc

SEQ ID NO: 327632 - RNA, 18 nt, Human herpesvirus 6
ugagcggaaucuauuguc

SEQ ID NO: 327633 - RNA, 18 nt, Human herpesvirus 6
ugaguaauugaacauugu

SEQ ID NO: 327634 - RNA, 14 nt, Human herpesvirus 6
ugagucacauagau

SEQ ID NO: 327635 - RNA, 19 nt, Human herpesvirus 6
ugaguuuuuaucggugaug

SEQ ID NO: 327636 - RNA, 15 nt, Human herpesvirus 6
ugaguuuuucgcaau

SEQ ID NO: 327637 - RNA, 21 nt, Human herpesvirus 6
ugauaaacauuaauuuauuaa

SEQ ID NO: 327638 - RNA, 12 nt, Human herpesvirus 6
ugauacaucccg

SEQ ID NO: 327639 - RNA, 19 nt, Human herpesvirus 6
ugauagcgucuuugcauau

SEQ ID NO: 327640 - RNA, 18 nt, Human herpesvirus 6
ugauauaguuuuugcuua

SEQ ID NO: 327641 - RNA, 15 nt, Human herpesvirus 6
ugauauauugugauc

SEQ ID NO: 327642 - RNA, 22 nt, Human herpesvirus 6
ugaucaacggccuggaguacaa

SEQ ID NO: 327643 - RNA, 11 nt, Human herpesvirus 6
ugaucacuauc

SEQ ID NO: 327644 - RNA, 15 nt, Human herpesvirus 6
ugaucauaugaggau

SEQ ID NO: 327645 - RNA, 20 nt, Human herpesvirus 6
ugaucaucgggaacauagag

SEQ ID NO: 327646 - RNA, 21 nt, Human herpesvirus 6
ugaucccuuagaagcuuucaa

SEQ ID NO: 327647 - RNA, 14 nt, Human herpesvirus 6
ugaucuagcuauag

SEQ ID NO: 327648 - RNA, 20 nt, Human herpesvirus 6
ugaucuuuacaaaagacaca

SEQ ID NO: 327649 - RNA, 16 nt, Human herpesvirus 6
ugaugaagaacagaau

SEQ ID NO: 327650 - RNA, 16 nt, Human herpesvirus 6
ugaugaauuuaugucc

SEQ ID NO: 327651 - RNA, 14 nt, Human herpesvirus 6
ugaugaucugccuu

SEQ ID NO: 327652 - RNA, 17 nt, Human herpesvirus 6
ugaugccaaagcuuuau

SEQ ID NO: 327653 - RNA, 16 nt, Human herpesvirus 6
ugaugcguugcauuuu

SEQ ID NO: 327654 - RNA, 17 nt, Human herpesvirus 6
ugauguuaacucaggug

SEQ ID NO: 327655 - RNA, 14 nt, Human herpesvirus 6
ugauuagagacgca

SEQ ID NO: 327656 - RNA, 20 nt, Human herpesvirus 6
ugauuauaucgcaagcaaaa

SEQ ID NO: 327657 - RNA, 16 nt, Human herpesvirus 6
ugauuaucauagacaa

SEQ ID NO: 327658 - RNA, 20 nt, Human herpesvirus 6
ugauucugcauuuauaucaa

SEQ ID NO: 327659 - RNA, 20 nt, Human herpesvirus 6
ugauugugacaaggaaugaa

SEQ ID NO: 327660 - RNA, 20 nt, Human herpesvirus 6
ugauuucgguuucgucgcaa

SEQ ID NO: 327661 - RNA, 19 nt, Human herpesvirus 6
ugauuugucgaaucagauc

SEQ ID NO: 327662 - RNA, 17 nt, Human herpesvirus 6
ugcaaaaaacaaaugaa

SEQ ID NO: 327663 - RNA, 13 nt, Human herpesvirus 6
ugcaaaacaaagg

SEQ ID NO: 327664 - RNA, 15 nt, Human herpesvirus 6
ugcaaacugacugua

SEQ ID NO: 327665 - RNA, 15 nt, Human herpesvirus 6
ugcaaaucucacugu

SEQ ID NO: 327666 - RNA, 18 nt, Human herpesvirus 6
ugcaacacaacaaacauc

SEQ ID NO: 327667 - RNA, 20 nt, Human herpesvirus 6
ugcaacgcaucacacauaca

SEQ ID NO: 327668 - RNA, 21 nt, Human herpesvirus 6
ugcaacgcaucacacauacaa

SEQ ID NO: 327669 - RNA, 22 nt, Human herpesvirus 6
ugcaacgcaucacacauacaac

SEQ ID NO: 327670 - RNA, 15 nt, Human herpesvirus 6
ugcaagccaugacaa

SEQ ID NO: 327671 - RNA, 15 nt, Human herpesvirus 6
ugcaauuuccuguca

SEQ ID NO: 327672 - RNA, 15 nt, Human herpesvirus 6
ugcacuacuugucuu

SEQ ID NO: 327673 - RNA, 17 nt, Human herpesvirus 6
ugcacuuccucacgcaa

SEQ ID NO: 327674 - RNA, 19 nt, Human herpesvirus 6
ugcacuuccucacgcaaac

SEQ ID NO: 327675 - RNA, 14 nt, Human herpesvirus 6
ugcagaacaucuca

SEQ ID NO: 327676 - RNA, 15 nt, Human herpesvirus 6
ugcagaacaucucag

SEQ ID NO: 327677 - RNA, 16 nt, Human herpesvirus 6
ugcagaacaucucaga

SEQ ID NO: 327678 - RNA, 21 nt, Human herpesvirus 6
ugcagaacaucucagaucuag

SEQ ID NO: 327679 - RNA, 19 nt, Human herpesvirus 6
ugcagugauauggaaacac

SEQ ID NO: 327680 - RNA, 18 nt, Human herpesvirus 6
ugcaguggucaugaucug

SEQ ID NO: 327681 - RNA, 18 nt, Human herpesvirus 6
ugcaguuacaauuacuaa

SEQ ID NO: 327682 - RNA, 18 nt, Human herpesvirus 6
ugcaguuaugugcugugu

SEQ ID NO: 327683 - RNA, 22 nt, Human herpesvirus 6
ugcauaccgccuccgcagucuc

SEQ ID NO: 327684 - RNA, 22 nt, Human herpesvirus 6
ugcauaugucuguuauaacaca

SEQ ID NO: 327685 - RNA, 13 nt, Human herpesvirus 6
ugcauauuauuaa

SEQ ID NO: 327686 - RNA, 12 nt, Human herpesvirus 6
ugcaucagugaa

SEQ ID NO: 327687 - RNA, 19 nt, Human herpesvirus 6
ugcaucaucaagggugcug

SEQ ID NO: 327688 - RNA, 14 nt, Human herpesvirus 6
ugcaugugauaaau

SEQ ID NO: 327689 - RNA, 16 nt, Human herpesvirus 6
ugcauucgugcucgca

SEQ ID NO: 327690 - RNA, 14 nt, Human herpesvirus 6
ugcauuguuaucac

SEQ ID NO: 327691 - RNA, 22 nt, Human herpesvirus 6
ugcauuucuugguuguguauau

SEQ ID NO: 327692 - RNA, 22 nt, Human herpesvirus 6
ugcauuuuggguugaguaugcu

SEQ ID NO: 327693 - RNA, 16 nt, Human herpesvirus 6
ugcauuuuguauuuau

SEQ ID NO: 327694 - RNA, 21 nt, Human herpesvirus 6
ugccaaaggaaaccaccggcu

SEQ ID NO: 327695 - RNA, 20 nt, Human herpesvirus 6
ugccaaggaaagacaugcau

SEQ ID NO: 327696 - RNA, 22 nt, Human herpesvirus 6
ugccaaggaaagacaugcauuu

SEQ ID NO: 327697 - RNA, 23 nt, Human herpesvirus 6
ugccacguaaccgaugcugauuc

SEQ ID NO: 327698 - RNA, 23 nt, Human herpesvirus 6
ugcccacaccaucuucagcucaa

SEQ ID NO: 327699 - RNA, 16 nt, Human herpesvirus 6
ugcccagauguggaau

SEQ ID NO: 327700 - RNA, 22 nt, Human herpesvirus 6
ugccgacaucuccuucuaauau

SEQ ID NO: 327701 - RNA, 18 nt, Human herpesvirus 6
ugccgggaugagcuuuaa

SEQ ID NO: 327702 - RNA, 16 nt, Human herpesvirus 6
ugccucuccuauaaau

SEQ ID NO: 327703 - RNA, 14 nt, Human herpesvirus 6
ugccugcauaugca

SEQ ID NO: 327704 - RNA, 15 nt, Human herpesvirus 6
ugccugcauaugcag

SEQ ID NO: 327705 - RNA, 16 nt, Human herpesvirus 6
ugcgaaccuagauuca

SEQ ID NO: 327706 - RNA, 16 nt, Human herpesvirus 6
ugcgauauucaaagua

SEQ ID NO: 327707 - RNA, 20 nt, Human herpesvirus 6
ugcgauauucaaaguaaucu

SEQ ID NO: 327708 - RNA, 23 nt, Human herpesvirus 6
ugcgcaggauaauuuauggaaau

SEQ ID NO: 327709 - RNA, 19 nt, Human herpesvirus 6
ugcgcuauuguaccuagca

SEQ ID NO: 327710 - RNA, 23 nt, Human herpesvirus 6
ugcguuaucgaccauguguauau

SEQ ID NO: 327711 - RNA, 12 nt, Human herpesvirus 6
ugcuaaguguga

SEQ ID NO: 327712 - RNA, 13 nt, Human herpesvirus 6
ugcuaauaaaaua

SEQ ID NO: 327713 - RNA, 22 nt, Human herpesvirus 6
ugcuaggacuucguucuugaca

SEQ ID NO: 327714 - RNA, 23 nt, Human herpesvirus 6
ugcuccacucggauucaaagaaa

SEQ ID NO: 327715 - RNA, 15 nt, Human herpesvirus 6
ugcucgccguauaag

SEQ ID NO: 327716 - RNA, 21 nt, Human herpesvirus 6
ugcucguauaaauaucgccau

SEQ ID NO: 327717 - RNA, 17 nt, Human herpesvirus 6
ugcugaugauggacguc

SEQ ID NO: 327718 - RNA, 21 nt, Human herpesvirus 6
ugcugcuagauaauuaugcau

SEQ ID NO: 327719 - RNA, 22 nt, Human herpesvirus 6
ugcuguauauguaaauaaacac

SEQ ID NO: 327720 - RNA, 21 nt, Human herpesvirus 6
ugcuguuagagauaucugcau

SEQ ID NO: 327721 - RNA, 13 nt, Human herpesvirus 6
ugcuuauacuguu

SEQ ID NO: 327722 - RNA, 16 nt, Human herpesvirus 6
ugcuucucucgaugaa

SEQ ID NO: 327723 - RNA, 21 nt, Human herpesvirus 6
ugcuuuaaucacaaugaucaa

SEQ ID NO: 327724 - RNA, 21 nt, Human herpesvirus 6
ugcuuucucuuuuuaauucca

SEQ ID NO: 327725 - RNA, 19 nt, Human herpesvirus 6
uggaaaacaaagaaucaau

SEQ ID NO: 327726 - RNA, 13 nt, Human herpesvirus 6
uggaaaauugcaa

SEQ ID NO: 327727 - RNA, 16 nt, Human herpesvirus 6
uggaaacgacaaagaa

SEQ ID NO: 327728 - RNA, 15 nt, Human herpesvirus 6
uggaagaaauugcaa

SEQ ID NO: 327729 - RNA, 15 nt, Human herpesvirus 6
uggaagaaccaaaga

SEQ ID NO: 327730 - RNA, 15 nt, Human herpesvirus 6
uggaauuuguggaac

SEQ ID NO: 327731 - RNA, 18 nt, Human herpesvirus 6
uggacaacgauagggcuc

SEQ ID NO: 327732 - RNA, 21 nt, Human herpesvirus 6
uggacaccgguaaccucgcuc

SEQ ID NO: 327733 - RNA, 17 nt, Human herpesvirus 6
uggacauuggucuuugc

SEQ ID NO: 327734 - RNA, 14 nt, Human herpesvirus 6
uggagaagaucuaa

SEQ ID NO: 327735 - RNA, 16 nt, Human herpesvirus 6
cgagcggugugcaguu

SEQ ID NO: 327736 - RNA, 19 nt, Human herpesvirus 6
cgaggcgaaggagauuuca

SEQ ID NO: 327737 - RNA, 14 nt, Human herpesvirus 6
cgauaaaaacucac

SEQ ID NO: 327738 - RNA, 21 nt, Human herpesvirus 6
cgauacagcaccaucaauaaa

SEQ ID NO: 327739 - RNA, 22 nt, Human herpesvirus 6
cgauacguuucuguccaaugac

SEQ ID NO: 327740 - RNA, 17 nt, Human herpesvirus 6
cgauagcagcucugcaa

SEQ ID NO: 327741 - RNA, 16 nt, Human herpesvirus 6
cgauagucaugcacuc

SEQ ID NO: 327742 - RNA, 22 nt, Human herpesvirus 6
cgauaucagcacccuaugcaag

SEQ ID NO: 327743 - RNA, 23 nt, Human herpesvirus 6
cgauauuaacgacuucgacuuca

SEQ ID NO: 327744 - RNA, 19 nt, Human herpesvirus 6
cgaugucggaaucuacuga

SEQ ID NO: 327745 - RNA, 20 nt, Human herpesvirus 6
cgaugucggaaucuacugag

SEQ ID NO: 327746 - RNA, 12 nt, Human herpesvirus 6
cgauguuuucag

SEQ ID NO: 327747 - RNA, 20 nt, Human herpesvirus 6
cgcaagauucuacgaugugu

SEQ ID NO: 327748 - RNA, 15 nt, Human herpesvirus 6
cgcaggaacaaaacu

SEQ ID NO: 327749 - RNA, 13 nt, Human herpesvirus 6
cgcaggauaauuu

SEQ ID NO: 327750 - RNA, 13 nt, Human herpesvirus 6
cgcauagacaaac

SEQ ID NO: 327751 - RNA, 21 nt, Human herpesvirus 6
cgcauaggugggucagugcuu

SEQ ID NO: 327752 - RNA, 18 nt, Human herpesvirus 6
cgccacgggcauuccucg

SEQ ID NO: 327753 - RNA, 18 nt, Human herpesvirus 6
cgccauauccuagcauuu

SEQ ID NO: 327754 - RNA, 19 nt, Human herpesvirus 6
cgccauauuaaaacccggc

SEQ ID NO: 327755 - RNA, 19 nt, Human herpesvirus 6
cgccggaucguaaggcagu

SEQ ID NO: 327756 - RNA, 11 nt, Human herpesvirus 6
cgccgugugug

SEQ ID NO: 327757 - RNA, 15 nt, Human herpesvirus 6
cgccuccacaugaca

SEQ ID NO: 327758 - RNA, 18 nt, Human herpesvirus 6
cgccuguaaagucugaau

SEQ ID NO: 327759 - RNA, 13 nt, Human herpesvirus 6
cgcgacaggguga

SEQ ID NO: 327760 - RNA, 19 nt, Human herpesvirus 6
cgcgacagggugagucaca

SEQ ID NO: 327761 - RNA, 20 nt, Human herpesvirus 6
cgcgacuaaaaauacggaaa

SEQ ID NO: 327762 - RNA, 22 nt, Human herpesvirus 6
cgcgauagaucgaguuuuuacg

SEQ ID NO: 327763 - RNA, 17 nt, Human herpesvirus 6
cgcgcaaaccauaaaaa

SEQ ID NO: 327764 - RNA, 18 nt, Human herpesvirus 6
cgcggagcacgcacgaca

SEQ ID NO: 327765 - RNA, 13 nt, Human herpesvirus 6
cgcggaguggagu

SEQ ID NO: 327766 - RNA, 23 nt, Human herpesvirus 6
cgcgggggcacaucuauguguau

SEQ ID NO: 327767 - RNA, 23 nt, Human herpesvirus 6
cgcguaaagauguagcuggauau

SEQ ID NO: 327768 - RNA, 20 nt, Human herpesvirus 6
cgcuggagcagcuuccacgc

SEQ ID NO: 327769 - RNA, 21 nt, Human herpesvirus 6
cgcuuaaagcguuugcaaaac

SEQ ID NO: 327770 - RNA, 13 nt, Human herpesvirus 6
cggaaaagaugag

SEQ ID NO: 327771 - RNA, 23 nt, Human herpesvirus 6
cggaaaagaugagcgucagagua

SEQ ID NO: 327772 - RNA, 16 nt, Human herpesvirus 6
cggaaucuauugucga

SEQ ID NO: 327773 - RNA, 19 nt, Human herpesvirus 6
cggaauuuugagauuuaca

SEQ ID NO: 327774 - RNA, 13 nt, Human herpesvirus 6
cggacaaugcaga

SEQ ID NO: 327775 - RNA, 14 nt, Human herpesvirus 6
cggaccaauccaug

SEQ ID NO: 327776 - RNA, 11 nt, Human herpesvirus 6
cggagaacucg

SEQ ID NO: 327777 - RNA, 16 nt, Human herpesvirus 6
cggaguggaguccagu

SEQ ID NO: 327778 - RNA, 20 nt, Human herpesvirus 6
cggauuguuaauauuagcca

SEQ ID NO: 327779 - RNA, 14 nt, Human herpesvirus 6
cggcaucauaauac

SEQ ID NO: 327780 - RNA, 16 nt, Human herpesvirus 6
cggccuggaguacaag

SEQ ID NO: 327781 - RNA, 18 nt, Human herpesvirus 6
cggcgcggagcccaagaa

SEQ ID NO: 327782 - RNA, 17 nt, Human herpesvirus 6
cggcuaauaugauccga

SEQ ID NO: 327783 - RNA, 13 nt, Human herpesvirus 6
cgggaaaagauca

SEQ ID NO: 327784 - RNA, 13 nt, Human herpesvirus 6
cgggaaauaaaaa

SEQ ID NO: 327785 - RNA, 21 nt, Human herpesvirus 6
cgggaacauagagaaacgaga

SEQ ID NO: 327786 - RNA, 19 nt, Human herpesvirus 6
cgggcuuugugaaauaucg

SEQ ID NO: 327787 - RNA, 17 nt, Human herpesvirus 6
cggggacgacacguggg

SEQ ID NO: 327788 - RNA, 21 nt, Human herpesvirus 6
cggguaaacgcgcgccggugc

SEQ ID NO: 327789 - RNA, 13 nt, Human herpesvirus 6
cgguauccgugaa

SEQ ID NO: 327790 - RNA, 16 nt, Human herpesvirus 6
cggucaccuacauucg

SEQ ID NO: 327791 - RNA, 22 nt, Human herpesvirus 6
cgguccguuuuucucugcaaaa

SEQ ID NO: 327792 - RNA, 16 nt, Human herpesvirus 6
cggucuugcuaagggu

SEQ ID NO: 327793 - RNA, 22 nt, Human herpesvirus 6
cggugucacacagcaugaacuc

SEQ ID NO: 327794 - RNA, 18 nt, Human herpesvirus 6
cguaagaauuaaugucca

SEQ ID NO: 327795 - RNA, 18 nt, Human herpesvirus 6
cguaaucgcgguccaaca

SEQ ID NO: 327796 - RNA, 21 nt, Human herpesvirus 6
cguaauggaaacgacaaagaa

SEQ ID NO: 327797 - RNA, 12 nt, Human herpesvirus 6
cguaaugugcaa

SEQ ID NO: 327798 - RNA, 14 nt, Human herpesvirus 6
cguaaugugcaaag

SEQ ID NO: 327799 - RNA, 14 nt, Human herpesvirus 6
cguacacgcauuug

SEQ ID NO: 327800 - RNA, 22 nt, Human herpesvirus 6
cguagaacggaaaaaaaaucua

SEQ ID NO: 327801 - RNA, 23 nt, Human herpesvirus 6
cguagacagucacacacagggug

SEQ ID NO: 327802 - RNA, 18 nt, Human herpesvirus 6
cguauaucuacugcaguc

SEQ ID NO: 327803 - RNA, 14 nt, Human herpesvirus 6
cguauauuguguac

SEQ ID NO: 327804 - RNA, 16 nt, Human herpesvirus 6
cguaucacacuuagca

SEQ ID NO: 327805 - RNA, 22 nt, Human herpesvirus 6
cguaucacacuuagcaacuacu

SEQ ID NO: 327806 - RNA, 16 nt, Human herpesvirus 6
cguauguuuggauaau

SEQ ID NO: 327807 - RNA, 17 nt, Human herpesvirus 6
cgucaugcaaaacagac

SEQ ID NO: 327808 - RNA, 19 nt, Human herpesvirus 6
cgucucccgcgccagguug

SEQ ID NO: 327809 - RNA, 14 nt, Human herpesvirus 6
cgugacggcgacaa

SEQ ID NO: 327810 - RNA, 17 nt, Human herpesvirus 6
cguggaauuuguggaac

SEQ ID NO: 327811 - RNA, 13 nt, Human herpesvirus 6
cguggacaaugau

SEQ ID NO: 327812 - RNA, 18 nt, Human herpesvirus 6
cgugucacacguguuaaa

SEQ ID NO: 327813 - RNA, 20 nt, Human herpesvirus 6
cgugugaaauuuuugacuga

SEQ ID NO: 327814 - RNA, 18 nt, Human herpesvirus 6
cguuaaucuaauaaaaua

SEQ ID NO: 327815 - RNA, 18 nt, Human herpesvirus 6
cguuacgacgaacaauau

SEQ ID NO: 327816 - RNA, 14 nt, Human herpesvirus 6
cguuauaaaaucua

SEQ ID NO: 327817 - RNA, 15 nt, Human herpesvirus 6
cguucaucauuccag

SEQ ID NO: 327818 - RNA, 22 nt, Human herpesvirus 6
cguuccaaaguaguuaccguga

SEQ ID NO: 327819 - RNA, 12 nt, Human herpesvirus 6
cguuugcaaaac

SEQ ID NO: 327820 - RNA, 15 nt, Human herpesvirus 6
cguuuuguguuaaaa

SEQ ID NO: 327821 - RNA, 19 nt, Human herpesvirus 6
cguuuuuuaacgaaaacca

SEQ ID NO: 327822 - RNA, 17 nt, Human herpesvirus 6
cuaaaaaaaaaaacaca

SEQ ID NO: 327823 - RNA, 15 nt, Human herpesvirus 6
cuaaaacaagacaga

SEQ ID NO: 327824 - RNA, 17 nt, Human herpesvirus 6
cuaaaacaucagaugaa

SEQ ID NO: 327825 - RNA, 12 nt, Human herpesvirus 6
cuaaacacagau

SEQ ID NO: 327826 - RNA, 14 nt, Human herpesvirus 6
cuaaaccaugucuu

SEQ ID NO: 327827 - RNA, 17 nt, Human herpesvirus 6
cuaaagucagagauuau

SEQ ID NO: 327828 - RNA, 13 nt, Human herpesvirus 6
cuaaauacauuca

SEQ ID NO: 327829 - RNA, 14 nt, Human herpesvirus 6
cuaaauacauucac

SEQ ID NO: 327830 - RNA, 17 nt, Human herpesvirus 6
cuaaauauaucaaagau

SEQ ID NO: 327831 - RNA, 19 nt, Human herpesvirus 6
cuaaaucgcgccauauccu

SEQ ID NO: 327832 - RNA, 20 nt, Human herpesvirus 6
cuaaaucgcgccauauccua

SEQ ID NO: 327833 - RNA, 15 nt, Human herpesvirus 6
cuaaauugauaauaa

SEQ ID NO: 327834 - RNA, 24 nt, Human herpesvirus 6
cuaaauuucuacaaaaauacugca

SEQ ID NO: 327835 - RNA, 19 nt, Human herpesvirus 6
cuaacaauaauugcauucu

SEQ ID NO: 327836 - RNA, 14 nt, Human herpesvirus 6
cuaacgcaacucua

SEQ ID NO: 327837 - RNA, 16 nt, Human herpesvirus 6
cuaagauugugcaguu

SEQ ID NO: 327838 - RNA, 17 nt, Human herpesvirus 6
cuaagcaggaacccaga

SEQ ID NO: 327839 - RNA, 16 nt, Human herpesvirus 6
cuaagugaaauucaaa

SEQ ID NO: 327840 - RNA, 17 nt, Human herpesvirus 6
cuaauaugaacaaugac

SEQ ID NO: 327841 - RNA, 14 nt, Human herpesvirus 6
cuaaucaucagagg

SEQ ID NO: 327842 - RNA, 17 nt, Human herpesvirus 6
cuacaacauuaucaauu

SEQ ID NO: 327843 - RNA, 18 nt, Human herpesvirus 6
cuacauauaaauccgaua

SEQ ID NO: 327844 - RNA, 14 nt, Human herpesvirus 6
cuacaucaacuaca

SEQ ID NO: 327845 - RNA, 18 nt, Human herpesvirus 6
cuacaucaacuacauuaa

SEQ ID NO: 327846 - RNA, 22 nt, Human herpesvirus 6
cuacauuuauaauuaaaauaga

SEQ ID NO: 327847 - RNA, 16 nt, Human herpesvirus 6
cuaccacaucaccgau

SEQ ID NO: 327848 - RNA, 13 nt, Human herpesvirus 6
cuaccuucacuuu

SEQ ID NO: 327849 - RNA, 15 nt, Human herpesvirus 6
cuacugaaaccaaag

SEQ ID NO: 327850 - RNA, 16 nt, Human herpesvirus 6
cuacuuuuucaaguaa

SEQ ID NO: 327851 - RNA, 16 nt, Human herpesvirus 6
cuagaaggagcuuuca

SEQ ID NO: 327852 - RNA, 21 nt, Human herpesvirus 6
cuagaaggagcuuucauccau

SEQ ID NO: 327853 - RNA, 14 nt, Human herpesvirus 6
cuagacacacaaaa

SEQ ID NO: 327854 - RNA, 18 nt, Human herpesvirus 6
cuagacucgccgaugaaa

SEQ ID NO: 327855 - RNA, 23 nt, Human herpesvirus 6
cuagagaaaauuauagcuucaaa

SEQ ID NO: 327856 - RNA, 17 nt, Human herpesvirus 6
cuagaggugccgaugaa

SEQ ID NO: 327857 - RNA, 21 nt, Human herpesvirus 6
cuagauacggugucacacagc

SEQ ID NO: 327858 - RNA, 17 nt, Human herpesvirus 6
cuagaucuggaucucag

SEQ ID NO: 327859 - RNA, 13 nt, Human herpesvirus 6
cuagccaauucau

SEQ ID NO: 327860 - RNA, 19 nt, Human herpesvirus 6
cuagccuacuaugacuuuu

SEQ ID NO: 327861 - RNA, 17 nt, Human herpesvirus 6
cuagcuaaaacuugaaa

SEQ ID NO: 327862 - RNA, 15 nt, Human herpesvirus 6
cuaggcagaucauca

SEQ ID NO: 327863 - RNA, 21 nt, Human herpesvirus 6
cuaggugauugggagcucacu

SEQ ID NO: 327864 - RNA, 14 nt, Human herpesvirus 6
cuaguaauaacauu

SEQ ID NO: 327865 - RNA, 19 nt, Human herpesvirus 6
cuauaaacaauuguauucu

SEQ ID NO: 327866 - RNA, 23 nt, Human herpesvirus 6
cuauaauaguuuggccuauauga

SEQ ID NO: 327867 - RNA, 17 nt, Human herpesvirus 6
cuauacuauauaugcaa

SEQ ID NO: 327868 - RNA, 20 nt, Human herpesvirus 6
cuauagacgccauaauggaa

SEQ ID NO: 327869 - RNA, 12 nt, Human herpesvirus 6
cuauagucaaug

SEQ ID NO: 327870 - RNA, 15 nt, Human herpesvirus 6
cuauauugcugcuag

SEQ ID NO: 327871 - RNA, 20 nt, Human herpesvirus 6
cuauauuuuuaccgaaccau

SEQ ID NO: 327872 - RNA, 21 nt, Human herpesvirus 6
cuauauuuuuaccgaaccaua

SEQ ID NO: 327873 - RNA, 16 nt, Human herpesvirus 6
cuauccgcccuccccg

SEQ ID NO: 327874 - RNA, 14 nt, Human herpesvirus 6
cuaucgcaaugauu

SEQ ID NO: 327875 - RNA, 23 nt, Human herpesvirus 6
cuaucguccuuaauauauuugca

SEQ ID NO: 327876 - RNA, 18 nt, Human herpesvirus 6
cuaucgucuauaacaauu

SEQ ID NO: 327877 - RNA, 17 nt, Human herpesvirus 6
cuaucuccgcaaaccac

SEQ ID NO: 327878 - RNA, 17 nt, Human herpesvirus 6
cuaucuuauuaauuucc

SEQ ID NO: 327879 - RNA, 17 nt, Human herpesvirus 6
cuaugacuuuucuauca

SEQ ID NO: 327880 - RNA, 20 nt, Human herpesvirus 6
cuaugcaaacgaaaccaucg

SEQ ID NO: 327881 - RNA, 14 nt, Human herpesvirus 6
cuauuauaagcaaa

SEQ ID NO: 327882 - RNA, 17 nt, Human herpesvirus 6
cuauuauaagcaaacau

SEQ ID NO: 327883 - RNA, 13 nt, Human herpesvirus 6
cuauuaucuggcc

SEQ ID NO: 327884 - RNA, 23 nt, Human herpesvirus 6
cuauuaugugaauguuaagcaaa

SEQ ID NO: 327885 - RNA, 18 nt, Human herpesvirus 6
cuauucagaggugcugau

SEQ ID NO: 327886 - RNA, 17 nt, Human herpesvirus 6
cuauugagauucuccgu

SEQ ID NO: 327887 - RNA, 20 nt, Human herpesvirus 6
cuauuguaccuagcagcaaa

SEQ ID NO: 327888 - RNA, 19 nt, Human herpesvirus 6
cuauuuuuaaaccuguugu

SEQ ID NO: 327889 - RNA, 22 nt, Human herpesvirus 6
cucaacuaaaccaugucuugca

SEQ ID NO: 327890 - RNA, 12 nt, Human herpesvirus 6
cucaauuaauac

SEQ ID NO: 327891 - RNA, 15 nt, Human herpesvirus 6
cucacaaucuaauac

SEQ ID NO: 327892 - RNA, 19 nt, Human herpesvirus 6
cucacaucaugauuaucau

SEQ ID NO: 327893 - RNA, 23 nt, Human herpesvirus 6
cucacaucaugauuaucauagac

SEQ ID NO: 327894 - RNA, 19 nt, Human herpesvirus 6
cucacucgugccaguucac

SEQ ID NO: 327895 - RNA, 16 nt, Human herpesvirus 6
cucagaaccaucuguu

SEQ ID NO: 327896 - RNA, 14 nt, Human herpesvirus 6
cucagagaaacgga

SEQ ID NO: 327897 - RNA, 23 nt, Human herpesvirus 6
cucagcgacucccggcccagaga

SEQ ID NO: 327898 - RNA, 22 nt, Human herpesvirus 6
ccauuuccggaguugcagugug

SEQ ID NO: 327899 - RNA, 19 nt, Human herpesvirus 6
cccaagaggauccauucua

SEQ ID NO: 327900 - RNA, 19 nt, Human herpesvirus 6
cccaaguucaucagcauua

SEQ ID NO: 327901 - RNA, 17 nt, Human herpesvirus 6
cccagcguggaauuugu

SEQ ID NO: 327902 - RNA, 14 nt, Human herpesvirus 6
cccagcuguguuua

SEQ ID NO: 327903 - RNA, 14 nt, Human herpesvirus 6
cccauaccuguaaa

SEQ ID NO: 327904 - RNA, 23 nt, Human herpesvirus 6
cccaucgucuccuccaacaaaga

SEQ ID NO: 327905 - RNA, 15 nt, Human herpesvirus 6
cccaugacgauucaa

SEQ ID NO: 327906 - RNA, 21 nt, Human herpesvirus 6
ccccaagaggauccauucuag

SEQ ID NO: 327907 - RNA, 23 nt, Human herpesvirus 6
ccccauuccuagaggugccgaug

SEQ ID NO: 327908 - RNA, 20 nt, Human herpesvirus 6
ccccuacgcuaacgaacaaa

SEQ ID NO: 327909 - RNA, 22 nt, Human herpesvirus 6
ccccuaucgauuugggcuuuau

SEQ ID NO: 327910 - RNA, 15 nt, Human herpesvirus 6
cccgagcacggucca

SEQ ID NO: 327911 - RNA, 18 nt, Human herpesvirus 6
cccgcacgcauaccuaca

SEQ ID NO: 327912 - RNA, 23 nt, Human herpesvirus 6
cccgcagagguacuuuccauuaa

SEQ ID NO: 327913 - RNA, 21 nt, Human herpesvirus 6
cccggaguacacguauguacu

SEQ ID NO: 327914 - RNA, 14 nt, Human herpesvirus 6
cccgguaaauuacu

SEQ ID NO: 327915 - RNA, 23 nt, Human herpesvirus 6
cccguaauggaaacgacaaagaa

SEQ ID NO: 327916 - RNA, 16 nt, Human herpesvirus 6
cccuagacacacaaaa

SEQ ID NO: 327917 - RNA, 14 nt, Human herpesvirus 6
cccucauuuucaaa

SEQ ID NO: 327918 - RNA, 22 nt, Human herpesvirus 6
cccuguuuuuguguucagucua

SEQ ID NO: 327919 - RNA, 22 nt, Human herpesvirus 6
ccgaauugugccguuuaugcga

SEQ ID NO: 327920 - RNA, 14 nt, Human herpesvirus 6
ccgacaauguaaaa

SEQ ID NO: 327921 - RNA, 13 nt, Human herpesvirus 6
ccgauucagaaag

SEQ ID NO: 327922 - RNA, 17 nt, Human herpesvirus 6
ccgauuuuucagugucu

SEQ ID NO: 327923 - RNA, 19 nt, Human herpesvirus 6
ccgcagaggcggcgaccgc

SEQ ID NO: 327924 - RNA, 19 nt, Human herpesvirus 6
ccgcagccgucgauaauaa

SEQ ID NO: 327925 - RNA, 21 nt, Human herpesvirus 6
ccgcauaucgcccccauacac

SEQ ID NO: 327926 - RNA, 22 nt, Human herpesvirus 6
ccgccguccuauucagaggugc

SEQ ID NO: 327927 - RNA, 19 nt, Human herpesvirus 6
ccgcguccuccauccguca

SEQ ID NO: 327928 - RNA, 18 nt, Human herpesvirus 6
ccgcugacaaccuccgca

SEQ ID NO: 327929 - RNA, 17 nt, Human herpesvirus 6
ccggaucguaaggcagu

SEQ ID NO: 327930 - RNA, 17 nt, Human herpesvirus 6
ccggauuguuaauauua

SEQ ID NO: 327931 - RNA, 16 nt, Human herpesvirus 6
ccggcgaacugagauu

SEQ ID NO: 327932 - RNA, 20 nt, Human herpesvirus 6
ccgguuacggaaaagaugag

SEQ ID NO: 327933 - RNA, 21 nt, Human herpesvirus 6
ccgguuuggugguaaugacua

SEQ ID NO: 327934 - RNA, 19 nt, Human herpesvirus 6
ccguauaucuacugcaguc

SEQ ID NO: 327935 - RNA, 17 nt, Human herpesvirus 6
ccguuuuucucugcaaa

SEQ ID NO: 327936 - RNA, 19 nt, Human herpesvirus 6
ccguuuuucucugcaaaac

SEQ ID NO: 327937 - RNA, 14 nt, Human herpesvirus 6
ccuaaaaaagugua

SEQ ID NO: 327938 - RNA, 22 nt, Human herpesvirus 6
ccuaaaaaaguguaacauccca

SEQ ID NO: 327939 - RNA, 15 nt, Human herpesvirus 6
ccuaaauacauucac

SEQ ID NO: 327940 - RNA, 21 nt, Human herpesvirus 6
ccuaagaaauuuugcaugcau

SEQ ID NO: 327941 - RNA, 16 nt, Human herpesvirus 6
ccuaagugaaauucaa

SEQ ID NO: 327942 - RNA, 16 nt, Human herpesvirus 6
ccuaauaaacuguguc

SEQ ID NO: 327943 - RNA, 11 nt, Human herpesvirus 6
ccuacauucuc

SEQ ID NO: 327944 - RNA, 15 nt, Human herpesvirus 6
ccuacuauccgcccu

SEQ ID NO: 327945 - RNA, 17 nt, Human herpesvirus 6
ccuagaaggagcuuuca

SEQ ID NO: 327946 - RNA, 16 nt, Human herpesvirus 6
ccuagacacacaaaaa

SEQ ID NO: 327947 - RNA, 20 nt, Human herpesvirus 6
ccuagaggugccgaugaauu

SEQ ID NO: 327948 - RNA, 23 nt, Human herpesvirus 6
ccuaguaggauggaauggaauuu

SEQ ID NO: 327949 - RNA, 13 nt, Human herpesvirus 6
ccuauagucaaug

SEQ ID NO: 327950 - RNA, 16 nt, Human herpesvirus 6
ccuauagucaauguug

SEQ ID NO: 327951 - RNA, 17 nt, Human herpesvirus 6
ccuauagucaauguugu

SEQ ID NO: 327952 - RNA, 14 nt, Human herpesvirus 6
ccuauauguguugc

SEQ ID NO: 327953 - RNA, 17 nt, Human herpesvirus 6
ccuaucuagaucaauau

SEQ ID NO: 327954 - RNA, 18 nt, Human herpesvirus 6
ccuaucuagaucaauaua

SEQ ID NO: 327955 - RNA, 22 nt, Human herpesvirus 6
ccuaucucucgcuuaccguuca

SEQ ID NO: 327956 - RNA, 19 nt, Human herpesvirus 6
ccuauucagaggugcugau

SEQ ID NO: 327957 - RNA, 17 nt, Human herpesvirus 6
ccucaacacucucagug

SEQ ID NO: 327958 - RNA, 22 nt, Human herpesvirus 6
ccucauggagaaucggauccaa

SEQ ID NO: 327959 - RNA, 16 nt, Human herpesvirus 6
ccuccggccccagaga

SEQ ID NO: 327960 - RNA, 17 nt, Human herpesvirus 6
ccucgaauaauuauccu

SEQ ID NO: 327961 - RNA, 19 nt, Human herpesvirus 6
ccucgcucacaauauuuca

SEQ ID NO: 327962 - RNA, 21 nt, Human herpesvirus 6
ccucgcucacaauauuucaca

SEQ ID NO: 327963 - RNA, 16 nt, Human herpesvirus 6
ccucgguccaaccccu

SEQ ID NO: 327964 - RNA, 13 nt, Human herpesvirus 6
ccucguuguuuca

SEQ ID NO: 327965 - RNA, 16 nt, Human herpesvirus 6
ccucguuguuucauaa

SEQ ID NO: 327966 - RNA, 13 nt, Human herpesvirus 6
ccugcauaugcag

SEQ ID NO: 327967 - RNA, 17 nt, Human herpesvirus 6
ccuggaaaaacugacug

SEQ ID NO: 327968 - RNA, 13 nt, Human herpesvirus 6
ccuggaguacaag

SEQ ID NO: 327969 - RNA, 19 nt, Human herpesvirus 6
ccugggaaaagggugacac

SEQ ID NO: 327970 - RNA, 13 nt, Human herpesvirus 6
ccuguaaaauaua

SEQ ID NO: 327971 - RNA, 19 nt, Human herpesvirus 6
ccuguaaacuggucugcuu

SEQ ID NO: 327972 - RNA, 16 nt, Human herpesvirus 6
ccuguccccucggucc

SEQ ID NO: 327973 - RNA, 20 nt, Human herpesvirus 6
ccuguuaucuuacgguguau

SEQ ID NO: 327974 - RNA, 20 nt, Human herpesvirus 6
ccuguuuuagaaacauuugc

SEQ ID NO: 327975 - RNA, 21 nt, Human herpesvirus 6
ccuuaaaaaaacacaguauuu

SEQ ID NO: 327976 - RNA, 16 nt, Human herpesvirus 6
ccuuaauauauuugca

SEQ ID NO: 327977 - RNA, 14 nt, Human herpesvirus 6
ccuucagacaucca

SEQ ID NO: 327978 - RNA, 15 nt, Human herpesvirus 6
ccuucagacauccag

SEQ ID NO: 327979 - RNA, 13 nt, Human herpesvirus 6
ccuucagacucaa

SEQ ID NO: 327980 - RNA, 23 nt, Human herpesvirus 6
ccuucgcggugcagaacaucuca

SEQ ID NO: 327981 - RNA, 15 nt, Human herpesvirus 6
ccuucugccugaaaa

SEQ ID NO: 327982 - RNA, 18 nt, Human herpesvirus 6
ccuugcgguaaauggcau

SEQ ID NO: 327983 - RNA, 16 nt, Human herpesvirus 6
ccuuucagaguagaaa

SEQ ID NO: 327984 - RNA, 14 nt, Human herpesvirus 6
ccuuucaguucaaa

SEQ ID NO: 327985 - RNA, 21 nt, Human herpesvirus 6
ccuuuuuuacuaguuuucaca

SEQ ID NO: 327986 - RNA, 20 nt, Human herpesvirus 6
cgaaaauuguaacuucauac

SEQ ID NO: 327987 - RNA, 17 nt, Human herpesvirus 6
cgaaacauagucaagua

SEQ ID NO: 327988 - RNA, 23 nt, Human herpesvirus 6
cgaaaccaucgucauaaccucau

SEQ ID NO: 327989 - RNA, 23 nt, Human herpesvirus 6
cgaaagcugaugcgcaacugaua

SEQ ID NO: 327990 - RNA, 18 nt, Human herpesvirus 6
cgaaaguucaucuuucaa

SEQ ID NO: 327991 - RNA, 15 nt, Human herpesvirus 6
cgaaauucaccagau

SEQ ID NO: 327992 - RNA, 18 nt, Human herpesvirus 6
cgaacguagacagucaca

SEQ ID NO: 327993 - RNA, 19 nt, Human herpesvirus 6
cgaagaagagccuuuaacc

SEQ ID NO: 327994 - RNA, 21 nt, Human herpesvirus 6
cgaagaauccuucguucuggu

SEQ ID NO: 327995 - RNA, 17 nt, Human herpesvirus 6
cgaauaauuauccucuc

SEQ ID NO: 327996 - RNA, 22 nt, Human herpesvirus 6
cgaauaauuauccucucuggaa

SEQ ID NO: 327997 - RNA, 19 nt, Human herpesvirus 6
cgaauacuuucaugauucu

SEQ ID NO: 327998 - RNA, 17 nt, Human herpesvirus 6
cgaaugugauuaugcca

SEQ ID NO: 327999 - RNA, 17 nt, Human herpesvirus 6
cgacacagaacacaucc

SEQ ID NO: 328000 - RNA, 12 nt, Human herpesvirus 6
cgacagaugugu

SEQ ID NO: 328001 - RNA, 18 nt, Human herpesvirus 6
cgacagggugagucacau

SEQ ID NO: 328002 - RNA, 21 nt, Human herpesvirus 6
cgacaucgucuccuacauucu

SEQ ID NO: 328003 - RNA, 23 nt, Human herpesvirus 6
cgacccacuccuacuauccgccc

SEQ ID NO: 328004 - RNA, 19 nt, Human herpesvirus 6
cgacucccggcccagagac

SEQ ID NO: 328005 - RNA, 18 nt, Human herpesvirus 6
cgacucgcggaguggagu

SEQ ID NO: 328006 - RNA, 22 nt, Human herpesvirus 6
cgacuuuuaaaucugagguuuc

SEQ ID NO: 328007 - RNA, 13 nt, Human herpesvirus 6
cgagaaaaacauc

SEQ ID NO: 328008 - RNA, 16 nt, Human herpesvirus 6
cgagaaacgcccugaa

SEQ ID NO: 328009 - RNA, 17 nt, Human herpesvirus 6
cgagaaccaccagagac

SEQ ID NO: 328010 - RNA, 17 nt, Human herpesvirus 6
cgagagcugacuuaaag

SEQ ID NO: 328011 - RNA, 19 nt, Human herpesvirus 6
cgagagcugacuuaaaguu

SEQ ID NO: 328012 - RNA, 15 nt, Human herpesvirus 6
cgagcccucguccaa

SEQ ID NO: 328013 - RNA, 19 nt, Human herpesvirus 6
cgagcccucguccaaauca

SEQ ID NO: 328014 - RNA, 16 nt, Human herpesvirus 6
aauuuguggaacaaua

SEQ ID NO: 328015 - RNA, 11 nt, Human herpesvirus 6
aauuuguguaa

SEQ ID NO: 328016 - RNA, 18 nt, Human herpesvirus 6
aauuuguuuuuccauaaa

SEQ ID NO: 328017 - RNA, 15 nt, Human herpesvirus 6
aauuuuauccaucca

SEQ ID NO: 328018 - RNA, 18 nt, Human herpesvirus 6
aauuuuauuaacuguaaa

SEQ ID NO: 328019 - RNA, 15 nt, Human herpesvirus 6
acaaaacaaucuauc

SEQ ID NO: 328020 - RNA, 22 nt, Human herpesvirus 6
acaaaacauaucgagccaaaga

SEQ ID NO: 328021 - RNA, 22 nt, Human herpesvirus 6
acaaaaccaggaauccuauuca

SEQ ID NO: 328022 - RNA, 15 nt, Human herpesvirus 6
acaaaaccuaaauac

SEQ ID NO: 328023 - RNA, 14 nt, Human herpesvirus 6
acaaaauuucucac

SEQ ID NO: 328024 - RNA, 21 nt, Human herpesvirus 6
acaaaccaucaauuuuaucca

SEQ ID NO: 328025 - RNA, 17 nt, Human herpesvirus 6
acaaagaaucaaugaaa

SEQ ID NO: 328026 - RNA, 22 nt, Human herpesvirus 6
acaaagcuuuacuuacaacuga

SEQ ID NO: 328027 - RNA, 15 nt, Human herpesvirus 6
acaaaggagugagaa

SEQ ID NO: 328028 - RNA, 17 nt, Human herpesvirus 6
acaaagugagauacgug

SEQ ID NO: 328029 - RNA, 17 nt, Human herpesvirus 6
acaaauaaaagcauuuu

SEQ ID NO: 328030 - RNA, 18 nt, Human herpesvirus 6
acaaaucagcauccggua

SEQ ID NO: 328031 - RNA, 20 nt, Human herpesvirus 6
acaaaucuucccuuuuacaa

SEQ ID NO: 328032 - RNA, 13 nt, Human herpesvirus 6
acaaauuaauuaa

SEQ ID NO: 328033 - RNA, 15 nt, Human herpesvirus 6
acaaauugaccagcc

SEQ ID NO: 328034 - RNA, 18 nt, Human herpesvirus 6
acaaauugaccagccaga

SEQ ID NO: 328035 - RNA, 22 nt, Human herpesvirus 6
acaacaacgaaaaagcuaucgu

SEQ ID NO: 328036 - RNA, 20 nt, Human herpesvirus 6
acaacaauaacaacaacaau

SEQ ID NO: 328037 - RNA, 10 nt, Human herpesvirus 6
acaacaggcu

SEQ ID NO: 328038 - RNA, 20 nt, Human herpesvirus 6
acaaccauccagauaaccuc

SEQ ID NO: 328039 - RNA, 16 nt, Human herpesvirus 6
acaacccccgauucag

SEQ ID NO: 328040 - RNA, 15 nt, Human herpesvirus 6
acaacgaaacaguuc

SEQ ID NO: 328041 - RNA, 16 nt, Human herpesvirus 6
acaacgacuaccacau

SEQ ID NO: 328042 - RNA, 17 nt, Human herpesvirus 6
acaacgacuaccacauc

SEQ ID NO: 328043 - RNA, 21 nt, Human herpesvirus 6
acaacgacuaccacaucaccg

SEQ ID NO: 328044 - RNA, 14 nt, Human herpesvirus 6
acaacgacuaucaa

SEQ ID NO: 328045 - RNA, 23 nt, Human herpesvirus 6
acaaguagcucguaauaauuugg

SEQ ID NO: 328046 - RNA, 17 nt, Human herpesvirus 6
acaaguauccuuccacc

SEQ ID NO: 328047 - RNA, 15 nt, Human herpesvirus 6
acaaguuucaauaua

SEQ ID NO: 328048 - RNA, 12 nt, Human herpesvirus 6
acaauaacaaca

SEQ ID NO: 328049 - RNA, 21 nt, Human herpesvirus 6
acaauaacaauuauucaacau

SEQ ID NO: 328050 - RNA, 16 nt, Human herpesvirus 6
acaauacaacaauaaa

SEQ ID NO: 328051 - RNA, 20 nt, Human herpesvirus 6
acaaucagaaaacacuaucu

SEQ ID NO: 328052 - RNA, 20 nt, Human herpesvirus 6
acaauccauguucauaggac

SEQ ID NO: 328053 - RNA, 16 nt, Human herpesvirus 6
acaaugacauuauuaa

SEQ ID NO: 328054 - RNA, 19 nt, Human herpesvirus 6
acaaugcagaacaacagca

SEQ ID NO: 328055 - RNA, 20 nt, Human herpesvirus 6
acaauggaaaagguggucgu

SEQ ID NO: 328056 - RNA, 21 nt, Human herpesvirus 6
acaauuagauaaacaacgcuc

SEQ ID NO: 328057 - RNA, 16 nt, Human herpesvirus 6
acaauuaucacaguug

SEQ ID NO: 328058 - RNA, 21 nt, Human herpesvirus 6
acaauuaugugucaaguuuca

SEQ ID NO: 328059 - RNA, 21 nt, Human herpesvirus 6
acaauuucuuguugaguuuca

SEQ ID NO: 328060 - RNA, 16 nt, Human herpesvirus 6
acacaaccauccagau

SEQ ID NO: 328061 - RNA, 15 nt, Human herpesvirus 6
acacaagaacagaga

SEQ ID NO: 328062 - RNA, 17 nt, Human herpesvirus 6
acacaaucagaaaacac

SEQ ID NO: 328063 - RNA, 21 nt, Human herpesvirus 6
acacaauuaguccauuaccac

SEQ ID NO: 328064 - RNA, 13 nt, Human herpesvirus 6
acacacagugaaa

SEQ ID NO: 328065 - RNA, 20 nt, Human herpesvirus 6
acacaccgucuucaaccugu

SEQ ID NO: 328066 - RNA, 21 nt, Human herpesvirus 6
acacaccgucuucaaccuguu

SEQ ID NO: 328067 - RNA, 23 nt, Human herpesvirus 6
acacaccuuaaacauguauauaa

SEQ ID NO: 328068 - RNA, 18 nt, Human herpesvirus 6
acacacgccgacuccguc

SEQ ID NO: 328069 - RNA, 15 nt, Human herpesvirus 6
acacagcacauaacu

SEQ ID NO: 328070 - RNA, 21 nt, Human herpesvirus 6
acacagcacauaacugcauac

SEQ ID NO: 328071 - RNA, 14 nt, Human herpesvirus 6
acacaggauuauaa

SEQ ID NO: 328072 - RNA, 13 nt, Human herpesvirus 6
acacauccaccca

SEQ ID NO: 328073 - RNA, 16 nt, Human herpesvirus 6
acacauguauuuauuc

SEQ ID NO: 328074 - RNA, 13 nt, Human herpesvirus 6
acaccgauucaga

SEQ ID NO: 328075 - RNA, 20 nt, Human herpesvirus 6
acaccucaauuaauacaaaa

SEQ ID NO: 328076 - RNA, 17 nt, Human herpesvirus 6
acaccuuaaacauguau

SEQ ID NO: 328077 - RNA, 22 nt, Human herpesvirus 6
acacgaaaaacauuucuuacac

SEQ ID NO: 328078 - RNA, 13 nt, Human herpesvirus 6
acacgccagacau

SEQ ID NO: 328079 - RNA, 23 nt, Human herpesvirus 6
acacgcuguugcucgaucgcacc

SEQ ID NO: 328080 - RNA, 15 nt, Human herpesvirus 6
acacguacauaauuc

SEQ ID NO: 328081 - RNA, 16 nt, Human herpesvirus 6
acacucuuaacuacuu

SEQ ID NO: 328082 - RNA, 14 nt, Human herpesvirus 6
acacugaguucugu

SEQ ID NO: 328083 - RNA, 23 nt, Human herpesvirus 6
acagagaaggguaugaaacuuua

SEQ ID NO: 328084 - RNA, 17 nt, Human herpesvirus 6
acagagauacguaguca

SEQ ID NO: 328085 - RNA, 18 nt, Human herpesvirus 6
acagagauauuucgugcu

SEQ ID NO: 328086 - RNA, 23 nt, Human herpesvirus 6
acagagaucguaccggucugcaa

SEQ ID NO: 328087 - RNA, 19 nt, Human herpesvirus 6
acagagcauccuguuuucc

SEQ ID NO: 328088 - RNA, 17 nt, Human herpesvirus 6
acagagcgcaucuuuaa

SEQ ID NO: 328089 - RNA, 18 nt, Human herpesvirus 6
acagaucggcguuuugau

SEQ ID NO: 328090 - RNA, 23 nt, Human herpesvirus 6
acagcguguuauuucgggacaaa

SEQ ID NO: 328091 - RNA, 20 nt, Human herpesvirus 6
acagcuuuauucccaugacg

SEQ ID NO: 328092 - RNA, 14 nt, Human herpesvirus 6
acaggaacagucug

SEQ ID NO: 328093 - RNA, 12 nt, Human herpesvirus 6
acaggauucccu

SEQ ID NO: 328094 - RNA, 23 nt, Human herpesvirus 6
acaggauucccuucagacaucca

SEQ ID NO: 328095 - RNA, 16 nt, Human herpesvirus 6
acaggcuugugaaaga

SEQ ID NO: 328096 - RNA, 12 nt, Human herpesvirus 6
acagggggaucg

SEQ ID NO: 328097 - RNA, 16 nt, Human herpesvirus 6
acagggugagucacau

SEQ ID NO: 328098 - RNA, 16 nt, Human herpesvirus 6
acaguacuaugauuua

SEQ ID NO: 328099 - RNA, 13 nt, Human herpesvirus 6
acaguagauuuca

SEQ ID NO: 328100 - RNA, 14 nt, Human herpesvirus 6
acagucacacacag

SEQ ID NO: 328101 - RNA, 22 nt, Human herpesvirus 6
acagucacacacagggugcuua

SEQ ID NO: 328102 - RNA, 19 nt, Human herpesvirus 6
acagucauacuccuuuuau

SEQ ID NO: 328103 - RNA, 22 nt, Human herpesvirus 6
acaguccauuucuaaagauuug

SEQ ID NO: 328104 - RNA, 13 nt, Human herpesvirus 6
acagucuacaugu

SEQ ID NO: 328105 - RNA, 15 nt, Human herpesvirus 6
acagucuacaugucc

SEQ ID NO: 328106 - RNA, 13 nt, Human herpesvirus 6
acagucugacaug

SEQ ID NO: 328107 - RNA, 18 nt, Human herpesvirus 6
acaguugauaaacauuaa

SEQ ID NO: 328108 - RNA, 21 nt, Human herpesvirus 6
acaguuucucgaaaaaacaac

SEQ ID NO: 328109 - RNA, 19 nt, Human herpesvirus 6
acauaaacuuagaucuaua

SEQ ID NO: 328110 - RNA, 14 nt, Human herpesvirus 6
acauaauaucuauc

SEQ ID NO: 328111 - RNA, 19 nt, Human herpesvirus 6
acauaauucggucaccuac

SEQ ID NO: 328112 - RNA, 15 nt, Human herpesvirus 6
acauagaaauuacaa

SEQ ID NO: 328113 - RNA, 18 nt, Human herpesvirus 6
acggaaaaaaaaucuauc

SEQ ID NO: 328114 - RNA, 15 nt, Human herpesvirus 6
acggaacaaggccaa

SEQ ID NO: 328115 - RNA, 21 nt, Human herpesvirus 6
acggagcccgugcacgucccg

SEQ ID NO: 328116 - RNA, 23 nt, Human herpesvirus 6
acggagucggcgugugugcuccg

SEQ ID NO: 328117 - RNA, 16 nt, Human herpesvirus 6
acggcaacauacccuu

SEQ ID NO: 328118 - RNA, 21 nt, Human herpesvirus 6
acggcagcggaccaauccaug

SEQ ID NO: 328119 - RNA, 13 nt, Human herpesvirus 6
acgggcaacuccc

SEQ ID NO: 328120 - RNA, 15 nt, Human herpesvirus 6
acgggcacacguccc

SEQ ID NO: 328121 - RNA, 16 nt, Human herpesvirus 6
acggucgaaaguucau

SEQ ID NO: 328122 - RNA, 11 nt, Human herpesvirus 6
acggugccaaa

SEQ ID NO: 328123 - RNA, 12 nt, Human herpesvirus 6
acggugccaaag

SEQ ID NO: 328124 - RNA, 17 nt, Human herpesvirus 6
acgguguuuucaucagu

SEQ ID NO: 328125 - RNA, 20 nt, Human herpesvirus 6
acgguucaccacugugauau

SEQ ID NO: 328126 - RNA, 16 nt, Human herpesvirus 6
acgguuugucucgcaa

SEQ ID NO: 328127 - RNA, 21 nt, Human herpesvirus 6
acguauccucagaaccaucug

SEQ ID NO: 328128 - RNA, 17 nt, Human herpesvirus 6
acgucuccuguaaaaua

SEQ ID NO: 328129 - RNA, 20 nt, Human herpesvirus 6
acgugaagugggccucguug

SEQ ID NO: 328130 - RNA, 19 nt, Human herpesvirus 6
acguggcagucugcucggu

SEQ ID NO: 328131 - RNA, 15 nt, Human herpesvirus 6
acguucugucugcag

SEQ ID NO: 328132 - RNA, 12 nt, Human herpesvirus 6
acguugaugauu

SEQ ID NO: 328133 - RNA, 16 nt, Human herpesvirus 6
acguugaugauuuaca

SEQ ID NO: 328134 - RNA, 22 nt, Human herpesvirus 6
acuaaaaagagucccaucuaua

SEQ ID NO: 328135 - RNA, 22 nt, Human herpesvirus 6
acuaaauuagagcuacgccaaa

SEQ ID NO: 328136 - RNA, 19 nt, Human herpesvirus 6
acuaagcaggaacccagau

SEQ ID NO: 328137 - RNA, 17 nt, Human herpesvirus 6
acuaauucggaacauug

SEQ ID NO: 328138 - RNA, 15 nt, Human herpesvirus 6
acuacaaagugaaag

SEQ ID NO: 328139 - RNA, 19 nt, Human herpesvirus 6
acuagauucaggguuuauc

SEQ ID NO: 328140 - RNA, 18 nt, Human herpesvirus 6
acuagcuaaaacuugaaa

SEQ ID NO: 328141 - RNA, 23 nt, Human herpesvirus 6
acuaggauuagaacaauuaucac

SEQ ID NO: 328142 - RNA, 22 nt, Human herpesvirus 6
acuaggugauugggagcucacu

SEQ ID NO: 328143 - RNA, 18 nt, Human herpesvirus 6
acuauggaguccuuguca

SEQ ID NO: 328144 - RNA, 13 nt, Human herpesvirus 6
acuaugugcauuc

SEQ ID NO: 328145 - RNA, 15 nt, Human herpesvirus 6
acuauugacauagga

SEQ ID NO: 328146 - RNA, 15 nt, Human herpesvirus 6
acuauuuaacaucca

SEQ ID NO: 328147 - RNA, 20 nt, Human herpesvirus 6
acuauuuguuuaaugcauuc

SEQ ID NO: 328148 - RNA, 16 nt, Human herpesvirus 6
acuauuuuagucacac

SEQ ID NO: 328149 - RNA, 18 nt, Human herpesvirus 6
acuauuuuagucacacau

SEQ ID NO: 328150 - RNA, 14 nt, Human herpesvirus 6
acucauagauuuca

SEQ ID NO: 328151 - RNA, 13 nt, Human herpesvirus 6
acucauccaagac

SEQ ID NO: 328152 - RNA, 16 nt, Human herpesvirus 6
acucccggcccagaga

SEQ ID NO: 328153 - RNA, 17 nt, Human herpesvirus 6
acuccgauuuucuuagu

SEQ ID NO: 328154 - RNA, 20 nt, Human herpesvirus 6
acuccggggggaaaccucaa

SEQ ID NO: 328155 - RNA, 21 nt, Human herpesvirus 6
acucgcggaguggaguccagu

SEQ ID NO: 328156 - RNA, 15 nt, Human herpesvirus 6
acucucucaguaauu

SEQ ID NO: 328157 - RNA, 18 nt, Human herpesvirus 6
acucuguguugaaugaac

SEQ ID NO: 328158 - RNA, 17 nt, Human herpesvirus 6
acucuuauaacaagcac

SEQ ID NO: 328159 - RNA, 15 nt, Human herpesvirus 6
acugaaaccaaagca

SEQ ID NO: 328160 - RNA, 14 nt, Human herpesvirus 6
acugaagaugagca

SEQ ID NO: 328161 - RNA, 17 nt, Human herpesvirus 6
acugacaaauacgagag

SEQ ID NO: 328162 - RNA, 18 nt, Human herpesvirus 6
acugacgguuagguuuaa

SEQ ID NO: 328163 - RNA, 21 nt, Human herpesvirus 6
acugcaagaacugcgacucaa

SEQ ID NO: 328164 - RNA, 18 nt, Human herpesvirus 6
acugcagcucgacuccag

SEQ ID NO: 328165 - RNA, 21 nt, Human herpesvirus 6
acugcuaaaagcuauguauga

SEQ ID NO: 328166 - RNA, 19 nt, Human herpesvirus 6
acuggugagaaauaacuua

SEQ ID NO: 328167 - RNA, 20 nt, Human herpesvirus 6
acugguuuacagcacuuugc

SEQ ID NO: 328168 - RNA, 19 nt, Human herpesvirus 6
acuguacgccaguguggau

SEQ ID NO: 328169 - RNA, 16 nt, Human herpesvirus 6
acuuacagagcuuuua

SEQ ID NO: 328170 - RNA, 16 nt, Human herpesvirus 6
acuuacuaauguggau

SEQ ID NO: 328171 - RNA, 21 nt, Human herpesvirus 6
acuucaaacaccucacaaucu

SEQ ID NO: 328172 - RNA, 14 nt, Human herpesvirus 6
acuucgacuucaaa

SEQ ID NO: 328173 - RNA, 16 nt, Human herpesvirus 6
acuucgugcugugaua

SEQ ID NO: 328174 - RNA, 17 nt, Human herpesvirus 6
acuucgugcugugauag

SEQ ID NO: 328175 - RNA, 21 nt, Human herpesvirus 6
acuucgugcugugauagcuau

SEQ ID NO: 328176 - RNA, 20 nt, Human herpesvirus 6
acuucuuucuaaaaucaaaa

SEQ ID NO: 328177 - RNA, 18 nt, Human herpesvirus 6
acuugauaaacuguaugc

SEQ ID NO: 328178 - RNA, 12 nt, Human herpesvirus 6
acuugauguaug

SEQ ID NO: 328179 - RNA, 14 nt, Human herpesvirus 6
acuugauguugauc

SEQ ID NO: 328180 - RNA, 21 nt, Human herpesvirus 6
acuuggacaccgguaaccucg

SEQ ID NO: 328181 - RNA, 16 nt, Human herpesvirus 6
acuugucuuacacucu

SEQ ID NO: 328182 - RNA, 18 nt, Human herpesvirus 6
acuuugauguuaacucag

SEQ ID NO: 328183 - RNA, 14 nt, Human herpesvirus 6
acuuuuaaaucuga

SEQ ID NO: 328184 - RNA, 19 nt, Human herpesvirus 6
acuuuuuuuuuucuuacaa

SEQ ID NO: 328185 - RNA, 20 nt, Human herpesvirus 6
agaaaaaaaacgaauagcau

SEQ ID NO: 328186 - RNA, 17 nt, Human herpesvirus 6
agaaaaaaacugugaaa

SEQ ID NO: 328187 - RNA, 22 nt, Human herpesvirus 6
agaaaauguuucauccaaauac

SEQ ID NO: 328188 - RNA, 18 nt, Human herpesvirus 6
agaaaauuauagcuucaa

SEQ ID NO: 328189 - RNA, 16 nt, Human herpesvirus 6
agaaacauuugcugau

SEQ ID NO: 328190 - RNA, 15 nt, Human herpesvirus 6
agaaacguugcacua

SEQ ID NO: 328191 - RNA, 17 nt, Human herpesvirus 6
agaaacuugcuccugga

SEQ ID NO: 328192 - RNA, 15 nt, Human herpesvirus 6
agaaauggaugucau

SEQ ID NO: 328193 - RNA, 15 nt, Human herpesvirus 6
agaaauuacaaggua

SEQ ID NO: 328194 - RNA, 21 nt, Human herpesvirus 6
agaaauuacaagguacacaau

SEQ ID NO: 328195 - RNA, 13 nt, Human herpesvirus 6
agaacaacagcau

SEQ ID NO: 328196 - RNA, 12 nt, Human herpesvirus 6
agaaccaaagac

SEQ ID NO: 328197 - RNA, 14 nt, Human herpesvirus 6
agaacgagcuuagc

SEQ ID NO: 328198 - RNA, 16 nt, Human herpesvirus 6
agaagagcgaaaugca

SEQ ID NO: 328199 - RNA, 20 nt, Human herpesvirus 6
agaaggcuaucacuuagaca

SEQ ID NO: 328200 - RNA, 18 nt, Human herpesvirus 6
agaaggucaucaugcugu

SEQ ID NO: 328201 - RNA, 19 nt, Human herpesvirus 6
agaaggucaucaugcugug

SEQ ID NO: 328202 - RNA, 15 nt, Human herpesvirus 6
agaauacgaacagaa

SEQ ID NO: 328203 - RNA, 21 nt, Human herpesvirus 6
agaauagagagaaagagauaa

SEQ ID NO: 328204 - RNA, 15 nt, Human herpesvirus 6
agaaucauuacuucg

SEQ ID NO: 328205 - RNA, 18 nt, Human herpesvirus 6
agaauccaccaaugacac

SEQ ID NO: 328206 - RNA, 13 nt, Human herpesvirus 6
agaaugccgugaa

SEQ ID NO: 328207 - RNA, 18 nt, Human herpesvirus 6
agaauuacgcagacuuaa

SEQ ID NO: 328208 - RNA, 18 nt, Human herpesvirus 6
agaauuacuauguggcau

SEQ ID NO: 328209 - RNA, 15 nt, Human herpesvirus 6
agacaaacgccucca

SEQ ID NO: 328210 - RNA, 20 nt, Human herpesvirus 6
agacaaacgccuccacauga

SEQ ID NO: 328211 - RNA, 23 nt, Human herpesvirus 6
agacaaacgccuccacaugacac

SEQ ID NO: 328212 - RNA, 13 nt, Human herpesvirus 6
agacacuguaucu

SEQ ID NO: 328213 - RNA, 16 nt, Human herpesvirus 6
agacagaccacacccc

SEQ ID NO: 328214 - RNA, 17 nt, Human herpesvirus 6
agacagaccacaccccu

SEQ ID NO: 328215 - RNA, 22 nt, Human herpesvirus 6
agacagaggaaauaaaaacacc

SEQ ID NO: 328216 - RNA, 12 nt, Human herpesvirus 6
agacagucacac

SEQ ID NO: 328217 - RNA, 23 nt, Human herpesvirus 6
agacagucacacacagggugcuu

SEQ ID NO: 328218 - RNA, 21 nt, Human herpesvirus 6
agacaguccauuucuaaagau

SEQ ID NO: 328219 - RNA, 16 nt, Human herpesvirus 6
agacagugagugagua

SEQ ID NO: 328220 - RNA, 16 nt, Human herpesvirus 6
agacaucacauuauaa

SEQ ID NO: 328221 - RNA, 22 nt, Human herpesvirus 6
agacaugcauuuuguauuuauc

SEQ ID NO: 328222 - RNA, 19 nt, Human herpesvirus 6
agacauucaacauuccaac

SEQ ID NO: 328223 - RNA, 21 nt, Human herpesvirus 6
agaccaauuuaugucauuuca

SEQ ID NO: 328224 - RNA, 22 nt, Human herpesvirus 6
agaccaauuuaugucauuucau

SEQ ID NO: 328225 - RNA, 24 nt, Human herpesvirus 6
agaccucauauaagaaccaacaga

SEQ ID NO: 328226 - RNA, 16 nt, Human herpesvirus 6
agacgaaacauaguca

SEQ ID NO: 328227 - RNA, 18 nt, Human herpesvirus 6
cauccaaaauacacuaac

SEQ ID NO: 328228 - RNA, 18 nt, Human herpesvirus 6
cauccagauaaccucacu

SEQ ID NO: 328229 - RNA, 14 nt, Human herpesvirus 6
cauccaugaaauca

SEQ ID NO: 328230 - RNA, 19 nt, Human herpesvirus 6
caucccagauacauaaaca

SEQ ID NO: 328231 - RNA, 19 nt, Human herpesvirus 6
cauccgucauacaaaauga

SEQ ID NO: 328232 - RNA, 15 nt, Human herpesvirus 6
cauccguuaguaaau

SEQ ID NO: 328233 - RNA, 14 nt, Human herpesvirus 6
caucgauccaaaag

SEQ ID NO: 328234 - RNA, 23 nt, Human herpesvirus 6
caucgauuugcugguaaauuuua

SEQ ID NO: 328235 - RNA, 19 nt, Human herpesvirus 6
caucgcgcgcgacgugcca

SEQ ID NO: 328236 - RNA, 17 nt, Human herpesvirus 6
caucgucauaaccucau

SEQ ID NO: 328237 - RNA, 15 nt, Human herpesvirus 6
caucgucuccuacau

SEQ ID NO: 328238 - RNA, 13 nt, Human herpesvirus 6
caucuauacaccc

SEQ ID NO: 328239 - RNA, 12 nt, Human herpesvirus 6
caucuccaauaa

SEQ ID NO: 328240 - RNA, 11 nt, Human herpesvirus 6
caucugcaaaa

SEQ ID NO: 328241 - RNA, 12 nt, Human herpesvirus 6
caucugcaaaaa

SEQ ID NO: 328242 - RNA, 12 nt, Human herpesvirus 6
caucugccauau

SEQ ID NO: 328243 - RNA, 13 nt, Human herpesvirus 6
caucugccauauc

SEQ ID NO: 328244 - RNA, 14 nt, Human herpesvirus 6
caucugccauauca

SEQ ID NO: 328245 - RNA, 16 nt, Human herpesvirus 6
caucuuaaaagaccac

SEQ ID NO: 328246 - RNA, 15 nt, Human herpesvirus 6
caucuuaccuucaaa

SEQ ID NO: 328247 - RNA, 16 nt, Human herpesvirus 6
caucuuuuucuucagg

SEQ ID NO: 328248 - RNA, 21 nt, Human herpesvirus 6
caugacgauucaaaccgcaga

SEQ ID NO: 328249 - RNA, 16 nt, Human herpesvirus 6
caugacugugagguua

SEQ ID NO: 328250 - RNA, 17 nt, Human herpesvirus 6
caugacugugagguuau

SEQ ID NO: 328251 - RNA, 16 nt, Human herpesvirus 6
caugaucugcuugaua

SEQ ID NO: 328252 - RNA, 12 nt, Human herpesvirus 6
caugaugaucug

SEQ ID NO: 328253 - RNA, 16 nt, Human herpesvirus 6
caugcaaaacagacuu

SEQ ID NO: 328254 - RNA, 18 nt, Human herpesvirus 6
caugcaacacaacaaaca

SEQ ID NO: 328255 - RNA, 23 nt, Human herpesvirus 6
caugcaacccgccacucuacaau

SEQ ID NO: 328256 - RNA, 18 nt, Human herpesvirus 6
caugcauuuuguauuuau

SEQ ID NO: 328257 - RNA, 19 nt, Human herpesvirus 6
cauggaaaacaaagaauca

SEQ ID NO: 328258 - RNA, 19 nt, Human herpesvirus 6
cauggaagacaaauuaauu

SEQ ID NO: 328259 - RNA, 15 nt, Human herpesvirus 6
caugucuugcaacuc

SEQ ID NO: 328260 - RNA, 23 nt, Human herpesvirus 6
cauguggugauacgugaauuuca

SEQ ID NO: 328261 - RNA, 14 nt, Human herpesvirus 6
cauguguauauuga

SEQ ID NO: 328262 - RNA, 20 nt, Human herpesvirus 6
cauguucggagauaucauaa

SEQ ID NO: 328263 - RNA, 22 nt, Human herpesvirus 6
cauguuuauugucaaauagcca

SEQ ID NO: 328264 - RNA, 21 nt, Human herpesvirus 6
cauguuuguugugaucuuuac

SEQ ID NO: 328265 - RNA, 21 nt, Human herpesvirus 6
cauuaaaaaaaauagcagaag

SEQ ID NO: 328266 - RNA, 20 nt, Human herpesvirus 6
cauuaaaauagccagggcau

SEQ ID NO: 328267 - RNA, 22 nt, Human herpesvirus 6
cauuaacccugggugaguuuua

SEQ ID NO: 328268 - RNA, 18 nt, Human herpesvirus 6
cauuaccacacgcuuaca

SEQ ID NO: 328269 - RNA, 16 nt, Human herpesvirus 6
cauuaccucugcaaua

SEQ ID NO: 328270 - RNA, 13 nt, Human herpesvirus 6
cauuagcauacag

SEQ ID NO: 328271 - RNA, 16 nt, Human herpesvirus 6
cauuauaagacacuga

SEQ ID NO: 328272 - RNA, 17 nt, Human herpesvirus 6
cauuauuguguucugcu

SEQ ID NO: 328273 - RNA, 15 nt, Human herpesvirus 6
cauucaaagucuaau

SEQ ID NO: 328274 - RNA, 12 nt, Human herpesvirus 6
cauucaacaucc

SEQ ID NO: 328275 - RNA, 13 nt, Human herpesvirus 6
cauucaccgguga

SEQ ID NO: 328276 - RNA, 22 nt, Human herpesvirus 6
cauuccucguucuaccaugugc

SEQ ID NO: 328277 - RNA, 21 nt, Human herpesvirus 6
cauucuagauacggugucaca

SEQ ID NO: 328278 - RNA, 22 nt, Human herpesvirus 6
cauucuagauacggugucacac

SEQ ID NO: 328279 - RNA, 17 nt, Human herpesvirus 6
cauugaaaaaucucuau

SEQ ID NO: 328280 - RNA, 17 nt, Human herpesvirus 6
cauugaauaacgguguu

SEQ ID NO: 328281 - RNA, 19 nt, Human herpesvirus 6
cauugaauaacgguguuga

SEQ ID NO: 328282 - RNA, 21 nt, Human herpesvirus 6
cauugagugugcaucagcaua

SEQ ID NO: 328283 - RNA, 18 nt, Human herpesvirus 6
cauugcgagauuguaaua

SEQ ID NO: 328284 - RNA, 22 nt, Human herpesvirus 6
cauugcgagauuguaauauuca

SEQ ID NO: 328285 - RNA, 15 nt, Human herpesvirus 6
cauuguuugaauaac

SEQ ID NO: 328286 - RNA, 16 nt, Human herpesvirus 6
cauuguuuuugcaugu

SEQ ID NO: 328287 - RNA, 21 nt, Human herpesvirus 6
cauuguuuuugcaugugauaa

SEQ ID NO: 328288 - RNA, 22 nt, Human herpesvirus 6
cauuucauugaauaacgguguu

SEQ ID NO: 328289 - RNA, 13 nt, Human herpesvirus 6
cauuuccaugcau

SEQ ID NO: 328290 - RNA, 15 nt, Human herpesvirus 6
cauuuccaugcauau

SEQ ID NO: 328291 - RNA, 16 nt, Human herpesvirus 6
cauuuccaugcauauc

SEQ ID NO: 328292 - RNA, 17 nt, Human herpesvirus 6
cauuucuaaagauuugg

SEQ ID NO: 328293 - RNA, 20 nt, Human herpesvirus 6
cauuugacuccaacgcacac

SEQ ID NO: 328294 - RNA, 21 nt, Human herpesvirus 6
cauuugccgggaugagcuuua

SEQ ID NO: 328295 - RNA, 23 nt, Human herpesvirus 6
cauuugccgggaugagcuuuaau

SEQ ID NO: 328296 - RNA, 20 nt, Human herpesvirus 6
cauuuguuuuuuaaagcaca

SEQ ID NO: 328297 - RNA, 22 nt, Human herpesvirus 6
cauuuugaaaugucgaaucuca

SEQ ID NO: 328298 - RNA, 21 nt, Human herpesvirus 6
ccaaaaugcaacgcaucacac

SEQ ID NO: 328299 - RNA, 15 nt, Human herpesvirus 6
ccaaagacauucaac

SEQ ID NO: 328300 - RNA, 18 nt, Human herpesvirus 6
ccaaagcuuuauguaccc

SEQ ID NO: 328301 - RNA, 15 nt, Human herpesvirus 6
ccaaauacacuuuca

SEQ ID NO: 328302 - RNA, 17 nt, Human herpesvirus 6
ccaaauccugacuacga

SEQ ID NO: 328303 - RNA, 16 nt, Human herpesvirus 6
ccaacgcgacagggug

SEQ ID NO: 328304 - RNA, 17 nt, Human herpesvirus 6
ccaacgcgacaggguga

SEQ ID NO: 328305 - RNA, 19 nt, Human herpesvirus 6
ccaacgcuaaauauaucaa

SEQ ID NO: 328306 - RNA, 21 nt, Human herpesvirus 6
ccaauauaacuuuacauuaaa

SEQ ID NO: 328307 - RNA, 18 nt, Human herpesvirus 6
ccaauccaacgaauacuu

SEQ ID NO: 328308 - RNA, 12 nt, Human herpesvirus 6
ccaauccaauau

SEQ ID NO: 328309 - RNA, 22 nt, Human herpesvirus 6
ccaaucccggacgcaccuccuu

SEQ ID NO: 328310 - RNA, 19 nt, Human herpesvirus 6
ccaauuaacacauuuuaac

SEQ ID NO: 328311 - RNA, 16 nt, Human herpesvirus 6
ccaauuccuuaauucu

SEQ ID NO: 328312 - RNA, 21 nt, Human herpesvirus 6
ccacaauccgguauccgugaa

SEQ ID NO: 328313 - RNA, 21 nt, Human herpesvirus 6
ccacaccaucuucagcucaaa

SEQ ID NO: 328314 - RNA, 13 nt, Human herpesvirus 6
ccacacgccaguc

SEQ ID NO: 328315 - RNA, 23 nt, Human herpesvirus 6
ccacagccuguucuugcuaccga

SEQ ID NO: 328316 - RNA, 13 nt, Human herpesvirus 6
ccacaucaccgau

SEQ ID NO: 328317 - RNA, 18 nt, Human herpesvirus 6
ccaccuggaaaaacugac

SEQ ID NO: 328318 - RNA, 20 nt, Human herpesvirus 6
ccacgaacguagacagucac

SEQ ID NO: 328319 - RNA, 20 nt, Human herpesvirus 6
ccacgcauagacaaaccagc

SEQ ID NO: 328320 - RNA, 19 nt, Human herpesvirus 6
ccacguccucgugcucugc

SEQ ID NO: 328321 - RNA, 13 nt, Human herpesvirus 6
ccacuugaaccaa

SEQ ID NO: 328322 - RNA, 17 nt, Human herpesvirus 6
ccacuugcaaugugauc

SEQ ID NO: 328323 - RNA, 14 nt, Human herpesvirus 6
ccagacaauaauca

SEQ ID NO: 328324 - RNA, 23 nt, Human herpesvirus 6
ccagauucgguugcuuauaugca

SEQ ID NO: 328325 - RNA, 21 nt, Human herpesvirus 6
ccaggaaaguguguucuuaca

SEQ ID NO: 328326 - RNA, 14 nt, Human herpesvirus 6
ccaggauagaaaaa

SEQ ID NO: 328327 - RNA, 14 nt, Human herpesvirus 6
ccagggaacuugau

SEQ ID NO: 328328 - RNA, 14 nt, Human herpesvirus 6
ccaguagcacaaac

SEQ ID NO: 328329 - RNA, 13 nt, Human herpesvirus 6
ccaguauugaaga

SEQ ID NO: 328330 - RNA, 19 nt, Human herpesvirus 6
ccaguguggauaucucaaa

SEQ ID NO: 328331 - RNA, 23 nt, Human herpesvirus 6
ccaguuaauaagauguugcaaua

SEQ ID NO: 328332 - RNA, 14 nt, Human herpesvirus 6
ccauaaaaaaucuu

SEQ ID NO: 328333 - RNA, 19 nt, Human herpesvirus 6
ccauaaaaaaucuugucac

SEQ ID NO: 328334 - RNA, 13 nt, Human herpesvirus 6
ccauaaaaauauc

SEQ ID NO: 328335 - RNA, 19 nt, Human herpesvirus 6
ccauacgauauaaaauuua

SEQ ID NO: 328336 - RNA, 16 nt, Human herpesvirus 6
ccauauuguguaacuc

SEQ ID NO: 328337 - RNA, 18 nt, Human herpesvirus 6
ccaucauuauugucugca

SEQ ID NO: 328338 - RNA, 16 nt, Human herpesvirus 6
ccauccaauccaauau

SEQ ID NO: 328339 - RNA, 14 nt, Human herpesvirus 6
ccaucccuaucucu

SEQ ID NO: 328340 - RNA, 14 nt, Human herpesvirus 6
ccaucuauacaccc

SEQ ID NO: 328341 - RNA, 21 nt, Human herpesvirus 6
ccaucugcgaaaaagaauugg

SEQ ID NO: 328342 - RNA, 22 nt, Human herpesvirus 6
ccaugacgauucaaaccgcaga

SEQ ID NO: 328343 - RNA, 20 nt, Human herpesvirus 6
ccauuagguugcuagacuau

SEQ ID NO: 328344 - RNA, 14 nt, Human herpesvirus 6
augaacaaugacau

SEQ ID NO: 328345 - RNA, 22 nt, Human herpesvirus 6
augaacgcagcguaaugugcaa

SEQ ID NO: 328346 - RNA, 19 nt, Human herpesvirus 6
augaauguguucacagagc

SEQ ID NO: 328347 - RNA, 11 nt, Human herpesvirus 6
augaauuccau

SEQ ID NO: 328348 - RNA, 19 nt, Human herpesvirus 6
augaauucguuacaaucuc

SEQ ID NO: 328349 - RNA, 23 nt, Human herpesvirus 6
augacaccucaauuaauacaaaa

SEQ ID NO: 328350 - RNA, 20 nt, Human herpesvirus 6
augaccucaucccuuaaaaa

SEQ ID NO: 328351 - RNA, 22 nt, Human herpesvirus 6
augaccuggccgaguuuggaca

SEQ ID NO: 328352 - RNA, 22 nt, Human herpesvirus 6
augacggccuccggccccagag

SEQ ID NO: 328353 - RNA, 15 nt, Human herpesvirus 6
augacuuuucuauca

SEQ ID NO: 328354 - RNA, 19 nt, Human herpesvirus 6
augacuuuucuaucacuca

SEQ ID NO: 328355 - RNA, 15 nt, Human herpesvirus 6
augagaggacaguca

SEQ ID NO: 328356 - RNA, 17 nt, Human herpesvirus 6
augagcguaagaauuaa

SEQ ID NO: 328357 - RNA, 11 nt, Human herpesvirus 6
augagcuuuaa

SEQ ID NO: 328358 - RNA, 22 nt, Human herpesvirus 6
augaggcgcuugaaaccacuga

SEQ ID NO: 328359 - RNA, 13 nt, Human herpesvirus 6
augauaaauugau

SEQ ID NO: 328360 - RNA, 16 nt, Human herpesvirus 6
augauauuccagacaa

SEQ ID NO: 328361 - RNA, 23 nt, Human herpesvirus 6
augaucaacggccuggaguacaa

SEQ ID NO: 328362 - RNA, 14 nt, Human herpesvirus 6
augaucacuaucag

SEQ ID NO: 328363 - RNA, 17 nt, Human herpesvirus 6
augaucagcauucacuc

SEQ ID NO: 328364 - RNA, 15 nt, Human herpesvirus 6
augaucgacauuugu

SEQ ID NO: 328365 - RNA, 10 nt, Human herpesvirus 6
augaucucac

SEQ ID NO: 328366 - RNA, 15 nt, Human herpesvirus 6
augaucugcuugaua

SEQ ID NO: 328367 - RNA, 20 nt, Human herpesvirus 6
augauuuuacaaagaccuau

SEQ ID NO: 328368 - RNA, 13 nt, Human herpesvirus 6
augcaaaucucac

SEQ ID NO: 328369 - RNA, 22 nt, Human herpesvirus 6
augcaacauccugcguguuaau

SEQ ID NO: 328370 - RNA, 18 nt, Human herpesvirus 6
augcaagcucaugaacau

SEQ ID NO: 328371 - RNA, 16 nt, Human herpesvirus 6
augcaauaggccauaa

SEQ ID NO: 328372 - RNA, 17 nt, Human herpesvirus 6
augcagaacaacagcau

SEQ ID NO: 328373 - RNA, 19 nt, Human herpesvirus 6
augcagacugcuucuuaga

SEQ ID NO: 328374 - RNA, 14 nt, Human herpesvirus 6
augcaucugccaua

SEQ ID NO: 328375 - RNA, 15 nt, Human herpesvirus 6
augcaucugccauau

SEQ ID NO: 328376 - RNA, 17 nt, Human herpesvirus 6
augccaaauguauugaa

SEQ ID NO: 328377 - RNA, 23 nt, Human herpesvirus 6
augccugcauaugcagacugcuu

SEQ ID NO: 328378 - RNA, 14 nt, Human herpesvirus 6
augcgaaucugccg

SEQ ID NO: 328379 - RNA, 15 nt, Human herpesvirus 6
augcguggggugcgu

SEQ ID NO: 328380 - RNA, 16 nt, Human herpesvirus 6
augcguuguguuacac

SEQ ID NO: 328381 - RNA, 17 nt, Human herpesvirus 6
augcuuugggaccuuca

SEQ ID NO: 328382 - RNA, 22 nt, Human herpesvirus 6
augcuuugguuucaguagugag

SEQ ID NO: 328383 - RNA, 15 nt, Human herpesvirus 6
auggaaaauugcaaa

SEQ ID NO: 328384 - RNA, 17 nt, Human herpesvirus 6
auggaaaauugcaaauu

SEQ ID NO: 328385 - RNA, 15 nt, Human herpesvirus 6
auggaagaaccaaag

SEQ ID NO: 328386 - RNA, 23 nt, Human herpesvirus 6
auggagacuccccgcuaacuuuu

SEQ ID NO: 328387 - RNA, 16 nt, Human herpesvirus 6
auggagggaauuguau

SEQ ID NO: 328388 - RNA, 16 nt, Human herpesvirus 6
auggauaaacgugucu

SEQ ID NO: 328389 - RNA, 19 nt, Human herpesvirus 6
auggaugucauauggugcg

SEQ ID NO: 328390 - RNA, 17 nt, Human herpesvirus 6
auggcagaucuugaaaa

SEQ ID NO: 328391 - RNA, 22 nt, Human herpesvirus 6
auggcagaucuugaaaagcccu

SEQ ID NO: 328392 - RNA, 13 nt, Human herpesvirus 6
auggcgcacgcua

SEQ ID NO: 328393 - RNA, 16 nt, Human herpesvirus 6
auggcuaacguacuca

SEQ ID NO: 328394 - RNA, 13 nt, Human herpesvirus 6
auggcugcgcuac

SEQ ID NO: 328395 - RNA, 13 nt, Human herpesvirus 6
augggagugauug

SEQ ID NO: 328396 - RNA, 23 nt, Human herpesvirus 6
augggagugauugugacaaggaa

SEQ ID NO: 328397 - RNA, 15 nt, Human herpesvirus 6
augguaucugaagac

SEQ ID NO: 328398 - RNA, 19 nt, Human herpesvirus 6
auggugaaacuugacacau

SEQ ID NO: 328399 - RNA, 16 nt, Human herpesvirus 6
auggugcguguacaag

SEQ ID NO: 328400 - RNA, 15 nt, Human herpesvirus 6
augguuaucaucaca

SEQ ID NO: 328401 - RNA, 15 nt, Human herpesvirus 6
auguaaaguuauauu

SEQ ID NO: 328402 - RNA, 15 nt, Human herpesvirus 6
auguaauacaucaac

SEQ ID NO: 328403 - RNA, 18 nt, Human herpesvirus 6
auguaauacaucaacaaa

SEQ ID NO: 328404 - RNA, 21 nt, Human herpesvirus 6
auguacaguuucucgaaaaaa

SEQ ID NO: 328405 - RNA, 23 nt, Human herpesvirus 6
auguacucauccaagacuccuac

SEQ ID NO: 328406 - RNA, 19 nt, Human herpesvirus 6
auguagcauacgacaaaua

SEQ ID NO: 328407 - RNA, 16 nt, Human herpesvirus 6
auguaugcaucaucaa

SEQ ID NO: 328408 - RNA, 22 nt, Human herpesvirus 6
auguccgcuguuggguaugcuc

SEQ ID NO: 328409 - RNA, 14 nt, Human herpesvirus 6
augucgauguggau

SEQ ID NO: 328410 - RNA, 17 nt, Human herpesvirus 6
augucggaaucuacuga

SEQ ID NO: 328411 - RNA, 20 nt, Human herpesvirus 6
augucggaaucuacugagau

SEQ ID NO: 328412 - RNA, 21 nt, Human herpesvirus 6
augucuagaugcaaaucucac

SEQ ID NO: 328413 - RNA, 21 nt, Human herpesvirus 6
augucuucuugggacuaggaa

SEQ ID NO: 328414 - RNA, 22 nt, Human herpesvirus 6
augugcgcguguuagaauguau

SEQ ID NO: 328415 - RNA, 22 nt, Human herpesvirus 6
auguggacguucugucugcagc

SEQ ID NO: 328416 - RNA, 11 nt, Human herpesvirus 6
auguguucaca

SEQ ID NO: 328417 - RNA, 14 nt, Human herpesvirus 6
auguucaauuacuc

SEQ ID NO: 328418 - RNA, 15 nt, Human herpesvirus 6
auguucaauuacuca

SEQ ID NO: 328419 - RNA, 13 nt, Human herpesvirus 6
auguucacuccuc

SEQ ID NO: 328420 - RNA, 19 nt, Human herpesvirus 6
auguugcaauaaaaaaugg

SEQ ID NO: 328421 - RNA, 15 nt, Human herpesvirus 6
auguuuucuccucaa

SEQ ID NO: 328422 - RNA, 17 nt, Human herpesvirus 6
auuaaacuaacauagcg

SEQ ID NO: 328423 - RNA, 17 nt, Human herpesvirus 6
auuaaaggacuacaucc

SEQ ID NO: 328424 - RNA, 18 nt, Human herpesvirus 6
auuaaaguuuacugugau

SEQ ID NO: 328425 - RNA, 19 nt, Human herpesvirus 6
auuaacacauuuuaacgca

SEQ ID NO: 328426 - RNA, 13 nt, Human herpesvirus 6
auuaacgcagcaa

SEQ ID NO: 328427 - RNA, 11 nt, Human herpesvirus 6
auuaacuguaa

SEQ ID NO: 328428 - RNA, 13 nt, Human herpesvirus 6
auuaacuguaaaa

SEQ ID NO: 328429 - RNA, 16 nt, Human herpesvirus 6
auuaaguagugcuuca

SEQ ID NO: 328430 - RNA, 22 nt, Human herpesvirus 6
auuaauuacauauagucaaugu

SEQ ID NO: 328431 - RNA, 20 nt, Human herpesvirus 6
auuaauuaccuauagucaau

SEQ ID NO: 328432 - RNA, 22 nt, Human herpesvirus 6
auuaauuaccuauagucaaugu

SEQ ID NO: 328433 - RNA, 20 nt, Human herpesvirus 6
auuaauuuauuaaguagugc

SEQ ID NO: 328434 - RNA, 14 nt, Human herpesvirus 6
auuacacaccuuaa

SEQ ID NO: 328435 - RNA, 18 nt, Human herpesvirus 6
auuacauauagucaaugu

SEQ ID NO: 328436 - RNA, 23 nt, Human herpesvirus 6
auuaccacacgcuuacacacagg

SEQ ID NO: 328437 - RNA, 17 nt, Human herpesvirus 6
auuaccuauagucaaug

SEQ ID NO: 328438 - RNA, 23 nt, Human herpesvirus 6
auuacgcuguccgccuguuccac

SEQ ID NO: 328439 - RNA, 20 nt, Human herpesvirus 6
auuacgucuuuuugugcuuu

SEQ ID NO: 328440 - RNA, 15 nt, Human herpesvirus 6
auuacuaguaauaac

SEQ ID NO: 328441 - RNA, 19 nt, Human herpesvirus 6
auuacuaguaauaacauua

SEQ ID NO: 328442 - RNA, 15 nt, Human herpesvirus 6
auuacuucguuuauu

SEQ ID NO: 328443 - RNA, 22 nt, Human herpesvirus 6
auuagaaaaucuuccacugaag

SEQ ID NO: 328444 - RNA, 19 nt, Human herpesvirus 6
auuagaaauuacauaagca

SEQ ID NO: 328445 - RNA, 20 nt, Human herpesvirus 6
auuagaaauuacauaagcaa

SEQ ID NO: 328446 - RNA, 22 nt, Human herpesvirus 6
auuagagcuacgccaaaacuac

SEQ ID NO: 328447 - RNA, 23 nt, Human herpesvirus 6
auuagagcuacgccaaaacuaca

SEQ ID NO: 328448 - RNA, 13 nt, Human herpesvirus 6
auuagaugaauuu

SEQ ID NO: 328449 - RNA, 21 nt, Human herpesvirus 6
auuaguccauuaccacacgcu

SEQ ID NO: 328450 - RNA, 15 nt, Human herpesvirus 6
auuauaagacacuga

SEQ ID NO: 328451 - RNA, 15 nt, Human herpesvirus 6
auuaucauagacaaa

SEQ ID NO: 328452 - RNA, 22 nt, Human herpesvirus 6
auuauccuauugguuugcauaa

SEQ ID NO: 328453 - RNA, 22 nt, Human herpesvirus 6
auuaucgcccgguaaauuacua

SEQ ID NO: 328454 - RNA, 23 nt, Human herpesvirus 6
auuaugaguaugaaacuuacaag

SEQ ID NO: 328455 - RNA, 20 nt, Human herpesvirus 6
auuauguaauacaucaacaa

SEQ ID NO: 328456 - RNA, 21 nt, Human herpesvirus 6
auuaugugaauguuaagcaaa

SEQ ID NO: 328457 - RNA, 18 nt, Human herpesvirus 6
auuaugugucaaguuuca

SEQ ID NO: 328458 - RNA, 16 nt, Human herpesvirus 6
auuauucaacauuacu

SEQ ID NO: 328459 - RNA, 17 nt, Human herpesvirus 6
auuauucugucuugaua

SEQ ID NO: 328460 - RNA, 17 nt, Human herpesvirus 6
auucaaaaauguugcau

SEQ ID NO: 328461 - RNA, 16 nt, Human herpesvirus 6
auucaaaauaaauacu

SEQ ID NO: 328462 - RNA, 22 nt, Human herpesvirus 6
auucaaaauaaauacuagcuaa

SEQ ID NO: 328463 - RNA, 15 nt, Human herpesvirus 6
auucaacauuccaac

SEQ ID NO: 328464 - RNA, 18 nt, Human herpesvirus 6
auucacauuaccucugca

SEQ ID NO: 328465 - RNA, 12 nt, Human herpesvirus 6
auucacucugaa

SEQ ID NO: 328466 - RNA, 17 nt, Human herpesvirus 6
auucagaggugcugaug

SEQ ID NO: 328467 - RNA, 13 nt, Human herpesvirus 6
auucagagugaau

SEQ ID NO: 328468 - RNA, 20 nt, Human herpesvirus 6
auucauuguuuuugcaugug

SEQ ID NO: 328469 - RNA, 15 nt, Human herpesvirus 6
auuccaagacaugua

SEQ ID NO: 328470 - RNA, 19 nt, Human herpesvirus 6
auuccagggaacuugaugu

SEQ ID NO: 328471 - RNA, 14 nt, Human herpesvirus 6
auucccaugacgau

SEQ ID NO: 328472 - RNA, 20 nt, Human herpesvirus 6
auucccaugacgauucaaac

SEQ ID NO: 328473 - RNA, 18 nt, Human herpesvirus 6
auucccuucagacaucca

SEQ ID NO: 328474 - RNA, 17 nt, Human herpesvirus 6
auuccgacuguguuaca

SEQ ID NO: 328475 - RNA, 18 nt, Human herpesvirus 6
auuccgacuguguuacaa

SEQ ID NO: 328476 - RNA, 17 nt, Human herpesvirus 6
auuccuucaauguucuu

SEQ ID NO: 328477 - RNA, 22 nt, Human herpesvirus 6
auucgaugucggaaucuacuga

SEQ ID NO: 328478 - RNA, 18 nt, Human herpesvirus 6
auucggaguuuucaagau

SEQ ID NO: 328479 - RNA, 21 nt, Human herpesvirus 6
auucgguugcuuauaugcagc

SEQ ID NO: 328480 - RNA, 12 nt, Human herpesvirus 6
auucuaaauacg

SEQ ID NO: 328481 - RNA, 22 nt, Human herpesvirus 6
auucuaccguagaccguuucuu

SEQ ID NO: 328482 - RNA, 12 nt, Human herpesvirus 6
auucucagacag

SEQ ID NO: 328483 - RNA, 20 nt, Human herpesvirus 6
auucugcauuuauaucaaac

SEQ ID NO: 328484 - RNA, 19 nt, Human herpesvirus 6
auucugggaaggaacauac

SEQ ID NO: 328485 - RNA, 15 nt, Human herpesvirus 6
auucugucuugauaa

SEQ ID NO: 328486 - RNA, 15 nt, Human herpesvirus 6
auucuuaccaagaaa

SEQ ID NO: 328487 - RNA, 17 nt, Human herpesvirus 6
auucuucugugacuaua

SEQ ID NO: 328488 - RNA, 23 nt, Human herpesvirus 6
auugaaagaguguuuggauaaug

SEQ ID NO: 328489 - RNA, 23 nt, Human herpesvirus 6
auugacucugcauaguguagaaa

SEQ ID NO: 328490 - RNA, 11 nt, Human herpesvirus 6
auugagugugc

SEQ ID NO: 328491 - RNA, 19 nt, Human herpesvirus 6
auugagugugcaucagcau

SEQ ID NO: 328492 - RNA, 14 nt, Human herpesvirus 6
auugcagaucuaau

SEQ ID NO: 328493 - RNA, 19 nt, Human herpesvirus 6
auugcauccaaaguauugg

SEQ ID NO: 328494 - RNA, 14 nt, Human herpesvirus 6
auugcauucugggc

SEQ ID NO: 328495 - RNA, 9 nt, Human herpesvirus 6
auugccaaa

SEQ ID NO: 328496 - RNA, 22 nt, Human herpesvirus 6
auugccaaggaaagacaugcau

SEQ ID NO: 328497 - RNA, 18 nt, Human herpesvirus 6
auugccuucgcagauuaa

SEQ ID NO: 328498 - RNA, 17 nt, Human herpesvirus 6
auugccuuguaaaucaa

SEQ ID NO: 328499 - RNA, 19 nt, Human herpesvirus 6
auugcgauucuaauaaaag

SEQ ID NO: 328500 - RNA, 18 nt, Human herpesvirus 6
auugcguuuugucuacua

SEQ ID NO: 328501 - RNA, 21 nt, Human herpesvirus 6
auugcuuucucuuuuuaauuc

SEQ ID NO: 328502 - RNA, 23 nt, Human herpesvirus 6
auugcuuucucuuuuuaauucca

SEQ ID NO: 328503 - RNA, 23 nt, Human herpesvirus 6
auuggucucuuugcgucuucuau

SEQ ID NO: 328504 - RNA, 13 nt, Human herpesvirus 6
auuggucuuugcc

SEQ ID NO: 328505 - RNA, 20 nt, Human herpesvirus 6
auugguuaaaaggaauagca

SEQ ID NO: 328506 - RNA, 15 nt, Human herpesvirus 6
auuguaaauagguaa

SEQ ID NO: 328507 - RNA, 18 nt, Human herpesvirus 6
auuguaccuagcagcaaa

SEQ ID NO: 328508 - RNA, 16 nt, Human herpesvirus 6
auuguaucgagucuuu

SEQ ID NO: 328509 - RNA, 20 nt, Human herpesvirus 6
auugucaaauagccaaaaaa

SEQ ID NO: 328510 - RNA, 18 nt, Human herpesvirus 6
auugucugcaguggucau

SEQ ID NO: 328511 - RNA, 21 nt, Human herpesvirus 6
auugucugcaguggucaugau

SEQ ID NO: 328512 - RNA, 13 nt, Human herpesvirus 6
auugugacaagga

SEQ ID NO: 328513 - RNA, 16 nt, Human herpesvirus 6
auugugauucugcauu

SEQ ID NO: 328514 - RNA, 17 nt, Human herpesvirus 6
auuguuaauauuagcca

SEQ ID NO: 328515 - RNA, 16 nt, Human herpesvirus 6
auuguugucgugauca

SEQ ID NO: 328516 - RNA, 15 nt, Human herpesvirus 6
auuuaaaugaagaua

SEQ ID NO: 328517 - RNA, 20 nt, Human herpesvirus 6
auuuaauaaagaacauguga

SEQ ID NO: 328518 - RNA, 20 nt, Human herpesvirus 6
auuuaauaagagccaauacc

SEQ ID NO: 328519 - RNA, 16 nt, Human herpesvirus 6
auuuaauccacugcau

SEQ ID NO: 328520 - RNA, 14 nt, Human herpesvirus 6
auuuacuguuucuu

SEQ ID NO: 328521 - RNA, 16 nt, Human herpesvirus 6
auuuauagaauuaaga

SEQ ID NO: 328522 - RNA, 19 nt, Human herpesvirus 6
auuucaagagaacaugauu

SEQ ID NO: 328523 - RNA, 17 nt, Human herpesvirus 6
auuucaaugcguuucuu

SEQ ID NO: 328524 - RNA, 22 nt, Human herpesvirus 6
auuuccauaaguuaauuccagc

SEQ ID NO: 328525 - RNA, 15 nt, Human herpesvirus 6
auuuccaugcauauc

SEQ ID NO: 328526 - RNA, 23 nt, Human herpesvirus 6
auuuccaugcauaucguggaaug

SEQ ID NO: 328527 - RNA, 16 nt, Human herpesvirus 6
auuucccuuguaauca

SEQ ID NO: 328528 - RNA, 20 nt, Human herpesvirus 6
auuuccggagauuaaaacau

SEQ ID NO: 328529 - RNA, 15 nt, Human herpesvirus 6
auuuccugaucacag

SEQ ID NO: 328530 - RNA, 20 nt, Human herpesvirus 6
auuucguuugggauguccau

SEQ ID NO: 328531 - RNA, 14 nt, Human herpesvirus 6
auuucucguuuacu

SEQ ID NO: 328532 - RNA, 15 nt, Human herpesvirus 6
auuucuuacacaaau

SEQ ID NO: 328533 - RNA, 18 nt, Human herpesvirus 6
auuucuugguuguguaua

SEQ ID NO: 328534 - RNA, 19 nt, Human herpesvirus 6
auuucuuguugaguuucag

SEQ ID NO: 328535 - RNA, 21 nt, Human herpesvirus 6
auuucuuguugaguuucagca

SEQ ID NO: 328536 - RNA, 17 nt, Human herpesvirus 6
auuucuuuugagggaau

SEQ ID NO: 328537 - RNA, 14 nt, Human herpesvirus 6
auuugagaaaguug

SEQ ID NO: 328538 - RNA, 16 nt, Human herpesvirus 6
auuugcuugucgggcu

SEQ ID NO: 328539 - RNA, 22 nt, Human herpesvirus 6
auuuggcauuaaaggacuacau

SEQ ID NO: 328540 - RNA, 14 nt, Human herpesvirus 6
auuugggcuuuauu

SEQ ID NO: 328541 - RNA, 17 nt, Human herpesvirus 6
auuuguucgauugccaa

SEQ ID NO: 328542 - RNA, 21 nt, Human herpesvirus 6
auuuguucgauugccaaaggc

SEQ ID NO: 328543 - RNA, 24 nt, Human herpesvirus 6
auuuguuuuauuucuuacuaggaa

SEQ ID NO: 328544 - RNA, 20 nt, Human herpesvirus 6
auuuuaacuauccauuuuau

SEQ ID NO: 328545 - RNA, 15 nt, Human herpesvirus 6
auuuuacaaagaccu

SEQ ID NO: 328546 - RNA, 12 nt, Human herpesvirus 6
auuuuagauaua

SEQ ID NO: 328547 - RNA, 19 nt, Human herpesvirus 6
auuuuauccauccaaucca

SEQ ID NO: 328548 - RNA, 17 nt, Human herpesvirus 6
auuuuauuaacuguaaa

SEQ ID NO: 328549 - RNA, 16 nt, Human herpesvirus 6
auuuucauuuugauau

SEQ ID NO: 328550 - RNA, 20 nt, Human herpesvirus 6
auuuugaaaaaacaguuuac

SEQ ID NO: 328551 - RNA, 22 nt, Human herpesvirus 6
auuuugaaaugucgaaucucaa

SEQ ID NO: 328552 - RNA, 19 nt, Human herpesvirus 6
auuuuggguugaguaugcu

SEQ ID NO: 328553 - RNA, 17 nt, Human herpesvirus 6
auuuugguuucccucag

SEQ ID NO: 328554 - RNA, 16 nt, Human herpesvirus 6
auuuuguuuucuacgu

SEQ ID NO: 328555 - RNA, 17 nt, Human herpesvirus 6
auuuuguuuucuacgua

SEQ ID NO: 328556 - RNA, 13 nt, Human herpesvirus 6
auuuuuaauuuga

SEQ ID NO: 328557 - RNA, 19 nt, Human herpesvirus 6
auuuuuauguugugaucaa

SEQ ID NO: 328558 - RNA, 16 nt, Human herpesvirus 6
auuuuuauucugcuau

SEQ ID NO: 328559 - RNA, 14 nt, Human herpesvirus 6
auuuuuguugugau

SEQ ID NO: 328560 - RNA, 18 nt, Human herpesvirus 6
auuuuuuuaauuggugcg

SEQ ID NO: 328561 - RNA, 13 nt, Human herpesvirus 6
caaaaacagauua

SEQ ID NO: 328562 - RNA, 18 nt, Human herpesvirus 6
caaaaaccgccaagagau

SEQ ID NO: 328563 - RNA, 21 nt, Human herpesvirus 6
caaaaacgagaaccugcaggg

SEQ ID NO: 328564 - RNA, 18 nt, Human herpesvirus 6
caaaaagcuuuaaagcag

SEQ ID NO: 328565 - RNA, 11 nt, Human herpesvirus 6
caaaacaaagg

SEQ ID NO: 328566 - RNA, 20 nt, Human herpesvirus 6
caaaacagacuuuacuucua

SEQ ID NO: 328567 - RNA, 21 nt, Human herpesvirus 6
caaaaccuaaauacauucaca

SEQ ID NO: 328568 - RNA, 14 nt, Human herpesvirus 6
caaaacuacaaagu

SEQ ID NO: 328569 - RNA, 19 nt, Human herpesvirus 6
caaaacuguccucuuugaa

SEQ ID NO: 328570 - RNA, 16 nt, Human herpesvirus 6
caaaagacacaaucuu

SEQ ID NO: 328571 - RNA, 14 nt, Human herpesvirus 6
caaaagaguuacua

SEQ ID NO: 328572 - RNA, 21 nt, Human herpesvirus 6
caaaauugggaaucaugugua

SEQ ID NO: 328573 - RNA, 15 nt, Human herpesvirus 6
caaacaccucacaau

SEQ ID NO: 328574 - RNA, 21 nt, Human herpesvirus 6
caaacagcuuuauucccauga

SEQ ID NO: 328575 - RNA, 17 nt, Human herpesvirus 6
caaacccgacaauguaa

SEQ ID NO: 328576 - RNA, 18 nt, Human herpesvirus 6
caaacccgacaauguaaa

SEQ ID NO: 328577 - RNA, 17 nt, Human herpesvirus 6
caaacugacuguaccau

SEQ ID NO: 328578 - RNA, 15 nt, Human herpesvirus 6
caaagaaacaguaaa

SEQ ID NO: 328579 - RNA, 22 nt, Human herpesvirus 6
caaagacaucgauuugcuggua

SEQ ID NO: 328580 - RNA, 16 nt, Human herpesvirus 6
caaagacgauugcuuu

SEQ ID NO: 328581 - RNA, 19 nt, Human herpesvirus 6
caaagauguacucauccaa

SEQ ID NO: 328582 - RNA, 22 nt, Human herpesvirus 6
caaagauguacucauccaagac

SEQ ID NO: 328583 - RNA, 21 nt, Human herpesvirus 6
caaagcacccuacacaaacua

SEQ ID NO: 328584 - RNA, 14 nt, Human herpesvirus 6
caaagcauacucaa

SEQ ID NO: 328585 - RNA, 15 nt, Human herpesvirus 6
caaagcuuuauguac

SEQ ID NO: 328586 - RNA, 20 nt, Human herpesvirus 6
caaaggaaaccaccggcuaa

SEQ ID NO: 328587 - RNA, 16 nt, Human herpesvirus 6
caaaucggacaaugca

SEQ ID NO: 328588 - RNA, 22 nt, Human herpesvirus 6
caaaucucacugucgaaauuca

SEQ ID NO: 328589 - RNA, 16 nt, Human herpesvirus 6
caaaucuccaaaagcg

SEQ ID NO: 328590 - RNA, 17 nt, Human herpesvirus 6
caaaucuccaaaagcgc

SEQ ID NO: 328591 - RNA, 13 nt, Human herpesvirus 6
caaauguaacuuu

SEQ ID NO: 328592 - RNA, 20 nt, Human herpesvirus 6
caaauuaugguuaucaucac

SEQ ID NO: 328593 - RNA, 21 nt, Human herpesvirus 6
caaauuaugguuaucaucaca

SEQ ID NO: 328594 - RNA, 12 nt, Human herpesvirus 6
caacaaaaagcu

SEQ ID NO: 328595 - RNA, 16 nt, Human herpesvirus 6
caacaaaaagcuuuaa

SEQ ID NO: 328596 - RNA, 16 nt, Human herpesvirus 6
caacaaacacgugauu

SEQ ID NO: 328597 - RNA, 13 nt, Human herpesvirus 6
caacaacaauaac

SEQ ID NO: 328598 - RNA, 14 nt, Human herpesvirus 6
caacaacaauaaca

SEQ ID NO: 328599 - RNA, 12 nt, Human herpesvirus 6
caacaaccacag

SEQ ID NO: 328600 - RNA, 14 nt, Human herpesvirus 6
caacacacagugaa

SEQ ID NO: 328601 - RNA, 15 nt, Human herpesvirus 6
caacacagcacauaa

SEQ ID NO: 328602 - RNA, 16 nt, Human herpesvirus 6
caacacagcaugcauu

SEQ ID NO: 328603 - RNA, 13 nt, Human herpesvirus 6
caacacccaugga

SEQ ID NO: 328604 - RNA, 15 nt, Human herpesvirus 6
caacacgccagacau

SEQ ID NO: 328605 - RNA, 22 nt, Human herpesvirus 6
caacagaaaaaaaucagaaucc

SEQ ID NO: 328606 - RNA, 14 nt, Human herpesvirus 6
caacauaucacuug

SEQ ID NO: 328607 - RNA, 18 nt, Human herpesvirus 6
caacaucuuaaaagacca

SEQ ID NO: 328608 - RNA, 19 nt, Human herpesvirus 6
caacauuaaaaaaaauagc

SEQ ID NO: 328609 - RNA, 12 nt, Human herpesvirus 6
caacauuccaac

SEQ ID NO: 328610 - RNA, 16 nt, Human herpesvirus 6
caaccaaguguuuuau

SEQ ID NO: 328611 - RNA, 21 nt, Human herpesvirus 6
caaccauccagauaaccucac

SEQ ID NO: 328612 - RNA, 22 nt, Human herpesvirus 6
caaccccgcacgcauaccuaca

SEQ ID NO: 328613 - RNA, 16 nt, Human herpesvirus 6
caacgacuaccacauc

SEQ ID NO: 328614 - RNA, 19 nt, Human herpesvirus 6
caacgcaucacacauacaa

SEQ ID NO: 328615 - RNA, 18 nt, Human herpesvirus 6
caacuaaauauguugaau

SEQ ID NO: 328616 - RNA, 18 nt, Human herpesvirus 6
caacugauuaagauuuuc

SEQ ID NO: 328617 - RNA, 16 nt, Human herpesvirus 6
caacugguuuugagaa

SEQ ID NO: 328618 - RNA, 20 nt, Human herpesvirus 6
caagaaaucauuuugaaaug

SEQ ID NO: 328619 - RNA, 21 nt, Human herpesvirus 6
caagacagaccgucaaaucuc

SEQ ID NO: 328620 - RNA, 17 nt, Human herpesvirus 6
caagacauguacaucaa

SEQ ID NO: 328621 - RNA, 20 nt, Human herpesvirus 6
caagccauggaaaacaaaga

SEQ ID NO: 328622 - RNA, 16 nt, Human herpesvirus 6
caaggccgacucuaua

SEQ ID NO: 328623 - RNA, 16 nt, Human herpesvirus 6
caaguagccaaugauu

SEQ ID NO: 328624 - RNA, 20 nt, Human herpesvirus 6
caaguagccaaugauucuua

SEQ ID NO: 328625 - RNA, 14 nt, Human herpesvirus 6
caaguuucaauaua

SEQ ID NO: 328626 - RNA, 13 nt, Human herpesvirus 6
caauaacaacaac

SEQ ID NO: 328627 - RNA, 17 nt, Human herpesvirus 6
caauaacaacaacaaua

SEQ ID NO: 328628 - RNA, 13 nt, Human herpesvirus 6
caauacacagaaa

SEQ ID NO: 328629 - RNA, 21 nt, Human herpesvirus 6
caauacgguuugucucgcaaa

SEQ ID NO: 328630 - RNA, 19 nt, Human herpesvirus 6
caauagacgaaagacguuu

SEQ ID NO: 328631 - RNA, 14 nt, Human herpesvirus 6
caauaggcaccuau

SEQ ID NO: 328632 - RNA, 16 nt, Human herpesvirus 6
caauaggcaccuaucu

SEQ ID NO: 328633 - RNA, 22 nt, Human herpesvirus 6
caauaggcaccuaucuagauca

SEQ ID NO: 328634 - RNA, 22 nt, Human herpesvirus 6
caaucacauaguuucgaauucu

SEQ ID NO: 328635 - RNA, 16 nt, Human herpesvirus 6
caaucagccugcucag

SEQ ID NO: 328636 - RNA, 21 nt, Human herpesvirus 6
caaucauuagcauacagaugu

SEQ ID NO: 328637 - RNA, 16 nt, Human herpesvirus 6
caauccaauauaacuu

SEQ ID NO: 328638 - RNA, 15 nt, Human herpesvirus 6
caauccauguucaua

SEQ ID NO: 328639 - RNA, 20 nt, Human herpesvirus 6
caaucgcaaaaacauguugu

SEQ ID NO: 328640 - RNA, 19 nt, Human herpesvirus 6
caaucuaccgagagauuua

SEQ ID NO: 328641 - RNA, 12 nt, Human herpesvirus 6
caaucuguccag

SEQ ID NO: 328642 - RNA, 16 nt, Human herpesvirus 6
caaucuguguuuccaa

SEQ ID NO: 328643 - RNA, 23 nt, Human herpesvirus 6
caaugaaaaaaaaugaaggggaa

SEQ ID NO: 328644 - RNA, 18 nt, Human herpesvirus 6
caaugacaccgauucaga

SEQ ID NO: 328645 - RNA, 23 nt, Human herpesvirus 6
caaugagguauaucucggacuca

SEQ ID NO: 328646 - RNA, 19 nt, Human herpesvirus 6
caauguucaauuacucaac

SEQ ID NO: 328647 - RNA, 16 nt, Human herpesvirus 6
caauguuuuugacaaa

SEQ ID NO: 328648 - RNA, 19 nt, Human herpesvirus 6
caauuaucacaguugauaa

SEQ ID NO: 328649 - RNA, 20 nt, Human herpesvirus 6
caauuaugugucaaguuuca

SEQ ID NO: 328650 - RNA, 23 nt, Human herpesvirus 6
caauuccacgugcuugucucaca

SEQ ID NO: 328651 - RNA, 21 nt, Human herpesvirus 6
caauuccuuaauucuaaauac

SEQ ID NO: 328652 - RNA, 17 nt, Human herpesvirus 6
caauuuaauauaucuug

SEQ ID NO: 328653 - RNA, 19 nt, Human herpesvirus 6
cacaaaaaauugacaauga

SEQ ID NO: 328654 - RNA, 23 nt, Human herpesvirus 6
cacaaaacaguugauuauuuagu

SEQ ID NO: 328655 - RNA, 23 nt, Human herpesvirus 6
cacaaaaccaggaauccuauuca

SEQ ID NO: 328656 - RNA, 22 nt, Human herpesvirus 6
cacaaaccaaaaugacucuaaa

SEQ ID NO: 328657 - RNA, 22 nt, Human herpesvirus 6
cacaaaccaucaauuuuaucca

SEQ ID NO: 328658 - RNA, 23 nt, Human herpesvirus 6
cacaaacccaaguucaucagcau

SEQ ID NO: 328659 - RNA, 20 nt, Human herpesvirus 6
cacaaaguuuaaguuuucac

SEQ ID NO: 328660 - RNA, 17 nt, Human herpesvirus 6
cacacaaccauccagau

SEQ ID NO: 328661 - RNA, 14 nt, Human herpesvirus 6
cacacacagggugc

SEQ ID NO: 328662 - RNA, 13 nt, Human herpesvirus 6
cacacagugaaac

SEQ ID NO: 328663 - RNA, 11 nt, Human herpesvirus 6
cacacauguau

SEQ ID NO: 328664 - RNA, 12 nt, Human herpesvirus 6
cacacauguauu

SEQ ID NO: 328665 - RNA, 17 nt, Human herpesvirus 6
cacaccuuaaacaugua

SEQ ID NO: 328666 - RNA, 20 nt, Human herpesvirus 6
cacacggguaccggccugac

SEQ ID NO: 328667 - RNA, 16 nt, Human herpesvirus 6
cacagcagcagcauua

SEQ ID NO: 328668 - RNA, 16 nt, Human herpesvirus 6
cacagcaugcauuugg

SEQ ID NO: 328669 - RNA, 18 nt, Human herpesvirus 6
cacagccuguucuugcua

SEQ ID NO: 328670 - RNA, 15 nt, Human herpesvirus 6
cacagcuaaacacca

SEQ ID NO: 328671 - RNA, 18 nt, Human herpesvirus 6
cacaggauuauaaaaaca

SEQ ID NO: 328672 - RNA, 14 nt, Human herpesvirus 6
cacagugugaucau

SEQ ID NO: 328673 - RNA, 16 nt, Human herpesvirus 6
cacagugugaucauca

SEQ ID NO: 328674 - RNA, 13 nt, Human herpesvirus 6
cacauguauuuau

SEQ ID NO: 328675 - RNA, 18 nt, Human herpesvirus 6
cacauuauaagacacuga

SEQ ID NO: 328676 - RNA, 17 nt, Human herpesvirus 6
caccaacacaccugccu

SEQ ID NO: 328677 - RNA, 22 nt, Human herpesvirus 6
caccaccaacacaccugccuag

SEQ ID NO: 328678 - RNA, 19 nt, Human herpesvirus 6
caccaccaucuaauaggua

SEQ ID NO: 328679 - RNA, 20 nt, Human herpesvirus 6
caccacucuguuuuuuugca

SEQ ID NO: 328680 - RNA, 23 nt, Human herpesvirus 6
caccacucuguuuuuuugcaauu

SEQ ID NO: 328681 - RNA, 20 nt, Human herpesvirus 6
caccacugugauaugcaaac

SEQ ID NO: 328682 - RNA, 14 nt, Human herpesvirus 6
caccagcauaacug

SEQ ID NO: 328683 - RNA, 13 nt, Human herpesvirus 6
cacccuacaaucu

SEQ ID NO: 328684 - RNA, 18 nt, Human herpesvirus 6
caccgcauauaucauauu

SEQ ID NO: 328685 - RNA, 18 nt, Human herpesvirus 6
caccgucuucaaccuguu

SEQ ID NO: 328686 - RNA, 12 nt, Human herpesvirus 6
caccuaauuaca

SEQ ID NO: 328687 - RNA, 18 nt, Human herpesvirus 6
caccucugaaacacugug

SEQ ID NO: 328688 - RNA, 22 nt, Human herpesvirus 6
caccuuagucgcacacacaaga

SEQ ID NO: 328689 - RNA, 19 nt, Human herpesvirus 6
cacgacauccguuaguaaa

SEQ ID NO: 328690 - RNA, 13 nt, Human herpesvirus 6
cacgcauuugcaa

SEQ ID NO: 328691 - RNA, 18 nt, Human herpesvirus 6
cacgcuaaaaacagacga

SEQ ID NO: 328692 - RNA, 19 nt, Human herpesvirus 6
cacggggauuuaguacagu

SEQ ID NO: 328693 - RNA, 20 nt, Human herpesvirus 6
cacgguccacacgccagucc

SEQ ID NO: 328694 - RNA, 15 nt, Human herpesvirus 6
cacggugccaaagga

SEQ ID NO: 328695 - RNA, 23 nt, Human herpesvirus 6
cacggugccaaaggaaaccaccg

SEQ ID NO: 328696 - RNA, 18 nt, Human herpesvirus 6
cacgucaacgugucuaua

SEQ ID NO: 328697 - RNA, 14 nt, Human herpesvirus 6
cacgucuccuuuau

SEQ ID NO: 328698 - RNA, 19 nt, Human herpesvirus 6
cacgucuccuuuauugcca

SEQ ID NO: 328699 - RNA, 13 nt, Human herpesvirus 6
cacguuagcuuua

SEQ ID NO: 328700 - RNA, 12 nt, Human herpesvirus 6
cacuaaauuacc

SEQ ID NO: 328701 - RNA, 20 nt, Human herpesvirus 6
cacuauuauauuguauauuu

SEQ ID NO: 328702 - RNA, 11 nt, Human herpesvirus 6
cacucauacac

SEQ ID NO: 328703 - RNA, 18 nt, Human herpesvirus 6
cacucuguuuuuuugcaa

SEQ ID NO: 328704 - RNA, 19 nt, Human herpesvirus 6
cacugaaucggaaacugag

SEQ ID NO: 328705 - RNA, 15 nt, Human herpesvirus 6
cacuuaagccagcuu

SEQ ID NO: 328706 - RNA, 21 nt, Human herpesvirus 6
cacuuccgcgauacccagcgg

SEQ ID NO: 328707 - RNA, 14 nt, Human herpesvirus 6
cacuugcaauguga

SEQ ID NO: 328708 - RNA, 15 nt, Human herpesvirus 6
cagaaaacacuaucu

SEQ ID NO: 328709 - RNA, 18 nt, Human herpesvirus 6
cagaaaaguauagucuag

SEQ ID NO: 328710 - RNA, 20 nt, Human herpesvirus 6
cagaaaaguauagucuagca

SEQ ID NO: 328711 - RNA, 14 nt, Human herpesvirus 6
cagaaaauguuuca

SEQ ID NO: 328712 - RNA, 21 nt, Human herpesvirus 6
cagaaaauguuucauccaaau

SEQ ID NO: 328713 - RNA, 15 nt, Human herpesvirus 6
cagaaaguucuaugu

SEQ ID NO: 328714 - RNA, 16 nt, Human herpesvirus 6
cagaaauaaaauuucg

SEQ ID NO: 328715 - RNA, 13 nt, Human herpesvirus 6
cagaaaucaaaga

SEQ ID NO: 328716 - RNA, 13 nt, Human herpesvirus 6
cagaaguuuacau

SEQ ID NO: 328717 - RNA, 21 nt, Human herpesvirus 6
cagaauaaaaauuuuagccga

SEQ ID NO: 328718 - RNA, 14 nt, Human herpesvirus 6
cagaauacgaacag

SEQ ID NO: 328719 - RNA, 14 nt, Human herpesvirus 6
cagaauccaccaau

SEQ ID NO: 328720 - RNA, 14 nt, Human herpesvirus 6
cagaaugaauguaa

SEQ ID NO: 328721 - RNA, 16 nt, Human herpesvirus 6
cagaaugcuauucguu

SEQ ID NO: 328722 - RNA, 20 nt, Human herpesvirus 6
cagacauccagaaaagcaaa

SEQ ID NO: 328723 - RNA, 17 nt, Human herpesvirus 6
cagagaaaaaacaaagc

SEQ ID NO: 328724 - RNA, 22 nt, Human herpesvirus 6
cagagaaaauuuuuuacaucac

SEQ ID NO: 328725 - RNA, 12 nt, Human herpesvirus 6
cagagacaccag

SEQ ID NO: 328726 - RNA, 21 nt, Human herpesvirus 6
cagagacgguguuuucaucag

SEQ ID NO: 328727 - RNA, 22 nt, Human herpesvirus 6
cagagaucguaccggucugcaa

SEQ ID NO: 328728 - RNA, 14 nt, Human herpesvirus 6
cagaggcguggaaa

SEQ ID NO: 328729 - RNA, 15 nt, Human herpesvirus 6
cagaggugcugauga

SEQ ID NO: 328730 - RNA, 16 nt, Human herpesvirus 6
cagaggugcugaugau

SEQ ID NO: 328731 - RNA, 19 nt, Human herpesvirus 6
cagauaaccucacuacuga

SEQ ID NO: 328732 - RNA, 19 nt, Human herpesvirus 6
cagauaccucauuguuuca

SEQ ID NO: 328733 - RNA, 15 nt, Human herpesvirus 6
cagaucuaauucaca

SEQ ID NO: 328734 - RNA, 23 nt, Human herpesvirus 6
cagauggugcgaucgagcaacag

SEQ ID NO: 328735 - RNA, 14 nt, Human herpesvirus 6
cagauguguacaac

SEQ ID NO: 328736 - RNA, 17 nt, Human herpesvirus 6
cagauguguacaaccga

SEQ ID NO: 328737 - RNA, 20 nt, Human herpesvirus 6
cagauugcggacauggugaa

SEQ ID NO: 328738 - RNA, 22 nt, Human herpesvirus 6
cagauuuccgccugcagugaua

SEQ ID NO: 328739 - RNA, 23 nt, Human herpesvirus 6
cagcauaacuggaaucaugaccg

SEQ ID NO: 328740 - RNA, 15 nt, Human herpesvirus 6
cagccuguucuugcu

SEQ ID NO: 328741 - RNA, 17 nt, Human herpesvirus 6
cagccuugcgguaaaug

SEQ ID NO: 328742 - RNA, 20 nt, Human herpesvirus 6
cagccuugcgguaaauggca

SEQ ID NO: 328743 - RNA, 17 nt, Human herpesvirus 6
cagcgauacaauaacaa

SEQ ID NO: 328744 - RNA, 19 nt, Human herpesvirus 6
cagcggaagugaaagcagu

SEQ ID NO: 328745 - RNA, 16 nt, Human herpesvirus 6
cagcuaagaguaacaa

SEQ ID NO: 328746 - RNA, 21 nt, Human herpesvirus 6
cagcugucuagauucuaauga

SEQ ID NO: 328747 - RNA, 20 nt, Human herpesvirus 6
cagcuuccguaucacacuua

SEQ ID NO: 328748 - RNA, 18 nt, Human herpesvirus 6
cagcuugcgauacauguu

SEQ ID NO: 328749 - RNA, 18 nt, Human herpesvirus 6
caggaaguuaauuguguu

SEQ ID NO: 328750 - RNA, 23 nt, Human herpesvirus 6
caggacaaucgucggaucaacag

SEQ ID NO: 328751 - RNA, 11 nt, Human herpesvirus 6
caggaggcuau

SEQ ID NO: 328752 - RNA, 21 nt, Human herpesvirus 6
caggccgguacccguguguga

SEQ ID NO: 328753 - RNA, 23 nt, Human herpesvirus 6
cagggaacuugauguugaucuga

SEQ ID NO: 328754 - RNA, 15 nt, Human herpesvirus 6
cagggugagucacau

SEQ ID NO: 328755 - RNA, 18 nt, Human herpesvirus 6
cagguugccaauaaaaug

SEQ ID NO: 328756 - RNA, 14 nt, Human herpesvirus 6
caguaaaucuucau

SEQ ID NO: 328757 - RNA, 17 nt, Human herpesvirus 6
caguaauuuguguaauu

SEQ ID NO: 328758 - RNA, 16 nt, Human herpesvirus 6
caguaauuuuagggau

SEQ ID NO: 328759 - RNA, 19 nt, Human herpesvirus 6
caguagauuucaagauaua

SEQ ID NO: 328760 - RNA, 21 nt, Human herpesvirus 6
caguaugucuccaaacagaga

SEQ ID NO: 328761 - RNA, 20 nt, Human herpesvirus 6
caguauugaagaaaauugca

SEQ ID NO: 328762 - RNA, 17 nt, Human herpesvirus 6
cagucaacgcaauucca

SEQ ID NO: 328763 - RNA, 16 nt, Human herpesvirus 6
cagucacacacagggu

SEQ ID NO: 328764 - RNA, 14 nt, Human herpesvirus 6
cagucauacuccuu

SEQ ID NO: 328765 - RNA, 16 nt, Human herpesvirus 6
cagucugacauggaag

SEQ ID NO: 328766 - RNA, 13 nt, Human herpesvirus 6
cagucugcuaaaa

SEQ ID NO: 328767 - RNA, 22 nt, Human herpesvirus 6
cagucugcuggaugcugaugaa

SEQ ID NO: 328768 - RNA, 20 nt, Human herpesvirus 6
cagugaaggcugccaugaaa

SEQ ID NO: 328769 - RNA, 14 nt, Human herpesvirus 6
cagugauauggaaa

SEQ ID NO: 328770 - RNA, 20 nt, Human herpesvirus 6
cagugcuuuaaucacaauga

SEQ ID NO: 328771 - RNA, 16 nt, Human herpesvirus 6
caguuaggauuacacu

SEQ ID NO: 328772 - RNA, 21 nt, Human herpesvirus 6
caguuuuuaaccggaaaaaug

SEQ ID NO: 328773 - RNA, 14 nt, Human herpesvirus 6
cauaaaacaacaac

SEQ ID NO: 328774 - RNA, 13 nt, Human herpesvirus 6
cauaaacagacag

SEQ ID NO: 328775 - RNA, 14 nt, Human herpesvirus 6
cauaaaucaaagac

SEQ ID NO: 328776 - RNA, 22 nt, Human herpesvirus 6
cauaacgauagcagcucugcaa

SEQ ID NO: 328777 - RNA, 19 nt, Human herpesvirus 6
cauaacuggaaucaugacc

SEQ ID NO: 328778 - RNA, 15 nt, Human herpesvirus 6
cauaaguuaauucca

SEQ ID NO: 328779 - RNA, 22 nt, Human herpesvirus 6
cauaaguuaauuccagcuuucu

SEQ ID NO: 328780 - RNA, 23 nt, Human herpesvirus 6
cauaaguuaauuccagcuuucuu

SEQ ID NO: 328781 - RNA, 20 nt, Human herpesvirus 6
cauaauaauggcaugcauua

SEQ ID NO: 328782 - RNA, 15 nt, Human herpesvirus 6
cauaauaucuaucuu

SEQ ID NO: 328783 - RNA, 22 nt, Human herpesvirus 6
cauaauucggucaccuacauuc

SEQ ID NO: 328784 - RNA, 16 nt, Human herpesvirus 6
cauaauugcacccuau

SEQ ID NO: 328785 - RNA, 18 nt, Human herpesvirus 6
cauaauugcacccuauca

SEQ ID NO: 328786 - RNA, 15 nt, Human herpesvirus 6
cauacaguuguguac

SEQ ID NO: 328787 - RNA, 19 nt, Human herpesvirus 6
cauaccgaucccagcucac

SEQ ID NO: 328788 - RNA, 22 nt, Human herpesvirus 6
cauaccguuuacuuaaacggaa

SEQ ID NO: 328789 - RNA, 23 nt, Human herpesvirus 6
cauaccguuuacuuaaacggaau

SEQ ID NO: 328790 - RNA, 11 nt, Human herpesvirus 6
cauacuggugg

SEQ ID NO: 328791 - RNA, 19 nt, Human herpesvirus 6
cauagaaaaaugagacuua

SEQ ID NO: 328792 - RNA, 13 nt, Human herpesvirus 6
cauagacaaaccg

SEQ ID NO: 328793 - RNA, 14 nt, Human herpesvirus 6
cauagcagcaauag

SEQ ID NO: 328794 - RNA, 18 nt, Human herpesvirus 6
cauauaaaagcuaaauca

SEQ ID NO: 328795 - RNA, 22 nt, Human herpesvirus 6
cauauaauauuuccauaaguua

SEQ ID NO: 328796 - RNA, 12 nt, Human herpesvirus 6
cauauacauuug

SEQ ID NO: 328797 - RNA, 13 nt, Human herpesvirus 6
cauauagucaaug

SEQ ID NO: 328798 - RNA, 14 nt, Human herpesvirus 6
cauaucacuuguau

SEQ ID NO: 328799 - RNA, 17 nt, Human herpesvirus 6
cauaucgcccccauaca

SEQ ID NO: 328800 - RNA, 21 nt, Human herpesvirus 6
cauaugaggaugaaguuucac

SEQ ID NO: 328801 - RNA, 19 nt, Human herpesvirus 6
cauauggugcguguacaag

SEQ ID NO: 328802 - RNA, 11 nt, Human herpesvirus 6
cauaugucucg

SEQ ID NO: 328803 - RNA, 16 nt, Human herpesvirus 6
caucaacuacauuaac

SEQ ID NO: 328804 - RNA, 21 nt, Human herpesvirus 6
caucaacugacuuauaaguca

SEQ ID NO: 328805 - RNA, 22 nt, Human herpesvirus 6
caucaucgccuuuuacuuacau

SEQ ID NO: 328806 - RNA, 23 nt, Human herpesvirus 6
caucaugauuaucauagacaaac

SEQ ID NO: 328807 - RNA, 12 nt, Human herpesvirus 6
caucauuccagg

SEQ ID NO: 328808 - RNA, 21 nt, Human herpesvirus 6
caucauuccagggaacuugau

SEQ ID NO: 328809 - RNA, 22 nt, Human herpesvirus 6
caucauuccagggaacuugaug

SEQ ID NO: 328810 - RNA, 15 nt, Human herpesvirus 6
uuaaaguuauauucu

SEQ ID NO: 328811 - RNA, 19 nt, Human herpesvirus 6
uuaaaguuauauucuucug

SEQ ID NO: 328812 - RNA, 14 nt, Human herpesvirus 6
uuaacacagucuuc

SEQ ID NO: 328813 - RNA, 16 nt, Human herpesvirus 6
uuaacauaaaacaaca

SEQ ID NO: 328814 - RNA, 21 nt, Human herpesvirus 6
uuaaccggaaaaaugaaauuu

SEQ ID NO: 328815 - RNA, 21 nt, Human herpesvirus 6
uuaaccuuuucacuuggagcu

SEQ ID NO: 328816 - RNA, 20 nt, Human herpesvirus 6
gucguacacgcauuugcaau

SEQ ID NO: 328817 - RNA, 16 nt, Human herpesvirus 6
gucguucuuaacucau

SEQ ID NO: 328818 - RNA, 15 nt, Human herpesvirus 6
gucucacaagcuguc

SEQ ID NO: 328819 - RNA, 18 nt, Human herpesvirus 6
gucucacaagcuguccau

SEQ ID NO: 328820 - RNA, 15 nt, Human herpesvirus 6
gucuccuacauucuc

SEQ ID NO: 328821 - RNA, 16 nt, Human herpesvirus 6
gucuccuuuauugcca

SEQ ID NO: 328822 - RNA, 16 nt, Human herpesvirus 6
gucucgcaaacagcuu

SEQ ID NO: 328823 - RNA, 14 nt, Human herpesvirus 6
gucucgcacuuccg

SEQ ID NO: 328824 - RNA, 16 nt, Human herpesvirus 6
gucucgccuaccuuca

SEQ ID NO: 328825 - RNA, 20 nt, Human herpesvirus 6
gucugacauggaagacaaau

SEQ ID NO: 328826 - RNA, 21 nt, Human herpesvirus 6
gucugagaugacaucugcaaa

SEQ ID NO: 328827 - RNA, 22 nt, Human herpesvirus 6
gucugagaugacaucugcaaaa

SEQ ID NO: 328828 - RNA, 19 nt, Human herpesvirus 6
gucugucuauuaucuggcc

SEQ ID NO: 328829 - RNA, 15 nt, Human herpesvirus 6
gucuguuuauugcca

SEQ ID NO: 328830 - RNA, 12 nt, Human herpesvirus 6
gucuuacacucu

SEQ ID NO: 328831 - RNA, 20 nt, Human herpesvirus 6
gucuuccgaugagaguggau

SEQ ID NO: 328832 - RNA, 17 nt, Human herpesvirus 6
gucuuuuuucccuaaca

SEQ ID NO: 328833 - RNA, 19 nt, Human herpesvirus 6
gugaaaguauuuuacuuua

SEQ ID NO: 328834 - RNA, 21 nt, Human herpesvirus 6
gugaacgcaagucacgggcag

SEQ ID NO: 328835 - RNA, 14 nt, Human herpesvirus 6
gugaauugugcaag

SEQ ID NO: 328836 - RNA, 21 nt, Human herpesvirus 6
gugacccggccggagugccgu

SEQ ID NO: 328837 - RNA, 19 nt, Human herpesvirus 6
gugacgccuugauguuucc

SEQ ID NO: 328838 - RNA, 22 nt, Human herpesvirus 6
gugacggaggcgacgaaagagg

SEQ ID NO: 328839 - RNA, 14 nt, Human herpesvirus 6
gugagucacauaga

SEQ ID NO: 328840 - RNA, 15 nt, Human herpesvirus 6
gugauaugcaaacug

SEQ ID NO: 328841 - RNA, 14 nt, Human herpesvirus 6
gugaucacaaaaga

SEQ ID NO: 328842 - RNA, 19 nt, Human herpesvirus 6
gugaucuuuacaaaagaca

SEQ ID NO: 328843 - RNA, 12 nt, Human herpesvirus 6
uaccuacauccu

SEQ ID NO: 328844 - RNA, 18 nt, Human herpesvirus 6
uaccuauagucaauguug

SEQ ID NO: 328845 - RNA, 13 nt, Human herpesvirus 6
uaccuauuuacaa

SEQ ID NO: 328846 - RNA, 16 nt, Human herpesvirus 6
uaccucuaaacccaga

SEQ ID NO: 328847 - RNA, 16 nt, Human herpesvirus 6
uaccugaaagaaaaau

SEQ ID NO: 328848 - RNA, 21 nt, Human herpesvirus 6
uaccuguaaacuggucugcuu

SEQ ID NO: 328849 - RNA, 22 nt, Human herpesvirus 6
uaccuguuuuagaaacauuugc

SEQ ID NO: 328850 - RNA, 19 nt, Human herpesvirus 6
uaccuucaaagugauucca

SEQ ID NO: 328851 - RNA, 22 nt, Human herpesvirus 6
uaccuucaaagugauuccaguu

SEQ ID NO: 328852 - RNA, 19 nt, Human herpesvirus 6
uacgaaaauaaaaaaaaca

SEQ ID NO: 328853 - RNA, 21 nt, Human herpesvirus 6
uacgacaaauaaaagcauuuu

SEQ ID NO: 328854 - RNA, 17 nt, Human herpesvirus 6
uacgcaguugucuggca

SEQ ID NO: 328855 - RNA, 20 nt, Human herpesvirus 6
uacgccaaaacuacaaagug

SEQ ID NO: 328856 - RNA, 21 nt, Human herpesvirus 6
uacgccuugggacauguauau

SEQ ID NO: 328857 - RNA, 15 nt, Human herpesvirus 6
uacggcaacauaccc

SEQ ID NO: 328858 - RNA, 14 nt, Human herpesvirus 6
uacguagugaugau

SEQ ID NO: 328859 - RNA, 21 nt, Human herpesvirus 6
uacguauauuguguaccuugu

SEQ ID NO: 328860 - RNA, 20 nt, Human herpesvirus 6
uacguaugaaaguccucaaa

SEQ ID NO: 328861 - RNA, 20 nt, Human herpesvirus 6
uacguuucuguccaaugacu

SEQ ID NO: 328862 - RNA, 20 nt, Human herpesvirus 6
uacguuuuccaugugaaucg

SEQ ID NO: 328863 - RNA, 22 nt, Human herpesvirus 6
uacuauauaugcaagccaugac

SEQ ID NO: 328864 - RNA, 23 nt, Human herpesvirus 6
uacuaugacuuuucuaucacuca

SEQ ID NO: 328865 - RNA, 21 nt, Human herpesvirus 6
uacuauuuguuuaaugcauuc

SEQ ID NO: 328866 - RNA, 17 nt, Human herpesvirus 6
uacugaaaccaaagcau

SEQ ID NO: 328867 - RNA, 21 nt, Human herpesvirus 6
uacugaaguuaauaggugugg

SEQ ID NO: 328868 - RNA, 21 nt, Human herpesvirus 6
uacugagcaaagaaaugaccu

SEQ ID NO: 328869 - RNA, 23 nt, Human herpesvirus 6
uacugauggcagguaaccaaaaa

SEQ ID NO: 328870 - RNA, 23 nt, Human herpesvirus 6
uacuggaggccuucaugagccag

SEQ ID NO: 328871 - RNA, 13 nt, Human herpesvirus 6
uacuguccauuau

SEQ ID NO: 328872 - RNA, 22 nt, Human herpesvirus 6
uacuuacuugagugauggaguu

SEQ ID NO: 328873 - RNA, 23 nt, Human herpesvirus 6
uacuuauuuuuuuuucuguguau

SEQ ID NO: 328874 - RNA, 18 nt, Human herpesvirus 6
uacuucgugcugugauag

SEQ ID NO: 328875 - RNA, 17 nt, Human herpesvirus 6
uacuugauaaacuguau

SEQ ID NO: 328876 - RNA, 18 nt, Human herpesvirus 6
uagaaauuacaagguaca

SEQ ID NO: 328877 - RNA, 15 nt, Human herpesvirus 6
uagaaauucuaugua

SEQ ID NO: 328878 - RNA, 17 nt, Human herpesvirus 6
uagaaauucuauguacu

SEQ ID NO: 328879 - RNA, 21 nt, Human herpesvirus 6
uagaacaauuaucacaguuga

SEQ ID NO: 328880 - RNA, 15 nt, Human herpesvirus 6
uagaaccgaucugug

SEQ ID NO: 328881 - RNA, 22 nt, Human herpesvirus 6
uagaaggagcuuucauccauga

SEQ ID NO: 328882 - RNA, 21 nt, Human herpesvirus 6
uagaauaucugcuaagucuuu

SEQ ID NO: 328883 - RNA, 19 nt, Human herpesvirus 6
uagaauuucuaaccauuuu

SEQ ID NO: 328884 - RNA, 14 nt, Human herpesvirus 6
uagacaaaccagca

SEQ ID NO: 328885 - RNA, 14 nt, Human herpesvirus 6
uagacacacaaaaa

SEQ ID NO: 328886 - RNA, 22 nt, Human herpesvirus 6
uagacagucacacacagggugc

SEQ ID NO: 328887 - RNA, 21 nt, Human herpesvirus 6
uagacuuuccccauauugugu

SEQ ID NO: 328888 - RNA, 19 nt, Human herpesvirus 6
uagagacgcacccuacaau

SEQ ID NO: 328889 - RNA, 14 nt, Human herpesvirus 6
uagagacgugauac

SEQ ID NO: 328890 - RNA, 14 nt, Human herpesvirus 6
uagagcaacucauc

SEQ ID NO: 328891 - RNA, 15 nt, Human herpesvirus 6
uagagcaacucauca

SEQ ID NO: 328892 - RNA, 15 nt, Human herpesvirus 6
uagagcuacgccaaa

SEQ ID NO: 328893 - RNA, 17 nt, Human herpesvirus 6
uagaguguuaugaucua

SEQ ID NO: 328894 - RNA, 22 nt, Human herpesvirus 6
uagaucuccugcgcgucuauac

SEQ ID NO: 328895 - RNA, 20 nt, Human herpesvirus 6
uagaugcaaaucucacuguc

SEQ ID NO: 328896 - RNA, 23 nt, Human herpesvirus 6
uagauuaggggagagacauccau

SEQ ID NO: 328897 - RNA, 19 nt, Human herpesvirus 6
uagauuuauuagccgugau

SEQ ID NO: 328898 - RNA, 21 nt, Human herpesvirus 6
uagcaaccuaauggaccaagc

SEQ ID NO: 328899 - RNA, 15 nt, Human herpesvirus 6
uagcacaaaccaaaa

SEQ ID NO: 328900 - RNA, 22 nt, Human herpesvirus 6
uagcacaaaccaaaaugacucu

SEQ ID NO: 328901 - RNA, 15 nt, Human herpesvirus 6
uagcagaaguuuaca

SEQ ID NO: 328902 - RNA, 16 nt, Human herpesvirus 6
uagcagaaguuuacau

SEQ ID NO: 328903 - RNA, 22 nt, Human herpesvirus 6
uagcagcaauaggcaccuaucu

SEQ ID NO: 328904 - RNA, 21 nt, Human herpesvirus 6
uagcauuauuaaagaugggaa

SEQ ID NO: 328905 - RNA, 23 nt, Human herpesvirus 6
uagcauucuguucuucaucauca

SEQ ID NO: 328906 - RNA, 14 nt, Human herpesvirus 6
uagccaaugauucu

SEQ ID NO: 328907 - RNA, 23 nt, Human herpesvirus 6
uagccaaugauucuuaauucuua

SEQ ID NO: 328908 - RNA, 20 nt, Human herpesvirus 6
uagccuaggccuucaccugu

SEQ ID NO: 328909 - RNA, 21 nt, Human herpesvirus 6
uagcggcacguugaccgcaga

SEQ ID NO: 328910 - RNA, 19 nt, Human herpesvirus 6
uagcgguuggaugccugca

SEQ ID NO: 328911 - RNA, 22 nt, Human herpesvirus 6
uagcgguuggaugccugcauau

SEQ ID NO: 328912 - RNA, 22 nt, Human herpesvirus 6
uagcguacaagucgacaaauua

SEQ ID NO: 328913 - RNA, 20 nt, Human herpesvirus 6
uagcuauaaaaacacacauc

SEQ ID NO: 328914 - RNA, 17 nt, Human herpesvirus 6
uagcuguaaauauucau

SEQ ID NO: 328915 - RNA, 14 nt, Human herpesvirus 6
uaggacacuuucaa

SEQ ID NO: 328916 - RNA, 17 nt, Human herpesvirus 6
uaggauggaauggaauu

SEQ ID NO: 328917 - RNA, 14 nt, Human herpesvirus 6
uaggccuucaccug

SEQ ID NO: 328918 - RNA, 14 nt, Human herpesvirus 6
uagguguaaaucau

SEQ ID NO: 328919 - RNA, 17 nt, Human herpesvirus 6
uagguguaaaucaucaa

SEQ ID NO: 328920 - RNA, 22 nt, Human herpesvirus 6
uagguguaaaucaucaacguaa

SEQ ID NO: 328921 - RNA, 13 nt, Human herpesvirus 6
uaguacaguaugu

SEQ ID NO: 328922 - RNA, 20 nt, Human herpesvirus 6
uaguacaguaugucuccaaa

SEQ ID NO: 328923 - RNA, 15 nt, Human herpesvirus 6
uaguacgucuccugu

SEQ ID NO: 328924 - RNA, 16 nt, Human herpesvirus 6
uagucuagcaaccuaa

SEQ ID NO: 328925 - RNA, 20 nt, Human herpesvirus 6
uagugcugagacucuacgau

SEQ ID NO: 328926 - RNA, 18 nt, Human herpesvirus 6
uaguguucgcauuagaaa

SEQ ID NO: 328927 - RNA, 14 nt, Human herpesvirus 6
uaguuaaugcugcu

SEQ ID NO: 328928 - RNA, 18 nt, Human herpesvirus 6
uaguuguauuuaucgauu

SEQ ID NO: 328929 - RNA, 17 nt, Human herpesvirus 6
uaguuuucacacguuau

SEQ ID NO: 328930 - RNA, 21 nt, Human herpesvirus 6
uauaaaaaacuaaaacaucag

SEQ ID NO: 328931 - RNA, 20 nt, Human herpesvirus 6
uauaaauccgauagccauac

SEQ ID NO: 328932 - RNA, 21 nt, Human herpesvirus 6
uauaaauguagcauacgacaa

SEQ ID NO: 328933 - RNA, 22 nt, Human herpesvirus 6
uauaaauguagcauacgacaaa

SEQ ID NO: 328934 - RNA, 19 nt, Human herpesvirus 6
uauaaauguuuauuaucca

SEQ ID NO: 328935 - RNA, 23 nt, Human herpesvirus 6
aggaugaagaaaaaaacugugaa

SEQ ID NO: 328936 - RNA, 20 nt, Human herpesvirus 6
aggaugaaguuucacauaua

SEQ ID NO: 328937 - RNA, 22 nt, Human herpesvirus 6
aggaugggcaaguagccaauga

SEQ ID NO: 328938 - RNA, 20 nt, Human herpesvirus 6
aggauuucccuuguaaucaa

SEQ ID NO: 328939 - RNA, 21 nt, Human herpesvirus 6
aggcaaaaacgagaaccugca

SEQ ID NO: 328940 - RNA, 17 nt, Human herpesvirus 6
aggcauagcagcaauag

SEQ ID NO: 328941 - RNA, 20 nt, Human herpesvirus 6
aggcauuaaacugaggcaaa

SEQ ID NO: 328942 - RNA, 15 nt, Human herpesvirus 6
aggccgucaaagaca

SEQ ID NO: 328943 - RNA, 23 nt, Human herpesvirus 6
aggccugugugccaggaaagugu

SEQ ID NO: 328944 - RNA, 22 nt, Human herpesvirus 6
aggcgacgaaagaggacgggaa

SEQ ID NO: 328945 - RNA, 19 nt, Human herpesvirus 6
aggcgcuaguuacggggaa

SEQ ID NO: 328946 - RNA, 20 nt, Human herpesvirus 6
aggcgcuugaaaccacugac

SEQ ID NO: 328947 - RNA, 18 nt, Human herpesvirus 6
aggcugcagccccaaaac

SEQ ID NO: 328948 - RNA, 15 nt, Human herpesvirus 6
agggaagauuuguaa

SEQ ID NO: 328949 - RNA, 24 nt, Human herpesvirus 6
agggaugucggucagacagugagu

SEQ ID NO: 328950 - RNA, 14 nt, Human herpesvirus 6
aggggaagggaaua

SEQ ID NO: 328951 - RNA, 20 nt, Human herpesvirus 6
aggggaccgcagcagcuaga

SEQ ID NO: 328952 - RNA, 15 nt, Human herpesvirus 6
aggggagagacaucc

SEQ ID NO: 328953 - RNA, 13 nt, Human herpesvirus 6
agguaaagaucug

SEQ ID NO: 328954 - RNA, 22 nt, Human herpesvirus 6
agguagaauuacuauguggcau

SEQ ID NO: 328955 - RNA, 20 nt, Human herpesvirus 6
agguaucaaagaacaaaauc

SEQ ID NO: 328956 - RNA, 19 nt, Human herpesvirus 6
aggucaucaugcugugaga

SEQ ID NO: 328957 - RNA, 18 nt, Human herpesvirus 6
aggugauugggagcucac

SEQ ID NO: 328958 - RNA, 21 nt, Human herpesvirus 6
agguguaaaucaucaacguaa

SEQ ID NO: 328959 - RNA, 22 nt, Human herpesvirus 6
agguguaaaucaucaacguaag

SEQ ID NO: 328960 - RNA, 17 nt, Human herpesvirus 6
aggugucgucacuccaa

SEQ ID NO: 328961 - RNA, 18 nt, Human herpesvirus 6
aggugucucaaccuucau

SEQ ID NO: 328962 - RNA, 23 nt, Human herpesvirus 6
agguuauuuaugaaaauugcucu

SEQ ID NO: 328963 - RNA, 19 nt, Human herpesvirus 6
agguuuugugggguuccag

SEQ ID NO: 328964 - RNA, 20 nt, Human herpesvirus 6
aguaaaugaauguguucaca

SEQ ID NO: 328965 - RNA, 15 nt, Human herpesvirus 6
aguaagggcuuuuca

SEQ ID NO: 328966 - RNA, 17 nt, Human herpesvirus 6
aguaauauaggauuucc

SEQ ID NO: 328967 - RNA, 20 nt, Human herpesvirus 6
aguaauggaucuugaucaaa

SEQ ID NO: 328968 - RNA, 14 nt, Human herpesvirus 6
aguacuuacgugug

SEQ ID NO: 328969 - RNA, 14 nt, Human herpesvirus 6
aguauagucuagca

SEQ ID NO: 328970 - RNA, 21 nt, Human herpesvirus 6
aguauccuuccaccuacauca

SEQ ID NO: 328971 - RNA, 12 nt, Human herpesvirus 6
aguauuggugca

SEQ ID NO: 328972 - RNA, 17 nt, Human herpesvirus 6
agucaacgcaauuccac

SEQ ID NO: 328973 - RNA, 11 nt, Human herpesvirus 6
agucaauguug

SEQ ID NO: 328974 - RNA, 17 nt, Human herpesvirus 6
agucacgggcagcugca

SEQ ID NO: 328975 - RNA, 16 nt, Human herpesvirus 6
agucaucauauaauau

SEQ ID NO: 328976 - RNA, 19 nt, Human herpesvirus 6
agucggcgugugugcuccg

SEQ ID NO: 328977 - RNA, 16 nt, Human herpesvirus 6
agucuagcaaccuaau

SEQ ID NO: 328978 - RNA, 14 nt, Human herpesvirus 6
agucuuuaccauuu

SEQ ID NO: 328979 - RNA, 17 nt, Human herpesvirus 6
agucuuuaccauuugac

SEQ ID NO: 328980 - RNA, 19 nt, Human herpesvirus 6
agugaaaaagguggcauca

SEQ ID NO: 328981 - RNA, 13 nt, Human herpesvirus 6
agugaacauacaa

SEQ ID NO: 328982 - RNA, 21 nt, Human herpesvirus 6
agugaauugugcaagcuguau

SEQ ID NO: 328983 - RNA, 15 nt, Human herpesvirus 6
agugagauacguguu

SEQ ID NO: 328984 - RNA, 14 nt, Human herpesvirus 6
agugcgcuggcuua

SEQ ID NO: 328985 - RNA, 16 nt, Human herpesvirus 6
agugcugcaacgggcg

SEQ ID NO: 328986 - RNA, 19 nt, Human herpesvirus 6
agugcuucucucgaugaaa

SEQ ID NO: 328987 - RNA, 19 nt, Human herpesvirus 6
agugcuuuaaucacaauga

SEQ ID NO: 328988 - RNA, 23 nt, Human herpesvirus 6
agugcuuuaaucacaaugaucaa

SEQ ID NO: 328989 - RNA, 18 nt, Human herpesvirus 6
agugcuuuaucuagccaa

SEQ ID NO: 328990 - RNA, 16 nt, Human herpesvirus 6
aguguagaaaacaucc

SEQ ID NO: 328991 - RNA, 16 nt, Human herpesvirus 6
aguguauccggcucau

SEQ ID NO: 328992 - RNA, 15 nt, Human herpesvirus 6
aguguggauaucuca

SEQ ID NO: 328993 - RNA, 19 nt, Human herpesvirus 6
aguuacuuugauguuaacu

SEQ ID NO: 328994 - RNA, 14 nt, Human herpesvirus 6
aguuagcagaagaa

SEQ ID NO: 328995 - RNA, 18 nt, Human herpesvirus 6
aguuauacuggcaaagca

SEQ ID NO: 328996 - RNA, 22 nt, Human herpesvirus 6
aguuaugcgucuguuuauugcc

SEQ ID NO: 328997 - RNA, 15 nt, Human herpesvirus 6
aguucaguaacauuu

SEQ ID NO: 328998 - RNA, 17 nt, Human herpesvirus 6
aguucaguaacauuuaa

SEQ ID NO: 328999 - RNA, 16 nt, Human herpesvirus 6
aguucaucagcauuaa

SEQ ID NO: 329000 - RNA, 17 nt, Human herpesvirus 6
aguucgccuugucauca

SEQ ID NO: 329001 - RNA, 16 nt, Human herpesvirus 6
aguugaagaucuuuau

SEQ ID NO: 329002 - RNA, 18 nt, Human herpesvirus 6
aguugggaucuucugcua

SEQ ID NO: 329003 - RNA, 22 nt, Human herpesvirus 6
aguuguacaggaggcuauggcu

SEQ ID NO: 329004 - RNA, 17 nt, Human herpesvirus 6
aguuuaccuauuuacaa

SEQ ID NO: 329005 - RNA, 21 nt, Human herpesvirus 6
aguuuaccuauuuacaauguu

SEQ ID NO: 329006 - RNA, 16 nt, Human herpesvirus 6
aguuucaauauaugau

SEQ ID NO: 329007 - RNA, 20 nt, Human herpesvirus 6
aguuucacauauaugaugcu

SEQ ID NO: 329008 - RNA, 18 nt, Human herpesvirus 6
aguuuccuuugugugaua

SEQ ID NO: 329009 - RNA, 15 nt, Human herpesvirus 6
aguuucucgaaaaaa

SEQ ID NO: 329010 - RNA, 19 nt, Human herpesvirus 6
aguuucucgaaaaaacaac

SEQ ID NO: 329011 - RNA, 20 nt, Human herpesvirus 6
aguuugauuuuguacaguag

SEQ ID NO: 329012 - RNA, 13 nt, Human herpesvirus 6
aguuuggauucag

SEQ ID NO: 329013 - RNA, 14 nt, Human herpesvirus 6
aguuuuugugcggc

SEQ ID NO: 329014 - RNA, 19 nt, Human herpesvirus 6
aguuuuugugcggcacaag

SEQ ID NO: 329015 - RNA, 23 nt, Human herpesvirus 6
aguuuuuuuugaagcaucccuau

SEQ ID NO: 329016 - RNA, 17 nt, Human herpesvirus 6
auaaaaaaaagacauca

SEQ ID NO: 329017 - RNA, 20 nt, Human herpesvirus 6
auaaaaaaaagacaucacau

SEQ ID NO: 329018 - RNA, 16 nt, Human herpesvirus 6
auaaaaaaucuuguca

SEQ ID NO: 329019 - RNA, 13 nt, Human herpesvirus 6
auaaaaacaccuc

SEQ ID NO: 329020 - RNA, 13 nt, Human herpesvirus 6
auaaaaacucaau

SEQ ID NO: 329021 - RNA, 17 nt, Human herpesvirus 6
auaaaauuuacaguguu

SEQ ID NO: 329022 - RNA, 15 nt, Human herpesvirus 6
auaaacagagacugg

SEQ ID NO: 329023 - RNA, 20 nt, Human herpesvirus 6
auaaacugugucuguucaac

SEQ ID NO: 329024 - RNA, 22 nt, Human herpesvirus 6
auaaacuuagaucuauaugcau

SEQ ID NO: 329025 - RNA, 17 nt, Human herpesvirus 6
auaaaguaagcaccuua

SEQ ID NO: 329026 - RNA, 18 nt, Human herpesvirus 6
auaaaguuugucacacca

SEQ ID NO: 329027 - RNA, 18 nt, Human herpesvirus 6
auaaauacuagcuaaaac

SEQ ID NO: 329028 - RNA, 14 nt, Human herpesvirus 6
auaaauaugguaau

SEQ ID NO: 329029 - RNA, 21 nt, Human herpesvirus 6
auaaauccgauagccauacca

SEQ ID NO: 329030 - RNA, 22 nt, Human herpesvirus 6
auaaaugaauagauaauaauca

SEQ ID NO: 329031 - RNA, 14 nt, Human herpesvirus 6
auaaaugguagcua

SEQ ID NO: 329032 - RNA, 22 nt, Human herpesvirus 6
auaaaugguagcuauuauguga

SEQ ID NO: 329033 - RNA, 15 nt, Human herpesvirus 6
auaaaugucaaagaa

SEQ ID NO: 329034 - RNA, 20 nt, Human herpesvirus 6
auaaauugguggacaacgau

SEQ ID NO: 329035 - RNA, 14 nt, Human herpesvirus 6
auaacaagcacuga

SEQ ID NO: 329036 - RNA, 18 nt, Human herpesvirus 6
auaacagcgguucgggcu

SEQ ID NO: 329037 - RNA, 17 nt, Human herpesvirus 6
auaaccucacuacugaa

SEQ ID NO: 329038 - RNA, 11 nt, Human herpesvirus 6
auaacgaugcu

SEQ ID NO: 329039 - RNA, 14 nt, Human herpesvirus 6
auaagaaagcaguu

SEQ ID NO: 329040 - RNA, 16 nt, Human herpesvirus 6
auaagagccaauacca

SEQ ID NO: 329041 - RNA, 19 nt, Human herpesvirus 6
auaagggacccguccgaga

SEQ ID NO: 329042 - RNA, 20 nt, Human herpesvirus 6
auaaggugucgucacuccaa

SEQ ID NO: 329043 - RNA, 15 nt, Human herpesvirus 6
auaagucuaaugcaa

SEQ ID NO: 329044 - RNA, 17 nt, Human herpesvirus 6
auaauaaaaaguaauau

SEQ ID NO: 329045 - RNA, 20 nt, Human herpesvirus 6
auaauaagccuaagaaauuu

SEQ ID NO: 329046 - RNA, 16 nt, Human herpesvirus 6
auaauaggaacuauga

SEQ ID NO: 329047 - RNA, 18 nt, Human herpesvirus 6
auaauauuccugagcuac

SEQ ID NO: 329048 - RNA, 17 nt, Human herpesvirus 6
auaaucccgucuccuca

SEQ ID NO: 329049 - RNA, 18 nt, Human herpesvirus 6
aucgucggaucaacagau

SEQ ID NO: 329050 - RNA, 15 nt, Human herpesvirus 6
aucguugauugaugc

SEQ ID NO: 329051 - RNA, 16 nt, Human herpesvirus 6
aucuaauaaaauacac

SEQ ID NO: 329052 - RNA, 17 nt, Human herpesvirus 6
aucuaccgagagauuua

SEQ ID NO: 329053 - RNA, 13 nt, Human herpesvirus 6
aucuacugcaguc

SEQ ID NO: 329054 - RNA, 24 nt, Human herpesvirus 6
aucuagaucuggaucucaguagau

SEQ ID NO: 329055 - RNA, 11 nt, Human herpesvirus 6
aucuagcuaua

SEQ ID NO: 329056 - RNA, 21 nt, Human herpesvirus 6
aucuauuauaagcaaacaugu

SEQ ID NO: 329057 - RNA, 21 nt, Human herpesvirus 6
aucuauugaagauaauaaaac

SEQ ID NO: 329058 - RNA, 16 nt, Human herpesvirus 6
aucuccgauaacgaaa

SEQ ID NO: 329059 - RNA, 12 nt, Human herpesvirus 6
aucucggacuca

SEQ ID NO: 329060 - RNA, 13 nt, Human herpesvirus 6
aucucggacucau

SEQ ID NO: 329061 - RNA, 14 nt, Human herpesvirus 6
aucugagacagucc

SEQ ID NO: 329062 - RNA, 22 nt, Human herpesvirus 6
aucugcauacagaaaucaaaga

SEQ ID NO: 329063 - RNA, 19 nt, Human herpesvirus 6
aucugccauaucacacauc

SEQ ID NO: 329064 - RNA, 23 nt, Human herpesvirus 6
aucugcggaaauaaaaaauauua

SEQ ID NO: 329065 - RNA, 12 nt, Human herpesvirus 6
aucugcuugaua

SEQ ID NO: 329066 - RNA, 20 nt, Human herpesvirus 6
aucuggcaaccuugacagau

SEQ ID NO: 329067 - RNA, 15 nt, Human herpesvirus 6
aucuguccagcuugc

SEQ ID NO: 329068 - RNA, 15 nt, Human herpesvirus 6
aucugugaacaaguu

SEQ ID NO: 329069 - RNA, 15 nt, Human herpesvirus 6
aucuuaaaagaccac

SEQ ID NO: 329070 - RNA, 18 nt, Human herpesvirus 6
aucuuaaaagaccacuuu

SEQ ID NO: 329071 - RNA, 16 nt, Human herpesvirus 6
aucuucaauagauuuu

SEQ ID NO: 329072 - RNA, 19 nt, Human herpesvirus 6
aucuucgccuuguauuuca

SEQ ID NO: 329073 - RNA, 23 nt, Human herpesvirus 6
aucuugaucaaauaucugaaaca

SEQ ID NO: 329074 - RNA, 17 nt, Human herpesvirus 6
aucuuuauggagggaau

SEQ ID NO: 329075 - RNA, 22 nt, Human herpesvirus 6
aucuuucauuuuuuugcaacuu

SEQ ID NO: 329076 - RNA, 15 nt, Human herpesvirus 6
aucuuuguuccagau

SEQ ID NO: 329077 - RNA, 19 nt, Human herpesvirus 6
augaaaaaaaaaauaucac

SEQ ID NO: 329078 - RNA, 21 nt, Human herpesvirus 6
augaaaaaaaaaucaacauuc

SEQ ID NO: 329079 - RNA, 20 nt, Human herpesvirus 6
augaaacaggaacagucuga

SEQ ID NO: 329080 - RNA, 13 nt, Human herpesvirus 6
augaaacauaaaa

SEQ ID NO: 329081 - RNA, 17 nt, Human herpesvirus 6
augaaagcuucauuuau

SEQ ID NO: 329082 - RNA, 17 nt, Human herpesvirus 6
augaaaguuucggaaaa

SEQ ID NO: 329083 - RNA, 19 nt, Human herpesvirus 6
augaaaugaaugccgacau

SEQ ID NO: 329084 - RNA, 13 nt, Human herpesvirus 6
aaccgaaaaaccc

SEQ ID NO: 329085 - RNA, 17 nt, Human herpesvirus 6
aaccguaugccugagcu

SEQ ID NO: 329086 - RNA, 16 nt, Human herpesvirus 6
aaccuaaauacauuca

SEQ ID NO: 329087 - RNA, 21 nt, Human herpesvirus 6
aaccuaauggaccaagcaccu

SEQ ID NO: 329088 - RNA, 23 nt, Human herpesvirus 6
aaccucacuacugaaaccaaagc

SEQ ID NO: 329089 - RNA, 16 nt, Human herpesvirus 6
aaccuuauacagaugu

SEQ ID NO: 329090 - RNA, 15 nt, Human herpesvirus 6
aacgaaaauugauga

SEQ ID NO: 329091 - RNA, 13 nt, Human herpesvirus 6
aacgaagucuuug

SEQ ID NO: 329092 - RNA, 15 nt, Human herpesvirus 6
aacgaauagcauucu

SEQ ID NO: 329093 - RNA, 17 nt, Human herpesvirus 6
aacgacuaccacaucac

SEQ ID NO: 329094 - RNA, 19 nt, Human herpesvirus 6
aacgagccaagccauggaa

SEQ ID NO: 329095 - RNA, 18 nt, Human herpesvirus 6
aacgauagcagcucugca

SEQ ID NO: 329096 - RNA, 14 nt, Human herpesvirus 6
aacgauaugcugcc

SEQ ID NO: 329097 - RNA, 13 nt, Human herpesvirus 6
aacgcaauuccac

SEQ ID NO: 329098 - RNA, 16 nt, Human herpesvirus 6
aacgcagcaacaaucc

SEQ ID NO: 329099 - RNA, 17 nt, Human herpesvirus 6
aacgcagcaacaaucca

SEQ ID NO: 329100 - RNA, 16 nt, Human herpesvirus 6
aacgcaucacacauac

SEQ ID NO: 329101 - RNA, 18 nt, Human herpesvirus 6
aacgcaucacacauacaa

SEQ ID NO: 329102 - RNA, 21 nt, Human herpesvirus 6
aacgcccgccggcccauccac

SEQ ID NO: 329103 - RNA, 20 nt, Human herpesvirus 6
aacgcccugaaacuaucgga

SEQ ID NO: 329104 - RNA, 21 nt, Human herpesvirus 6
aacgcgacagggugagucaca

SEQ ID NO: 329105 - RNA, 16 nt, Human herpesvirus 6
aacgcuaaauauauca

SEQ ID NO: 329106 - RNA, 19 nt, Human herpesvirus 6
aacgcuaaauauaucaaag

SEQ ID NO: 329107 - RNA, 18 nt, Human herpesvirus 6
aacgcugucuuuuuuccc

SEQ ID NO: 329108 - RNA, 16 nt, Human herpesvirus 6
aacguagacagucaca

SEQ ID NO: 329109 - RNA, 12 nt, Human herpesvirus 6
aacguugcacua

SEQ ID NO: 329110 - RNA, 21 nt, Human herpesvirus 6
aacuaaaucgcgccauauccu

SEQ ID NO: 329111 - RNA, 19 nt, Human herpesvirus 6
aacuaauucggaacauugu

SEQ ID NO: 329112 - RNA, 23 nt, Human herpesvirus 6
aacuaggugauugggagcucacu

SEQ ID NO: 329113 - RNA, 14 nt, Human herpesvirus 6
aacuaguugcuugu

SEQ ID NO: 329114 - RNA, 16 nt, Human herpesvirus 6
aacuaguugcuuguac

SEQ ID NO: 329115 - RNA, 16 nt, Human herpesvirus 6
aacuauauugcugcua

SEQ ID NO: 329116 - RNA, 21 nt, Human herpesvirus 6
aacuaugcaaacgaaaccauc

SEQ ID NO: 329117 - RNA, 17 nt, Human herpesvirus 6
aacuaugugcauuccga

SEQ ID NO: 329118 - RNA, 21 nt, Human herpesvirus 6
aacuauuaauaaaucgcuuaa

SEQ ID NO: 329119 - RNA, 17 nt, Human herpesvirus 6
aacuauugacauaggaa

SEQ ID NO: 329120 - RNA, 18 nt, Human herpesvirus 6
aacucaaaaaaauuccca

SEQ ID NO: 329121 - RNA, 12 nt, Human herpesvirus 6
aacucacacaac

SEQ ID NO: 329122 - RNA, 17 nt, Human herpesvirus 6
aacucaucaaauccucu

SEQ ID NO: 329123 - RNA, 16 nt, Human herpesvirus 6
aacucaucgacuucug

SEQ ID NO: 329124 - RNA, 13 nt, Human herpesvirus 6
aacucuaccugga

SEQ ID NO: 329125 - RNA, 16 nt, Human herpesvirus 6
aacucuuauaacaagc

SEQ ID NO: 329126 - RNA, 13 nt, Human herpesvirus 6
aacugacugacaa

SEQ ID NO: 329127 - RNA, 20 nt, Human herpesvirus 6
aacugcuggcugagauucac

SEQ ID NO: 329128 - RNA, 22 nt, Human herpesvirus 6
aacugcuggcugagauucacuc

SEQ ID NO: 329129 - RNA, 15 nt, Human herpesvirus 6
aacuguaugcaauac

SEQ ID NO: 329130 - RNA, 15 nt, Human herpesvirus 6
aacuguccucuuuga

SEQ ID NO: 329131 - RNA, 17 nt, Human herpesvirus 6
aacugugucuguucaac

SEQ ID NO: 329132 - RNA, 16 nt, Human herpesvirus 6
aacuuacuaaugugga

SEQ ID NO: 329133 - RNA, 19 nt, Human herpesvirus 6
aacuuuuuucggauuuuga

SEQ ID NO: 329134 - RNA, 21 nt, Human herpesvirus 6
aacuuuuuuuuuucuuacaac

SEQ ID NO: 329135 - RNA, 13 nt, Human herpesvirus 6
aagaaacaaugcu

SEQ ID NO: 329136 - RNA, 12 nt, Human herpesvirus 6
aagaaacagaua

SEQ ID NO: 329137 - RNA, 19 nt, Human herpesvirus 6
aagaaacgaagucuuuggc

SEQ ID NO: 329138 - RNA, 18 nt, Human herpesvirus 6
aagaacaaaaucuucuuu

SEQ ID NO: 329139 - RNA, 12 nt, Human herpesvirus 6
aagaaccaaaga

SEQ ID NO: 329140 - RNA, 13 nt, Human herpesvirus 6
aagaaccaaagac

SEQ ID NO: 329141 - RNA, 13 nt, Human herpesvirus 6
aagaaccaacaga

SEQ ID NO: 329142 - RNA, 20 nt, Human herpesvirus 6
aagaaccggcgugugcgauu

SEQ ID NO: 329143 - RNA, 19 nt, Human herpesvirus 6
aagaaccugaaaucugagu

SEQ ID NO: 329144 - RNA, 21 nt, Human herpesvirus 6
aagaagaaaaaaacacaaauc

SEQ ID NO: 329145 - RNA, 21 nt, Human herpesvirus 6
aagaaugccgugaauuguguc

SEQ ID NO: 329146 - RNA, 18 nt, Human herpesvirus 6
aagaaugggauugugauu

SEQ ID NO: 329147 - RNA, 16 nt, Human herpesvirus 6
aagaauuaauguccag

SEQ ID NO: 329148 - RNA, 19 nt, Human herpesvirus 6
aagaauuaauguccaguga

SEQ ID NO: 329149 - RNA, 16 nt, Human herpesvirus 6
aagacaaacgccucca

SEQ ID NO: 329150 - RNA, 17 nt, Human herpesvirus 6
aagacaucgauuugcug

SEQ ID NO: 329151 - RNA, 17 nt, Human herpesvirus 6
aagaccuauauguguug

SEQ ID NO: 329152 - RNA, 20 nt, Human herpesvirus 6
aagacgauugcuuuaguagu

SEQ ID NO: 329153 - RNA, 16 nt, Human herpesvirus 6
aagacuccuacaauac

SEQ ID NO: 329154 - RNA, 16 nt, Human herpesvirus 6
aagacuuauaauauuc

SEQ ID NO: 329155 - RNA, 13 nt, Human herpesvirus 6
aagagaacgagcu

SEQ ID NO: 329156 - RNA, 23 nt, Human herpesvirus 6
aagagaccaauuuaugucauuuc

SEQ ID NO: 329157 - RNA, 17 nt, Human herpesvirus 6
aagagaugaaagacaga

SEQ ID NO: 329158 - RNA, 16 nt, Human herpesvirus 6
aagagcgucguauuaa

SEQ ID NO: 329159 - RNA, 18 nt, Human herpesvirus 6
aagaggugcgaaugcuca

SEQ ID NO: 329160 - RNA, 22 nt, Human herpesvirus 6
aagagucccaucuauacacccu

SEQ ID NO: 329161 - RNA, 14 nt, Human herpesvirus 6
aagaucaagcaagu

SEQ ID NO: 329162 - RNA, 20 nt, Human herpesvirus 6
aagaucuguacguauaccua

SEQ ID NO: 329163 - RNA, 15 nt, Human herpesvirus 6
aagaugguaucugaa

SEQ ID NO: 329164 - RNA, 19 nt, Human herpesvirus 6
aagauguagcuggauauac

SEQ ID NO: 329165 - RNA, 22 nt, Human herpesvirus 6
aagauuacuucgugcugugaua

SEQ ID NO: 329166 - RNA, 20 nt, Human herpesvirus 6
aagauuauggcuacaacaga

SEQ ID NO: 329167 - RNA, 16 nt, Human herpesvirus 6
aagauucagagugaau

SEQ ID NO: 329168 - RNA, 17 nt, Human herpesvirus 6
aagcagaucgaguuaca

SEQ ID NO: 329169 - RNA, 16 nt, Human herpesvirus 6
aagcaggaacccagau

SEQ ID NO: 329170 - RNA, 16 nt, Human herpesvirus 6
aagcaguuuuacauca

SEQ ID NO: 329171 - RNA, 18 nt, Human herpesvirus 6
aagcauacucaacccaaa

SEQ ID NO: 329172 - RNA, 16 nt, Human herpesvirus 6
aagccgaguuuggcaa

SEQ ID NO: 329173 - RNA, 13 nt, Human herpesvirus 6
aagcgccauaaaa

SEQ ID NO: 329174 - RNA, 14 nt, Human herpesvirus 6
aagcuaaaucaaau

SEQ ID NO: 329175 - RNA, 14 nt, Human herpesvirus 6
aagcuaucauauca

SEQ ID NO: 329176 - RNA, 18 nt, Human herpesvirus 6
aagcuauugaaacuaggu

SEQ ID NO: 329177 - RNA, 14 nt, Human herpesvirus 6
aaggacuacauccc

SEQ ID NO: 329178 - RNA, 13 nt, Human herpesvirus 6
aaggagauuucag

SEQ ID NO: 329179 - RNA, 16 nt, Human herpesvirus 6
aaggagcuuucaucca

SEQ ID NO: 329180 - RNA, 18 nt, Human herpesvirus 6
aaggcuaucacuuagaca

SEQ ID NO: 329181 - RNA, 15 nt, Human herpesvirus 6
aagggaagauuugua

SEQ ID NO: 329182 - RNA, 19 nt, Human herpesvirus 6
aagggucuaucgcaaauuc

SEQ ID NO: 329183 - RNA, 20 nt, Human herpesvirus 6
aaggucaucaugcugugaga

SEQ ID NO: 329184 - RNA, 19 nt, Human herpesvirus 6
aagguggguuauagaugac

SEQ ID NO: 329185 - RNA, 15 nt, Human herpesvirus 6
aaguaaaacaaaaca

SEQ ID NO: 329186 - RNA, 15 nt, Human herpesvirus 6
aaguagccaaugauu

SEQ ID NO: 329187 - RNA, 20 nt, Human herpesvirus 6
aaguagugcuucaacuaaau

SEQ ID NO: 329188 - RNA, 18 nt, Human herpesvirus 6
aaguauccuaaauaccaa

SEQ ID NO: 329189 - RNA, 13 nt, Human herpesvirus 6
aaguauuggugca

SEQ ID NO: 329190 - RNA, 16 nt, Human herpesvirus 6
aaguauuggugcauca

SEQ ID NO: 329191 - RNA, 16 nt, Human herpesvirus 6
aaguauuuuacuuuau

SEQ ID NO: 329192 - RNA, 16 nt, Human herpesvirus 6
aagucguugugucaug

SEQ ID NO: 329193 - RNA, 21 nt, Human herpesvirus 6
aagucguugugucaugauuau

SEQ ID NO: 329194 - RNA, 15 nt, Human herpesvirus 6
aaguguguucuuaca

SEQ ID NO: 329195 - RNA, 15 nt, Human herpesvirus 6
aaguguuugguguga

SEQ ID NO: 329196 - RNA, 12 nt, Human herpesvirus 6
aaguuaauucca

SEQ ID NO: 329197 - RNA, 13 nt, Human herpesvirus 6
aaguuaauuccag

SEQ ID NO: 329198 - RNA, 20 nt, Human herpesvirus 6
aaguuauauucuucuguaaa

SEQ ID NO: 329199 - RNA, 18 nt, Human herpesvirus 6
aaguucaguaacauuuaa

SEQ ID NO: 329200 - RNA, 17 nt, Human herpesvirus 6
aaguucaucagccauuu

SEQ ID NO: 329201 - RNA, 19 nt, Human herpesvirus 6
aaguucaucagccauuucg

SEQ ID NO: 329202 - RNA, 14 nt, Human herpesvirus 6
aaguuccauuguuu

SEQ ID NO: 329203 - RNA, 15 nt, Human herpesvirus 6
aaguuuaaguuuuca

SEQ ID NO: 329204 - RNA, 14 nt, Human herpesvirus 6
aaguuuacauagaa

SEQ ID NO: 329205 - RNA, 20 nt, Human herpesvirus 6
aaguuucuguugaauuccag

SEQ ID NO: 329206 - RNA, 16 nt, Human herpesvirus 6
aaguuuugggugcuau

SEQ ID NO: 329207 - RNA, 23 nt, Human herpesvirus 6
aauaaaauccacgaacguagaca

SEQ ID NO: 329208 - RNA, 23 nt, Human herpesvirus 6
aauaaaaugcccauucucagaca

SEQ ID NO: 329209 - RNA, 16 nt, Human herpesvirus 6
aauaaaguaagcaccu

SEQ ID NO: 329210 - RNA, 17 nt, Human herpesvirus 6
aauaaauacuagcuaaa

SEQ ID NO: 329211 - RNA, 16 nt, Human herpesvirus 6
aauaacaacaaccaca

SEQ ID NO: 329212 - RNA, 14 nt, Human herpesvirus 6
aauaacacgcuguu

SEQ ID NO: 329213 - RNA, 14 nt, Human herpesvirus 6
aauaagccuaagaa

SEQ ID NO: 329214 - RNA, 19 nt, Human herpesvirus 6
aauaaguacauagaauuuc

SEQ ID NO: 329215 - RNA, 19 nt, Human herpesvirus 6
aauaaugcccagaugugga

SEQ ID NO: 329216 - RNA, 12 nt, Human herpesvirus 6
aauaaugccuaa

SEQ ID NO: 329217 - RNA, 14 nt, Human herpesvirus 6
aauaauggcaugca

SEQ ID NO: 329218 - RNA, 14 nt, Human herpesvirus 6
aauaauuacaauac

SEQ ID NO: 329219 - RNA, 15 nt, Human herpesvirus 6
aauaauuauggacaa

SEQ ID NO: 329220 - RNA, 15 nt, Human herpesvirus 6
aauacaaaauuugaa

SEQ ID NO: 329221 - RNA, 13 nt, Human herpesvirus 6
aauacaucauuaa

SEQ ID NO: 329222 - RNA, 18 nt, Human herpesvirus 6
aauacauuuccaugcaua

SEQ ID NO: 329223 - RNA, 15 nt, Human herpesvirus 6
aauacuaaauguuau

SEQ ID NO: 329224 - RNA, 16 nt, Human herpesvirus 6
aauacugaaguuaaua

SEQ ID NO: 329225 - RNA, 22 nt, Human herpesvirus 6
aauacuuucaugauucuuuguc

SEQ ID NO: 329226 - RNA, 20 nt, Human herpesvirus 6
aauagucgcacaucgauaaa

SEQ ID NO: 329227 - RNA, 14 nt, Human herpesvirus 6
aauaguuacuuuga

SEQ ID NO: 329228 - RNA, 20 nt, Human herpesvirus 6
aauaguucuucaacauauca

SEQ ID NO: 329229 - RNA, 16 nt, Human herpesvirus 6
aauaguuuuacuucac

SEQ ID NO: 329230 - RNA, 18 nt, Human herpesvirus 6
aauauaacuuuacauuaa

SEQ ID NO: 329231 - RNA, 12 nt, Human herpesvirus 6
aauauagacuuu

SEQ ID NO: 329232 - RNA, 14 nt, Human herpesvirus 6
aauauaucaaagau

SEQ ID NO: 329233 - RNA, 21 nt, Human herpesvirus 6
aauauaucaaagauguacuca

SEQ ID NO: 329234 - RNA, 22 nt, Human herpesvirus 6
aauauaucaaagauguacucau

SEQ ID NO: 329235 - RNA, 18 nt, Human herpesvirus 6
aauauauuugcacuuccu

SEQ ID NO: 329236 - RNA, 22 nt, Human herpesvirus 6
aauaucuaucuuauuaauuucc

SEQ ID NO: 329237 - RNA, 17 nt, Human herpesvirus 6
aauaugaacaaugacau

SEQ ID NO: 329238 - RNA, 23 nt, Human herpesvirus 6
aauauuaauuaccuauagucaau

SEQ ID NO: 329239 - RNA, 18 nt, Human herpesvirus 6
aauauuuccaugacugug

SEQ ID NO: 329240 - RNA, 21 nt, Human herpesvirus 6
aauauuuccaugacugugagg

SEQ ID NO: 329241 - RNA, 19 nt, Human herpesvirus 6
aaucaaaugauuuuacaaa

SEQ ID NO: 329242 - RNA, 17 nt, Human herpesvirus 6
aaucaacauucccuuaa

SEQ ID NO: 329243 - RNA, 24 nt, Human herpesvirus 6
aaucaacauucccuuaauguaugc

SEQ ID NO: 329244 - RNA, 16 nt, Human herpesvirus 6
aaucacaaugaucaau

SEQ ID NO: 329245 - RNA, 15 nt, Human herpesvirus 6
aaucagaauccacca

SEQ ID NO: 329246 - RNA, 18 nt, Human herpesvirus 6
aaucauuguuugaauaac

SEQ ID NO: 329247 - RNA, 16 nt, Human herpesvirus 6
aauccaccaaugacac

SEQ ID NO: 329248 - RNA, 23 nt, Human herpesvirus 6
aauccagacuagacgcacuaagu

SEQ ID NO: 329249 - RNA, 18 nt, Human herpesvirus 6
aauccauguucauaggac

SEQ ID NO: 329250 - RNA, 19 nt, Human herpesvirus 6
aauccggaguuaaguaaac

SEQ ID NO: 329251 - RNA, 23 nt, Human herpesvirus 6
aauccggaguuaaguaaacugcu

SEQ ID NO: 329252 - RNA, 19 nt, Human herpesvirus 6
aaucgauuacaaaacaauc

SEQ ID NO: 329253 - RNA, 17 nt, Human herpesvirus 6
aaucuacugagaucaua

SEQ ID NO: 329254 - RNA, 14 nt, Human herpesvirus 6
aaucuacuguacaa

SEQ ID NO: 329255 - RNA, 20 nt, Human herpesvirus 6
aaucuagaauaucugcuaag

SEQ ID NO: 329256 - RNA, 21 nt, Human herpesvirus 6
aaucuauccgcuaaaacgacu

SEQ ID NO: 329257 - RNA, 20 nt, Human herpesvirus 6
aaucuaucuccgcaaaccac

SEQ ID NO: 329258 - RNA, 20 nt, Human herpesvirus 6
aaucucaagcacaaaaccag

SEQ ID NO: 329259 - RNA, 18 nt, Human herpesvirus 6
aaucugcguuccucucuc

SEQ ID NO: 329260 - RNA, 22 nt, Human herpesvirus 6
aaucuggcaaccuugacagaua

SEQ ID NO: 329261 - RNA, 14 nt, Human herpesvirus 6
aaucuucauuaaaa

SEQ ID NO: 329262 - RNA, 20 nt, Human herpesvirus 6
aaucuucccuuuuacaauac

SEQ ID NO: 329263 - RNA, 18 nt, Human herpesvirus 6
aaucuucugcuucuucag

SEQ ID NO: 329264 - RNA, 21 nt, Human herpesvirus 6
aaugaaacaagaaagaggaau

SEQ ID NO: 329265 - RNA, 20 nt, Human herpesvirus 6
aaugaaugccgacaucuccu

SEQ ID NO: 329266 - RNA, 14 nt, Human herpesvirus 6
aaugaaugugcuga

SEQ ID NO: 329267 - RNA, 21 nt, Human herpesvirus 6
aaugaauguguucacagagca

SEQ ID NO: 329268 - RNA, 16 nt, Human herpesvirus 6
aaugacaccgauucag

SEQ ID NO: 329269 - RNA, 18 nt, Human herpesvirus 6
aaugacuguacacaagag

SEQ ID NO: 329270 - RNA, 16 nt, Human herpesvirus 6
aaugaucaauuuuaca

SEQ ID NO: 329271 - RNA, 13 nt, Human herpesvirus 6
aaugauuuuacaa

SEQ ID NO: 329272 - RNA, 15 nt, Human herpesvirus 6
aaugccgacaucucc

SEQ ID NO: 329273 - RNA, 13 nt, Human herpesvirus 6
aauggcaugcauu

SEQ ID NO: 329274 - RNA, 15 nt, Human herpesvirus 6
aaugggauugugauu

SEQ ID NO: 329275 - RNA, 17 nt, Human herpesvirus 6
aaugguuagaaauucua

SEQ ID NO: 329276 - RNA, 15 nt, Human herpesvirus 6
aauguaugcaucauc

SEQ ID NO: 329277 - RNA, 23 nt, Human herpesvirus 6
aauguauugauuauauauuugca

SEQ ID NO: 329278 - RNA, 23 nt, Human herpesvirus 6
aaugugacaguucgagcccauaa

SEQ ID NO: 329279 - RNA, 13 nt, Human herpesvirus 6
aauguguucacag

SEQ ID NO: 329280 - RNA, 15 nt, Human herpesvirus 6
aauguuaaauaacuc

SEQ ID NO: 329281 - RNA, 23 nt, Human herpesvirus 6
aauguuuuucauaaaugguagcu

SEQ ID NO: 329282 - RNA, 16 nt, Human herpesvirus 6
aauguuuuugacaaau

SEQ ID NO: 329283 - RNA, 16 nt, Human herpesvirus 6
aauuacaagguacaca

SEQ ID NO: 329284 - RNA, 17 nt, Human herpesvirus 6
aauuaccuauagucaau

SEQ ID NO: 329285 - RNA, 19 nt, Human herpesvirus 6
aauuaccuauagucaaugu

SEQ ID NO: 329286 - RNA, 15 nt, Human herpesvirus 6
aauuauaaaaccgau

SEQ ID NO: 329287 - RNA, 14 nt, Human herpesvirus 6
aauuauaucaucuu

SEQ ID NO: 329288 - RNA, 21 nt, Human herpesvirus 6
aauuauccuggcgaugcagau

SEQ ID NO: 329289 - RNA, 12 nt, Human herpesvirus 6
aauuaugcauuu

SEQ ID NO: 329290 - RNA, 20 nt, Human herpesvirus 6
aauuaugguuaucaucacaa

SEQ ID NO: 329291 - RNA, 22 nt, Human herpesvirus 6
aauuaugguuaucaucacaaag

SEQ ID NO: 329292 - RNA, 23 nt, Human herpesvirus 6
aauuaugguuaucaucacaaagu

SEQ ID NO: 329293 - RNA, 18 nt, Human herpesvirus 6
aauucaaaacgacaucgc

SEQ ID NO: 329294 - RNA, 15 nt, Human herpesvirus 6
aauucaccagauuca

SEQ ID NO: 329295 - RNA, 17 nt, Human herpesvirus 6
aauucaccagauucacu

SEQ ID NO: 329296 - RNA, 22 nt, Human herpesvirus 6
aauuccaagacauguacaucaa

SEQ ID NO: 329297 - RNA, 17 nt, Human herpesvirus 6
aauuccgauaguagauu

SEQ ID NO: 329298 - RNA, 22 nt, Human herpesvirus 6
aauuccugugacgccuugaugu

SEQ ID NO: 329299 - RNA, 20 nt, Human herpesvirus 6
aauucggucaccuacauucg

SEQ ID NO: 329300 - RNA, 14 nt, Human herpesvirus 6
aauucuauguacuu

SEQ ID NO: 329301 - RNA, 16 nt, Human herpesvirus 6
aauucuauguacuuau

SEQ ID NO: 329302 - RNA, 14 nt, Human herpesvirus 6
aauucuuauuuacc

SEQ ID NO: 329303 - RNA, 14 nt, Human herpesvirus 6
aauugaacauugua

SEQ ID NO: 329304 - RNA, 11 nt, Human herpesvirus 6B
aaaucucgccg

SEQ ID NO: 329305 - RNA, 20 nt, Human herpesvirus 6B
aaaucucgccgaacuagaaa

SEQ ID NO: 329306 - RNA, 22 nt, Human herpesvirus 6B
aaaucucuuagcggauggaauc

SEQ ID NO: 329307 - RNA, 15 nt, Human herpesvirus 6B
aaaugaacgacuuau

SEQ ID NO: 329308 - RNA, 13 nt, Human herpesvirus 6B
aaaugaccagaga

SEQ ID NO: 329309 - RNA, 22 nt, Human herpesvirus 6B
aaaugaccagagauucuaugua

SEQ ID NO: 329310 - RNA, 21 nt, Human herpesvirus 6B
aaaugaucgccccagacuuau

SEQ ID NO: 329311 - RNA, 13 nt, Human herpesvirus 6B
aaaugaugauuaa

SEQ ID NO: 329312 - RNA, 20 nt, Human herpesvirus 6B
aaaugaugauuaauacauca

SEQ ID NO: 329313 - RNA, 23 nt, Human herpesvirus 6B
aaaugcuacccacauaaaaucac

SEQ ID NO: 329314 - RNA, 14 nt, Human herpesvirus 6B
aaauggaaacugga

SEQ ID NO: 329315 - RNA, 21 nt, Human herpesvirus 6B
aaauguaaacacgaaacugcu

SEQ ID NO: 329316 - RNA, 22 nt, Human herpesvirus 6B
aaauguaaacacgaaacugcuu

SEQ ID NO: 329317 - RNA, 14 nt, Human herpesvirus 6B
aaauguaacucuuu

SEQ ID NO: 329318 - RNA, 12 nt, Human herpesvirus 6B
aaauguagcaaa

SEQ ID NO: 329319 - RNA, 12 nt, Human herpesvirus 6B
aaauguauugaa

SEQ ID NO: 329320 - RNA, 12 nt, Human herpesvirus 6B
aaaugugucuua

SEQ ID NO: 329321 - RNA, 12 nt, Human herpesvirus 6B
aaauuaauucaa

SEQ ID NO: 329322 - RNA, 15 nt, Human herpesvirus 6B
aaauuacaauuaugc

SEQ ID NO: 329323 - RNA, 12 nt, Human herpesvirus 6B
aaauuacauaag

SEQ ID NO: 329324 - RNA, 17 nt, Human herpesvirus 6B
aaauuaucgucccuguc

SEQ ID NO: 329325 - RNA, 21 nt, Human herpesvirus 6B
aaauucaaacuccgaaaaagg

SEQ ID NO: 329326 - RNA, 15 nt, Human herpesvirus 6B
aaauucucugcaugu

SEQ ID NO: 329327 - RNA, 18 nt, Human herpesvirus 6B
aaauucuuuugugcuuau

SEQ ID NO: 329328 - RNA, 16 nt, Human herpesvirus 6B
aaauugaauacagcug

SEQ ID NO: 329329 - RNA, 12 nt, Human herpesvirus 6B
aaauugguuuau

SEQ ID NO: 329330 - RNA, 13 nt, Human herpesvirus 6B
aaauugugucaca

SEQ ID NO: 329331 - RNA, 22 nt, Human herpesvirus 6B
aaauuuaauaaaguuugucaca

SEQ ID NO: 329332 - RNA, 13 nt, Human herpesvirus 6B
aaauuuacucucc

SEQ ID NO: 329333 - RNA, 23 nt, Human herpesvirus 6B
aaauuuacucuccacccaucucc

SEQ ID NO: 329334 - RNA, 22 nt, Human herpesvirus 6B
aaauuugugcgaauuguguugc

SEQ ID NO: 329335 - RNA, 18 nt, Human herpesvirus 6B
aaauuuguucgcacaaaa

SEQ ID NO: 329336 - RNA, 16 nt, Human herpesvirus 6B
aaauuuuacaaugagu

SEQ ID NO: 329337 - RNA, 13 nt, Human herpesvirus 6B
aaauuuuaccuau

SEQ ID NO: 329338 - RNA, 13 nt, Human herpesvirus 6B
aaauuuuccaaac

SEQ ID NO: 329339 - RNA, 13 nt, Human herpesvirus 6B
aaauuuugucacu

SEQ ID NO: 329340 - RNA, 18 nt, Human herpesvirus 6B
aaauuuugucacucucaa

SEQ ID NO: 329341 - RNA, 18 nt, Human herpesvirus 6B
aaauuuuuauuaguuaaa

SEQ ID NO: 329342 - RNA, 15 nt, Human herpesvirus 6B
aacaaagagcuuuaa

SEQ ID NO: 329343 - RNA, 19 nt, Human herpesvirus 6B
aacaaauucuuacaaguau

SEQ ID NO: 329344 - RNA, 19 nt, Human herpesvirus 6B
aacaacugccgccauauua

SEQ ID NO: 329345 - RNA, 18 nt, Human herpesvirus 6B
aacaaggaacgauaugcu

SEQ ID NO: 329346 - RNA, 21 nt, Human herpesvirus 6B
aacaaggaacgauaugcugcc

SEQ ID NO: 329347 - RNA, 20 nt, Human herpesvirus 6B
aacaauguccaauuacucaa

SEQ ID NO: 329348 - RNA, 13 nt, Human herpesvirus 6B
aacacaccugccu

SEQ ID NO: 329349 - RNA, 16 nt, Human herpesvirus 6B
aacaccaguacuucaa

SEQ ID NO: 329350 - RNA, 22 nt, Human herpesvirus 6B
aacaccguccuucguucuuuca

SEQ ID NO: 329351 - RNA, 16 nt, Human herpesvirus 6B
aacacgaaaugaacga

SEQ ID NO: 329352 - RNA, 15 nt, Human herpesvirus 6B
aacagauuuuacuuc

SEQ ID NO: 329353 - RNA, 23 nt, Human herpesvirus 6B
aacagcuaauggcguauagcgca

SEQ ID NO: 329354 - RNA, 20 nt, Human herpesvirus 6B
aacaguaggagacgacggaa

SEQ ID NO: 329355 - RNA, 11 nt, Human herpesvirus 6B
aacagugacag

SEQ ID NO: 329356 - RNA, 17 nt, Human herpesvirus 6B
aacaguuuaccuaucaa

SEQ ID NO: 329357 - RNA, 15 nt, Human herpesvirus 6B
aacauacagaugugu

SEQ ID NO: 329358 - RNA, 21 nt, Human herpesvirus 6B
aacaucgucauaccgauccca

SEQ ID NO: 329359 - RNA, 12 nt, Human herpesvirus 6B
aacaugacaaau

SEQ ID NO: 329360 - RNA, 21 nt, Human herpesvirus 6B
aacaugacaaaucugaaugua

SEQ ID NO: 329361 - RNA, 14 nt, Human herpesvirus 6B
aacaugaucgucau

SEQ ID NO: 329362 - RNA, 19 nt, Human herpesvirus 6B
aacauguaacuaagcagga

SEQ ID NO: 329363 - RNA, 13 nt, Human herpesvirus 6B
aacauucagaaaa

SEQ ID NO: 329364 - RNA, 18 nt, Human herpesvirus 6B
aacauucggaauuucuuc

SEQ ID NO: 329365 - RNA, 16 nt, Human herpesvirus 6B
aacauuuuuauuccaa

SEQ ID NO: 329366 - RNA, 14 nt, Human herpesvirus 6B
aaccacguuuuucc

SEQ ID NO: 329367 - RNA, 20 nt, Human herpesvirus 6B
aaccaguauuaaugucuucg

SEQ ID NO: 329368 - RNA, 23 nt, Human herpesvirus 6B
aaccaucccuaucucucgcugac

SEQ ID NO: 329369 - RNA, 15 nt, Human herpesvirus 6B
aaccauguuuuuacu

SEQ ID NO: 329370 - RNA, 13 nt, Human herpesvirus 6B
aaccauucugcag

SEQ ID NO: 329371 - RNA, 18 nt, Human herpesvirus 6B
aacccauaggugauuuca

SEQ ID NO: 329372 - RNA, 17 nt, Human herpesvirus 6B
aacccaugcugccuuug

SEQ ID NO: 329373 - RNA, 22 nt, Human herpesvirus 6B
aacccaugcugccuuuggacac

SEQ ID NO: 329374 - RNA, 17 nt, Human herpesvirus 6B
aacccuagacacacaga

SEQ ID NO: 329375 - RNA, 18 nt, Human herpesvirus 6B
aacccuagacacacagaa

SEQ ID NO: 329376 - RNA, 21 nt, Human herpesvirus 6B
aaccgcaguuccuguuuuucu

SEQ ID NO: 329377 - RNA, 17 nt, Human herpesvirus 6B
aaccguugcgauuuccu

SEQ ID NO: 329378 - RNA, 17 nt, Human herpesvirus 6B
aaccucaaaaaugcaca

SEQ ID NO: 329379 - RNA, 19 nt, Human herpesvirus 6B
aaccuccucagaugcaaug

SEQ ID NO: 329380 - RNA, 13 nt, Human herpesvirus 6B
aaccugauuucag

SEQ ID NO: 329381 - RNA, 22 nt, Human herpesvirus 6B
aaccuucccuaucacaauacac

SEQ ID NO: 329382 - RNA, 16 nt, Human herpesvirus 6B
aaccuucguucugaua

SEQ ID NO: 329383 - RNA, 19 nt, Human herpesvirus 6B
aacgacaaacauccaaagc

SEQ ID NO: 329384 - RNA, 15 nt, Human herpesvirus 6B
aacgacuuauuacaa

SEQ ID NO: 329385 - RNA, 17 nt, Human herpesvirus 6B
aacgacuuauuacaauu

SEQ ID NO: 329386 - RNA, 18 nt, Human herpesvirus 6B
aacgagaaagaaaaccag

SEQ ID NO: 329387 - RNA, 15 nt, Human herpesvirus 6B
aacgauagaguucau

SEQ ID NO: 329388 - RNA, 15 nt, Human herpesvirus 6B
aacgcgccagacguu

SEQ ID NO: 329389 - RNA, 20 nt, Human herpesvirus 6B
aacgcggcaaccgcaguucc

SEQ ID NO: 329390 - RNA, 16 nt, Human herpesvirus 6B
aacggagaaaacuaua

SEQ ID NO: 329391 - RNA, 21 nt, Human herpesvirus 6B
aacggagcaaccgcaguuccu

SEQ ID NO: 329392 - RNA, 24 nt, Human herpesvirus 6B
aacgucuucaaauuuacucuccac

SEQ ID NO: 329393 - RNA, 21 nt, Human herpesvirus 6B
aacgugaaucuucgucgggaa

SEQ ID NO: 329394 - RNA, 17 nt, Human herpesvirus 6B
aacguugaaaaaucucu

SEQ ID NO: 329395 - RNA, 13 nt, Human herpesvirus 6B
aacuaacaugaca

SEQ ID NO: 329396 - RNA, 21 nt, Human herpesvirus 6B
aacuaacaugacaaaucugaa

SEQ ID NO: 329397 - RNA, 18 nt, Human herpesvirus 6B
aacuaagauugugcaguu

SEQ ID NO: 329398 - RNA, 12 nt, Human herpesvirus 6B
aacuacacuuau

SEQ ID NO: 329399 - RNA, 13 nt, Human herpesvirus 6B
aacuaugugcauu

SEQ ID NO: 329400 - RNA, 21 nt, Human herpesvirus 6B
aacuauuaauaaaccgcuuaa

SEQ ID NO: 329401 - RNA, 12 nt, Human herpesvirus 6B
aacuauuuaaca

SEQ ID NO: 329402 - RNA, 13 nt, Human herpesvirus 6B
aacuccacgaucu

SEQ ID NO: 329403 - RNA, 14 nt, Human herpesvirus 6B
aacucccagcauuu

SEQ ID NO: 329404 - RNA, 14 nt, Human herpesvirus 6B
aacuccccauucaa

SEQ ID NO: 329405 - RNA, 19 nt, Human herpesvirus 6B
aacuccuuacucauuuuaa

SEQ ID NO: 329406 - RNA, 22 nt, Human herpesvirus 6B
aacucgccaauuaaaguuuuca

SEQ ID NO: 329407 - RNA, 22 nt, Human herpesvirus 6B
aacucguuaauaguuacuuuga

SEQ ID NO: 329408 - RNA, 18 nt, Human herpesvirus 6B
aacucuaaaagcugcuaa

SEQ ID NO: 329409 - RNA, 19 nt, Human herpesvirus 6B
aacucuuucuauuauguaa

SEQ ID NO: 329410 - RNA, 20 nt, Human herpesvirus 6B
aacucuuucuauuauguaaa

SEQ ID NO: 329411 - RNA, 19 nt, Human herpesvirus 6B
acguucuuugaacagugac

SEQ ID NO: 329412 - RNA, 17 nt, Human herpesvirus 6B
acguugaaaaaucucua

SEQ ID NO: 329413 - RNA, 16 nt, Human herpesvirus 6B
acguugcagucugcuc

SEQ ID NO: 329414 - RNA, 21 nt, Human herpesvirus 6B
acguuugaguugggacuugga

SEQ ID NO: 329415 - RNA, 22 nt, Human herpesvirus 6B
acguuugaguugggacuuggaa

SEQ ID NO: 329416 - RNA, 17 nt, Human herpesvirus 6B
acuaaaacaucagauga

SEQ ID NO: 329417 - RNA, 14 nt, Human herpesvirus 6B
acuaaaucaugucu

SEQ ID NO: 329418 - RNA, 14 nt, Human herpesvirus 6B
acuaagauugugca

SEQ ID NO: 329419 - RNA, 17 nt, Human herpesvirus 6B
acuaagauugugcaguu

SEQ ID NO: 329420 - RNA, 17 nt, Human herpesvirus 6B
acuaaugcggaacauug

SEQ ID NO: 329421 - RNA, 12 nt, Human herpesvirus 6B
acuaauguggau

SEQ ID NO: 329422 - RNA, 15 nt, Human herpesvirus 6B
acuacagcuaagauu

SEQ ID NO: 329423 - RNA, 17 nt, Human herpesvirus 6B
acuacagcuaagauuaa

SEQ ID NO: 329424 - RNA, 15 nt, Human herpesvirus 6B
acuaccgauaaaucc

SEQ ID NO: 329425 - RNA, 15 nt, Human herpesvirus 6B
acuacgugucucagu

SEQ ID NO: 329426 - RNA, 11 nt, Human herpesvirus 6B
acuacuaaagc

SEQ ID NO: 329427 - RNA, 16 nt, Human herpesvirus 6B
acuagacaucaacucc

SEQ ID NO: 329428 - RNA, 19 nt, Human herpesvirus 6B
acuagauuuaggguuuauc

SEQ ID NO: 329429 - RNA, 15 nt, Human herpesvirus 6B
acuaguaagaacauu

SEQ ID NO: 329430 - RNA, 18 nt, Human herpesvirus 6B
acuauaacuuuucuauca

SEQ ID NO: 329431 - RNA, 14 nt, Human herpesvirus 6B
acuauagacgccau

SEQ ID NO: 329432 - RNA, 16 nt, Human herpesvirus 6B
acuauaggaugacuga

SEQ ID NO: 329433 - RNA, 17 nt, Human herpesvirus 6B
acuauauuaucuuucau

SEQ ID NO: 329434 - RNA, 14 nt, Human herpesvirus 6B
acuaucugagacag

SEQ ID NO: 329435 - RNA, 16 nt, Human herpesvirus 6B
acuaucugagacaguc

SEQ ID NO: 329436 - RNA, 16 nt, Human herpesvirus 6B
acuauggaguccuugu

SEQ ID NO: 329437 - RNA, 14 nt, Human herpesvirus 6B
acuaugugcauucc

SEQ ID NO: 329438 - RNA, 16 nt, Human herpesvirus 6B
acuaugugcauuccga

SEQ ID NO: 329439 - RNA, 17 nt, Human herpesvirus 6B
acuauuaauaaaccgcu

SEQ ID NO: 329440 - RNA, 22 nt, Human herpesvirus 6B
acuauucgaagacauuaauacu

SEQ ID NO: 329441 - RNA, 18 nt, Human herpesvirus 6B
acuauuuaacauccaaaa

SEQ ID NO: 329442 - RNA, 14 nt, Human herpesvirus 6B
acucaauucugaaa

SEQ ID NO: 329443 - RNA, 23 nt, Human herpesvirus 6B
acucagauucgcaagacuacaga

SEQ ID NO: 329444 - RNA, 16 nt, Human herpesvirus 6B
acucaucuuucugaga

SEQ ID NO: 329445 - RNA, 15 nt, Human herpesvirus 6B
acucauuugcaauug

SEQ ID NO: 329446 - RNA, 17 nt, Human herpesvirus 6B
acucauuuuaacauuuu

SEQ ID NO: 329447 - RNA, 18 nt, Human herpesvirus 6B
acuccaacgcacaugcua

SEQ ID NO: 329448 - RNA, 21 nt, Human herpesvirus 6B
acuccccauucaacauccuau

SEQ ID NO: 329449 - RNA, 17 nt, Human herpesvirus 6B
acuccgauuaucuuagu

SEQ ID NO: 329450 - RNA, 21 nt, Human herpesvirus 6B
acuccggccuaggacguacag

SEQ ID NO: 329451 - RNA, 19 nt, Human herpesvirus 6B
acuccgggggaaaccucaa

SEQ ID NO: 329452 - RNA, 18 nt, Human herpesvirus 6B
acucggaagaaaagcuau

SEQ ID NO: 329453 - RNA, 18 nt, Human herpesvirus 6B
acucggucuacuguguau

SEQ ID NO: 329454 - RNA, 21 nt, Human herpesvirus 6B
acucgugccaguucacacaga

SEQ ID NO: 329455 - RNA, 18 nt, Human herpesvirus 6B
acucuaaaaccugcuaac

SEQ ID NO: 329456 - RNA, 22 nt, Human herpesvirus 6B
acucugaagaauaaaaguccau

SEQ ID NO: 329457 - RNA, 17 nt, Human herpesvirus 6B
acucuggcugaaggaau

SEQ ID NO: 329458 - RNA, 19 nt, Human herpesvirus 6B
acucuucucuaaaaacuaa

SEQ ID NO: 329459 - RNA, 16 nt, Human herpesvirus 6B
acucuugacauagcaa

SEQ ID NO: 329460 - RNA, 21 nt, Human herpesvirus 6B
acugaaacuccacgaucuaca

SEQ ID NO: 329461 - RNA, 22 nt, Human herpesvirus 6B
acugaagcaaagcacccugcac

SEQ ID NO: 329462 - RNA, 17 nt, Human herpesvirus 6B
acugacaaauacgagag

SEQ ID NO: 329463 - RNA, 22 nt, Human herpesvirus 6B
acugcaguccagaaguccuuca

SEQ ID NO: 329464 - RNA, 16 nt, Human herpesvirus 6B
acugcaugcuaauaaa

SEQ ID NO: 329465 - RNA, 12 nt, Human herpesvirus 6B
acugcauuucau

SEQ ID NO: 329466 - RNA, 15 nt, Human herpesvirus 6B
acugccgccauauua

SEQ ID NO: 329467 - RNA, 20 nt, Human herpesvirus 6B
acugcgguuggggucuuucc

SEQ ID NO: 329468 - RNA, 18 nt, Human herpesvirus 6B
acugcuggcugagauuca

SEQ ID NO: 329469 - RNA, 14 nt, Human herpesvirus 6B
acugcuuaacuugc

SEQ ID NO: 329470 - RNA, 17 nt, Human herpesvirus 6B
acugguucaggauuugu

SEQ ID NO: 329471 - RNA, 24 nt, Human herpesvirus 6B
acugguugaguuuccugcaacucu

SEQ ID NO: 329472 - RNA, 21 nt, Human herpesvirus 6B
acugugaggugauuugaacag

SEQ ID NO: 329473 - RNA, 13 nt, Human herpesvirus 6B
acuguuuacuuaa

SEQ ID NO: 329474 - RNA, 13 nt, Human herpesvirus 6B
acuuaacuuauca

SEQ ID NO: 329475 - RNA, 20 nt, Human herpesvirus 6B
acuuaauaacuacacuuaua

SEQ ID NO: 329476 - RNA, 15 nt, Human herpesvirus 6B
acuuacagagcuuuu

SEQ ID NO: 329477 - RNA, 17 nt, Human herpesvirus 6B
acuuacagagcuuuuaa

SEQ ID NO: 329478 - RNA, 14 nt, Human herpesvirus 6B
acuuauaagucauc

SEQ ID NO: 329479 - RNA, 19 nt, Human herpesvirus 6B
acuuauaagucaucauaca

SEQ ID NO: 329480 - RNA, 18 nt, Human herpesvirus 6B
acuuauauauauccgaaa

SEQ ID NO: 329481 - RNA, 18 nt, Human herpesvirus 6B
acuuaucaacuauacuua

SEQ ID NO: 329482 - RNA, 20 nt, Human herpesvirus 6B
acuucauacccgauguucuc

SEQ ID NO: 329483 - RNA, 18 nt, Human herpesvirus 6B
acuuccguaucacauuua

SEQ ID NO: 329484 - RNA, 16 nt, Human herpesvirus 6B
acuucuccgcauguau

SEQ ID NO: 329485 - RNA, 19 nt, Human herpesvirus 6B
acuugaucacaacauaaaa

SEQ ID NO: 329486 - RNA, 22 nt, Human herpesvirus 6B
acuuggaagacggaaccaugau

SEQ ID NO: 329487 - RNA, 21 nt, Human herpesvirus 6B
acuuggagcuauaugcaucuc

SEQ ID NO: 329488 - RNA, 23 nt, Human herpesvirus 6B
acuuuaaagucguuuuggagaaa

SEQ ID NO: 329489 - RNA, 17 nt, Human herpesvirus 6B
acuuuaucuuuugcaaa

SEQ ID NO: 329490 - RNA, 22 nt, Human herpesvirus 6B
acuuucauaggaaguaaauaca

SEQ ID NO: 329491 - RNA, 22 nt, Human herpesvirus 6B
acuuucgaucacaaacugucac

SEQ ID NO: 329492 - RNA, 18 nt, Human herpesvirus 6B
acuuugaguuguauuuaa

SEQ ID NO: 329493 - RNA, 18 nt, Human herpesvirus 6B
acuuugauguuaacucag

SEQ ID NO: 329494 - RNA, 18 nt, Human herpesvirus 6B
acuuugccgcgagauuuu

SEQ ID NO: 329495 - RNA, 18 nt, Human herpesvirus 6B
acuuuggauuuugaugua

SEQ ID NO: 329496 - RNA, 22 nt, Human herpesvirus 6B
acuuugugcccauacuuguaaa

SEQ ID NO: 329497 - RNA, 22 nt, Human herpesvirus 6B
acuuuuccagugagaacauaua

SEQ ID NO: 329498 - RNA, 19 nt, Human herpesvirus 6B
agaaaaaaaaaaacaaaga

SEQ ID NO: 329499 - RNA, 21 nt, Human herpesvirus 6B
agaaaaaacaucguaauggca

SEQ ID NO: 329500 - RNA, 23 nt, Human herpesvirus 6B
agaaaaacuauagccuagcaagc

SEQ ID NO: 329501 - RNA, 17 nt, Human herpesvirus 6B
agcaauucuuauuuacc

SEQ ID NO: 329502 - RNA, 11 nt, Human herpesvirus 6B
agcacaccucg

SEQ ID NO: 329503 - RNA, 21 nt, Human herpesvirus 6B
agcacaccucgcccgacauaa

SEQ ID NO: 329504 - RNA, 14 nt, Human herpesvirus 6B
agcacccugcacaa

SEQ ID NO: 329505 - RNA, 12 nt, Human herpesvirus 6B
agcacgucuucu

SEQ ID NO: 329506 - RNA, 15 nt, Human herpesvirus 6B
agcagaaguuuaccu

SEQ ID NO: 329507 - RNA, 21 nt, Human herpesvirus 6B
agcagaaguuuaccuagagau

SEQ ID NO: 329508 - RNA, 22 nt, Human herpesvirus 6B
agcagaggccggcacauacaca

SEQ ID NO: 329509 - RNA, 17 nt, Human herpesvirus 6B
agcaucucaaaaaacau

SEQ ID NO: 329510 - RNA, 15 nt, Human herpesvirus 6B
agcaugaacucucac

SEQ ID NO: 329511 - RNA, 11 nt, Human herpesvirus 6B
agcaugcauug

SEQ ID NO: 329512 - RNA, 17 nt, Human herpesvirus 6B
agcauucuuaucaaauc

SEQ ID NO: 329513 - RNA, 15 nt, Human herpesvirus 6B
agccaaaaaaguuua

SEQ ID NO: 329514 - RNA, 13 nt, Human herpesvirus 6B
agccaacauacac

SEQ ID NO: 329515 - RNA, 12 nt, Human herpesvirus 6B
agccagacaucu

SEQ ID NO: 329516 - RNA, 14 nt, Human herpesvirus 6B
agccaugacaagaa

SEQ ID NO: 329517 - RNA, 16 nt, Human herpesvirus 6B
agcccggaagugugau

SEQ ID NO: 329518 - RNA, 21 nt, Human herpesvirus 6B
agcccuucaccgucucugaag

SEQ ID NO: 329519 - RNA, 14 nt, Human herpesvirus 6B
agccgugauguuuu

SEQ ID NO: 329520 - RNA, 23 nt, Human herpesvirus 6B
agccuagcgauuaguuugugcag

SEQ ID NO: 329521 - RNA, 15 nt, Human herpesvirus 6B
agccuauuaagcagc

SEQ ID NO: 329522 - RNA, 21 nt, Human herpesvirus 6B
agccuguccgugacacacaga

SEQ ID NO: 329523 - RNA, 16 nt, Human herpesvirus 6B
agccuuaucgaaagac

SEQ ID NO: 329524 - RNA, 20 nt, Human herpesvirus 6B
agccuucgauaauaauucag

SEQ ID NO: 329525 - RNA, 12 nt, Human herpesvirus 6B
agccuucugucu

SEQ ID NO: 329526 - RNA, 13 nt, Human herpesvirus 6B
agccuuuccccag

SEQ ID NO: 329527 - RNA, 13 nt, Human herpesvirus 6B
acaaagagaucag

SEQ ID NO: 329528 - RNA, 19 nt, Human herpesvirus 6B
acaaagauuacguccacau

SEQ ID NO: 329529 - RNA, 17 nt, Human herpesvirus 6B
acaaagcuuuacuuaca

SEQ ID NO: 329530 - RNA, 12 nt, Human herpesvirus 6B
acaaaguaauau

SEQ ID NO: 329531 - RNA, 17 nt, Human herpesvirus 6B
acaaaguuuaaguucuc

SEQ ID NO: 329532 - RNA, 19 nt, Human herpesvirus 6B
acaaaguuuaaguucucac

SEQ ID NO: 329533 - RNA, 23 nt, Human herpesvirus 6B
acaaauaaaaaauuccugaauaa

SEQ ID NO: 329534 - RNA, 19 nt, Human herpesvirus 6B
acaaaucuguaagauuaaa

SEQ ID NO: 329535 - RNA, 22 nt, Human herpesvirus 6B
acaacgauagaguucaucuaac

SEQ ID NO: 329536 - RNA, 23 nt, Human herpesvirus 6B
acaacgguguggagacaccucaa

SEQ ID NO: 329537 - RNA, 21 nt, Human herpesvirus 6B
acaacgugcucgugaaaauau

SEQ ID NO: 329538 - RNA, 14 nt, Human herpesvirus 6B
acaagaacagagag

SEQ ID NO: 329539 - RNA, 16 nt, Human herpesvirus 6B
acaagagugcacgaaa

SEQ ID NO: 329540 - RNA, 14 nt, Human herpesvirus 6B
acaagcaugcauug

SEQ ID NO: 329541 - RNA, 13 nt, Human herpesvirus 6B
acaagcuguccau

SEQ ID NO: 329542 - RNA, 18 nt, Human herpesvirus 6B
acaagcuguccaucuuca

SEQ ID NO: 329543 - RNA, 20 nt, Human herpesvirus 6B
acaaggcggagauucaauac

SEQ ID NO: 329544 - RNA, 18 nt, Human herpesvirus 6B
acaagguacacaauacac

SEQ ID NO: 329545 - RNA, 22 nt, Human herpesvirus 6B
acaaguauguuuuguacaaagg

SEQ ID NO: 329546 - RNA, 23 nt, Human herpesvirus 6B
acaaguuaacggagagucuucau

SEQ ID NO: 329547 - RNA, 20 nt, Human herpesvirus 6B
acaaguuucuuuugugacua

SEQ ID NO: 329548 - RNA, 21 nt, Human herpesvirus 6B
acaauaacaauuauucaccau

SEQ ID NO: 329549 - RNA, 14 nt, Human herpesvirus 6B
acaauccuaauuca

SEQ ID NO: 329550 - RNA, 19 nt, Human herpesvirus 6B
acaaugaguuuuuugcaau

SEQ ID NO: 329551 - RNA, 22 nt, Human herpesvirus 6B
acaaugauacuacguguaaugu

SEQ ID NO: 329552 - RNA, 16 nt, Human herpesvirus 6B
acaaugcuuugggacc

SEQ ID NO: 329553 - RNA, 15 nt, Human herpesvirus 6B
acaauguccaauuac

SEQ ID NO: 329554 - RNA, 18 nt, Human herpesvirus 6B
acaauguccaauuacuca

SEQ ID NO: 329555 - RNA, 19 nt, Human herpesvirus 6B
acaauguccaauuacucaa

SEQ ID NO: 329556 - RNA, 13 nt, Human herpesvirus 6B
acaauucucucaa

SEQ ID NO: 329557 - RNA, 18 nt, Human herpesvirus 6B
acacaaaaagacucuauu

SEQ ID NO: 329558 - RNA, 11 nt, Human herpesvirus 6B
acacaauacac

SEQ ID NO: 329559 - RNA, 15 nt, Human herpesvirus 6B
acacaauacacagua

SEQ ID NO: 329560 - RNA, 13 nt, Human herpesvirus 6B
acacacagaauac

SEQ ID NO: 329561 - RNA, 12 nt, Human herpesvirus 6B
acacaccaucaa

SEQ ID NO: 329562 - RNA, 13 nt, Human herpesvirus 6B
acacaccugccua

SEQ ID NO: 329563 - RNA, 21 nt, Human herpesvirus 6B
acacaguagaccgaguaucac

SEQ ID NO: 329564 - RNA, 20 nt, Human herpesvirus 6B
acacaucgagcccugcucua

SEQ ID NO: 329565 - RNA, 18 nt, Human herpesvirus 6B
acacaugccgcaagauac

SEQ ID NO: 329566 - RNA, 19 nt, Human herpesvirus 6B
acacauucuccuuguaaaa

SEQ ID NO: 329567 - RNA, 19 nt, Human herpesvirus 6B
acacauuuuagcuauccau

SEQ ID NO: 329568 - RNA, 15 nt, Human herpesvirus 6B
acaccaaugaucaca

SEQ ID NO: 329569 - RNA, 14 nt, Human herpesvirus 6B
acaccagcauguca

SEQ ID NO: 329570 - RNA, 14 nt, Human herpesvirus 6B
acaccaggaguuua

SEQ ID NO: 329571 - RNA, 15 nt, Human herpesvirus 6B
acaccaggaguuuaa

SEQ ID NO: 329572 - RNA, 15 nt, Human herpesvirus 6B
acaccaguacuucaa

SEQ ID NO: 329573 - RNA, 19 nt, Human herpesvirus 6B
acaccaguacuucaagaaa

SEQ ID NO: 329574 - RNA, 13 nt, Human herpesvirus 6B
acaccaucaauuu

SEQ ID NO: 329575 - RNA, 23 nt, Human herpesvirus 6B
acaccaucaauuuuauucaacca

SEQ ID NO: 329576 - RNA, 21 nt, Human herpesvirus 6B
acacccauuuccggaguugca

SEQ ID NO: 329577 - RNA, 13 nt, Human herpesvirus 6B
acacgaaacugcu

SEQ ID NO: 329578 - RNA, 13 nt, Human herpesvirus 6B
acacgauuuauca

SEQ ID NO: 329579 - RNA, 14 nt, Human herpesvirus 6B
acacgccgucuuca

SEQ ID NO: 329580 - RNA, 18 nt, Human herpesvirus 6B
acacgcuaaaaacagacg

SEQ ID NO: 329581 - RNA, 21 nt, Human herpesvirus 6B
acacguauguacuccggggga

SEQ ID NO: 329582 - RNA, 15 nt, Human herpesvirus 6B
acacucauuugcaau

SEQ ID NO: 329583 - RNA, 20 nt, Human herpesvirus 6B
acacugacuaaacguacauc

SEQ ID NO: 329584 - RNA, 18 nt, Human herpesvirus 6B
acacugcgaauccgucuc

SEQ ID NO: 329585 - RNA, 22 nt, Human herpesvirus 6B
acagaaaaaaaaaaacaaagag

SEQ ID NO: 329586 - RNA, 13 nt, Human herpesvirus 6B
acagaaaggccau

SEQ ID NO: 329587 - RNA, 23 nt, Human herpesvirus 6B
acagaaaucguaccggucugcaa

SEQ ID NO: 329588 - RNA, 23 nt, Human herpesvirus 6B
acagaaguuucggcaacugaauu

SEQ ID NO: 329589 - RNA, 13 nt, Human herpesvirus 6B
acagacauugcuu

SEQ ID NO: 329590 - RNA, 17 nt, Human herpesvirus 6B
acagacgaaucacaucc

SEQ ID NO: 329591 - RNA, 15 nt, Human herpesvirus 6B
acagagccagacauc

SEQ ID NO: 329592 - RNA, 21 nt, Human herpesvirus 6B
acagaugaggaggagggaccc

SEQ ID NO: 329593 - RNA, 19 nt, Human herpesvirus 6B
acagauggcacugaaucag

SEQ ID NO: 329594 - RNA, 16 nt, Human herpesvirus 6B
acagauuuuacuucua

SEQ ID NO: 329595 - RNA, 16 nt, Human herpesvirus 6B
acagcaugaacucuca

SEQ ID NO: 329596 - RNA, 17 nt, Human herpesvirus 6B
acagcaugaacucucac

SEQ ID NO: 329597 - RNA, 23 nt, Human herpesvirus 6B
acagcaugaacucucacggccau

SEQ ID NO: 329598 - RNA, 17 nt, Human herpesvirus 6B
acagcgagacaauaaca

SEQ ID NO: 329599 - RNA, 16 nt, Human herpesvirus 6B
acagcuuuauucccau

SEQ ID NO: 329600 - RNA, 23 nt, Human herpesvirus 6B
acaggauuccccucauacaucca

SEQ ID NO: 329601 - RNA, 19 nt, Human herpesvirus 6B
acaggccacauuagcugcu

SEQ ID NO: 329602 - RNA, 16 nt, Human herpesvirus 6B
acaggcggagcugugu

SEQ ID NO: 329603 - RNA, 21 nt, Human herpesvirus 6B
acagguaagcagcaaaacaac

SEQ ID NO: 329604 - RNA, 17 nt, Human herpesvirus 6B
acaguaaaacauguagu

SEQ ID NO: 329605 - RNA, 13 nt, Human herpesvirus 6B
acaguaaaucucu

SEQ ID NO: 329606 - RNA, 14 nt, Human herpesvirus 6B
acaguauuuacuga

SEQ ID NO: 329607 - RNA, 18 nt, Human herpesvirus 6B
acagucaauuucuaaaga

SEQ ID NO: 329608 - RNA, 18 nt, Human herpesvirus 6B
acagucuauauguccgau

SEQ ID NO: 329609 - RNA, 20 nt, Human herpesvirus 6B
acagugaauaucgaguuuag

SEQ ID NO: 329610 - RNA, 13 nt, Human herpesvirus 6B
acagugacuuuca

SEQ ID NO: 329611 - RNA, 16 nt, Human herpesvirus 6B
acagugauuaggaugu

SEQ ID NO: 329612 - RNA, 19 nt, Human herpesvirus 6B
acaguggauguuagaucac

SEQ ID NO: 329613 - RNA, 16 nt, Human herpesvirus 6B
acaguguuuccaauau

SEQ ID NO: 329614 - RNA, 12 nt, Human herpesvirus 6B
acaguuuaccua

SEQ ID NO: 329615 - RNA, 14 nt, Human herpesvirus 6B
acaguuucucgaaa

SEQ ID NO: 329616 - RNA, 14 nt, Human herpesvirus 6B
acauaaaaaaacac

SEQ ID NO: 329617 - RNA, 21 nt, Human herpesvirus 6B
acauaauucggucaccaacau

SEQ ID NO: 329618 - RNA, 13 nt, Human herpesvirus 6B
acauacagaugug

SEQ ID NO: 329619 - RNA, 12 nt, Human herpesvirus 6B
acauacuuuccc

SEQ ID NO: 329620 - RNA, 21 nt, Human herpesvirus 6B
acauacuuuccccauacugug

SEQ ID NO: 329621 - RNA, 22 nt, Human herpesvirus 6B
acauacuuuccccauacugugu

SEQ ID NO: 329622 - RNA, 15 nt, Human herpesvirus 6B
acauagcaauucuua

SEQ ID NO: 329623 - RNA, 17 nt, Human herpesvirus 6B
acauaguggcuaugaag

SEQ ID NO: 329624 - RNA, 20 nt, Human herpesvirus 6B
acaucaacuauuuaacaucc

SEQ ID NO: 329625 - RNA, 19 nt, Human herpesvirus 6B
acaucacgucccauucaca

SEQ ID NO: 329626 - RNA, 15 nt, Human herpesvirus 6B
acaucauauccugaa

SEQ ID NO: 329627 - RNA, 22 nt, Human herpesvirus 6B
acaucccguaugaaauauuuaa

SEQ ID NO: 329628 - RNA, 14 nt, Human herpesvirus 6B
acaucgauccaaaa

SEQ ID NO: 329629 - RNA, 17 nt, Human herpesvirus 6B
acaucgcuaaguguuga

SEQ ID NO: 329630 - RNA, 20 nt, Human herpesvirus 6B
acaucgcuaaguguugacug

SEQ ID NO: 329631 - RNA, 12 nt, Human herpesvirus 6B
acaucgcuccau

SEQ ID NO: 329632 - RNA, 15 nt, Human herpesvirus 6B
acaucuauguguaua

SEQ ID NO: 329633 - RNA, 23 nt, Human herpesvirus 6B
acaucuuaacagacuacuuuuaa

SEQ ID NO: 329634 - RNA, 16 nt, Human herpesvirus 6B
acaugaaaacauucag

SEQ ID NO: 329635 - RNA, 17 nt, Human herpesvirus 6B
acaugaaaacauucaga

SEQ ID NO: 329636 - RNA, 16 nt, Human herpesvirus 6B
acaugagcuaaaccau

SEQ ID NO: 329637 - RNA, 11 nt, Human herpesvirus 6B
acaugccacag

SEQ ID NO: 329638 - RNA, 20 nt, Human herpesvirus 6B
acaugccgcaagauacuggu

SEQ ID NO: 329639 - RNA, 15 nt, Human herpesvirus 6B
acaugcuucacaucu

SEQ ID NO: 329640 - RNA, 16 nt, Human herpesvirus 6B
acauguauucuccuca

SEQ ID NO: 329641 - RNA, 20 nt, Human herpesvirus 6B
acaugugguaauacgugaau

SEQ ID NO: 329642 - RNA, 17 nt, Human herpesvirus 6B
acauuauaagacgcuga

SEQ ID NO: 329643 - RNA, 20 nt, Human herpesvirus 6B
acauuauccaggcaugugau

SEQ ID NO: 329644 - RNA, 16 nt, Human herpesvirus 6B
acauucuuaaauucaa

SEQ ID NO: 329645 - RNA, 13 nt, Human herpesvirus 6B
acauugauuccac

SEQ ID NO: 329646 - RNA, 19 nt, Human herpesvirus 6B
acauugauuccaccuuuau

SEQ ID NO: 329647 - RNA, 22 nt, Human herpesvirus 6B
acauugguaauccaugaacuac

SEQ ID NO: 329648 - RNA, 15 nt, Human herpesvirus 6B
acauuucuuacauaa

SEQ ID NO: 329649 - RNA, 10 nt, Human herpesvirus 6B
accaaaacaa

SEQ ID NO: 329650 - RNA, 14 nt, Human herpesvirus 6B
accaaaacaacaac

SEQ ID NO: 329651 - RNA, 12 nt, Human herpesvirus 6B
accaaaacgaga

SEQ ID NO: 329652 - RNA, 12 nt, Human herpesvirus 6B
accaacauguau

SEQ ID NO: 329653 - RNA, 21 nt, Human herpesvirus 6B
accaacauguauucuccucaa

SEQ ID NO: 329654 - RNA, 23 nt, Human herpesvirus 6B
accaacauucggaauuucuuccu

SEQ ID NO: 329655 - RNA, 16 nt, Human herpesvirus 6B
accaacgucaugcaaa

SEQ ID NO: 329656 - RNA, 18 nt, Human herpesvirus 6B
accaacgucaugcaaaac

SEQ ID NO: 329657 - RNA, 23 nt, Human herpesvirus 6B
accaaucuaagauaguuuugcau

SEQ ID NO: 329658 - RNA, 17 nt, Human herpesvirus 6B
accaaucugugcaacac

SEQ ID NO: 329659 - RNA, 22 nt, Human herpesvirus 6B
accacguauggucgucauuuca

SEQ ID NO: 329660 - RNA, 15 nt, Human herpesvirus 6B
accacguuuuuccau

SEQ ID NO: 329661 - RNA, 20 nt, Human herpesvirus 6B
accacguuuuuccaugucuu

SEQ ID NO: 329662 - RNA, 12 nt, Human herpesvirus 6B
accacugugaua

SEQ ID NO: 329663 - RNA, 17 nt, Human herpesvirus 6B
accacugugauaugcaa

SEQ ID NO: 329664 - RNA, 22 nt, Human herpesvirus 6B
accacuuuauuguuaacaugua

SEQ ID NO: 329665 - RNA, 17 nt, Human herpesvirus 6B
accagagauacgugaua

SEQ ID NO: 329666 - RNA, 23 nt, Human herpesvirus 6B
accagcaaguucaucagccauuu

SEQ ID NO: 329667 - RNA, 13 nt, Human herpesvirus 6B
accaggaguuuaa

SEQ ID NO: 329668 - RNA, 20 nt, Human herpesvirus 6B
accaguauuaaugucuucga

SEQ ID NO: 329669 - RNA, 18 nt, Human herpesvirus 6B
accauaacgcguacaaaa

SEQ ID NO: 329670 - RNA, 15 nt, Human herpesvirus 6B
accaucuucagcuca

SEQ ID NO: 329671 - RNA, 21 nt, Human herpesvirus 6B
accaugccauugaauacacgu

SEQ ID NO: 329672 - RNA, 23 nt, Human herpesvirus 6B
accauggcccuacuacaguggau

SEQ ID NO: 329673 - RNA, 15 nt, Human herpesvirus 6B
accauguugcuuaua

SEQ ID NO: 329674 - RNA, 14 nt, Human herpesvirus 6B
accauuacucugug

SEQ ID NO: 329675 - RNA, 16 nt, Human herpesvirus 6B
acccagcagcaaauaa

SEQ ID NO: 329676 - RNA, 20 nt, Human herpesvirus 6B
acccaugcugccuuuggaca

SEQ ID NO: 329677 - RNA, 22 nt, Human herpesvirus 6B
acccauuuccggaguugcagua

SEQ ID NO: 329678 - RNA, 15 nt, Human herpesvirus 6B
accccccacuacuaa

SEQ ID NO: 329679 - RNA, 15 nt, Human herpesvirus 6B
accccccucuugcag

SEQ ID NO: 329680 - RNA, 15 nt, Human herpesvirus 6B
acccgacaugcuuca

SEQ ID NO: 329681 - RNA, 17 nt, Human herpesvirus 6B
acccgauguucucucac

SEQ ID NO: 329682 - RNA, 24 nt, Human herpesvirus 6B
acccuaaaaucugcuaacggagca

SEQ ID NO: 329683 - RNA, 16 nt, Human herpesvirus 6B
acccuagacacacaga

SEQ ID NO: 329684 - RNA, 14 nt, Human herpesvirus 6B
acccuaucgaucca

SEQ ID NO: 329685 - RNA, 17 nt, Human herpesvirus 6B
acccucaagagugcuga

SEQ ID NO: 329686 - RNA, 19 nt, Human herpesvirus 6B
acccucaagagugcugauu

SEQ ID NO: 329687 - RNA, 19 nt, Human herpesvirus 6B
acccuuugcggugcauaac

SEQ ID NO: 329688 - RNA, 19 nt, Human herpesvirus 6B
accgagcgggcuccgucgc

SEQ ID NO: 329689 - RNA, 19 nt, Human herpesvirus 6B
accgcagaggaucuguuca

SEQ ID NO: 329690 - RNA, 22 nt, Human herpesvirus 6B
accgcaguuccuguuuuucuca

SEQ ID NO: 329691 - RNA, 22 nt, Human herpesvirus 6B
accgcaguuucuguuuuucuca

SEQ ID NO: 329692 - RNA, 11 nt, Human herpesvirus 6B
accgcuuaaag

SEQ ID NO: 329693 - RNA, 15 nt, Human herpesvirus 6B
accggaauaaugaaa

SEQ ID NO: 329694 - RNA, 19 nt, Human herpesvirus 6B
accgguacgcuucuuucac

SEQ ID NO: 329695 - RNA, 23 nt, Human herpesvirus 6B
accggucugcaacgaugaguuca

SEQ ID NO: 329696 - RNA, 22 nt, Human herpesvirus 6B
accguaggaagaucaugacaag

SEQ ID NO: 329697 - RNA, 19 nt, Human herpesvirus 6B
accgucuacugcacuuucg

SEQ ID NO: 329698 - RNA, 18 nt, Human herpesvirus 6B
accgucucugaagcaaaa

SEQ ID NO: 329699 - RNA, 16 nt, Human herpesvirus 6B
accguucaccauucca

SEQ ID NO: 329700 - RNA, 17 nt, Human herpesvirus 6B
accguucaccauuccag

SEQ ID NO: 329701 - RNA, 18 nt, Human herpesvirus 6B
accuaaacaccacuugau

SEQ ID NO: 329702 - RNA, 17 nt, Human herpesvirus 6B
accuaauaaacucugcc

SEQ ID NO: 329703 - RNA, 15 nt, Human herpesvirus 6B
accuagagauuacaa

SEQ ID NO: 329704 - RNA, 21 nt, Human herpesvirus 6B
accuauuagcuauaaaaacac

SEQ ID NO: 329705 - RNA, 17 nt, Human herpesvirus 6B
accucugcaauagcaga

SEQ ID NO: 329706 - RNA, 21 nt, Human herpesvirus 6B
accugauuucagaauugaguu

SEQ ID NO: 329707 - RNA, 15 nt, Human herpesvirus 6B
accugccuucacuuu

SEQ ID NO: 329708 - RNA, 16 nt, Human herpesvirus 6B
accugucguaucuuaa

SEQ ID NO: 329709 - RNA, 17 nt, Human herpesvirus 6B
accuguuuccagaauac

SEQ ID NO: 329710 - RNA, 12 nt, Human herpesvirus 6B
accuuauacaga

SEQ ID NO: 329711 - RNA, 14 nt, Human herpesvirus 6B
accuucaggaacaa

SEQ ID NO: 329712 - RNA, 13 nt, Human herpesvirus 6B
acgaaaaagcuau

SEQ ID NO: 329713 - RNA, 17 nt, Human herpesvirus 6B
acgaaaauaaaaaacca

SEQ ID NO: 329714 - RNA, 15 nt, Human herpesvirus 6B
acgaacaaaucucca

SEQ ID NO: 329715 - RNA, 16 nt, Human herpesvirus 6B
acgaauagcauucugu

SEQ ID NO: 329716 - RNA, 18 nt, Human herpesvirus 6B
acgacacacaacacaucu

SEQ ID NO: 329717 - RNA, 23 nt, Human herpesvirus 6B
acgagaacccuaaaaucugcuaa

SEQ ID NO: 329718 - RNA, 17 nt, Human herpesvirus 6B
acgagaacgcucuugcc

SEQ ID NO: 329719 - RNA, 14 nt, Human herpesvirus 6B
acgagaauguaaua

SEQ ID NO: 329720 - RNA, 22 nt, Human herpesvirus 6B
acgagagccuuaucgaaagaca

SEQ ID NO: 329721 - RNA, 17 nt, Human herpesvirus 6B
acgagagcugacugaaa

SEQ ID NO: 329722 - RNA, 16 nt, Human herpesvirus 6B
acgaggcccacuucac

SEQ ID NO: 329723 - RNA, 10 nt, Human herpesvirus 6B
acgaguagau

SEQ ID NO: 329724 - RNA, 15 nt, Human herpesvirus 6B
acgagucgacaaauu

SEQ ID NO: 329725 - RNA, 17 nt, Human herpesvirus 6B
acgauagaguucaucua

SEQ ID NO: 329726 - RNA, 20 nt, Human herpesvirus 6B
acgauaucaauuccugugau

SEQ ID NO: 329727 - RNA, 16 nt, Human herpesvirus 6B
acgaugugucggagac

SEQ ID NO: 329728 - RNA, 16 nt, Human herpesvirus 6B
acgcaccuaaacacca

SEQ ID NO: 329729 - RNA, 15 nt, Human herpesvirus 6B
acgcacuagacauca

SEQ ID NO: 329730 - RNA, 21 nt, Human herpesvirus 6B
acgccgccgccguccuauuca

SEQ ID NO: 329731 - RNA, 21 nt, Human herpesvirus 6B
acgcgacacggugagucgcau

SEQ ID NO: 329732 - RNA, 22 nt, Human herpesvirus 6B
acgcguacaaaaucaaacucac

SEQ ID NO: 329733 - RNA, 15 nt, Human herpesvirus 6B
acgcuaaauuuauca

SEQ ID NO: 329734 - RNA, 12 nt, Human herpesvirus 6B
acgcuaacgaac

SEQ ID NO: 329735 - RNA, 14 nt, Human herpesvirus 6B
acgcuucuaacaau

SEQ ID NO: 329736 - RNA, 15 nt, Human herpesvirus 6B
acggaaagcaucuca

SEQ ID NO: 329737 - RNA, 16 nt, Human herpesvirus 6B
acggaaagcaucucaa

SEQ ID NO: 329738 - RNA, 15 nt, Human herpesvirus 6B
acggaaauccuugac

SEQ ID NO: 329739 - RNA, 21 nt, Human herpesvirus 6B
acggccuggaauacaagacca

SEQ ID NO: 329740 - RNA, 21 nt, Human herpesvirus 6B
acggcuucaagaaugccguga

SEQ ID NO: 329741 - RNA, 17 nt, Human herpesvirus 6B
acgggcagggcgggcac

SEQ ID NO: 329742 - RNA, 23 nt, Human herpesvirus 6B
acgggcuuggcuaucgcaaugau

SEQ ID NO: 329743 - RNA, 15 nt, Human herpesvirus 6B
acggggacuaccgau

SEQ ID NO: 329744 - RNA, 22 nt, Human herpesvirus 6B
acggggauuuagugcaguaugu

SEQ ID NO: 329745 - RNA, 17 nt, Human herpesvirus 6B
acggugugaucaucaca

SEQ ID NO: 329746 - RNA, 14 nt, Human herpesvirus 6B
acgguuagauuuaa

SEQ ID NO: 329747 - RNA, 17 nt, Human herpesvirus 6B
acgguucaccacuguga

SEQ ID NO: 329748 - RNA, 17 nt, Human herpesvirus 6B
acguauaaaaguccuca

SEQ ID NO: 329749 - RNA, 15 nt, Human herpesvirus 6B
acguauaccauuccc

SEQ ID NO: 329750 - RNA, 20 nt, Human herpesvirus 6B
acguccagcgcauccuuaaa

SEQ ID NO: 329751 - RNA, 17 nt, Human herpesvirus 6B
acgucccauucagucuc

SEQ ID NO: 329752 - RNA, 21 nt, Human herpesvirus 6B
acgucuguggcgaggaaccca

SEQ ID NO: 329753 - RNA, 15 nt, Human herpesvirus 6B
acgugcuagcucugu

SEQ ID NO: 329754 - RNA, 14 nt, Human herpesvirus 6B
acguggccgucucc

SEQ ID NO: 329755 - RNA, 16 nt, Human herpesvirus 6B
acguuccaucacgcau

SEQ ID NO: 329756 - RNA, 19 nt, Human herpesvirus 6B
acguuccaucacgcauaga

SEQ ID NO: 329757 - RNA, 23 nt, Human herpesvirus 6B
aucuaauagguagcggcaauuua

SEQ ID NO: 329758 - RNA, 23 nt, Human herpesvirus 6B
aucuaguguuucgcagaggacag

SEQ ID NO: 329759 - RNA, 16 nt, Human herpesvirus 6B
aucucaaaaaacauau

SEQ ID NO: 329760 - RNA, 20 nt, Human herpesvirus 6B
aucucaaaaaacauauaaag

SEQ ID NO: 329761 - RNA, 22 nt, Human herpesvirus 6B
aucucaaauuuuccaaacauua

SEQ ID NO: 329762 - RNA, 13 nt, Human herpesvirus 6B
aucucaagcacaa

SEQ ID NO: 329763 - RNA, 14 nt, Human herpesvirus 6B
aucucaagcacaaa

SEQ ID NO: 329764 - RNA, 15 nt, Human herpesvirus 6B
aucucauaugcauca

SEQ ID NO: 329765 - RNA, 17 nt, Human herpesvirus 6B
aucucauaugcaucaga

SEQ ID NO: 329766 - RNA, 18 nt, Human herpesvirus 6B
aucuccaauagauuucau

SEQ ID NO: 329767 - RNA, 12 nt, Human herpesvirus 6B
aucuccucaaca

SEQ ID NO: 329768 - RNA, 13 nt, Human herpesvirus 6B
aucucgugcaaaa

SEQ ID NO: 329769 - RNA, 18 nt, Human herpesvirus 6B
aucugagugaucugauuc

SEQ ID NO: 329770 - RNA, 16 nt, Human herpesvirus 6B
aucugauucgacaaau

SEQ ID NO: 329771 - RNA, 22 nt, Human herpesvirus 6B
aucugauucgacaaaucaucac

SEQ ID NO: 329772 - RNA, 19 nt, Human herpesvirus 6B
aucugccccccuucaucca

SEQ ID NO: 329773 - RNA, 14 nt, Human herpesvirus 6B
aucugcucauguca

SEQ ID NO: 329774 - RNA, 16 nt, Human herpesvirus 6B
aucugcugcuucuucu

SEQ ID NO: 329775 - RNA, 16 nt, Human herpesvirus 6B
aucuggaugguugugu

SEQ ID NO: 329776 - RNA, 17 nt, Human herpesvirus 6B
aucuggugaauguuucu

SEQ ID NO: 329777 - RNA, 20 nt, Human herpesvirus 6B
aucuguaagauuaaauguga

SEQ ID NO: 329778 - RNA, 12 nt, Human herpesvirus 6B
aucugugcaaca

SEQ ID NO: 329779 - RNA, 18 nt, Human herpesvirus 6B
aucugugcaacacaacaa

SEQ ID NO: 329780 - RNA, 13 nt, Human herpesvirus 6B
aucuuaacagacu

SEQ ID NO: 329781 - RNA, 22 nt, Human herpesvirus 6B
aucuuauauuaaagauugcauc

SEQ ID NO: 329782 - RNA, 15 nt, Human herpesvirus 6B
aucuuccccauaaca

SEQ ID NO: 329783 - RNA, 22 nt, Human herpesvirus 6B
aucuuccuuuucaguauagaca

SEQ ID NO: 329784 - RNA, 19 nt, Human herpesvirus 6B
aucuuguguucuaacacau

SEQ ID NO: 329785 - RNA, 15 nt, Human herpesvirus 6B
aucuuuccugcuaau

SEQ ID NO: 329786 - RNA, 14 nt, Human herpesvirus 6B
aucuuucugagauu

SEQ ID NO: 329787 - RNA, 16 nt, Human herpesvirus 6B
aucuuucugagauuuu

SEQ ID NO: 329788 - RNA, 19 nt, Human herpesvirus 6B
augaaaguggauacgccag

SEQ ID NO: 329789 - RNA, 22 nt, Human herpesvirus 6B
augaacgcacuagacaucaacu

SEQ ID NO: 329790 - RNA, 21 nt, Human herpesvirus 6B
augaacgcagcguaauaugca

SEQ ID NO: 329791 - RNA, 21 nt, Human herpesvirus 6B
augaacguugaaaaaucucua

SEQ ID NO: 329792 - RNA, 12 nt, Human herpesvirus 6B
augaacuacuga

SEQ ID NO: 329793 - RNA, 15 nt, Human herpesvirus 6B
augaauguuugacug

SEQ ID NO: 329794 - RNA, 21 nt, Human herpesvirus 6B
augaauucaagacgaucucau

SEQ ID NO: 329795 - RNA, 19 nt, Human herpesvirus 6B
augaauucguuacaaucuc

SEQ ID NO: 329796 - RNA, 16 nt, Human herpesvirus 6B
augaauuuauguucag

SEQ ID NO: 329797 - RNA, 18 nt, Human herpesvirus 6B
augacaauugcagaauuu

SEQ ID NO: 329798 - RNA, 15 nt, Human herpesvirus 6B
augacuggaaucaca

SEQ ID NO: 329799 - RNA, 16 nt, Human herpesvirus 6B
augagacgccuauucu

SEQ ID NO: 329800 - RNA, 22 nt, Human herpesvirus 6B
augagcugacaucugcaaaaac

SEQ ID NO: 329801 - RNA, 14 nt, Human herpesvirus 6B
augaggauuugcuu

SEQ ID NO: 329802 - RNA, 21 nt, Human herpesvirus 6B
augagggguaugucugugcga

SEQ ID NO: 329803 - RNA, 18 nt, Human herpesvirus 6B
augaguuuuuugcaauuu

SEQ ID NO: 329804 - RNA, 15 nt, Human herpesvirus 6B
augauacuacgugua

SEQ ID NO: 329805 - RNA, 15 nt, Human herpesvirus 6B
augauauauugcgau

SEQ ID NO: 329806 - RNA, 14 nt, Human herpesvirus 6B
augaucagcauuca

SEQ ID NO: 329807 - RNA, 22 nt, Human herpesvirus 6B
augaucgccgcuaggcagauca

SEQ ID NO: 329808 - RNA, 17 nt, Human herpesvirus 6B
augaucgucauaaacaa

SEQ ID NO: 329809 - RNA, 16 nt, Human herpesvirus 6B
augauuaauacaucau

SEQ ID NO: 329810 - RNA, 14 nt, Human herpesvirus 6B
augauucuuaauuc

SEQ ID NO: 329811 - RNA, 13 nt, Human herpesvirus 6B
augauugcaacaa

SEQ ID NO: 329812 - RNA, 16 nt, Human herpesvirus 6B
augauugcaaccaaua

SEQ ID NO: 329813 - RNA, 20 nt, Human herpesvirus 6B
augauuggccaugguaggcu

SEQ ID NO: 329814 - RNA, 19 nt, Human herpesvirus 6B
augcaaaaucguguuuucu

SEQ ID NO: 329815 - RNA, 19 nt, Human herpesvirus 6B
augcaacgguguuccagga

SEQ ID NO: 329816 - RNA, 23 nt, Human herpesvirus 6B
augcagcgccagcauucuuauca

SEQ ID NO: 329817 - RNA, 20 nt, Human herpesvirus 6B
augcagcguuggaaagcuuu

SEQ ID NO: 329818 - RNA, 18 nt, Human herpesvirus 6B
augcaguaguuuuuggau

SEQ ID NO: 329819 - RNA, 16 nt, Human herpesvirus 6B
augcauucacaaggaa

SEQ ID NO: 329820 - RNA, 17 nt, Human herpesvirus 6B
augccacagaacaccug

SEQ ID NO: 329821 - RNA, 14 nt, Human herpesvirus 6B
augccaugcaauag

SEQ ID NO: 329822 - RNA, 22 nt, Human herpesvirus 6B
augccauugaauacacgugugg

SEQ ID NO: 329823 - RNA, 19 nt, Human herpesvirus 6B
augccgacuguuucuuaga

SEQ ID NO: 329824 - RNA, 14 nt, Human herpesvirus 6B
augccuacauaugc

SEQ ID NO: 329825 - RNA, 19 nt, Human herpesvirus 6B
augcgaauuaaaacucuaa

SEQ ID NO: 329826 - RNA, 23 nt, Human herpesvirus 6B
augcggcagauuuuuuggaagaa

SEQ ID NO: 329827 - RNA, 21 nt, Human herpesvirus 6B
augcgguuaugugcuaucugu

SEQ ID NO: 329828 - RNA, 15 nt, Human herpesvirus 6B
augcucaaccuaacg

SEQ ID NO: 329829 - RNA, 13 nt, Human herpesvirus 6B
augcucucagauc

SEQ ID NO: 329830 - RNA, 17 nt, Human herpesvirus 6B
auucugggacaggaucc

SEQ ID NO: 329831 - RNA, 18 nt, Human herpesvirus 6B
auucuuaaauucaauuua

SEQ ID NO: 329832 - RNA, 15 nt, Human herpesvirus 6B
auucuuaccaagaaa

SEQ ID NO: 329833 - RNA, 18 nt, Human herpesvirus 6B
auucuuauuuaccuuccu

SEQ ID NO: 329834 - RNA, 21 nt, Human herpesvirus 6B
auucuuggaaaaccuuauaca

SEQ ID NO: 329835 - RNA, 15 nt, Human herpesvirus 6B
auugaauacagcugc

SEQ ID NO: 329836 - RNA, 13 nt, Human herpesvirus 6B
auugaccagccag

SEQ ID NO: 329837 - RNA, 15 nt, Human herpesvirus 6B
auugaccagccagau

SEQ ID NO: 329838 - RNA, 16 nt, Human herpesvirus 6B
auugauuagcaaucau

SEQ ID NO: 329839 - RNA, 15 nt, Human herpesvirus 6B
auugauuccaggugg

SEQ ID NO: 329840 - RNA, 14 nt, Human herpesvirus 6B
auugcaaccaauaa

SEQ ID NO: 329841 - RNA, 13 nt, Human herpesvirus 6B
auugcacccuauc

SEQ ID NO: 329842 - RNA, 18 nt, Human herpesvirus 6B
auugcaucgcuggaguua

SEQ ID NO: 329843 - RNA, 13 nt, Human herpesvirus 6B
auugcaugcauug

SEQ ID NO: 329844 - RNA, 16 nt, Human herpesvirus 6B
auugccgcuucuaugu

SEQ ID NO: 329845 - RNA, 21 nt, Human herpesvirus 6B
auugcgagaugguagugcuca

SEQ ID NO: 329846 - RNA, 13 nt, Human herpesvirus 6B
auugcuauagauu

SEQ ID NO: 329847 - RNA, 14 nt, Human herpesvirus 6B
auugcugucuuccu

SEQ ID NO: 329848 - RNA, 15 nt, Human herpesvirus 6B
auugcuucguuucuu

SEQ ID NO: 329849 - RNA, 23 nt, Human herpesvirus 6B
auugcuuucucuuuuuaauucca

SEQ ID NO: 329850 - RNA, 19 nt, Human herpesvirus 6B
auuggaauugggaagcaua

SEQ ID NO: 329851 - RNA, 22 nt, Human herpesvirus 6B
auugggucuuucccgugcucag

SEQ ID NO: 329852 - RNA, 14 nt, Human herpesvirus 6B
auuggugugcauua

SEQ ID NO: 329853 - RNA, 14 nt, Human herpesvirus 6B
auuguaacuucaua

SEQ ID NO: 329854 - RNA, 13 nt, Human herpesvirus 6B
auugugacaaggu

SEQ ID NO: 329855 - RNA, 19 nt, Human herpesvirus 6B
auugugucuuuguuccaga

SEQ ID NO: 329856 - RNA, 19 nt, Human herpesvirus 6B
auuguuuucauucugcuau

SEQ ID NO: 329857 - RNA, 14 nt, Human herpesvirus 6B
auuguuuuuuacuu

SEQ ID NO: 329858 - RNA, 13 nt, Human herpesvirus 6B
auuuaaaugucag

SEQ ID NO: 329859 - RNA, 16 nt, Human herpesvirus 6B
auuuaacauccaaaau

SEQ ID NO: 329860 - RNA, 19 nt, Human herpesvirus 6B
auuuaacgcgucaacaaac

SEQ ID NO: 329861 - RNA, 19 nt, Human herpesvirus 6B
auuuaacuaagauugugca

SEQ ID NO: 329862 - RNA, 23 nt, Human herpesvirus 6B
auuuaaggugguugaaaucacac

SEQ ID NO: 329863 - RNA, 17 nt, Human herpesvirus 6B
auuuacaaaacaaauau

SEQ ID NO: 329864 - RNA, 14 nt, Human herpesvirus 6B
auuuacaaaagccu

SEQ ID NO: 329865 - RNA, 17 nt, Human herpesvirus 6B
auuuacucuccacccau

SEQ ID NO: 329866 - RNA, 18 nt, Human herpesvirus 6B
auuuacucuccacccauc

SEQ ID NO: 329867 - RNA, 19 nt, Human herpesvirus 6B
auuuacuguuucuuugaca

SEQ ID NO: 329868 - RNA, 13 nt, Human herpesvirus 6B
auuuagugcagua

SEQ ID NO: 329869 - RNA, 16 nt, Human herpesvirus 6B
auuuaucaaaagccag

SEQ ID NO: 329870 - RNA, 18 nt, Human herpesvirus 6B
auuuaucaaaagccagau

SEQ ID NO: 329871 - RNA, 18 nt, Human herpesvirus 6B
auuuaugaaaauugcucu

SEQ ID NO: 329872 - RNA, 16 nt, Human herpesvirus 6B
auuuauuauaagcaaa

SEQ ID NO: 329873 - RNA, 15 nt, Human herpesvirus 6B
auuucacgugaaaua

SEQ ID NO: 329874 - RNA, 12 nt, Human herpesvirus 6B
auuucagccgau

SEQ ID NO: 329875 - RNA, 21 nt, Human herpesvirus 6B
auuucagccgaugauaagauu

SEQ ID NO: 329876 - RNA, 22 nt, Human herpesvirus 6B
auuucaggaaguucuucaaaaa

SEQ ID NO: 329877 - RNA, 13 nt, Human herpesvirus 6B
auuucauacugua

SEQ ID NO: 329878 - RNA, 22 nt, Human herpesvirus 6B
auuucauacuguauggcaaaac

SEQ ID NO: 329879 - RNA, 22 nt, Human herpesvirus 6B
auuuccauaaguuaauuccagc

SEQ ID NO: 329880 - RNA, 15 nt, Human herpesvirus 6B
auuuccggaguugca

SEQ ID NO: 329881 - RNA, 17 nt, Human herpesvirus 6B
auuuccggaguugcagu

SEQ ID NO: 329882 - RNA, 21 nt, Human herpesvirus 6B
auuuccguagcggccgcaaaa

SEQ ID NO: 329883 - RNA, 19 nt, Human herpesvirus 6B
auuuccuucaaagugaauu

SEQ ID NO: 329884 - RNA, 17 nt, Human herpesvirus 6B
auuuccuuugugugaua

SEQ ID NO: 329885 - RNA, 18 nt, Human herpesvirus 6B
auuuccuuugugugauau

SEQ ID NO: 329886 - RNA, 15 nt, Human herpesvirus 6B
auuucgaaagagaua

SEQ ID NO: 329887 - RNA, 13 nt, Human herpesvirus 6B
auuucgacaaucc

SEQ ID NO: 329888 - RNA, 19 nt, Human herpesvirus 6B
auuucgacaauccuaauuc

SEQ ID NO: 329889 - RNA, 21 nt, Human herpesvirus 6B
auuucgacaauccuaauucaa

SEQ ID NO: 329890 - RNA, 15 nt, Human herpesvirus 6B
auuucuaaagauuug

SEQ ID NO: 329891 - RNA, 16 nt, Human herpesvirus 6B
auuucuccacacuguu

SEQ ID NO: 329892 - RNA, 15 nt, Human herpesvirus 6B
auuucucgucuacuc

SEQ ID NO: 329893 - RNA, 18 nt, Human herpesvirus 6B
auuucucugucgcuguga

SEQ ID NO: 329894 - RNA, 19 nt, Human herpesvirus 6B
auuucucugucgcugugag

SEQ ID NO: 329895 - RNA, 13 nt, Human herpesvirus 6B
auuucuuacauaa

SEQ ID NO: 329896 - RNA, 18 nt, Human herpesvirus 6B
auuucuuauuaugugauu

SEQ ID NO: 329897 - RNA, 17 nt, Human herpesvirus 6B
auuucuuuggagggaau

SEQ ID NO: 329898 - RNA, 13 nt, Human herpesvirus 6B
auuugccgggaug

SEQ ID NO: 329899 - RNA, 23 nt, Human herpesvirus 6B
auuugcugacccgauguggaacg

SEQ ID NO: 329900 - RNA, 14 nt, Human herpesvirus 6B
auuuggggaaaaua

SEQ ID NO: 329901 - RNA, 15 nt, Human herpesvirus 6B
auuuuaacauuuuua

SEQ ID NO: 329902 - RNA, 17 nt, Human herpesvirus 6B
auuuuagcuauccauuu

SEQ ID NO: 329903 - RNA, 19 nt, Human herpesvirus 6B
auuuuauugacugugaaaa

SEQ ID NO: 329904 - RNA, 15 nt, Human herpesvirus 6B
auuuucguggaagac

SEQ ID NO: 329905 - RNA, 20 nt, Human herpesvirus 6B
auuuugaaagaacaguuuac

SEQ ID NO: 329906 - RNA, 19 nt, Human herpesvirus 6B
auuuugagacuuagaccaa

SEQ ID NO: 329907 - RNA, 14 nt, Human herpesvirus 6B
auuuuggcuacaac

SEQ ID NO: 329908 - RNA, 21 nt, Human herpesvirus 6B
auuuugucacucucaauuuca

SEQ ID NO: 329909 - RNA, 14 nt, Human herpesvirus 6B
auuuugucagucaa

SEQ ID NO: 329910 - RNA, 22 nt, Human herpesvirus 6B
auuuuguggcuauuugacaaua

SEQ ID NO: 329911 - RNA, 23 nt, Human herpesvirus 6B
auuuuguuucgucgcuaaauuga

SEQ ID NO: 329912 - RNA, 15 nt, Human herpesvirus 6B
auuuuuacucauaca

SEQ ID NO: 329913 - RNA, 21 nt, Human herpesvirus 6B
auuuuuuucuccugaucucac

SEQ ID NO: 329914 - RNA, 16 nt, Human herpesvirus 6B
caaaaaaauacaguau

SEQ ID NO: 329915 - RNA, 20 nt, Human herpesvirus 6B
caaaaaaauacaguauauaa

SEQ ID NO: 329916 - RNA, 23 nt, Human herpesvirus 6B
caaaaacgaccugaucacagaga

SEQ ID NO: 329917 - RNA, 21 nt, Human herpesvirus 6B
caaaaagaaugggauugucau

SEQ ID NO: 329918 - RNA, 14 nt, Human herpesvirus 6B
caaaacaaauaucg

SEQ ID NO: 329919 - RNA, 20 nt, Human herpesvirus 6B
caaaacagauuuuacuucua

SEQ ID NO: 329920 - RNA, 14 nt, Human herpesvirus 6B
caaaacuguuaaaa

SEQ ID NO: 329921 - RNA, 21 nt, Human herpesvirus 6B
caaaagauuauggcaacauac

SEQ ID NO: 329922 - RNA, 22 nt, Human herpesvirus 6B
caaaagauuauggcaacauacc

SEQ ID NO: 329923 - RNA, 23 nt, Human herpesvirus 6B
caaaaguagcacggggauuuagu

SEQ ID NO: 329924 - RNA, 14 nt, Human herpesvirus 6B
caaaaucugcuaac

SEQ ID NO: 329925 - RNA, 15 nt, Human herpesvirus 6B
caaaaugaccagaga

SEQ ID NO: 329926 - RNA, 16 nt, Human herpesvirus 6B
caaaaugaccagagau

SEQ ID NO: 329927 - RNA, 20 nt, Human herpesvirus 6B
caaaaugauugcaaccaaua

SEQ ID NO: 329928 - RNA, 16 nt, Human herpesvirus 6B
caaaaugguuaugaca

SEQ ID NO: 329929 - RNA, 17 nt, Human herpesvirus 6B
caaaaugguuaugacaa

SEQ ID NO: 329930 - RNA, 18 nt, Human herpesvirus 6B
caaaaugguuaugacaaa

SEQ ID NO: 329931 - RNA, 21 nt, Human herpesvirus 6B
caaacaccucacagucuagua

SEQ ID NO: 329932 - RNA, 12 nt, Human herpesvirus 6B
caaacaggugua

SEQ ID NO: 329933 - RNA, 23 nt, Human herpesvirus 6B
caaacaugcaacccgccacucua

SEQ ID NO: 329934 - RNA, 18 nt, Human herpesvirus 6B
caaacccaccgauguuaa

SEQ ID NO: 329935 - RNA, 23 nt, Human herpesvirus 6B
caaaccguagagcaaauucugau

SEQ ID NO: 329936 - RNA, 11 nt, Human herpesvirus 6B
caaaccuuccc

SEQ ID NO: 329937 - RNA, 18 nt, Human herpesvirus 6B
caaaccuucccuaucaca

SEQ ID NO: 329938 - RNA, 19 nt, Human herpesvirus 6B
caaaccuucccuaucacaa

SEQ ID NO: 329939 - RNA, 23 nt, Human herpesvirus 6B
caaaccuucccuaucacaauaca

SEQ ID NO: 329940 - RNA, 16 nt, Human herpesvirus 6B
caaacgcagacuaauc

SEQ ID NO: 329941 - RNA, 22 nt, Human herpesvirus 6B
caaacgcucgccggcccgucca

SEQ ID NO: 329942 - RNA, 19 nt, Human herpesvirus 6B
caaacuacggaaaaucuca

SEQ ID NO: 329943 - RNA, 21 nt, Human herpesvirus 6B
caccaagaaaaaacacaaaaa

SEQ ID NO: 329944 - RNA, 16 nt, Human herpesvirus 6B
caccaaugaucacaca

SEQ ID NO: 329945 - RNA, 18 nt, Human herpesvirus 6B
caccaccgcugacaguca

SEQ ID NO: 329946 - RNA, 15 nt, Human herpesvirus 6B
caccagcaugucaua

SEQ ID NO: 329947 - RNA, 14 nt, Human herpesvirus 6B
caccaguacuucaa

SEQ ID NO: 329948 - RNA, 20 nt, Human herpesvirus 6B
caccauuccagggaacuuga

SEQ ID NO: 329949 - RNA, 11 nt, Human herpesvirus 6B
cacccaucucc

SEQ ID NO: 329950 - RNA, 15 nt, Human herpesvirus 6B
caccccgccugaaca

SEQ ID NO: 329951 - RNA, 14 nt, Human herpesvirus 6B
caccggugaugaac

SEQ ID NO: 329952 - RNA, 14 nt, Human herpesvirus 6B
caccgucccucuca

SEQ ID NO: 329953 - RNA, 21 nt, Human herpesvirus 6B
caccuuagucgcacacacaag

SEQ ID NO: 329954 - RNA, 22 nt, Human herpesvirus 6B
caccuuagucgcacacacaaga

SEQ ID NO: 329955 - RNA, 18 nt, Human herpesvirus 6B
cacgauccaauuacauca

SEQ ID NO: 329956 - RNA, 15 nt, Human herpesvirus 6B
cacgcuaaaaacaga

SEQ ID NO: 329957 - RNA, 18 nt, Human herpesvirus 6B
cacgcuaaaaacagacga

SEQ ID NO: 329958 - RNA, 19 nt, Human herpesvirus 6B
cacgguaaacgagugugaa

SEQ ID NO: 329959 - RNA, 22 nt, Human herpesvirus 6B
cacguguggcagcaauccaauc

SEQ ID NO: 329960 - RNA, 20 nt, Human herpesvirus 6B
cacuaagcgacuuuuuaaca

SEQ ID NO: 329961 - RNA, 17 nt, Human herpesvirus 6B
cacuaugagucccuuga

SEQ ID NO: 329962 - RNA, 15 nt, Human herpesvirus 6B
cacucauuugcaauu

SEQ ID NO: 329963 - RNA, 16 nt, Human herpesvirus 6B
cacucauuugcaauug

SEQ ID NO: 329964 - RNA, 20 nt, Human herpesvirus 6B
cacucucguagucgcauuug

SEQ ID NO: 329965 - RNA, 12 nt, Human herpesvirus 6B
cacucugaagaa

SEQ ID NO: 329966 - RNA, 19 nt, Human herpesvirus 6B
cacucugaagaauaaaagu

SEQ ID NO: 329967 - RNA, 23 nt, Human herpesvirus 6B
cacucugaagaauaaaaguccau

SEQ ID NO: 329968 - RNA, 18 nt, Human herpesvirus 6B
cacugaauuagaauaauu

SEQ ID NO: 329969 - RNA, 20 nt, Human herpesvirus 6B
cacugacgauggcuacguuu

SEQ ID NO: 329970 - RNA, 13 nt, Human herpesvirus 6B
cacugcauuucau

SEQ ID NO: 329971 - RNA, 18 nt, Human herpesvirus 6B
cacugcgaauccgucucc

SEQ ID NO: 329972 - RNA, 16 nt, Human herpesvirus 6B
cacugucgaauaucuu

SEQ ID NO: 329973 - RNA, 15 nt, Human herpesvirus 6B
cacugugauaugcaa

SEQ ID NO: 329974 - RNA, 19 nt, Human herpesvirus 6B
cacuuauagacuaaacuua

SEQ ID NO: 329975 - RNA, 19 nt, Human herpesvirus 6B
cacuucacguuauuacaua

SEQ ID NO: 329976 - RNA, 16 nt, Human herpesvirus 6B
cacuugaucacaacau

SEQ ID NO: 329977 - RNA, 21 nt, Human herpesvirus 6B
cacuuucauaggaaguaaaua

SEQ ID NO: 329978 - RNA, 15 nt, Human herpesvirus 6B
cacuuucgaucacaa

SEQ ID NO: 329979 - RNA, 16 nt, Human herpesvirus 6B
cagaaacuuggagcua

SEQ ID NO: 329980 - RNA, 21 nt, Human herpesvirus 6B
cagaaauugugucacauguua

SEQ ID NO: 329981 - RNA, 20 nt, Human herpesvirus 6B
cagaaccaucuuuucaauua

SEQ ID NO: 329982 - RNA, 20 nt, Human herpesvirus 6B
cagaagaagagccuuuaacc

SEQ ID NO: 329983 - RNA, 17 nt, Human herpesvirus 6B
cagaaggauccauucua

SEQ ID NO: 329984 - RNA, 18 nt, Human herpesvirus 6B
cagaaggauccauucuag

SEQ ID NO: 329985 - RNA, 22 nt, Human herpesvirus 6B
cagaaguuuaccuagagauuac

SEQ ID NO: 329986 - RNA, 21 nt, Human herpesvirus 6B
cagaauaaaaauuucagccga

SEQ ID NO: 329987 - RNA, 16 nt, Human herpesvirus 6B
cagaauacgaacagaa

SEQ ID NO: 329988 - RNA, 23 nt, Human herpesvirus 6B
cagacauugcuuucucuuuuuaa

SEQ ID NO: 329989 - RNA, 13 nt, Human herpesvirus 6B
cagaccauaaaaa

SEQ ID NO: 329990 - RNA, 21 nt, Human herpesvirus 6B
cagacgcugaaaucauuucaa

SEQ ID NO: 329991 - RNA, 17 nt, Human herpesvirus 6B
cagacuaauccauauga

SEQ ID NO: 329992 - RNA, 21 nt, Human herpesvirus 6B
cagagaaaaaacaaagcuuua

SEQ ID NO: 329993 - RNA, 13 nt, Human herpesvirus 6B
cagagacaugacc

SEQ ID NO: 329994 - RNA, 17 nt, Human herpesvirus 6B
cagagagaggagcauuc

SEQ ID NO: 329995 - RNA, 21 nt, Human herpesvirus 6B
cagagauauugcaguuaauca

SEQ ID NO: 329996 - RNA, 14 nt, Human herpesvirus 6B
cagagccagacauc

SEQ ID NO: 329997 - RNA, 15 nt, Human herpesvirus 6B
cagagccagacaucu

SEQ ID NO: 329998 - RNA, 15 nt, Human herpesvirus 6B
cagaggugcugauga

SEQ ID NO: 329999 - RNA, 14 nt, Human herpesvirus 6B
cagaguaaucucgu

SEQ ID NO: 330000 - RNA, 18 nt, Human herpesvirus 6B
cagauaaacaaaaaucca

SEQ ID NO: 330001 - RNA, 17 nt, Human herpesvirus 6B
cagaugccaaguauuca

SEQ ID NO: 330002 - RNA, 13 nt, Human herpesvirus 6B
cagauggcacuga

SEQ ID NO: 330003 - RNA, 20 nt, Human herpesvirus 6B
cagauggcacugaaucagaa

SEQ ID NO: 330004 - RNA, 12 nt, Human herpesvirus 6B
cagauguagguu

SEQ ID NO: 330005 - RNA, 17 nt, Human herpesvirus 6B
cagaugugcacaaccga

SEQ ID NO: 330006 - RNA, 19 nt, Human herpesvirus 6B
cagauugcauaugucuguu

SEQ ID NO: 330007 - RNA, 16 nt, Human herpesvirus 6B
cagcaaacaugugauu

SEQ ID NO: 330008 - RNA, 21 nt, Human herpesvirus 6B
cagcacccucugcaagcucau

SEQ ID NO: 330009 - RNA, 16 nt, Human herpesvirus 6B
cagcaccuuagcucua

SEQ ID NO: 330010 - RNA, 22 nt, Human herpesvirus 6B
cagcaccuuagcucuaaugcua

SEQ ID NO: 330011 - RNA, 22 nt, Human herpesvirus 6B
cagcagaggccggcacauacac

SEQ ID NO: 330012 - RNA, 15 nt, Human herpesvirus 6B
cagcaugaacucuca

SEQ ID NO: 330013 - RNA, 18 nt, Human herpesvirus 6B
cagccagauacugcacaa

SEQ ID NO: 330014 - RNA, 23 nt, Human herpesvirus 6B
cagccuaaacggagacugcacag

SEQ ID NO: 330015 - RNA, 23 nt, Human herpesvirus 6B
cagcgcauaaauaaaaugguuuu

SEQ ID NO: 330016 - RNA, 17 nt, Human herpesvirus 6B
cagcucaccaccaucua

SEQ ID NO: 330017 - RNA, 19 nt, Human herpesvirus 6B
cagcucaccaccaucuaau

SEQ ID NO: 330018 - RNA, 14 nt, Human herpesvirus 6B
cagcucugcaauuu

SEQ ID NO: 330019 - RNA, 15 nt, Human herpesvirus 6B
cagcuuuauucccau

SEQ ID NO: 330020 - RNA, 23 nt, Human herpesvirus 6B
cagcuuugacgguuuauaugcag

SEQ ID NO: 330021 - RNA, 20 nt, Human herpesvirus 6B
caggaaaauguguucuuaca

SEQ ID NO: 330022 - RNA, 22 nt, Human herpesvirus 6B
caggaaaauguguucuuacaau

SEQ ID NO: 330023 - RNA, 18 nt, Human herpesvirus 6B
caggaagcgccauaaaaa

SEQ ID NO: 330024 - RNA, 17 nt, Human herpesvirus 6B
caggauuauaaaaacac

SEQ ID NO: 330025 - RNA, 22 nt, Human herpesvirus 6B
caggauuccccucauacaucca

SEQ ID NO: 330026 - RNA, 16 nt, Human herpesvirus 6B
caggcaauaaucauua

SEQ ID NO: 330027 - RNA, 22 nt, Human herpesvirus 6B
caggcacgacgaaaacuuuuaa

SEQ ID NO: 330028 - RNA, 19 nt, Human herpesvirus 6B
caggccacauuagcugcua

SEQ ID NO: 330029 - RNA, 23 nt, Human herpesvirus 6B
cagggaacuugauguugaucuga

SEQ ID NO: 330030 - RNA, 20 nt, Human herpesvirus 6B
cagggaugugguaugagcug

SEQ ID NO: 330031 - RNA, 13 nt, Human herpesvirus 6B
caggggcuuuuca

SEQ ID NO: 330032 - RNA, 20 nt, Human herpesvirus 6B
cagguaagcagcaaaacaac

SEQ ID NO: 330033 - RNA, 14 nt, Human herpesvirus 6B
caguaaaacaugua

SEQ ID NO: 330034 - RNA, 13 nt, Human herpesvirus 6B
caguaagauuuaa

SEQ ID NO: 330035 - RNA, 16 nt, Human herpesvirus 6B
caguacauagaaucuc

SEQ ID NO: 330036 - RNA, 22 nt, Human herpesvirus 6B
caguauagacauuuugugauuc

SEQ ID NO: 330037 - RNA, 12 nt, Human herpesvirus 6B
caguaugccaua

SEQ ID NO: 330038 - RNA, 23 nt, Human herpesvirus 6B
caguaugccauaaagaacacagg

SEQ ID NO: 330039 - RNA, 17 nt, Human herpesvirus 6B
cagucaaugcaauucca

SEQ ID NO: 330040 - RNA, 22 nt, Human herpesvirus 6B
caguccagaaguccuucaugau

SEQ ID NO: 330041 - RNA, 15 nt, Human herpesvirus 6B
cagucugcuaaaaau

SEQ ID NO: 330042 - RNA, 19 nt, Human herpesvirus 6B
cagucuucaauaaaaacuc

SEQ ID NO: 330043 - RNA, 22 nt, Human herpesvirus 6B
cagucuucaauaaaaacucaau

SEQ ID NO: 330044 - RNA, 15 nt, Human herpesvirus 6B
cagucuucuggauac

SEQ ID NO: 330045 - RNA, 19 nt, Human herpesvirus 6B
caguggauaggaugauuga

SEQ ID NO: 330046 - RNA, 14 nt, Human herpesvirus 6B
caguguuuccaaua

SEQ ID NO: 330047 - RNA, 16 nt, Human herpesvirus 6B
caguuacaauuacuaa

SEQ ID NO: 330048 - RNA, 19 nt, Human herpesvirus 6B
caguuaggauuacacuguc

SEQ ID NO: 330049 - RNA, 21 nt, Human herpesvirus 6B
caguuauacuggcaaagcaaa

SEQ ID NO: 330050 - RNA, 18 nt, Human herpesvirus 6B
caguucuuacauauuugg

SEQ ID NO: 330051 - RNA, 14 nt, Human herpesvirus 6B
caguugucuggcag

SEQ ID NO: 330052 - RNA, 16 nt, Human herpesvirus 6B
caguuucuguuuuucu

SEQ ID NO: 330053 - RNA, 18 nt, Human herpesvirus 6B
cauaaaaacgacauccau

SEQ ID NO: 330054 - RNA, 14 nt, Human herpesvirus 6B
cauaaaacugccaa

SEQ ID NO: 330055 - RNA, 15 nt, Human herpesvirus 6B
ccaacgucaugcaaa

SEQ ID NO: 330056 - RNA, 21 nt, Human herpesvirus 6B
ccaacgucaugcaaaacagau

SEQ ID NO: 330057 - RNA, 18 nt, Human herpesvirus 6B
ccaagaaaaaacacaaaa

SEQ ID NO: 330058 - RNA, 20 nt, Human herpesvirus 6B
ccaagaaaaaacacaaaaag

SEQ ID NO: 330059 - RNA, 22 nt, Human herpesvirus 6B
ccaagaaaaaacacaaaaagac

SEQ ID NO: 330060 - RNA, 22 nt, Human herpesvirus 6B
ccaagaaucguuaaaugagaua

SEQ ID NO: 330061 - RNA, 19 nt, Human herpesvirus 6B
ccaaggcaacggcacgaga

SEQ ID NO: 330062 - RNA, 16 nt, Human herpesvirus 6B
ccaauaaaauguccau

SEQ ID NO: 330063 - RNA, 17 nt, Human herpesvirus 6B
ccaauaaauauauuugu

SEQ ID NO: 330064 - RNA, 22 nt, Human herpesvirus 6B
ccaauaauugaugggauguaau

SEQ ID NO: 330065 - RNA, 14 nt, Human herpesvirus 6B
ccaaucugugcaac

SEQ ID NO: 330066 - RNA, 16 nt, Human herpesvirus 6B
ccaaucugugcaacac

SEQ ID NO: 330067 - RNA, 22 nt, Human herpesvirus 6B
ccaaucugugcaacacaacaaa

SEQ ID NO: 330068 - RNA, 13 nt, Human herpesvirus 6B
ccaaugaauacuu

SEQ ID NO: 330069 - RNA, 18 nt, Human herpesvirus 6B
ccaaugaucacacacgcg

SEQ ID NO: 330070 - RNA, 19 nt, Human herpesvirus 6B
ccaauuacucaacauuaaa

SEQ ID NO: 330071 - RNA, 13 nt, Human herpesvirus 6B
ccaccgcaagcaa

SEQ ID NO: 330072 - RNA, 15 nt, Human herpesvirus 6B
ccaccuaauaaacuc

SEQ ID NO: 330073 - RNA, 21 nt, Human herpesvirus 6B
ccaccuguuuccaauguccau

SEQ ID NO: 330074 - RNA, 17 nt, Human herpesvirus 6B
ccacugaagcaaagcac

SEQ ID NO: 330075 - RNA, 18 nt, Human herpesvirus 6B
ccagaaaagcaaacaugc

SEQ ID NO: 330076 - RNA, 21 nt, Human herpesvirus 6B
ccagacaucucuucccacaaa

SEQ ID NO: 330077 - RNA, 14 nt, Human herpesvirus 6B
ccagagacaugacc

SEQ ID NO: 330078 - RNA, 16 nt, Human herpesvirus 6B
ccagagauacgugaua

SEQ ID NO: 330079 - RNA, 19 nt, Human herpesvirus 6B
ccagauaaacaaaaaucca

SEQ ID NO: 330080 - RNA, 19 nt, Human herpesvirus 6B
ccagaucgaagaaaaugaa

SEQ ID NO: 330081 - RNA, 18 nt, Human herpesvirus 6B
ccagauucggcugcuuau

SEQ ID NO: 330082 - RNA, 23 nt, Human herpesvirus 6B
ccagauucggcugcuuauaugca

SEQ ID NO: 330083 - RNA, 18 nt, Human herpesvirus 6B
ccagcacagcaugcauuu

SEQ ID NO: 330084 - RNA, 17 nt, Human herpesvirus 6B
ccagcaccuuagcucua

SEQ ID NO: 330085 - RNA, 19 nt, Human herpesvirus 6B
ccagcaccuuagcucuaau

SEQ ID NO: 330086 - RNA, 16 nt, Human herpesvirus 6B
ccagcauuuucaaagu

SEQ ID NO: 330087 - RNA, 19 nt, Human herpesvirus 6B
ccagcguggauaucucaaa

SEQ ID NO: 330088 - RNA, 22 nt, Human herpesvirus 6B
ccagcguggugugcacuuguag

SEQ ID NO: 330089 - RNA, 21 nt, Human herpesvirus 6B
ccaggaaaauguguucuuaca

SEQ ID NO: 330090 - RNA, 17 nt, Human herpesvirus 6B
ccaggaauucacuuuga

SEQ ID NO: 330091 - RNA, 14 nt, Human herpesvirus 6B
ccaggcaauaauca

SEQ ID NO: 330092 - RNA, 13 nt, Human herpesvirus 6B
ccaggcagaguuu

SEQ ID NO: 330093 - RNA, 20 nt, Human herpesvirus 6B
ccaguaagucuucauuaaaa

SEQ ID NO: 330094 - RNA, 12 nt, Human herpesvirus 6B
ccaguacuucaa

SEQ ID NO: 330095 - RNA, 21 nt, Human herpesvirus 6B
ccaguacuucaagaaaaucgc

SEQ ID NO: 330096 - RNA, 20 nt, Human herpesvirus 6B
ccaguagcacgaaccaaaau

SEQ ID NO: 330097 - RNA, 19 nt, Human herpesvirus 6B
ccauaaacggagacacgcc

SEQ ID NO: 330098 - RNA, 15 nt, Human herpesvirus 6B
ccauaaagaacacag

SEQ ID NO: 330099 - RNA, 16 nt, Human herpesvirus 6B
ccauaaguuaauucca

SEQ ID NO: 330100 - RNA, 16 nt, Human herpesvirus 6B
ccauacuguguaacuc

SEQ ID NO: 330101 - RNA, 22 nt, Human herpesvirus 6B
ccauagugaaagaguaccgaau

SEQ ID NO: 330102 - RNA, 12 nt, Human herpesvirus 6B
ccauauaucauc

SEQ ID NO: 330103 - RNA, 14 nt, Human herpesvirus 6B
ccauaucacagcau

SEQ ID NO: 330104 - RNA, 20 nt, Human herpesvirus 6B
ccaucaacacaccugccuag

SEQ ID NO: 330105 - RNA, 15 nt, Human herpesvirus 6B
ccaucaugcugugag

SEQ ID NO: 330106 - RNA, 18 nt, Human herpesvirus 6B
ccaucauucuugucugca

SEQ ID NO: 330107 - RNA, 14 nt, Human herpesvirus 6B
ccaucccuaucucu

SEQ ID NO: 330108 - RNA, 19 nt, Human herpesvirus 6B
ccauccgcuaagagauuua

SEQ ID NO: 330109 - RNA, 15 nt, Human herpesvirus 6B
ccaugacugugaggu

SEQ ID NO: 330110 - RNA, 10 nt, Human herpesvirus 6B
ccaugccauu

SEQ ID NO: 330111 - RNA, 23 nt, Human herpesvirus 6B
ccauggcgagaaacgcccugaag

SEQ ID NO: 330112 - RNA, 14 nt, Human herpesvirus 6B
ccauguugcuuaua

SEQ ID NO: 330113 - RNA, 16 nt, Human herpesvirus 6B
ccauuucgccaaaaau

SEQ ID NO: 330114 - RNA, 16 nt, Human herpesvirus 6B
cccaagugaaauucga

SEQ ID NO: 330115 - RNA, 19 nt, Human herpesvirus 6B
cccagaaggauccauucua

SEQ ID NO: 330116 - RNA, 16 nt, Human herpesvirus 6B
cccagcugaaauagac

SEQ ID NO: 330117 - RNA, 16 nt, Human herpesvirus 6B
cccauaggugauuuca

SEQ ID NO: 330118 - RNA, 20 nt, Human herpesvirus 6B
cccaugaaaaucauuaccag

SEQ ID NO: 330119 - RNA, 19 nt, Human herpesvirus 6B
cccccucccccguuuuaua

SEQ ID NO: 330120 - RNA, 16 nt, Human herpesvirus 6B
ccccucauacauccag

SEQ ID NO: 330121 - RNA, 13 nt, Human herpesvirus 6B
ccccuucauccag

SEQ ID NO: 330122 - RNA, 19 nt, Human herpesvirus 6B
cccgacggcagagguugcg

SEQ ID NO: 330123 - RNA, 13 nt, Human herpesvirus 6B
cccgcuguguuua

SEQ ID NO: 330124 - RNA, 16 nt, Human herpesvirus 6B
cccggggaugggaugu

SEQ ID NO: 330125 - RNA, 17 nt, Human herpesvirus 6B
cccuaaaaucugcuaac

SEQ ID NO: 330126 - RNA, 16 nt, Human herpesvirus 6B
cccuaacgugggaggu

SEQ ID NO: 330127 - RNA, 15 nt, Human herpesvirus 6B
cccuacuacagugga

SEQ ID NO: 330128 - RNA, 18 nt, Human herpesvirus 6B
cccuacuacaguggaugu

SEQ ID NO: 330129 - RNA, 14 nt, Human herpesvirus 6B
cccuauauagcuau

SEQ ID NO: 330130 - RNA, 14 nt, Human herpesvirus 6B
cccucauacaucca

SEQ ID NO: 330131 - RNA, 15 nt, Human herpesvirus 6B
cccucauacauccag

SEQ ID NO: 330132 - RNA, 21 nt, Human herpesvirus 6B
cccucuagcgggguugcuaua

SEQ ID NO: 330133 - RNA, 17 nt, Human herpesvirus 6B
cccuuguaauccaucag

SEQ ID NO: 330134 - RNA, 18 nt, Human herpesvirus 6B
ccgacccuagcuuuucau

SEQ ID NO: 330135 - RNA, 19 nt, Human herpesvirus 6B
ccgagacuccuacaaugcg

SEQ ID NO: 330136 - RNA, 17 nt, Human herpesvirus 6B
ccgagcgggcuccgucg

SEQ ID NO: 330137 - RNA, 14 nt, Human herpesvirus 6B
ccgaugaugaucug

SEQ ID NO: 330138 - RNA, 23 nt, Human herpesvirus 6B
ccgauguggaacggaaacaugaa

SEQ ID NO: 330139 - RNA, 14 nt, Human herpesvirus 6B
ccgauuguccuuca

SEQ ID NO: 330140 - RNA, 17 nt, Human herpesvirus 6B
ccgcaaaaaagcgccaa

SEQ ID NO: 330141 - RNA, 22 nt, Human herpesvirus 6B
ccgcagcuccuuccgcuaccgc

SEQ ID NO: 330142 - RNA, 16 nt, Human herpesvirus 6B
ccgcuucuauguauua

SEQ ID NO: 330143 - RNA, 14 nt, Human herpesvirus 6B
ccggaguugcagua

SEQ ID NO: 330144 - RNA, 14 nt, Human herpesvirus 6B
ccggcacauacaca

SEQ ID NO: 330145 - RNA, 16 nt, Human herpesvirus 6B
ccggcgaacugagaua

SEQ ID NO: 330146 - RNA, 18 nt, Human herpesvirus 6B
ccgguacgcuucuuucac

SEQ ID NO: 330147 - RNA, 15 nt, Human herpesvirus 6B
ccgguuaaagcagaa

SEQ ID NO: 330148 - RNA, 19 nt, Human herpesvirus 6B
ccgguuaaagcagaaggcc

SEQ ID NO: 330149 - RNA, 19 nt, Human herpesvirus 6B
ccguagcggccgcaaaaac

SEQ ID NO: 330150 - RNA, 17 nt, Human herpesvirus 6B
ccgucucugaagcaaaa

SEQ ID NO: 330151 - RNA, 21 nt, Human herpesvirus 6B
ccgugagugcuauuugcauua

SEQ ID NO: 330152 - RNA, 14 nt, Human herpesvirus 6B
ccguguuacugaca

SEQ ID NO: 330153 - RNA, 15 nt, Human herpesvirus 6B
ccguucaccauucca

SEQ ID NO: 330154 - RNA, 18 nt, Human herpesvirus 6B
ccguuuuuucugcaaaac

SEQ ID NO: 330155 - RNA, 23 nt, Human herpesvirus 6B
ccuaaaacaccgguaagcaucug

SEQ ID NO: 330156 - RNA, 16 nt, Human herpesvirus 6B
ccuaaaaucugcuaac

SEQ ID NO: 330157 - RNA, 16 nt, Human herpesvirus 6B
ccuaaacaccacuuga

SEQ ID NO: 330158 - RNA, 17 nt, Human herpesvirus 6B
ccuaaauaccauuuuau

SEQ ID NO: 330159 - RNA, 17 nt, Human herpesvirus 6B
ccuaagaaauauugcau

SEQ ID NO: 330160 - RNA, 13 nt, Human herpesvirus 6B
ccuaauuccaauu

SEQ ID NO: 330161 - RNA, 11 nt, Human herpesvirus 6B
ccuacacugcg

SEQ ID NO: 330162 - RNA, 18 nt, Human herpesvirus 6B
ccuacacuuuuccaguga

SEQ ID NO: 330163 - RNA, 22 nt, Human herpesvirus 6B
ccuauaaaaaaagcaaauacua

SEQ ID NO: 330164 - RNA, 19 nt, Human herpesvirus 6B
ccuauaugcgaauguuaaa

SEQ ID NO: 330165 - RNA, 20 nt, Human herpesvirus 6B
ccuaugauagcauaauccuu

SEQ ID NO: 330166 - RNA, 18 nt, Human herpesvirus 6B
ccuauguuaacauuguga

SEQ ID NO: 330167 - RNA, 22 nt, Human herpesvirus 6B
ccucaaaaaugcacaauuuagc

SEQ ID NO: 330168 - RNA, 21 nt, Human herpesvirus 6B
cgggaacauagagaacugaga

SEQ ID NO: 330169 - RNA, 19 nt, Human herpesvirus 6B
cgggauguuguuguguuga

SEQ ID NO: 330170 - RNA, 22 nt, Human herpesvirus 6B
cgggcuauaaucacaaauaucc

SEQ ID NO: 330171 - RNA, 18 nt, Human herpesvirus 6B
cggggcgcaccggcgaca

SEQ ID NO: 330172 - RNA, 16 nt, Human herpesvirus 6B
cgguaaaauggaguua

SEQ ID NO: 330173 - RNA, 14 nt, Human herpesvirus 6B
cggucuacugugua

SEQ ID NO: 330174 - RNA, 20 nt, Human herpesvirus 6B
cggucugagguuggagacga

SEQ ID NO: 330175 - RNA, 16 nt, Human herpesvirus 6B
cggugagaagauuugu

SEQ ID NO: 330176 - RNA, 22 nt, Human herpesvirus 6B
cggugagaagauuugugugaac

SEQ ID NO: 330177 - RNA, 22 nt, Human herpesvirus 6B
cggugauaccgucuuugcauau

SEQ ID NO: 330178 - RNA, 20 nt, Human herpesvirus 6B
cggugcauaacaucucagau

SEQ ID NO: 330179 - RNA, 13 nt, Human herpesvirus 6B
cgguuagaucugg

SEQ ID NO: 330180 - RNA, 15 nt, Human herpesvirus 6B
cgguuucgcugcuau

SEQ ID NO: 330181 - RNA, 15 nt, Human herpesvirus 6B
cgguuuucuuacaca

SEQ ID NO: 330182 - RNA, 22 nt, Human herpesvirus 6B
cgguuuucuuacacaugccgca

SEQ ID NO: 330183 - RNA, 13 nt, Human herpesvirus 6B
cguaaccauucug

SEQ ID NO: 330184 - RNA, 21 nt, Human herpesvirus 6B
cguaauagccgaacaaggguu

SEQ ID NO: 330185 - RNA, 15 nt, Human herpesvirus 6B
cguaauggcauucac

SEQ ID NO: 330186 - RNA, 19 nt, Human herpesvirus 6B
cguagcgguuucuagguuu

SEQ ID NO: 330187 - RNA, 15 nt, Human herpesvirus 6B
cguaggcaugucugu

SEQ ID NO: 330188 - RNA, 12 nt, Human herpesvirus 6B
cguauacuuccu

SEQ ID NO: 330189 - RNA, 14 nt, Human herpesvirus 6B
cguauuaauaaaga

SEQ ID NO: 330190 - RNA, 17 nt, Human herpesvirus 6B
cguauucagaguacuuu

SEQ ID NO: 330191 - RNA, 16 nt, Human herpesvirus 6B
cgucauaaacaaaccg

SEQ ID NO: 330192 - RNA, 22 nt, Human herpesvirus 6B
cguccuguucgauguacaguuu

SEQ ID NO: 330193 - RNA, 22 nt, Human herpesvirus 6B
cgucucugaagcaaaagucuua

SEQ ID NO: 330194 - RNA, 15 nt, Human herpesvirus 6B
cgucugauacuugaa

SEQ ID NO: 330195 - RNA, 20 nt, Human herpesvirus 6B
cgucuuaaauggguuuguuc

SEQ ID NO: 330196 - RNA, 16 nt, Human herpesvirus 6B
cgugaaauaucggaua

SEQ ID NO: 330197 - RNA, 21 nt, Human herpesvirus 6B
cgugaauuuucugaagacagc

SEQ ID NO: 330198 - RNA, 22 nt, Human herpesvirus 6B
cgugacacacagaauacaaaaa

SEQ ID NO: 330199 - RNA, 19 nt, Human herpesvirus 6B
cgugagcggcgcauaauaa

SEQ ID NO: 330200 - RNA, 22 nt, Human herpesvirus 6B
cgugccguguuacugacaccac

SEQ ID NO: 330201 - RNA, 17 nt, Human herpesvirus 6B
cguggaauuuguggaac

SEQ ID NO: 330202 - RNA, 21 nt, Human herpesvirus 6B
cguggugaugauuugucgaau

SEQ ID NO: 330203 - RNA, 20 nt, Human herpesvirus 6B
cguguuauggggaagaucua

SEQ ID NO: 330204 - RNA, 17 nt, Human herpesvirus 6B
cguguucgccauauaag

SEQ ID NO: 330205 - RNA, 21 nt, Human herpesvirus 6B
cguuaaaaaaaaugugucuua

SEQ ID NO: 330206 - RNA, 18 nt, Human herpesvirus 6B
cguuacaagcaugcauug

SEQ ID NO: 330207 - RNA, 20 nt, Human herpesvirus 6B
cguuagauguaacucaucaa

SEQ ID NO: 330208 - RNA, 18 nt, Human herpesvirus 6B
cguuaugacgaucaauau

SEQ ID NO: 330209 - RNA, 16 nt, Human herpesvirus 6B
cguucuaacccaugaa

SEQ ID NO: 330210 - RNA, 18 nt, Human herpesvirus 6B
cguucuuugaacagugac

SEQ ID NO: 330211 - RNA, 15 nt, Human herpesvirus 6B
cguuguauguguaau

SEQ ID NO: 330212 - RNA, 20 nt, Human herpesvirus 6B
cguuguuucaguuucaaaua

SEQ ID NO: 330213 - RNA, 22 nt, Human herpesvirus 6B
cguuuaucaugagagagcaaau

SEQ ID NO: 330214 - RNA, 14 nt, Human herpesvirus 6B
cguuuguacauguu

SEQ ID NO: 330215 - RNA, 16 nt, Human herpesvirus 6B
cguuugucaaagcuac

SEQ ID NO: 330216 - RNA, 23 nt, Human herpesvirus 6B
cguuuucgugguugucuuugucc

SEQ ID NO: 330217 - RNA, 16 nt, Human herpesvirus 6B
cuaaaaucugcuaacg

SEQ ID NO: 330218 - RNA, 15 nt, Human herpesvirus 6B
cuaaacaccacuuga

SEQ ID NO: 330219 - RNA, 21 nt, Human herpesvirus 6B
cuaaacacugacuaaacguac

SEQ ID NO: 330220 - RNA, 20 nt, Human herpesvirus 6B
cuaaacggagacugcacaga

SEQ ID NO: 330221 - RNA, 22 nt, Human herpesvirus 6B
cuaaacggagacugcacagaau

SEQ ID NO: 330222 - RNA, 23 nt, Human herpesvirus 6B
cuaaacggagacugcacagaauc

SEQ ID NO: 330223 - RNA, 13 nt, Human herpesvirus 6B
cuaaacuuaacuu

SEQ ID NO: 330224 - RNA, 13 nt, Human herpesvirus 6B
cuaaagauuugga

SEQ ID NO: 330225 - RNA, 13 nt, Human herpesvirus 6B
auauagcuauccu

SEQ ID NO: 330226 - RNA, 24 nt, Human herpesvirus 6B
auauaucuugaaaucuaccauaac

SEQ ID NO: 330227 - RNA, 17 nt, Human herpesvirus 6B
auaucaauuccugugau

SEQ ID NO: 330228 - RNA, 13 nt, Human herpesvirus 6B
auaucacacaucg

SEQ ID NO: 330229 - RNA, 19 nt, Human herpesvirus 6B
auaucacccccauacacac

SEQ ID NO: 330230 - RNA, 20 nt, Human herpesvirus 6B
auaucacccccauacacacc

SEQ ID NO: 330231 - RNA, 19 nt, Human herpesvirus 6B
auaucagcacccucugcaa

SEQ ID NO: 330232 - RNA, 20 nt, Human herpesvirus 6B
auaucagcacccucugcaag

SEQ ID NO: 330233 - RNA, 21 nt, Human herpesvirus 6B
auaucaucuuugggaagucuc

SEQ ID NO: 330234 - RNA, 23 nt, Human herpesvirus 6B
auaucgaaucaugagauacaaaa

SEQ ID NO: 330235 - RNA, 18 nt, Human herpesvirus 6B
auaucgcaagcaaaacac

SEQ ID NO: 330236 - RNA, 20 nt, Human herpesvirus 6B
auaucuacugcaguccagaa

SEQ ID NO: 330237 - RNA, 21 nt, Human herpesvirus 6B
auaucuugaaaucuaccauaa

SEQ ID NO: 330238 - RNA, 14 nt, Human herpesvirus 6B
auaugaaugaucac

SEQ ID NO: 330239 - RNA, 18 nt, Human herpesvirus 6B
auaugaggauuugcuugu

SEQ ID NO: 330240 - RNA, 21 nt, Human herpesvirus 6B
auaugaggauuugcuugucac

SEQ ID NO: 330241 - RNA, 17 nt, Human herpesvirus 6B
auaugagugaauugugc

SEQ ID NO: 330242 - RNA, 23 nt, Human herpesvirus 6B
auaugaucgccgcuaggcagauc

SEQ ID NO: 330243 - RNA, 13 nt, Human herpesvirus 6B
auaugcaucucua

SEQ ID NO: 330244 - RNA, 19 nt, Human herpesvirus 6B
auaugguuccacuuggaag

SEQ ID NO: 330245 - RNA, 17 nt, Human herpesvirus 6B
auauuaauuacauauag

SEQ ID NO: 330246 - RNA, 20 nt, Human herpesvirus 6B
auauuaugucgauacaauaa

SEQ ID NO: 330247 - RNA, 14 nt, Human herpesvirus 6B
auauucugggguau

SEQ ID NO: 330248 - RNA, 19 nt, Human herpesvirus 6B
auauugaucgucauaacga

SEQ ID NO: 330249 - RNA, 18 nt, Human herpesvirus 6B
auauugccuucgcagauu

SEQ ID NO: 330250 - RNA, 23 nt, Human herpesvirus 6B
auauuuccauaaguuaauuccag

SEQ ID NO: 330251 - RNA, 18 nt, Human herpesvirus 6B
auauuuuuucagcuuuca

SEQ ID NO: 330252 - RNA, 19 nt, Human herpesvirus 6B
auauuuuuucagcuuucau

SEQ ID NO: 330253 - RNA, 14 nt, Human herpesvirus 6B
aucaaaaaaaugau

SEQ ID NO: 330254 - RNA, 18 nt, Human herpesvirus 6B
aucaaaaaaugcuuuuau

SEQ ID NO: 330255 - RNA, 22 nt, Human herpesvirus 6B
aucaaaauaaaaauuuuaccua

SEQ ID NO: 330256 - RNA, 22 nt, Human herpesvirus 6B
aucaaaguucggaucugugaca

SEQ ID NO: 330257 - RNA, 18 nt, Human herpesvirus 6B
aucaacacaccugccuag

SEQ ID NO: 330258 - RNA, 19 nt, Human herpesvirus 6B
aucaacuauuuaacaucca

SEQ ID NO: 330259 - RNA, 20 nt, Human herpesvirus 6B
aucaacuauuuaacauccaa

SEQ ID NO: 330260 - RNA, 11 nt, Human herpesvirus 6B
aucaagacuua

SEQ ID NO: 330261 - RNA, 22 nt, Human herpesvirus 6B
aucaagacuuaauaucugacca

SEQ ID NO: 330262 - RNA, 16 nt, Human herpesvirus 6B
aucaagcaaguuccau

SEQ ID NO: 330263 - RNA, 17 nt, Human herpesvirus 6B
aucaauacuuuuuucaa

SEQ ID NO: 330264 - RNA, 12 nt, Human herpesvirus 6B
aucaaucucuau

SEQ ID NO: 330265 - RNA, 19 nt, Human herpesvirus 6B
aucacaaaacuguaccuga

SEQ ID NO: 330266 - RNA, 21 nt, Human herpesvirus 6B
aucacaaaguuuaaguucuca

SEQ ID NO: 330267 - RNA, 22 nt, Human herpesvirus 6B
aucacaaaguuuaaguucucac

SEQ ID NO: 330268 - RNA, 13 nt, Human herpesvirus 6B
aucacaaauaucc

SEQ ID NO: 330269 - RNA, 11 nt, Human herpesvirus 6B
aucacaacaua

SEQ ID NO: 330270 - RNA, 19 nt, Human herpesvirus 6B
aucacaacauaaaaaaaca

SEQ ID NO: 330271 - RNA, 13 nt, Human herpesvirus 6B
aucacaauacaca

SEQ ID NO: 330272 - RNA, 14 nt, Human herpesvirus 6B
aucacaauacacag

SEQ ID NO: 330273 - RNA, 21 nt, Human herpesvirus 6B
aucacaccaaugaucacacac

SEQ ID NO: 330274 - RNA, 17 nt, Human herpesvirus 6B
aucacagagaaaaaaca

SEQ ID NO: 330275 - RNA, 17 nt, Human herpesvirus 6B
aucacgucccauucaca

SEQ ID NO: 330276 - RNA, 18 nt, Human herpesvirus 6B
aucacgucccauucacau

SEQ ID NO: 330277 - RNA, 22 nt, Human herpesvirus 6B
aucacucccuguuuuuguguuc

SEQ ID NO: 330278 - RNA, 12 nt, Human herpesvirus 6B
aucacuuucaca

SEQ ID NO: 330279 - RNA, 20 nt, Human herpesvirus 6B
aucagagcgggcuauaauca

SEQ ID NO: 330280 - RNA, 19 nt, Human herpesvirus 6B
aucagaugaauugugcgug

SEQ ID NO: 330281 - RNA, 14 nt, Human herpesvirus 6B
aucagcauucacuc

SEQ ID NO: 330282 - RNA, 21 nt, Human herpesvirus 6B
aucagcauuuggcagccuaaa

SEQ ID NO: 330283 - RNA, 22 nt, Human herpesvirus 6B
aucagccauuucgccaaaaauu

SEQ ID NO: 330284 - RNA, 21 nt, Human herpesvirus 6B
aucaggguuuuguggaaaaac

SEQ ID NO: 330285 - RNA, 19 nt, Human herpesvirus 6B
aucaguacauagaaucucu

SEQ ID NO: 330286 - RNA, 15 nt, Human herpesvirus 6B
aucauaaaacugcca

SEQ ID NO: 330287 - RNA, 16 nt, Human herpesvirus 6B
aucauaaaacugccaa

SEQ ID NO: 330288 - RNA, 12 nt, Human herpesvirus 6B
aucauacaauau

SEQ ID NO: 330289 - RNA, 17 nt, Human herpesvirus 6B
aucaucgccauagugaa

SEQ ID NO: 330290 - RNA, 23 nt, Human herpesvirus 6B
aucaucuuugggaagucucuagu

SEQ ID NO: 330291 - RNA, 22 nt, Human herpesvirus 6B
aucaugugugccuacuuuggau

SEQ ID NO: 330292 - RNA, 17 nt, Human herpesvirus 6B
auccaaaauacacuaac

SEQ ID NO: 330293 - RNA, 14 nt, Human herpesvirus 6B
auccaacucuacua

SEQ ID NO: 330294 - RNA, 15 nt, Human herpesvirus 6B
auccaauaagaaaca

SEQ ID NO: 330295 - RNA, 17 nt, Human herpesvirus 6B
auccauggauucguucu

SEQ ID NO: 330296 - RNA, 22 nt, Human herpesvirus 6B
auccauggauucguucugacca

SEQ ID NO: 330297 - RNA, 21 nt, Human herpesvirus 6B
aucccagcucaccaccaucua

SEQ ID NO: 330298 - RNA, 21 nt, Human herpesvirus 6B
aucccuaugucaaugugaaua

SEQ ID NO: 330299 - RNA, 21 nt, Human herpesvirus 6B
aucccucguacaagcuuaaua

SEQ ID NO: 330300 - RNA, 18 nt, Human herpesvirus 6B
aucccuuaaaaaaacaca

SEQ ID NO: 330301 - RNA, 16 nt, Human herpesvirus 6B
aacugguucaggauuu

SEQ ID NO: 330302 - RNA, 19 nt, Human herpesvirus 6B
aacuuaucaacuauacuua

SEQ ID NO: 330303 - RNA, 23 nt, Human herpesvirus 6B
aacuuaucaacuauacuuaacuu

SEQ ID NO: 330304 - RNA, 22 nt, Human herpesvirus 6B
aacuucauacccgauguucucu

SEQ ID NO: 330305 - RNA, 19 nt, Human herpesvirus 6B
aacuuggagcuauaugcau

SEQ ID NO: 330306 - RNA, 13 nt, Human herpesvirus 6B
aagaaaaguuuau

SEQ ID NO: 330307 - RNA, 13 nt, Human herpesvirus 6B
aagaaaaucgcaa

SEQ ID NO: 330308 - RNA, 16 nt, Human herpesvirus 6B
aagaaaaugaauucaa

SEQ ID NO: 330309 - RNA, 17 nt, Human herpesvirus 6B
aagaaacaguaaaucuc

SEQ ID NO: 330310 - RNA, 16 nt, Human herpesvirus 6B
aagaaaccuucguucu

SEQ ID NO: 330311 - RNA, 18 nt, Human herpesvirus 6B
aagaacagaaucuucuuu

SEQ ID NO: 330312 - RNA, 14 nt, Human herpesvirus 6B
aagaacaguuuacc

SEQ ID NO: 330313 - RNA, 17 nt, Human herpesvirus 6B
aagaacaguuuaccuau

SEQ ID NO: 330314 - RNA, 19 nt, Human herpesvirus 6B
aagaacaguuuaccuauca

SEQ ID NO: 330315 - RNA, 9 nt, Human herpesvirus 6B
aagaagcau

SEQ ID NO: 330316 - RNA, 18 nt, Human herpesvirus 6B
aagaaggcuaucacuuag

SEQ ID NO: 330317 - RNA, 12 nt, Human herpesvirus 6B
aagaauaagccu

SEQ ID NO: 330318 - RNA, 18 nt, Human herpesvirus 6B
aagaaugggauugucauu

SEQ ID NO: 330319 - RNA, 17 nt, Human herpesvirus 6B
aagacauuaauacuggu

SEQ ID NO: 330320 - RNA, 18 nt, Human herpesvirus 6B
aagacauuaauacugguu

SEQ ID NO: 330321 - RNA, 13 nt, Human herpesvirus 6B
aagacgaucucau

SEQ ID NO: 330322 - RNA, 14 nt, Human herpesvirus 6B
aagacgaucucaua

SEQ ID NO: 330323 - RNA, 13 nt, Human herpesvirus 6B
aagacguuugcuu

SEQ ID NO: 330324 - RNA, 20 nt, Human herpesvirus 6B
aagacuacagacuccucacc

SEQ ID NO: 330325 - RNA, 21 nt, Human herpesvirus 6B
aagacuuauaauauuccugaa

SEQ ID NO: 330326 - RNA, 18 nt, Human herpesvirus 6B
aagagaauacuacaguga

SEQ ID NO: 330327 - RNA, 15 nt, Human herpesvirus 6B
aagagagucagaaau

SEQ ID NO: 330328 - RNA, 18 nt, Human herpesvirus 6B
aagagaucaguacauaga

SEQ ID NO: 330329 - RNA, 14 nt, Human herpesvirus 6B
aagagauuuacugu

SEQ ID NO: 330330 - RNA, 13 nt, Human herpesvirus 6B
aagaggagaccau

SEQ ID NO: 330331 - RNA, 23 nt, Human herpesvirus 6B
aagaggccaauuuaugucauuuc

SEQ ID NO: 330332 - RNA, 17 nt, Human herpesvirus 6B
aagaguuuuccuugaca

SEQ ID NO: 330333 - RNA, 15 nt, Human herpesvirus 6B
aagauagacagugaa

SEQ ID NO: 330334 - RNA, 11 nt, Human herpesvirus 6B
aagauagcucu

SEQ ID NO: 330335 - RNA, 17 nt, Human herpesvirus 6B
aagaugucggaggguuu

SEQ ID NO: 330336 - RNA, 12 nt, Human herpesvirus 6B
aagaugugauac

SEQ ID NO: 330337 - RNA, 22 nt, Human herpesvirus 6B
aagauguguuaaagaaugcuga

SEQ ID NO: 330338 - RNA, 14 nt, Human herpesvirus 6B
aagauuacguccac

SEQ ID NO: 330339 - RNA, 15 nt, Human herpesvirus 6B
aagauugugcaguuc

SEQ ID NO: 330340 - RNA, 20 nt, Human herpesvirus 6B
aagauuuggaggugagacau

SEQ ID NO: 330341 - RNA, 16 nt, Human herpesvirus 6B
aagauuugugugaacg

SEQ ID NO: 330342 - RNA, 17 nt, Human herpesvirus 6B
aagcaaaagucuuauaa

SEQ ID NO: 330343 - RNA, 16 nt, Human herpesvirus 6B
aagcaaacauguaucc

SEQ ID NO: 330344 - RNA, 14 nt, Human herpesvirus 6B
aagcacaaaaccag

SEQ ID NO: 330345 - RNA, 16 nt, Human herpesvirus 6B
aagcacccugcacaaa

SEQ ID NO: 330346 - RNA, 18 nt, Human herpesvirus 6B
aagcaucccuaugucaau

SEQ ID NO: 330347 - RNA, 22 nt, Human herpesvirus 6B
aagcaucugcugcuucuucuuu

SEQ ID NO: 330348 - RNA, 12 nt, Human herpesvirus 6B
aagcaugcauug

SEQ ID NO: 330349 - RNA, 14 nt, Human herpesvirus 6B
aagccgacuuauau

SEQ ID NO: 330350 - RNA, 18 nt, Human herpesvirus 6B
aagccugcauaugaucca

SEQ ID NO: 330351 - RNA, 18 nt, Human herpesvirus 6B
aagcgaagucaugaauuu

SEQ ID NO: 330352 - RNA, 12 nt, Human herpesvirus 6B
aagcgagucuug

SEQ ID NO: 330353 - RNA, 22 nt, Human herpesvirus 6B
aagcgccugccuacacugcgaa

SEQ ID NO: 330354 - RNA, 20 nt, Human herpesvirus 6B
aagcguuuacaaaacuguua

SEQ ID NO: 330355 - RNA, 18 nt, Human herpesvirus 6B
aagcuacucauccucagu

SEQ ID NO: 330356 - RNA, 21 nt, Human herpesvirus 6B
aagcuagcagaagaacagcua

SEQ ID NO: 330357 - RNA, 17 nt, Human herpesvirus 6B
aagcuagugaaucaaau

SEQ ID NO: 330358 - RNA, 19 nt, Human herpesvirus 6B
aagcuauucuaaauaccaa

SEQ ID NO: 330359 - RNA, 16 nt, Human herpesvirus 6B
aagcuuucaucaauca

SEQ ID NO: 330360 - RNA, 14 nt, Human herpesvirus 6B
aagcuuucuguacc

SEQ ID NO: 330361 - RNA, 20 nt, Human herpesvirus 6B
aaggaaaaauaucgaaauaa

SEQ ID NO: 330362 - RNA, 16 nt, Human herpesvirus 6B
aaggaaaacucuugac

SEQ ID NO: 330363 - RNA, 21 nt, Human herpesvirus 6B
aaggaaaacucuugacauagc

SEQ ID NO: 330364 - RNA, 17 nt, Human herpesvirus 6B
aaggagcgucguauuaa

SEQ ID NO: 330365 - RNA, 22 nt, Human herpesvirus 6B
aaggccuucaugagccggcuca

SEQ ID NO: 330366 - RNA, 13 nt, Human herpesvirus 6B
aaggcggagacac

SEQ ID NO: 330367 - RNA, 19 nt, Human herpesvirus 6B
aaggcggagacacauagcc

SEQ ID NO: 330368 - RNA, 20 nt, Human herpesvirus 6B
aaggguaguuuuagggaugg

SEQ ID NO: 330369 - RNA, 19 nt, Human herpesvirus 6B
aagggucgaagacauucaa

SEQ ID NO: 330370 - RNA, 22 nt, Human herpesvirus 6B
aagguacacaauacacaguaga

SEQ ID NO: 330371 - RNA, 18 nt, Human herpesvirus 6B
aaggucaaaaaacucagc

SEQ ID NO: 330372 - RNA, 22 nt, Human herpesvirus 6B
aaggucaaaaaacucagccgau

SEQ ID NO: 330373 - RNA, 18 nt, Human herpesvirus 6B
aaguauacggaagugcau

SEQ ID NO: 330374 - RNA, 24 nt, Human herpesvirus 6B
aaguauacggaagugcaugcgaca

SEQ ID NO: 330375 - RNA, 13 nt, Human herpesvirus 6B
aaguauuguacuu

SEQ ID NO: 330376 - RNA, 14 nt, Human herpesvirus 6B
aagucaccuguaua

SEQ ID NO: 330377 - RNA, 15 nt, Human herpesvirus 6B
aagucaugcuucuuu

SEQ ID NO: 330378 - RNA, 18 nt, Human herpesvirus 6B
aaguccugucgauuugag

SEQ ID NO: 330379 - RNA, 13 nt, Human herpesvirus 6B
aaguccuucauga

SEQ ID NO: 330380 - RNA, 16 nt, Human herpesvirus 6B
aagucuaaugcaaaga

SEQ ID NO: 330381 - RNA, 23 nt, Human herpesvirus 6B
aagucuuauaacaccaguacuuc

SEQ ID NO: 330382 - RNA, 14 nt, Human herpesvirus 6B
aagugcaacaaaga

SEQ ID NO: 330383 - RNA, 13 nt, Human herpesvirus 6B
aagugcaagggua

SEQ ID NO: 330384 - RNA, 22 nt, Human herpesvirus 6B
aagugccgaggaacucugggaa

SEQ ID NO: 330385 - RNA, 14 nt, Human herpesvirus 6B
aagugcuucugcuc

SEQ ID NO: 330386 - RNA, 16 nt, Human herpesvirus 6B
aagugguuuaauggaa

SEQ ID NO: 330387 - RNA, 13 nt, Human herpesvirus 6B
aaguuaauuccag

SEQ ID NO: 330388 - RNA, 18 nt, Human herpesvirus 6B
aaguucggaucugugaca

SEQ ID NO: 330389 - RNA, 21 nt, Human herpesvirus 6B
aaguuggggucucaugacuau

SEQ ID NO: 330390 - RNA, 13 nt, Human herpesvirus 6B
aaguuuacuguga

SEQ ID NO: 330391 - RNA, 13 nt, Human herpesvirus 6B
aaguuucaccaug

SEQ ID NO: 330392 - RNA, 18 nt, Human herpesvirus 6B
aaguuucggcaacugaau

SEQ ID NO: 330393 - RNA, 20 nt, Human herpesvirus 6B
aaguuucuguggaauuccaa

SEQ ID NO: 330394 - RNA, 16 nt, Human herpesvirus 6B
aaguuucuuuugugac

SEQ ID NO: 330395 - RNA, 18 nt, Human herpesvirus 6B
aaguuugucacaccacuc

SEQ ID NO: 330396 - RNA, 16 nt, Human herpesvirus 6B
aaguuuugagugcuau

SEQ ID NO: 330397 - RNA, 14 nt, Human herpesvirus 6B
aauaaaaacucaau

SEQ ID NO: 330398 - RNA, 23 nt, Human herpesvirus 6B
aauaaaauguccauucucagaca

SEQ ID NO: 330399 - RNA, 12 nt, Human herpesvirus 6B
aauaaaauucac

SEQ ID NO: 330400 - RNA, 12 nt, Human herpesvirus 6B
aauaaacaugau

SEQ ID NO: 330401 - RNA, 23 nt, Human herpesvirus 6B
aauaaaggauguuugugacucug

SEQ ID NO: 330402 - RNA, 16 nt, Human herpesvirus 6B
aauaaaguuugucaca

SEQ ID NO: 330403 - RNA, 14 nt, Human herpesvirus 6B
aauaacuacacuua

SEQ ID NO: 330404 - RNA, 12 nt, Human herpesvirus 6B
aauaaugcucag

SEQ ID NO: 330405 - RNA, 17 nt, Human herpesvirus 6B
aguggauguuagaucac

SEQ ID NO: 330406 - RNA, 17 nt, Human herpesvirus 6B
aguguauuauacguguc

SEQ ID NO: 330407 - RNA, 15 nt, Human herpesvirus 6B
aguguucgcauuaga

SEQ ID NO: 330408 - RNA, 17 nt, Human herpesvirus 6B
aguguuugccaaccaaa

SEQ ID NO: 330409 - RNA, 19 nt, Human herpesvirus 6B
aguguuugccaaccaaaug

SEQ ID NO: 330410 - RNA, 12 nt, Human herpesvirus 6B
aguuaagacauu

SEQ ID NO: 330411 - RNA, 23 nt, Human herpesvirus 6B
aguuaaucauucgauuaaugcca

SEQ ID NO: 330412 - RNA, 15 nt, Human herpesvirus 6B
aguuacacauucucc

SEQ ID NO: 330413 - RNA, 18 nt, Human herpesvirus 6B
aguuacggggaagaucua

SEQ ID NO: 330414 - RNA, 14 nt, Human herpesvirus 6B
aguucaccuuguca

SEQ ID NO: 330415 - RNA, 17 nt, Human herpesvirus 6B
aguucaccuugucauca

SEQ ID NO: 330416 - RNA, 13 nt, Human herpesvirus 6B
aguucaguaagau

SEQ ID NO: 330417 - RNA, 17 nt, Human herpesvirus 6B
aguucaguaagauuuaa

SEQ ID NO: 330418 - RNA, 18 nt, Human herpesvirus 6B
aguucaguaagauuuaau

SEQ ID NO: 330419 - RNA, 19 nt, Human herpesvirus 6B
aguucaucagccauuucgc

SEQ ID NO: 330420 - RNA, 17 nt, Human herpesvirus 6B
aguuccaaaacuucuau

SEQ ID NO: 330421 - RNA, 21 nt, Human herpesvirus 6B
aguuccuguuuuucucauaaa

SEQ ID NO: 330422 - RNA, 21 nt, Human herpesvirus 6B
aguuguauuauaaaaacuaau

SEQ ID NO: 330423 - RNA, 16 nt, Human herpesvirus 6B
aguuuaaguucucacg

SEQ ID NO: 330424 - RNA, 17 nt, Human herpesvirus 6B
aguuuaauaguuugcca

SEQ ID NO: 330425 - RNA, 15 nt, Human herpesvirus 6B
aguuucaccaugucc

SEQ ID NO: 330426 - RNA, 19 nt, Human herpesvirus 6B
aguuucuguggaauuccaa

SEQ ID NO: 330427 - RNA, 21 nt, Human herpesvirus 6B
aguuucuguuuuucucauaaa

SEQ ID NO: 330428 - RNA, 20 nt, Human herpesvirus 6B
aguuugucacaccacucucu

SEQ ID NO: 330429 - RNA, 17 nt, Human herpesvirus 6B
aguuuuaucacuuucac

SEQ ID NO: 330430 - RNA, 18 nt, Human herpesvirus 6B
aguuuuaucacuuucaca

SEQ ID NO: 330431 - RNA, 20 nt, Human herpesvirus 6B
aguuuuuuaaaagugcaaca

SEQ ID NO: 330432 - RNA, 12 nt, Human herpesvirus 6B
auaaaaaaccaa

SEQ ID NO: 330433 - RNA, 16 nt, Human herpesvirus 6B
auaaaaaauuuuguca

SEQ ID NO: 330434 - RNA, 13 nt, Human herpesvirus 6B
auaaaaacacaca

SEQ ID NO: 330435 - RNA, 15 nt, Human herpesvirus 6B
auaaaaacuaaugcg

SEQ ID NO: 330436 - RNA, 19 nt, Human herpesvirus 6B
auaaaacaggguugcgaua

SEQ ID NO: 330437 - RNA, 17 nt, Human herpesvirus 6B
auaaaaguuccauuguu

SEQ ID NO: 330438 - RNA, 17 nt, Human herpesvirus 6B
auaaaauacacaucuga

SEQ ID NO: 330439 - RNA, 16 nt, Human herpesvirus 6B
auaaaauguccauucu

SEQ ID NO: 330440 - RNA, 15 nt, Human herpesvirus 6B
auaaacgcugucuca

SEQ ID NO: 330441 - RNA, 12 nt, Human herpesvirus 6B
auaaacucugcc

SEQ ID NO: 330442 - RNA, 18 nt, Human herpesvirus 6B
auaaacugacuuauaagu

SEQ ID NO: 330443 - RNA, 12 nt, Human herpesvirus 6B
auaaaguuaaag

SEQ ID NO: 330444 - RNA, 18 nt, Human herpesvirus 6B
auaaauggcauucuugca

SEQ ID NO: 330445 - RNA, 18 nt, Human herpesvirus 6B
auaaauggcggacccgac

SEQ ID NO: 330446 - RNA, 21 nt, Human herpesvirus 6B
auaaauguagcacacgacaaa

SEQ ID NO: 330447 - RNA, 16 nt, Human herpesvirus 6B
auaacaccaguacuuc

SEQ ID NO: 330448 - RNA, 22 nt, Human herpesvirus 6B
auaacacgcaccuaaacaccac

SEQ ID NO: 330449 - RNA, 11 nt, Human herpesvirus 6B
auaacaucuca

SEQ ID NO: 330450 - RNA, 18 nt, Human herpesvirus 6B
auaacgacaaaagacaaa

SEQ ID NO: 330451 - RNA, 20 nt, Human herpesvirus 6B
auaacggagagcuucuuagg

SEQ ID NO: 330452 - RNA, 15 nt, Human herpesvirus 6B
auaacuuuucuauca

SEQ ID NO: 330453 - RNA, 20 nt, Human herpesvirus 6B
auaacuuuucuaucacuuau

SEQ ID NO: 330454 - RNA, 16 nt, Human herpesvirus 6B
auaagaaacauuauac

SEQ ID NO: 330455 - RNA, 17 nt, Human herpesvirus 6B
auaagaauuacaauaca

SEQ ID NO: 330456 - RNA, 19 nt, Human herpesvirus 6B
auaagacgcugauaacuca

SEQ ID NO: 330457 - RNA, 19 nt, Human herpesvirus 6B
auaagcaaaacucuauucc

SEQ ID NO: 330458 - RNA, 14 nt, Human herpesvirus 6B
auaagcucuacaca

SEQ ID NO: 330459 - RNA, 16 nt, Human herpesvirus 6B
auaaggcaaaaaccag

SEQ ID NO: 330460 - RNA, 15 nt, Human herpesvirus 6B
auaagguaucgucau

SEQ ID NO: 330461 - RNA, 15 nt, Human herpesvirus 6B
auaauaaaaguucca

SEQ ID NO: 330462 - RNA, 23 nt, Human herpesvirus 6B
auaauauuccugaacuacacgau

SEQ ID NO: 330463 - RNA, 19 nt, Human herpesvirus 6B
auaaucacaaauauccuuu

SEQ ID NO: 330464 - RNA, 17 nt, Human herpesvirus 6B
auaauccugucuccuca

SEQ ID NO: 330465 - RNA, 22 nt, Human herpesvirus 6B
auaaucugaucgaaauacuucu

SEQ ID NO: 330466 - RNA, 17 nt, Human herpesvirus 6B
auaaucuuguagcucag

SEQ ID NO: 330467 - RNA, 19 nt, Human herpesvirus 6B
auaaucuuguagcucagug

SEQ ID NO: 330468 - RNA, 22 nt, Human herpesvirus 6B
auaauuagaauaggcgucucau

SEQ ID NO: 330469 - RNA, 23 nt, Human herpesvirus 6B
auaauuagaauaggcgucucaug

SEQ ID NO: 330470 - RNA, 17 nt, Human herpesvirus 6B
auaauuggaacuaugaa

SEQ ID NO: 330471 - RNA, 15 nt, Human herpesvirus 6B
auacacuaacaggau

SEQ ID NO: 330472 - RNA, 13 nt, Human herpesvirus 6B
auacagaaauugg

SEQ ID NO: 330473 - RNA, 17 nt, Human herpesvirus 6B
auacauaaggcaaaaac

SEQ ID NO: 330474 - RNA, 16 nt, Human herpesvirus 6B
auacccgauguucucu

SEQ ID NO: 330475 - RNA, 19 nt, Human herpesvirus 6B
auacccgauguucucucac

SEQ ID NO: 330476 - RNA, 20 nt, Human herpesvirus 6B
auaccgagcgggcuccgucg

SEQ ID NO: 330477 - RNA, 15 nt, Human herpesvirus 6B
auaccgaucccagcu

SEQ ID NO: 330478 - RNA, 19 nt, Human herpesvirus 6B
auaccuauuagcuauaaaa

SEQ ID NO: 330479 - RNA, 20 nt, Human herpesvirus 6B
auacgaggaugaaguuccac

SEQ ID NO: 330480 - RNA, 22 nt, Human herpesvirus 6B
auacgcaggauuauaaaaacac

SEQ ID NO: 330481 - RNA, 16 nt, Human herpesvirus 6B
auacguuaaauaucua

SEQ ID NO: 330482 - RNA, 16 nt, Human herpesvirus 6B
auacuacagugacuuu

SEQ ID NO: 330483 - RNA, 16 nt, Human herpesvirus 6B
auacuacgugucucag

SEQ ID NO: 330484 - RNA, 20 nt, Human herpesvirus 6B
auacuauauauacaagccau

SEQ ID NO: 330485 - RNA, 19 nt, Human herpesvirus 6B
auacuauuuuaguuacaca

SEQ ID NO: 330486 - RNA, 15 nt, Human herpesvirus 6B
ucaaauccucuacgu

SEQ ID NO: 330487 - RNA, 20 nt, Human herpesvirus 6B
ucaaauccucuacguauaaa

SEQ ID NO: 330488 - RNA, 13 nt, Human herpesvirus 6B
ucaaaucucgccg

SEQ ID NO: 330489 - RNA, 22 nt, Human herpesvirus 6B
ucaaaucucgccgaacuagaaa

SEQ ID NO: 330490 - RNA, 12 nt, Human herpesvirus 6B
ucaaauggaugg

SEQ ID NO: 330491 - RNA, 12 nt, Human herpesvirus 6B
ucaaauguagca

SEQ ID NO: 330492 - RNA, 18 nt, Human herpesvirus 6B
ucaaauguagcaaaugaa

SEQ ID NO: 330493 - RNA, 15 nt, Human herpesvirus 6B
ucaaauuuacucucc

SEQ ID NO: 330494 - RNA, 15 nt, Human herpesvirus 6B
ucaacaauguccaau

SEQ ID NO: 330495 - RNA, 16 nt, Human herpesvirus 6B
ucaacacaacgacaaa

SEQ ID NO: 330496 - RNA, 22 nt, Human herpesvirus 6B
ucaacacaacgacaaacaucca

SEQ ID NO: 330497 - RNA, 20 nt, Human herpesvirus 6B
ucaaccuguuuccagaauac

SEQ ID NO: 330498 - RNA, 11 nt, Human herpesvirus 6B
ucaaccuucau

SEQ ID NO: 330499 - RNA, 14 nt, Human herpesvirus 6B
ucaacggcguaaaa

SEQ ID NO: 330500 - RNA, 13 nt, Human herpesvirus 6B
ucaacgucuucaa

SEQ ID NO: 330501 - RNA, 21 nt, Human herpesvirus 6B
ucaacuaaaucaugucuuaca

SEQ ID NO: 330502 - RNA, 17 nt, Human herpesvirus 6B
ucaacuguuacuuucca

SEQ ID NO: 330503 - RNA, 15 nt, Human herpesvirus 6B
ucaagacgaucucau

SEQ ID NO: 330504 - RNA, 19 nt, Human herpesvirus 6B
ucaagaggguuuuuuacaa

SEQ ID NO: 330505 - RNA, 12 nt, Human herpesvirus 6B
ucaagcaaagac

SEQ ID NO: 330506 - RNA, 14 nt, Human herpesvirus 6B
ucaagcaaagacau

SEQ ID NO: 330507 - RNA, 14 nt, Human herpesvirus 6B
ucaauaaaaacuca

SEQ ID NO: 330508 - RNA, 16 nt, Human herpesvirus 6B
ucaauaaacauuucau

SEQ ID NO: 330509 - RNA, 13 nt, Human herpesvirus 6B
ucaauaaauggcg

SEQ ID NO: 330510 - RNA, 19 nt, Human herpesvirus 6B
uccagugagaacauauaaa

SEQ ID NO: 330511 - RNA, 21 nt, Human herpesvirus 6B
uccauccgcuaagagauuuac

SEQ ID NO: 330512 - RNA, 13 nt, Human herpesvirus 6B
uccaucuucagac

SEQ ID NO: 330513 - RNA, 15 nt, Human herpesvirus 6B
uccaugagcacccgc

SEQ ID NO: 330514 - RNA, 16 nt, Human herpesvirus 6B
uccaugcgaguagauu

SEQ ID NO: 330515 - RNA, 19 nt, Human herpesvirus 6B
uccaugcgaguagauucuc

SEQ ID NO: 330516 - RNA, 17 nt, Human herpesvirus 6B
uccauuuuuucccaaaa

SEQ ID NO: 330517 - RNA, 14 nt, Human herpesvirus 6B
ucccaccuaauaaa

SEQ ID NO: 330518 - RNA, 20 nt, Human herpesvirus 6B
ucccagcucaccaccaucua

SEQ ID NO: 330519 - RNA, 18 nt, Human herpesvirus 6B
ucccauauuguccagcac

SEQ ID NO: 330520 - RNA, 20 nt, Human herpesvirus 6B
ucccaugguuccgggaugua

SEQ ID NO: 330521 - RNA, 22 nt, Human herpesvirus 6B
uccccuauauagcuauccuuau

SEQ ID NO: 330522 - RNA, 20 nt, Human herpesvirus 6B
ucccuaugucaaugugaaua

SEQ ID NO: 330523 - RNA, 20 nt, Human herpesvirus 6B
uccgaaaaagguucaaacaa

SEQ ID NO: 330524 - RNA, 16 nt, Human herpesvirus 6B
uccgaaaucaaugagu

SEQ ID NO: 330525 - RNA, 22 nt, Human herpesvirus 6B
uccgaaauuuccuuugugugau

SEQ ID NO: 330526 - RNA, 15 nt, Human herpesvirus 6B
uccgaauucuuacca

SEQ ID NO: 330527 - RNA, 19 nt, Human herpesvirus 6B
uccgcacgcuagcaaugau

SEQ ID NO: 330528 - RNA, 15 nt, Human herpesvirus 6B
uccggaguugcagua

SEQ ID NO: 330529 - RNA, 21 nt, Human herpesvirus 6B
uccggccaauucauuguacga

SEQ ID NO: 330530 - RNA, 12 nt, Human herpesvirus 6B
uccgucauguaa

SEQ ID NO: 330531 - RNA, 18 nt, Human herpesvirus 6B
uccguccauuaaauccua

SEQ ID NO: 330532 - RNA, 15 nt, Human herpesvirus 6B
uccgucucaguguca

SEQ ID NO: 330533 - RNA, 17 nt, Human herpesvirus 6B
uccgugacacacagaau

SEQ ID NO: 330534 - RNA, 22 nt, Human herpesvirus 6B
uccguuaaucuaauaaaauaca

SEQ ID NO: 330535 - RNA, 16 nt, Human herpesvirus 6B
uccuaauaagacagaa

SEQ ID NO: 330536 - RNA, 15 nt, Human herpesvirus 6B
uccuauaaauacuga

SEQ ID NO: 330537 - RNA, 13 nt, Human herpesvirus 6B
uccucagucuuca

SEQ ID NO: 330538 - RNA, 14 nt, Human herpesvirus 6B
uccucagucuucaa

SEQ ID NO: 330539 - RNA, 23 nt, Human herpesvirus 6B
uccucuacguauaaaaguccuca

SEQ ID NO: 330540 - RNA, 14 nt, Human herpesvirus 6B
uccugaaaucugag

SEQ ID NO: 330541 - RNA, 18 nt, Human herpesvirus 6B
uccugaacuacacgauga

SEQ ID NO: 330542 - RNA, 11 nt, Human herpesvirus 6B
uccugaucuca

SEQ ID NO: 330543 - RNA, 22 nt, Human herpesvirus 6B
uccugaucucacgucacaguuu

SEQ ID NO: 330544 - RNA, 13 nt, Human herpesvirus 6B
uccugcaauuuga

SEQ ID NO: 330545 - RNA, 16 nt, Human herpesvirus 6B
uccuguuugaauuuua

SEQ ID NO: 330546 - RNA, 19 nt, Human herpesvirus 6B
uccuuaaaugacacagaau

SEQ ID NO: 330547 - RNA, 15 nt, Human herpesvirus 6B
uccuuacaaaccuuc

SEQ ID NO: 330548 - RNA, 16 nt, Human herpesvirus 6B
uccuuacaaaccuucc

SEQ ID NO: 330549 - RNA, 15 nt, Human herpesvirus 6B
uccuuauaucugaaa

SEQ ID NO: 330550 - RNA, 14 nt, Human herpesvirus 6B
uccuucaaagugaa

SEQ ID NO: 330551 - RNA, 17 nt, Human herpesvirus 6B
uccuucguucuuucaca

SEQ ID NO: 330552 - RNA, 19 nt, Human herpesvirus 6B
uccuuucgcacgcacauau

SEQ ID NO: 330553 - RNA, 13 nt, Human herpesvirus 6B
uccuuucucugcg

SEQ ID NO: 330554 - RNA, 17 nt, Human herpesvirus 6B
uccuuugugugauauua

SEQ ID NO: 330555 - RNA, 19 nt, Human herpesvirus 6B
ucgaaauaacgcaaucuac

SEQ ID NO: 330556 - RNA, 22 nt, Human herpesvirus 6B
ucgaacagauaggcguugugau

SEQ ID NO: 330557 - RNA, 20 nt, Human herpesvirus 6B
ucgaacucuucgauccaaua

SEQ ID NO: 330558 - RNA, 22 nt, Human herpesvirus 6B
ucgaauguuacagauacaaaga

SEQ ID NO: 330559 - RNA, 16 nt, Human herpesvirus 6B
ucgacuucaaacaccu

SEQ ID NO: 330560 - RNA, 21 nt, Human herpesvirus 6B
ucgagaccgacaguauuuacu

SEQ ID NO: 330561 - RNA, 23 nt, Human herpesvirus 6B
ucgagaucguuuugcaacuuaaa

SEQ ID NO: 330562 - RNA, 21 nt, Human herpesvirus 6B
ucgaugauuauucugucuuga

SEQ ID NO: 330563 - RNA, 17 nt, Human herpesvirus 6B
ucgaugauuuuucugcc

SEQ ID NO: 330564 - RNA, 14 nt, Human herpesvirus 6B
ucgauguacaguuu

SEQ ID NO: 330565 - RNA, 17 nt, Human herpesvirus 6B
ucgaugucuugcuauuu

SEQ ID NO: 330566 - RNA, 15 nt, Human herpesvirus 6B
ucgauuaaugccaca

SEQ ID NO: 330567 - RNA, 16 nt, Human herpesvirus 6B
ucgauuaaugccacag

SEQ ID NO: 330568 - RNA, 20 nt, Human herpesvirus 6B
ucgauuauugccgcuucuau

SEQ ID NO: 330569 - RNA, 17 nt, Human herpesvirus 6B
ucgauugccaaaggcac

SEQ ID NO: 330570 - RNA, 20 nt, Human herpesvirus 6B
ucgcaaaccguccaaaccga

SEQ ID NO: 330571 - RNA, 19 nt, Human herpesvirus 6B
ucgcacaaaaugauugcaa

SEQ ID NO: 330572 - RNA, 19 nt, Human herpesvirus 6B
ucgcaguccagcacagcau

SEQ ID NO: 330573 - RNA, 22 nt, Human herpesvirus 6B
ucgcauuucucuacaugccaca

SEQ ID NO: 330574 - RNA, 21 nt, Human herpesvirus 6B
ucgccgcuccggacccuccac

SEQ ID NO: 330575 - RNA, 22 nt, Human herpesvirus 6B
ucgccuggccucccauguaugc

SEQ ID NO: 330576 - RNA, 14 nt, Human herpesvirus 6B
ucgcgaagccuguc

SEQ ID NO: 330577 - RNA, 21 nt, Human herpesvirus 6B
ucgcgauagucaugcacuccg

SEQ ID NO: 330578 - RNA, 17 nt, Human herpesvirus 6B
ucgcucagcguggaauu

SEQ ID NO: 330579 - RNA, 16 nt, Human herpesvirus 6B
ucggaagaaaagcuau

SEQ ID NO: 330580 - RNA, 22 nt, Human herpesvirus 6B
ucggagcuuccgucacaacauu

SEQ ID NO: 330581 - RNA, 14 nt, Human herpesvirus 6B
ucggucuacugugu

SEQ ID NO: 330582 - RNA, 16 nt, Human herpesvirus 6B
ucgguuucgcugcuau

SEQ ID NO: 330583 - RNA, 12 nt, Human herpesvirus 6B
ucguaaccauuc

SEQ ID NO: 330584 - RNA, 20 nt, Human herpesvirus 6B
ucguauaaauuuaacuaaga

SEQ ID NO: 330585 - RNA, 17 nt, Human herpesvirus 6B
ucgucauaccgauccca

SEQ ID NO: 330586 - RNA, 15 nt, Human herpesvirus 6B
ucgucugauacuuga

SEQ ID NO: 330587 - RNA, 16 nt, Human herpesvirus 6B
ucgucugauacuugaa

SEQ ID NO: 330588 - RNA, 18 nt, Human herpesvirus 6B
ucgugauccgaauccuga

SEQ ID NO: 330589 - RNA, 20 nt, Human herpesvirus 6B
ucgugguugucuuuguccua

SEQ ID NO: 330590 - RNA, 16 nt, Human herpesvirus 6B
ucgugugcuacauuua

SEQ ID NO: 330591 - RNA, 17 nt, Human herpesvirus 6B
ucguguguguguaugcu

SEQ ID NO: 330592 - RNA, 19 nt, Human herpesvirus 6B
ucguucagaauguuccaau

SEQ ID NO: 330593 - RNA, 22 nt, Human herpesvirus 6B
ucguucuugauccccccaaaau

SEQ ID NO: 330594 - RNA, 19 nt, Human herpesvirus 6B
ucguugucugacuuagaua

SEQ ID NO: 330595 - RNA, 22 nt, Human herpesvirus 6B
ucguuucugugaaucugcugau

SEQ ID NO: 330596 - RNA, 18 nt, Human herpesvirus 6B
ucguuuguugaaugcuua

SEQ ID NO: 330597 - RNA, 16 nt, Human herpesvirus 6B
ucguuuuaguuguaug

SEQ ID NO: 330598 - RNA, 14 nt, Human herpesvirus 6B
ucguuuuuauucau

SEQ ID NO: 330599 - RNA, 16 nt, Human herpesvirus 6B
ucuaaaacaagaccga

SEQ ID NO: 330600 - RNA, 13 nt, Human herpesvirus 6B
ucuaagauauuau

SEQ ID NO: 330601 - RNA, 21 nt, Human herpesvirus 6B
ucuaaggugacucuucucuaa

SEQ ID NO: 330602 - RNA, 14 nt, Human herpesvirus 6B
ucuaauaaaauaca

SEQ ID NO: 330603 - RNA, 23 nt, Human herpesvirus 6B
ucuaaucaucggaggcaccuugu

SEQ ID NO: 330604 - RNA, 20 nt, Human herpesvirus 6B
ucuaaugcuagauaacucag

SEQ ID NO: 330605 - RNA, 18 nt, Human herpesvirus 6B
ucuacaccaggaguuuaa

SEQ ID NO: 330606 - RNA, 13 nt, Human herpesvirus 6B
ucuacaugccaca

SEQ ID NO: 330607 - RNA, 14 nt, Human herpesvirus 6B
ucuacaugccacag

SEQ ID NO: 330608 - RNA, 15 nt, Human herpesvirus 6B
ucuacaugccacaga

SEQ ID NO: 330609 - RNA, 14 nt, Human herpesvirus 6B
ucuacccuaucgau

SEQ ID NO: 330610 - RNA, 21 nt, Human herpesvirus 6B
ucuacguauaaaaguccucaa

SEQ ID NO: 330611 - RNA, 15 nt, Human herpesvirus 6B
ucuacguuagcuucc

SEQ ID NO: 330612 - RNA, 17 nt, Human herpesvirus 6B
ucuacuguguauugugu

SEQ ID NO: 330613 - RNA, 18 nt, Human herpesvirus 6B
ucuacuguguauugugua

SEQ ID NO: 330614 - RNA, 20 nt, Human herpesvirus 6B
ucuacuuuaucuuuugcaaa

SEQ ID NO: 330615 - RNA, 22 nt, Human herpesvirus 6B
ucuagguacggcgucacacagc

SEQ ID NO: 330616 - RNA, 16 nt, Human herpesvirus 6B
ucuaguguuucgcaga

SEQ ID NO: 330617 - RNA, 13 nt, Human herpesvirus 6B
ucuauguacugau

SEQ ID NO: 330618 - RNA, 14 nt, Human herpesvirus 6B
ucuauguacugauc

SEQ ID NO: 330619 - RNA, 15 nt, Human herpesvirus 6B
ucuauuauguaaaac

SEQ ID NO: 330620 - RNA, 22 nt, Human herpesvirus 6B
ucucaaauuuuccaaacauuau

SEQ ID NO: 330621 - RNA, 21 nt, Human herpesvirus 6B
ucucaaugcggguacuauaga

SEQ ID NO: 330622 - RNA, 16 nt, Human herpesvirus 6B
ucucacgucacaguuu

SEQ ID NO: 330623 - RNA, 11 nt, Human herpesvirus 6B
cuauguuaaca

SEQ ID NO: 330624 - RNA, 17 nt, Human herpesvirus 6B
cuauguuaacauuguga

SEQ ID NO: 330625 - RNA, 13 nt, Human herpesvirus 6B
cuauuaacacaua

SEQ ID NO: 330626 - RNA, 14 nt, Human herpesvirus 6B
cuauuaacacauac

SEQ ID NO: 330627 - RNA, 16 nt, Human herpesvirus 6B
cuauuaacacauacau

SEQ ID NO: 330628 - RNA, 17 nt, Human herpesvirus 6B
cuauuauguaaaaccuc

SEQ ID NO: 330629 - RNA, 23 nt, Human herpesvirus 6B
cuauuauguaaaaccucagcaaa

SEQ ID NO: 330630 - RNA, 15 nt, Human herpesvirus 6B
cuauucagaggugcu

SEQ ID NO: 330631 - RNA, 17 nt, Human herpesvirus 6B
cuauucagaggugcuga

SEQ ID NO: 330632 - RNA, 14 nt, Human herpesvirus 6B
cuauuuaacaucca

SEQ ID NO: 330633 - RNA, 17 nt, Human herpesvirus 6B
cuauuuaacauccaaaa

SEQ ID NO: 330634 - RNA, 19 nt, Human herpesvirus 6B
cuauuuaacauccaaaaua

SEQ ID NO: 330635 - RNA, 22 nt, Human herpesvirus 6B
cucaaaccguagagcaaauucu

SEQ ID NO: 330636 - RNA, 15 nt, Human herpesvirus 6B
cucaagagugcugau

SEQ ID NO: 330637 - RNA, 16 nt, Human herpesvirus 6B
cucaagauucuaugau

SEQ ID NO: 330638 - RNA, 20 nt, Human herpesvirus 6B
cucaaugcggguacuauaga

SEQ ID NO: 330639 - RNA, 14 nt, Human herpesvirus 6B
cucacaacaugauc

SEQ ID NO: 330640 - RNA, 16 nt, Human herpesvirus 6B
cucacaugcgagcaaa

SEQ ID NO: 330641 - RNA, 15 nt, Human herpesvirus 6B
cucacccgacaugcu

SEQ ID NO: 330642 - RNA, 20 nt, Human herpesvirus 6B
cucacccgauauaucgugau

SEQ ID NO: 330643 - RNA, 15 nt, Human herpesvirus 6B
cucacggccauuuaa

SEQ ID NO: 330644 - RNA, 16 nt, Human herpesvirus 6B
cucacguuuugggaaa

SEQ ID NO: 330645 - RNA, 24 nt, Human herpesvirus 6B
cucacguuuugggaaaucugacaa

SEQ ID NO: 330646 - RNA, 23 nt, Human herpesvirus 6B
cucagauauauacuuacuugagu

SEQ ID NO: 330647 - RNA, 13 nt, Human herpesvirus 6B
cucagauucgcaa

SEQ ID NO: 330648 - RNA, 17 nt, Human herpesvirus 6B
cucagcaaacaugugau

SEQ ID NO: 330649 - RNA, 13 nt, Human herpesvirus 6B
cucaguguuugcc

SEQ ID NO: 330650 - RNA, 15 nt, Human herpesvirus 6B
cucauaaaguuaaag

SEQ ID NO: 330651 - RNA, 13 nt, Human herpesvirus 6B
cucauacauccag

SEQ ID NO: 330652 - RNA, 20 nt, Human herpesvirus 6B
cucauagauuucauacugua

SEQ ID NO: 330653 - RNA, 21 nt, Human herpesvirus 6B
cucauagauuucauacuguau

SEQ ID NO: 330654 - RNA, 22 nt, Human herpesvirus 6B
cucaucccuuaaaaaaacacag

SEQ ID NO: 330655 - RNA, 15 nt, Human herpesvirus 6B
cucauccucagucuu

SEQ ID NO: 330656 - RNA, 18 nt, Human herpesvirus 6B
cucauccucagucuucaa

SEQ ID NO: 330657 - RNA, 16 nt, Human herpesvirus 6B
cucaucugcgucaaug

SEQ ID NO: 330658 - RNA, 13 nt, Human herpesvirus 6B
cucauuugcaauu

SEQ ID NO: 330659 - RNA, 20 nt, Human herpesvirus 6B
cuccaacggagaaaacuaua

SEQ ID NO: 330660 - RNA, 16 nt, Human herpesvirus 6B
cuccaauagauuucau

SEQ ID NO: 330661 - RNA, 20 nt, Human herpesvirus 6B
cuccacacuguuuacuuaaa

SEQ ID NO: 330662 - RNA, 17 nt, Human herpesvirus 6B
cuccauccgucauguaa

SEQ ID NO: 330663 - RNA, 21 nt, Human herpesvirus 6B
cuccgauuaucuuaguaauuu

SEQ ID NO: 330664 - RNA, 20 nt, Human herpesvirus 6B
cuccgcacgcuagcaaugau

SEQ ID NO: 330665 - RNA, 22 nt, Human herpesvirus 6B
cuccgggggaaaccucaaaaau

SEQ ID NO: 330666 - RNA, 14 nt, Human herpesvirus 6B
cuccucaccgaaau

SEQ ID NO: 330667 - RNA, 21 nt, Human herpesvirus 6B
cucgacguguaucgauuuaac

SEQ ID NO: 330668 - RNA, 14 nt, Human herpesvirus 6B
cucgacuucuuuca

SEQ ID NO: 330669 - RNA, 17 nt, Human herpesvirus 6B
cucggcucuuugcugau

SEQ ID NO: 330670 - RNA, 20 nt, Human herpesvirus 6B
cucgugccaguucacacaga

SEQ ID NO: 330671 - RNA, 18 nt, Human herpesvirus 6B
cucuaaaaccugcuaacg

SEQ ID NO: 330672 - RNA, 15 nt, Human herpesvirus 6B
cucuaacuguuguuc

SEQ ID NO: 330673 - RNA, 20 nt, Human herpesvirus 6B
cucuaacuguuguucuugga

SEQ ID NO: 330674 - RNA, 13 nt, Human herpesvirus 6B
cucuacaugccac

SEQ ID NO: 330675 - RNA, 14 nt, Human herpesvirus 6B
cucuacgaucucau

SEQ ID NO: 330676 - RNA, 20 nt, Human herpesvirus 6B
cucuacgaucucauaugcau

SEQ ID NO: 330677 - RNA, 22 nt, Human herpesvirus 6B
cucuauuuuuuauuaguauccu

SEQ ID NO: 330678 - RNA, 21 nt, Human herpesvirus 6B
cucucaaugcggguacuauag

SEQ ID NO: 330679 - RNA, 24 nt, Human herpesvirus 6B
cucuccaaguuagaaauuacacau

SEQ ID NO: 330680 - RNA, 15 nt, Human herpesvirus 6B
cucucgaugaaaguu

SEQ ID NO: 330681 - RNA, 15 nt, Human herpesvirus 6B
cucucuuucaguaau

SEQ ID NO: 330682 - RNA, 14 nt, Human herpesvirus 6B
cucugaagcaaaag

SEQ ID NO: 330683 - RNA, 22 nt, Human herpesvirus 6B
cucugccuguucaacgucuuca

SEQ ID NO: 330684 - RNA, 20 nt, Human herpesvirus 6B
cucugggaacauguaacuaa

SEQ ID NO: 330685 - RNA, 23 nt, Human herpesvirus 6B
cucugggaaggaacauacacucu

SEQ ID NO: 330686 - RNA, 17 nt, Human herpesvirus 6B
cucugggugaguuuuau

SEQ ID NO: 330687 - RNA, 16 nt, Human herpesvirus 6B
cucugguaaaugucaa

SEQ ID NO: 330688 - RNA, 20 nt, Human herpesvirus 6B
cucugguaaaugucaaagaa

SEQ ID NO: 330689 - RNA, 19 nt, Human herpesvirus 6B
cucuuagagauaucugcau

SEQ ID NO: 330690 - RNA, 17 nt, Human herpesvirus 6B
cucuuauggcaagcacu

SEQ ID NO: 330691 - RNA, 18 nt, Human herpesvirus 6B
cucuucccacaaaccauc

SEQ ID NO: 330692 - RNA, 15 nt, Human herpesvirus 6B
cucuuuuuaauucca

SEQ ID NO: 330693 - RNA, 16 nt, Human herpesvirus 6B
cucuuuuuaauuccaa

SEQ ID NO: 330694 - RNA, 18 nt, Human herpesvirus 6B
cugaaacuccacgaucua

SEQ ID NO: 330695 - RNA, 22 nt, Human herpesvirus 6B
cugaacacccgcguccuccauc

SEQ ID NO: 330696 - RNA, 20 nt, Human herpesvirus 6B
cugaagcuaucggacaggcg

SEQ ID NO: 330697 - RNA, 15 nt, Human herpesvirus 6B
cugaauuuaaugcaa

SEQ ID NO: 330698 - RNA, 13 nt, Human herpesvirus 6B
cugacacaaucag

SEQ ID NO: 330699 - RNA, 14 nt, Human herpesvirus 6B
cugacaucugcaaa

SEQ ID NO: 330700 - RNA, 17 nt, Human herpesvirus 6B
cugacaucugcaaaaac

SEQ ID NO: 330701 - RNA, 19 nt, Human herpesvirus 6B
cugacaucugcaaaaacaa

SEQ ID NO: 330702 - RNA, 19 nt, Human herpesvirus 6B
cugaccguucaccauucca

SEQ ID NO: 330703 - RNA, 15 nt, Human herpesvirus 6B
cugacucucuuucag

SEQ ID NO: 330704 - RNA, 20 nt, Human herpesvirus 6B
cugacugaaaguuauauucu

SEQ ID NO: 330705 - RNA, 19 nt, Human herpesvirus 6B
cugacuuauaagucaucau

SEQ ID NO: 330706 - RNA, 12 nt, Human herpesvirus 6B
cugagacaguca

SEQ ID NO: 330707 - RNA, 14 nt, Human herpesvirus 6B
cugaggacggugag

SEQ ID NO: 330708 - RNA, 13 nt, Human herpesvirus 6B
cugauacuugaaa

SEQ ID NO: 330709 - RNA, 15 nt, Human herpesvirus 6B
cugauuauuaucaca

SEQ ID NO: 330710 - RNA, 23 nt, Human herpesvirus 6B
cugauuccuucaauguuuuucaa

SEQ ID NO: 330711 - RNA, 20 nt, Human herpesvirus 6B
cugauucgacaaaucaucac

SEQ ID NO: 330712 - RNA, 10 nt, Human herpesvirus 6B
cugauuucag

SEQ ID NO: 330713 - RNA, 13 nt, Human herpesvirus 6B
cugcaagcucaug

SEQ ID NO: 330714 - RNA, 23 nt, Human herpesvirus 6B
cugcaagcucaugaacaucguca

SEQ ID NO: 330715 - RNA, 16 nt, Human herpesvirus 6B
cugcagcgauauggaa

SEQ ID NO: 330716 - RNA, 18 nt, Human herpesvirus 6B
cugcauacagaaauugga

SEQ ID NO: 330717 - RNA, 14 nt, Human herpesvirus 6B
cugcauuaauguca

SEQ ID NO: 330718 - RNA, 15 nt, Human herpesvirus 6B
cugcauuuauaucaa

SEQ ID NO: 330719 - RNA, 16 nt, Human herpesvirus 6B
cugcauuuauaucaaa

SEQ ID NO: 330720 - RNA, 15 nt, Human herpesvirus 6B
cugccagaaaaacua

SEQ ID NO: 330721 - RNA, 16 nt, Human herpesvirus 6B
cugccuacacugcgaa

SEQ ID NO: 330722 - RNA, 20 nt, Human herpesvirus 6B
cugccuguucaacgucuuca

SEQ ID NO: 330723 - RNA, 14 nt, Human herpesvirus 6B
cugccuuaauguau

SEQ ID NO: 330724 - RNA, 13 nt, Human herpesvirus 6B
cugccuucacuuu

SEQ ID NO: 330725 - RNA, 15 nt, Human herpesvirus 6B
cugcggaaauaaaaa

SEQ ID NO: 330726 - RNA, 19 nt, Human herpesvirus 6B
cugcuaaaaaucaucucgu

SEQ ID NO: 330727 - RNA, 19 nt, Human herpesvirus 6B
cugcuuagcguauuuuggc

SEQ ID NO: 330728 - RNA, 18 nt, Human herpesvirus 6B
cuggaaaacuaugugcau

SEQ ID NO: 330729 - RNA, 21 nt, Human herpesvirus 6B
cuggaaaacuaugugcauucc

SEQ ID NO: 330730 - RNA, 17 nt, Human herpesvirus 6B
cuggaggcgaacuaaga

SEQ ID NO: 330731 - RNA, 16 nt, Human herpesvirus 6B
cuggcccgaggauuau

SEQ ID NO: 330732 - RNA, 19 nt, Human herpesvirus 6B
cuggccucccauguaugca

SEQ ID NO: 330733 - RNA, 13 nt, Human herpesvirus 6B
cuggcugagauuc

SEQ ID NO: 330734 - RNA, 17 nt, Human herpesvirus 6B
cuggcugagauucacuc

SEQ ID NO: 330735 - RNA, 22 nt, Human herpesvirus 6B
cugggaaggaacauacacucuc

SEQ ID NO: 330736 - RNA, 17 nt, Human herpesvirus 6B
cugggauuauucuggua

SEQ ID NO: 330737 - RNA, 20 nt, Human herpesvirus 6B
cugggugauugggagcucac

SEQ ID NO: 330738 - RNA, 15 nt, Human herpesvirus 6B
cuggucugcuugcaa

SEQ ID NO: 330739 - RNA, 14 nt, Human herpesvirus 6B
cugguuuccaguac

SEQ ID NO: 330740 - RNA, 20 nt, Human herpesvirus 6B
cuguaauaguauugucugau

SEQ ID NO: 330741 - RNA, 15 nt, Human herpesvirus 6B
cuguaguugaugcug

SEQ ID NO: 330742 - RNA, 11 nt, Human herpesvirus 6B
cugucaaggaa

SEQ ID NO: 330743 - RNA, 12 nt, Human herpesvirus 6B
cugucacacucu

SEQ ID NO: 330744 - RNA, 16 nt, Human herpesvirus 6B
cugucacacucugaac

SEQ ID NO: 330745 - RNA, 16 nt, Human herpesvirus 6B
cuguccgugacacaca

SEQ ID NO: 330746 - RNA, 20 nt, Human herpesvirus 6B
cuguccgugacacacagaau

SEQ ID NO: 330747 - RNA, 19 nt, Human herpesvirus 6B
cugucucagauauauacuu

SEQ ID NO: 330748 - RNA, 14 nt, Human herpesvirus 6B
cugucuuccuguga

SEQ ID NO: 330749 - RNA, 12 nt, Human herpesvirus 6B
cugucuugcagc

SEQ ID NO: 330750 - RNA, 17 nt, Human herpesvirus 6B
cugugaagaggugcaaa

SEQ ID NO: 330751 - RNA, 17 nt, Human herpesvirus 6B
cugugcgaaaacggguu

SEQ ID NO: 330752 - RNA, 14 nt, Human herpesvirus 6B
cuguguauugugau

SEQ ID NO: 330753 - RNA, 13 nt, Human herpesvirus 6B
cuguuacuaugua

SEQ ID NO: 330754 - RNA, 13 nt, Human herpesvirus 6B
cuguucgguuuaa

SEQ ID NO: 330755 - RNA, 16 nt, Human herpesvirus 6B
cuguucgguuuaauua

SEQ ID NO: 330756 - RNA, 20 nt, Human herpesvirus 6B
cuguucuucaucaucaccaa

SEQ ID NO: 330757 - RNA, 12 nt, Human herpesvirus 6B
cuguucuuucaa

SEQ ID NO: 330758 - RNA, 15 nt, Human herpesvirus 6B
cuguucuuucaaaau

SEQ ID NO: 330759 - RNA, 22 nt, Human herpesvirus 6B
cuguuggagagacguuguuuga

SEQ ID NO: 330760 - RNA, 16 nt, Human herpesvirus 6B
cuguuuacgaaugaug

SEQ ID NO: 330761 - RNA, 17 nt, Human herpesvirus 6B
cuguuuccaauguccau

SEQ ID NO: 330762 - RNA, 14 nt, Human herpesvirus 6B
cuguuuccagaaua

SEQ ID NO: 330763 - RNA, 12 nt, Human herpesvirus 6B
cuguuuccagag

SEQ ID NO: 330764 - RNA, 23 nt, Human herpesvirus 6B
cuguuuucgccaucaaucucuau

SEQ ID NO: 330765 - RNA, 20 nt, Human herpesvirus 6B
cuguuuugagagcuacacau

SEQ ID NO: 330766 - RNA, 18 nt, Human herpesvirus 6B
cuuaaagcgugugauuca

SEQ ID NO: 330767 - RNA, 22 nt, Human herpesvirus 6B
cuuaaagcgugugauucaguau

SEQ ID NO: 330768 - RNA, 17 nt, Human herpesvirus 6B
cuuaaaugacacagaau

SEQ ID NO: 330769 - RNA, 12 nt, Human herpesvirus 6B
cuuaaauucaau

SEQ ID NO: 330770 - RNA, 16 nt, Human herpesvirus 6B
cuuaauaacuacacuu

SEQ ID NO: 330771 - RNA, 15 nt, Human herpesvirus 6B
cuuaaugaaugugcu

SEQ ID NO: 330772 - RNA, 13 nt, Human herpesvirus 6B
cuuacaaaccuuc

SEQ ID NO: 330773 - RNA, 21 nt, Human herpesvirus 6B
cuuacaaaccuucccuaucac

SEQ ID NO: 330774 - RNA, 23 nt, Human herpesvirus 6B
cuuacaaaccuucccuaucacaa

SEQ ID NO: 330775 - RNA, 19 nt, Human herpesvirus 6B
cuuacaauguucuugacaa

SEQ ID NO: 330776 - RNA, 17 nt, Human herpesvirus 6B
cuuacaucgauccaaaa

SEQ ID NO: 330777 - RNA, 15 nt, Human herpesvirus 6B
cuuaccaagaaauca

SEQ ID NO: 330778 - RNA, 17 nt, Human herpesvirus 6B
cuuaccaagaaaucacg

SEQ ID NO: 330779 - RNA, 22 nt, Human herpesvirus 6B
cuuacgugccguguuacugaca

SEQ ID NO: 330780 - RNA, 23 nt, Human herpesvirus 6B
cuuacuaaguuuugagugcuauu

SEQ ID NO: 330781 - RNA, 22 nt, Human herpesvirus 6B
cuuacuguaaacaaauucuuac

SEQ ID NO: 330782 - RNA, 16 nt, Human herpesvirus 6B
cuuagagauaucugca

SEQ ID NO: 330783 - RNA, 17 nt, Human herpesvirus 6B
cuuagagauaucugcau

SEQ ID NO: 330784 - RNA, 20 nt, Human herpesvirus 6B
cuuauaauuggaacuaugaa

SEQ ID NO: 330785 - RNA, 15 nt, Human herpesvirus 6B
cuuauacgcaggauu

SEQ ID NO: 330786 - RNA, 13 nt, Human herpesvirus 6B
cuuauaucugaaa

SEQ ID NO: 330787 - RNA, 19 nt, Human herpesvirus 6B
cuuauauuaaagauugcau

SEQ ID NO: 330788 - RNA, 16 nt, Human herpesvirus 6B
cuuaucaaauuacaau

SEQ ID NO: 330789 - RNA, 18 nt, Human herpesvirus 6B
cuuaugaucggcauuugu

SEQ ID NO: 330790 - RNA, 17 nt, Human herpesvirus 6B
cuuauggcaagcacuga

SEQ ID NO: 330791 - RNA, 11 nt, Human herpesvirus 6B
cuuauuacaau

SEQ ID NO: 330792 - RNA, 23 nt, Human herpesvirus 6B
cuuauuuaugaaaauugcucuau

SEQ ID NO: 330793 - RNA, 22 nt, Human herpesvirus 6B
cuuauuucgaaagagauauagc

SEQ ID NO: 330794 - RNA, 13 nt, Human herpesvirus 6B
cuuauuucuaaac

SEQ ID NO: 330795 - RNA, 22 nt, Human herpesvirus 6B
cuucaaagugaauuccuggaca

SEQ ID NO: 330796 - RNA, 14 nt, Human herpesvirus 6B
cuucaacauaucac

SEQ ID NO: 330797 - RNA, 22 nt, Human herpesvirus 6B
cuucaagaaaaucgcaaaagaa

SEQ ID NO: 330798 - RNA, 21 nt, Human herpesvirus 6B
cuucaagaaugccgugaacug

SEQ ID NO: 330799 - RNA, 17 nt, Human herpesvirus 6B
cuucaauaaaaacucaa

SEQ ID NO: 330800 - RNA, 18 nt, Human herpesvirus 6B
cuucaauaaaaacucaau

SEQ ID NO: 330801 - RNA, 15 nt, Human herpesvirus 6B
cuucaauguuuuuca

SEQ ID NO: 330802 - RNA, 12 nt, Human herpesvirus 6B
cuucacaucucg

SEQ ID NO: 330803 - RNA, 16 nt, Human herpesvirus 6B
cuucaccgucucugaa

SEQ ID NO: 330804 - RNA, 20 nt, Human herpesvirus 6B
cuucauacccgauguucucu

SEQ ID NO: 330805 - RNA, 13 nt, Human herpesvirus 6B
cuuccccauaaca

SEQ ID NO: 330806 - RNA, 16 nt, Human herpesvirus 6B
cuuccugaaaucugag

SEQ ID NO: 330807 - RNA, 16 nt, Human herpesvirus 6B
cuuccuguccgugaga

SEQ ID NO: 330808 - RNA, 22 nt, Human herpesvirus 6B
cuuccuguccgugagacaccgc

SEQ ID NO: 330809 - RNA, 22 nt, Human herpesvirus 6B
cuucggaaaaaugggugaaauc

SEQ ID NO: 330810 - RNA, 13 nt, Human herpesvirus 6B
cuucgucuucuaa

SEQ ID NO: 330811 - RNA, 22 nt, Human herpesvirus 6B
cuucuacuuuaucuuuugcaaa

SEQ ID NO: 330812 - RNA, 16 nt, Human herpesvirus 6B
cuucuauaugcguguu

SEQ ID NO: 330813 - RNA, 15 nt, Human herpesvirus 6B
cuucucuaaaaacua

SEQ ID NO: 330814 - RNA, 15 nt, Human herpesvirus 6B
cuucuggauacugau

SEQ ID NO: 330815 - RNA, 18 nt, Human herpesvirus 6B
cuucuggauacugaugaa

SEQ ID NO: 330816 - RNA, 16 nt, Human herpesvirus 6B
cuucuuuuaguauuua

SEQ ID NO: 330817 - RNA, 19 nt, Human herpesvirus 6B
cuucuuuuaguauuuacca

SEQ ID NO: 330818 - RNA, 20 nt, Human herpesvirus 6B
cuugaaaagccccugcuuga

SEQ ID NO: 330819 - RNA, 14 nt, Human herpesvirus 6B
cuugaaccaaguca

SEQ ID NO: 330820 - RNA, 15 nt, Human herpesvirus 6B
cuugaagaugugaua

SEQ ID NO: 330821 - RNA, 16 nt, Human herpesvirus 6B
cuugaagaugugauac

SEQ ID NO: 330822 - RNA, 13 nt, Human herpesvirus 6B
cuugacaguuccc

SEQ ID NO: 330823 - RNA, 13 nt, Human herpesvirus 6B
cuugauaaacugu

SEQ ID NO: 330824 - RNA, 17 nt, Human herpesvirus 6B
cuugaucacaacauaaa

SEQ ID NO: 330825 - RNA, 17 nt, Human herpesvirus 6B
cuuggagcuauaugcau

SEQ ID NO: 330826 - RNA, 18 nt, Human herpesvirus 6B
cuuggcuaucgcaaugau

SEQ ID NO: 330827 - RNA, 21 nt, Human herpesvirus 6B
cuugggcauaaguccaguaac

SEQ ID NO: 330828 - RNA, 12 nt, Human herpesvirus 6B
cuuguagcucag

SEQ ID NO: 330829 - RNA, 15 nt, Human herpesvirus 6B
cuuguagcucagugu

SEQ ID NO: 330830 - RNA, 17 nt, Human herpesvirus 6B
cuugucaauaaacauuu

SEQ ID NO: 330831 - RNA, 20 nt, Human herpesvirus 6B
cuugucaccccucgugaaau

SEQ ID NO: 330832 - RNA, 19 nt, Human herpesvirus 6B
cuugugugaaaguauugua

SEQ ID NO: 330833 - RNA, 14 nt, Human herpesvirus 6B
cuuuaaagauuaga

SEQ ID NO: 330834 - RNA, 20 nt, Human herpesvirus 6B
cuuuagauggaaaacugcag

SEQ ID NO: 330835 - RNA, 18 nt, Human herpesvirus 6B
cuuuauccggccaauuca

SEQ ID NO: 330836 - RNA, 16 nt, Human herpesvirus 6B
cuuuauggagauuuga

SEQ ID NO: 330837 - RNA, 20 nt, Human herpesvirus 6B
cuuuauuguuaacauguaca

SEQ ID NO: 330838 - RNA, 20 nt, Human herpesvirus 6B
cuuucaaaaugaccagagau

SEQ ID NO: 330839 - RNA, 22 nt, Human herpesvirus 6B
cuuucacacaacuuaaccgcaa

SEQ ID NO: 330840 - RNA, 16 nt, Human herpesvirus 6B
cuuucauaagcucuac

SEQ ID NO: 330841 - RNA, 22 nt, Human herpesvirus 6B
cuuucauaggaaguaaauacaa

SEQ ID NO: 330842 - RNA, 22 nt, Human herpesvirus 6B
cuuuccgauaucagcacccucu

SEQ ID NO: 330843 - RNA, 22 nt, Human herpesvirus 6B
cuuucguuuacgaauucaaugu

SEQ ID NO: 330844 - RNA, 22 nt, Human herpesvirus 6B
cuuucuacauaaaacaggguug

SEQ ID NO: 330845 - RNA, 18 nt, Human herpesvirus 6B
cuuucucuuuuuaauucc

SEQ ID NO: 330846 - RNA, 13 nt, Human herpesvirus 6B
cuuucuguggaac

SEQ ID NO: 330847 - RNA, 14 nt, Human herpesvirus 6B
cuuugaaaucugag

SEQ ID NO: 330848 - RNA, 15 nt, Human herpesvirus 6B
cuuugaacagugaca

SEQ ID NO: 330849 - RNA, 14 nt, Human herpesvirus 6B
cuuugacauuuacc

SEQ ID NO: 330850 - RNA, 19 nt, Human herpesvirus 6B
cuuugacauuuaccagaga

SEQ ID NO: 330851 - RNA, 18 nt, Human herpesvirus 6B
cuuugcggugcauaacau

SEQ ID NO: 330852 - RNA, 23 nt, Human herpesvirus 6B
cuuugcggugcauaacaucucag

SEQ ID NO: 330853 - RNA, 15 nt, Human herpesvirus 6B
cuuuguccuuacaaa

SEQ ID NO: 330854 - RNA, 16 nt, Human herpesvirus 6B
cuuuuagaacaggaag

SEQ ID NO: 330855 - RNA, 17 nt, Human herpesvirus 6B
cuuuuagguccuuauaa

SEQ ID NO: 330856 - RNA, 16 nt, Human herpesvirus 6B
cuuuuauaaacccaua

SEQ ID NO: 330857 - RNA, 15 nt, Human herpesvirus 6B
cuuuuauauagacac

SEQ ID NO: 330858 - RNA, 11 nt, Human herpesvirus 6B
cuuuucaauua

SEQ ID NO: 330859 - RNA, 17 nt, Human herpesvirus 6B
cuuuuuaacgaaaacca

SEQ ID NO: 330860 - RNA, 21 nt, Human herpesvirus 6B
cuuuuuaccgguuugguggua

SEQ ID NO: 330861 - RNA, 22 nt, Human herpesvirus 6B
cuuuuuucaauaaugcucagau

SEQ ID NO: 330862 - RNA, 19 nt, Human herpesvirus 6B
gaaaaaaaacgaauagcau

SEQ ID NO: 330863 - RNA, 15 nt, Human herpesvirus 6B
gaaaaaaacuaugaa

SEQ ID NO: 330864 - RNA, 21 nt, Human herpesvirus 6B
gaaaaaacaaguuaacggaga

SEQ ID NO: 330865 - RNA, 15 nt, Human herpesvirus 6B
gaaaaacuauagccu

SEQ ID NO: 330866 - RNA, 19 nt, Human herpesvirus 6B
gaaaacaaggaacgauaug

SEQ ID NO: 330867 - RNA, 12 nt, Human herpesvirus 6B
gaaaacaaugca

SEQ ID NO: 330868 - RNA, 22 nt, Human herpesvirus 6B
gaaaacaugacggacuuggaaa

SEQ ID NO: 330869 - RNA, 23 nt, Human herpesvirus 6B
gaaaaccaguauuaaugucuucg

SEQ ID NO: 330870 - RNA, 23 nt, Human herpesvirus 6B
gaaaacgcagcaugaugaucugc

SEQ ID NO: 330871 - RNA, 20 nt, Human herpesvirus 6B
gaaaacguuucauccaaaua

SEQ ID NO: 330872 - RNA, 19 nt, Human herpesvirus 6B
gaaaacuaugugcauuccg

SEQ ID NO: 330873 - RNA, 14 nt, Human herpesvirus 6B
gaaaacuuuuugcc

SEQ ID NO: 330874 - RNA, 18 nt, Human herpesvirus 6B
gaaaagaaacaaugcuuu

SEQ ID NO: 330875 - RNA, 17 nt, Human herpesvirus 6B
gaaaagccccugcuuga

SEQ ID NO: 330876 - RNA, 19 nt, Human herpesvirus 6B
gaaaagcuauugaaacugg

SEQ ID NO: 330877 - RNA, 13 nt, Human herpesvirus 6B
gaaaagggugaca

SEQ ID NO: 330878 - RNA, 15 nt, Human herpesvirus 6B
gaaaagugcugugcu

SEQ ID NO: 330879 - RNA, 22 nt, Human herpesvirus 6B
gaaaaguuuauuuugucaguca

SEQ ID NO: 330880 - RNA, 20 nt, Human herpesvirus 6B
gaaaauaaaaaaccaaaaca

SEQ ID NO: 330881 - RNA, 19 nt, Human herpesvirus 6B
gaaaauaaacaguuauacu

SEQ ID NO: 330882 - RNA, 24 nt, Human herpesvirus 6B
gaaaaugaauucaagacgaucuca

SEQ ID NO: 330883 - RNA, 21 nt, Human herpesvirus 6B
gaaaauguguucuuacaaugu

SEQ ID NO: 330884 - RNA, 18 nt, Human herpesvirus 6B
gaaaauugcucuauugug

SEQ ID NO: 330885 - RNA, 14 nt, Human herpesvirus 6B
gaaaauuggugugc

SEQ ID NO: 330886 - RNA, 19 nt, Human herpesvirus 6B
gaaacaacuggaugaaucu

SEQ ID NO: 330887 - RNA, 17 nt, Human herpesvirus 6B
gaaacacuuucuucgcc

SEQ ID NO: 330888 - RNA, 14 nt, Human herpesvirus 6B
gaaacauaaaaugu

SEQ ID NO: 330889 - RNA, 12 nt, Human herpesvirus 6B
gaaaccguccac

SEQ ID NO: 330890 - RNA, 19 nt, Human herpesvirus 6B
gaaacguguuugucuguau

SEQ ID NO: 330891 - RNA, 15 nt, Human herpesvirus 6B
gaaacguugugcuga

SEQ ID NO: 330892 - RNA, 21 nt, Human herpesvirus 6B
gaaacguugugcugagcacuu

SEQ ID NO: 330893 - RNA, 19 nt, Human herpesvirus 6B
gaaagaggcugaacuguuu

SEQ ID NO: 330894 - RNA, 14 nt, Human herpesvirus 6B
gaaagaguaccgaa

SEQ ID NO: 330895 - RNA, 12 nt, Human herpesvirus 6B
gaaagcagucag

SEQ ID NO: 330896 - RNA, 11 nt, Human herpesvirus 6B
gaaagcuuuau

SEQ ID NO: 330897 - RNA, 19 nt, Human herpesvirus 6B
gaaagucucugucuuccca

SEQ ID NO: 330898 - RNA, 16 nt, Human herpesvirus 6B
gaaaguucaucuuuca

SEQ ID NO: 330899 - RNA, 22 nt, Human herpesvirus 6B
gaaaguuucuguggaauuccaa

SEQ ID NO: 330900 - RNA, 14 nt, Human herpesvirus 6B
gaaaguuuuggaaa

SEQ ID NO: 330901 - RNA, 17 nt, Human herpesvirus 6B
gaaauaaaaaaauauua

SEQ ID NO: 330902 - RNA, 17 nt, Human herpesvirus 6B
gaaauaacgcaaucuac

SEQ ID NO: 330903 - RNA, 13 nt, Human herpesvirus 6B
gaaauacguucac

SEQ ID NO: 330904 - RNA, 12 nt, Human herpesvirus 6B
gaaauacuucuc

SEQ ID NO: 330905 - RNA, 18 nt, Human herpesvirus 6B
gaaaucacguugaaaugu

SEQ ID NO: 330906 - RNA, 22 nt, Human herpesvirus 6B
gaaaucgcauuucucuacaugc

SEQ ID NO: 330907 - RNA, 15 nt, Human herpesvirus 6B
gaaaucuaccauaac

SEQ ID NO: 330908 - RNA, 10 nt, Human herpesvirus 6B
gaaaucugac

SEQ ID NO: 330909 - RNA, 24 nt, Human herpesvirus 6B
gaaaucugagguuucucucucacc

SEQ ID NO: 330910 - RNA, 20 nt, Human herpesvirus 6B
gaaaucugagugaucugauu

SEQ ID NO: 330911 - RNA, 19 nt, Human herpesvirus 6B
gaaauugugucacauguua

SEQ ID NO: 330912 - RNA, 16 nt, Human herpesvirus 6B
gaacaccagcauguca

SEQ ID NO: 330913 - RNA, 19 nt, Human herpesvirus 6B
gaacagcuaauggcguaua

SEQ ID NO: 330914 - RNA, 12 nt, Human herpesvirus 6B
gaacaggugcuu

SEQ ID NO: 330915 - RNA, 15 nt, Human herpesvirus 6B
gaacaggugcuucuu

SEQ ID NO: 330916 - RNA, 15 nt, Human herpesvirus 6B
gaacagugacaguaa

SEQ ID NO: 330917 - RNA, 18 nt, Human herpesvirus 6B
gaacaugauuauaucgca

SEQ ID NO: 330918 - RNA, 20 nt, Human herpesvirus 6B
gaacauguaacuaagcagga

SEQ ID NO: 330919 - RNA, 17 nt, Human herpesvirus 6B
gaaccacguuuuuccau

SEQ ID NO: 330920 - RNA, 18 nt, Human herpesvirus 6B
gaaccauagguguuugca

SEQ ID NO: 330921 - RNA, 22 nt, Human herpesvirus 6B
gaaccauagguguuugcagaua

SEQ ID NO: 330922 - RNA, 14 nt, Human herpesvirus 6B
gaacccuagacaca

SEQ ID NO: 330923 - RNA, 18 nt, Human herpesvirus 6B
gaacccuagacacacaga

SEQ ID NO: 330924 - RNA, 12 nt, Human herpesvirus 6B
gaacgauaugcu

SEQ ID NO: 330925 - RNA, 21 nt, Human herpesvirus 6B
gaacgcacuagacaucaacuc

SEQ ID NO: 330926 - RNA, 15 nt, Human herpesvirus 6B
gaacggaaacaugaa

SEQ ID NO: 330927 - RNA, 18 nt, Human herpesvirus 6B
gaacgggcaacuccccau

SEQ ID NO: 330928 - RNA, 17 nt, Human herpesvirus 6B
gaacucucacggccauu

SEQ ID NO: 330929 - RNA, 20 nt, Human herpesvirus 6B
gaacugucaaggaaaacucu

SEQ ID NO: 330930 - RNA, 20 nt, Human herpesvirus 6B
gaagaaacgucaacgucucu

SEQ ID NO: 330931 - RNA, 22 nt, Human herpesvirus 6B
gaagaacuuccugaaaucugag

SEQ ID NO: 330932 - RNA, 16 nt, Human herpesvirus 6B
gaagaauaaaagucca

SEQ ID NO: 330933 - RNA, 16 nt, Human herpesvirus 6B
gaagaccuauaugugu

SEQ ID NO: 330934 - RNA, 13 nt, Human herpesvirus 6B
gaagacgcugugu

SEQ ID NO: 330935 - RNA, 13 nt, Human herpesvirus 6B
gaagacguuucua

SEQ ID NO: 330936 - RNA, 14 nt, Human herpesvirus 6B
gaagaggugcaaau

SEQ ID NO: 330937 - RNA, 15 nt, Human herpesvirus 6B
gaagaggugcaaaug

SEQ ID NO: 330938 - RNA, 13 nt, Human herpesvirus 6B
gaagauagcucuc

SEQ ID NO: 330939 - RNA, 13 nt, Human herpesvirus 6B
gaagaucaugaca

SEQ ID NO: 330940 - RNA, 17 nt, Human herpesvirus 6B
gaagaugacagcgagac

SEQ ID NO: 330941 - RNA, 19 nt, Human herpesvirus 6B
gaagaugacagcgagacaa

SEQ ID NO: 330942 - RNA, 16 nt, Human herpesvirus 6B
gaagauuugugugaac

SEQ ID NO: 330943 - RNA, 15 nt, Human herpesvirus 6B
gaagcaaaagucuua

SEQ ID NO: 330944 - RNA, 19 nt, Human herpesvirus 6B
gaagcagcagaugcuuacc

SEQ ID NO: 330945 - RNA, 17 nt, Human herpesvirus 6B
gaagcaucccuauguca

SEQ ID NO: 330946 - RNA, 16 nt, Human herpesvirus 6B
gaagcaugacuuugug

SEQ ID NO: 330947 - RNA, 20 nt, Human herpesvirus 6B
gaagccuguuuuagauucua

SEQ ID NO: 330948 - RNA, 11 nt, Human herpesvirus 6B
gaagcuuucaa

SEQ ID NO: 330949 - RNA, 18 nt, Human herpesvirus 6B
gaaggacuaucugagaca

SEQ ID NO: 330950 - RNA, 15 nt, Human herpesvirus 6B
gaaggaggucucagg

SEQ ID NO: 330951 - RNA, 20 nt, Human herpesvirus 6B
gaaggccaucaugcugugag

SEQ ID NO: 330952 - RNA, 21 nt, Human herpesvirus 6B
gaagugaaagcagucaguaau

SEQ ID NO: 330953 - RNA, 13 nt, Human herpesvirus 6B
gaauacaaaaacg

SEQ ID NO: 330954 - RNA, 15 nt, Human herpesvirus 6B
gaauacaaaaacgac

SEQ ID NO: 330955 - RNA, 14 nt, Human herpesvirus 6B
gaauacaagaccau

SEQ ID NO: 330956 - RNA, 17 nt, Human herpesvirus 6B
gaauacaagaccaucug

SEQ ID NO: 330957 - RNA, 14 nt, Human herpesvirus 6B
gaauacuacaguga

SEQ ID NO: 330958 - RNA, 21 nt, Human herpesvirus 6B
gaauacuacagugacuuucac

SEQ ID NO: 330959 - RNA, 14 nt, Human herpesvirus 6B
gaauagcauucugu

SEQ ID NO: 330960 - RNA, 14 nt, Human herpesvirus 6B
gaauaggcgucuca

SEQ ID NO: 330961 - RNA, 13 nt, Human herpesvirus 6B
gagaaaguuucug

SEQ ID NO: 330962 - RNA, 17 nt, Human herpesvirus 6B
gagaacgcucuugccga

SEQ ID NO: 330963 - RNA, 18 nt, Human herpesvirus 6B
gagaagauuugugugaac

SEQ ID NO: 330964 - RNA, 21 nt, Human herpesvirus 6B
gagaagcacggauaacguuca

SEQ ID NO: 330965 - RNA, 17 nt, Human herpesvirus 6B
gagaauacuacagugac

SEQ ID NO: 330966 - RNA, 15 nt, Human herpesvirus 6B
gagaaugcaacauuc

SEQ ID NO: 330967 - RNA, 23 nt, Human herpesvirus 6B
gagaauuaugacugacaagguau

SEQ ID NO: 330968 - RNA, 21 nt, Human herpesvirus 6B
gagacaauaacaauuauucac

SEQ ID NO: 330969 - RNA, 17 nt, Human herpesvirus 6B
gagacauuuucuauaaa

SEQ ID NO: 330970 - RNA, 14 nt, Human herpesvirus 6B
gagaccaugccauu

SEQ ID NO: 330971 - RNA, 15 nt, Human herpesvirus 6B
gagaccaugccauug

SEQ ID NO: 330972 - RNA, 13 nt, Human herpesvirus 6B
gagagagcaaaug

SEQ ID NO: 330973 - RNA, 17 nt, Human herpesvirus 6B
gagagccggaaaacaau

SEQ ID NO: 330974 - RNA, 20 nt, Human herpesvirus 6B
gagagccggaaaacaaugca

SEQ ID NO: 330975 - RNA, 22 nt, Human herpesvirus 6B
gagaucaguacauagaaucucu

SEQ ID NO: 330976 - RNA, 17 nt, Human herpesvirus 6B
gagaucugcucauguca

SEQ ID NO: 330977 - RNA, 16 nt, Human herpesvirus 6B
gagaugaugggaccau

SEQ ID NO: 330978 - RNA, 20 nt, Human herpesvirus 6B
gagauuuacuguuucuuuga

SEQ ID NO: 330979 - RNA, 22 nt, Human herpesvirus 6B
gagauuuacuguuucuuugaca

SEQ ID NO: 330980 - RNA, 14 nt, Human herpesvirus 6B
gagauuuguguuca

SEQ ID NO: 330981 - RNA, 17 nt, Human herpesvirus 6B
gagcaaccgcaguuccu

SEQ ID NO: 330982 - RNA, 17 nt, Human herpesvirus 6B
gagcaaccgcaguuucu

SEQ ID NO: 330983 - RNA, 14 nt, Human herpesvirus 6B
gagcacgucuucuu

SEQ ID NO: 330984 - RNA, 13 nt, Human herpesvirus 6B
gagcacuugucaa

SEQ ID NO: 330985 - RNA, 19 nt, Human herpesvirus 6B
gagccggaaaacaaugcau

SEQ ID NO: 330986 - RNA, 23 nt, Human herpesvirus 6B
gagccuuuccccagcacaccucg

SEQ ID NO: 330987 - RNA, 15 nt, Human herpesvirus 6B
gagcugacaucugca

SEQ ID NO: 330988 - RNA, 23 nt, Human herpesvirus 6B
gagcugacaucugcaaaaacaaa

SEQ ID NO: 330989 - RNA, 14 nt, Human herpesvirus 6B
gagcugacugaaag

SEQ ID NO: 330990 - RNA, 21 nt, Human herpesvirus 6B
gagcugucgaguaacuguggg

SEQ ID NO: 330991 - RNA, 13 nt, Human herpesvirus 6B
gagcuucuuagga

SEQ ID NO: 330992 - RNA, 20 nt, Human herpesvirus 6B
gagcuuguagauaauuucca

SEQ ID NO: 330993 - RNA, 15 nt, Human herpesvirus 6B
gagcuuuggcuguga

SEQ ID NO: 330994 - RNA, 14 nt, Human herpesvirus 6B
gaggaaaugcagca

SEQ ID NO: 330995 - RNA, 13 nt, Human herpesvirus 6B
gaggagggaccca

SEQ ID NO: 330996 - RNA, 16 nt, Human herpesvirus 6B
gaggaugaguagcuuu

SEQ ID NO: 330997 - RNA, 20 nt, Human herpesvirus 6B
gagggacccacacgcgggga

SEQ ID NO: 330998 - RNA, 14 nt, Human herpesvirus 6B
gagggcggccucga

SEQ ID NO: 330999 - RNA, 17 nt, Human herpesvirus 6B
gagggugggaacuguca

SEQ ID NO: 331000 - RNA, 20 nt, Human herpesvirus 6B
gaggguuuuuucaucauuua

SEQ ID NO: 331001 - RNA, 18 nt, Human herpesvirus 6B
gagguaauaaaaacaccu

SEQ ID NO: 331002 - RNA, 20 nt, Human herpesvirus 6B
gagguaauaaaaacaccucu

SEQ ID NO: 331003 - RNA, 22 nt, Human herpesvirus 6B
gaguaaugauuggaaucacaaa

SEQ ID NO: 331004 - RNA, 23 nt, Human herpesvirus 6B
gaguaauuauugugacaagguau

SEQ ID NO: 331005 - RNA, 15 nt, Human herpesvirus 6B
gaguaccgaauaaaa

SEQ ID NO: 331006 - RNA, 19 nt, Human herpesvirus 6B
gagucucugggaacaugua

SEQ ID NO: 331007 - RNA, 17 nt, Human herpesvirus 6B
gagugcuauuugcauua

SEQ ID NO: 331008 - RNA, 20 nt, Human herpesvirus 6B
gaguucgguccaaggauuau

SEQ ID NO: 331009 - RNA, 23 nt, Human herpesvirus 6B
gaguucgguccaaggauuaugau

SEQ ID NO: 331010 - RNA, 18 nt, Human herpesvirus 6B
gaguugcaacuuuugcuu

SEQ ID NO: 331011 - RNA, 15 nt, Human herpesvirus 6B
gaguuuuuugcaauu

SEQ ID NO: 331012 - RNA, 15 nt, Human herpesvirus 6B
gauaaaacguuccau

SEQ ID NO: 331013 - RNA, 15 nt, Human herpesvirus 6B
gauaaacguuguagc

SEQ ID NO: 331014 - RNA, 18 nt, Human herpesvirus 6B
gauaaacuguacgccaua

SEQ ID NO: 331015 - RNA, 15 nt, Human herpesvirus 6B
gauaaauugaugaaa

SEQ ID NO: 331016 - RNA, 20 nt, Human herpesvirus 6B
gauaaauugaugaaauugug

SEQ ID NO: 331017 - RNA, 13 nt, Human herpesvirus 6B
gauaaauuugcca

SEQ ID NO: 331018 - RNA, 23 nt, Human herpesvirus 6B
gauaacagguucaaagauagaca

SEQ ID NO: 331019 - RNA, 20 nt, Human herpesvirus 6B
gauaagccguacugcugguu

SEQ ID NO: 331020 - RNA, 23 nt, Human herpesvirus 6B
gauacauguuuuugaugugcuac

SEQ ID NO: 331021 - RNA, 18 nt, Human herpesvirus 6B
gauaccgucuuugcauau

SEQ ID NO: 331022 - RNA, 20 nt, Human herpesvirus 6B
gauacggcggcggaagugaa

SEQ ID NO: 331023 - RNA, 20 nt, Human herpesvirus 6B
gauacucggucuacugugua

SEQ ID NO: 331024 - RNA, 12 nt, Human herpesvirus 6B
gauacugaugaa

SEQ ID NO: 331025 - RNA, 18 nt, Human herpesvirus 6B
gauacugguuuacagcac

SEQ ID NO: 331026 - RNA, 19 nt, Human herpesvirus 6B
gauagacgacgcagauuua

SEQ ID NO: 331027 - RNA, 22 nt, Human herpesvirus 6B
gauagauuuguccguauacagc

SEQ ID NO: 331028 - RNA, 19 nt, Human herpesvirus 6B
gauagccagggcauucaca

SEQ ID NO: 331029 - RNA, 11 nt, Human herpesvirus 6B
gauagccauac

SEQ ID NO: 331030 - RNA, 20 nt, Human herpesvirus 6B
gauaguacuuacguguguau

SEQ ID NO: 331031 - RNA, 17 nt, Human herpesvirus 6B
gauagucaugcacuccg

SEQ ID NO: 331032 - RNA, 17 nt, Human herpesvirus 6B
gauauauacuuacuuga

SEQ ID NO: 331033 - RNA, 20 nt, Human herpesvirus 6B
gauaugagugaauugugcaa

SEQ ID NO: 331034 - RNA, 15 nt, Human herpesvirus 6B
gauauuccaggcaau

SEQ ID NO: 331035 - RNA, 15 nt, Human herpesvirus 6B
gaucacaaacuguca

SEQ ID NO: 331036 - RNA, 21 nt, Human herpesvirus 6B
gaucacagagaaaaaacaaag

SEQ ID NO: 331037 - RNA, 22 nt, Human herpesvirus 6B
gaucacagagaaaaaacaaagc

SEQ ID NO: 331038 - RNA, 15 nt, Human herpesvirus 6B
gaucaccgugaucau

SEQ ID NO: 331039 - RNA, 15 nt, Human herpesvirus 6B
gaucagucaaaaucu

SEQ ID NO: 331040 - RNA, 14 nt, Human herpesvirus 6B
gaucauaaaacugc

SEQ ID NO: 331041 - RNA, 17 nt, Human herpesvirus 6B
gaucaucgccauaguga

SEQ ID NO: 331042 - RNA, 13 nt, Human herpesvirus 6B
gauccagauuucu

SEQ ID NO: 331043 - RNA, 13 nt, Human herpesvirus 6B
gauccaugagcac

SEQ ID NO: 331044 - RNA, 20 nt, Human herpesvirus 6B
gaucggacggugauggguuu

SEQ ID NO: 331045 - RNA, 16 nt, Human herpesvirus 6B
gaucguggacaguaaa

SEQ ID NO: 331046 - RNA, 17 nt, Human herpesvirus 6B
gaucguuuugcaacuua

SEQ ID NO: 331047 - RNA, 17 nt, Human herpesvirus 6B
gaucuacagaguaccga

SEQ ID NO: 331048 - RNA, 16 nt, Human herpesvirus 6B
gaucucggcagauuac

SEQ ID NO: 331049 - RNA, 20 nt, Human herpesvirus 6B
gaugaaguuccacaucuaug

SEQ ID NO: 331050 - RNA, 19 nt, Human herpesvirus 6B
gaugacagcgagacaauaa

SEQ ID NO: 331051 - RNA, 21 nt, Human herpesvirus 6B
gaugacagcgagacaauaaca

SEQ ID NO: 331052 - RNA, 16 nt, Human herpesvirus 6B
gaugaucagcauucac

SEQ ID NO: 331053 - RNA, 16 nt, Human herpesvirus 6B
gaugaugggaccauug

SEQ ID NO: 331054 - RNA, 21 nt, Human herpesvirus 6B
gaugcaagucgcgaagugcuu

SEQ ID NO: 331055 - RNA, 17 nt, Human herpesvirus 6B
gauggcuagugugccua

SEQ ID NO: 331056 - RNA, 17 nt, Human herpesvirus 6B
gauguaaucaaugucac

SEQ ID NO: 331057 - RNA, 13 nt, Human herpesvirus 6B
gauguacaguuuc

SEQ ID NO: 331058 - RNA, 16 nt, Human herpesvirus 6B
gauguacgaugaacua

SEQ ID NO: 331059 - RNA, 17 nt, Human herpesvirus 6B
gauguagcaagggagaa

SEQ ID NO: 331060 - RNA, 19 nt, Human herpesvirus 6B
gauguguggggaugacgag

SEQ ID NO: 331061 - RNA, 13 nt, Human herpesvirus 6B
gauguguuaaaga

SEQ ID NO: 331062 - RNA, 13 nt, Human herpesvirus 6B
gauguucaaaacu

SEQ ID NO: 331063 - RNA, 14 nt, Human herpesvirus 6B
gauuaaugccacag

SEQ ID NO: 331064 - RNA, 20 nt, Human herpesvirus 6B
gauuacacugucuuguagua

SEQ ID NO: 331065 - RNA, 22 nt, Human herpesvirus 6B
gauuagaaauuacauaagcaaa

SEQ ID NO: 331066 - RNA, 16 nt, Human herpesvirus 6B
gauuauagauagcucc

SEQ ID NO: 331067 - RNA, 19 nt, Human herpesvirus 6B
gauuauggugccucagggu

SEQ ID NO: 331068 - RNA, 13 nt, Human herpesvirus 6B
gauuauuaucaca

SEQ ID NO: 331069 - RNA, 15 nt, Human herpesvirus 6B
gauuccuucaauguu

SEQ ID NO: 331070 - RNA, 24 nt, Human herpesvirus 6B
gauuccuucggggacagugauuag

SEQ ID NO: 331071 - RNA, 14 nt, Human herpesvirus 6B
gauucggcugcuua

SEQ ID NO: 331072 - RNA, 16 nt, Human herpesvirus 6B
gauucuauguacugau

SEQ ID NO: 331073 - RNA, 14 nt, Human herpesvirus 6B
gauucuccgucuca

SEQ ID NO: 331074 - RNA, 18 nt, Human herpesvirus 6B
gauucuguuuucuacgua

SEQ ID NO: 331075 - RNA, 21 nt, Human herpesvirus 6B
gauugcugucuuccugugaga

SEQ ID NO: 331076 - RNA, 20 nt, Human herpesvirus 6B
gauuuguucgauugccaaag

SEQ ID NO: 331077 - RNA, 18 nt, Human herpesvirus 6B
gauuuguucuagugcgua

SEQ ID NO: 331078 - RNA, 18 nt, Human herpesvirus 6B
gauuuugaggaucacuaa

SEQ ID NO: 331079 - RNA, 16 nt, Human herpesvirus 6B
gcaaaaaauaguuuua

SEQ ID NO: 331080 - RNA, 15 nt, Human herpesvirus 6B
gcaaaaucguguuuu

SEQ ID NO: 331081 - RNA, 13 nt, Human herpesvirus 6B
gcaaacagcuuua

SEQ ID NO: 331082 - RNA, 19 nt, Human herpesvirus 6B
gcaaacagguguaaauauu

SEQ ID NO: 331083 - RNA, 21 nt, Human herpesvirus 6B
gcaaacagguguaaauauucu

SEQ ID NO: 331084 - RNA, 15 nt, Human herpesvirus 6B
gcaaacauguauccu

SEQ ID NO: 331085 - RNA, 14 nt, Human herpesvirus 6B
gcaaacucaaagaa

SEQ ID NO: 331086 - RNA, 15 nt, Human herpesvirus 6B
gcaaacugacuguac

SEQ ID NO: 331087 - RNA, 20 nt, Human herpesvirus 6B
gcaaacugacuguaccauug

SEQ ID NO: 331088 - RNA, 16 nt, Human herpesvirus 6B
gcaaagagagaccaau

SEQ ID NO: 331089 - RNA, 15 nt, Human herpesvirus 6B
gcaaagcacccugca

SEQ ID NO: 331090 - RNA, 16 nt, Human herpesvirus 6B
gcaaagcacccugcac

SEQ ID NO: 331091 - RNA, 16 nt, Human herpesvirus 6B
gcaaaggguaguuuua

SEQ ID NO: 331092 - RNA, 21 nt, Human herpesvirus 6B
gcaaaugccgacaagcuuuuu

SEQ ID NO: 331093 - RNA, 15 nt, Human herpesvirus 6B
gcaaauguaacucuu

SEQ ID NO: 331094 - RNA, 16 nt, Human herpesvirus 6B
gcaaauguaacucuuu

SEQ ID NO: 331095 - RNA, 15 nt, Human herpesvirus 6B
gcaacacaacaaaca

SEQ ID NO: 331096 - RNA, 23 nt, Human herpesvirus 6B
gcaacuccccauucaacauccua

SEQ ID NO: 331097 - RNA, 14 nt, Human herpesvirus 6B
gcaagcaaacgcuc

SEQ ID NO: 331098 - RNA, 11 nt, Human herpesvirus 6B
gcaagcacuga

SEQ ID NO: 331099 - RNA, 22 nt, Human herpesvirus 6B
gcaaguucaucagccauuucgc

SEQ ID NO: 331100 - RNA, 12 nt, Human herpesvirus 6B
gcaauaggccau

SEQ ID NO: 331101 - RNA, 18 nt, Human herpesvirus 6B
gcaaugauuuuguuuauu

SEQ ID NO: 331102 - RNA, 15 nt, Human herpesvirus 6B
gcacaaaaugauugc

SEQ ID NO: 331103 - RNA, 22 nt, Human herpesvirus 6B
gcacaaaaugauugcaaccaau

SEQ ID NO: 331104 - RNA, 23 nt, Human herpesvirus 6B
gcacaaaaugauugcaaccaaua

SEQ ID NO: 331105 - RNA, 13 nt, Human herpesvirus 6B
gcacagaaucgag

SEQ ID NO: 331106 - RNA, 18 nt, Human herpesvirus 6B
gcacccuaucaccuuucu

SEQ ID NO: 331107 - RNA, 18 nt, Human herpesvirus 6B
gcaccgccuccgccacca

SEQ ID NO: 331108 - RNA, 20 nt, Human herpesvirus 6B
gcaccuaaacaccacuugau

SEQ ID NO: 331109 - RNA, 16 nt, Human herpesvirus 6B
gcacggauaacguuca

SEQ ID NO: 331110 - RNA, 22 nt, Human herpesvirus 6B
gcacuugucaauaaacauuuca

SEQ ID NO: 331111 - RNA, 23 nt, Human herpesvirus 6B
gcacuugucaauaaacauuucau

SEQ ID NO: 331112 - RNA, 22 nt, Human herpesvirus 6B
gcacuuuuuaacgaaaaccauu

SEQ ID NO: 331113 - RNA, 19 nt, Human herpesvirus 6B
gcagaaaacguuucaucca

SEQ ID NO: 331114 - RNA, 13 nt, Human herpesvirus 6B
gcagaaguuuacc

SEQ ID NO: 331115 - RNA, 12 nt, Human herpesvirus 6B
gcagacuaaucc

SEQ ID NO: 331116 - RNA, 13 nt, Human herpesvirus 6B
gcagacuaaucca

SEQ ID NO: 331117 - RNA, 17 nt, Human herpesvirus 6B
gcagacuaauccauaug

SEQ ID NO: 331118 - RNA, 16 nt, Human herpesvirus 6B
gcagaggaucuguuca

SEQ ID NO: 331119 - RNA, 16 nt, Human herpesvirus 6B
gcagaggcggcgacca

SEQ ID NO: 331120 - RNA, 14 nt, Human herpesvirus 6B
gcagaucagucaaa

SEQ ID NO: 331121 - RNA, 18 nt, Human herpesvirus 6B
gcagcgcccgaugccaac

SEQ ID NO: 331122 - RNA, 20 nt, Human herpesvirus 6B
gcagcguuggaaagcuuuau

SEQ ID NO: 331123 - RNA, 23 nt, Human herpesvirus 6B
gcaggcacgacgaaaacuuuuaa

SEQ ID NO: 331124 - RNA, 18 nt, Human herpesvirus 6B
gcaggcaucgacuauuaa

SEQ ID NO: 331125 - RNA, 12 nt, Human herpesvirus 6B
gcaggugcugcu

SEQ ID NO: 331126 - RNA, 17 nt, Human herpesvirus 6B
gcaguuucuguuuuucu

SEQ ID NO: 331127 - RNA, 14 nt, Human herpesvirus 6B
gcauaacaucucag

SEQ ID NO: 331128 - RNA, 21 nt, Human herpesvirus 6B
gcauacacccugccgaccuga

SEQ ID NO: 331129 - RNA, 19 nt, Human herpesvirus 6B
gcauauuauuaacaaugaa

SEQ ID NO: 331130 - RNA, 15 nt, Human herpesvirus 6B
gcaucccuaugucaa

SEQ ID NO: 331131 - RNA, 22 nt, Human herpesvirus 6B
gcauccuguuuucccaccuaau

SEQ ID NO: 331132 - RNA, 12 nt, Human herpesvirus 6B
gcaucucaaaaa

SEQ ID NO: 331133 - RNA, 20 nt, Human herpesvirus 6B
gcaucucaaaaaacauauaa

SEQ ID NO: 331134 - RNA, 16 nt, Human herpesvirus 6B
gcaugaauuccaugcg

SEQ ID NO: 331135 - RNA, 16 nt, Human herpesvirus 6B
gcaugggugaguguau

SEQ ID NO: 331136 - RNA, 19 nt, Human herpesvirus 6B
gcauguuuuccccacaaca

SEQ ID NO: 331137 - RNA, 17 nt, Human herpesvirus 6B
gcauuauacugaaugga

SEQ ID NO: 331138 - RNA, 16 nt, Human herpesvirus 6B
gcauugaagaugacag

SEQ ID NO: 331139 - RNA, 23 nt, Human herpesvirus 6B
gcauuuaaacucgacuucuuuca

SEQ ID NO: 331140 - RNA, 21 nt, Human herpesvirus 6B
gcauuucucuacaugccacag

SEQ ID NO: 331141 - RNA, 22 nt, Human herpesvirus 6B
gcauuucucuacaugccacaga

SEQ ID NO: 331142 - RNA, 15 nt, Human herpesvirus 6B
gcauuugugcucgca

SEQ ID NO: 331143 - RNA, 13 nt, Human herpesvirus 6B
gcauuuguguuuu

SEQ ID NO: 331144 - RNA, 15 nt, Human herpesvirus 6B
gccaaaaaaauacag

SEQ ID NO: 331145 - RNA, 18 nt, Human herpesvirus 6B
gccaaaaaaauacaguau

SEQ ID NO: 331146 - RNA, 16 nt, Human herpesvirus 6B
gccaaaaaaguuuauu

SEQ ID NO: 331147 - RNA, 11 nt, Human herpesvirus 6B
gccaaccaaau

SEQ ID NO: 331148 - RNA, 20 nt, Human herpesvirus 6B
gccaaccuucuaaugacgcu

SEQ ID NO: 331149 - RNA, 23 nt, Human herpesvirus 6B
gccaacggaaagcaucucaaaaa

SEQ ID NO: 331150 - RNA, 18 nt, Human herpesvirus 6B
gccaauuuaugucauuuc

SEQ ID NO: 331151 - RNA, 19 nt, Human herpesvirus 6B
gccacauuucgguuuaaua

SEQ ID NO: 331152 - RNA, 21 nt, Human herpesvirus 6B
gccacguucuuugaacaguga

SEQ ID NO: 331153 - RNA, 15 nt, Human herpesvirus 6B
gccagagacaugacc

SEQ ID NO: 331154 - RNA, 16 nt, Human herpesvirus 6B
gccagaucgaagaaaa

SEQ ID NO: 331155 - RNA, 22 nt, Human herpesvirus 6B
gccagcaguaugccauaaagaa

SEQ ID NO: 331156 - RNA, 13 nt, Human herpesvirus 6B
gccagggcauuca

SEQ ID NO: 331157 - RNA, 14 nt, Human herpesvirus 6B
gccagggcauucac

SEQ ID NO: 331158 - RNA, 17 nt, Human herpesvirus 6B
gccauaucacagcauuu

SEQ ID NO: 331159 - RNA, 18 nt, Human herpesvirus 6B
gccauaucacagcauuuc

SEQ ID NO: 331160 - RNA, 17 nt, Human herpesvirus 6B
gccccgguuaaagcaga

SEQ ID NO: 331161 - RNA, 21 nt, Human herpesvirus 6B
gcccuaaugugauuaugccaa

SEQ ID NO: 331162 - RNA, 15 nt, Human herpesvirus 6B
gcccuacuacagugg

SEQ ID NO: 331163 - RNA, 20 nt, Human herpesvirus 6B
gccgaacuagaaaaacaacg

SEQ ID NO: 331164 - RNA, 16 nt, Human herpesvirus 6B
gccgacucucuccgca

SEQ ID NO: 331165 - RNA, 21 nt, Human herpesvirus 6B
gccgccauauuaaaacccggc

SEQ ID NO: 331166 - RNA, 22 nt, Human herpesvirus 6B
gccgcgaacucguuaauaguua

SEQ ID NO: 331167 - RNA, 15 nt, Human herpesvirus 6B
gccgcguaggcaugu

SEQ ID NO: 331168 - RNA, 17 nt, Human herpesvirus 6B
gccgucuccugcaauuu

SEQ ID NO: 331169 - RNA, 14 nt, Human herpesvirus 6B
gccgugacacggaa

SEQ ID NO: 331170 - RNA, 14 nt, Human herpesvirus 6B
gccgugauguuuuc

SEQ ID NO: 331171 - RNA, 16 nt, Human herpesvirus 6B
gccguguuacugacac

SEQ ID NO: 331172 - RNA, 23 nt, Human herpesvirus 6B
gccuaaacggagacugcacagaa

SEQ ID NO: 331173 - RNA, 13 nt, Human herpesvirus 6B
gccuacauaugcc

SEQ ID NO: 331174 - RNA, 20 nt, Human herpesvirus 6B
gccuacggcgccacaaaaca

SEQ ID NO: 331175 - RNA, 18 nt, Human herpesvirus 6B
gccuccacggcaacgcuc

SEQ ID NO: 331176 - RNA, 18 nt, Human herpesvirus 6B
gccucggcguacauauaa

SEQ ID NO: 331177 - RNA, 17 nt, Human herpesvirus 6B
gccuguacucuuucaag

SEQ ID NO: 331178 - RNA, 16 nt, Human herpesvirus 6B
gccuguccgugacaca

SEQ ID NO: 331179 - RNA, 16 nt, Human herpesvirus 6B
gccuucgguacaguga

SEQ ID NO: 331180 - RNA, 23 nt, Human herpesvirus 6B
gccuugcgguaaacggcauacau

SEQ ID NO: 331181 - RNA, 19 nt, Human herpesvirus 6B
gcgacacggugagucgcau

SEQ ID NO: 331182 - RNA, 17 nt, Human herpesvirus 6B
gcgagucuugugugaaa

SEQ ID NO: 331183 - RNA, 13 nt, Human herpesvirus 6B
gcgauaccgagcg

SEQ ID NO: 331184 - RNA, 14 nt, Human herpesvirus 6B
gcgcaccggcgaca

SEQ ID NO: 331185 - RNA, 15 nt, Human herpesvirus 6B
gcgcauguugcaguu

SEQ ID NO: 331186 - RNA, 21 nt, Human herpesvirus 6B
gcgccagcauucuuaucaaau

SEQ ID NO: 331187 - RNA, 22 nt, Human herpesvirus 6B
gcgcggguacgcgcgugaucaa

SEQ ID NO: 331188 - RNA, 19 nt, Human herpesvirus 6B
gcggaacaccagcauguca

SEQ ID NO: 331189 - RNA, 16 nt, Human herpesvirus 6B
gcggagcugugucgau

SEQ ID NO: 331190 - RNA, 20 nt, Human herpesvirus 6B
gcgggcuuaauaaaggaugu

SEQ ID NO: 331191 - RNA, 17 nt, Human herpesvirus 6B
gcgguuggggucuuucc

SEQ ID NO: 331192 - RNA, 20 nt, Human herpesvirus 6B
gcguacaaaaucaaacucac

SEQ ID NO: 331193 - RNA, 20 nt, Human herpesvirus 6B
gcguacacgaaaaacauuuc

SEQ ID NO: 331194 - RNA, 16 nt, Human herpesvirus 6B
gcgucacacagcauga

SEQ ID NO: 331195 - RNA, 19 nt, Human herpesvirus 6B
gcguccucuauauugaucg

SEQ ID NO: 331196 - RNA, 18 nt, Human herpesvirus 6B
gcgugcguaucugcauca

SEQ ID NO: 331197 - RNA, 19 nt, Human herpesvirus 6B
gcguuagauguaacucauc

SEQ ID NO: 331198 - RNA, 16 nt, Human herpesvirus 6B
gcguuggaaagcuuua

SEQ ID NO: 331199 - RNA, 17 nt, Human herpesvirus 6B
gcguuggaaagcuuuau

SEQ ID NO: 331200 - RNA, 22 nt, Human herpesvirus 6B
gcguuuaucaugagagagcaaa

SEQ ID NO: 331201 - RNA, 17 nt, Human herpesvirus 6B
gcguuuuuggugaaaaa

SEQ ID NO: 331202 - RNA, 15 nt, Human herpesvirus 6B
gcuaauucauaguua

SEQ ID NO: 331203 - RNA, 14 nt, Human herpesvirus 6B
gcuacggugcgauu

SEQ ID NO: 331204 - RNA, 14 nt, Human herpesvirus 6B
gcuagugaucgcaa

SEQ ID NO: 331205 - RNA, 13 nt, Human herpesvirus 6B
gcuauaugcaucu

SEQ ID NO: 331206 - RNA, 22 nt, Human herpesvirus 6B
gcuaucgcaaugauuuuguuua

SEQ ID NO: 331207 - RNA, 15 nt, Human herpesvirus 6B
gcuaucgucuacccu

SEQ ID NO: 331208 - RNA, 17 nt, Human herpesvirus 6B
gcuaucgucuacccuau

SEQ ID NO: 331209 - RNA, 13 nt, Human herpesvirus 6B
gcucaguguuugc

SEQ ID NO: 331210 - RNA, 21 nt, Human herpesvirus 6B
gcucaguguuugccaaccaaa

SEQ ID NO: 331211 - RNA, 20 nt, Human herpesvirus 6B
gcuccuaaauaccauuuuau

SEQ ID NO: 331212 - RNA, 16 nt, Human herpesvirus 6B
gcucuaaaucagacag

SEQ ID NO: 331213 - RNA, 23 nt, Human herpesvirus 6B
gcucuaaugcuagauaacucaga

SEQ ID NO: 331214 - RNA, 14 nt, Human herpesvirus 6B
gcucuuugcugauu

SEQ ID NO: 331215 - RNA, 15 nt, Human herpesvirus 6B
gcugacaucugcaaa

SEQ ID NO: 331216 - RNA, 19 nt, Human herpesvirus 6B
gcugaccguucaccauucc

SEQ ID NO: 331217 - RNA, 12 nt, Human herpesvirus 6B
gcugauacacaa

SEQ ID NO: 331218 - RNA, 23 nt, Human herpesvirus 6B
gcugauuccuucaauguuuuuca

SEQ ID NO: 331219 - RNA, 16 nt, Human herpesvirus 6B
gcugcccgauugcacc

SEQ ID NO: 331220 - RNA, 21 nt, Human herpesvirus 6B
gcugcccgauugcaccaucug

SEQ ID NO: 331221 - RNA, 17 nt, Human herpesvirus 6B
gcuggcgcugcauagac

SEQ ID NO: 331222 - RNA, 18 nt, Human herpesvirus 6B
gcuguaguugaugcuguu

SEQ ID NO: 331223 - RNA, 19 nt, Human herpesvirus 6B
gcugugacgaggauggaug

SEQ ID NO: 331224 - RNA, 12 nt, Human herpesvirus 6B
gcuguuguugua

SEQ ID NO: 331225 - RNA, 15 nt, Human herpesvirus 6B
gcuguuuacgaauga

SEQ ID NO: 331226 - RNA, 16 nt, Human herpesvirus 6B
gcuuaaugaaugugcu

SEQ ID NO: 331227 - RNA, 14 nt, Human herpesvirus 6B
gcuucagguugcca

SEQ ID NO: 331228 - RNA, 20 nt, Human herpesvirus 6B
gcuuguuuugguggacacca

SEQ ID NO: 331229 - RNA, 14 nt, Human herpesvirus 6B
gcuuuaaagcagcu

SEQ ID NO: 331230 - RNA, 19 nt, Human herpesvirus 6B
gcuuuauccggccaauuca

SEQ ID NO: 331231 - RNA, 20 nt, Human herpesvirus 6B
gcuuugacgguuuauaugca

SEQ ID NO: 331232 - RNA, 23 nt, Human herpesvirus 6B
gcuuugcacggcgucaccaagaa

SEQ ID NO: 331233 - RNA, 22 nt, Human herpesvirus 6B
gcuuugggaccuucaggaacaa

SEQ ID NO: 331234 - RNA, 22 nt, Human herpesvirus 6B
ggaaaacgcagcaugaugaucu

SEQ ID NO: 331235 - RNA, 20 nt, Human herpesvirus 6B
ggaaacguguuugucuguau

SEQ ID NO: 331236 - RNA, 19 nt, Human herpesvirus 6B
ggaacaccagcaugucaua

SEQ ID NO: 331237 - RNA, 14 nt, Human herpesvirus 6B
ggaacauguaacua

SEQ ID NO: 331238 - RNA, 13 nt, Human herpesvirus 6B
ggaacccuagaca

SEQ ID NO: 331239 - RNA, 22 nt, Human herpesvirus 6B
ggaaccgagauuuguguucaaa

SEQ ID NO: 331240 - RNA, 21 nt, Human herpesvirus 6B
ggaacugucaaggaaaacucu

SEQ ID NO: 331241 - RNA, 20 nt, Human herpesvirus 6B
ggaacuugauguugaucuga

SEQ ID NO: 331242 - RNA, 16 nt, Human herpesvirus 6B
ggaagauacacugcaa

SEQ ID NO: 331243 - RNA, 17 nt, Human herpesvirus 6B
ggaagauacacugcaag

SEQ ID NO: 331244 - RNA, 16 nt, Human herpesvirus 6B
ggaagaucuaugagaa

SEQ ID NO: 331245 - RNA, 15 nt, Human herpesvirus 6B
ggaagaucuauggga

SEQ ID NO: 331246 - RNA, 15 nt, Human herpesvirus 6B
ggaaggaacauacac

SEQ ID NO: 331247 - RNA, 18 nt, Human herpesvirus 6B
ggaagugaaagcagucag

SEQ ID NO: 331248 - RNA, 15 nt, Human herpesvirus 6B
ggaauaaugaaauuu

SEQ ID NO: 331249 - RNA, 11 nt, Human herpesvirus 6B
ggaaucacaac

SEQ ID NO: 331250 - RNA, 14 nt, Human herpesvirus 6B
ggaauuuguggaac

SEQ ID NO: 331251 - RNA, 19 nt, Human herpesvirus 6B
ggacacgagaagaacaugc

SEQ ID NO: 331252 - RNA, 21 nt, Human herpesvirus 6B
ggacagugauuaggauguuug

SEQ ID NO: 331253 - RNA, 22 nt, Human herpesvirus 6B
ggaccauggucguaaccauucu

SEQ ID NO: 331254 - RNA, 12 nt, Human herpesvirus 6B
ggaccuucagga

SEQ ID NO: 331255 - RNA, 20 nt, Human herpesvirus 6B
ggacgaucccauauugucca

SEQ ID NO: 331256 - RNA, 15 nt, Human herpesvirus 6B
ggacguugaugaaau

SEQ ID NO: 331257 - RNA, 16 nt, Human herpesvirus 6B
ggagagcuucuuagga

SEQ ID NO: 331258 - RNA, 20 nt, Human herpesvirus 6B
ggagaucuggugaauguuuc

SEQ ID NO: 331259 - RNA, 21 nt, Human herpesvirus 6B
ggagaucuggugaauguuucu

SEQ ID NO: 331260 - RNA, 20 nt, Human herpesvirus 6B
ggagcucacuguaccuuuag

SEQ ID NO: 331261 - RNA, 23 nt, Human herpesvirus 6B
ggaguaaugauuggaaucacaaa

SEQ ID NO: 331262 - RNA, 23 nt, Human herpesvirus 6B
ggaguaauuauugugacaaggua

SEQ ID NO: 331263 - RNA, 19 nt, Human herpesvirus 6B
ggauaugaauaaucacuaa

SEQ ID NO: 331264 - RNA, 13 nt, Human herpesvirus 6B
ggaucacuaacuu

SEQ ID NO: 331265 - RNA, 20 nt, Human herpesvirus 6B
ggaugaaguuccacaucuau

SEQ ID NO: 331266 - RNA, 13 nt, Human herpesvirus 6B
ggaugaugguguc

SEQ ID NO: 331267 - RNA, 19 nt, Human herpesvirus 6B
ggauguccauuucuucgag

SEQ ID NO: 331268 - RNA, 15 nt, Human herpesvirus 6B
ggauguuugugacuc

SEQ ID NO: 331269 - RNA, 19 nt, Human herpesvirus 6B
ggauuuguucgauugccaa

SEQ ID NO: 331270 - RNA, 16 nt, Human herpesvirus 6B
ggcaaccgcaguuccu

SEQ ID NO: 331271 - RNA, 15 nt, Human herpesvirus 6B
ggcacacgucccuau

SEQ ID NO: 331272 - RNA, 16 nt, Human herpesvirus 6B
ggcagaucuugaaaag

SEQ ID NO: 331273 - RNA, 16 nt, Human herpesvirus 6B
ggcagauugcaaaauu

SEQ ID NO: 331274 - RNA, 23 nt, Human herpesvirus 6B
ggcauucgccauauaccuuguca

SEQ ID NO: 331275 - RNA, 20 nt, Human herpesvirus 6B
ggccaauuuaugucauuuca

SEQ ID NO: 331276 - RNA, 21 nt, Human herpesvirus 6B
ggccaauuuaugucauuucau

SEQ ID NO: 331277 - RNA, 17 nt, Human herpesvirus 6B
ggccagagacaugaccg

SEQ ID NO: 331278 - RNA, 15 nt, Human herpesvirus 6B
ggccggcacauacac

SEQ ID NO: 331279 - RNA, 13 nt, Human herpesvirus 6B
ggccguaaacuua

SEQ ID NO: 331280 - RNA, 13 nt, Human herpesvirus 6B
ggccucccaugua

SEQ ID NO: 331281 - RNA, 16 nt, Human herpesvirus 6B
ggccucccauguaugc

SEQ ID NO: 331282 - RNA, 17 nt, Human herpesvirus 6B
ggcgaggggacggacag

SEQ ID NO: 331283 - RNA, 19 nt, Human herpesvirus 6B
ggcgcgcauguugcaguuu

SEQ ID NO: 331284 - RNA, 12 nt, Human herpesvirus 6B
ggcgcgugcacg

SEQ ID NO: 331285 - RNA, 21 nt, Human herpesvirus 6B
ggcggaagugaaagcagucag

SEQ ID NO: 331286 - RNA, 11 nt, Human herpesvirus 6B
ggcggagacac

SEQ ID NO: 331287 - RNA, 17 nt, Human herpesvirus 6B
ggcggcaugaauuccau

SEQ ID NO: 331288 - RNA, 21 nt, Human herpesvirus 6B
ggcgugguaggaaaugaugau

SEQ ID NO: 331289 - RNA, 15 nt, Human herpesvirus 6B
ggcuaaaaaugcgac

SEQ ID NO: 331290 - RNA, 16 nt, Human herpesvirus 6B
ggcuaucgcaaugauu

SEQ ID NO: 331291 - RNA, 14 nt, Human herpesvirus 6B
ggcuauuugacaau

SEQ ID NO: 331292 - RNA, 16 nt, Human herpesvirus 6B
ggcucuacgaucucau

SEQ ID NO: 331293 - RNA, 21 nt, Human herpesvirus 6B
ggcuuaauaaaggauguuugu

SEQ ID NO: 331294 - RNA, 20 nt, Human herpesvirus 6B
ggcuucaagaaugccgugaa

SEQ ID NO: 331295 - RNA, 21 nt, Human herpesvirus 6B
ggcuuuaaaaauuacuaaugu

SEQ ID NO: 331296 - RNA, 12 nt, Human herpesvirus 6B
gggaagaucuau

SEQ ID NO: 331297 - RNA, 16 nt, Human herpesvirus 6B
gggaagcauaaguccu

SEQ ID NO: 331298 - RNA, 19 nt, Human herpesvirus 6B
gggacacaucuauguguau

SEQ ID NO: 331299 - RNA, 20 nt, Human herpesvirus 6B
gggacagacagggggaucga

SEQ ID NO: 331300 - RNA, 21 nt, Human herpesvirus 6B
gggccguacacucauuugcaa

SEQ ID NO: 331301 - RNA, 21 nt, Human herpesvirus 6B
gggguccgcucugagauuuga

SEQ ID NO: 331302 - RNA, 21 nt, Human herpesvirus 6B
gggucuuucccgugcucagua

SEQ ID NO: 331303 - RNA, 16 nt, Human herpesvirus 6B
gggugcaaucaaucuu

SEQ ID NO: 331304 - RNA, 17 nt, Human herpesvirus 6B
gggugcaaucaaucuuu

SEQ ID NO: 331305 - RNA, 20 nt, Human herpesvirus 6B
ggguuauacauaaggcaaaa

SEQ ID NO: 331306 - RNA, 22 nt, Human herpesvirus 6B
ggguuuuagaaaaaagugcaag

SEQ ID NO: 331307 - RNA, 18 nt, Human herpesvirus 6B
gguaaacggcauacauuu

SEQ ID NO: 331308 - RNA, 16 nt, Human herpesvirus 6B
gguaaacuguucuuuc

SEQ ID NO: 331309 - RNA, 18 nt, Human herpesvirus 6B
gguaaacuguucuuucaa

SEQ ID NO: 331310 - RNA, 16 nt, Human herpesvirus 6B
gguaaacuucugcuau

SEQ ID NO: 331311 - RNA, 15 nt, Human herpesvirus 6B
gguaagcagcaaaac

SEQ ID NO: 331312 - RNA, 16 nt, Human herpesvirus 6B
gguacgcuucuuucac

SEQ ID NO: 331313 - RNA, 11 nt, Human herpesvirus 6B
gguaugagcug

SEQ ID NO: 331314 - RNA, 13 nt, Human herpesvirus 6B
gguaugucugugc

SEQ ID NO: 331315 - RNA, 17 nt, Human herpesvirus 6B
ggucaaaaaacucagcc

SEQ ID NO: 331316 - RNA, 18 nt, Human herpesvirus 6B
gguccguuuuuucugcaa

SEQ ID NO: 331317 - RNA, 22 nt, Human herpesvirus 6B
ggucgaagacauucaacauucc

SEQ ID NO: 331318 - RNA, 14 nt, Human herpesvirus 6B
ggucgaaugagcuu

SEQ ID NO: 331319 - RNA, 13 nt, Human herpesvirus 6B
ggugaauguuucu

SEQ ID NO: 331320 - RNA, 20 nt, Human herpesvirus 6B
ggugagaagauuugugugaa

SEQ ID NO: 331321 - RNA, 21 nt, Human herpesvirus 6B
ggugauuauagauagcuccaa

SEQ ID NO: 331322 - RNA, 20 nt, Human herpesvirus 6B
ggugauuucaagauuguguu

SEQ ID NO: 331323 - RNA, 16 nt, Human herpesvirus 6B
ggugcuauuaacacau

SEQ ID NO: 331324 - RNA, 22 nt, Human herpesvirus 6B
ggugucucaaccuucauuaauu

SEQ ID NO: 331325 - RNA, 22 nt, Human herpesvirus 6B
ggugugcgaauggcacucugaa

SEQ ID NO: 331326 - RNA, 18 nt, Human herpesvirus 6B
gguguggaaaaaagucac

SEQ ID NO: 331327 - RNA, 15 nt, Human herpesvirus 6B
gguguuuagugccua

SEQ ID NO: 331328 - RNA, 18 nt, Human herpesvirus 6B
gguuauacauaaggcaaa

SEQ ID NO: 331329 - RNA, 13 nt, Human herpesvirus 6B
gguuauuuacaaa

SEQ ID NO: 331330 - RNA, 17 nt, Human herpesvirus 6B
gguucuucgucuucuaa

SEQ ID NO: 331331 - RNA, 13 nt, Human herpesvirus 6B
gguuuauaugcag

SEQ ID NO: 331332 - RNA, 15 nt, Human herpesvirus 6B
gguuuucuuacacau

SEQ ID NO: 331333 - RNA, 16 nt, Human herpesvirus 6B
guaaaaaaacauucua

SEQ ID NO: 331334 - RNA, 18 nt, Human herpesvirus 6B
guaaaaauucacuguggu

SEQ ID NO: 331335 - RNA, 10 nt, Human herpesvirus 6B
guaaaaccuc

SEQ ID NO: 331336 - RNA, 14 nt, Human herpesvirus 6B
guaaaagagccaga

SEQ ID NO: 331337 - RNA, 17 nt, Human herpesvirus 6B
guaaaagagccagagac

SEQ ID NO: 331338 - RNA, 21 nt, Human herpesvirus 6B
guaaaagagccagagacugac

SEQ ID NO: 331339 - RNA, 19 nt, Human herpesvirus 6B
guaaaauuaccucaucccu

SEQ ID NO: 331340 - RNA, 14 nt, Human herpesvirus 6B
guaaacuuauugag

SEQ ID NO: 331341 - RNA, 16 nt, Human herpesvirus 6B
guaaaugucaaagaaa

SEQ ID NO: 331342 - RNA, 15 nt, Human herpesvirus 6B
guguugcuaguugua

SEQ ID NO: 331343 - RNA, 16 nt, Human herpesvirus 6B
guguuggucauuucau

SEQ ID NO: 331344 - RNA, 14 nt, Human herpesvirus 6B
guguugugcgcuag

SEQ ID NO: 331345 - RNA, 14 nt, Human herpesvirus 6B
guguuuagugccua

SEQ ID NO: 331346 - RNA, 15 nt, Human herpesvirus 6B
guguuuauuugcucu

SEQ ID NO: 331347 - RNA, 22 nt, Human herpesvirus 6B
guguuugaaacguugugcugag

SEQ ID NO: 331348 - RNA, 15 nt, Human herpesvirus 6B
guuaaaguauguaua

SEQ ID NO: 331349 - RNA, 16 nt, Human herpesvirus 6B
guuacaagcaugcauu

SEQ ID NO: 331350 - RNA, 15 nt, Human herpesvirus 6B
guuacgauuugcuau

SEQ ID NO: 331351 - RNA, 18 nt, Human herpesvirus 6B
guuacggggaagaucuau

SEQ ID NO: 331352 - RNA, 22 nt, Human herpesvirus 6B
guuagaucuggggagaugcucu

SEQ ID NO: 331353 - RNA, 14 nt, Human herpesvirus 6B
guuagaugcuuaac

SEQ ID NO: 331354 - RNA, 18 nt, Human herpesvirus 6B
guuauacuggcaaagcaa

SEQ ID NO: 331355 - RNA, 16 nt, Human herpesvirus 6B
guuaucggcauugaua

SEQ ID NO: 331356 - RNA, 21 nt, Human herpesvirus 6B
guuaugcgucuguuuauuacc

SEQ ID NO: 331357 - RNA, 22 nt, Human herpesvirus 6B
guuaugcgucuguuuauuacca

SEQ ID NO: 331358 - RNA, 16 nt, Human herpesvirus 6B
guuaugugcuaucugu

SEQ ID NO: 331359 - RNA, 16 nt, Human herpesvirus 6B
guucaaagauagacag

SEQ ID NO: 331360 - RNA, 20 nt, Human herpesvirus 6B
guucaaagauagacagugaa

SEQ ID NO: 331361 - RNA, 14 nt, Human herpesvirus 6B
guucaccacuguga

SEQ ID NO: 331362 - RNA, 15 nt, Human herpesvirus 6B
guucaccacugugau

SEQ ID NO: 331363 - RNA, 12 nt, Human herpesvirus 6B
guucaccauucc

SEQ ID NO: 331364 - RNA, 21 nt, Human herpesvirus 6B
guucaguguucuggcuuguca

SEQ ID NO: 331365 - RNA, 22 nt, Human herpesvirus 6B
guucaguguucuggcuugucau

SEQ ID NO: 331366 - RNA, 16 nt, Human herpesvirus 6B
guucauuuguuccgau

SEQ ID NO: 331367 - RNA, 20 nt, Human herpesvirus 6B
guuccgaauucuuaccaaga

SEQ ID NO: 331368 - RNA, 14 nt, Human herpesvirus 6B
guuccuguuuuucu

SEQ ID NO: 331369 - RNA, 16 nt, Human herpesvirus 6B
guucgauugccaaagg

SEQ ID NO: 331370 - RNA, 22 nt, Human herpesvirus 6B
guucgcacaaaaugauugcaac

SEQ ID NO: 331371 - RNA, 13 nt, Human herpesvirus 6B
guucuaacacaua

SEQ ID NO: 331372 - RNA, 14 nt, Human herpesvirus 6B
guucuaacccauga

SEQ ID NO: 331373 - RNA, 19 nt, Human herpesvirus 6B
guucugccuauaugcgaau

SEQ ID NO: 331374 - RNA, 23 nt, Human herpesvirus 6B
guucuuacaauguucuugacaaa

SEQ ID NO: 331375 - RNA, 22 nt, Human herpesvirus 6B
guucuuucaaaaugaccagaga

SEQ ID NO: 331376 - RNA, 23 nt, Human herpesvirus 6B
guucuuucaaaaugaccagagau

SEQ ID NO: 331377 - RNA, 20 nt, Human herpesvirus 6B
guucuuugaacagugacagu

SEQ ID NO: 331378 - RNA, 12 nt, Human herpesvirus 6B
guugcaguuuaa

SEQ ID NO: 331379 - RNA, 19 nt, Human herpesvirus 6B
guugccaguaagucuucau

SEQ ID NO: 331380 - RNA, 22 nt, Human herpesvirus 6B
guugcgacaucgucuccuauau

SEQ ID NO: 331381 - RNA, 12 nt, Human herpesvirus 6B
guuguacaggaa

SEQ ID NO: 331382 - RNA, 22 nt, Human herpesvirus 6B
guuguauuuaucgauucggaga

SEQ ID NO: 331383 - RNA, 23 nt, Human herpesvirus 6B
guugucuuuguccuauguuaaca

SEQ ID NO: 331384 - RNA, 16 nt, Human herpesvirus 6B
guuguuucaguuucaa

SEQ ID NO: 331385 - RNA, 16 nt, Human herpesvirus 6B
guuuaaucucacacac

SEQ ID NO: 331386 - RNA, 14 nt, Human herpesvirus 6B
guuuaaugcauuca

SEQ ID NO: 331387 - RNA, 13 nt, Human herpesvirus 6B
guuuaccuaucaa

SEQ ID NO: 331388 - RNA, 13 nt, Human herpesvirus 6B
guuuacgaaugau

SEQ ID NO: 331389 - RNA, 17 nt, Human herpesvirus 6B
guuuacugugauuucac

SEQ ID NO: 331390 - RNA, 17 nt, Human herpesvirus 6B
guuuauaugcaggugcu

SEQ ID NO: 331391 - RNA, 20 nt, Human herpesvirus 6B
guuuaucaugagagagcaaa

SEQ ID NO: 331392 - RNA, 19 nt, Human herpesvirus 6B
guuuaucguuuuuauucau

SEQ ID NO: 331393 - RNA, 13 nt, Human herpesvirus 6B
guuuauguuucaa

SEQ ID NO: 331394 - RNA, 22 nt, Human herpesvirus 6B
guuuauuuugucagucaaugca

SEQ ID NO: 331395 - RNA, 17 nt, Human herpesvirus 6B
guuucaaauacucgcau

SEQ ID NO: 331396 - RNA, 15 nt, Human herpesvirus 6B
guuucaccaugucca

SEQ ID NO: 331397 - RNA, 18 nt, Human herpesvirus 6B
guuucaggcgucaaagaa

SEQ ID NO: 331398 - RNA, 22 nt, Human herpesvirus 6B
guuuccagaauacgaacagaaa

SEQ ID NO: 331399 - RNA, 20 nt, Human herpesvirus 6B
guuuccaggcagaguuuugu

SEQ ID NO: 331400 - RNA, 19 nt, Human herpesvirus 6B
guuucgcagaggacaguua

SEQ ID NO: 331401 - RNA, 13 nt, Human herpesvirus 6B
guuucgcugcuau

SEQ ID NO: 331402 - RNA, 19 nt, Human herpesvirus 6B
guuucuccgcacgcuagca

SEQ ID NO: 331403 - RNA, 23 nt, Human herpesvirus 6B
guuucuccgcacgcuagcaauga

SEQ ID NO: 331404 - RNA, 17 nt, Human herpesvirus 6B
guuucucgaaaauacaa

SEQ ID NO: 331405 - RNA, 20 nt, Human herpesvirus 6B
guuucucgaaaauacaauga

SEQ ID NO: 331406 - RNA, 22 nt, Human herpesvirus 6B
guuucugaaaauaaaguugaau

SEQ ID NO: 331407 - RNA, 18 nt, Human herpesvirus 6B
guuucuguggaauuccaa

SEQ ID NO: 331408 - RNA, 14 nt, Human herpesvirus 6B
guuucuguuuuucu

SEQ ID NO: 331409 - RNA, 23 nt, Human herpesvirus 6B
guuucuuagaaccaaucugugag

SEQ ID NO: 331410 - RNA, 23 nt, Human herpesvirus 6B
guuucuuugacauuuaccagaga

SEQ ID NO: 331411 - RNA, 22 nt, Human herpesvirus 6B
guuugacgguucaccacuguga

SEQ ID NO: 331412 - RNA, 16 nt, Human herpesvirus 6B
guuugccaaccaaaug

SEQ ID NO: 331413 - RNA, 17 nt, Human herpesvirus 6B
guuugcgggaugccaua

SEQ ID NO: 331414 - RNA, 19 nt, Human herpesvirus 6B
guuugcgggaugccauaau

SEQ ID NO: 331415 - RNA, 15 nt, Human herpesvirus 6B
guuugucaaagcuac

SEQ ID NO: 331416 - RNA, 20 nt, Human herpesvirus 6B
guuugucuugcaaacagcuu

SEQ ID NO: 331417 - RNA, 14 nt, Human herpesvirus 6B
guuugugacucuga

SEQ ID NO: 331418 - RNA, 14 nt, Human herpesvirus 6B
guuuuaaacauucu

SEQ ID NO: 331419 - RNA, 17 nt, Human herpesvirus 6B
guuuugggaaaucugac

SEQ ID NO: 331420 - RNA, 19 nt, Human herpesvirus 6B
guuuuuacuugaugcaugu

SEQ ID NO: 331421 - RNA, 21 nt, Human herpesvirus 6B
guuuuugaugugcuacguaac

SEQ ID NO: 331422 - RNA, 22 nt, Human herpesvirus 6B
uaaaaaaaaaaacacaccauca

SEQ ID NO: 331423 - RNA, 16 nt, Human herpesvirus 6B
uaaaaaaaaugugucu

SEQ ID NO: 331424 - RNA, 18 nt, Human herpesvirus 6B
uaaaaaaaaugugucuua

SEQ ID NO: 331425 - RNA, 21 nt, Human herpesvirus 6B
uaaaaaagugcaugaugaaca

SEQ ID NO: 331426 - RNA, 23 nt, Human herpesvirus 6B
uaaaaaauuugugcgaauugugu

SEQ ID NO: 331427 - RNA, 21 nt, Human herpesvirus 6B
uaaaaacacacaucauauccu

SEQ ID NO: 331428 - RNA, 23 nt, Human herpesvirus 6B
uaaaaacuaaugcggaacauugu

SEQ ID NO: 331429 - RNA, 14 nt, Human herpesvirus 6B
uaaaaaugaucgcc

SEQ ID NO: 331430 - RNA, 22 nt, Human herpesvirus 6B
uaaaaauuauucuggcgaugca

SEQ ID NO: 331431 - RNA, 19 nt, Human herpesvirus 6B
uaaaaauuucagccgauga

SEQ ID NO: 331432 - RNA, 21 nt, Human herpesvirus 6B
uaaaaauuucagccgaugaua

SEQ ID NO: 331433 - RNA, 16 nt, Human herpesvirus 6B
uaaaacagaaaggcca

SEQ ID NO: 331434 - RNA, 22 nt, Human herpesvirus 6B
uaaaaccugcuaacggagcaac

SEQ ID NO: 331435 - RNA, 20 nt, Human herpesvirus 6B
uaaaacgcucacaacaugau

SEQ ID NO: 331436 - RNA, 20 nt, Human herpesvirus 6B
uaaaacucuaaaaccugcua

SEQ ID NO: 331437 - RNA, 13 nt, Human herpesvirus 6B
uaaaagagccaga

SEQ ID NO: 331438 - RNA, 14 nt, Human herpesvirus 6B
uaaaagagccagag

SEQ ID NO: 331439 - RNA, 12 nt, Human herpesvirus 6B
uaaaagcugcua

SEQ ID NO: 331440 - RNA, 13 nt, Human herpesvirus 6B
uaaaagcugcuaa

SEQ ID NO: 331441 - RNA, 14 nt, Human herpesvirus 6B
uaaaagcugcuaac

SEQ ID NO: 331442 - RNA, 12 nt, Human herpesvirus 6B
uaaaagugcaac

SEQ ID NO: 331443 - RNA, 13 nt, Human herpesvirus 6B
uaaaaucugcuaa

SEQ ID NO: 331444 - RNA, 14 nt, Human herpesvirus 6B
uaaaaucugcuaac

SEQ ID NO: 331445 - RNA, 23 nt, Human herpesvirus 6B
uaaaaugcuccuagggaauuuaa

SEQ ID NO: 331446 - RNA, 22 nt, Human herpesvirus 6B
uaaaaugguuuuuuugugugua

SEQ ID NO: 331447 - RNA, 19 nt, Human herpesvirus 6B
uaaaauuaccucaucccuu

SEQ ID NO: 331448 - RNA, 19 nt, Human herpesvirus 6B
uaaaauuuuuaaacagauu

SEQ ID NO: 331449 - RNA, 21 nt, Human herpesvirus 6B
uaaaauuuuuugcaguauuaa

SEQ ID NO: 331450 - RNA, 16 nt, Human herpesvirus 6B
uaaacacgaaaugaac

SEQ ID NO: 331451 - RNA, 23 nt, Human herpesvirus 6B
uaaacaguuauacuggcaaagca

SEQ ID NO: 331452 - RNA, 14 nt, Human herpesvirus 6B
uaaacaugauugua

SEQ ID NO: 331453 - RNA, 17 nt, Human herpesvirus 6B
uaaaccaucgacuucaa

SEQ ID NO: 331454 - RNA, 17 nt, Human herpesvirus 6B
uacagagccagacaucu

SEQ ID NO: 331455 - RNA, 14 nt, Human herpesvirus 6B
uacagauguguauu

SEQ ID NO: 331456 - RNA, 21 nt, Human herpesvirus 6B
uacagugaauaucgaguuuag

SEQ ID NO: 331457 - RNA, 15 nt, Human herpesvirus 6B
uacagugacuuucac

SEQ ID NO: 331458 - RNA, 15 nt, Human herpesvirus 6B
uacauaaaacagggu

SEQ ID NO: 331459 - RNA, 14 nt, Human herpesvirus 6B
uacauaaacuauug

SEQ ID NO: 331460 - RNA, 17 nt, Human herpesvirus 6B
uacauagaaucucuggu

SEQ ID NO: 331461 - RNA, 14 nt, Human herpesvirus 6B
uacauaguguagaa

SEQ ID NO: 331462 - RNA, 13 nt, Human herpesvirus 6B
uacaucaacuauu

SEQ ID NO: 331463 - RNA, 22 nt, Human herpesvirus 6B
uacaucaacuauuuaacaucca

SEQ ID NO: 331464 - RNA, 17 nt, Human herpesvirus 6B
uacaugaaaacauucag

SEQ ID NO: 331465 - RNA, 15 nt, Human herpesvirus 6B
uacaugccacagaac

SEQ ID NO: 331466 - RNA, 20 nt, Human herpesvirus 6B
uacauguuuuugaugugcua

SEQ ID NO: 331467 - RNA, 23 nt, Human herpesvirus 6B
uacauuauccaggcaugugauug

SEQ ID NO: 331468 - RNA, 12 nt, Human herpesvirus 6B
uaccaacaugua

SEQ ID NO: 331469 - RNA, 22 nt, Human herpesvirus 6B
uaccaacauguauucuccucaa

SEQ ID NO: 331470 - RNA, 20 nt, Human herpesvirus 6B
uaccaguagauggugcuauu

SEQ ID NO: 331471 - RNA, 23 nt, Human herpesvirus 6B
uaccaguagcacgaaccaaaaug

SEQ ID NO: 331472 - RNA, 22 nt, Human herpesvirus 6B
uacccaucguucuuaacauauu

SEQ ID NO: 331473 - RNA, 19 nt, Human herpesvirus 6B
uaccgaccugacacaauca

SEQ ID NO: 331474 - RNA, 20 nt, Human herpesvirus 6B
uaccgaccugacacaaucag

SEQ ID NO: 331475 - RNA, 18 nt, Human herpesvirus 6B
uaccgaucccagcucacc

SEQ ID NO: 331476 - RNA, 17 nt, Human herpesvirus 6B
uaccuaauuccaauuua

SEQ ID NO: 331477 - RNA, 15 nt, Human herpesvirus 6B
uaccucaucccuuaa

SEQ ID NO: 331478 - RNA, 21 nt, Human herpesvirus 6B
uaccugucuuagaagcauuug

SEQ ID NO: 331479 - RNA, 22 nt, Human herpesvirus 6B
uaccugucuuagaagcauuugc

SEQ ID NO: 331480 - RNA, 15 nt, Human herpesvirus 6B
uacgagaggcuuuau

SEQ ID NO: 331481 - RNA, 17 nt, Human herpesvirus 6B
uacgaucucauaugcau

SEQ ID NO: 331482 - RNA, 22 nt, Human herpesvirus 6B
uacgauugcugucuuccuguga

SEQ ID NO: 331483 - RNA, 17 nt, Human herpesvirus 6B
uacgcauugacggguau

SEQ ID NO: 331484 - RNA, 16 nt, Human herpesvirus 6B
uacgcgccgacucucu

SEQ ID NO: 331485 - RNA, 22 nt, Human herpesvirus 6B
uacgcuaacgaacaaaucucca

SEQ ID NO: 331486 - RNA, 19 nt, Human herpesvirus 6B
uacgcuuauaaucuagaau

SEQ ID NO: 331487 - RNA, 14 nt, Human herpesvirus 6B
uacggaagaaauca

SEQ ID NO: 331488 - RNA, 16 nt, Human herpesvirus 6B
uacggucgaaugagcu

SEQ ID NO: 331489 - RNA, 23 nt, Human herpesvirus 6B
uacgugaauuuucugaagacagc

SEQ ID NO: 331490 - RNA, 18 nt, Human herpesvirus 6B
uacgugucggugauaccg

SEQ ID NO: 331491 - RNA, 14 nt, Human herpesvirus 6B
uacgugucucaguc

SEQ ID NO: 331492 - RNA, 15 nt, Human herpesvirus 6B
uacuacagugacuuu

SEQ ID NO: 331493 - RNA, 21 nt, Human herpesvirus 6B
uacuauaacuuuucuaucacu

SEQ ID NO: 331494 - RNA, 23 nt, Human herpesvirus 6B
uacuauaacuuuucuaucacuua

SEQ ID NO: 331495 - RNA, 14 nt, Human herpesvirus 6B
uacuaugugacauc

SEQ ID NO: 331496 - RNA, 19 nt, Human herpesvirus 6B
uacucuccacccaucuccu

SEQ ID NO: 331497 - RNA, 19 nt, Human herpesvirus 6B
uacugacaccacauaacaa

SEQ ID NO: 331498 - RNA, 20 nt, Human herpesvirus 6B
uacugcacuuucgaucacaa

SEQ ID NO: 331499 - RNA, 15 nt, Human herpesvirus 6B
uacugcugguucucg

SEQ ID NO: 331500 - RNA, 17 nt, Human herpesvirus 6B
uacuggcaaagcaaaga

SEQ ID NO: 331501 - RNA, 22 nt, Human herpesvirus 6B
uacuguguauuguguaccuugu

SEQ ID NO: 331502 - RNA, 16 nt, Human herpesvirus 6B
uacuguuucuuugaca

SEQ ID NO: 331503 - RNA, 20 nt, Human herpesvirus 6B
uacuuaaacggaauuaacaa

SEQ ID NO: 331504 - RNA, 20 nt, Human herpesvirus 6B
uacuuaauaacuacacuuau

SEQ ID NO: 331505 - RNA, 20 nt, Human herpesvirus 6B
uacuuacaucgauccaaaag

SEQ ID NO: 331506 - RNA, 10 nt, Human herpesvirus 6B
uacuuccugu

SEQ ID NO: 331507 - RNA, 21 nt, Human herpesvirus 6B
uacuuguaaacuggucugcuu

SEQ ID NO: 331508 - RNA, 21 nt, Human herpesvirus 6B
uacuuuuuucaauaaugcuca

SEQ ID NO: 331509 - RNA, 22 nt, Human herpesvirus 6B
uagaaaaaaauauuuugaaaag

SEQ ID NO: 331510 - RNA, 19 nt, Human herpesvirus 6B
uagaacaggaagcgccaua

SEQ ID NO: 331511 - RNA, 15 nt, Human herpesvirus 6B
uagaaccaaucugug

SEQ ID NO: 331512 - RNA, 18 nt, Human herpesvirus 6B
uagaaccaaucugugagc

SEQ ID NO: 331513 - RNA, 13 nt, Human herpesvirus 6B
uagaagcauuugc

SEQ ID NO: 331514 - RNA, 17 nt, Human herpesvirus 6B
uagacauuuugugauuc

SEQ ID NO: 331515 - RNA, 21 nt, Human herpesvirus 6B
uagagaaaauuauagcuucaa

SEQ ID NO: 331516 - RNA, 16 nt, Human herpesvirus 6B
uagagauauaaugaua

SEQ ID NO: 331517 - RNA, 18 nt, Human herpesvirus 6B
uagagcauccuguuuucc

SEQ ID NO: 331518 - RNA, 21 nt, Human herpesvirus 6B
uagagcauggcgcacgcuaaa

SEQ ID NO: 331519 - RNA, 23 nt, Human herpesvirus 6B
uagaggaugcuuugcuguuuacg

SEQ ID NO: 331520 - RNA, 17 nt, Human herpesvirus 6B
uagauaauuuccaauag

SEQ ID NO: 331521 - RNA, 14 nt, Human herpesvirus 6B
uagaucugccaugg

SEQ ID NO: 331522 - RNA, 18 nt, Human herpesvirus 6B
uagaugaucagcauucac

SEQ ID NO: 331523 - RNA, 20 nt, Human herpesvirus 6B
uagaugcuuaacuuacuuaa

SEQ ID NO: 331524 - RNA, 20 nt, Human herpesvirus 6B
uagauggaaaacugcagauu

SEQ ID NO: 331525 - RNA, 22 nt, Human herpesvirus 6B
uagauggugcuauuaacacaua

SEQ ID NO: 331526 - RNA, 22 nt, Human herpesvirus 6B
uagauuaggggagagacauccg

SEQ ID NO: 331527 - RNA, 20 nt, Human herpesvirus 6B
uagauuuauuagccgugaug

SEQ ID NO: 331528 - RNA, 15 nt, Human herpesvirus 6B
uagcaaucauuaaca

SEQ ID NO: 331529 - RNA, 15 nt, Human herpesvirus 6B
uagcagaaguuuacc

SEQ ID NO: 331530 - RNA, 23 nt, Human herpesvirus 6B
uagcauucuguucuucaucauca

SEQ ID NO: 331531 - RNA, 14 nt, Human herpesvirus 6B
uagccacaaaauaa

SEQ ID NO: 331532 - RNA, 16 nt, Human herpesvirus 6B
uagccagggcauucac

SEQ ID NO: 331533 - RNA, 17 nt, Human herpesvirus 6B
uagccagggcauucaca

SEQ ID NO: 331534 - RNA, 21 nt, Human herpesvirus 6B
uagcggcacguugaccgcaga

SEQ ID NO: 331535 - RNA, 16 nt, Human herpesvirus 6B
uagcggccgcaaaaac

SEQ ID NO: 331536 - RNA, 18 nt, Human herpesvirus 6B
uagcgguuucuagguuuc

SEQ ID NO: 331537 - RNA, 17 nt, Human herpesvirus 6B
uagcuagacgugucuuc

SEQ ID NO: 331538 - RNA, 14 nt, Human herpesvirus 6B
uagcucuaaugcua

SEQ ID NO: 331539 - RNA, 14 nt, Human herpesvirus 6B
uagcuuugacaaac

SEQ ID NO: 331540 - RNA, 15 nt, Human herpesvirus 6B
uagcuuuucauauga

SEQ ID NO: 331541 - RNA, 21 nt, Human herpesvirus 6B
uagcuuuucauaugaaaagcu

SEQ ID NO: 331542 - RNA, 17 nt, Human herpesvirus 6B
uaggaaaagguugagaa

SEQ ID NO: 331543 - RNA, 17 nt, Human herpesvirus 6B
uaggaagaucaugacaa

SEQ ID NO: 331544 - RNA, 23 nt, Human herpesvirus 6B
uaggaaucuuguguucuaacaca

SEQ ID NO: 331545 - RNA, 12 nt, Human herpesvirus 6B
uaggauguuugg

SEQ ID NO: 331546 - RNA, 22 nt, Human herpesvirus 6B
uaggauguuugggagaucugag

SEQ ID NO: 331547 - RNA, 12 nt, Human herpesvirus 6B
uaggcuguuuaa

SEQ ID NO: 331548 - RNA, 16 nt, Human herpesvirus 6B
uaggggagagacaucc

SEQ ID NO: 331549 - RNA, 17 nt, Human herpesvirus 6B
uaggucuuuaucccauc

SEQ ID NO: 331550 - RNA, 13 nt, Human herpesvirus 6B
uaggugugcuuug

SEQ ID NO: 331551 - RNA, 19 nt, Human herpesvirus 6B
uaguagauuuucauuuuga

SEQ ID NO: 331552 - RNA, 13 nt, Human herpesvirus 6B
uagucaauggugu

SEQ ID NO: 331553 - RNA, 13 nt, Human herpesvirus 6B
uagucaugcacuc

SEQ ID NO: 331554 - RNA, 23 nt, Human herpesvirus 6B
uagucguuuuuggauuucuguaa

SEQ ID NO: 331555 - RNA, 13 nt, Human herpesvirus 6B
uagugcaguaugu

SEQ ID NO: 331556 - RNA, 20 nt, Human herpesvirus 6B
uagugcugaggcucuacgau

SEQ ID NO: 331557 - RNA, 12 nt, Human herpesvirus 6B
uagugugccuau

SEQ ID NO: 331558 - RNA, 14 nt, Human herpesvirus 6B
uaguuaaacauacg

SEQ ID NO: 331559 - RNA, 19 nt, Human herpesvirus 6B
uaguuagaugcuuaacuua

SEQ ID NO: 331560 - RNA, 14 nt, Human herpesvirus 6B
uaguugaugcuguu

SEQ ID NO: 331561 - RNA, 12 nt, Human herpesvirus 6B
uauaaaaacaca

SEQ ID NO: 331562 - RNA, 14 nt, Human herpesvirus 6B
uauaaaaguccuca

SEQ ID NO: 331563 - RNA, 15 nt, Human herpesvirus 6B
uauaaagaggccaau

SEQ ID NO: 331564 - RNA, 20 nt, Human herpesvirus 6B
uauaaauguagcacacgaca

SEQ ID NO: 331565 - RNA, 22 nt, Human herpesvirus 6B
uauaaauguagcacacgacaaa

SEQ ID NO: 331566 - RNA, 12 nt, Human herpesvirus 6B
uauaaauucuuu

SEQ ID NO: 331567 - RNA, 21 nt, Human herpesvirus 6B
ugaagaggugcaaaugcucaa

SEQ ID NO: 331568 - RNA, 18 nt, Human herpesvirus 6B
ugaagaugacagcgagac

SEQ ID NO: 331569 - RNA, 14 nt, Human herpesvirus 6B
ugaagcaaaagucu

SEQ ID NO: 331570 - RNA, 23 nt, Human herpesvirus 6B
ugaagcaaagcacccugcacaaa

SEQ ID NO: 331571 - RNA, 19 nt, Human herpesvirus 6B
ugaagcaucccuaugucaa

SEQ ID NO: 331572 - RNA, 19 nt, Human herpesvirus 6B
ugaagcuuucaucaaucac

SEQ ID NO: 331573 - RNA, 16 nt, Human herpesvirus 6B
ugaauauuaguauuag

SEQ ID NO: 331574 - RNA, 16 nt, Human herpesvirus 6B
ugaaucaaauaccuaa

SEQ ID NO: 331575 - RNA, 21 nt, Human herpesvirus 6B
ugaaucaaauaccuaauucca

SEQ ID NO: 331576 - RNA, 18 nt, Human herpesvirus 6B
ugaaugaacgcacuagac

SEQ ID NO: 331577 - RNA, 15 nt, Human herpesvirus 6B
ugaaugaucacuauc

SEQ ID NO: 331578 - RNA, 19 nt, Human herpesvirus 6B
ugaaugaucacuaucaggg

SEQ ID NO: 331579 - RNA, 12 nt, Human herpesvirus 6B
ugaauguguuca

SEQ ID NO: 331580 - RNA, 17 nt, Human herpesvirus 6B
ugaauguuugacuguuc

SEQ ID NO: 331581 - RNA, 20 nt, Human herpesvirus 6B
ugaauucaagacgaucucau

SEQ ID NO: 331582 - RNA, 18 nt, Human herpesvirus 6B
ugaauugugcaagcugua

SEQ ID NO: 331583 - RNA, 17 nt, Human herpesvirus 6B
aagccagaucgaagaaa

SEQ ID NO: 331584 - RNA, 23 nt, Human herpesvirus 6B
aagccucgacguccaccuggaaa

SEQ ID NO: 331585 - RNA, 19 nt, Human herpesvirus 6B
aagccuguuuuagauucua

SEQ ID NO: 331586 - RNA, 23 nt, Human herpesvirus 6B
aagcgccaacggaaagcaucuca

SEQ ID NO: 331587 - RNA, 19 nt, Human herpesvirus 6B
aagcgguuagaucugggga

SEQ ID NO: 331588 - RNA, 17 nt, Human herpesvirus 6B
aagcuagcagaagaaca

SEQ ID NO: 331589 - RNA, 13 nt, Human herpesvirus 6B
aagcuauguauga

SEQ ID NO: 331590 - RNA, 22 nt, Human herpesvirus 6B
aagcugauacacaacuguuacc

SEQ ID NO: 331591 - RNA, 18 nt, Human herpesvirus 6B
aagcuggaaaacuauuaa

SEQ ID NO: 331592 - RNA, 19 nt, Human herpesvirus 6B
aagcuggaaaacuauuaau

SEQ ID NO: 331593 - RNA, 17 nt, Human herpesvirus 6B
aagcuguccaucuucag

SEQ ID NO: 331594 - RNA, 21 nt, Human herpesvirus 6B
aagcuuuacuuacaacugaaa

SEQ ID NO: 331595 - RNA, 22 nt, Human herpesvirus 6B
aaggaaaacucuugacauagca

SEQ ID NO: 331596 - RNA, 22 nt, Human herpesvirus 6B
aaggaauuuauuuucaauauca

SEQ ID NO: 331597 - RNA, 13 nt, Human herpesvirus 6B
aaggacaaaguuc

SEQ ID NO: 331598 - RNA, 18 nt, Human herpesvirus 6B
aaggacuaucugagacag

SEQ ID NO: 331599 - RNA, 23 nt, Human herpesvirus 6B
aaggaguuuaucguuuuuauuca

SEQ ID NO: 331600 - RNA, 16 nt, Human herpesvirus 6B
aaggauaagaugauuu

SEQ ID NO: 331601 - RNA, 16 nt, Human herpesvirus 6B
aaggauguuugugacu

SEQ ID NO: 331602 - RNA, 18 nt, Human herpesvirus 6B
aaggcgcgaguuggugcu

SEQ ID NO: 331603 - RNA, 21 nt, Human herpesvirus 6B
aaggcuucauuggcaucauaa

SEQ ID NO: 331604 - RNA, 14 nt, Human herpesvirus 6B
aagguacacaauac

SEQ ID NO: 331605 - RNA, 17 nt, Human herpesvirus 6B
aagguaggcgaaccaua

SEQ ID NO: 331606 - RNA, 16 nt, Human herpesvirus 6B
aaggugacucuucucu

SEQ ID NO: 331607 - RNA, 21 nt, Human herpesvirus 6B
aaggugaucguggacaguaaa

SEQ ID NO: 331608 - RNA, 20 nt, Human herpesvirus 6B
aaggugcuuuuagagauuau

SEQ ID NO: 331609 - RNA, 16 nt, Human herpesvirus 6B
aaggugguugaaauca

SEQ ID NO: 331610 - RNA, 18 nt, Human herpesvirus 6B
aaggugguugaaaucaca

SEQ ID NO: 331611 - RNA, 17 nt, Human herpesvirus 6B
aaguauacggaagugca

SEQ ID NO: 331612 - RNA, 22 nt, Human herpesvirus 6B
aaguauguauaauauaaauucu

SEQ ID NO: 331613 - RNA, 17 nt, Human herpesvirus 6B
aaguauguuuuguacaa

SEQ ID NO: 331614 - RNA, 16 nt, Human herpesvirus 6B
aaguauuguacuucau

SEQ ID NO: 331615 - RNA, 13 nt, Human herpesvirus 6B
aagucaucauaca

SEQ ID NO: 331616 - RNA, 14 nt, Human herpesvirus 6B
aagucaugcuucuu

SEQ ID NO: 331617 - RNA, 23 nt, Human herpesvirus 6B
aagucgcgaagugcuucugcucu

SEQ ID NO: 331618 - RNA, 16 nt, Human herpesvirus 6B
aagugaaagcagucag

SEQ ID NO: 331619 - RNA, 15 nt, Human herpesvirus 6B
aagugagauacaugu

SEQ ID NO: 331620 - RNA, 22 nt, Human herpesvirus 6B
aagugaggagugcguaaucgca

SEQ ID NO: 331621 - RNA, 14 nt, Human herpesvirus 6B
aagugcaugaugaa

SEQ ID NO: 331622 - RNA, 15 nt, Human herpesvirus 6B
aagugcugugcucuu

SEQ ID NO: 331623 - RNA, 16 nt, Human herpesvirus 6B
aaguggauguggauua

SEQ ID NO: 331624 - RNA, 20 nt, Human herpesvirus 6B
aaguuaacggagagucuuca

SEQ ID NO: 331625 - RNA, 12 nt, Human herpesvirus 6B
aaguuaauucca

SEQ ID NO: 331626 - RNA, 17 nt, Human herpesvirus 6B
aaguuagaaauuacaca

SEQ ID NO: 331627 - RNA, 23 nt, Human herpesvirus 6B
aaguuagaaauuacacaucuuaa

SEQ ID NO: 331628 - RNA, 20 nt, Human herpesvirus 6B
aaguuauauucuucuguaaa

SEQ ID NO: 331629 - RNA, 14 nt, Human herpesvirus 6B
aaguuuacugugau

SEQ ID NO: 331630 - RNA, 19 nt, Human herpesvirus 6B
aaguuucuguggaauucca

SEQ ID NO: 331631 - RNA, 19 nt, Human herpesvirus 6B
aaguuucuuuugugacuau

SEQ ID NO: 331632 - RNA, 17 nt, Human herpesvirus 6B
aaguuuuugguuuuucg

SEQ ID NO: 331633 - RNA, 13 nt, Human herpesvirus 6B
aauaaaaaaccaa

SEQ ID NO: 331634 - RNA, 18 nt, Human herpesvirus 6B
aauaaaaaauuugugcga

SEQ ID NO: 331635 - RNA, 15 nt, Human herpesvirus 6B
aauaaaaacaccucu

SEQ ID NO: 331636 - RNA, 21 nt, Human herpesvirus 6B
aauaaaauguuggcgccaaaa

SEQ ID NO: 331637 - RNA, 13 nt, Human herpesvirus 6B
aauaaacauuuca

SEQ ID NO: 331638 - RNA, 16 nt, Human herpesvirus 6B
aauaaacgcugucuca

SEQ ID NO: 331639 - RNA, 13 nt, Human herpesvirus 6B
aauaaagauuuug

SEQ ID NO: 331640 - RNA, 13 nt, Human herpesvirus 6B
aauaaaugaagcu

SEQ ID NO: 331641 - RNA, 19 nt, Human herpesvirus 6B
aauaagaguuucauccuga

SEQ ID NO: 331642 - RNA, 20 nt, Human herpesvirus 6B
aauaagguaucgucauucca

SEQ ID NO: 331643 - RNA, 19 nt, Human herpesvirus 6B
aauaaugcucagaugugga

SEQ ID NO: 331644 - RNA, 12 nt, Human herpesvirus 6B
aauaauugaugg

SEQ ID NO: 331645 - RNA, 12 nt, Human herpesvirus 6B
aauaauugcacc

SEQ ID NO: 331646 - RNA, 21 nt, Human herpesvirus 6B
aauaauugcacccuaucaccu

SEQ ID NO: 331647 - RNA, 18 nt, Human herpesvirus 6B
aauaccuaauuccaauuu

SEQ ID NO: 331648 - RNA, 19 nt, Human herpesvirus 6B
aauacgagagcugacugaa

SEQ ID NO: 331649 - RNA, 20 nt, Human herpesvirus 6B
aauacuacagugacuuucac

SEQ ID NO: 331650 - RNA, 16 nt, Human herpesvirus 6B
aauacuagacucggaa

SEQ ID NO: 331651 - RNA, 21 nt, Human herpesvirus 6B
aauacuauguggaaauuaaaa

SEQ ID NO: 331652 - RNA, 19 nt, Human herpesvirus 6B
aauagaugaucagcauuca

SEQ ID NO: 331653 - RNA, 20 nt, Human herpesvirus 6B
aauagaugaucagcauucac

SEQ ID NO: 331654 - RNA, 12 nt, Human herpesvirus 6B
aauagauuucau

SEQ ID NO: 331655 - RNA, 22 nt, Human herpesvirus 6B
aauagcauucuguucuucauca

SEQ ID NO: 331656 - RNA, 13 nt, Human herpesvirus 6B
aauaggcgucuca

SEQ ID NO: 331657 - RNA, 14 nt, Human herpesvirus 6B
aauaguaacuucuc

SEQ ID NO: 331658 - RNA, 15 nt, Human herpesvirus 6B
aauaguaacuucucu

SEQ ID NO: 331659 - RNA, 11 nt, Human herpesvirus 6B
aauaguagauu

SEQ ID NO: 331660 - RNA, 15 nt, Human herpesvirus 6B
aauaguuugccauaa

SEQ ID NO: 331661 - RNA, 16 nt, Human herpesvirus 6B
aauauaaauucuuacc

SEQ ID NO: 331662 - RNA, 20 nt, Human herpesvirus 6B
aauaucaaggcggaguguau

SEQ ID NO: 331663 - RNA, 14 nt, Human herpesvirus 6B
aauaucgaguuuag

SEQ ID NO: 331664 - RNA, 19 nt, Human herpesvirus 6B
aauaucgcagcguugcgac

SEQ ID NO: 331665 - RNA, 15 nt, Human herpesvirus 6B
aauaugauggacaaa

SEQ ID NO: 331666 - RNA, 20 nt, Human herpesvirus 6B
aauaugguuccacuuggaag

SEQ ID NO: 331667 - RNA, 16 nt, Human herpesvirus 6B
aauauuaauaguuaaa

SEQ ID NO: 331668 - RNA, 15 nt, Human herpesvirus 6B
aauauucaugcgcuu

SEQ ID NO: 331669 - RNA, 16 nt, Human herpesvirus 6B
aauauugcaugcauug

SEQ ID NO: 331670 - RNA, 19 nt, Human herpesvirus 6B
aauauugcaugcauugcga

SEQ ID NO: 331671 - RNA, 22 nt, Human herpesvirus 6B
aauauuuuuucagcuuucauaa

SEQ ID NO: 331672 - RNA, 14 nt, Human herpesvirus 6B
aaucaaauaccuaa

SEQ ID NO: 331673 - RNA, 19 nt, Human herpesvirus 6B
aaucacaccaaugaucaca

SEQ ID NO: 331674 - RNA, 17 nt, Human herpesvirus 6B
aaucaccgacaaacuac

SEQ ID NO: 331675 - RNA, 20 nt, Human herpesvirus 6B
aaucacgugcuagcucuguu

SEQ ID NO: 331676 - RNA, 18 nt, Human herpesvirus 6B
aaucagguuugucuuuug

SEQ ID NO: 331677 - RNA, 18 nt, Human herpesvirus 6B
aaucaugauugcaacaaa

SEQ ID NO: 331678 - RNA, 14 nt, Human herpesvirus 6B
aaucaugucuuaca

SEQ ID NO: 331679 - RNA, 22 nt, Human herpesvirus 6B
aaucauuaccaguagcacgaac

SEQ ID NO: 331680 - RNA, 19 nt, Human herpesvirus 6B
aaucauuaggaucgaacuc

SEQ ID NO: 331681 - RNA, 19 nt, Human herpesvirus 6B
aaucauucgauuaaugcca

SEQ ID NO: 331682 - RNA, 17 nt, Human herpesvirus 6B
aauccacugcauuucau

SEQ ID NO: 331683 - RNA, 17 nt, Human herpesvirus 6B
aauccaggaguaaugau

SEQ ID NO: 331684 - RNA, 15 nt, Human herpesvirus 6B
aauccaugaacuaca

SEQ ID NO: 331685 - RNA, 16 nt, Human herpesvirus 6B
aauccaugaacuacag

SEQ ID NO: 331686 - RNA, 20 nt, Human herpesvirus 6B
aauccccagaaggauccauu

SEQ ID NO: 331687 - RNA, 16 nt, Human herpesvirus 6B
aauccgauagccauac

SEQ ID NO: 331688 - RNA, 22 nt, Human herpesvirus 6B
aauccguuagucuacgcauuca

SEQ ID NO: 331689 - RNA, 15 nt, Human herpesvirus 6B
aaucgcaaacaggug

SEQ ID NO: 331690 - RNA, 12 nt, Human herpesvirus 6B
aaucgcauuucu

SEQ ID NO: 331691 - RNA, 17 nt, Human herpesvirus 6B
aaucgcauuucucuaca

SEQ ID NO: 331692 - RNA, 22 nt, Human herpesvirus 6B
aaucgcauuucucuacaugcca

SEQ ID NO: 331693 - RNA, 15 nt, Human herpesvirus 6B
aaucgcgccauauca

SEQ ID NO: 331694 - RNA, 19 nt, Human herpesvirus 6B
aaucguaccggucugcaac

SEQ ID NO: 331695 - RNA, 20 nt, Human herpesvirus 6B
aaucuaaaucgcgagacaga

SEQ ID NO: 331696 - RNA, 13 nt, Human herpesvirus 6B
aaucuaagauagu

SEQ ID NO: 331697 - RNA, 22 nt, Human herpesvirus 6B
aaucuaccauaacgcguacaaa

SEQ ID NO: 331698 - RNA, 22 nt, Human herpesvirus 6B
acaaugcggaacaccagcaugu

SEQ ID NO: 331699 - RNA, 19 nt, Human herpesvirus 6B
acaauguucuugacaaaua

SEQ ID NO: 331700 - RNA, 15 nt, Human herpesvirus 6B
acaauuuagccuauu

SEQ ID NO: 331701 - RNA, 22 nt, Human herpesvirus 6B
acaauuucugacucucuuucag

SEQ ID NO: 331702 - RNA, 24 nt, Human herpesvirus 6B
acacaaaaacagggagugauugau

SEQ ID NO: 331703 - RNA, 19 nt, Human herpesvirus 6B
acacaacuuaaccgcaaaa

SEQ ID NO: 331704 - RNA, 15 nt, Human herpesvirus 6B
acacaagaacagaga

SEQ ID NO: 331705 - RNA, 14 nt, Human herpesvirus 6B
acacaagaguaaaa

SEQ ID NO: 331706 - RNA, 17 nt, Human herpesvirus 6B
acacaauacacaguaga

SEQ ID NO: 331707 - RNA, 14 nt, Human herpesvirus 6B
acacacaaugugcu

SEQ ID NO: 331708 - RNA, 19 nt, Human herpesvirus 6B
acacaccccgccugaacac

SEQ ID NO: 331709 - RNA, 17 nt, Human herpesvirus 6B
acacacgguaaacgagu

SEQ ID NO: 331710 - RNA, 19 nt, Human herpesvirus 6B
acacacuggccuacuauaa

SEQ ID NO: 331711 - RNA, 17 nt, Human herpesvirus 6B
acacagaauacaaaaac

SEQ ID NO: 331712 - RNA, 15 nt, Human herpesvirus 6B
acacagcaugaacuc

SEQ ID NO: 331713 - RNA, 15 nt, Human herpesvirus 6B
acacauacauaauuc

SEQ ID NO: 331714 - RNA, 21 nt, Human herpesvirus 6B
acacauaguuuggaucuucug

SEQ ID NO: 331715 - RNA, 18 nt, Human herpesvirus 6B
acacauuuuagcuaucca

SEQ ID NO: 331716 - RNA, 16 nt, Human herpesvirus 6B
acaccaguacuucaag

SEQ ID NO: 331717 - RNA, 19 nt, Human herpesvirus 6B
acaccucgcccgacauaaa

SEQ ID NO: 331718 - RNA, 23 nt, Human herpesvirus 6B
acaccuugacauugauuccaccu

SEQ ID NO: 331719 - RNA, 21 nt, Human herpesvirus 6B
acacgaaaaacauuucuuaca

SEQ ID NO: 331720 - RNA, 20 nt, Human herpesvirus 6B
acacgauccaauuacaucaa

SEQ ID NO: 331721 - RNA, 19 nt, Human herpesvirus 6B
acacgcaccuaaacaccac

SEQ ID NO: 331722 - RNA, 14 nt, Human herpesvirus 6B
acacgcggggaucg

SEQ ID NO: 331723 - RNA, 17 nt, Human herpesvirus 6B
acacggugagucgcaua

SEQ ID NO: 331724 - RNA, 12 nt, Human herpesvirus 6B
acacgucccuau

SEQ ID NO: 331725 - RNA, 13 nt, Human herpesvirus 6B
acacuaacaggau

SEQ ID NO: 331726 - RNA, 15 nt, Human herpesvirus 6B
acacuaacaggauuc

SEQ ID NO: 331727 - RNA, 15 nt, Human herpesvirus 6B
acacuuucauaggaa

SEQ ID NO: 331728 - RNA, 22 nt, Human herpesvirus 6B
acagaaaauugacaaugagguc

SEQ ID NO: 331729 - RNA, 15 nt, Human herpesvirus 6B
acagaacaccugcuu

SEQ ID NO: 331730 - RNA, 22 nt, Human herpesvirus 6B
acagaaguuucggcaacugaau

SEQ ID NO: 331731 - RNA, 15 nt, Human herpesvirus 6B
acagacagggggauc

SEQ ID NO: 331732 - RNA, 15 nt, Human herpesvirus 6B
acagacgaaucacau

SEQ ID NO: 331733 - RNA, 16 nt, Human herpesvirus 6B
acagacgaaucacauc

SEQ ID NO: 331734 - RNA, 23 nt, Human herpesvirus 6B
acccucaagagugcugauuggau

SEQ ID NO: 331735 - RNA, 21 nt, Human herpesvirus 6B
acccuccacgccccuccgucc

SEQ ID NO: 331736 - RNA, 17 nt, Human herpesvirus 6B
acccucugcaagcucau

SEQ ID NO: 331737 - RNA, 20 nt, Human herpesvirus 6B
acccucugcaagcucaugaa

SEQ ID NO: 331738 - RNA, 19 nt, Human herpesvirus 6B
accgaauaaaacaaguuaa

SEQ ID NO: 331739 - RNA, 16 nt, Human herpesvirus 6B
accgacaaacuacuga

SEQ ID NO: 331740 - RNA, 23 nt, Human herpesvirus 6B
accgagagccggaaaacaaugca

SEQ ID NO: 331741 - RNA, 12 nt, Human herpesvirus 6B
accgaugaugau

SEQ ID NO: 331742 - RNA, 17 nt, Human herpesvirus 6B
accgaugaugaucugcu

SEQ ID NO: 331743 - RNA, 24 nt, Human herpesvirus 6B
accgaugcucucagaucaucgcca

SEQ ID NO: 331744 - RNA, 21 nt, Human herpesvirus 6B
accgauguuaaaguugugauu

SEQ ID NO: 331745 - RNA, 19 nt, Human herpesvirus 6B
accgccgacccuagcuuuu

SEQ ID NO: 331746 - RNA, 20 nt, Human herpesvirus 6B
accgcuauuauuuguuuaau

SEQ ID NO: 331747 - RNA, 20 nt, Human herpesvirus 6B
accggagcuuauuuaugaaa

SEQ ID NO: 331748 - RNA, 17 nt, Human herpesvirus 6B
accguagaccguuuuuu

SEQ ID NO: 331749 - RNA, 14 nt, Human herpesvirus 6B
accuaaacaccacu

SEQ ID NO: 331750 - RNA, 13 nt, Human herpesvirus 6B
accuaauaaacuc

SEQ ID NO: 331751 - RNA, 18 nt, Human herpesvirus 6B
accuaaucacaaaacugu

SEQ ID NO: 331752 - RNA, 19 nt, Human herpesvirus 6B
accuaucaacaauguccaa

SEQ ID NO: 331753 - RNA, 17 nt, Human herpesvirus 6B
accucaaaaaugcacaa

SEQ ID NO: 331754 - RNA, 20 nt, Human herpesvirus 6B
accucagcaaacaugugauu

SEQ ID NO: 331755 - RNA, 21 nt, Human herpesvirus 6B
accucagcaaacaugugauuu

SEQ ID NO: 331756 - RNA, 17 nt, Human herpesvirus 6B
accucuaaaacaagacc

SEQ ID NO: 331757 - RNA, 13 nt, Human herpesvirus 6B
accugaucacaga

SEQ ID NO: 331758 - RNA, 17 nt, Human herpesvirus 6B
accugauuucagaauug

SEQ ID NO: 331759 - RNA, 16 nt, Human herpesvirus 6B
accugcuaacggagca

SEQ ID NO: 331760 - RNA, 20 nt, Human herpesvirus 6B
accuggaaaaacugacugac

SEQ ID NO: 331761 - RNA, 15 nt, Human herpesvirus 6B
accuucccuaucaca

SEQ ID NO: 331762 - RNA, 16 nt, Human herpesvirus 6B
accuucccuaucacaa

SEQ ID NO: 331763 - RNA, 16 nt, Human herpesvirus 6B
accuugucagucauaa

SEQ ID NO: 331764 - RNA, 22 nt, Human herpesvirus 6B
accuugucagucauaauucuca

SEQ ID NO: 331765 - RNA, 20 nt, Human herpesvirus 6B
accuuucaauagaugaucag

SEQ ID NO: 331766 - RNA, 14 nt, Human herpesvirus 6B
acgaaaaacauuuc

SEQ ID NO: 331767 - RNA, 14 nt, Human herpesvirus 6B
acgaaaccguccac

SEQ ID NO: 331768 - RNA, 18 nt, Human herpesvirus 6B
acgaaaguucaucuuuca

SEQ ID NO: 331769 - RNA, 20 nt, Human herpesvirus 6B
acgaaauagggucaacuguu

SEQ ID NO: 331770 - RNA, 17 nt, Human herpesvirus 6B
acgaaccaaaaugacuc

SEQ ID NO: 331771 - RNA, 15 nt, Human herpesvirus 6B
acgaaucacauccgc

SEQ ID NO: 331772 - RNA, 16 nt, Human herpesvirus 6B
acgagcugcagucuca

SEQ ID NO: 331773 - RNA, 21 nt, Human herpesvirus 6B
acgauaaaacguuccaucacg

SEQ ID NO: 331774 - RNA, 21 nt, Human herpesvirus 6B
acgauaucaauuccugugaug

SEQ ID NO: 331775 - RNA, 14 nt, Human herpesvirus 6B
acgaucagauguau

SEQ ID NO: 331776 - RNA, 16 nt, Human herpesvirus 6B
acgauccaauuacauc

SEQ ID NO: 331777 - RNA, 23 nt, Human herpesvirus 6B
acgaucuuuccacccacguguga

SEQ ID NO: 331778 - RNA, 17 nt, Human herpesvirus 6B
acgaugaacuacugagu

SEQ ID NO: 331779 - RNA, 23 nt, Human herpesvirus 6B
acgauugcugucuuccugugaga

SEQ ID NO: 331780 - RNA, 13 nt, Human herpesvirus 6B
acgauuuugugac

SEQ ID NO: 331781 - RNA, 18 nt, Human herpesvirus 6B
acgcagacuaauccauau

SEQ ID NO: 331782 - RNA, 22 nt, Human herpesvirus 6B
acgccgccgccguccuauucag

SEQ ID NO: 331783 - RNA, 18 nt, Human herpesvirus 6B
acgcguacaaaaucaaac

SEQ ID NO: 331784 - RNA, 18 nt, Human herpesvirus 6B
acgcgucaacaaacaauu

SEQ ID NO: 331785 - RNA, 18 nt, Human herpesvirus 6B
acgcgucgguaaacaauu

SEQ ID NO: 331786 - RNA, 16 nt, Human herpesvirus 6B
acgcuaaggugagcca

SEQ ID NO: 331787 - RNA, 14 nt, Human herpesvirus 6B
acgcuagcaaugau

SEQ ID NO: 331788 - RNA, 15 nt, Human herpesvirus 6B
acgcuagcaaugaua

SEQ ID NO: 331789 - RNA, 17 nt, Human herpesvirus 6B
acgcucacaacaugauc

SEQ ID NO: 331790 - RNA, 17 nt, Human herpesvirus 6B
acgcucacccgauauau

SEQ ID NO: 331791 - RNA, 17 nt, Human herpesvirus 6B
acggaaaaauuuuacaa

SEQ ID NO: 331792 - RNA, 13 nt, Human herpesvirus 6B
acggaaacaugaa

SEQ ID NO: 331793 - RNA, 13 nt, Human herpesvirus 6B
acggaaagcaucu

SEQ ID NO: 331794 - RNA, 17 nt, Human herpesvirus 6B
acggaauuaacaauucu

SEQ ID NO: 331795 - RNA, 21 nt, Human herpesvirus 6B
acggagaacacuuagaggguu

SEQ ID NO: 331796 - RNA, 23 nt, Human herpesvirus 6B
acggaugggcaagcagccaauga

SEQ ID NO: 331797 - RNA, 13 nt, Human herpesvirus 6B
acggcauacauuu

SEQ ID NO: 331798 - RNA, 21 nt, Human herpesvirus 6B
acggccagcaccuuagcucua

SEQ ID NO: 331799 - RNA, 13 nt, Human herpesvirus 6B
acggcgaaagcca

SEQ ID NO: 331800 - RNA, 23 nt, Human herpesvirus 6B
acggcguuccgacucgauuugau

SEQ ID NO: 331801 - RNA, 23 nt, Human herpesvirus 6B
acgggaaaagaucaagcaaguuc

SEQ ID NO: 331802 - RNA, 22 nt, Human herpesvirus 6B
acggggaugauggugucuuuau

SEQ ID NO: 331803 - RNA, 18 nt, Human herpesvirus 6B
acggggauuuagugcagu

SEQ ID NO: 331804 - RNA, 23 nt, Human herpesvirus 6B
acgggucacguauaccauuccca

SEQ ID NO: 331805 - RNA, 20 nt, Human herpesvirus 6B
acggguuggagaucaguucu

SEQ ID NO: 331806 - RNA, 15 nt, Human herpesvirus 6B
acgguaaacgagugu

SEQ ID NO: 331807 - RNA, 17 nt, Human herpesvirus 6B
acggugagaagauuugu

SEQ ID NO: 331808 - RNA, 14 nt, Human herpesvirus 6B
acggugauggguuu

SEQ ID NO: 331809 - RNA, 19 nt, Human herpesvirus 6B
acgguucaccacugugaua

SEQ ID NO: 331810 - RNA, 17 nt, Human herpesvirus 6B
acguacagagccagaca

SEQ ID NO: 331811 - RNA, 19 nt, Human herpesvirus 6B
acgucaacgucucuauaac

SEQ ID NO: 331812 - RNA, 15 nt, Human herpesvirus 6B
acgugaauuuucuga

SEQ ID NO: 331813 - RNA, 22 nt, Human herpesvirus 6B
acgugauacucggucuacugug

SEQ ID NO: 331814 - RNA, 14 nt, Human herpesvirus 6B
acguuaaauaucua

SEQ ID NO: 331815 - RNA, 18 nt, Human herpesvirus 6B
acguugaaaaaucucuau

SEQ ID NO: 331816 - RNA, 17 nt, Human herpesvirus 6B
acguugcagucugcucg

SEQ ID NO: 331817 - RNA, 19 nt, Human herpesvirus 6B
acguugcagucugcucggu

SEQ ID NO: 331818 - RNA, 23 nt, Human herpesvirus 6B
acguugcucguagccauauauca

SEQ ID NO: 331819 - RNA, 13 nt, Human herpesvirus 6B
acuaaaacaucag

SEQ ID NO: 331820 - RNA, 16 nt, Human herpesvirus 6B
acuaaacuuaacuuau

SEQ ID NO: 331821 - RNA, 18 nt, Human herpesvirus 6B
acuaaaucaugucuuaca

SEQ ID NO: 331822 - RNA, 20 nt, Human herpesvirus 6B
acuaaaucgcgccauaucac

SEQ ID NO: 331823 - RNA, 22 nt, Human herpesvirus 6B
acuaaaucgcgccauaucacag

SEQ ID NO: 331824 - RNA, 14 nt, Human herpesvirus 6B
acuaacaugacaaa

SEQ ID NO: 331825 - RNA, 20 nt, Human herpesvirus 6B
acuaacaugacaaaucugaa

SEQ ID NO: 331826 - RNA, 17 nt, Human herpesvirus 6B
acuaacuucaagaauuc

SEQ ID NO: 331827 - RNA, 16 nt, Human herpesvirus 6B
acuaagauugugcagu

SEQ ID NO: 331828 - RNA, 14 nt, Human herpesvirus 6B
acuaauccauauga

SEQ ID NO: 331829 - RNA, 16 nt, Human herpesvirus 6B
acuacagacuccucac

SEQ ID NO: 331830 - RNA, 24 nt, Human herpesvirus 6B
acuacagcuaagauuaacaacugc

SEQ ID NO: 331831 - RNA, 22 nt, Human herpesvirus 6B
acuacagugaauaucgaguuua

SEQ ID NO: 331832 - RNA, 17 nt, Human herpesvirus 6B
acuacaguggauguuag

SEQ ID NO: 331833 - RNA, 18 nt, Human herpesvirus 6B
acuacguuuuguguuaaa

SEQ ID NO: 331834 - RNA, 17 nt, Human herpesvirus 6B
acuaguaagaacauuaa

SEQ ID NO: 331835 - RNA, 23 nt, Human herpesvirus 6B
acuauagacgccauaauggaaga

SEQ ID NO: 331836 - RNA, 20 nt, Human herpesvirus 6B
acuaugaaccacguuuuucc

SEQ ID NO: 331837 - RNA, 12 nt, Human herpesvirus 6B
acuaugugcauu

SEQ ID NO: 331838 - RNA, 15 nt, Human herpesvirus 6B
acuauuaaacuaaca

SEQ ID NO: 331839 - RNA, 22 nt, Human herpesvirus 6B
acuauuaaacuaacaugacaaa

SEQ ID NO: 331840 - RNA, 15 nt, Human herpesvirus 6B
acuauuuaacaucca

SEQ ID NO: 331841 - RNA, 16 nt, Human herpesvirus 6B
acuauuuaacauccaa

SEQ ID NO: 331842 - RNA, 22 nt, Human herpesvirus 6B
acuauuucuuuuuaaaaucaaa

SEQ ID NO: 331843 - RNA, 15 nt, Human herpesvirus 6B
acuauuuuaguuaca

SEQ ID NO: 331844 - RNA, 14 nt, Human herpesvirus 6B
acucagauucgcaa

SEQ ID NO: 331845 - RNA, 22 nt, Human herpesvirus 6B
acucagauucgcaagacuacag

SEQ ID NO: 331846 - RNA, 18 nt, Human herpesvirus 6B
acucauccucagucuuca

SEQ ID NO: 331847 - RNA, 13 nt, Human herpesvirus 6B
acucauuugcaau

SEQ ID NO: 331848 - RNA, 15 nt, Human herpesvirus 6B
acucgcaugucgaua

SEQ ID NO: 331849 - RNA, 21 nt, Human herpesvirus 6B
acucggaagauacacugcaag

SEQ ID NO: 331850 - RNA, 16 nt, Human herpesvirus 6B
acucggucuacugugu

SEQ ID NO: 331851 - RNA, 17 nt, Human herpesvirus 6B
acucggucuacugugua

SEQ ID NO: 331852 - RNA, 18 nt, Human herpesvirus 6B
acucuaaaagcugcuaac

SEQ ID NO: 331853 - RNA, 23 nt, Human herpesvirus 6B
acucuauuuuuuauuaguauccu

SEQ ID NO: 331854 - RNA, 18 nt, Human herpesvirus 6B
acucucaauuucacuuaa

SEQ ID NO: 331855 - RNA, 18 nt, Human herpesvirus 6B
acucucacggccauuuaa

SEQ ID NO: 331856 - RNA, 17 nt, Human herpesvirus 6B
acucucuuucaguaauu

SEQ ID NO: 331857 - RNA, 11 nt, Human herpesvirus 6B
acucugaagaa

SEQ ID NO: 331858 - RNA, 14 nt, Human herpesvirus 6B
acucugccuguuca

SEQ ID NO: 331859 - RNA, 18 nt, Human herpesvirus 6B
acucuguguugaaugaac

SEQ ID NO: 331860 - RNA, 22 nt, Human herpesvirus 6B
acucuucggcauaaacagagac

SEQ ID NO: 331861 - RNA, 21 nt, Human herpesvirus 6B
acucuugacauagcaauucuu

SEQ ID NO: 331862 - RNA, 18 nt, Human herpesvirus 6B
acugaacuuuguccuuug

SEQ ID NO: 331863 - RNA, 23 nt, Human herpesvirus 6B
acugacuuauaagucaucauaca

SEQ ID NO: 331864 - RNA, 12 nt, Human herpesvirus 6B
acugaucuguag

SEQ ID NO: 331865 - RNA, 13 nt, Human herpesvirus 6B
acugcacagaauc

SEQ ID NO: 331866 - RNA, 13 nt, Human herpesvirus 6B
acugccgcuuaaa

SEQ ID NO: 331867 - RNA, 13 nt, Human herpesvirus 6B
acugcgacucaau

SEQ ID NO: 331868 - RNA, 22 nt, Human herpesvirus 6B
acugcguuacaagcaugcauug

SEQ ID NO: 331869 - RNA, 14 nt, Human herpesvirus 6B
acugcuggcugaga

SEQ ID NO: 331870 - RNA, 20 nt, Human herpesvirus 6B
acugcuggcugagauucacu

SEQ ID NO: 331871 - RNA, 19 nt, Human herpesvirus 6B
acuggaaaacuaugugcau

SEQ ID NO: 331872 - RNA, 20 nt, Human herpesvirus 6B
acuggaaaacuaugugcauu

SEQ ID NO: 331873 - RNA, 13 nt, Human herpesvirus 6B
acuggaugaaucu

SEQ ID NO: 331874 - RNA, 22 nt, Human herpesvirus 6B
acugggugauugggagcucacu

SEQ ID NO: 331875 - RNA, 17 nt, Human herpesvirus 6B
acuggucugcuugcaaa

SEQ ID NO: 331876 - RNA, 16 nt, Human herpesvirus 6B
aaucucaagcacaaaa

SEQ ID NO: 331877 - RNA, 16 nt, Human herpesvirus 6B
aaucucuaugagacug

SEQ ID NO: 331878 - RNA, 21 nt, Human herpesvirus 6B
aaucugaucgaaauacuucuc

SEQ ID NO: 331879 - RNA, 22 nt, Human herpesvirus 6B
aaucugaucgaaauacuucucc

SEQ ID NO: 331880 - RNA, 16 nt, Human herpesvirus 6B
aaucuuuccugcuaau

SEQ ID NO: 331881 - RNA, 17 nt, Human herpesvirus 6B
aaugaacgcacuagaca

SEQ ID NO: 331882 - RNA, 14 nt, Human herpesvirus 6B
aaugacacagaauc

SEQ ID NO: 331883 - RNA, 17 nt, Human herpesvirus 6B
aaugaccagagauucua

SEQ ID NO: 331884 - RNA, 12 nt, Human herpesvirus 6B
aaugacuaucaa

SEQ ID NO: 331885 - RNA, 19 nt, Human herpesvirus 6B
aaugaguuuuuugcaauuu

SEQ ID NO: 331886 - RNA, 13 nt, Human herpesvirus 6B
aaugauacuacgu

SEQ ID NO: 331887 - RNA, 18 nt, Human herpesvirus 6B
aaugauacuacguguaau

SEQ ID NO: 331888 - RNA, 23 nt, Human herpesvirus 6B
aaugaucgccccagacuuaucuc

SEQ ID NO: 331889 - RNA, 19 nt, Human herpesvirus 6B
aaugaugauuaauacauca

SEQ ID NO: 331890 - RNA, 20 nt, Human herpesvirus 6B
aaugaugauuaauacaucau

SEQ ID NO: 331891 - RNA, 12 nt, Human herpesvirus 6B
aaugauuaguua

SEQ ID NO: 331892 - RNA, 20 nt, Human herpesvirus 6B
aaugauuaguuagaugcuua

SEQ ID NO: 331893 - RNA, 20 nt, Human herpesvirus 6B
aaugcaaaaucguguuuucu

SEQ ID NO: 331894 - RNA, 21 nt, Human herpesvirus 6B
aaugcaacauucugcguguua

SEQ ID NO: 331895 - RNA, 13 nt, Human herpesvirus 6B
aaugcaauuccac

SEQ ID NO: 331896 - RNA, 15 nt, Human herpesvirus 6B
aaugcagcaguuuuu

SEQ ID NO: 331897 - RNA, 17 nt, Human herpesvirus 6B
aaugcagcaguuuuugu

SEQ ID NO: 331898 - RNA, 16 nt, Human herpesvirus 6B
aaugcaugauggugcu

SEQ ID NO: 331899 - RNA, 12 nt, Human herpesvirus 6B
aaugcauucaca

SEQ ID NO: 331900 - RNA, 14 nt, Human herpesvirus 6B
aaugcccacaccau

SEQ ID NO: 331901 - RNA, 15 nt, Human herpesvirus 6B
aaugcccacauuucc

SEQ ID NO: 331902 - RNA, 14 nt, Human herpesvirus 6B
aaugcgacaaagcu

SEQ ID NO: 331903 - RNA, 20 nt, Human herpesvirus 6B
aaugcgacaaagcuauucua

SEQ ID NO: 331904 - RNA, 23 nt, Human herpesvirus 6B
aaugcggaacaccagcaugucau

SEQ ID NO: 331905 - RNA, 17 nt, Human herpesvirus 6B
aaugcggguacuauaga

SEQ ID NO: 331906 - RNA, 20 nt, Human herpesvirus 6B
aaugcuaggaagaugguauc

SEQ ID NO: 331907 - RNA, 19 nt, Human herpesvirus 6B
aaugcucagauguggaauu

SEQ ID NO: 331908 - RNA, 15 nt, Human herpesvirus 6B
aaugcugacuuugac

SEQ ID NO: 331909 - RNA, 15 nt, Human herpesvirus 6B
aauggcacucugaag

SEQ ID NO: 331910 - RNA, 13 nt, Human herpesvirus 6B
aauggcugugcua

SEQ ID NO: 331911 - RNA, 20 nt, Human herpesvirus 6B
aaugggauugucauucugca

SEQ ID NO: 331912 - RNA, 20 nt, Human herpesvirus 6B
aauguaaccaccaaaacgac

SEQ ID NO: 331913 - RNA, 21 nt, Human herpesvirus 6B
aauguaacgagaauguaauaa

SEQ ID NO: 331914 - RNA, 23 nt, Human herpesvirus 6B
aaugucuauccgccugcguguau

SEQ ID NO: 331915 - RNA, 15 nt, Human herpesvirus 6B
aaugugaacuaaaua

SEQ ID NO: 331916 - RNA, 15 nt, Human herpesvirus 6B
aauguguucuuacaa

SEQ ID NO: 331917 - RNA, 13 nt, Human herpesvirus 6B
aauguguugguca

SEQ ID NO: 331918 - RNA, 18 nt, Human herpesvirus 6B
agacaagggugugaaacu

SEQ ID NO: 331919 - RNA, 17 nt, Human herpesvirus 6B
agacaccucaaggucaa

SEQ ID NO: 331920 - RNA, 14 nt, Human herpesvirus 6B
agacacgauuuauc

SEQ ID NO: 331921 - RNA, 12 nt, Human herpesvirus 6B
agacacggccag

SEQ ID NO: 331922 - RNA, 21 nt, Human herpesvirus 6B
agacagagguaauaaaaacac

SEQ ID NO: 331923 - RNA, 22 nt, Human herpesvirus 6B
agacagagguaauaaaaacacc

SEQ ID NO: 331924 - RNA, 23 nt, Human herpesvirus 6B
agacagguaagcagcaaaacaac

SEQ ID NO: 331925 - RNA, 16 nt, Human herpesvirus 6B
agacagucaaauugaa

SEQ ID NO: 331926 - RNA, 23 nt, Human herpesvirus 6B
agacauccguugagugugcauca

SEQ ID NO: 331927 - RNA, 20 nt, Human herpesvirus 6B
agacaucgagauucuuuaaa

SEQ ID NO: 331928 - RNA, 16 nt, Human herpesvirus 6B
agacauuuucuauaaa

SEQ ID NO: 331929 - RNA, 16 nt, Human herpesvirus 6B
agacauuuugugauuc

SEQ ID NO: 331930 - RNA, 18 nt, Human herpesvirus 6B
agaccaagaaucguuaaa

SEQ ID NO: 331931 - RNA, 14 nt, Human herpesvirus 6B
agaccgaguaucac

SEQ ID NO: 331932 - RNA, 17 nt, Human herpesvirus 6B
agacgauuuuagaggag

SEQ ID NO: 331933 - RNA, 13 nt, Human herpesvirus 6B
agacguugcucgu

SEQ ID NO: 331934 - RNA, 15 nt, Human herpesvirus 6B
agacugaacacaaaa

SEQ ID NO: 331935 - RNA, 17 nt, Human herpesvirus 6B
agacugaacacaaaaac

SEQ ID NO: 331936 - RNA, 22 nt, Human herpesvirus 6B
agacugcccuggggucuaagau

SEQ ID NO: 331937 - RNA, 21 nt, Human herpesvirus 6B
agacuggaaaacuaugugcau

SEQ ID NO: 331938 - RNA, 22 nt, Human herpesvirus 6B
agacuggccgcauacacccugc

SEQ ID NO: 331939 - RNA, 15 nt, Human herpesvirus 6B
agacuuagaccaaac

SEQ ID NO: 331940 - RNA, 16 nt, Human herpesvirus 6B
agcgguaaaauggagu

SEQ ID NO: 331941 - RNA, 16 nt, Human herpesvirus 6B
agcguggauaucucaa

SEQ ID NO: 331942 - RNA, 20 nt, Human herpesvirus 6B
agcgugugauucaguaucug

SEQ ID NO: 331943 - RNA, 22 nt, Human herpesvirus 6B
agcuaaacgccgacaacgugcu

SEQ ID NO: 331944 - RNA, 14 nt, Human herpesvirus 6B
agcuagacgugucu

SEQ ID NO: 331945 - RNA, 16 nt, Human herpesvirus 6B
agcuagacgugucuuc

SEQ ID NO: 331946 - RNA, 14 nt, Human herpesvirus 6B
agcuagagaaaauu

SEQ ID NO: 331947 - RNA, 21 nt, Human herpesvirus 6B
agcuauaaaaacacacaucau

SEQ ID NO: 331948 - RNA, 22 nt, Human herpesvirus 6B
agcuauaaaaacacacaucaua

SEQ ID NO: 331949 - RNA, 18 nt, Human herpesvirus 6B
agcuauaugcaucucuac

SEQ ID NO: 331950 - RNA, 15 nt, Human herpesvirus 6B
agcucaccaccaucu

SEQ ID NO: 331951 - RNA, 17 nt, Human herpesvirus 6B
agcucacuguaccuuua

SEQ ID NO: 331952 - RNA, 19 nt, Human herpesvirus 6B
agcucagacaaauggaaac

SEQ ID NO: 331953 - RNA, 18 nt, Human herpesvirus 6B
agcucauuugugcuagau

SEQ ID NO: 331954 - RNA, 17 nt, Human herpesvirus 6B
agcugacaucugcaaaa

SEQ ID NO: 331955 - RNA, 18 nt, Human herpesvirus 6B
agcugacaucugcaaaaa

SEQ ID NO: 331956 - RNA, 19 nt, Human herpesvirus 6B
agcugacaucugcaaaaac

SEQ ID NO: 331957 - RNA, 16 nt, Human herpesvirus 6B
agugagauacauguuu

SEQ ID NO: 331958 - RNA, 16 nt, Human herpesvirus 6B
agugagguuaucugga

SEQ ID NO: 331959 - RNA, 15 nt, Human herpesvirus 6B
agugauucaaggugg

SEQ ID NO: 331960 - RNA, 22 nt, Human herpesvirus 6B
agugcacgaaaguggaugugga

SEQ ID NO: 331961 - RNA, 13 nt, Human herpesvirus 6B
agugcaucuuuaa

SEQ ID NO: 331962 - RNA, 16 nt, Human herpesvirus 6B
agugcaugaugaacaa

SEQ ID NO: 331963 - RNA, 23 nt, Human herpesvirus 6B
agugccgugagugcuauuugcau

SEQ ID NO: 331964 - RNA, 12 nt, Human herpesvirus 6B
agugccuaugac

SEQ ID NO: 331965 - RNA, 23 nt, Human herpesvirus 6B
agugcggggagagaauugccgau

SEQ ID NO: 331966 - RNA, 14 nt, Human herpesvirus 6B
agugcuucugcucu

SEQ ID NO: 331967 - RNA, 15 nt, Human herpesvirus 6B
aguggcuaugaagcc

SEQ ID NO: 331968 - RNA, 15 nt, Human herpesvirus 6B
agugggaggagccaa

SEQ ID NO: 331969 - RNA, 21 nt, Human herpesvirus 6B
agugggaggagccaacauaca

SEQ ID NO: 331970 - RNA, 16 nt, Human herpesvirus 6B
aguggguacaaugaaa

SEQ ID NO: 331971 - RNA, 21 nt, Human herpesvirus 6B
agugguuuaauggaaaccuau

SEQ ID NO: 331972 - RNA, 15 nt, Human herpesvirus 6B
agugguuuuuuggau

SEQ ID NO: 331973 - RNA, 16 nt, Human herpesvirus 6B
aguguagaaaacauuc

SEQ ID NO: 331974 - RNA, 15 nt, Human herpesvirus 6B
agugugcaucagcau

SEQ ID NO: 331975 - RNA, 13 nt, Human herpesvirus 6B
aguguuugccaac

SEQ ID NO: 331976 - RNA, 16 nt, Human herpesvirus 6B
aguguuugccaaccaa

SEQ ID NO: 331977 - RNA, 13 nt, Human herpesvirus 6B
aguuaacuaugga

SEQ ID NO: 331978 - RNA, 12 nt, Human herpesvirus 6B
aguuacaauuac

SEQ ID NO: 331979 - RNA, 13 nt, Human herpesvirus 6B
aguuagacuacgc

SEQ ID NO: 331980 - RNA, 19 nt, Human herpesvirus 6B
aguuauacuggcaaagcaa

SEQ ID NO: 331981 - RNA, 17 nt, Human herpesvirus 6B
aguucacacagaugcaa

SEQ ID NO: 331982 - RNA, 22 nt, Human herpesvirus 6B
aguucagaagagaugaaagaca

SEQ ID NO: 331983 - RNA, 18 nt, Human herpesvirus 6B
aguucaucguuauggguu

SEQ ID NO: 331984 - RNA, 20 nt, Human herpesvirus 6B
aguuccacaucuaugaugcu

SEQ ID NO: 331985 - RNA, 20 nt, Human herpesvirus 6B
aguugcggaagggcucuguu

SEQ ID NO: 331986 - RNA, 14 nt, Human herpesvirus 6B
aguuguuagaugau

SEQ ID NO: 331987 - RNA, 15 nt, Human herpesvirus 6B
aguuuaaguucucac

SEQ ID NO: 331988 - RNA, 22 nt, Human herpesvirus 6B
aguuuacauaagaauuacaaua

SEQ ID NO: 331989 - RNA, 21 nt, Human herpesvirus 6B
aguuuaccuaucaacaauguc

SEQ ID NO: 331990 - RNA, 18 nt, Human herpesvirus 6B
aguuuauuuugucaguca

SEQ ID NO: 331991 - RNA, 20 nt, Human herpesvirus 6B
aguuucauccugaccgacuu

SEQ ID NO: 331992 - RNA, 14 nt, Human herpesvirus 6B
aguuuucugaugga

SEQ ID NO: 331993 - RNA, 18 nt, Human herpesvirus 6B
aguuuugagaaagccgau

SEQ ID NO: 331994 - RNA, 16 nt, Human herpesvirus 6B
aguuuuugaccggaau

SEQ ID NO: 331995 - RNA, 14 nt, Human herpesvirus 6B
aguuuuuugcaauu

SEQ ID NO: 331996 - RNA, 21 nt, Human herpesvirus 6B
auaaaaaaaaagacaucacau

SEQ ID NO: 331997 - RNA, 19 nt, Human herpesvirus 6B
auaaaaaaacacauuuuag

SEQ ID NO: 331998 - RNA, 14 nt, Human herpesvirus 6B
auaaaaaaccaaaa

SEQ ID NO: 331999 - RNA, 15 nt, Human herpesvirus 6B
auaaaaaagugcaug

SEQ ID NO: 332000 - RNA, 18 nt, Human herpesvirus 6B
auaaaaaagugcaugaug

SEQ ID NO: 332001 - RNA, 20 nt, Human herpesvirus 6B
auaaaaaagugcaugaugaa

SEQ ID NO: 332002 - RNA, 14 nt, Human herpesvirus 6B
auaaaaacaccucu

SEQ ID NO: 332003 - RNA, 14 nt, Human herpesvirus 6B
auaaaaacgacauc

SEQ ID NO: 332004 - RNA, 23 nt, Human herpesvirus 6B
auaaaaacucaauucugaaauca

SEQ ID NO: 332005 - RNA, 22 nt, Human herpesvirus 6B
auaaaagaaacucuuauggcaa

SEQ ID NO: 332006 - RNA, 18 nt, Human herpesvirus 6B
auaaaauaacaugugaca

SEQ ID NO: 332007 - RNA, 13 nt, Human herpesvirus 6B
auaaaauacacau

SEQ ID NO: 332008 - RNA, 13 nt, Human herpesvirus 6B
auaaacauuucau

SEQ ID NO: 332009 - RNA, 19 nt, Human herpesvirus 6B
auaaacucugccuguucaa

SEQ ID NO: 332010 - RNA, 20 nt, Human herpesvirus 6B
auaaacucugccuguucaac

SEQ ID NO: 332011 - RNA, 19 nt, Human herpesvirus 6B
auaaagacuuacagagcuu

SEQ ID NO: 332012 - RNA, 19 nt, Human herpesvirus 6B
auaaaggcuaaacacugac

SEQ ID NO: 332013 - RNA, 21 nt, Human herpesvirus 6B
auaaagugccgugagugcuau

SEQ ID NO: 332014 - RNA, 22 nt, Human herpesvirus 6B
auaaauggcauucuugcagauu

SEQ ID NO: 332015 - RNA, 12 nt, Human herpesvirus 6B
auaaauuacugc

SEQ ID NO: 332016 - RNA, 16 nt, Human herpesvirus 6B
auaaauuugccaccag

SEQ ID NO: 332017 - RNA, 18 nt, Human herpesvirus 6B
auaacaccaguacuucaa

SEQ ID NO: 332018 - RNA, 22 nt, Human herpesvirus 6B
auaacaccaguacuucaagaaa

SEQ ID NO: 332019 - RNA, 14 nt, Human herpesvirus 6B
auaacacgcugcug

SEQ ID NO: 332020 - RNA, 12 nt, Human herpesvirus 6B
auaacaucucag

SEQ ID NO: 332021 - RNA, 20 nt, Human herpesvirus 6B
auaacgagaaagaaaaccag

SEQ ID NO: 332022 - RNA, 14 nt, Human herpesvirus 6B
auaacggagagcuu

SEQ ID NO: 332023 - RNA, 23 nt, Human herpesvirus 6B
auaagaacuggugucugucuauu

SEQ ID NO: 332024 - RNA, 14 nt, Human herpesvirus 6B
auaagaaugcuggc

SEQ ID NO: 332025 - RNA, 17 nt, Human herpesvirus 6B
auaagaucuacagagua

SEQ ID NO: 332026 - RNA, 15 nt, Human herpesvirus 6B
auaagcaaacaugua

SEQ ID NO: 332027 - RNA, 10 nt, Human herpesvirus 6B
auaagcucua

SEQ ID NO: 332028 - RNA, 16 nt, Human herpesvirus 6B
auaagucaucauacaa

SEQ ID NO: 332029 - RNA, 15 nt, Human herpesvirus 6B
auaaguuaauuccag

SEQ ID NO: 332030 - RNA, 16 nt, Human herpesvirus 6B
auaauaaaaagucaua

SEQ ID NO: 332031 - RNA, 18 nt, Human herpesvirus 6B
auaauaaaaagucauaca

SEQ ID NO: 332032 - RNA, 16 nt, Human herpesvirus 6B
auaauaaaaguuccau

SEQ ID NO: 332033 - RNA, 14 nt, Human herpesvirus 6B
auaaucacaaauau

SEQ ID NO: 332034 - RNA, 15 nt, Human herpesvirus 6B
auaaucacaaauauc

SEQ ID NO: 332035 - RNA, 21 nt, Human herpesvirus 6B
auaauccugucuccucaugga

SEQ ID NO: 332036 - RNA, 15 nt, Human herpesvirus 6B
auaaucgauuacaaa

SEQ ID NO: 332037 - RNA, 18 nt, Human herpesvirus 6B
auaaucgauuacaaaaca

SEQ ID NO: 332038 - RNA, 21 nt, Human herpesvirus 6B
auaaucugaucgaaauacuuc

SEQ ID NO: 332039 - RNA, 17 nt, Human herpesvirus 6B
auaaugcucagaugugg

SEQ ID NO: 332040 - RNA, 19 nt, Human herpesvirus 6B
auaaugcucagauguggaa

SEQ ID NO: 332041 - RNA, 17 nt, Human herpesvirus 6B
auaaugugaacuaaaua

SEQ ID NO: 332042 - RNA, 21 nt, Human herpesvirus 6B
auaauuagaauaggcgucuca

SEQ ID NO: 332043 - RNA, 16 nt, Human herpesvirus 6B
auaauuauggacaacg

SEQ ID NO: 332044 - RNA, 12 nt, Human herpesvirus 6B
auaauucagucu

SEQ ID NO: 332045 - RNA, 19 nt, Human herpesvirus 6B
auaauucagucugcuaaaa

SEQ ID NO: 332046 - RNA, 21 nt, Human herpesvirus 6B
auaauucggucaccaacauuc

SEQ ID NO: 332047 - RNA, 18 nt, Human herpesvirus 6B
auacaagccaugacaaga

SEQ ID NO: 332048 - RNA, 20 nt, Human herpesvirus 6B
auacaagccaugacaagaaa

SEQ ID NO: 332049 - RNA, 16 nt, Human herpesvirus 6B
auacaaugacuaucaa

SEQ ID NO: 332050 - RNA, 13 nt, Human herpesvirus 6B
auacacaacuguu

SEQ ID NO: 332051 - RNA, 20 nt, Human herpesvirus 6B
auacacaacuguuaccgaaa

SEQ ID NO: 332052 - RNA, 15 nt, Human herpesvirus 6B
auacacucucguagu

SEQ ID NO: 332053 - RNA, 22 nt, Human herpesvirus 6B
auacagauguguauuauguaaa

SEQ ID NO: 332054 - RNA, 21 nt, Human herpesvirus 6B
auacagcaauaaaauucacag

SEQ ID NO: 332055 - RNA, 19 nt, Human herpesvirus 6B
auacauaauucggucacca

SEQ ID NO: 332056 - RNA, 21 nt, Human herpesvirus 6B
auacaucauuaaaauauucua

SEQ ID NO: 332057 - RNA, 22 nt, Human herpesvirus 6B
auacauguuuuugaugugcuac

SEQ ID NO: 332058 - RNA, 14 nt, Human herpesvirus 6B
auaccaauuccuua

SEQ ID NO: 332059 - RNA, 12 nt, Human herpesvirus 6B
auaccauuuuau

SEQ ID NO: 332060 - RNA, 15 nt, Human herpesvirus 6B
auacccgauguucuc

SEQ ID NO: 332061 - RNA, 17 nt, Human herpesvirus 6B
auacccgauguucucuc

SEQ ID NO: 332062 - RNA, 14 nt, Human herpesvirus 6B
auaccgacaagaaa

SEQ ID NO: 332063 - RNA, 18 nt, Human herpesvirus 6B
auaccgaucccagcucac

SEQ ID NO: 332064 - RNA, 19 nt, Human herpesvirus 6B
auaccuuuguaaugggagu

SEQ ID NO: 332065 - RNA, 23 nt, Human herpesvirus 6B
auacgcaggauuauaaaaacaca

SEQ ID NO: 332066 - RNA, 14 nt, Human herpesvirus 6B
auacggagcacuuu

SEQ ID NO: 332067 - RNA, 21 nt, Human herpesvirus 6B
auacuauaaacaauuguauuc

SEQ ID NO: 332068 - RNA, 18 nt, Human herpesvirus 6B
auacuauuuuaguuacac

SEQ ID NO: 332069 - RNA, 22 nt, Human herpesvirus 6B
auacuauuuuaguuacacauuc

SEQ ID NO: 332070 - RNA, 14 nt, Human herpesvirus 6B
auacugaugaauuu

SEQ ID NO: 332071 - RNA, 16 nt, Human herpesvirus 6B
auagaaucucugguca

SEQ ID NO: 332072 - RNA, 23 nt, Human herpesvirus 6B
caauguccauuuuuucccaaaag

SEQ ID NO: 332073 - RNA, 14 nt, Human herpesvirus 6B
caauguucuugaca

SEQ ID NO: 332074 - RNA, 16 nt, Human herpesvirus 6B
caauguucuugacaaa

SEQ ID NO: 332075 - RNA, 18 nt, Human herpesvirus 6B
caauucaucaaauccucu

SEQ ID NO: 332076 - RNA, 14 nt, Human herpesvirus 6B
caauuccugugaug

SEQ ID NO: 332077 - RNA, 20 nt, Human herpesvirus 6B
caauucuuauuuaccuuccu

SEQ ID NO: 332078 - RNA, 18 nt, Human herpesvirus 6B
caauuuaugucauuucau

SEQ ID NO: 332079 - RNA, 21 nt, Human herpesvirus 6B
caauuucugacucucuuucag

SEQ ID NO: 332080 - RNA, 22 nt, Human herpesvirus 6B
caauuuuauucaaccaaucuaa

SEQ ID NO: 332081 - RNA, 13 nt, Human herpesvirus 6B
cacaaaacuguac

SEQ ID NO: 332082 - RNA, 17 nt, Human herpesvirus 6B
cacaaaaugauuaguua

SEQ ID NO: 332083 - RNA, 12 nt, Human herpesvirus 6B
cacaaacuguca

SEQ ID NO: 332084 - RNA, 11 nt, Human herpesvirus 6B
cacaaagugag

SEQ ID NO: 332085 - RNA, 23 nt, Human herpesvirus 6B
cacaaauaauuuuauugacugug

SEQ ID NO: 332086 - RNA, 14 nt, Human herpesvirus 6B
cacaaauauccuuu

SEQ ID NO: 332087 - RNA, 16 nt, Human herpesvirus 6B
cacaaggaaugugcag

SEQ ID NO: 332088 - RNA, 12 nt, Human herpesvirus 6B
cacaauacacag

SEQ ID NO: 332089 - RNA, 14 nt, Human herpesvirus 6B
cacaauacacagua

SEQ ID NO: 332090 - RNA, 16 nt, Human herpesvirus 6B
cacaauacacaguaga

SEQ ID NO: 332091 - RNA, 21 nt, Human herpesvirus 6B
cacacacgguaaacgagugug

SEQ ID NO: 332092 - RNA, 23 nt, Human herpesvirus 6B
cacacccauuuccggaguugcag

SEQ ID NO: 332093 - RNA, 15 nt, Human herpesvirus 6B
cacaccccgccugaa

SEQ ID NO: 332094 - RNA, 22 nt, Human herpesvirus 6B
cacagaaaaaaaaaaacaaaga

SEQ ID NO: 332095 - RNA, 15 nt, Human herpesvirus 6B
cacagaaucgagauc

SEQ ID NO: 332096 - RNA, 17 nt, Human herpesvirus 6B
cacagaaucgcaaacag

SEQ ID NO: 332097 - RNA, 13 nt, Human herpesvirus 6B
cacagauugcaua

SEQ ID NO: 332098 - RNA, 17 nt, Human herpesvirus 6B
cacagcaugaacucuca

SEQ ID NO: 332099 - RNA, 18 nt, Human herpesvirus 6B
cacaggcgcgugcacgca

SEQ ID NO: 332100 - RNA, 14 nt, Human herpesvirus 6B
cacagguguacacu

SEQ ID NO: 332101 - RNA, 18 nt, Human herpesvirus 6B
cacagguguacacuauga

SEQ ID NO: 332102 - RNA, 20 nt, Human herpesvirus 6B
cacaguagaccgaguaucac

SEQ ID NO: 332103 - RNA, 13 nt, Human herpesvirus 6B
cacauaaaaucac

SEQ ID NO: 332104 - RNA, 11 nt, Human herpesvirus 6B
cacauacacac

SEQ ID NO: 332105 - RNA, 12 nt, Human herpesvirus 6B
cacauagugaaa

SEQ ID NO: 332106 - RNA, 18 nt, Human herpesvirus 6B
cacauuuuagcuauccau

SEQ ID NO: 332107 - RNA, 22 nt, Human herpesvirus 6B
cacauuuuagcuauccauuuua

SEQ ID NO: 332108 - RNA, 16 nt, Human herpesvirus 6B
caccaacgucaugcaa

SEQ ID NO: 332109 - RNA, 17 nt, Human herpesvirus 6B
caccaacgucaugcaaa

SEQ ID NO: 332110 - RNA, 14 nt, Human herpesvirus 6B
caccaaugaucaca

SEQ ID NO: 332111 - RNA, 18 nt, Human herpesvirus 6B
caccacugugauaugcaa

SEQ ID NO: 332112 - RNA, 13 nt, Human herpesvirus 6B
caccaguacuuca

SEQ ID NO: 332113 - RNA, 22 nt, Human herpesvirus 6B
caccaucaacacaccugccuag

SEQ ID NO: 332114 - RNA, 12 nt, Human herpesvirus 6B
cacccacgugug

SEQ ID NO: 332115 - RNA, 21 nt, Human herpesvirus 6B
cacccacgugugauuuuacaa

SEQ ID NO: 332116 - RNA, 22 nt, Human herpesvirus 6B
cacccauuuccggaguugcagu

SEQ ID NO: 332117 - RNA, 19 nt, Human herpesvirus 6B
cacccgacaugcuucacau

SEQ ID NO: 332118 - RNA, 15 nt, Human herpesvirus 6B
cacccgcguccucca

SEQ ID NO: 332119 - RNA, 16 nt, Human herpesvirus 6B
caccgacaaacuacug

SEQ ID NO: 332120 - RNA, 15 nt, Human herpesvirus 6B
caccgccuccgccac

SEQ ID NO: 332121 - RNA, 19 nt, Human herpesvirus 6B
caccgucucugaagcaaaa

SEQ ID NO: 332122 - RNA, 20 nt, Human herpesvirus 6B
caccgucucugaagcaaaag

SEQ ID NO: 332123 - RNA, 21 nt, Human herpesvirus 6B
caccgucucugaagcaaaagu

SEQ ID NO: 332124 - RNA, 18 nt, Human herpesvirus 6B
caccuaaacaccacuuga

SEQ ID NO: 332125 - RNA, 18 nt, Human herpesvirus 6B
caccuaauaaacucugcc

SEQ ID NO: 332126 - RNA, 23 nt, Human herpesvirus 6B
caccuggaaaaacugacugacaa

SEQ ID NO: 332127 - RNA, 21 nt, Human herpesvirus 6B
caccuuagcucuaaugcuaga

SEQ ID NO: 332128 - RNA, 19 nt, Human herpesvirus 6B
cacgaaccaaaaugacucu

SEQ ID NO: 332129 - RNA, 17 nt, Human herpesvirus 6B
cacgcaccuaaacacca

SEQ ID NO: 332130 - RNA, 20 nt, Human herpesvirus 6B
cacgccccuccguccaggac

SEQ ID NO: 332131 - RNA, 20 nt, Human herpesvirus 6B
cacgccgucuucaaccuguu

SEQ ID NO: 332132 - RNA, 16 nt, Human herpesvirus 6B
cacgcuaaaaacagac

SEQ ID NO: 332133 - RNA, 15 nt, Human herpesvirus 6B
cacgcuaaaaagcag

SEQ ID NO: 332134 - RNA, 15 nt, Human herpesvirus 6B
cacgcuagcaaugau

SEQ ID NO: 332135 - RNA, 16 nt, Human herpesvirus 6B
cacgucccauucacau

SEQ ID NO: 332136 - RNA, 19 nt, Human herpesvirus 6B
cacgucccuaugauagcau

SEQ ID NO: 332137 - RNA, 12 nt, Human herpesvirus 6B
cacuacuaaagc

SEQ ID NO: 332138 - RNA, 12 nt, Human herpesvirus 6B
cacuagacauca

SEQ ID NO: 332139 - RNA, 15 nt, Human herpesvirus 6B
cacucgaaucgcgca

SEQ ID NO: 332140 - RNA, 12 nt, Human herpesvirus 6B
cacucucaauuu

SEQ ID NO: 332141 - RNA, 15 nt, Human herpesvirus 6B
cacucugaagaauaa

SEQ ID NO: 332142 - RNA, 22 nt, Human herpesvirus 6B
cacucugaagaauaaaagucca

SEQ ID NO: 332143 - RNA, 16 nt, Human herpesvirus 6B
cacugccuuaauguau

SEQ ID NO: 332144 - RNA, 14 nt, Human herpesvirus 6B
cacuguaccuuuag

SEQ ID NO: 332145 - RNA, 14 nt, Human herpesvirus 6B
cacugugauaugca

SEQ ID NO: 332146 - RNA, 22 nt, Human herpesvirus 6B
cagaaaaaaaaaaacaaagaga

SEQ ID NO: 332147 - RNA, 18 nt, Human herpesvirus 6B
cagaaaagcaaacaugca

SEQ ID NO: 332148 - RNA, 12 nt, Human herpesvirus 6B
cagaaacugcua

SEQ ID NO: 332149 - RNA, 18 nt, Human herpesvirus 6B
cagaaacuuggagcuaua

SEQ ID NO: 332150 - RNA, 22 nt, Human herpesvirus 6B
cagaaaggccauuggauuccau

SEQ ID NO: 332151 - RNA, 22 nt, Human herpesvirus 6B
cagaaaucguaccggucugcaa

SEQ ID NO: 332152 - RNA, 20 nt, Human herpesvirus 6B
cagaagagaugaaagacaga

SEQ ID NO: 332153 - RNA, 20 nt, Human herpesvirus 6B
cagaaguuucggcaacugaa

SEQ ID NO: 332154 - RNA, 16 nt, Human herpesvirus 6B
cagaauaaaaauuuca

SEQ ID NO: 332155 - RNA, 21 nt, Human herpesvirus 6B
cagaaucgagaucguuuugca

SEQ ID NO: 332156 - RNA, 12 nt, Human herpesvirus 6B
cagaauguucca

SEQ ID NO: 332157 - RNA, 20 nt, Human herpesvirus 6B
cagaauuuuguguccuuaaa

SEQ ID NO: 332158 - RNA, 14 nt, Human herpesvirus 6B
cagacaaauggaaa

SEQ ID NO: 332159 - RNA, 22 nt, Human herpesvirus 6B
cagacacgcuaaaaacagacga

SEQ ID NO: 332160 - RNA, 17 nt, Human herpesvirus 6B
cagaccuucuuuuagua

SEQ ID NO: 332161 - RNA, 16 nt, Human herpesvirus 6B
cagacgcugaaaucau

SEQ ID NO: 332162 - RNA, 14 nt, Human herpesvirus 6B
cagaguaaugacua

SEQ ID NO: 332163 - RNA, 16 nt, Human herpesvirus 6B
cagagugcaucuuuaa

SEQ ID NO: 332164 - RNA, 14 nt, Human herpesvirus 6B
cagauacugcacaa

SEQ ID NO: 332165 - RNA, 15 nt, Human herpesvirus 6B
cagauacugcacaaa

SEQ ID NO: 332166 - RNA, 20 nt, Human herpesvirus 6B
cagaucaucgccauagugaa

SEQ ID NO: 332167 - RNA, 22 nt, Human herpesvirus 6B
cagauccccgccugcagcgaua

SEQ ID NO: 332168 - RNA, 17 nt, Human herpesvirus 6B
cagaucuagaucuggau

SEQ ID NO: 332169 - RNA, 17 nt, Human herpesvirus 6B
cagaugaauugugcgug

SEQ ID NO: 332170 - RNA, 17 nt, Human herpesvirus 6B
cagauggcacugaauca

SEQ ID NO: 332171 - RNA, 19 nt, Human herpesvirus 6B
cagauguagguuucaauca

SEQ ID NO: 332172 - RNA, 21 nt, Human herpesvirus 6B
cagauucgcaagacuacagac

SEQ ID NO: 332173 - RNA, 20 nt, Human herpesvirus 6B
cagcaaguucaucagccauu

SEQ ID NO: 332174 - RNA, 14 nt, Human herpesvirus 6B
cagcaauaaaauuc

SEQ ID NO: 332175 - RNA, 19 nt, Human herpesvirus 6B
cagcaaucagcagccucau

SEQ ID NO: 332176 - RNA, 12 nt, Human herpesvirus 6B
cagcacaccucg

SEQ ID NO: 332177 - RNA, 12 nt, Human herpesvirus 6B
cagcauucacuc

SEQ ID NO: 332178 - RNA, 12 nt, Human herpesvirus 6B
cagccaaugauu

SEQ ID NO: 332179 - RNA, 14 nt, Human herpesvirus 6B
cagcgauauggaaa

SEQ ID NO: 332180 - RNA, 23 nt, Human herpesvirus 6B
cagcgcauccuuaaaugacacag

SEQ ID NO: 332181 - RNA, 17 nt, Human herpesvirus 6B
cagcgcccgaugccaac

SEQ ID NO: 332182 - RNA, 24 nt, Human herpesvirus 6B
cagcgcuugauauaauccugucuc

SEQ ID NO: 332183 - RNA, 19 nt, Human herpesvirus 6B
cagcuaagauuaacaacug

SEQ ID NO: 332184 - RNA, 16 nt, Human herpesvirus 6B
cagcucaccaccaucu

SEQ ID NO: 332185 - RNA, 22 nt, Human herpesvirus 6B
cagcuuucuugaagaugugaua

SEQ ID NO: 332186 - RNA, 20 nt, Human herpesvirus 6B
caggaacaaaguaauaugau

SEQ ID NO: 332187 - RNA, 19 nt, Human herpesvirus 6B
caggaaguucuucaaaaaa

SEQ ID NO: 332188 - RNA, 20 nt, Human herpesvirus 6B
caggaauccuauucauaaca

SEQ ID NO: 332189 - RNA, 16 nt, Human herpesvirus 6B
caggaauucacuuuga

SEQ ID NO: 332190 - RNA, 14 nt, Human herpesvirus 6B
caggauuauaaaaa

SEQ ID NO: 332191 - RNA, 19 nt, Human herpesvirus 6B
caggauuauaaaaacacac

SEQ ID NO: 332192 - RNA, 18 nt, Human herpesvirus 6B
caggauuccccucauaca

SEQ ID NO: 332193 - RNA, 14 nt, Human herpesvirus 6B
cagggaacuugaug

SEQ ID NO: 332194 - RNA, 13 nt, Human herpesvirus 6B
cagggcauucaca

SEQ ID NO: 332195 - RNA, 20 nt, Human herpesvirus 6B
cagggggcgcggggacacau

SEQ ID NO: 332196 - RNA, 15 nt, Human herpesvirus 6B
cagggugcuuugcuu

SEQ ID NO: 332197 - RNA, 21 nt, Human herpesvirus 6B
caggugucucaaccuucauua

SEQ ID NO: 332198 - RNA, 22 nt, Human herpesvirus 6B
caggugucucaaccuucauuaa

SEQ ID NO: 332199 - RNA, 23 nt, Human herpesvirus 6B
cagguugccaauaaaauguccau

SEQ ID NO: 332200 - RNA, 22 nt, Human herpesvirus 6B
caguaagucuucauuaaaacuc

SEQ ID NO: 332201 - RNA, 21 nt, Human herpesvirus 6B
caguauaacggaaauccuuga

SEQ ID NO: 332202 - RNA, 14 nt, Human herpesvirus 6B
caguauuaaugucu

SEQ ID NO: 332203 - RNA, 14 nt, Human herpesvirus 6B
cagucaaugcaauu

SEQ ID NO: 332204 - RNA, 21 nt, Human herpesvirus 6B
cagucucagcaaucaccauca

SEQ ID NO: 332205 - RNA, 20 nt, Human herpesvirus 6B
cagucuucaauaaaaacuca

SEQ ID NO: 332206 - RNA, 19 nt, Human herpesvirus 6B
caguguucuggcuugucau

SEQ ID NO: 332207 - RNA, 19 nt, Human herpesvirus 6B
caguguuugccaaccaaau

SEQ ID NO: 332208 - RNA, 13 nt, Human herpesvirus 6B
caguuaccgugau

SEQ ID NO: 332209 - RNA, 21 nt, Human herpesvirus 6B
caguuagugcaccgagaaaua

SEQ ID NO: 332210 - RNA, 22 nt, Human herpesvirus 6B
caguucaaaauuuuucuguaag

SEQ ID NO: 332211 - RNA, 15 nt, Human herpesvirus 6B
caguuccuguuuuuc

SEQ ID NO: 332212 - RNA, 16 nt, Human herpesvirus 6B
caguuccuguuuuucu

SEQ ID NO: 332213 - RNA, 15 nt, Human herpesvirus 6B
caguuuaccuaucaa

SEQ ID NO: 332214 - RNA, 18 nt, Human herpesvirus 6B
caguuucucgaaaauaca

SEQ ID NO: 332215 - RNA, 15 nt, Human herpesvirus 6B
caguuucuguuuuuc

SEQ ID NO: 332216 - RNA, 20 nt, Human herpesvirus 6B
caguuuuuaucggaacacau

SEQ ID NO: 332217 - RNA, 20 nt, Human herpesvirus 6B
cauaaaagggcgcuggugac

SEQ ID NO: 332218 - RNA, 21 nt, Human herpesvirus 6B
cauaaacugacuuauaaguca

SEQ ID NO: 332219 - RNA, 19 nt, Human herpesvirus 6B
cauaacagauggcacugaa

SEQ ID NO: 332220 - RNA, 12 nt, Human herpesvirus 6B
cauaacaucuca

SEQ ID NO: 332221 - RNA, 13 nt, Human herpesvirus 6B
cauaacaucucag

SEQ ID NO: 332222 - RNA, 15 nt, Human herpesvirus 6B
cauaagaauuacaau

SEQ ID NO: 332223 - RNA, 15 nt, Human herpesvirus 6B
cauaaguuaauucca

SEQ ID NO: 332224 - RNA, 22 nt, Human herpesvirus 6B
cauaaguuaauuccagcuuucu

SEQ ID NO: 332225 - RNA, 23 nt, Human herpesvirus 6B
cauaaguuaauuccagcuuucuu

SEQ ID NO: 332226 - RNA, 22 nt, Human herpesvirus 6B
cauaauucggucaccaacauuc

SEQ ID NO: 332227 - RNA, 17 nt, Human herpesvirus 6B
cauacaauauuuccaua

SEQ ID NO: 332228 - RNA, 22 nt, Human herpesvirus 6B
cauacaauauuuccauaaguua

SEQ ID NO: 332229 - RNA, 19 nt, Human herpesvirus 6B
cauacagacauugcuuucu

SEQ ID NO: 332230 - RNA, 20 nt, Human herpesvirus 6B
cauacauaauucggucacca

SEQ ID NO: 332231 - RNA, 19 nt, Human herpesvirus 6B
cauacuguguaacucuuua

SEQ ID NO: 332232 - RNA, 18 nt, Human herpesvirus 6B
cauagacugaacacaaaa

SEQ ID NO: 332233 - RNA, 20 nt, Human herpesvirus 6B
cauagauggguaagugccua

SEQ ID NO: 332234 - RNA, 16 nt, Human herpesvirus 6B
cauagauuguuacuag

SEQ ID NO: 332235 - RNA, 22 nt, Human herpesvirus 6B
cauagauuguuacuagugauua

SEQ ID NO: 332236 - RNA, 23 nt, Human herpesvirus 6B
cauagcaauucuuauuuaccuuc

SEQ ID NO: 332237 - RNA, 11 nt, Human herpesvirus 6B
cauauaagucu

SEQ ID NO: 332238 - RNA, 17 nt, Human herpesvirus 6B
cauauauuggcacgugu

SEQ ID NO: 332239 - RNA, 16 nt, Human herpesvirus 6B
cauaucacagcauuuc

SEQ ID NO: 332240 - RNA, 18 nt, Human herpesvirus 6B
cauaucacccccauacac

SEQ ID NO: 332241 - RNA, 18 nt, Human herpesvirus 6B
cauauuauuaacaaugaa

SEQ ID NO: 332242 - RNA, 18 nt, Human herpesvirus 6B
caucaaauccucuacgua

SEQ ID NO: 332243 - RNA, 13 nt, Human herpesvirus 6B
caucaacguaaga

SEQ ID NO: 332244 - RNA, 19 nt, Human herpesvirus 6B
caucaacuauuuaacaucc

SEQ ID NO: 332245 - RNA, 20 nt, Human herpesvirus 6B
caucaacuauuuaacaucca

SEQ ID NO: 332246 - RNA, 21 nt, Human herpesvirus 6B
caucaacuauuuaacauccaa

SEQ ID NO: 332247 - RNA, 14 nt, Human herpesvirus 6B
caucacgcauagac

SEQ ID NO: 332248 - RNA, 18 nt, Human herpesvirus 6B
caucacgucccauucaca

SEQ ID NO: 332249 - RNA, 19 nt, Human herpesvirus 6B
caucacgucccauucacau

SEQ ID NO: 332250 - RNA, 22 nt, Human herpesvirus 6B
cauccagaaaagcaaacaugca

SEQ ID NO: 332251 - RNA, 20 nt, Human herpesvirus 6B
caucccuaugucaaugugaa

SEQ ID NO: 332252 - RNA, 21 nt, Human herpesvirus 6B
caucccuaugucaaugugaau

SEQ ID NO: 332253 - RNA, 13 nt, Human herpesvirus 6B
cauccgucaugua

SEQ ID NO: 332254 - RNA, 20 nt, Human herpesvirus 6B
cauccuaauaagacagaaga

SEQ ID NO: 332255 - RNA, 13 nt, Human herpesvirus 6B
caucgacuucaaa

SEQ ID NO: 332256 - RNA, 18 nt, Human herpesvirus 6B
caucgacuucaaacaccu

SEQ ID NO: 332257 - RNA, 21 nt, Human herpesvirus 6B
caucgucuccuccaacaaaga

SEQ ID NO: 332258 - RNA, 15 nt, Human herpesvirus 6B
caucguuuguugaau

SEQ ID NO: 332259 - RNA, 17 nt, Human herpesvirus 6B
caucuauguguauaaug

SEQ ID NO: 332260 - RNA, 15 nt, Human herpesvirus 6B
caucucgugcaaaag

SEQ ID NO: 332261 - RNA, 12 nt, Human herpesvirus 6B
caucugcaaaaa

SEQ ID NO: 332262 - RNA, 13 nt, Human herpesvirus 6B
caucugcaaaaac

SEQ ID NO: 332263 - RNA, 12 nt, Human herpesvirus 6B
caucuguugauc

SEQ ID NO: 332264 - RNA, 18 nt, Human herpesvirus 6B
caugaaaacauucagaaa

SEQ ID NO: 332265 - RNA, 18 nt, Human herpesvirus 6B
caugaaaaucauuaccag

SEQ ID NO: 332266 - RNA, 15 nt, Human herpesvirus 6B
caugaacaucgucau

SEQ ID NO: 332267 - RNA, 12 nt, Human herpesvirus 6B
caugaacucuca

SEQ ID NO: 332268 - RNA, 15 nt, Human herpesvirus 6B
caugacaaaucugaa

SEQ ID NO: 332269 - RNA, 16 nt, Human herpesvirus 6B
caugacggacuuggaa

SEQ ID NO: 332270 - RNA, 20 nt, Human herpesvirus 6B
caugacuauaggaugacuga

SEQ ID NO: 332271 - RNA, 17 nt, Human herpesvirus 6B
caugacuggaaucacaa

SEQ ID NO: 332272 - RNA, 18 nt, Human herpesvirus 6B
caugagccggcucaagau

SEQ ID NO: 332273 - RNA, 15 nt, Human herpesvirus 6B
caugauugcaacaaa

SEQ ID NO: 332274 - RNA, 17 nt, Human herpesvirus 6B
caugccauugaauacac

SEQ ID NO: 332275 - RNA, 21 nt, Human herpesvirus 6B
caugcgaauuaaaacucuaaa

SEQ ID NO: 332276 - RNA, 19 nt, Human herpesvirus 6B
cauggcccuacuacagugg

SEQ ID NO: 332277 - RNA, 17 nt, Human herpesvirus 6B
cauguaaaauuaccuca

SEQ ID NO: 332278 - RNA, 18 nt, Human herpesvirus 6B
cauguaaaauuaccucau

SEQ ID NO: 332279 - RNA, 19 nt, Human herpesvirus 6B
cauguaaaauuaccucauc

SEQ ID NO: 332280 - RNA, 16 nt, Human herpesvirus 6B
cauguacaaacgacaa

SEQ ID NO: 332281 - RNA, 23 nt, Human herpesvirus 6B
cauguaguggucgucggauuaaa

SEQ ID NO: 332282 - RNA, 13 nt, Human herpesvirus 6B
cauguaugcauua

SEQ ID NO: 332283 - RNA, 23 nt, Human herpesvirus 6B
caugucgaauuuucgucugauac

SEQ ID NO: 332284 - RNA, 17 nt, Human herpesvirus 6B
caugugauugucuuuuc

SEQ ID NO: 332285 - RNA, 12 nt, Human herpesvirus 6B
cauguuguucuu

SEQ ID NO: 332286 - RNA, 11 nt, Human herpesvirus 6B
cauguuuacug

SEQ ID NO: 332287 - RNA, 20 nt, Human herpesvirus 6B
cauguuuacugcaugcuaau

SEQ ID NO: 332288 - RNA, 16 nt, Human herpesvirus 6B
cauguuuauugucaaa

SEQ ID NO: 332289 - RNA, 20 nt, Human herpesvirus 6B
cauuaaaaaaauagcagaag

SEQ ID NO: 332290 - RNA, 19 nt, Human herpesvirus 6B
cauuaaaauauucuacuuc

SEQ ID NO: 332291 - RNA, 12 nt, Human herpesvirus 6B
cauuaaacugag

SEQ ID NO: 332292 - RNA, 13 nt, Human herpesvirus 6B
cauuaacauacag

SEQ ID NO: 332293 - RNA, 21 nt, Human herpesvirus 6B
cauuaacauacagauguguau

SEQ ID NO: 332294 - RNA, 14 nt, Human herpesvirus 6B
cauuaaugucacug

SEQ ID NO: 332295 - RNA, 22 nt, Human herpesvirus 6B
cauuaucgugagacauuuucua

SEQ ID NO: 332296 - RNA, 15 nt, Human herpesvirus 6B
cauuauugauagcau

SEQ ID NO: 332297 - RNA, 16 nt, Human herpesvirus 6B
cauuauuuugucuucg

SEQ ID NO: 332298 - RNA, 14 nt, Human herpesvirus 6B
cauucaacauccua

SEQ ID NO: 332299 - RNA, 14 nt, Human herpesvirus 6B
cauucacaaggaau

SEQ ID NO: 332300 - RNA, 21 nt, Human herpesvirus 6B
cauucacaaggaaugugcaga

SEQ ID NO: 332301 - RNA, 13 nt, Human herpesvirus 6B
cauucccaguguc

SEQ ID NO: 332302 - RNA, 17 nt, Human herpesvirus 6B
cauucgauuaaugccac

SEQ ID NO: 332303 - RNA, 15 nt, Human herpesvirus 6B
cauucgucuuuuaua

SEQ ID NO: 332304 - RNA, 21 nt, Human herpesvirus 6B
cauucuccuuguaaaaauuca

SEQ ID NO: 332305 - RNA, 21 nt, Human herpesvirus 6B
cauucuuaaauucaauuuaaa

SEQ ID NO: 332306 - RNA, 13 nt, Human herpesvirus 6B
cauuguguuacac

SEQ ID NO: 332307 - RNA, 17 nt, Human herpesvirus 6B
cauuguugauagguaaa

SEQ ID NO: 332308 - RNA, 20 nt, Human herpesvirus 6B
cauuuacaaaacaaauaucg

SEQ ID NO: 332309 - RNA, 14 nt, Human herpesvirus 6B
cauuuaccagagau

SEQ ID NO: 332310 - RNA, 13 nt, Human herpesvirus 6B
cauuucauuguau

SEQ ID NO: 332311 - RNA, 14 nt, Human herpesvirus 6B
cauuucauuuauua

SEQ ID NO: 332312 - RNA, 22 nt, Human herpesvirus 6B
cauuuccguagcggccgcaaaa

SEQ ID NO: 332313 - RNA, 17 nt, Human herpesvirus 6B
cauuucucuacaugcca

SEQ ID NO: 332314 - RNA, 16 nt, Human herpesvirus 6B
cauuucuuacauaaau

SEQ ID NO: 332315 - RNA, 19 nt, Human herpesvirus 6B
cauuuguuuuuaaagcaca

SEQ ID NO: 332316 - RNA, 14 nt, Human herpesvirus 6B
cauuuuuucccaaa

SEQ ID NO: 332317 - RNA, 19 nt, Human herpesvirus 6B
ccaaaaaaguuuauuuugu

SEQ ID NO: 332318 - RNA, 17 nt, Human herpesvirus 6B
ccaaaaugacucuaaau

SEQ ID NO: 332319 - RNA, 20 nt, Human herpesvirus 6B
ccaacauguauucuccucaa

SEQ ID NO: 332320 - RNA, 17 nt, Human herpesvirus 6B
ccaaccaguuaccguga

SEQ ID NO: 332321 - RNA, 18 nt, Human herpesvirus 6B
ccaacgcgacacggugag

SEQ ID NO: 332322 - RNA, 19 nt, Human herpesvirus 6B
ccaacggagaaaacuauau

SEQ ID NO: 332323 - RNA, 18 nt, Human herpesvirus 6B
ccaagucacguacauaaa

SEQ ID NO: 332324 - RNA, 14 nt, Human herpesvirus 6B
ccaaugauucuuaa

SEQ ID NO: 332325 - RNA, 19 nt, Human herpesvirus 6B
ccaauuaaaguuuucauaa

SEQ ID NO: 332326 - RNA, 13 nt, Human herpesvirus 6B
ccaauuacaucaa

SEQ ID NO: 332327 - RNA, 20 nt, Human herpesvirus 6B
ccaauuuaauauaucuugaa

SEQ ID NO: 332328 - RNA, 23 nt, Human herpesvirus 6B
ccaauuugucgcacguguugaau

SEQ ID NO: 332329 - RNA, 23 nt, Human herpesvirus 6B
ccacagauugcauaugucuguua

SEQ ID NO: 332330 - RNA, 15 nt, Human herpesvirus 6B
ccacaucuaugaugc

SEQ ID NO: 332331 - RNA, 21 nt, Human herpesvirus 6B
ccacauuuccuucaaagugaa

SEQ ID NO: 332332 - RNA, 22 nt, Human herpesvirus 6B
ccacauuuccuucaaagugaau

SEQ ID NO: 332333 - RNA, 18 nt, Human herpesvirus 6B
ccaccuggaaaaacugac

SEQ ID NO: 332334 - RNA, 16 nt, Human herpesvirus 6B
ccacuacuaaagcaau

SEQ ID NO: 332335 - RNA, 20 nt, Human herpesvirus 6B
ccacugcauuucauuuccca

SEQ ID NO: 332336 - RNA, 14 nt, Human herpesvirus 6B
ccacuugaucacaa

SEQ ID NO: 332337 - RNA, 18 nt, Human herpesvirus 6B
ccagagacaugaccguag

SEQ ID NO: 332338 - RNA, 23 nt, Human herpesvirus 6B
ccagagguagcccgagaccuaau

SEQ ID NO: 332339 - RNA, 20 nt, Human herpesvirus 6B
ccagauaaacaaaaauccag

SEQ ID NO: 332340 - RNA, 20 nt, Human herpesvirus 6B
ccagauacugcacaaacgaa

SEQ ID NO: 332341 - RNA, 22 nt, Human herpesvirus 6B
ccagcaaguucaucagccauuu

SEQ ID NO: 332342 - RNA, 21 nt, Human herpesvirus 6B
ccaggaauccuauucauaaca

SEQ ID NO: 332343 - RNA, 18 nt, Human herpesvirus 6B
ccaggaauucacuuugaa

SEQ ID NO: 332344 - RNA, 14 nt, Human herpesvirus 6B
ccagggaacuugau

SEQ ID NO: 332345 - RNA, 12 nt, Human herpesvirus 6B
ccagguuuuuca

SEQ ID NO: 332346 - RNA, 17 nt, Human herpesvirus 6B
ccaguacuucaagaaaa

SEQ ID NO: 332347 - RNA, 18 nt, Human herpesvirus 6B
ccagugagaacauauaaa

SEQ ID NO: 332348 - RNA, 16 nt, Human herpesvirus 6B
ccauaaagaacacagg

SEQ ID NO: 332349 - RNA, 22 nt, Human herpesvirus 6B
ccauaacgcguacaaaaucaaa

SEQ ID NO: 332350 - RNA, 20 nt, Human herpesvirus 6B
ccauacggucgaaugagcuu

SEQ ID NO: 332351 - RNA, 16 nt, Human herpesvirus 6B
ccauaggugauuucaa

SEQ ID NO: 332352 - RNA, 15 nt, Human herpesvirus 6B
ccauaucacagcauu

SEQ ID NO: 332353 - RNA, 14 nt, Human herpesvirus 6B
ccauccgucaugua

SEQ ID NO: 332354 - RNA, 14 nt, Human herpesvirus 6B
ccaucuucagcuca

SEQ ID NO: 332355 - RNA, 20 nt, Human herpesvirus 6B
ccaucuucagcucagacaaa

SEQ ID NO: 332356 - RNA, 20 nt, Human herpesvirus 6B
ccauggcccuacuacagugg

SEQ ID NO: 332357 - RNA, 23 nt, Human herpesvirus 6B
ccauguuuuuacuugauaaacug

SEQ ID NO: 332358 - RNA, 12 nt, Human herpesvirus 6B
ccauuaaauccu

SEQ ID NO: 332359 - RNA, 13 nt, Human herpesvirus 6B
ccauuaaauccua

SEQ ID NO: 332360 - RNA, 23 nt, Human herpesvirus 6B
ccauuguauuggauauguguuaa

SEQ ID NO: 332361 - RNA, 15 nt, Human herpesvirus 6B
cccacagauugcaua

SEQ ID NO: 332362 - RNA, 21 nt, Human herpesvirus 6B
cccaccgauguuaaaguugug

SEQ ID NO: 332363 - RNA, 16 nt, Human herpesvirus 6B
cccacuugaaccaagu

SEQ ID NO: 332364 - RNA, 20 nt, Human herpesvirus 6B
cccagaaggauccauucuag

SEQ ID NO: 332365 - RNA, 15 nt, Human herpesvirus 6B
cccagcauuuucaaa

SEQ ID NO: 332366 - RNA, 23 nt, Human herpesvirus 6B
cccaucgucuccuccaacaaaga

SEQ ID NO: 332367 - RNA, 17 nt, Human herpesvirus 6B
cccaucguucuuaacau

SEQ ID NO: 332368 - RNA, 18 nt, Human herpesvirus 6B
cccauggcgagaaacgcc

SEQ ID NO: 332369 - RNA, 21 nt, Human herpesvirus 6B
ccccagaaggauccauucuag

SEQ ID NO: 332370 - RNA, 13 nt, Human herpesvirus 6B
cccgauguucucu

SEQ ID NO: 332371 - RNA, 21 nt, Human herpesvirus 6B
cccggaguacacguauguacu

SEQ ID NO: 332372 - RNA, 16 nt, Human herpesvirus 6B
cccuaaaaucugcuaa

SEQ ID NO: 332373 - RNA, 20 nt, Human herpesvirus 6B
cccuaaugugauuaugccaa

SEQ ID NO: 332374 - RNA, 14 nt, Human herpesvirus 6B
cccuacuacagugg

SEQ ID NO: 332375 - RNA, 16 nt, Human herpesvirus 6B
cccucauacauccaga

SEQ ID NO: 332376 - RNA, 23 nt, Human herpesvirus 6B
cccugccgaccugauccaugagc

SEQ ID NO: 332377 - RNA, 21 nt, Human herpesvirus 6B
cccuucaccgucucugaagca

SEQ ID NO: 332378 - RNA, 13 nt, Human herpesvirus 6B
cccuucauccagc

SEQ ID NO: 332379 - RNA, 14 nt, Human herpesvirus 6B
ccgaauucuuacca

SEQ ID NO: 332380 - RNA, 15 nt, Human herpesvirus 6B
ccgacauaaaauuua

SEQ ID NO: 332381 - RNA, 21 nt, Human herpesvirus 6B
ccgauugcaccaucuguugau

SEQ ID NO: 332382 - RNA, 23 nt, Human herpesvirus 6B
ccgcguacacgaaaaacauuucu

SEQ ID NO: 332383 - RNA, 14 nt, Human herpesvirus 6B
ccgggauguagcaa

SEQ ID NO: 332384 - RNA, 20 nt, Human herpesvirus 6B
ccggggagugggaggagcca

SEQ ID NO: 332385 - RNA, 20 nt, Human herpesvirus 6B
ccguaggaagaucaugacaa

SEQ ID NO: 332386 - RNA, 19 nt, Human herpesvirus 6B
ccguauucuugagcuugua

SEQ ID NO: 332387 - RNA, 13 nt, Human herpesvirus 6B
ccgucgagacugg

SEQ ID NO: 332388 - RNA, 15 nt, Human herpesvirus 6B
ccgugacacacagaa

SEQ ID NO: 332389 - RNA, 19 nt, Human herpesvirus 6B
ccgugauguuuuccuuuau

SEQ ID NO: 332390 - RNA, 16 nt, Human herpesvirus 6B
ccguuuuuucugcaaa

SEQ ID NO: 332391 - RNA, 17 nt, Human herpesvirus 6B
ccuaaacaccacuugau

SEQ ID NO: 332392 - RNA, 21 nt, Human herpesvirus 6B
ccuaagaaauauugcaugcau

SEQ ID NO: 332393 - RNA, 14 nt, Human herpesvirus 6B
ccuaauaagacaga

SEQ ID NO: 332394 - RNA, 12 nt, Human herpesvirus 6B
ccuacauaugcc

SEQ ID NO: 332395 - RNA, 19 nt, Human herpesvirus 6B
ccuacgcuaacgaacaaau

SEQ ID NO: 332396 - RNA, 18 nt, Human herpesvirus 6B
ccuacuuuggauuuugau

SEQ ID NO: 332397 - RNA, 19 nt, Human herpesvirus 6B
ccuagaguuguuuuuagua

SEQ ID NO: 332398 - RNA, 20 nt, Human herpesvirus 6B
ccuagcuuuucauaugaaaa

SEQ ID NO: 332399 - RNA, 21 nt, Human herpesvirus 6B
ccuauaaaaaaagcaaauacu

SEQ ID NO: 332400 - RNA, 23 nt, Human herpesvirus 6B
ccuauauuuucguugaagaauaa

SEQ ID NO: 332401 - RNA, 14 nt, Human herpesvirus 6B
ccuaucaacaaugu

SEQ ID NO: 332402 - RNA, 12 nt, Human herpesvirus 6B
ccuauguuaaca

SEQ ID NO: 332403 - RNA, 21 nt, Human herpesvirus 6B
ccucaaacuuuuagagacuuu

SEQ ID NO: 332404 - RNA, 18 nt, Human herpesvirus 6B
ccucaaggucaaaaaacu

SEQ ID NO: 332405 - RNA, 20 nt, Human herpesvirus 6B
ccucaggguuggaguuuagc

SEQ ID NO: 332406 - RNA, 13 nt, Human herpesvirus 6B
ccucagucuucaa

SEQ ID NO: 332407 - RNA, 13 nt, Human herpesvirus 6B
ccucauacaucca

SEQ ID NO: 332408 - RNA, 14 nt, Human herpesvirus 6B
ccucauacauccag

SEQ ID NO: 332409 - RNA, 15 nt, Human herpesvirus 6B
ccucauuaugaauaa

SEQ ID NO: 332410 - RNA, 18 nt, Human herpesvirus 6B
ccucgucuguugcuguag

SEQ ID NO: 332411 - RNA, 13 nt, Human herpesvirus 6B
ccucuugcagugg

SEQ ID NO: 332412 - RNA, 20 nt, Human herpesvirus 6B
ccugaaaucugagugaucug

SEQ ID NO: 332413 - RNA, 14 nt, Human herpesvirus 6B
ccugaucacagaga

SEQ ID NO: 332414 - RNA, 10 nt, Human herpesvirus 6B
ccugaucuca

SEQ ID NO: 332415 - RNA, 18 nt, Human herpesvirus 6B
ccugaucucacgucacag

SEQ ID NO: 332416 - RNA, 22 nt, Human herpesvirus 6B
ccugcaauuugaauucugcucg

SEQ ID NO: 332417 - RNA, 16 nt, Human herpesvirus 6B
ccugcacaaacuaauc

SEQ ID NO: 332418 - RNA, 21 nt, Human herpesvirus 6B
ccugccgaccugauccaugag

SEQ ID NO: 332419 - RNA, 16 nt, Human herpesvirus 6B
ccugccuacacugcga

SEQ ID NO: 332420 - RNA, 19 nt, Human herpesvirus 6B
ccuggaaaaacugacugac

SEQ ID NO: 332421 - RNA, 18 nt, Human herpesvirus 6B
ccuguagggauguagaua

SEQ ID NO: 332422 - RNA, 18 nt, Human herpesvirus 6B
ccugucauuuuuacucau

SEQ ID NO: 332423 - RNA, 15 nt, Human herpesvirus 6B
ccuuaaaaaaacaca

SEQ ID NO: 332424 - RNA, 16 nt, Human herpesvirus 6B
ccuuaaaaaaacacag

SEQ ID NO: 332425 - RNA, 17 nt, Human herpesvirus 6B
ccuucaaagugaauucc

SEQ ID NO: 332426 - RNA, 23 nt, Human herpesvirus 6B
ccuucaugauauuccaggcaaua

SEQ ID NO: 332427 - RNA, 13 nt, Human herpesvirus 6B
ccuucgauaauaa

SEQ ID NO: 332428 - RNA, 15 nt, Human herpesvirus 6B
ccuucgguacaguga

SEQ ID NO: 332429 - RNA, 16 nt, Human herpesvirus 6B
ccuucgguacagugaa

SEQ ID NO: 332430 - RNA, 14 nt, Human herpesvirus 6B
ccuucuuuaguaua

SEQ ID NO: 332431 - RNA, 13 nt, Human herpesvirus 6B
ccuugauguuucc

SEQ ID NO: 332432 - RNA, 17 nt, Human herpesvirus 6B
ccuugauguuuccugaa

SEQ ID NO: 332433 - RNA, 18 nt, Human herpesvirus 6B
ccuugauguuuccugaau

SEQ ID NO: 332434 - RNA, 16 nt, Human herpesvirus 6B
ccuuucaauagaugau

SEQ ID NO: 332435 - RNA, 16 nt, Human herpesvirus 6B
ccuuugccugcauuaa

SEQ ID NO: 332436 - RNA, 20 nt, Human herpesvirus 6B
ccuuuguccuuacaaaccuu

SEQ ID NO: 332437 - RNA, 20 nt, Human herpesvirus 6B
ccuuugugugauauuauucu

SEQ ID NO: 332438 - RNA, 14 nt, Human herpesvirus 6B
cgaaaguucaucuu

SEQ ID NO: 332439 - RNA, 18 nt, Human herpesvirus 6B
cgaaauacguucacauua

SEQ ID NO: 332440 - RNA, 16 nt, Human herpesvirus 6B
cgaaauauaaaaccaa

SEQ ID NO: 332441 - RNA, 16 nt, Human herpesvirus 6B
cgaacagaaauuucua

SEQ ID NO: 332442 - RNA, 22 nt, Human herpesvirus 6B
cgaaccauagguguuugcagau

SEQ ID NO: 332443 - RNA, 17 nt, Human herpesvirus 6B
cgaaggaggucucaggu

SEQ ID NO: 332444 - RNA, 17 nt, Human herpesvirus 6B
cgaagugcuucugcucu

SEQ ID NO: 332445 - RNA, 17 nt, Human herpesvirus 6B
cgaaucuaaauuggucu

SEQ ID NO: 332446 - RNA, 18 nt, Human herpesvirus 6B
cgaaugcccacaccaucu

SEQ ID NO: 332447 - RNA, 23 nt, Human herpesvirus 6B
cgaauguacacagucacacacaa

SEQ ID NO: 332448 - RNA, 16 nt, Human herpesvirus 6B
cgaauucuuaccaaga

SEQ ID NO: 332449 - RNA, 21 nt, Human herpesvirus 6B
cgaauugugucguuucuguga

SEQ ID NO: 332450 - RNA, 20 nt, Human herpesvirus 6B
cgacaaagcuauucuaaaua

SEQ ID NO: 332451 - RNA, 20 nt, Human herpesvirus 6B
cgacgucccauucagucuca

SEQ ID NO: 332452 - RNA, 17 nt, Human herpesvirus 6B
cgacuucaaacaccuca

SEQ ID NO: 332453 - RNA, 15 nt, Human herpesvirus 6B
cgagaccgacaguau

SEQ ID NO: 332454 - RNA, 21 nt, Human herpesvirus 6B
cgagacuggccgcauacaccc

SEQ ID NO: 332455 - RNA, 21 nt, Human herpesvirus 6B
cgagaucguuuugcaacuuaa

SEQ ID NO: 332456 - RNA, 16 nt, Human herpesvirus 6B
cgagauucuuuaaaga

SEQ ID NO: 332457 - RNA, 18 nt, Human herpesvirus 6B
cgagcugcagucucagga

SEQ ID NO: 332458 - RNA, 16 nt, Human herpesvirus 6B
cgagucuugugugaaa

SEQ ID NO: 332459 - RNA, 16 nt, Human herpesvirus 6B
cgaguuuagacagagu

SEQ ID NO: 332460 - RNA, 14 nt, Human herpesvirus 6B
cgauaaauuugcca

SEQ ID NO: 332461 - RNA, 20 nt, Human herpesvirus 6B
cgauaaauuugccaccagau

SEQ ID NO: 332462 - RNA, 11 nt, Human herpesvirus 6B
cgauagaggaa

SEQ ID NO: 332463 - RNA, 14 nt, Human herpesvirus 6B
cgauaguguucucu

SEQ ID NO: 332464 - RNA, 22 nt, Human herpesvirus 6B
cgaucuuauauuaaagauugca

SEQ ID NO: 332465 - RNA, 16 nt, Human herpesvirus 6B
cgaugaaacugucgaa

SEQ ID NO: 332466 - RNA, 17 nt, Human herpesvirus 6B
cgaugauuauucugucu

SEQ ID NO: 332467 - RNA, 17 nt, Human herpesvirus 6B
cgaugcguuugccauau

SEQ ID NO: 332468 - RNA, 15 nt, Human herpesvirus 6B
cgauguacaguuucu

SEQ ID NO: 332469 - RNA, 21 nt, Human herpesvirus 6B
cgauuaaugccacagguacau

SEQ ID NO: 332470 - RNA, 16 nt, Human herpesvirus 6B
cgauuaguuugugcag

SEQ ID NO: 332471 - RNA, 13 nt, Human herpesvirus 6B
cgcaaaaacaugu

SEQ ID NO: 332472 - RNA, 12 nt, Human herpesvirus 6B
cgcagacuaauc

SEQ ID NO: 332473 - RNA, 21 nt, Human herpesvirus 6B
cgcaguuccuguuuuucucau

SEQ ID NO: 332474 - RNA, 22 nt, Human herpesvirus 6B
cgcauccuuaaaugacacagaa

SEQ ID NO: 332475 - RNA, 20 nt, Human herpesvirus 6B
cgcauuucucgucuacuccg

SEQ ID NO: 332476 - RNA, 19 nt, Human herpesvirus 6B
cgcauuucucuacaugcca

SEQ ID NO: 332477 - RNA, 12 nt, Human herpesvirus 6B
cgccacucuaca

SEQ ID NO: 332478 - RNA, 22 nt, Human herpesvirus 6B
cgccgcguccgaagaaucugcc

SEQ ID NO: 332479 - RNA, 14 nt, Human herpesvirus 6B
cgccucccauagag

SEQ ID NO: 332480 - RNA, 20 nt, Human herpesvirus 6B
cgccuuguguauuugugaac

SEQ ID NO: 332481 - RNA, 18 nt, Human herpesvirus 6B
cgcgcaaaggguaguuuu

SEQ ID NO: 332482 - RNA, 13 nt, Human herpesvirus 6B
cgcgcgccgugac

SEQ ID NO: 332483 - RNA, 17 nt, Human herpesvirus 6B
cgcgguauaaugcauga

SEQ ID NO: 332484 - RNA, 17 nt, Human herpesvirus 6B
cgcgugcguaucugcau

SEQ ID NO: 332485 - RNA, 21 nt, Human herpesvirus 6B
cgcuaacgaacaaaucuccaa

SEQ ID NO: 332486 - RNA, 16 nt, Human herpesvirus 6B
cgcuaagagauuuacu

SEQ ID NO: 332487 - RNA, 14 nt, Human herpesvirus 6B
cgcuagcaaugaua

SEQ ID NO: 332488 - RNA, 19 nt, Human herpesvirus 6B
cgcucugagauuugagaaa

SEQ ID NO: 332489 - RNA, 15 nt, Human herpesvirus 6B
cggaaauccuugacu

SEQ ID NO: 332490 - RNA, 16 nt, Human herpesvirus 6B
cggaacaccagcaugu

SEQ ID NO: 332491 - RNA, 22 nt, Human herpesvirus 6B
cggaacugcuggcugagauuca

SEQ ID NO: 332492 - RNA, 20 nt, Human herpesvirus 6B
cggaauuaacaauucucuca

SEQ ID NO: 332493 - RNA, 13 nt, Human herpesvirus 6B
cggacgaucccau

SEQ ID NO: 332494 - RNA, 21 nt, Human herpesvirus 6B
cggagaacgggcaacucccca

SEQ ID NO: 332495 - RNA, 15 nt, Human herpesvirus 6B
cggagacacauagcc

SEQ ID NO: 332496 - RNA, 17 nt, Human herpesvirus 6B
cggagacacgauuuauc

SEQ ID NO: 332497 - RNA, 18 nt, Human herpesvirus 6B
cggagcaaccgcaguucc

SEQ ID NO: 332498 - RNA, 18 nt, Human herpesvirus 6B
cggagcaaccgcaguuuc

SEQ ID NO: 332499 - RNA, 15 nt, Human herpesvirus 6B
cggagcacuuuuuaa

SEQ ID NO: 332500 - RNA, 14 nt, Human herpesvirus 6B
cggaguuaagacau

SEQ ID NO: 332501 - RNA, 14 nt, Human herpesvirus 6B
cggauagguagaau

SEQ ID NO: 332502 - RNA, 14 nt, Human herpesvirus 6B
cggauggaauccaa

SEQ ID NO: 332503 - RNA, 17 nt, Human herpesvirus 6B
cggauggaauccaaugg

SEQ ID NO: 332504 - RNA, 15 nt, Human herpesvirus 6B
cggaugggguuuuga

SEQ ID NO: 332505 - RNA, 16 nt, Human herpesvirus 6B
cggcaaccgcaguucc

SEQ ID NO: 332506 - RNA, 17 nt, Human herpesvirus 6B
cggcauuuguguuuuua

SEQ ID NO: 332507 - RNA, 23 nt, Human herpesvirus 6B
cggccacguucuuugaacaguga

SEQ ID NO: 332508 - RNA, 15 nt, Human herpesvirus 6B
cggcggauggagccc

SEQ ID NO: 332509 - RNA, 13 nt, Human herpesvirus 6B
cggcguguuucuu

SEQ ID NO: 332510 - RNA, 16 nt, Human herpesvirus 6B
cggcuacggugcgauu

SEQ ID NO: 332511 - RNA, 19 nt, Human herpesvirus 6B
cggcucaagauucuaugau

SEQ ID NO: 332512 - RNA, 17 nt, Human herpesvirus 6B
cgggaccuggcgggcac

SEQ ID NO: 332513 - RNA, 18 nt, Human herpesvirus 6B
cgggcaccgagggcgggc

SEQ ID NO: 332514 - RNA, 20 nt, Human herpesvirus 6B
cgggcacggugugaucauca

SEQ ID NO: 332515 - RNA, 14 nt, Human herpesvirus 6B
cgggcagggcgggc

SEQ ID NO: 332516 - RNA, 13 nt, Human herpesvirus 6B
cggggacagugau

SEQ ID NO: 332517 - RNA, 18 nt, Human herpesvirus 6B
cggggauuuagugcagua

SEQ ID NO: 332518 - RNA, 23 nt, Human herpesvirus 6B
cgggguccgcucugagauuugag

SEQ ID NO: 332519 - RNA, 23 nt, Human herpesvirus 6B
cggguuuuagaaaaaagugcaag

SEQ ID NO: 332520 - RNA, 17 nt, Human herpesvirus 6B
cgguacgcuucuuucac

SEQ ID NO: 332521 - RNA, 22 nt, Human herpesvirus 6B
cgguauaaugcaugauggugcu

SEQ ID NO: 332522 - RNA, 19 nt, Human herpesvirus 6B
cgguccccccucccuccau

SEQ ID NO: 332523 - RNA, 20 nt, Human herpesvirus 6B
cgguccguuuuuucugcaaa

SEQ ID NO: 332524 - RNA, 21 nt, Human herpesvirus 6B
cgguccguuuuuucugcaaaa

SEQ ID NO: 332525 - RNA, 22 nt, Human herpesvirus 6B
cggucuacuguguauuguguac

SEQ ID NO: 332526 - RNA, 18 nt, Human herpesvirus 6B
cggugauggguuuggcca

SEQ ID NO: 332527 - RNA, 16 nt, Human herpesvirus 6B
cgguugaagucuuucc

SEQ ID NO: 332528 - RNA, 16 nt, Human herpesvirus 6B
cgguuggggucuuucc

SEQ ID NO: 332529 - RNA, 20 nt, Human herpesvirus 6B
cgguuuauaugcaggugcug

SEQ ID NO: 332530 - RNA, 16 nt, Human herpesvirus 6B
cguaaccgaugcugau

SEQ ID NO: 332531 - RNA, 23 nt, Human herpesvirus 6B
cguaauaugcaacgguguuccag

SEQ ID NO: 332532 - RNA, 12 nt, Human herpesvirus 6B
cguaaugugcag

SEQ ID NO: 332533 - RNA, 14 nt, Human herpesvirus 6B
cguacaaaaucaaa

SEQ ID NO: 332534 - RNA, 15 nt, Human herpesvirus 6B
cguacaaaaucaaac

SEQ ID NO: 332535 - RNA, 19 nt, Human herpesvirus 6B
cguaggaagaucaugacaa

SEQ ID NO: 332536 - RNA, 16 nt, Human herpesvirus 6B
cguauaaaaguccuca

SEQ ID NO: 332537 - RNA, 17 nt, Human herpesvirus 6B
cguauaaaaguccucaa

SEQ ID NO: 332538 - RNA, 14 nt, Human herpesvirus 6B
cguauaccauuccc

SEQ ID NO: 332539 - RNA, 20 nt, Human herpesvirus 6B
cguaugcgguuaugugcuau

SEQ ID NO: 332540 - RNA, 14 nt, Human herpesvirus 6B
cguauuuuggcaaa

SEQ ID NO: 332541 - RNA, 19 nt, Human herpesvirus 6B
cgucaaugcguauuugaua

SEQ ID NO: 332542 - RNA, 20 nt, Human herpesvirus 6B
cgucaccaagaaaaaacaca

SEQ ID NO: 332543 - RNA, 16 nt, Human herpesvirus 6B
cgucagcuuugacggu

SEQ ID NO: 332544 - RNA, 16 nt, Human herpesvirus 6B
cgucauaccgauccca

SEQ ID NO: 332545 - RNA, 17 nt, Human herpesvirus 6B
cgucccauucagucuca

SEQ ID NO: 332546 - RNA, 20 nt, Human herpesvirus 6B
cgucuacccuaucgauccag

SEQ ID NO: 332547 - RNA, 22 nt, Human herpesvirus 6B
cgucuauuagauaagagaguuu

SEQ ID NO: 332548 - RNA, 16 nt, Human herpesvirus 6B
cgucucaugcgaucua

SEQ ID NO: 332549 - RNA, 20 nt, Human herpesvirus 6B
cgucuccugggaacucuccc

SEQ ID NO: 332550 - RNA, 15 nt, Human herpesvirus 6B
cgucuguugcuguag

SEQ ID NO: 332551 - RNA, 19 nt, Human herpesvirus 6B
cgucuuuuauauagacacc

SEQ ID NO: 332552 - RNA, 17 nt, Human herpesvirus 6B
cgugaaaauaucgucau

SEQ ID NO: 332553 - RNA, 16 nt, Human herpesvirus 6B
cgugacacacagaaua

SEQ ID NO: 332554 - RNA, 17 nt, Human herpesvirus 6B
cgugacaucgcuaagau

SEQ ID NO: 332555 - RNA, 21 nt, Human herpesvirus 6B
cgugagugcuauuugcauuaa

SEQ ID NO: 332556 - RNA, 21 nt, Human herpesvirus 6B
cgugauacucggucuacugug

SEQ ID NO: 332557 - RNA, 23 nt, Human herpesvirus 6B
cgugccaguucacacagaugcaa

SEQ ID NO: 332558 - RNA, 19 nt, Human herpesvirus 6B
cgugcucgugaaaauaucg

SEQ ID NO: 332559 - RNA, 14 nt, Human herpesvirus 6B
cgugcugucugcag

SEQ ID NO: 332560 - RNA, 18 nt, Human herpesvirus 6B
cguggaauuuguggaaca

SEQ ID NO: 332561 - RNA, 19 nt, Human herpesvirus 6B
cgugguaggaaaugaugau

SEQ ID NO: 332562 - RNA, 18 nt, Human herpesvirus 6B
cguggucguugguguuua

SEQ ID NO: 332563 - RNA, 13 nt, Human herpesvirus 6B
cguguaauguuuc

SEQ ID NO: 332564 - RNA, 14 nt, Human herpesvirus 6B
cguguaauguuucc

SEQ ID NO: 332565 - RNA, 15 nt, Human herpesvirus 6B
cgugucggugauacc

SEQ ID NO: 332566 - RNA, 19 nt, Human herpesvirus 6B
cguguguguguaugcuuuc

SEQ ID NO: 332567 - RNA, 18 nt, Human herpesvirus 6B
cguuaaguaguugcuugu

SEQ ID NO: 332568 - RNA, 18 nt, Human herpesvirus 6B
cguuaaucuaauaaaaua

SEQ ID NO: 332569 - RNA, 13 nt, Human herpesvirus 6B
cguuaguaaaaag

SEQ ID NO: 332570 - RNA, 22 nt, Human herpesvirus 6B
cguucacauuaccucugcaaua

SEQ ID NO: 332571 - RNA, 14 nt, Human herpesvirus 6B
cguucaccauucca

SEQ ID NO: 332572 - RNA, 16 nt, Human herpesvirus 6B
cguucagaauguucca

SEQ ID NO: 332573 - RNA, 18 nt, Human herpesvirus 6B
cguucugcguuguuucag

SEQ ID NO: 332574 - RNA, 20 nt, Human herpesvirus 6B
cguugaaaugucgaaucuca

SEQ ID NO: 332575 - RNA, 19 nt, Human herpesvirus 6B
cguuuccaggcagaguuuu

SEQ ID NO: 332576 - RNA, 22 nt, Human herpesvirus 6B
cguuuuuggauuucuguaaugu

SEQ ID NO: 332577 - RNA, 18 nt, Human herpesvirus 6B
cuaaaaaaaaaaacacac

SEQ ID NO: 332578 - RNA, 16 nt, Human herpesvirus 6B
cuaaaaaucaucucgu

SEQ ID NO: 332579 - RNA, 16 nt, Human herpesvirus 6B
cuaaaagcugcuaacg

SEQ ID NO: 332580 - RNA, 13 nt, Human herpesvirus 6B
cuaaacacugacu

SEQ ID NO: 332581 - RNA, 21 nt, Human herpesvirus 6B
cuaaacggagacugcacagaa

SEQ ID NO: 332582 - RNA, 23 nt, Human herpesvirus 6B
cuaaagauuuggaggugagacau

SEQ ID NO: 332583 - RNA, 14 nt, Human herpesvirus 6B
cuaaaucaugucuu

SEQ ID NO: 332584 - RNA, 21 nt, Human herpesvirus 6B
cuaaaucaugucuuacagcuu

SEQ ID NO: 332585 - RNA, 13 nt, Human herpesvirus 6B
cuaaaugugauac

SEQ ID NO: 332586 - RNA, 20 nt, Human herpesvirus 6B
cuaacgaacaaaucuccaaa

SEQ ID NO: 332587 - RNA, 16 nt, Human herpesvirus 6B
cuaagaaauauugcau

SEQ ID NO: 332588 - RNA, 13 nt, Human herpesvirus 6B
cuaagagauuuac

SEQ ID NO: 332589 - RNA, 15 nt, Human herpesvirus 6B
cuaagauaauggauc

SEQ ID NO: 332590 - RNA, 20 nt, Human herpesvirus 6B
cuaagauaguuuugcauuaa

SEQ ID NO: 332591 - RNA, 15 nt, Human herpesvirus 6B
cuaagauugugcagu

SEQ ID NO: 332592 - RNA, 16 nt, Human herpesvirus 6B
cuaagauugugcaguu

SEQ ID NO: 332593 - RNA, 21 nt, Human herpesvirus 6B
cuaauaaacucugccuguuca

SEQ ID NO: 332594 - RNA, 11 nt, Human herpesvirus 6B
cuaaugugauu

SEQ ID NO: 332595 - RNA, 15 nt, Human herpesvirus 6B
cuaauuccaauuuaa

SEQ ID NO: 332596 - RNA, 15 nt, Human herpesvirus 6B
cuacacgaugaacga

SEQ ID NO: 332597 - RNA, 16 nt, Human herpesvirus 6B
cuacacgccgucuuca

SEQ ID NO: 332598 - RNA, 21 nt, Human herpesvirus 6B
cuacacugcgaauccgucucc

SEQ ID NO: 332599 - RNA, 20 nt, Human herpesvirus 6B
cuacagacuccucaccgaaa

SEQ ID NO: 332600 - RNA, 18 nt, Human herpesvirus 6B
cuacauaaaacaggguug

SEQ ID NO: 332601 - RNA, 15 nt, Human herpesvirus 6B
cuacaugccacagaa

SEQ ID NO: 332602 - RNA, 18 nt, Human herpesvirus 6B
cuacgauugcugucuucc

SEQ ID NO: 332603 - RNA, 15 nt, Human herpesvirus 6B
cuacggaaaaucuca

SEQ ID NO: 332604 - RNA, 22 nt, Human herpesvirus 6B
cuacuauaacuuuucuaucacu

SEQ ID NO: 332605 - RNA, 20 nt, Human herpesvirus 6B
cuacucauccucagucuuca

SEQ ID NO: 332606 - RNA, 13 nt, Human herpesvirus 6B
cuagacacacaga

SEQ ID NO: 332607 - RNA, 14 nt, Human herpesvirus 6B
cuagacgugucuuc

SEQ ID NO: 332608 - RNA, 14 nt, Human herpesvirus 6B
cuagagauuacaag

SEQ ID NO: 332609 - RNA, 22 nt, Human herpesvirus 6B
cuagaguuguuuuuaguaauaa

SEQ ID NO: 332610 - RNA, 23 nt, Human herpesvirus 6B
cuagauccguccauuaaauccua

SEQ ID NO: 332611 - RNA, 12 nt, Human herpesvirus 6B
cuagaucugcca

SEQ ID NO: 332612 - RNA, 22 nt, Human herpesvirus 6B
cuagcgaucauaaaacugccaa

SEQ ID NO: 332613 - RNA, 20 nt, Human herpesvirus 6B
cuagcgauuaguuugugcag

SEQ ID NO: 332614 - RNA, 19 nt, Human herpesvirus 6B
cuagcuuuucauaugaaaa

SEQ ID NO: 332615 - RNA, 23 nt, Human herpesvirus 6B
cuagguacggcgucacacagcau

SEQ ID NO: 332616 - RNA, 23 nt, Human herpesvirus 6B
cuagugugccuauuaaugcuuau

SEQ ID NO: 332617 - RNA, 20 nt, Human herpesvirus 6B
cuaguuacggggaagaucua

SEQ ID NO: 332618 - RNA, 23 nt, Human herpesvirus 6B
cuaguuacggggaagaucuaugg

SEQ ID NO: 332619 - RNA, 18 nt, Human herpesvirus 6B
cuauaaaaaaagcaaaua

SEQ ID NO: 332620 - RNA, 18 nt, Human herpesvirus 6B
cuauaaaaacacacauca

SEQ ID NO: 332621 - RNA, 22 nt, Human herpesvirus 6B
cuauaacuuuucuaucacuuau

SEQ ID NO: 332622 - RNA, 18 nt, Human herpesvirus 6B
cuauaaucacaaauaucc

SEQ ID NO: 332623 - RNA, 17 nt, Human herpesvirus 6B
cuauagacgccauaaug

SEQ ID NO: 332624 - RNA, 21 nt, Human herpesvirus 6B
cuauagauuagaaauuacaua

SEQ ID NO: 332625 - RNA, 15 nt, Human herpesvirus 6B
cuauauagcuauccu

SEQ ID NO: 332626 - RNA, 18 nt, Human herpesvirus 6B
cuauaugcgaauguuaaa

SEQ ID NO: 332627 - RNA, 13 nt, Human herpesvirus 6B
cuaucacuuagac

SEQ ID NO: 332628 - RNA, 14 nt, Human herpesvirus 6B
cuaucgcaaugauu

SEQ ID NO: 332629 - RNA, 17 nt, Human herpesvirus 6B
cuaucgcgaauaucgca

SEQ ID NO: 332630 - RNA, 22 nt, Human herpesvirus 6B
cuaucucucgcugaccguucac

SEQ ID NO: 332631 - RNA, 22 nt, Human herpesvirus 6B
cuaugagaauuaugacugacaa

SEQ ID NO: 332632 - RNA, 16 nt, Human herpesvirus 6B
cuauguacugaucucu

SEQ ID NO: 332633 - RNA, 18 nt, Human herpesvirus 6B
cuauguaguacacagaau

SEQ ID NO: 332634 - RNA, 20 nt, Human herpesvirus 6B
cuauguaugaacaggugcuu

SEQ ID NO: 332635 - RNA, 14 nt, Human herpesvirus 6B
cuauguauuggaau

SEQ ID NO: 332636 - RNA, 15 nt, Human herpesvirus 6B
cuaugucaagaguuu

SEQ ID NO: 332637 - RNA, 17 nt, Human herpesvirus 6B
cuaugucaagaguuuuc

SEQ ID NO: 332638 - RNA, 13 nt, Human herpesvirus 6B
cuaugugcauucc

SEQ ID NO: 332639 - RNA, 15 nt, Human herpesvirus 6B
cuauuaacacauaca

SEQ ID NO: 332640 - RNA, 16 nt, Human herpesvirus 6B
cuauucuaaauaccaa

SEQ ID NO: 332641 - RNA, 20 nt, Human herpesvirus 6B
cuauuggagauaauaaaaca

SEQ ID NO: 332642 - RNA, 18 nt, Human herpesvirus 6B
cuauuuaaaaacaucuua

SEQ ID NO: 332643 - RNA, 15 nt, Human herpesvirus 6B
cuauuuaacauccaa

SEQ ID NO: 332644 - RNA, 20 nt, Human herpesvirus 6B
cuauuucucugucgcuguga

SEQ ID NO: 332645 - RNA, 20 nt, Human herpesvirus 6B
cuauuucuuuuuaaaaucaa

SEQ ID NO: 332646 - RNA, 13 nt, Human herpesvirus 6B
cuauuugcauuaa

SEQ ID NO: 332647 - RNA, 23 nt, Human herpesvirus 6B
cuauuuuuuauuaguauccuucu

SEQ ID NO: 332648 - RNA, 19 nt, Human herpesvirus 6B
cuauuuuuuuaauguugag

SEQ ID NO: 332649 - RNA, 16 nt, Human herpesvirus 6B
cucaaaaaacauauaa

SEQ ID NO: 332650 - RNA, 13 nt, Human herpesvirus 6B
cucaacacucuca

SEQ ID NO: 332651 - RNA, 18 nt, Human herpesvirus 6B
cucaacacucucaaugua

SEQ ID NO: 332652 - RNA, 22 nt, Human herpesvirus 6B
cucaacuaaaucaugucuuaca

SEQ ID NO: 332653 - RNA, 14 nt, Human herpesvirus 6B
cucaacugcuaguu

SEQ ID NO: 332654 - RNA, 14 nt, Human herpesvirus 6B
cucaagagugcuga

SEQ ID NO: 332655 - RNA, 15 nt, Human herpesvirus 6B
cucaagcacaaaacc

SEQ ID NO: 332656 - RNA, 19 nt, Human herpesvirus 6B
cucaaugcggguacuauag

SEQ ID NO: 332657 - RNA, 13 nt, Human herpesvirus 6B
cucaccgcauaua

SEQ ID NO: 332658 - RNA, 22 nt, Human herpesvirus 6B
cucagauauauacuuacuugag

SEQ ID NO: 332659 - RNA, 13 nt, Human herpesvirus 6B
cucagaugcaaug

SEQ ID NO: 332660 - RNA, 18 nt, Human herpesvirus 6B
cucagcaaacaugugauu

SEQ ID NO: 332661 - RNA, 15 nt, Human herpesvirus 6B
cucagcaaucaccau

SEQ ID NO: 332662 - RNA, 18 nt, Human herpesvirus 6B
cucagcaaucaccaucaa

SEQ ID NO: 332663 - RNA, 14 nt, Human herpesvirus 6B
cucaggugagauuc

SEQ ID NO: 332664 - RNA, 12 nt, Human herpesvirus 6B
cucagucuucaa

SEQ ID NO: 332665 - RNA, 14 nt, Human herpesvirus 6B
cucagugucacuua

SEQ ID NO: 332666 - RNA, 15 nt, Human herpesvirus 6B
cucagugucacuuau

SEQ ID NO: 332667 - RNA, 20 nt, Human herpesvirus 6B
cucagugucacuuauauaaa

SEQ ID NO: 332668 - RNA, 20 nt, Human herpesvirus 6B
cucaguguuugccaaccaaa

SEQ ID NO: 332669 - RNA, 14 nt, Human herpesvirus 6B
cucauaaaguuaaa

SEQ ID NO: 332670 - RNA, 13 nt, Human herpesvirus 6B
cucauacagaucc

SEQ ID NO: 332671 - RNA, 12 nt, Human herpesvirus 6B
cucauacaucca

SEQ ID NO: 332672 - RNA, 22 nt, Human herpesvirus 6B
cucaucugcgucaaugcguauu

SEQ ID NO: 332673 - RNA, 15 nt, Human herpesvirus 6B
cucaugcgaucuaau

SEQ ID NO: 332674 - RNA, 21 nt, Human herpesvirus 6B
cucaugucaguauuucgccuc

SEQ ID NO: 332675 - RNA, 14 nt, Human herpesvirus 6B
cucauuugcaauug

SEQ ID NO: 332676 - RNA, 16 nt, Human herpesvirus 6B
cucauuuuaacauuuu

SEQ ID NO: 332677 - RNA, 19 nt, Human herpesvirus 6B
cuccaacgcacaugcuaac

SEQ ID NO: 332678 - RNA, 18 nt, Human herpesvirus 6B
cuccaacggagaaaacua

SEQ ID NO: 332679 - RNA, 16 nt, Human herpesvirus 6B
cuccauggguucuucg

SEQ ID NO: 332680 - RNA, 16 nt, Human herpesvirus 6B
cucccauguaugcauu

SEQ ID NO: 332681 - RNA, 15 nt, Human herpesvirus 6B
cuccgaacaugauca

SEQ ID NO: 332682 - RNA, 14 nt, Human herpesvirus 6B
cuccgcagucaucu

SEQ ID NO: 332683 - RNA, 17 nt, Human herpesvirus 6B
cuccgccggguaugagc

SEQ ID NO: 332684 - RNA, 22 nt, Human herpesvirus 6B
cuccguuacccgggagcuucac

SEQ ID NO: 332685 - RNA, 18 nt, Human herpesvirus 6B
cuccuaaauaccauuuua

SEQ ID NO: 332686 - RNA, 16 nt, Human herpesvirus 6B
cuccucaacacucuca

SEQ ID NO: 332687 - RNA, 20 nt, Human herpesvirus 6B
cuccucaacuaaaucauguc

SEQ ID NO: 332688 - RNA, 18 nt, Human herpesvirus 6B
cuccuguuuaccguuuca

SEQ ID NO: 332689 - RNA, 19 nt, Human herpesvirus 6B
cuccuucuaauaucguuag

SEQ ID NO: 332690 - RNA, 19 nt, Human herpesvirus 6B
cuccuuguaaaaauucacu

SEQ ID NO: 332691 - RNA, 23 nt, Human herpesvirus 6B
cucgaaaauacaaugacuaucaa

SEQ ID NO: 332692 - RNA, 14 nt, Human herpesvirus 6B
cucgaaugccccac

SEQ ID NO: 332693 - RNA, 12 nt, Human herpesvirus 6B
cucgacguccac

SEQ ID NO: 332694 - RNA, 16 nt, Human herpesvirus 6B
cucgcugaccguucac

SEQ ID NO: 332695 - RNA, 21 nt, Human herpesvirus 6B
cucggaagauacacugcaaga

SEQ ID NO: 332696 - RNA, 21 nt, Human herpesvirus 6B
cucggauuccgcacagaaaaa

SEQ ID NO: 332697 - RNA, 15 nt, Human herpesvirus 6B
cucggucuacugugu

SEQ ID NO: 332698 - RNA, 17 nt, Human herpesvirus 6B
cucuaaaacaagaccga

SEQ ID NO: 332699 - RNA, 17 nt, Human herpesvirus 6B
cucuaaaaccugcuaac

SEQ ID NO: 332700 - RNA, 20 nt, Human herpesvirus 6B
cucuacguuuacaucaacua

SEQ ID NO: 332701 - RNA, 17 nt, Human herpesvirus 6B
cucucaauuucacuuaa

SEQ ID NO: 332702 - RNA, 16 nt, Human herpesvirus 6B
cucucacggccauuua

SEQ ID NO: 332703 - RNA, 23 nt, Human herpesvirus 6B
cucuccaaguuagaaauuacaca

SEQ ID NO: 332704 - RNA, 14 nt, Human herpesvirus 6B
cucuccuggguauu

SEQ ID NO: 332705 - RNA, 20 nt, Human herpesvirus 6B
cucugaagcaaaagucuuau

SEQ ID NO: 332706 - RNA, 13 nt, Human herpesvirus 6B
cucugagauuuga

SEQ ID NO: 332707 - RNA, 24 nt, Human herpesvirus 6B
cucugcaagcucaugaacaucguc

SEQ ID NO: 332708 - RNA, 19 nt, Human herpesvirus 6B
cucugguaaaugucaaaga

SEQ ID NO: 332709 - RNA, 19 nt, Human herpesvirus 6B
cucuggucauuuugaaaga

SEQ ID NO: 332710 - RNA, 20 nt, Human herpesvirus 6B
cucuggucauuuugaaagaa

SEQ ID NO: 332711 - RNA, 17 nt, Human herpesvirus 6B
cucuuagagauaucugc

SEQ ID NO: 332712 - RNA, 21 nt, Human herpesvirus 6B
cucuuagcggauggaauccaa

SEQ ID NO: 332713 - RNA, 16 nt, Human herpesvirus 6B
cucuucgauccaauaa

SEQ ID NO: 332714 - RNA, 21 nt, Human herpesvirus 6B
cucuucggcauaaacagagac

SEQ ID NO: 332715 - RNA, 20 nt, Human herpesvirus 6B
cucuuuauagagcaauucau

SEQ ID NO: 332716 - RNA, 13 nt, Human herpesvirus 6B
cugaacacaaaaa

SEQ ID NO: 332717 - RNA, 19 nt, Human herpesvirus 6B
cugaacacaaaaacaggga

SEQ ID NO: 332718 - RNA, 19 nt, Human herpesvirus 6B
cugaagaauaaaaguccau

SEQ ID NO: 332719 - RNA, 11 nt, Human herpesvirus 6B
cugaagacagc

SEQ ID NO: 332720 - RNA, 23 nt, Human herpesvirus 6B
cugaaggaaucgguaaacuucag

SEQ ID NO: 332721 - RNA, 16 nt, Human herpesvirus 6B
cugaauuuaaugcaaa

SEQ ID NO: 332722 - RNA, 15 nt, Human herpesvirus 6B
cugacaagcugucca

SEQ ID NO: 332723 - RNA, 17 nt, Human herpesvirus 6B
cugacaccacauaacaa

SEQ ID NO: 332724 - RNA, 15 nt, Human herpesvirus 6B
cugacaucugcaaaa

SEQ ID NO: 332725 - RNA, 16 nt, Human herpesvirus 6B
cugacaucugcaaaaa

SEQ ID NO: 332726 - RNA, 14 nt, Human herpesvirus 6B
cugaccaccaaaac

SEQ ID NO: 332727 - RNA, 15 nt, Human herpesvirus 6B
cugaccaccaaaacg

SEQ ID NO: 332728 - RNA, 17 nt, Human herpesvirus 6B
cugacccgauguggaac

SEQ ID NO: 332729 - RNA, 18 nt, Human herpesvirus 6B
cugacccgauguggaacg

SEQ ID NO: 332730 - RNA, 13 nt, Human herpesvirus 6B
cugagacagucaa

SEQ ID NO: 332731 - RNA, 14 nt, Human herpesvirus 6B
cugagacagucaau

SEQ ID NO: 332732 - RNA, 16 nt, Human herpesvirus 6B
cugagauucacucuac

SEQ ID NO: 332733 - RNA, 15 nt, Human herpesvirus 6B
cugagcacuugucaa

SEQ ID NO: 332734 - RNA, 16 nt, Human herpesvirus 6B
cugagcacuugucaau

SEQ ID NO: 332735 - RNA, 21 nt, Human herpesvirus 6B
cugagugaucugauucgacaa

SEQ ID NO: 332736 - RNA, 19 nt, Human herpesvirus 6B
cugauauggcaaauuucaa

SEQ ID NO: 332737 - RNA, 20 nt, Human herpesvirus 6B
cugauauggcaaauuucaaa

SEQ ID NO: 332738 - RNA, 14 nt, Human herpesvirus 6B
cugaucucacguca

SEQ ID NO: 332739 - RNA, 17 nt, Human herpesvirus 6B
cugauuauuaucacaaa

SEQ ID NO: 332740 - RNA, 21 nt, Human herpesvirus 6B
cugauuuguucucgagcuaga

SEQ ID NO: 332741 - RNA, 12 nt, Human herpesvirus 6B
cugcaaaacaaa

SEQ ID NO: 332742 - RNA, 22 nt, Human herpesvirus 6B
cugcaagaacugcgacucaauc

SEQ ID NO: 332743 - RNA, 13 nt, Human herpesvirus 6B
cugcacaaacgaa

SEQ ID NO: 332744 - RNA, 12 nt, Human herpesvirus 6B
cugcacagaauc

SEQ ID NO: 332745 - RNA, 22 nt, Human herpesvirus 6B
cugcagggaugugguaugagcu

SEQ ID NO: 332746 - RNA, 23 nt, Human herpesvirus 6B
cugcagggaugugguaugagcug

SEQ ID NO: 332747 - RNA, 15 nt, Human herpesvirus 6B
cugcaggggaccgau

SEQ ID NO: 332748 - RNA, 15 nt, Human herpesvirus 6B
cugcagucucaggag

SEQ ID NO: 332749 - RNA, 13 nt, Human herpesvirus 6B
cugcccgauugca

SEQ ID NO: 332750 - RNA, 16 nt, Human herpesvirus 6B
cugccgaucaccaccg

SEQ ID NO: 332751 - RNA, 20 nt, Human herpesvirus 6B
cugccuuuaacccgaugaga

SEQ ID NO: 332752 - RNA, 14 nt, Human herpesvirus 6B
cugcucuaaaucag

SEQ ID NO: 332753 - RNA, 23 nt, Human herpesvirus 6B
cugcugauaaucuuguagcucag

SEQ ID NO: 332754 - RNA, 16 nt, Human herpesvirus 6B
cugcuggcugagauuc

SEQ ID NO: 332755 - RNA, 19 nt, Human herpesvirus 6B
cuggaaaaauuuaaucaag

SEQ ID NO: 332756 - RNA, 14 nt, Human herpesvirus 6B
cuggaaaacuauua

SEQ ID NO: 332757 - RNA, 18 nt, Human herpesvirus 6B
cuggaaaacuauuaauaa

SEQ ID NO: 332758 - RNA, 13 nt, Human herpesvirus 6B
cuggaauacaaga

SEQ ID NO: 332759 - RNA, 17 nt, Human herpesvirus 6B
cuggaaucacaaccgaa

SEQ ID NO: 332760 - RNA, 23 nt, Human herpesvirus 6B
cuggcccuuuucgcgauagucau

SEQ ID NO: 332761 - RNA, 23 nt, Human herpesvirus 6B
cugggaaaagggugacaccuuga

SEQ ID NO: 332762 - RNA, 14 nt, Human herpesvirus 6B
cugguaaaugucaa

SEQ ID NO: 332763 - RNA, 18 nt, Human herpesvirus 6B
cugguaaaugucaaagaa

SEQ ID NO: 332764 - RNA, 21 nt, Human herpesvirus 6B
cugguaaaugucaaagaaaca

SEQ ID NO: 332765 - RNA, 20 nt, Human herpesvirus 6B
cuggucauuuugaaagaaca

SEQ ID NO: 332766 - RNA, 17 nt, Human herpesvirus 6B
cuggucugcuugcaaau

SEQ ID NO: 332767 - RNA, 22 nt, Human herpesvirus 6B
cuguaaaguuuggaugcaaguc

SEQ ID NO: 332768 - RNA, 20 nt, Human herpesvirus 6B
cuguaagauuaaaugugaac

SEQ ID NO: 332769 - RNA, 21 nt, Human herpesvirus 6B
cuguacucuuucaagcagggg

SEQ ID NO: 332770 - RNA, 15 nt, Human herpesvirus 6B
cuguaggcaacuuaa

SEQ ID NO: 332771 - RNA, 16 nt, Human herpesvirus 6B
cugucaaggaaaacuc

SEQ ID NO: 332772 - RNA, 20 nt, Human herpesvirus 6B
cugucgaaugcccacaccau

SEQ ID NO: 332773 - RNA, 18 nt, Human herpesvirus 6B
cugugaagaggugcaaau

SEQ ID NO: 332774 - RNA, 22 nt, Human herpesvirus 6B
cugugagagaaugcaacauucu

SEQ ID NO: 332775 - RNA, 13 nt, Human herpesvirus 6B
cugugauaugcaa

SEQ ID NO: 332776 - RNA, 15 nt, Human herpesvirus 6B
cugugauaugcaaac

SEQ ID NO: 332777 - RNA, 15 nt, Human herpesvirus 6B
cuguguauugugaua

SEQ ID NO: 332778 - RNA, 16 nt, Human herpesvirus 6B
cuguguauugugauag

SEQ ID NO: 332779 - RNA, 14 nt, Human herpesvirus 6B
cuguguguguugug

SEQ ID NO: 332780 - RNA, 21 nt, Human herpesvirus 6B
cuguuuuaauuaaaaaagagg

SEQ ID NO: 332781 - RNA, 17 nt, Human herpesvirus 6B
cuguuuuuuuucuuaag

SEQ ID NO: 332782 - RNA, 15 nt, Human herpesvirus 6B
cuuaaaaaaacacag

SEQ ID NO: 332783 - RNA, 18 nt, Human herpesvirus 6B
cuuaaaaaaacacaguau

SEQ ID NO: 332784 - RNA, 19 nt, Human herpesvirus 6B
cuuaaaaaaacacaguauu

SEQ ID NO: 332785 - RNA, 15 nt, Human herpesvirus 6B
cuuaaaagaaucaaa

SEQ ID NO: 332786 - RNA, 16 nt, Human herpesvirus 6B
cuuaacagacuacuuu

SEQ ID NO: 332787 - RNA, 13 nt, Human herpesvirus 6B
cuuaacauauucg

SEQ ID NO: 332788 - RNA, 22 nt, Human herpesvirus 6B
cuuaacuuacuuaauaacuaca

SEQ ID NO: 332789 - RNA, 21 nt, Human herpesvirus 6B
cuuaauaaaugcuacccacau

SEQ ID NO: 332790 - RNA, 22 nt, Human herpesvirus 6B
cuuacaaaccuucccuaucaca

SEQ ID NO: 332791 - RNA, 18 nt, Human herpesvirus 6B
cuuacaacugaaacucca

SEQ ID NO: 332792 - RNA, 17 nt, Human herpesvirus 6B
cuuacaauguucuugac

SEQ ID NO: 332793 - RNA, 18 nt, Human herpesvirus 6B
cuuacacaugccgcaaga

SEQ ID NO: 332794 - RNA, 15 nt, Human herpesvirus 6B
cuuagaagcauuugc

SEQ ID NO: 332795 - RNA, 20 nt, Human herpesvirus 6B
cuuagauaugucguuucaug

SEQ ID NO: 332796 - RNA, 16 nt, Human herpesvirus 6B
cuuagcucuaaugcua

SEQ ID NO: 332797 - RNA, 16 nt, Human herpesvirus 6B
cuuauaacaccaguac

SEQ ID NO: 332798 - RNA, 18 nt, Human herpesvirus 6B
cuuauaacaccaguacuu

SEQ ID NO: 332799 - RNA, 21 nt, Human herpesvirus 6B
cuuauaacaccaguacuucaa

SEQ ID NO: 332800 - RNA, 18 nt, Human herpesvirus 6B
cuuauaagucaucauaca

SEQ ID NO: 332801 - RNA, 18 nt, Human herpesvirus 6B
cuuauaaugugaacuaaa

SEQ ID NO: 332802 - RNA, 20 nt, Human herpesvirus 6B
cuuauaaugugaacuaaaua

SEQ ID NO: 332803 - RNA, 20 nt, Human herpesvirus 6B
cuuauagacuaaacuuaacu

SEQ ID NO: 332804 - RNA, 19 nt, Human herpesvirus 6B
cuuaucaacuauacuuaac

SEQ ID NO: 332805 - RNA, 19 nt, Human herpesvirus 6B
cuuaucgaaagacacggcg

SEQ ID NO: 332806 - RNA, 16 nt, Human herpesvirus 6B
cuuauguaaacuaaau

SEQ ID NO: 332807 - RNA, 17 nt, Human herpesvirus 6B
cuuauguaaacuaaaua

SEQ ID NO: 332808 - RNA, 18 nt, Human herpesvirus 6B
cuucaaaaucugcuaacg

SEQ ID NO: 332809 - RNA, 16 nt, Human herpesvirus 6B
cuucaaagugaauucc

SEQ ID NO: 332810 - RNA, 17 nt, Human herpesvirus 6B
cuucaaauuuacucucc

SEQ ID NO: 332811 - RNA, 20 nt, Human herpesvirus 6B
cuucaagcaaagacaucgau

SEQ ID NO: 332812 - RNA, 14 nt, Human herpesvirus 6B
cuucaauaaaaacu

SEQ ID NO: 332813 - RNA, 13 nt, Human herpesvirus 6B
cuucaccgucucu

SEQ ID NO: 332814 - RNA, 15 nt, Human herpesvirus 6B
cuucaccgucucuga

SEQ ID NO: 332815 - RNA, 21 nt, Human herpesvirus 6B
cuucagcucagacaaauggaa

SEQ ID NO: 332816 - RNA, 13 nt, Human herpesvirus 6B
cuucaucaucacc

SEQ ID NO: 332817 - RNA, 21 nt, Human herpesvirus 6B
cuucaugagccggcucaagau

SEQ ID NO: 332818 - RNA, 15 nt, Human herpesvirus 6B
cuucaugauauucca

SEQ ID NO: 332819 - RNA, 13 nt, Human herpesvirus 6B
cuucccuaucaca

SEQ ID NO: 332820 - RNA, 15 nt, Human herpesvirus 6B
cuucgguacagugaa

SEQ ID NO: 332821 - RNA, 19 nt, Human herpesvirus 6B
cuucguacguacuacagcu

SEQ ID NO: 332822 - RNA, 23 nt, Human herpesvirus 6B
cuucguugccggcuaaacuuuac

SEQ ID NO: 332823 - RNA, 16 nt, Human herpesvirus 6B
cuucuauguauuauca

SEQ ID NO: 332824 - RNA, 16 nt, Human herpesvirus 6B
cuucuccgcauguaua

SEQ ID NO: 332825 - RNA, 20 nt, Human herpesvirus 6B
cuucucuacaccaggaguuu

SEQ ID NO: 332826 - RNA, 14 nt, Human herpesvirus 6B
cuucuggauacuga

SEQ ID NO: 332827 - RNA, 11 nt, Human herpesvirus 6B
cuucuuugucc

SEQ ID NO: 332828 - RNA, 13 nt, Human herpesvirus 6B
cuugacauagcaa

SEQ ID NO: 332829 - RNA, 16 nt, Human herpesvirus 6B
cuugauguugaucuga

SEQ ID NO: 332830 - RNA, 15 nt, Human herpesvirus 6B
cuugcaaacagcuuu

SEQ ID NO: 332831 - RNA, 21 nt, Human herpesvirus 6B
cuugcacucgaaaacagucua

SEQ ID NO: 332832 - RNA, 13 nt, Human herpesvirus 6B
cuugcagcugucu

SEQ ID NO: 332833 - RNA, 14 nt, Human herpesvirus 6B
cuugcgauguugua

SEQ ID NO: 332834 - RNA, 14 nt, Human herpesvirus 6B
cuuggaaacguguu

SEQ ID NO: 332835 - RNA, 18 nt, Human herpesvirus 6B
cuugguggcggauggcua

SEQ ID NO: 332836 - RNA, 17 nt, Human herpesvirus 6B
cuuguaauccaucaggg

SEQ ID NO: 332837 - RNA, 15 nt, Human herpesvirus 6B
cuugucuuuuuuacu

SEQ ID NO: 332838 - RNA, 18 nt, Human herpesvirus 6B
cuuguguucuaacacaua

SEQ ID NO: 332839 - RNA, 18 nt, Human herpesvirus 6B
cuuuaaacgguaaauuca

SEQ ID NO: 332840 - RNA, 19 nt, Human herpesvirus 6B
cuuuaaacgguaaauucaa

SEQ ID NO: 332841 - RNA, 20 nt, Human herpesvirus 6B
cuuuaaacgguaaauucaaa

SEQ ID NO: 332842 - RNA, 19 nt, Human herpesvirus 6B
cuuuaaagauuagauuagg

SEQ ID NO: 332843 - RNA, 22 nt, Human herpesvirus 6B
cuuuaaagcagcuagagaaauu

SEQ ID NO: 332844 - RNA, 12 nt, Human herpesvirus 6B
cuuuaguauacg

SEQ ID NO: 332845 - RNA, 17 nt, Human herpesvirus 6B
cuuuaucuuuugcaaag

SEQ ID NO: 332846 - RNA, 18 nt, Human herpesvirus 6B
cuuuauuguuaacaugua

SEQ ID NO: 332847 - RNA, 15 nt, Human herpesvirus 6B
cuuucaaaaugacca

SEQ ID NO: 332848 - RNA, 19 nt, Human herpesvirus 6B
cuuucaaaaugaccagaga

SEQ ID NO: 332849 - RNA, 21 nt, Human herpesvirus 6B
cuuucaaaaugaccagagauu

SEQ ID NO: 332850 - RNA, 22 nt, Human herpesvirus 6B
cuuucaagcaggggcuuuucaa

SEQ ID NO: 332851 - RNA, 15 nt, Human herpesvirus 6B
cuuucauaagcucua

SEQ ID NO: 332852 - RNA, 15 nt, Human herpesvirus 6B
cuuucccgugcucag

SEQ ID NO: 332853 - RNA, 21 nt, Human herpesvirus 6B
cuuucucuuuuuaauuccaag

SEQ ID NO: 332854 - RNA, 19 nt, Human herpesvirus 6B
cuuucuugaagaugugaua

SEQ ID NO: 332855 - RNA, 12 nt, Human herpesvirus 6B
cuuugacauuua

SEQ ID NO: 332856 - RNA, 20 nt, Human herpesvirus 6B
cuuugacauuuaccagagau

SEQ ID NO: 332857 - RNA, 12 nt, Human herpesvirus 6B
cuuugacgguuu

SEQ ID NO: 332858 - RNA, 17 nt, Human herpesvirus 6B
cuuuggauuuugaugua

SEQ ID NO: 332859 - RNA, 19 nt, Human herpesvirus 6B
cuuugugcccauacuugua

SEQ ID NO: 332860 - RNA, 23 nt, Human herpesvirus 6B
cuuuuacuuacaucgauccaaaa

SEQ ID NO: 332861 - RNA, 23 nt, Human herpesvirus 6B
cuuuuagaacaggaagcgccaua

SEQ ID NO: 332862 - RNA, 13 nt, Human herpesvirus 6B
cuuuuccagugag

SEQ ID NO: 332863 - RNA, 19 nt, Human herpesvirus 6B
cuuuuuaaucaugauugca

SEQ ID NO: 332864 - RNA, 12 nt, Human herpesvirus 6B
cuuuuuaauucc

SEQ ID NO: 332865 - RNA, 17 nt, Human herpesvirus 6B
cuuuuuguucaguguuc

SEQ ID NO: 332866 - RNA, 21 nt, Human herpesvirus 6B
gaaaaagacaagggugugaaa

SEQ ID NO: 332867 - RNA, 17 nt, Human herpesvirus 6B
gaaaaagguucaaacaa

SEQ ID NO: 332868 - RNA, 18 nt, Human herpesvirus 6B
gaaaaauuuuacaaugag

SEQ ID NO: 332869 - RNA, 22 nt, Human herpesvirus 6B
gaaaacauucagaaaauuggug

SEQ ID NO: 332870 - RNA, 19 nt, Human herpesvirus 6B
gaaaacguuucauccaaau

SEQ ID NO: 332871 - RNA, 15 nt, Human herpesvirus 6B
gaaaacuaugugcau

SEQ ID NO: 332872 - RNA, 22 nt, Human herpesvirus 6B
gaaaacuauuaauaaaccgcuu

SEQ ID NO: 332873 - RNA, 14 nt, Human herpesvirus 6B
gaaaacucuugaca

SEQ ID NO: 332874 - RNA, 20 nt, Human herpesvirus 6B
gaaaacucuugacauagcaa

SEQ ID NO: 332875 - RNA, 15 nt, Human herpesvirus 6B
gaaaacuuuuugccg

SEQ ID NO: 332876 - RNA, 16 nt, Human herpesvirus 6B
gaaaacuuuuugccga

SEQ ID NO: 332877 - RNA, 17 nt, Human herpesvirus 6B
gaaaagaaacaaugcuu

SEQ ID NO: 332878 - RNA, 15 nt, Human herpesvirus 6B
gaaaagcaaacaugc

SEQ ID NO: 332879 - RNA, 16 nt, Human herpesvirus 6B
gaaaagcaaacaugca

SEQ ID NO: 332880 - RNA, 19 nt, Human herpesvirus 6B
gaaaagccccugcuugaaa

SEQ ID NO: 332881 - RNA, 21 nt, Human herpesvirus 6B
gaaaagcuggaaaacuauuaa

SEQ ID NO: 332882 - RNA, 21 nt, Human herpesvirus 6B
gaaaauaaaaaaccaaaacaa

SEQ ID NO: 332883 - RNA, 11 nt, Human herpesvirus 6B
gaaaaucucaa

SEQ ID NO: 332884 - RNA, 15 nt, Human herpesvirus 6B
gaaaauuauagcuuc

SEQ ID NO: 332885 - RNA, 16 nt, Human herpesvirus 6B
gaaaauuauagcuuca

SEQ ID NO: 332886 - RNA, 15 nt, Human herpesvirus 6B
gaaaauugacaauga

SEQ ID NO: 332887 - RNA, 17 nt, Human herpesvirus 6B
gaaaauugacaaugagg

SEQ ID NO: 332888 - RNA, 19 nt, Human herpesvirus 6B
gaaaauuggugugcauuau

SEQ ID NO: 332889 - RNA, 16 nt, Human herpesvirus 6B
gaaaauuguaacuuca

SEQ ID NO: 332890 - RNA, 17 nt, Human herpesvirus 6B
gaaaauuguaacuucau

SEQ ID NO: 332891 - RNA, 15 nt, Human herpesvirus 6B
gaaacaaagucuuug

SEQ ID NO: 332892 - RNA, 11 nt, Human herpesvirus 6B
gaaacaguaaa

SEQ ID NO: 332893 - RNA, 16 nt, Human herpesvirus 6B
gaaacaguaaaucucu

SEQ ID NO: 332894 - RNA, 16 nt, Human herpesvirus 6B
gaaacauuauaccuau

SEQ ID NO: 332895 - RNA, 21 nt, Human herpesvirus 6B
gaaaccauagcuguccaugaa

SEQ ID NO: 332896 - RNA, 16 nt, Human herpesvirus 6B
gaaacucuuauggcaa

SEQ ID NO: 332897 - RNA, 18 nt, Human herpesvirus 6B
gaaagacguuugcuuuuu

SEQ ID NO: 332898 - RNA, 18 nt, Human herpesvirus 6B
gaaagcaucucaaaaaac

SEQ ID NO: 332899 - RNA, 18 nt, Human herpesvirus 6B
gaaaguauuguacuucau

SEQ ID NO: 332900 - RNA, 22 nt, Human herpesvirus 6B
gaaauaaaaucggcgaauguac

SEQ ID NO: 332901 - RNA, 21 nt, Human herpesvirus 6B
gaaauaaucgauuacaaaaca

SEQ ID NO: 332902 - RNA, 18 nt, Human herpesvirus 6B
gaaauauaaaaccaaaaa

SEQ ID NO: 332903 - RNA, 18 nt, Human herpesvirus 6B
gaaauauugcaugcauug

SEQ ID NO: 332904 - RNA, 21 nt, Human herpesvirus 6B
gaaaucacaccaaugaucaca

SEQ ID NO: 332905 - RNA, 21 nt, Human herpesvirus 6B
gaaaugaacgacuuauuacaa

SEQ ID NO: 332906 - RNA, 15 nt, Human herpesvirus 6B
gaaaugaugauuaau

SEQ ID NO: 332907 - RNA, 22 nt, Human herpesvirus 6B
gaaaugaugauuaauacaucau

SEQ ID NO: 332908 - RNA, 19 nt, Human herpesvirus 6B
gaaauuauggcgacgaccg

SEQ ID NO: 332909 - RNA, 15 nt, Human herpesvirus 6B
gaaauuuccuuugug

SEQ ID NO: 332910 - RNA, 17 nt, Human herpesvirus 6B
gaacaccagcaugucau

SEQ ID NO: 332911 - RNA, 14 nt, Human herpesvirus 6B
gaacagaaucuucu

SEQ ID NO: 332912 - RNA, 22 nt, Human herpesvirus 6B
gaacagagagaggagcauucac

SEQ ID NO: 332913 - RNA, 16 nt, Human herpesvirus 6B
gaacaggaagcgccau

SEQ ID NO: 332914 - RNA, 14 nt, Human herpesvirus 6B
gaacaggugcuucu

SEQ ID NO: 332915 - RNA, 12 nt, Human herpesvirus 6B
gaacaguuuacc

SEQ ID NO: 332916 - RNA, 15 nt, Human herpesvirus 6B
gaaccaaucugugag

SEQ ID NO: 332917 - RNA, 16 nt, Human herpesvirus 6B
gaaccaaucugugagc

SEQ ID NO: 332918 - RNA, 12 nt, Human herpesvirus 6B
gaacccuagaca

SEQ ID NO: 332919 - RNA, 16 nt, Human herpesvirus 6B
gaacggaaacaugaac

SEQ ID NO: 332920 - RNA, 17 nt, Human herpesvirus 6B
gaacucgcugauuuguu

SEQ ID NO: 332921 - RNA, 16 nt, Human herpesvirus 6B
gaacucucacggccau

SEQ ID NO: 332922 - RNA, 18 nt, Human herpesvirus 6B
gaacucuucgauccaaua

SEQ ID NO: 332923 - RNA, 14 nt, Human herpesvirus 6B
gaacugaugagaaa

SEQ ID NO: 332924 - RNA, 14 nt, Human herpesvirus 6B
gaagaauaagccua

SEQ ID NO: 332925 - RNA, 15 nt, Human herpesvirus 6B
gaagaauaagccuaa

SEQ ID NO: 332926 - RNA, 19 nt, Human herpesvirus 6B
gaagacggaaccaugauca

SEQ ID NO: 332927 - RNA, 23 nt, Human herpesvirus 6B
gaagaguuuuuuaaaagugcaac

SEQ ID NO: 332928 - RNA, 14 nt, Human herpesvirus 6B
gaagauacacugca

SEQ ID NO: 332929 - RNA, 15 nt, Human herpesvirus 6B
gaagauacacugcaa

SEQ ID NO: 332930 - RNA, 18 nt, Human herpesvirus 6B
gaagaucuaugagaauua

SEQ ID NO: 332931 - RNA, 21 nt, Human herpesvirus 6B
gaagaucuaugggaguaauua

SEQ ID NO: 332932 - RNA, 19 nt, Human herpesvirus 6B
gaagaugguaucuaaagac

SEQ ID NO: 332933 - RNA, 12 nt, Human herpesvirus 6B
gaagaugugaua

SEQ ID NO: 332934 - RNA, 17 nt, Human herpesvirus 6B
gaagccuucaacuuuug

SEQ ID NO: 332935 - RNA, 17 nt, Human herpesvirus 6B
gaagcgguaaaauggag

SEQ ID NO: 332936 - RNA, 22 nt, Human herpesvirus 6B
gaaggacuaucugagacaguca

SEQ ID NO: 332937 - RNA, 18 nt, Human herpesvirus 6B
gaaggaggucucagguga

SEQ ID NO: 332938 - RNA, 19 nt, Human herpesvirus 6B
gaaggcuaucacuuagaca

SEQ ID NO: 332939 - RNA, 17 nt, Human herpesvirus 6B
gaagggcucuguuacua

SEQ ID NO: 332940 - RNA, 13 nt, Human herpesvirus 6B
gaagucucuaguu

SEQ ID NO: 332941 - RNA, 19 nt, Human herpesvirus 6B
gaagucugaauuuaaugca

SEQ ID NO: 332942 - RNA, 19 nt, Human herpesvirus 6B
gaagugcaugcgacagaca

SEQ ID NO: 332943 - RNA, 14 nt, Human herpesvirus 6B
gaauaaaaguccau

SEQ ID NO: 332944 - RNA, 18 nt, Human herpesvirus 6B
gaauaacggagagcuucu

SEQ ID NO: 332945 - RNA, 16 nt, Human herpesvirus 6B
gaauaauuauggacaa

SEQ ID NO: 332946 - RNA, 22 nt, Human herpesvirus 6B
gaauagaucuucggcgcugauu

SEQ ID NO: 332947 - RNA, 15 nt, Human herpesvirus 6B
gaaucacauccgcuc

SEQ ID NO: 332948 - RNA, 14 nt, Human herpesvirus 6B
gaaucagaucacuc

SEQ ID NO: 332949 - RNA, 16 nt, Human herpesvirus 6B
gaaucucaagcacaaa

SEQ ID NO: 332950 - RNA, 21 nt, Human herpesvirus 6B
gaaucucacaugcgagcaaaa

SEQ ID NO: 332951 - RNA, 15 nt, Human herpesvirus 6B
gaaucuuccacugaa

SEQ ID NO: 332952 - RNA, 21 nt, Human herpesvirus 6B
gaaucuuguguucuaacacau

SEQ ID NO: 332953 - RNA, 23 nt, Human herpesvirus 6B
gaaucuuguguucuaacacauag

SEQ ID NO: 332954 - RNA, 15 nt, Human herpesvirus 6B
gaaugggaugcauua

SEQ ID NO: 332955 - RNA, 21 nt, Human herpesvirus 6B
gaauguuuaaaguuuugugau

SEQ ID NO: 332956 - RNA, 19 nt, Human herpesvirus 6B
gaauuaugacugacaaggu

SEQ ID NO: 332957 - RNA, 14 nt, Human herpesvirus 6B
gaauucaagacgau

SEQ ID NO: 332958 - RNA, 14 nt, Human herpesvirus 6B
gaauucacuuugaa

SEQ ID NO: 332959 - RNA, 22 nt, Human herpesvirus 6B
gaauucguuacaaucucugugu

SEQ ID NO: 332960 - RNA, 15 nt, Human herpesvirus 6B
gaauucuuaccaaga

SEQ ID NO: 332961 - RNA, 15 nt, Human herpesvirus 6B
gaauugggaagcaua

SEQ ID NO: 332962 - RNA, 14 nt, Human herpesvirus 6B
gaauuuaaugcaaa

SEQ ID NO: 332963 - RNA, 18 nt, Human herpesvirus 6B
gaauuuucugaagacagc

SEQ ID NO: 332964 - RNA, 14 nt, Human herpesvirus 6B
gacaaaacuguccu

SEQ ID NO: 332965 - RNA, 16 nt, Human herpesvirus 6B
gacaaaccucucgccg

SEQ ID NO: 332966 - RNA, 17 nt, Human herpesvirus 6B
gacaaaccugauuucag

SEQ ID NO: 332967 - RNA, 21 nt, Human herpesvirus 6B
gacaaaguucaguaagauuua

SEQ ID NO: 332968 - RNA, 19 nt, Human herpesvirus 6B
gacaagcuguccaucuuca

SEQ ID NO: 332969 - RNA, 19 nt, Human herpesvirus 6B
gacaaguaagauugcagac

SEQ ID NO: 332970 - RNA, 23 nt, Human herpesvirus 6B
gacaaguuucuuuugugacuaua

SEQ ID NO: 332971 - RNA, 18 nt, Human herpesvirus 6B
gacaauauaaaagauuug

SEQ ID NO: 332972 - RNA, 13 nt, Human herpesvirus 6B
gacaaugauacua

SEQ ID NO: 332973 - RNA, 20 nt, Human herpesvirus 6B
gacaaugcggaacaccagca

SEQ ID NO: 332974 - RNA, 16 nt, Human herpesvirus 6B
gacacaauuucugacu

SEQ ID NO: 332975 - RNA, 19 nt, Human herpesvirus 6B
gacacgagaagaacaugca

SEQ ID NO: 332976 - RNA, 20 nt, Human herpesvirus 6B
gacacgagaagaacaugcag

SEQ ID NO: 332977 - RNA, 17 nt, Human herpesvirus 6B
gacacggugagucgcau

SEQ ID NO: 332978 - RNA, 17 nt, Human herpesvirus 6B
gacagagccuagaccaa

SEQ ID NO: 332979 - RNA, 23 nt, Human herpesvirus 6B
gacagagguaauaaaaacaccuc

SEQ ID NO: 332980 - RNA, 15 nt, Human herpesvirus 6B
gacaguauuuacuga

SEQ ID NO: 332981 - RNA, 15 nt, Human herpesvirus 6B
gacaucacauuauaa

SEQ ID NO: 332982 - RNA, 22 nt, Human herpesvirus 6B
gacaucacgucccauucacaua

SEQ ID NO: 332983 - RNA, 20 nt, Human herpesvirus 6B
gacauccguugagugugcau

SEQ ID NO: 332984 - RNA, 19 nt, Human herpesvirus 6B
gacaucgagauucuuuaaa

SEQ ID NO: 332985 - RNA, 23 nt, Human herpesvirus 6B
gacaucgcuaaguguugacugau

SEQ ID NO: 332986 - RNA, 23 nt, Human herpesvirus 6B
gacaugccgcagaagacuuuaaa

SEQ ID NO: 332987 - RNA, 12 nt, Human herpesvirus 6B
gacaugcuucac

SEQ ID NO: 332988 - RNA, 18 nt, Human herpesvirus 6B
gacauucaacauucccac

SEQ ID NO: 332989 - RNA, 14 nt, Human herpesvirus 6B
gacauugcuuucuc

SEQ ID NO: 332990 - RNA, 15 nt, Human herpesvirus 6B
gacauuuaccagaga

SEQ ID NO: 332991 - RNA, 16 nt, Human herpesvirus 6B
gacauuuaccagagau

SEQ ID NO: 332992 - RNA, 18 nt, Human herpesvirus 6B
gaccaaucugugcaacac

SEQ ID NO: 332993 - RNA, 15 nt, Human herpesvirus 6B
gaccagagauucuau

SEQ ID NO: 332994 - RNA, 20 nt, Human herpesvirus 6B
gaccauaaaaaauuuuguca

SEQ ID NO: 332995 - RNA, 20 nt, Human herpesvirus 6B
gacccuagcuuuucauauga

SEQ ID NO: 332996 - RNA, 21 nt, Human herpesvirus 6B
gaccgcagaggaucuguucau

SEQ ID NO: 332997 - RNA, 21 nt, Human herpesvirus 6B
gaccguaggaagaucaugaca

SEQ ID NO: 332998 - RNA, 14 nt, Human herpesvirus 6B
gaccgucaaaucuc

SEQ ID NO: 332999 - RNA, 18 nt, Human herpesvirus 6B
gaccgucaaaucucgccg

SEQ ID NO: 333000 - RNA, 16 nt, Human herpesvirus 6B
gaccguucaccauucc

SEQ ID NO: 333001 - RNA, 17 nt, Human herpesvirus 6B
gaccguucaccauucca

SEQ ID NO: 333002 - RNA, 18 nt, Human herpesvirus 6B
gaccuaaucacaaaacug

SEQ ID NO: 333003 - RNA, 22 nt, Human herpesvirus 6B
gaccuucuuuuaguauuuacca

SEQ ID NO: 333004 - RNA, 20 nt, Human herpesvirus 6B
gacgaauaagccuuugcuga

SEQ ID NO: 333005 - RNA, 22 nt, Human herpesvirus 6B
gacgaaugguucgauugcgcga

SEQ ID NO: 333006 - RNA, 23 nt, Human herpesvirus 6B
gacgacggaauaugguuccacuu

SEQ ID NO: 333007 - RNA, 17 nt, Human herpesvirus 6B
gacgagcugcagucuca

SEQ ID NO: 333008 - RNA, 17 nt, Human herpesvirus 6B
gacgauaguguucucug

SEQ ID NO: 333009 - RNA, 14 nt, Human herpesvirus 6B
gacggcagcgggga

SEQ ID NO: 333010 - RNA, 21 nt, Human herpesvirus 6B
gacggcgaggggacggacaga

SEQ ID NO: 333011 - RNA, 20 nt, Human herpesvirus 6B
gacgguucaccacugugaua

SEQ ID NO: 333012 - RNA, 19 nt, Human herpesvirus 6B
gacuacgauugcugucuuc

SEQ ID NO: 333013 - RNA, 17 nt, Human herpesvirus 6B
gacuacucuggcugaag

SEQ ID NO: 333014 - RNA, 19 nt, Human herpesvirus 6B
gacuauacgaaauaaucga

SEQ ID NO: 333015 - RNA, 18 nt, Human herpesvirus 6B
gacuaucugagacaguca

SEQ ID NO: 333016 - RNA, 20 nt, Human herpesvirus 6B
gacuccaacgcacaugcuaa

SEQ ID NO: 333017 - RNA, 13 nt, Human herpesvirus 6B
gacugacaaggua

SEQ ID NO: 333018 - RNA, 16 nt, Human herpesvirus 6B
gacuguaccauuguca

SEQ ID NO: 333019 - RNA, 15 nt, Human herpesvirus 6B
gacuuauaagucauc

SEQ ID NO: 333020 - RNA, 23 nt, Human herpesvirus 6B
gacuuauaagucaucauacaaua

SEQ ID NO: 333021 - RNA, 12 nt, Human herpesvirus 6B
gacuucaaacac

SEQ ID NO: 333022 - RNA, 17 nt, Human herpesvirus 6B
gacuuuaaagucguuuu

SEQ ID NO: 333023 - RNA, 14 nt, Human herpesvirus 6B
gagaaagaaaacca

SEQ ID NO: 333024 - RNA, 18 nt, Human herpesvirus 6B
gagaaagaaaaccaguau

SEQ ID NO: 333025 - RNA, 15 nt, Human herpesvirus 6B
gagaaucuuccacug

SEQ ID NO: 333026 - RNA, 17 nt, Human herpesvirus 6B
gagaaucuuccacugaa

SEQ ID NO: 333027 - RNA, 22 nt, Human herpesvirus 6B
gagaauuaugacugacaaggua

SEQ ID NO: 333028 - RNA, 12 nt, Human herpesvirus 6B
gagaauugccga

SEQ ID NO: 333029 - RNA, 20 nt, Human herpesvirus 6B
gagacaauaacaauuauuca

SEQ ID NO: 333030 - RNA, 18 nt, Human herpesvirus 6B
gagacaccucaaggucaa

SEQ ID NO: 333031 - RNA, 14 nt, Human herpesvirus 6B
gagacagaucagca

SEQ ID NO: 333032 - RNA, 19 nt, Human herpesvirus 6B
gagaccaauuuagauucga

SEQ ID NO: 333033 - RNA, 12 nt, Human herpesvirus 6B
gagaccuauaaa

SEQ ID NO: 333034 - RNA, 16 nt, Human herpesvirus 6B
gagacucguucguuaa

SEQ ID NO: 333035 - RNA, 20 nt, Human herpesvirus 6B
gagacuggaaaacuaugugc

SEQ ID NO: 333036 - RNA, 21 nt, Human herpesvirus 6B
gagacuggaaaacuaugugca

SEQ ID NO: 333037 - RNA, 19 nt, Human herpesvirus 6B
gagaggagcauucacauaa

SEQ ID NO: 333038 - RNA, 13 nt, Human herpesvirus 6B
gagaguucauuug

SEQ ID NO: 333039 - RNA, 13 nt, Human herpesvirus 6B
gagauaucugcau

SEQ ID NO: 333040 - RNA, 20 nt, Human herpesvirus 6B
gagaucguuuugcaacuuaa

SEQ ID NO: 333041 - RNA, 16 nt, Human herpesvirus 6B
gagaugaaaaacucaa

SEQ ID NO: 333042 - RNA, 21 nt, Human herpesvirus 6B
gagauguuucugugcgucuau

SEQ ID NO: 333043 - RNA, 22 nt, Human herpesvirus 6B
gagauucuauguacugaucucu

SEQ ID NO: 333044 - RNA, 18 nt, Human herpesvirus 6B
gagcaaagaaaugacuug

SEQ ID NO: 333045 - RNA, 20 nt, Human herpesvirus 6B
gagcacgcacgagaacacgc

SEQ ID NO: 333046 - RNA, 14 nt, Human herpesvirus 6B
gagccggcucaaga

SEQ ID NO: 333047 - RNA, 18 nt, Human herpesvirus 6B
gagcgacauaguggcuau

SEQ ID NO: 333048 - RNA, 21 nt, Human herpesvirus 6B
gagcgcgguagucgagaucau

SEQ ID NO: 333049 - RNA, 17 nt, Human herpesvirus 6B
gagcugcagucucagga

SEQ ID NO: 333050 - RNA, 12 nt, Human herpesvirus 6B
gagcuucuuagg

SEQ ID NO: 333051 - RNA, 24 nt, Human herpesvirus 6B
gaggaacugaugagaaaugacuua

SEQ ID NO: 333052 - RNA, 20 nt, Human herpesvirus 6B
gaggcggcgaagggacacga

SEQ ID NO: 333053 - RNA, 23 nt, Human herpesvirus 6B
gaggggaauacaccggagaccga

SEQ ID NO: 333054 - RNA, 15 nt, Human herpesvirus 6B
gaggggacggacaga

SEQ ID NO: 333055 - RNA, 20 nt, Human herpesvirus 6B
gaggucuuauauuucagaua

SEQ ID NO: 333056 - RNA, 24 nt, Human herpesvirus 6B
gaguaaaacgcucacaacaugauc

SEQ ID NO: 333057 - RNA, 18 nt, Human herpesvirus 6B
gaguaaugacuacgauug

SEQ ID NO: 333058 - RNA, 21 nt, Human herpesvirus 6B
gaguaauuauugugacaaggu

SEQ ID NO: 333059 - RNA, 22 nt, Human herpesvirus 6B
gaguaauuggacauuguugaua

SEQ ID NO: 333060 - RNA, 17 nt, Human herpesvirus 6B
gaguaucacguaucucu

SEQ ID NO: 333061 - RNA, 18 nt, Human herpesvirus 6B
gaguaucacguaucucug

SEQ ID NO: 333062 - RNA, 22 nt, Human herpesvirus 6B
gagucaaauguucgaugauuau

SEQ ID NO: 333063 - RNA, 15 nt, Human herpesvirus 6B
gagugauugaugaaa

SEQ ID NO: 333064 - RNA, 15 nt, Human herpesvirus 6B
gagugcuauuucucu

SEQ ID NO: 333065 - RNA, 18 nt, Human herpesvirus 6B
gagugcuauuugcauuaa

SEQ ID NO: 333066 - RNA, 22 nt, Human herpesvirus 6B
gagugggaggagccaacauaca

SEQ ID NO: 333067 - RNA, 15 nt, Human herpesvirus 6B
gaguuacauucguau

SEQ ID NO: 333068 - RNA, 22 nt, Human herpesvirus 6B
gaguuguauuauaaaaacuaau

SEQ ID NO: 333069 - RNA, 19 nt, Human herpesvirus 6B
gaguuuuccuugacaguuc

SEQ ID NO: 333070 - RNA, 20 nt, Human herpesvirus 6B
gaguuuuuuaaaagugcaac

SEQ ID NO: 333071 - RNA, 13 nt, Human herpesvirus 6B
gaguuuuuugcaa

SEQ ID NO: 333072 - RNA, 18 nt, Human herpesvirus 6B
gauaaacuccuuacucau

SEQ ID NO: 333073 - RNA, 20 nt, Human herpesvirus 6B
gauaaauccgauagccauac

SEQ ID NO: 333074 - RNA, 20 nt, Human herpesvirus 6B
gauaacuguuuuugucgcau

SEQ ID NO: 333075 - RNA, 12 nt, Human herpesvirus 6B
gauaaucuugua

SEQ ID NO: 333076 - RNA, 12 nt, Human herpesvirus 6B
gauaauuuccaa

SEQ ID NO: 333077 - RNA, 17 nt, Human herpesvirus 6B
gauacaucguuuguuga

SEQ ID NO: 333078 - RNA, 16 nt, Human herpesvirus 6B
gauacuauaaacaauu

SEQ ID NO: 333079 - RNA, 17 nt, Human herpesvirus 6B
gauagaggaauugcuuu

SEQ ID NO: 333080 - RNA, 16 nt, Human herpesvirus 6B
gauagaguucaucuaa

SEQ ID NO: 333081 - RNA, 22 nt, Human herpesvirus 6B
gauagccagggcauucacaauc

SEQ ID NO: 333082 - RNA, 11 nt, Human herpesvirus 6B
gauaguacuua

SEQ ID NO: 333083 - RNA, 22 nt, Human herpesvirus 6B
gauauauaaaaaagugcaugau

SEQ ID NO: 333084 - RNA, 22 nt, Human herpesvirus 6B
gauaugagugaauugugcaagc

SEQ ID NO: 333085 - RNA, 19 nt, Human herpesvirus 6B
gauaugcaaacugacugua

SEQ ID NO: 333086 - RNA, 15 nt, Human herpesvirus 6B
gauauggaaacacuu

SEQ ID NO: 333087 - RNA, 22 nt, Human herpesvirus 6B
gauauguguuaagaaugagaug

SEQ ID NO: 333088 - RNA, 15 nt, Human herpesvirus 6B
gauauucagaguaau

SEQ ID NO: 333089 - RNA, 16 nt, Human herpesvirus 6B
gaucaacggccuggaa

SEQ ID NO: 333090 - RNA, 20 nt, Human herpesvirus 6B
gaucacaacauaaaaaaaca

SEQ ID NO: 333091 - RNA, 19 nt, Human herpesvirus 6B
gaucacucagauuucagga

SEQ ID NO: 333092 - RNA, 13 nt, Human herpesvirus 6B
gaucagcauucac

SEQ ID NO: 333093 - RNA, 14 nt, Human herpesvirus 6B
gaucagcauucacu

SEQ ID NO: 333094 - RNA, 21 nt, Human herpesvirus 6B
gaucaguacauagaaucucug

SEQ ID NO: 333095 - RNA, 15 nt, Human herpesvirus 6B
gaucaucacaugcca

SEQ ID NO: 333096 - RNA, 21 nt, Human herpesvirus 6B
gaucaucgccauagugaaaga

SEQ ID NO: 333097 - RNA, 18 nt, Human herpesvirus 6B
gaucaucgggaacauaga

SEQ ID NO: 333098 - RNA, 15 nt, Human herpesvirus 6B
gauccaaaagauuau

SEQ ID NO: 333099 - RNA, 21 nt, Human herpesvirus 6B
gaucccagcucaccaccaucu

SEQ ID NO: 333100 - RNA, 19 nt, Human herpesvirus 6B
gaucgggccuggggacaga

SEQ ID NO: 333101 - RNA, 17 nt, Human herpesvirus 6B
gaucuaugggaguaauu

SEQ ID NO: 333102 - RNA, 16 nt, Human herpesvirus 6B
gaucucauaugcauca

SEQ ID NO: 333103 - RNA, 23 nt, Human herpesvirus 6B
gaucucgaaauauaaaaccaaaa

SEQ ID NO: 333104 - RNA, 16 nt, Human herpesvirus 6B
gaucugaggacgguga

SEQ ID NO: 333105 - RNA, 14 nt, Human herpesvirus 6B
gaucugugacaauu

SEQ ID NO: 333106 - RNA, 16 nt, Human herpesvirus 6B
gaucuuccccauaaca

SEQ ID NO: 333107 - RNA, 18 nt, Human herpesvirus 6B
gaucuucugcuaauucau

SEQ ID NO: 333108 - RNA, 23 nt, Human herpesvirus 6B
gaucuucugcuaauucauaguua

SEQ ID NO: 333109 - RNA, 13 nt, Human herpesvirus 6B
gaugaaagcuuca

SEQ ID NO: 333110 - RNA, 14 nt, Human herpesvirus 6B
gaugagaguggauu

SEQ ID NO: 333111 - RNA, 17 nt, Human herpesvirus 6B
gaugaucagcauucacu

SEQ ID NO: 333112 - RNA, 14 nt, Human herpesvirus 6B
gaugaugaucugcu

SEQ ID NO: 333113 - RNA, 15 nt, Human herpesvirus 6B
gaugcauguggcaag

SEQ ID NO: 333114 - RNA, 16 nt, Human herpesvirus 6B
gaugccuacauaugcc

SEQ ID NO: 333115 - RNA, 18 nt, Human herpesvirus 6B
gaugccuacauaugccga

SEQ ID NO: 333116 - RNA, 16 nt, Human herpesvirus 6B
gaugccuugauguuuc

SEQ ID NO: 333117 - RNA, 17 nt, Human herpesvirus 6B
gaugccuugauguuucc

SEQ ID NO: 333118 - RNA, 16 nt, Human herpesvirus 6B
gaugcguuugccauau

SEQ ID NO: 333119 - RNA, 12 nt, Human herpesvirus 6B
gaugcuguagaa

SEQ ID NO: 333120 - RNA, 16 nt, Human herpesvirus 6B
gaugcuuaacuuacuu

SEQ ID NO: 333121 - RNA, 13 nt, Human herpesvirus 6B
gauggaugugcac

SEQ ID NO: 333122 - RNA, 23 nt, Human herpesvirus 6B
gauggguaagugccuaugacugg

SEQ ID NO: 333123 - RNA, 16 nt, Human herpesvirus 6B
gauggucgauauagau

SEQ ID NO: 333124 - RNA, 20 nt, Human herpesvirus 6B
gauggugcuauuaacacaua

SEQ ID NO: 333125 - RNA, 15 nt, Human herpesvirus 6B
gauguaaucaauguc

SEQ ID NO: 333126 - RNA, 21 nt, Human herpesvirus 6B
gauguggaacggaaacaugaa

SEQ ID NO: 333127 - RNA, 18 nt, Human herpesvirus 6B
gauuaaagcauuagcaac

SEQ ID NO: 333128 - RNA, 14 nt, Human herpesvirus 6B
gauuaaaucauauc

SEQ ID NO: 333129 - RNA, 15 nt, Human herpesvirus 6B
gauuaaaugugaaca

SEQ ID NO: 333130 - RNA, 15 nt, Human herpesvirus 6B
gauuaauacaucauu

SEQ ID NO: 333131 - RNA, 20 nt, Human herpesvirus 6B
gauuacgucuuuuuguucag

SEQ ID NO: 333132 - RNA, 18 nt, Human herpesvirus 6B
gauuagcaaucauuaaca

SEQ ID NO: 333133 - RNA, 22 nt, Human herpesvirus 6B
gauuagcaaucauuaacauaca

SEQ ID NO: 333134 - RNA, 15 nt, Human herpesvirus 6B
gauuaguuugugcag

SEQ ID NO: 333135 - RNA, 18 nt, Human herpesvirus 6B
gauuauaaaaacacaccc

SEQ ID NO: 333136 - RNA, 15 nt, Human herpesvirus 6B
gauuaucuuaguaau

SEQ ID NO: 333137 - RNA, 17 nt, Human herpesvirus 6B
gauuauggcaacauacc

SEQ ID NO: 333138 - RNA, 15 nt, Human herpesvirus 6B
gauuauggugccuca

SEQ ID NO: 333139 - RNA, 20 nt, Human herpesvirus 6B
gauuccccucauacauccag

SEQ ID NO: 333140 - RNA, 18 nt, Human herpesvirus 6B
gauucgacaaaucaucac

SEQ ID NO: 333141 - RNA, 12 nt, Human herpesvirus 6B
gauugcaaccaa

SEQ ID NO: 333142 - RNA, 14 nt, Human herpesvirus 6B
gauugcaaucacau

SEQ ID NO: 333143 - RNA, 15 nt, Human herpesvirus 6B
gauugcagacgcuga

SEQ ID NO: 333144 - RNA, 22 nt, Human herpesvirus 6B
gauuggauagagauauaaugau

SEQ ID NO: 333145 - RNA, 15 nt, Human herpesvirus 6B
gauugggagcucacu

SEQ ID NO: 333146 - RNA, 13 nt, Human herpesvirus 6B
gauugugcaguuc

SEQ ID NO: 333147 - RNA, 11 nt, Human herpesvirus 6B
gauuguucgcu

SEQ ID NO: 333148 - RNA, 16 nt, Human herpesvirus 6B
gauuuaaugguuucaa

SEQ ID NO: 333149 - RNA, 21 nt, Human herpesvirus 6B
gauuuacuguuucuuugacau

SEQ ID NO: 333150 - RNA, 14 nt, Human herpesvirus 6B
gauuucagaauuga

SEQ ID NO: 333151 - RNA, 19 nt, Human herpesvirus 6B
gauuucaggaaguucuuca

SEQ ID NO: 333152 - RNA, 17 nt, Human herpesvirus 6B
gauuuggaggugagaca

SEQ ID NO: 333153 - RNA, 22 nt, Human herpesvirus 6B
gauuuggaggugagacaucgag

SEQ ID NO: 333154 - RNA, 17 nt, Human herpesvirus 6B
gauuuguucgauugcca

SEQ ID NO: 333155 - RNA, 20 nt, Human herpesvirus 6B
gauuuugaggaucacuaacu

SEQ ID NO: 333156 - RNA, 17 nt, Human herpesvirus 6B
gcaaaaaauaguuuuaa

SEQ ID NO: 333157 - RNA, 14 nt, Human herpesvirus 6B
gcaaaaacaaauga

SEQ ID NO: 333158 - RNA, 15 nt, Human herpesvirus 6B
gcaaacagcuuuauu

SEQ ID NO: 333159 - RNA, 18 nt, Human herpesvirus 6B
gcaaacaugcaacccgcc

SEQ ID NO: 333160 - RNA, 13 nt, Human herpesvirus 6B
gcaaaugcucaac

SEQ ID NO: 333161 - RNA, 13 nt, Human herpesvirus 6B
gcaaauguaacuc

SEQ ID NO: 333162 - RNA, 22 nt, Human herpesvirus 6B
gcaaauucugauuauuaucaca

SEQ ID NO: 333163 - RNA, 18 nt, Human herpesvirus 6B
gcaacaaagagcuuuaaa

SEQ ID NO: 333164 - RNA, 20 nt, Human herpesvirus 6B
gcaacauucugcguguuaau

SEQ ID NO: 333165 - RNA, 18 nt, Human herpesvirus 6B
gcaaccaauaaauggcau

SEQ ID NO: 333166 - RNA, 15 nt, Human herpesvirus 6B
gcaaccgcaguuccu

SEQ ID NO: 333167 - RNA, 22 nt, Human herpesvirus 6B
gcaagaacugcgacucaauccu

SEQ ID NO: 333168 - RNA, 15 nt, Human herpesvirus 6B
gcaagcagccaauga

SEQ ID NO: 333169 - RNA, 21 nt, Human herpesvirus 6B
gcaagcucaugaacaucguca

SEQ ID NO: 333170 - RNA, 17 nt, Human herpesvirus 6B
gcaaggugaaacauaaa

SEQ ID NO: 333171 - RNA, 20 nt, Human herpesvirus 6B
gcaaguucaucagccauuuc

SEQ ID NO: 333172 - RNA, 15 nt, Human herpesvirus 6B
gcaauaaaauucaca

SEQ ID NO: 333173 - RNA, 22 nt, Human herpesvirus 6B
gcaauagcagaaaacguuucau

SEQ ID NO: 333174 - RNA, 13 nt, Human herpesvirus 6B
gcaaucacauugu

SEQ ID NO: 333175 - RNA, 19 nt, Human herpesvirus 6B
gcaauucaucaaauccucu

SEQ ID NO: 333176 - RNA, 21 nt, Human herpesvirus 6B
gcaauucuuauuuaccuuccu

SEQ ID NO: 333177 - RNA, 23 nt, Human herpesvirus 6B
gcaauuuaggucuuuaucccauc

SEQ ID NO: 333178 - RNA, 19 nt, Human herpesvirus 6B
gcaauuugaauucugcucg

SEQ ID NO: 333179 - RNA, 17 nt, Human herpesvirus 6B
gcacaaaaugauugcaa

SEQ ID NO: 333180 - RNA, 22 nt, Human herpesvirus 6B
gcacccucugcaagcucaugaa

SEQ ID NO: 333181 - RNA, 19 nt, Human herpesvirus 6B
gcaccuuagucgcacacac

SEQ ID NO: 333182 - RNA, 15 nt, Human herpesvirus 6B
gcacgaucuuuccac

SEQ ID NO: 333183 - RNA, 17 nt, Human herpesvirus 6B
gcacucugaagaauaaa

SEQ ID NO: 333184 - RNA, 17 nt, Human herpesvirus 6B
gcacuuuuuaacgaaaa

SEQ ID NO: 333185 - RNA, 14 nt, Human herpesvirus 6B
gcagacuaauccau

SEQ ID NO: 333186 - RNA, 19 nt, Human herpesvirus 6B
gcagaggccggcacauaca

SEQ ID NO: 333187 - RNA, 13 nt, Human herpesvirus 6B
gcagaucagucaa

SEQ ID NO: 333188 - RNA, 18 nt, Human herpesvirus 6B
gcagcagaggccggcaca

SEQ ID NO: 333189 - RNA, 15 nt, Human herpesvirus 6B
gcagccaaugauucu

SEQ ID NO: 333190 - RNA, 13 nt, Human herpesvirus 6B
gcagcugucuaga

SEQ ID NO: 333191 - RNA, 21 nt, Human herpesvirus 6B
gcagggaaacuuuguguuuau

SEQ ID NO: 333192 - RNA, 24 nt, Human herpesvirus 6B
gcaggugcugcuaaaagcuaugua

SEQ ID NO: 333193 - RNA, 13 nt, Human herpesvirus 6B
gcaguaugccaua

SEQ ID NO: 333194 - RNA, 12 nt, Human herpesvirus 6B
gcagucugcucg

SEQ ID NO: 333195 - RNA, 13 nt, Human herpesvirus 6B
gcaguggucauga

SEQ ID NO: 333196 - RNA, 19 nt, Human herpesvirus 6B
gcaguguuauucagccgua

SEQ ID NO: 333197 - RNA, 17 nt, Human herpesvirus 6B
gcaguuccuguuuuucu

SEQ ID NO: 333198 - RNA, 22 nt, Human herpesvirus 6B
gcaguuccuguuuuucucauaa

SEQ ID NO: 333199 - RNA, 22 nt, Human herpesvirus 6B
gcaguuucuguuuuucucauaa

SEQ ID NO: 333200 - RNA, 21 nt, Human herpesvirus 6B
gcauaaaagggcgcuggugac

SEQ ID NO: 333201 - RNA, 20 nt, Human herpesvirus 6B
gcauaacaucucagaucuag

SEQ ID NO: 333202 - RNA, 20 nt, Human herpesvirus 6B
gcauacauuuuggacaguuu

SEQ ID NO: 333203 - RNA, 14 nt, Human herpesvirus 6B
gcaucgacuauuaa

SEQ ID NO: 333204 - RNA, 15 nt, Human herpesvirus 6B
gcaucgguuguguua

SEQ ID NO: 333205 - RNA, 11 nt, Human herpesvirus 6B
gcaugaugaac

SEQ ID NO: 333206 - RNA, 16 nt, Human herpesvirus 6B
gcauguuuauuucaau

SEQ ID NO: 333207 - RNA, 16 nt, Human herpesvirus 6B
gcauuaaacugaggca

SEQ ID NO: 333208 - RNA, 17 nt, Human herpesvirus 6B
gcauuauuuugucuucg

SEQ ID NO: 333209 - RNA, 21 nt, Human herpesvirus 6B
gcauucacaaggaaugugcag

SEQ ID NO: 333210 - RNA, 22 nt, Human herpesvirus 6B
gcauucuguucuucaucaucac

SEQ ID NO: 333211 - RNA, 14 nt, Human herpesvirus 6B
gcauucuuaucaaa

SEQ ID NO: 333212 - RNA, 14 nt, Human herpesvirus 6B
gcauugacggguau

SEQ ID NO: 333213 - RNA, 14 nt, Human herpesvirus 6B
gcauuguguuacac

SEQ ID NO: 333214 - RNA, 14 nt, Human herpesvirus 6B
gcauuucucuacau

SEQ ID NO: 333215 - RNA, 22 nt, Human herpesvirus 6B
gccaaaaaaauacaguauauaa

SEQ ID NO: 333216 - RNA, 20 nt, Human herpesvirus 6B
gccaaauguauugaacuuug

SEQ ID NO: 333217 - RNA, 18 nt, Human herpesvirus 6B
ggaaaauguguucuuaca

SEQ ID NO: 333218 - RNA, 20 nt, Human herpesvirus 6B
ggaaacuguaacggccacgu

SEQ ID NO: 333219 - RNA, 14 nt, Human herpesvirus 6B
ggaaauccuugacu

SEQ ID NO: 333220 - RNA, 13 nt, Human herpesvirus 6B
ggaacccaugcug

SEQ ID NO: 333221 - RNA, 15 nt, Human herpesvirus 6B
ggaacugucaaggaa

SEQ ID NO: 333222 - RNA, 23 nt, Human herpesvirus 6B
ggaagaaaauccagcaauccaau

SEQ ID NO: 333223 - RNA, 13 nt, Human herpesvirus 6B
ggaagaaauugca

SEQ ID NO: 333224 - RNA, 15 nt, Human herpesvirus 6B
ggaagacgcuguguu

SEQ ID NO: 333225 - RNA, 11 nt, Human herpesvirus 6B
ggaagaucuau

SEQ ID NO: 333226 - RNA, 15 nt, Human herpesvirus 6B
ggaagcgccauaaaa

SEQ ID NO: 333227 - RNA, 20 nt, Human herpesvirus 6B
ggaagggucgaagacauuca

SEQ ID NO: 333228 - RNA, 22 nt, Human herpesvirus 6B
ggaauacaccggagaccgagcg

SEQ ID NO: 333229 - RNA, 17 nt, Human herpesvirus 6B
ggaauaugguuccacuu

SEQ ID NO: 333230 - RNA, 11 nt, Human herpesvirus 6B
ggaaugugcag

SEQ ID NO: 333231 - RNA, 16 nt, Human herpesvirus 6B
ggacacaucuaugugu

SEQ ID NO: 333232 - RNA, 22 nt, Human herpesvirus 6B
ggacagugauuaggauguuugg

SEQ ID NO: 333233 - RNA, 19 nt, Human herpesvirus 6B
ggaccaaucugugcaacac

SEQ ID NO: 333234 - RNA, 22 nt, Human herpesvirus 6B
ggacuaucugagacagucaauu

SEQ ID NO: 333235 - RNA, 18 nt, Human herpesvirus 6B
ggagacucguucguuaaa

SEQ ID NO: 333236 - RNA, 21 nt, Human herpesvirus 6B
ggagauuaaagcauuagcaac

SEQ ID NO: 333237 - RNA, 22 nt, Human herpesvirus 6B
ggagcacccggggaggcgacga

SEQ ID NO: 333238 - RNA, 17 nt, Human herpesvirus 6B
ggagcauucacauaaga

SEQ ID NO: 333239 - RNA, 14 nt, Human herpesvirus 6B
ggaggggaauacac

SEQ ID NO: 333240 - RNA, 22 nt, Human herpesvirus 6B
ggaggggaauacaccggagacc

SEQ ID NO: 333241 - RNA, 13 nt, Human herpesvirus 6B
ggagugauugaug

SEQ ID NO: 333242 - RNA, 16 nt, Human herpesvirus 6B
ggagugauugaugaaa

SEQ ID NO: 333243 - RNA, 12 nt, Human herpesvirus 6B
ggaguugcagua

SEQ ID NO: 333244 - RNA, 14 nt, Human herpesvirus 6B
ggauagaaauggau

SEQ ID NO: 333245 - RNA, 23 nt, Human herpesvirus 6B
ggauaugaggauuugcuugucac

SEQ ID NO: 333246 - RNA, 15 nt, Human herpesvirus 6B
ggauaugagugaauu

SEQ ID NO: 333247 - RNA, 16 nt, Human herpesvirus 6B
ggaugauggugucuuu

SEQ ID NO: 333248 - RNA, 19 nt, Human herpesvirus 6B
ggaugauggugucuuuauu

SEQ ID NO: 333249 - RNA, 23 nt, Human herpesvirus 6B
ggaugcauuauacugaauggagu

SEQ ID NO: 333250 - RNA, 12 nt, Human herpesvirus 6B
ggaugguggaug

SEQ ID NO: 333251 - RNA, 19 nt, Human herpesvirus 6B
ggauguaaucaaugucaca

SEQ ID NO: 333252 - RNA, 22 nt, Human herpesvirus 6B
ggauguggauuauagaugacug

SEQ ID NO: 333253 - RNA, 17 nt, Human herpesvirus 6B
ggaugugguaugagcug

SEQ ID NO: 333254 - RNA, 19 nt, Human herpesvirus 6B
ggauguuugggagaucuga

SEQ ID NO: 333255 - RNA, 18 nt, Human herpesvirus 6B
ggauguuugugacucuga

SEQ ID NO: 333256 - RNA, 22 nt, Human herpesvirus 6B
ggauguuuuuacuugaugcaug

SEQ ID NO: 333257 - RNA, 16 nt, Human herpesvirus 6B
ggauugucauucugca

SEQ ID NO: 333258 - RNA, 21 nt, Human herpesvirus 6B
ggauugucauucugcauuuau

SEQ ID NO: 333259 - RNA, 13 nt, Human herpesvirus 6B
ggcaacuccccau

SEQ ID NO: 333260 - RNA, 22 nt, Human herpesvirus 6B
ggcacggugugaucaucacaug

SEQ ID NO: 333261 - RNA, 22 nt, Human herpesvirus 6B
ggcagauugcaaaauugauaca

SEQ ID NO: 333262 - RNA, 22 nt, Human herpesvirus 6B
ggcauucacaaucgcaguccag

SEQ ID NO: 333263 - RNA, 16 nt, Human herpesvirus 6B
ggcccuacuacagugg

SEQ ID NO: 333264 - RNA, 19 nt, Human herpesvirus 6B
ggccguauaucuacugcag

SEQ ID NO: 333265 - RNA, 12 nt, Human herpesvirus 6B
ggccucauagau

SEQ ID NO: 333266 - RNA, 19 nt, Human herpesvirus 6B
ggccuggaauacaagacca

SEQ ID NO: 333267 - RNA, 17 nt, Human herpesvirus 6B
ggccuucgguacaguga

SEQ ID NO: 333268 - RNA, 18 nt, Human herpesvirus 6B
ggccuucgguacagugaa

SEQ ID NO: 333269 - RNA, 20 nt, Human herpesvirus 6B
ggcgaagaccuauauguguu

SEQ ID NO: 333270 - RNA, 16 nt, Human herpesvirus 6B
ggcgcuggugacugug

SEQ ID NO: 333271 - RNA, 14 nt, Human herpesvirus 6B
ggcggaagugaaag

SEQ ID NO: 333272 - RNA, 15 nt, Human herpesvirus 6B
ggcgucacacagcau

SEQ ID NO: 333273 - RNA, 19 nt, Human herpesvirus 6B
ggcgucucaugcgaucuaa

SEQ ID NO: 333274 - RNA, 22 nt, Human herpesvirus 6B
ggcguuccgacucgauuugaua

SEQ ID NO: 333275 - RNA, 12 nt, Human herpesvirus 6B
ggcuaaacacug

SEQ ID NO: 333276 - RNA, 18 nt, Human herpesvirus 6B
ggcuauaaucacaaauau

SEQ ID NO: 333277 - RNA, 15 nt, Human herpesvirus 6B
ggcuaucgcaaugau

SEQ ID NO: 333278 - RNA, 15 nt, Human herpesvirus 6B
ggcuauuugacaaua

SEQ ID NO: 333279 - RNA, 15 nt, Human herpesvirus 6B
ggcucuuugcugauu

SEQ ID NO: 333280 - RNA, 13 nt, Human herpesvirus 6B
gggaaaaacgaca

SEQ ID NO: 333281 - RNA, 19 nt, Human herpesvirus 6B
gggacagugauuaggaugu

SEQ ID NO: 333282 - RNA, 16 nt, Human herpesvirus 6B
gggaugauggugucuu

SEQ ID NO: 333283 - RNA, 18 nt, Human herpesvirus 6B
gggauggcagauugcaaa

SEQ ID NO: 333284 - RNA, 13 nt, Human herpesvirus 6B
gggauguaaucaa

SEQ ID NO: 333285 - RNA, 22 nt, Human herpesvirus 6B
gggauguaaucaaugucacaaa

SEQ ID NO: 333286 - RNA, 21 nt, Human herpesvirus 6B
gggcagcugcaugguccacag

SEQ ID NO: 333287 - RNA, 22 nt, Human herpesvirus 6B
gggcaguucaucguuauggguu

SEQ ID NO: 333288 - RNA, 23 nt, Human herpesvirus 6B
gggcauucacaaucgcaguccag

SEQ ID NO: 333289 - RNA, 17 nt, Human herpesvirus 6B
gggccguacacucauuu

SEQ ID NO: 333290 - RNA, 23 nt, Human herpesvirus 6B
gggccguacacucauuugcaauu

SEQ ID NO: 333291 - RNA, 23 nt, Human herpesvirus 6B
gggcgccacuuuagcuuugcccu

SEQ ID NO: 333292 - RNA, 15 nt, Human herpesvirus 6B
gggcgcuagugaucg

SEQ ID NO: 333293 - RNA, 20 nt, Human herpesvirus 6B
gggcuuggcuaucgcaauga

SEQ ID NO: 333294 - RNA, 21 nt, Human herpesvirus 6B
gggcuuggcuaucgcaaugau

SEQ ID NO: 333295 - RNA, 22 nt, Human herpesvirus 6B
gggcuuuaaaaauuacuaaugu

SEQ ID NO: 333296 - RNA, 12 nt, Human herpesvirus 6B
ggggaagaucua

SEQ ID NO: 333297 - RNA, 22 nt, Human herpesvirus 6B
ggggauuuagugcaguaugucu

SEQ ID NO: 333298 - RNA, 21 nt, Human herpesvirus 6B
ggggcgucgggcgacgggcag

SEQ ID NO: 333299 - RNA, 15 nt, Human herpesvirus 6B
gggguaugucugugc

SEQ ID NO: 333300 - RNA, 22 nt, Human herpesvirus 6B
gggguccgcucugagauuugag

SEQ ID NO: 333301 - RNA, 11 nt, Human herpesvirus 6B
ggguaaucgca

SEQ ID NO: 333302 - RNA, 19 nt, Human herpesvirus 6B
ggguauucguaaugugcag

SEQ ID NO: 333303 - RNA, 15 nt, Human herpesvirus 6B
gggucucaugacuau

SEQ ID NO: 333304 - RNA, 23 nt, Human herpesvirus 6B
gguaaaaaaacaccaacaugacu

SEQ ID NO: 333305 - RNA, 18 nt, Human herpesvirus 6B
gguaaaauggcugugcua

SEQ ID NO: 333306 - RNA, 18 nt, Human herpesvirus 6B
gguacauuguuucucuaa

SEQ ID NO: 333307 - RNA, 23 nt, Human herpesvirus 6B
gguaccgcgguugaagucuuucc

SEQ ID NO: 333308 - RNA, 23 nt, Human herpesvirus 6B
gguacugcgguuggggucuuucc

SEQ ID NO: 333309 - RNA, 20 nt, Human herpesvirus 6B
gguaugagcugacaucugca

SEQ ID NO: 333310 - RNA, 20 nt, Human herpesvirus 6B
ggucacguauaccauuccca

SEQ ID NO: 333311 - RNA, 17 nt, Human herpesvirus 6B
gguccguuuuuucugca

SEQ ID NO: 333312 - RNA, 15 nt, Human herpesvirus 6B
ggucugcuugcaaau

SEQ ID NO: 333313 - RNA, 18 nt, Human herpesvirus 6B
ggucuuucccgugcucag

SEQ ID NO: 333314 - RNA, 14 nt, Human herpesvirus 6B
ggucuuuccuaccc

SEQ ID NO: 333315 - RNA, 15 nt, Human herpesvirus 6B
ggugaugaacuggcg

SEQ ID NO: 333316 - RNA, 15 nt, Human herpesvirus 6B
ggugcauaacaucuc

SEQ ID NO: 333317 - RNA, 12 nt, Human herpesvirus 6B
ggugcuauuaac

SEQ ID NO: 333318 - RNA, 20 nt, Human herpesvirus 6B
ggugucucaaccuucauuaa

SEQ ID NO: 333319 - RNA, 18 nt, Human herpesvirus 6B
gguguguuuuuuucaaga

SEQ ID NO: 333320 - RNA, 17 nt, Human herpesvirus 6B
gguuaggguuaggguua

SEQ ID NO: 333321 - RNA, 21 nt, Human herpesvirus 6B
gguucaccacugugauaugca

SEQ ID NO: 333322 - RNA, 22 nt, Human herpesvirus 6B
gguucaccacugugauaugcaa

SEQ ID NO: 333323 - RNA, 23 nt, Human herpesvirus 6B
gguuuauaugcaggugcugcuaa

SEQ ID NO: 333324 - RNA, 18 nt, Human herpesvirus 6B
gguuugucuucaagcaaa

SEQ ID NO: 333325 - RNA, 19 nt, Human herpesvirus 6B
gguuuuguccugaaauaac

SEQ ID NO: 333326 - RNA, 22 nt, Human herpesvirus 6B
guaaaaaaagauuuaucaaaag

SEQ ID NO: 333327 - RNA, 13 nt, Human herpesvirus 6B
guaaaacauguag

SEQ ID NO: 333328 - RNA, 15 nt, Human herpesvirus 6B
guaaaagagccagag

SEQ ID NO: 333329 - RNA, 16 nt, Human herpesvirus 6B
guaaaauacauacuuu

SEQ ID NO: 333330 - RNA, 18 nt, Human herpesvirus 6B
guaaacacgaaacugcuu

SEQ ID NO: 333331 - RNA, 23 nt, Human herpesvirus 6B
guaaacgauaucaauuccuguga

SEQ ID NO: 333332 - RNA, 17 nt, Human herpesvirus 6B
guaaacggcauacauuu

SEQ ID NO: 333333 - RNA, 16 nt, Human herpesvirus 6B
guaaauacaauaguaa

SEQ ID NO: 333334 - RNA, 14 nt, Human herpesvirus 6B
guaaauaugcuuau

SEQ ID NO: 333335 - RNA, 15 nt, Human herpesvirus 6B
guaaaugucaaagaa

SEQ ID NO: 333336 - RNA, 15 nt, Human herpesvirus 6B
guaaauuaaaguuua

SEQ ID NO: 333337 - RNA, 18 nt, Human herpesvirus 6B
guaaccaccaaaacgacu

SEQ ID NO: 333338 - RNA, 16 nt, Human herpesvirus 6B
guaaccgaugcugauu

SEQ ID NO: 333339 - RNA, 20 nt, Human herpesvirus 6B
guaacugguucaggauuugu

SEQ ID NO: 333340 - RNA, 23 nt, Human herpesvirus 6B
guaagauuaaaugugaacaguau

SEQ ID NO: 333341 - RNA, 12 nt, Human herpesvirus 6B
guaagugccuau

SEQ ID NO: 333342 - RNA, 18 nt, Human herpesvirus 6B
guaaguggguacaaugaa

SEQ ID NO: 333343 - RNA, 21 nt, Human herpesvirus 6B
guaaugugcagaucagucaaa

SEQ ID NO: 333344 - RNA, 23 nt, Human herpesvirus 6B
guaauucuuauguaaacuaaaua

SEQ ID NO: 333345 - RNA, 16 nt, Human herpesvirus 6B
guaauuggacauuguu

SEQ ID NO: 333346 - RNA, 13 nt, Human herpesvirus 6B
guacacaauacac

SEQ ID NO: 333347 - RNA, 14 nt, Human herpesvirus 6B
guacacagucacac

SEQ ID NO: 333348 - RNA, 20 nt, Human herpesvirus 6B
guacacuaugagucccuuga

SEQ ID NO: 333349 - RNA, 18 nt, Human herpesvirus 6B
guacacucauuugcaauu

SEQ ID NO: 333350 - RNA, 14 nt, Human herpesvirus 6B
guacagagccagac

SEQ ID NO: 333351 - RNA, 21 nt, Human herpesvirus 6B
guacauaaacuauuguuuaau

SEQ ID NO: 333352 - RNA, 11 nt, Human herpesvirus 6B
guacauagaau

SEQ ID NO: 333353 - RNA, 20 nt, Human herpesvirus 6B
guacauauaaacagauuuua

SEQ ID NO: 333354 - RNA, 14 nt, Human herpesvirus 6B
guaccaacauguau

SEQ ID NO: 333355 - RNA, 18 nt, Human herpesvirus 6B
guacggcgucacacagca

SEQ ID NO: 333356 - RNA, 14 nt, Human herpesvirus 6B
guagauggugcuau

SEQ ID NO: 333357 - RNA, 16 nt, Human herpesvirus 6B
guagcaaaugaaugug

SEQ ID NO: 333358 - RNA, 18 nt, Human herpesvirus 6B
guagcucaguguuugcca

SEQ ID NO: 333359 - RNA, 20 nt, Human herpesvirus 6B
guagcucaguguuugccaac

SEQ ID NO: 333360 - RNA, 20 nt, Human herpesvirus 6B
guaggcuguuuaaacuuugg

SEQ ID NO: 333361 - RNA, 21 nt, Human herpesvirus 6B
guagguaaaauggcugugcua

SEQ ID NO: 333362 - RNA, 13 nt, Human herpesvirus 6B
guauaagaacugg

SEQ ID NO: 333363 - RNA, 20 nt, Human herpesvirus 6B
guauaaugcaugauggugcu

SEQ ID NO: 333364 - RNA, 15 nt, Human herpesvirus 6B
guauaccauucccaa

SEQ ID NO: 333365 - RNA, 19 nt, Human herpesvirus 6B
guauauggugauguguucu

SEQ ID NO: 333366 - RNA, 20 nt, Human herpesvirus 6B
guaucucugguaaaugucaa

SEQ ID NO: 333367 - RNA, 22 nt, Human herpesvirus 6B
guaucuuaaaguuggggucuca

SEQ ID NO: 333368 - RNA, 20 nt, Human herpesvirus 6B
guauguauaauauaaauucu

SEQ ID NO: 333369 - RNA, 17 nt, Human herpesvirus 6B
guaugucucaguucaaa

SEQ ID NO: 333370 - RNA, 15 nt, Human herpesvirus 6B
guauucagaguacuu

SEQ ID NO: 333371 - RNA, 16 nt, Human herpesvirus 6B
guauucagaguacuuu

SEQ ID NO: 333372 - RNA, 19 nt, Human herpesvirus 6B
guauucuccucaacuaaau

SEQ ID NO: 333373 - RNA, 23 nt, Human herpesvirus 6B
guauucuuggaaaaccuuauaca

SEQ ID NO: 333374 - RNA, 18 nt, Human herpesvirus 6B
guauugucugauauggca

SEQ ID NO: 333375 - RNA, 13 nt, Human herpesvirus 6B
guauuugugaaca

SEQ ID NO: 333376 - RNA, 22 nt, Human herpesvirus 6B
gucaaagaaacaguaaaucucu

SEQ ID NO: 333377 - RNA, 15 nt, Human herpesvirus 6B
gucaaagcuacucau

SEQ ID NO: 333378 - RNA, 15 nt, Human herpesvirus 6B
gucaaccgccacaau

SEQ ID NO: 333379 - RNA, 18 nt, Human herpesvirus 6B
gucacacacaaugugcuu

SEQ ID NO: 333380 - RNA, 13 nt, Human herpesvirus 6B
gucacacacggua

SEQ ID NO: 333381 - RNA, 12 nt, Human herpesvirus 6B
gucacaguuuuu

SEQ ID NO: 333382 - RNA, 16 nt, Human herpesvirus 6B
gucacucucaauuuca

SEQ ID NO: 333383 - RNA, 17 nt, Human herpesvirus 6B
gucagucauaauucuca

SEQ ID NO: 333384 - RNA, 10 nt, Human herpesvirus 6B
gucaguuuaa

SEQ ID NO: 333385 - RNA, 22 nt, Human herpesvirus 6B
gucauaccgaucccagcucacc

SEQ ID NO: 333386 - RNA, 14 nt, Human herpesvirus 6B
gucaucaugugugc

SEQ ID NO: 333387 - RNA, 18 nt, Human herpesvirus 6B
gucaugaucugcuugauu

SEQ ID NO: 333388 - RNA, 18 nt, Human herpesvirus 6B
gucauguuuacugcaugc

SEQ ID NO: 333389 - RNA, 15 nt, Human herpesvirus 6B
gucauuucaaauaca

SEQ ID NO: 333390 - RNA, 17 nt, Human herpesvirus 6B
guccagcacagcaugca

SEQ ID NO: 333391 - RNA, 20 nt, Human herpesvirus 6B
guccagcacagcaugcauuu

SEQ ID NO: 333392 - RNA, 18 nt, Human herpesvirus 6B
guccaucuucagacauca

SEQ ID NO: 333393 - RNA, 18 nt, Human herpesvirus 6B
guccgcucugagauuuga

SEQ ID NO: 333394 - RNA, 15 nt, Human herpesvirus 6B
guccuauguuaacau

SEQ ID NO: 333395 - RNA, 20 nt, Human herpesvirus 6B
guccuauguuaacauuguga

SEQ ID NO: 333396 - RNA, 23 nt, Human herpesvirus 6B
guccuauguuaacauugugagaa

SEQ ID NO: 333397 - RNA, 20 nt, Human herpesvirus 6B
guccuccauccgucauguaa

SEQ ID NO: 333398 - RNA, 22 nt, Human herpesvirus 6B
guccugaaauaacacgcugcug

SEQ ID NO: 333399 - RNA, 22 nt, Human herpesvirus 6B
guccuuauaaugugaacuaaau

SEQ ID NO: 333400 - RNA, 17 nt, Human herpesvirus 6B
guccuucguucuuucac

SEQ ID NO: 333401 - RNA, 18 nt, Human herpesvirus 6B
guccuucguucuuucaca

SEQ ID NO: 333402 - RNA, 19 nt, Human herpesvirus 6B
gucgaaacgaaagcugaua

SEQ ID NO: 333403 - RNA, 13 nt, Human herpesvirus 6B
gucgaaugagcuu

SEQ ID NO: 333404 - RNA, 14 nt, Human herpesvirus 6B
gucggcgcguuuau

SEQ ID NO: 333405 - RNA, 13 nt, Human herpesvirus 6B
gucggugauaccg

SEQ ID NO: 333406 - RNA, 11 nt, Human herpesvirus 6B
gucgugugauc

SEQ ID NO: 333407 - RNA, 16 nt, Human herpesvirus 6B
gucuaaggugacucuu

SEQ ID NO: 333408 - RNA, 13 nt, Human herpesvirus 6B
gucuaaugcaaag

SEQ ID NO: 333409 - RNA, 13 nt, Human herpesvirus 6B
gucuacuguguau

SEQ ID NO: 333410 - RNA, 22 nt, Human herpesvirus 6B
gucuacuguguauuguguaccu

SEQ ID NO: 333411 - RNA, 17 nt, Human herpesvirus 6B
gucuaugacaauugcag

SEQ ID NO: 333412 - RNA, 13 nt, Human herpesvirus 6B
gucucucuuugcg

SEQ ID NO: 333413 - RNA, 22 nt, Human herpesvirus 6B
gucucugugaagaggugcaaau

SEQ ID NO: 333414 - RNA, 23 nt, Human herpesvirus 6B
gucugacaagcuguccaucuuca

SEQ ID NO: 333415 - RNA, 14 nt, Human herpesvirus 6B
gucugauacuugaa

SEQ ID NO: 333416 - RNA, 20 nt, Human herpesvirus 6B
gucugcaguggucaugaucu

SEQ ID NO: 333417 - RNA, 17 nt, Human herpesvirus 6B
gucugcuaaaaaucauc

SEQ ID NO: 333418 - RNA, 13 nt, Human herpesvirus 6B
gucuguugcugua

SEQ ID NO: 333419 - RNA, 14 nt, Human herpesvirus 6B
gucuucaagcaaag

SEQ ID NO: 333420 - RNA, 19 nt, Human herpesvirus 6B
gucuucguacguacuacag

SEQ ID NO: 333421 - RNA, 23 nt, Human herpesvirus 6B
gucuucuaauucuagaucugcca

SEQ ID NO: 333422 - RNA, 16 nt, Human herpesvirus 6B
gucuugcaaacagcuu

SEQ ID NO: 333423 - RNA, 18 nt, Human herpesvirus 6B
gugaaaaacacggcgccu

SEQ ID NO: 333424 - RNA, 16 nt, Human herpesvirus 6B
gugaagaggugcaaau

SEQ ID NO: 333425 - RNA, 19 nt, Human herpesvirus 6B
gugaagcgguuagaucugg

SEQ ID NO: 333426 - RNA, 17 nt, Human herpesvirus 6B
gugaaucugcugaucuu

SEQ ID NO: 333427 - RNA, 16 nt, Human herpesvirus 6B
gugacaucggcuugga

SEQ ID NO: 333428 - RNA, 21 nt, Human herpesvirus 6B
gugagccagauucggcugcuu

SEQ ID NO: 333429 - RNA, 15 nt, Human herpesvirus 6B
gugaggugauuugaa

SEQ ID NO: 333430 - RNA, 19 nt, Human herpesvirus 6B
gugaucguggacaguaaaa

SEQ ID NO: 333431 - RNA, 13 nt, Human herpesvirus 6B
gugaugauuuguc

SEQ ID NO: 333432 - RNA, 18 nt, Human herpesvirus 6B
gugaugccuugauguuuc

SEQ ID NO: 333433 - RNA, 18 nt, Human herpesvirus 6B
gugauggaugugcacuuu

SEQ ID NO: 333434 - RNA, 16 nt, Human herpesvirus 6B
gugauugggagcucac

SEQ ID NO: 333435 - RNA, 21 nt, Human herpesvirus 6B
gugcaaaagcugaccauucag

SEQ ID NO: 333436 - RNA, 15 nt, Human herpesvirus 6B
gugcauaacaucuca

SEQ ID NO: 333437 - RNA, 16 nt, Human herpesvirus 6B
gugcauaacaucucag

SEQ ID NO: 333438 - RNA, 13 nt, Human herpesvirus 6B
gugccuacuuugg

SEQ ID NO: 333439 - RNA, 18 nt, Human herpesvirus 6B
gugcgaauuguguugcua

SEQ ID NO: 333440 - RNA, 16 nt, Human herpesvirus 6B
gugcuauuaacacaua

SEQ ID NO: 333441 - RNA, 17 nt, Human herpesvirus 6B
gugcuauuugcauuaag

SEQ ID NO: 333442 - RNA, 13 nt, Human herpesvirus 6B
gugcuuaucaaau

SEQ ID NO: 333443 - RNA, 12 nt, Human herpesvirus 6B
gugcuucugcuc

SEQ ID NO: 333444 - RNA, 16 nt, Human herpesvirus 6B
gugcuuuggaccuuga

SEQ ID NO: 333445 - RNA, 22 nt, Human herpesvirus 6B
guggaaaaaagucaccuguaua

SEQ ID NO: 333446 - RNA, 14 nt, Human herpesvirus 6B
guggaaaugucuau

SEQ ID NO: 333447 - RNA, 17 nt, Human herpesvirus 6B
guggaagacgcuguguu

SEQ ID NO: 333448 - RNA, 15 nt, Human herpesvirus 6B
guggacaaugauacu

SEQ ID NO: 333449 - RNA, 15 nt, Human herpesvirus 6B
gugggaacugucaag

SEQ ID NO: 333450 - RNA, 22 nt, Human herpesvirus 6B
gugggcgguagguucacuucca

SEQ ID NO: 333451 - RNA, 21 nt, Human herpesvirus 6B
gugguugccaguaagucuuca

SEQ ID NO: 333452 - RNA, 18 nt, Human herpesvirus 6B
guguaccuuguaaucucu

SEQ ID NO: 333453 - RNA, 15 nt, Human herpesvirus 6B
guguacgaagcaaau

SEQ ID NO: 333454 - RNA, 21 nt, Human herpesvirus 6B
guguaugugugggguguguau

SEQ ID NO: 333455 - RNA, 13 nt, Human herpesvirus 6B
guguauugugaua

SEQ ID NO: 333456 - RNA, 20 nt, Human herpesvirus 6B
guguauuuuauguguguauu

SEQ ID NO: 333457 - RNA, 20 nt, Human herpesvirus 6B
guguauuuuuuuguguguau

SEQ ID NO: 333458 - RNA, 15 nt, Human herpesvirus 6B
gugucgaauguuaca

SEQ ID NO: 333459 - RNA, 18 nt, Human herpesvirus 6B
gugucgaugucuugcuau

SEQ ID NO: 333460 - RNA, 14 nt, Human herpesvirus 6B
gugucggugauacc

SEQ ID NO: 333461 - RNA, 14 nt, Human herpesvirus 6B
gugugacuuauaua

SEQ ID NO: 333462 - RNA, 13 nt, Human herpesvirus 6B
gugugcaucagca

SEQ ID NO: 333463 - RNA, 20 nt, Human herpesvirus 6B
gugugccuauuaaugcuuau

SEQ ID NO: 333464 - RNA, 18 nt, Human herpesvirus 6B
guguggggaugacgagcu

SEQ ID NO: 333465 - RNA, 20 nt, Human herpesvirus 6B
guguguaugcuuucgcucac

SEQ ID NO: 333466 - RNA, 22 nt, Human herpesvirus 6B
gugugucgaauguuacagauac

SEQ ID NO: 333467 - RNA, 14 nt, Human herpesvirus 6B
guguguguugugcg

SEQ ID NO: 333468 - RNA, 23 nt, Human herpesvirus 6B
guguuauggggaagaucuaugag

SEQ ID NO: 333469 - RNA, 15 nt, Human herpesvirus 6B
guguuggucauuuca

SEQ ID NO: 333470 - RNA, 12 nt, Human herpesvirus 6B
guguuucugucu

SEQ ID NO: 333471 - RNA, 15 nt, Human herpesvirus 6B
guguuugccaaccaa

SEQ ID NO: 333472 - RNA, 17 nt, Human herpesvirus 6B
guguuuguggacaauga

SEQ ID NO: 333473 - RNA, 20 nt, Human herpesvirus 6B
guguuuuucauuucauugua

SEQ ID NO: 333474 - RNA, 19 nt, Human herpesvirus 6B
guuaaaaacguuuuugauu

SEQ ID NO: 333475 - RNA, 23 nt, Human herpesvirus 6B
guuaaaagagaauacuacaguga

SEQ ID NO: 333476 - RNA, 16 nt, Human herpesvirus 6B
guuaaagaaacagauc

SEQ ID NO: 333477 - RNA, 16 nt, Human herpesvirus 6B
guuaaaguuucagagc

SEQ ID NO: 333478 - RNA, 19 nt, Human herpesvirus 6B
guuaacggagaucugguga

SEQ ID NO: 333479 - RNA, 15 nt, Human herpesvirus 6B
guuaacucagguggu

SEQ ID NO: 333480 - RNA, 20 nt, Human herpesvirus 6B
guuaaugaauguuugacugu

SEQ ID NO: 333481 - RNA, 18 nt, Human herpesvirus 6B
guuacaagcaugcauugu

SEQ ID NO: 333482 - RNA, 20 nt, Human herpesvirus 6B
guuaccgccguucugcuuag

SEQ ID NO: 333483 - RNA, 15 nt, Human herpesvirus 6B
guuacuagugauuau

SEQ ID NO: 333484 - RNA, 13 nt, Human herpesvirus 6B
guuauacuggcaa

SEQ ID NO: 333485 - RNA, 18 nt, Human herpesvirus 6B
guuaucgauuuauaccac

SEQ ID NO: 333486 - RNA, 15 nt, Human herpesvirus 6B
guuaucuuauguaua

SEQ ID NO: 333487 - RNA, 17 nt, Human herpesvirus 6B
guuauggggaagaucua

SEQ ID NO: 333488 - RNA, 17 nt, Human herpesvirus 6B
guuauuuacaaaagccu

SEQ ID NO: 333489 - RNA, 11 nt, Human herpesvirus 6B
guucaaacaau

SEQ ID NO: 333490 - RNA, 15 nt, Human herpesvirus 6B
guucaaacaaugcaa

SEQ ID NO: 333491 - RNA, 14 nt, Human herpesvirus 6B
guucaacgucuuca

SEQ ID NO: 333492 - RNA, 15 nt, Human herpesvirus 6B
guucacacagaugca

SEQ ID NO: 333493 - RNA, 13 nt, Human herpesvirus 6B
guucacauuaccu

SEQ ID NO: 333494 - RNA, 16 nt, Human herpesvirus 6B
guucaccacugugaua

SEQ ID NO: 333495 - RNA, 20 nt, Human herpesvirus 6B
guucaccacugugauaugca

SEQ ID NO: 333496 - RNA, 13 nt, Human herpesvirus 6B
guucaccauucca

SEQ ID NO: 333497 - RNA, 14 nt, Human herpesvirus 6B
guucaccauuccag

SEQ ID NO: 333498 - RNA, 17 nt, Human herpesvirus 6B
guucagaauguuccaau

SEQ ID NO: 333499 - RNA, 14 nt, Human herpesvirus 6B
guucaucagccauu

SEQ ID NO: 333500 - RNA, 17 nt, Human herpesvirus 6B
guucaucagccauuucg

SEQ ID NO: 333501 - RNA, 22 nt, Human herpesvirus 6B
guucccaaccaguuaccgugau

SEQ ID NO: 333502 - RNA, 15 nt, Human herpesvirus 6B
guucucagauguaua

SEQ ID NO: 333503 - RNA, 14 nt, Human herpesvirus 6B
guucuuaacauauu

SEQ ID NO: 333504 - RNA, 14 nt, Human herpesvirus 6B
guucuuucacacaa

SEQ ID NO: 333505 - RNA, 16 nt, Human herpesvirus 6B
guucuuugaacaguga

SEQ ID NO: 333506 - RNA, 18 nt, Human herpesvirus 6B
guugaauugauaguacuu

SEQ ID NO: 333507 - RNA, 14 nt, Human herpesvirus 6B
guugaguaugcuuu

SEQ ID NO: 333508 - RNA, 13 nt, Human herpesvirus 6B
guugcuauagcag

SEQ ID NO: 333509 - RNA, 17 nt, Human herpesvirus 6B
guugcucguagccauau

SEQ ID NO: 333510 - RNA, 20 nt, Human herpesvirus 6B
guugucuuuguccuauguua

SEQ ID NO: 333511 - RNA, 11 nt, Human herpesvirus 6B
guugugaucaa

SEQ ID NO: 333512 - RNA, 15 nt, Human herpesvirus 6B
guugugauucuggga

SEQ ID NO: 333513 - RNA, 22 nt, Human herpesvirus 6B
guuguguuugaaacguugugcu

SEQ ID NO: 333514 - RNA, 20 nt, Human herpesvirus 6B
guuguuucaguuucaaauac

SEQ ID NO: 333515 - RNA, 17 nt, Human herpesvirus 6B
guuuacaaaacuguuaa

SEQ ID NO: 333516 - RNA, 15 nt, Human herpesvirus 6B
guuuacgaauucaau

SEQ ID NO: 333517 - RNA, 18 nt, Human herpesvirus 6B
guuuacgaauucaauguc

SEQ ID NO: 333518 - RNA, 20 nt, Human herpesvirus 6B
guuuauaugcaggugcugcu

SEQ ID NO: 333519 - RNA, 19 nt, Human herpesvirus 6B
guuuauugucaaauagcca

SEQ ID NO: 333520 - RNA, 19 nt, Human herpesvirus 6B
guuucaccauguccaggaa

SEQ ID NO: 333521 - RNA, 20 nt, Human herpesvirus 6B
guuucacuucuaguguuauu

SEQ ID NO: 333522 - RNA, 13 nt, Human herpesvirus 6B
guuucaguuucaa

SEQ ID NO: 333523 - RNA, 15 nt, Human herpesvirus 6B
guuuccgggcauguu

SEQ ID NO: 333524 - RNA, 12 nt, Human herpesvirus 6B
guuuccugcaac

SEQ ID NO: 333525 - RNA, 16 nt, Human herpesvirus 6B
guuucggcaacugaau

SEQ ID NO: 333526 - RNA, 21 nt, Human herpesvirus 6B
guuucuccgcacgcuagcaau

SEQ ID NO: 333527 - RNA, 19 nt, Human herpesvirus 6B
guuucugugaaucugcuga

SEQ ID NO: 333528 - RNA, 14 nt, Human herpesvirus 6B
guuuguacauguua

SEQ ID NO: 333529 - RNA, 18 nt, Human herpesvirus 6B
guuuuagggaugguggau

SEQ ID NO: 333530 - RNA, 15 nt, Human herpesvirus 6B
guuuucaaugugaau

SEQ ID NO: 333531 - RNA, 20 nt, Human herpesvirus 6B
guuuucuguaggcaacuuaa

SEQ ID NO: 333532 - RNA, 21 nt, Human herpesvirus 6B
guuuucuguaggcaacuuaag

SEQ ID NO: 333533 - RNA, 14 nt, Human herpesvirus 6B
guuuucuuacacau

SEQ ID NO: 333534 - RNA, 16 nt, Human herpesvirus 6B
guuuucuuaugcgucu

SEQ ID NO: 333535 - RNA, 15 nt, Human herpesvirus 6B
guuuugcaacuuaaa

SEQ ID NO: 333536 - RNA, 16 nt, Human herpesvirus 6B
guuuugguggacacca

SEQ ID NO: 333537 - RNA, 15 nt, Human herpesvirus 6B
guuuuugaugugcua

SEQ ID NO: 333538 - RNA, 20 nt, Human herpesvirus 6B
guuuuugauugcaaucacau

SEQ ID NO: 333539 - RNA, 20 nt, Human herpesvirus 6B
guuuuuuaggacauguggua

SEQ ID NO: 333540 - RNA, 21 nt, Human herpesvirus 6B
guuuuuucaccccccucuugc

SEQ ID NO: 333541 - RNA, 15 nt, Human herpesvirus 6B
guuuuuucugcaaaa

SEQ ID NO: 333542 - RNA, 15 nt, Human herpesvirus 6B
guuuuuugugcaaac

SEQ ID NO: 333543 - RNA, 15 nt, Human herpesvirus 6B
uaaaaaaagauuuau

SEQ ID NO: 333544 - RNA, 21 nt, Human herpesvirus 6B
uaaaaaaauaaaacaguauaa

SEQ ID NO: 333545 - RNA, 20 nt, Human herpesvirus 6B
uaaaaaagugcaugaugaac

SEQ ID NO: 333546 - RNA, 16 nt, Human herpesvirus 6B
uaaaaaauuuugucac

SEQ ID NO: 333547 - RNA, 13 nt, Human herpesvirus 6B
uaaaaacaccucu

SEQ ID NO: 333548 - RNA, 19 nt, Human herpesvirus 6B
uaaaaagcaaggugaaaca

SEQ ID NO: 333549 - RNA, 14 nt, Human herpesvirus 6B
uaaaaaucaucucg

SEQ ID NO: 333550 - RNA, 13 nt, Human herpesvirus 6B
uaaaaauucacug

SEQ ID NO: 333551 - RNA, 12 nt, Human herpesvirus 6B
uaaaacaagacc

SEQ ID NO: 333552 - RNA, 23 nt, Human herpesvirus 6B
uaaaacacgauccaauuacauca

SEQ ID NO: 333553 - RNA, 15 nt, Human herpesvirus 6B
uaaaacaucagauga

SEQ ID NO: 333554 - RNA, 16 nt, Human herpesvirus 6B
uaaaacaucagaugaa

SEQ ID NO: 333555 - RNA, 11 nt, Human herpesvirus 6B
uaaaacaugua

SEQ ID NO: 333556 - RNA, 20 nt, Human herpesvirus 6B
uacaacgacugggagaauaa

SEQ ID NO: 333557 - RNA, 17 nt, Human herpesvirus 6B
uacaagagugcacgaaa

SEQ ID NO: 333558 - RNA, 12 nt, Human herpesvirus 6B
uacaagcaugca

SEQ ID NO: 333559 - RNA, 16 nt, Human herpesvirus 6B
uacaagcaugcauugu

SEQ ID NO: 333560 - RNA, 17 nt, Human herpesvirus 6B
uacaauaguaacuucuc

SEQ ID NO: 333561 - RNA, 22 nt, Human herpesvirus 6B
uacaaucauguuuauugucaaa

SEQ ID NO: 333562 - RNA, 14 nt, Human herpesvirus 6B
uacaaugacuauca

SEQ ID NO: 333563 - RNA, 10 nt, Human herpesvirus 6B
uacaaugagu

SEQ ID NO: 333564 - RNA, 13 nt, Human herpesvirus 6B
uacacaauacaca

SEQ ID NO: 333565 - RNA, 22 nt, Human herpesvirus 6B
uacacaauccuaucacguuuga

SEQ ID NO: 333566 - RNA, 22 nt, Human herpesvirus 6B
uacacaguagaccgaguaucac

SEQ ID NO: 333567 - RNA, 17 nt, Human herpesvirus 6B
uacacgaaaaacauuuc

SEQ ID NO: 333568 - RNA, 22 nt, Human herpesvirus 6B
uacacgccgucuucaaccuguu

SEQ ID NO: 333569 - RNA, 16 nt, Human herpesvirus 6B
uacacucauuugcaau

SEQ ID NO: 333570 - RNA, 18 nt, Human herpesvirus 6B
uacacucauuugcaauug

SEQ ID NO: 333571 - RNA, 14 nt, Human herpesvirus 6B
uacagauacaaaga

SEQ ID NO: 333572 - RNA, 20 nt, Human herpesvirus 6B
uacagauccccuauauagcu

SEQ ID NO: 333573 - RNA, 13 nt, Human herpesvirus 6B
uacagauguguau

SEQ ID NO: 333574 - RNA, 15 nt, Human herpesvirus 6B
uacauauaaacagau

SEQ ID NO: 333575 - RNA, 15 nt, Human herpesvirus 6B
uacauauagucaaug

SEQ ID NO: 333576 - RNA, 20 nt, Human herpesvirus 6B
uacauauagucaauggugug

SEQ ID NO: 333577 - RNA, 18 nt, Human herpesvirus 6B
uacaucgauccaaaagau

SEQ ID NO: 333578 - RNA, 16 nt, Human herpesvirus 6B
uacaugaaaacauuca

SEQ ID NO: 333579 - RNA, 12 nt, Human herpesvirus 6B
uacaugccacag

SEQ ID NO: 333580 - RNA, 13 nt, Human herpesvirus 6B
uaccauguugcuu

SEQ ID NO: 333581 - RNA, 16 nt, Human herpesvirus 6B
uaccauuugacuccaa

SEQ ID NO: 333582 - RNA, 18 nt, Human herpesvirus 6B
uacccagcagcaaauaaa

SEQ ID NO: 333583 - RNA, 15 nt, Human herpesvirus 6B
uacccgauguucucu

SEQ ID NO: 333584 - RNA, 22 nt, Human herpesvirus 6B
uacccuuugcggugcauaacau

SEQ ID NO: 333585 - RNA, 14 nt, Human herpesvirus 6B
uaccgaccugacac

SEQ ID NO: 333586 - RNA, 21 nt, Human herpesvirus 6B
uaccgauaaauccgauagcca

SEQ ID NO: 333587 - RNA, 14 nt, Human herpesvirus 6B
uaccgaugcucuca

SEQ ID NO: 333588 - RNA, 13 nt, Human herpesvirus 6B
uaccuaauuccaa

SEQ ID NO: 333589 - RNA, 15 nt, Human herpesvirus 6B
uaccuaauuccaauu

SEQ ID NO: 333590 - RNA, 15 nt, Human herpesvirus 6B
uaccuagagauuaca

SEQ ID NO: 333591 - RNA, 21 nt, Human herpesvirus 6B
uaccuauuagcuauaaaaaca

SEQ ID NO: 333592 - RNA, 20 nt, Human herpesvirus 6B
uaccugaaaccgaaaguaua

SEQ ID NO: 333593 - RNA, 15 nt, Human herpesvirus 6B
uaccuuguaaucucu

SEQ ID NO: 333594 - RNA, 20 nt, Human herpesvirus 6B
uacgcaggauuauaaaaaca

SEQ ID NO: 333595 - RNA, 21 nt, Human herpesvirus 6B
uacgcuguguuuacauuugcc

SEQ ID NO: 333596 - RNA, 19 nt, Human herpesvirus 6B
uacggccagagacaugacc

SEQ ID NO: 333597 - RNA, 20 nt, Human herpesvirus 6B
uacguauaaaaguccucaaa

SEQ ID NO: 333598 - RNA, 21 nt, Human herpesvirus 6B
uacguuaguuuuuuguuucag

SEQ ID NO: 333599 - RNA, 14 nt, Human herpesvirus 6B
uacguucacauuac

SEQ ID NO: 333600 - RNA, 21 nt, Human herpesvirus 6B
uacuaaguuuugagugcuauu

SEQ ID NO: 333601 - RNA, 19 nt, Human herpesvirus 6B
uacuaccuauaaacccaga

SEQ ID NO: 333602 - RNA, 16 nt, Human herpesvirus 6B
uacuacgugucucagu

SEQ ID NO: 333603 - RNA, 19 nt, Human herpesvirus 6B
uacuauaacuuuucuauca

SEQ ID NO: 333604 - RNA, 15 nt, Human herpesvirus 6B
uacuauagacgccau

SEQ ID NO: 333605 - RNA, 22 nt, Human herpesvirus 6B
uacuauauauacaagccaugac

SEQ ID NO: 333606 - RNA, 14 nt, Human herpesvirus 6B
uacucauacagauc

SEQ ID NO: 333607 - RNA, 17 nt, Human herpesvirus 6B
uacucggucuacugugu

SEQ ID NO: 333608 - RNA, 21 nt, Human herpesvirus 6B
uacugagcaaagaaaugacuu

SEQ ID NO: 333609 - RNA, 19 nt, Human herpesvirus 6B
uacuuaauaacuacacuua

SEQ ID NO: 333610 - RNA, 13 nt, Human herpesvirus 6B
uacuuacaacuga

SEQ ID NO: 333611 - RNA, 17 nt, Human herpesvirus 6B
uacuuacaucgauccaa

SEQ ID NO: 333612 - RNA, 19 nt, Human herpesvirus 6B
uacuuacaucgauccaaaa

SEQ ID NO: 333613 - RNA, 15 nt, Human herpesvirus 6B
uacuuacguguguau

SEQ ID NO: 333614 - RNA, 22 nt, Human herpesvirus 6B
uacuuacuugagugauggaguu

SEQ ID NO: 333615 - RNA, 13 nt, Human herpesvirus 6B
uacuucauuuugc

SEQ ID NO: 333616 - RNA, 14 nt, Human herpesvirus 6B
uacuuuuaaaauac

SEQ ID NO: 333617 - RNA, 15 nt, Human herpesvirus 6B
uagaaaaaagugcaa

SEQ ID NO: 333618 - RNA, 23 nt, Human herpesvirus 6B
uagaaaacauuccggauauuuca

SEQ ID NO: 333619 - RNA, 14 nt, Human herpesvirus 6B
uagaaaacucgcca

SEQ ID NO: 333620 - RNA, 14 nt, Human herpesvirus 6B
uagaagcuuucaaa

SEQ ID NO: 333621 - RNA, 20 nt, Human herpesvirus 6B
uagaauaauuauggacaacg

SEQ ID NO: 333622 - RNA, 18 nt, Human herpesvirus 6B
uagaauguggagcaguga

SEQ ID NO: 333623 - RNA, 18 nt, Human herpesvirus 6B
uagaauuacuaugugaca

SEQ ID NO: 333624 - RNA, 14 nt, Human herpesvirus 6B
uagaccaaccagca

SEQ ID NO: 333625 - RNA, 16 nt, Human herpesvirus 6B
uagaccgaguaucacg

SEQ ID NO: 333626 - RNA, 17 nt, Human herpesvirus 6B
uagacuaaacuuaacuu

SEQ ID NO: 333627 - RNA, 18 nt, Human herpesvirus 6B
uagacuaaacuuaacuua

SEQ ID NO: 333628 - RNA, 20 nt, Human herpesvirus 6B
uagagaaauuggacguugau

SEQ ID NO: 333629 - RNA, 18 nt, Human herpesvirus 6B
uagagugacaucuuuuau

SEQ ID NO: 333630 - RNA, 16 nt, Human herpesvirus 6B
uagauaagagaguuuc

SEQ ID NO: 333631 - RNA, 22 nt, Human herpesvirus 6B
uagaucugccaugggauaugaa

SEQ ID NO: 333632 - RNA, 16 nt, Human herpesvirus 6B
uagaugaucagcauuc

SEQ ID NO: 333633 - RNA, 18 nt, Human herpesvirus 6B
uagaugcuuaacuuacuu

SEQ ID NO: 333634 - RNA, 21 nt, Human herpesvirus 6B
uagaugcuuaacuuacuuaau

SEQ ID NO: 333635 - RNA, 19 nt, Human herpesvirus 6B
uagauggguaagugccuau

SEQ ID NO: 333636 - RNA, 23 nt, Human herpesvirus 6B
uagauguaacucaucaacguaag

SEQ ID NO: 333637 - RNA, 15 nt, Human herpesvirus 6B
uagauucgagccaaa

SEQ ID NO: 333638 - RNA, 18 nt, Human herpesvirus 6B
uagauucggaaaccauag

SEQ ID NO: 333639 - RNA, 22 nt, Human herpesvirus 6B
uagauuuauuagccgugauguu

SEQ ID NO: 333640 - RNA, 23 nt, Human herpesvirus 6B
uagauuuguccguauacagcuaa

SEQ ID NO: 333641 - RNA, 15 nt, Human herpesvirus 6B
uagcacacgacaaau

SEQ ID NO: 333642 - RNA, 22 nt, Human herpesvirus 6B
uagcacgaaccaaaaugacucu

SEQ ID NO: 333643 - RNA, 14 nt, Human herpesvirus 6B
uagcagauccaugg

SEQ ID NO: 333644 - RNA, 19 nt, Human herpesvirus 6B
uagcagcgcccgaugccaa

SEQ ID NO: 333645 - RNA, 17 nt, Human herpesvirus 6B
uagcagcucugcaauuu

SEQ ID NO: 333646 - RNA, 18 nt, Human herpesvirus 6B
uagcaugggugaguguau

SEQ ID NO: 333647 - RNA, 18 nt, Human herpesvirus 6B
uagccagggcauucacaa

SEQ ID NO: 333648 - RNA, 21 nt, Human herpesvirus 6B
uagcccuucaccgucucugaa

SEQ ID NO: 333649 - RNA, 19 nt, Human herpesvirus 6B
uagcgauuaguuugugcag

SEQ ID NO: 333650 - RNA, 22 nt, Human herpesvirus 6B
uagcguacgagucgacaaauua

SEQ ID NO: 333651 - RNA, 16 nt, Human herpesvirus 6B
uagcuauccauuuuau

SEQ ID NO: 333652 - RNA, 22 nt, Human herpesvirus 6B
uagcuccuaaauaccauuuuau

SEQ ID NO: 333653 - RNA, 15 nt, Human herpesvirus 6B
uagcucuaaugcuag

SEQ ID NO: 333654 - RNA, 23 nt, Human herpesvirus 6B
uagcucuaaugcuagauaacuca

SEQ ID NO: 333655 - RNA, 11 nt, Human herpesvirus 6B
uagcuuuucau

SEQ ID NO: 333656 - RNA, 14 nt, Human herpesvirus 6B
uaggaaacuuucaa

SEQ ID NO: 333657 - RNA, 17 nt, Human herpesvirus 6B
uaggaaaugaugauuaa

SEQ ID NO: 333658 - RNA, 17 nt, Human herpesvirus 6B
uaggaucgaacucuucg

SEQ ID NO: 333659 - RNA, 23 nt, Human herpesvirus 6B
uaggccuacggcgccacaaaaca

SEQ ID NO: 333660 - RNA, 19 nt, Human herpesvirus 6B
uagggucaacuguuacuuu

SEQ ID NO: 333661 - RNA, 18 nt, Human herpesvirus 6B
uaggguuaggguuagggu

SEQ ID NO: 333662 - RNA, 20 nt, Human herpesvirus 6B
uagguaaaauggcugugcua

SEQ ID NO: 333663 - RNA, 13 nt, Human herpesvirus 6B
uaggugauuucaa

SEQ ID NO: 333664 - RNA, 16 nt, Human herpesvirus 6B
uaguaauaauagguua

SEQ ID NO: 333665 - RNA, 18 nt, Human herpesvirus 6B
uagugauuauggugccuc

SEQ ID NO: 333666 - RNA, 21 nt, Human herpesvirus 6B
uagugcucaagcgaagucaug

SEQ ID NO: 333667 - RNA, 23 nt, Human herpesvirus 6B
uauaaaaaaaacuaaaacaucag

SEQ ID NO: 333668 - RNA, 18 nt, Human herpesvirus 6B
uauaaaaacacacaucau

SEQ ID NO: 333669 - RNA, 12 nt, Human herpesvirus 6B
ucaacugcuagu

SEQ ID NO: 333670 - RNA, 10 nt, Human herpesvirus 6B
ucaagaaugg

SEQ ID NO: 333671 - RNA, 23 nt, Human herpesvirus 6B
ucaagauuguguuucugucuuua

SEQ ID NO: 333672 - RNA, 15 nt, Human herpesvirus 6B
ucaagcaaguuccau

SEQ ID NO: 333673 - RNA, 19 nt, Human herpesvirus 6B
ucaagcacaaaaccaggaa

SEQ ID NO: 333674 - RNA, 22 nt, Human herpesvirus 6B
ucaauagaugaucagcauucac

SEQ ID NO: 333675 - RNA, 17 nt, Human herpesvirus 6B
ucaauaucaccuuacaa

SEQ ID NO: 333676 - RNA, 14 nt, Human herpesvirus 6B
ucaauauucaugcg

SEQ ID NO: 333677 - RNA, 17 nt, Human herpesvirus 6B
ucaaugcggguacuaua

SEQ ID NO: 333678 - RNA, 13 nt, Human herpesvirus 6B
ucaaugugaaucg

SEQ ID NO: 333679 - RNA, 14 nt, Human herpesvirus 6B
ucaauuucuaaaga

SEQ ID NO: 333680 - RNA, 12 nt, Human herpesvirus 6B
ucacaaacuguc

SEQ ID NO: 333681 - RNA, 14 nt, Human herpesvirus 6B
ucacaaacugucac

SEQ ID NO: 333682 - RNA, 16 nt, Human herpesvirus 6B
ucacaaacugucacuu

SEQ ID NO: 333683 - RNA, 18 nt, Human herpesvirus 6B
ucacaaacugucacuuuc

SEQ ID NO: 333684 - RNA, 20 nt, Human herpesvirus 6B
ucacaaaguuuaaguucuca

SEQ ID NO: 333685 - RNA, 15 nt, Human herpesvirus 6B
ucacaaaucuguaag

SEQ ID NO: 333686 - RNA, 17 nt, Human herpesvirus 6B
ucacaaaucuguaagau

SEQ ID NO: 333687 - RNA, 16 nt, Human herpesvirus 6B
ucacaauacacagaaa

SEQ ID NO: 333688 - RNA, 14 nt, Human herpesvirus 6B
ucacacgcauagau

SEQ ID NO: 333689 - RNA, 19 nt, Human herpesvirus 6B
ucacagccuugauaaucug

SEQ ID NO: 333690 - RNA, 15 nt, Human herpesvirus 6B
ucacaugccaugcaa

SEQ ID NO: 333691 - RNA, 20 nt, Human herpesvirus 6B
ucacauuaccucugcaauag

SEQ ID NO: 333692 - RNA, 21 nt, Human herpesvirus 6B
ucacauuguuccgaauucuua

SEQ ID NO: 333693 - RNA, 16 nt, Human herpesvirus 6B
ucaccaacauucggaa

SEQ ID NO: 333694 - RNA, 18 nt, Human herpesvirus 6B
ucaccaagaaaaaacaca

SEQ ID NO: 333695 - RNA, 15 nt, Human herpesvirus 6B
ucaccacugugauau

SEQ ID NO: 333696 - RNA, 19 nt, Human herpesvirus 6B
ucaccacugugauaugcaa

SEQ ID NO: 333697 - RNA, 13 nt, Human herpesvirus 6B
ucaccauuacucu

SEQ ID NO: 333698 - RNA, 20 nt, Human herpesvirus 6B
ucaccauuacucuguguuga

SEQ ID NO: 333699 - RNA, 11 nt, Human herpesvirus 6B
ucaccauucca

SEQ ID NO: 333700 - RNA, 15 nt, Human herpesvirus 6B
ucacccccauacaca

SEQ ID NO: 333701 - RNA, 19 nt, Human herpesvirus 6B
ucaccccccucuugcagug

SEQ ID NO: 333702 - RNA, 19 nt, Human herpesvirus 6B
ucacccgacaugcuucaca

SEQ ID NO: 333703 - RNA, 22 nt, Human herpesvirus 6B
ucaccgucucugaagcaaaagu

SEQ ID NO: 333704 - RNA, 15 nt, Human herpesvirus 6B
ucaccuguauagauu

SEQ ID NO: 333705 - RNA, 17 nt, Human herpesvirus 6B
ucacgagaucugcucau

SEQ ID NO: 333706 - RNA, 17 nt, Human herpesvirus 6B
ucacguauaccauuccc

SEQ ID NO: 333707 - RNA, 15 nt, Human herpesvirus 6B
ucacgucccauucac

SEQ ID NO: 333708 - RNA, 12 nt, Human herpesvirus 6B
ucacuaacuuca

SEQ ID NO: 333709 - RNA, 22 nt, Human herpesvirus 6B
ucacuuuuugaagagcgagauc

SEQ ID NO: 333710 - RNA, 21 nt, Human herpesvirus 6B
ucagaaccaucuuuucaauua

SEQ ID NO: 333711 - RNA, 20 nt, Human herpesvirus 6B
ucagacaaauggaaacugga

SEQ ID NO: 333712 - RNA, 21 nt, Human herpesvirus 6B
ucagacagguaagcagcaaaa

SEQ ID NO: 333713 - RNA, 21 nt, Human herpesvirus 6B
ucagagaaguggaacugcuug

SEQ ID NO: 333714 - RNA, 19 nt, Human herpesvirus 6B
ucagagcgggcuauaauca

SEQ ID NO: 333715 - RNA, 14 nt, Human herpesvirus 6B
ucagaucaucgcca

SEQ ID NO: 333716 - RNA, 17 nt, Human herpesvirus 6B
ucagcacccucugcaag

SEQ ID NO: 333717 - RNA, 12 nt, Human herpesvirus 6B
ucagcauucacu

SEQ ID NO: 333718 - RNA, 17 nt, Human herpesvirus 6B
ucagcccccagcugaaa

SEQ ID NO: 333719 - RNA, 23 nt, Human herpesvirus 6B
ucagcuugagagcgggcacacgu

SEQ ID NO: 333720 - RNA, 20 nt, Human herpesvirus 6B
ucaggaacagaaacuuggag

SEQ ID NO: 333721 - RNA, 23 nt, Human herpesvirus 6B
ucaggaaguucuucaaaaaaaga

SEQ ID NO: 333722 - RNA, 22 nt, Human herpesvirus 6B
ucaggugucucaaccuucauua

SEQ ID NO: 333723 - RNA, 20 nt, Human herpesvirus 6B
ucaguaugucucaguucaaa

SEQ ID NO: 333724 - RNA, 13 nt, Human herpesvirus 6B
ucagucaaaaucu

SEQ ID NO: 333725 - RNA, 10 nt, Human herpesvirus 6B
ucagucaaug

SEQ ID NO: 333726 - RNA, 23 nt, Human herpesvirus 6B
ucaguguucuggcuugucauucu

SEQ ID NO: 333727 - RNA, 16 nt, Human herpesvirus 6B
ucauaaacaaaccgcc

SEQ ID NO: 333728 - RNA, 15 nt, Human herpesvirus 6B
ucauaacguacauaa

SEQ ID NO: 333729 - RNA, 18 nt, Human herpesvirus 6B
ucauaagcucuacacaga

SEQ ID NO: 333730 - RNA, 13 nt, Human herpesvirus 6B
ucauacauccaga

SEQ ID NO: 333731 - RNA, 16 nt, Human herpesvirus 6B
ucauacccgauguucu

SEQ ID NO: 333732 - RNA, 18 nt, Human herpesvirus 6B
ucauacccgauguucucu

SEQ ID NO: 333733 - RNA, 20 nt, Human herpesvirus 6B
ucauacccgauguucucuca

SEQ ID NO: 333734 - RNA, 23 nt, Human herpesvirus 6B
ucauacccgauguucucucacgc

SEQ ID NO: 333735 - RNA, 22 nt, Human herpesvirus 6B
ucauaggaaguaaauacaauag

SEQ ID NO: 333736 - RNA, 19 nt, Human herpesvirus 6B
ucauaguuaugcgucuguu

SEQ ID NO: 333737 - RNA, 16 nt, Human herpesvirus 6B
ucauaugaaaagcugg

SEQ ID NO: 333738 - RNA, 15 nt, Human herpesvirus 6B
ucaucagccauuucg

SEQ ID NO: 333739 - RNA, 19 nt, Human herpesvirus 6B
ucaucaucaccaagucuaa

SEQ ID NO: 333740 - RNA, 15 nt, Human herpesvirus 6B
ucauccucagucuuc

SEQ ID NO: 333741 - RNA, 23 nt, Human herpesvirus 6B
ucaucuuugggaagucucuaguu

SEQ ID NO: 333742 - RNA, 17 nt, Human herpesvirus 6B
ucaugagauacaaaaca

SEQ ID NO: 333743 - RNA, 16 nt, Human herpesvirus 6B
ucaugaucugcuugau

SEQ ID NO: 333744 - RNA, 13 nt, Human herpesvirus 6B
ucaugauugcaac

SEQ ID NO: 333745 - RNA, 14 nt, Human herpesvirus 6B
ucaugauugcaaca

SEQ ID NO: 333746 - RNA, 16 nt, Human herpesvirus 6B
ucaugucuuacagcuu

SEQ ID NO: 333747 - RNA, 17 nt, Human herpesvirus 6B
ucaugucuuacagcuug

SEQ ID NO: 333748 - RNA, 14 nt, Human herpesvirus 6B
ucaugugugccuac

SEQ ID NO: 333749 - RNA, 16 nt, Human herpesvirus 6B
ucauguuuauugucaa

SEQ ID NO: 333750 - RNA, 20 nt, Human herpesvirus 6B
ucauuaaaacucccagcauu

SEQ ID NO: 333751 - RNA, 20 nt, Human herpesvirus 6B
ucauuaacauacagaugugu

SEQ ID NO: 333752 - RNA, 18 nt, Human herpesvirus 6B
ucauucgauuaaugccac

SEQ ID NO: 333753 - RNA, 19 nt, Human herpesvirus 6B
ucauucgauuaaugccaca

SEQ ID NO: 333754 - RNA, 23 nt, Human herpesvirus 6B
ucauuggcaucauaauacuagac

SEQ ID NO: 333755 - RNA, 20 nt, Human herpesvirus 6B
ucauuuacaaaacaaauauc

SEQ ID NO: 333756 - RNA, 14 nt, Human herpesvirus 6B
ucauuucaaauaca

SEQ ID NO: 333757 - RNA, 15 nt, Human herpesvirus 6B
ucauuucaaauacac

SEQ ID NO: 333758 - RNA, 18 nt, Human herpesvirus 6B
ucauuucaaauacaccuc

SEQ ID NO: 333759 - RNA, 20 nt, Human herpesvirus 6B
ucauuucaaauacaccucac

SEQ ID NO: 333760 - RNA, 12 nt, Human herpesvirus 6B
ucauuugcaauu

SEQ ID NO: 333761 - RNA, 22 nt, Human herpesvirus 6B
uccaaauacacuuucauaggaa

SEQ ID NO: 333762 - RNA, 23 nt, Human herpesvirus 6B
uccaacgcacaugcuaacuaaau

SEQ ID NO: 333763 - RNA, 18 nt, Human herpesvirus 6B
uccaaggauuaugaucau

SEQ ID NO: 333764 - RNA, 17 nt, Human herpesvirus 6B
uccaagucacguacaua

SEQ ID NO: 333765 - RNA, 21 nt, Human herpesvirus 6B
uccaaguuagaaauuacacau

SEQ ID NO: 333766 - RNA, 19 nt, Human herpesvirus 6B
uccaauaagaaacauuaua

SEQ ID NO: 333767 - RNA, 16 nt, Human herpesvirus 6B
uccaauagaacauccc

SEQ ID NO: 333768 - RNA, 22 nt, Human herpesvirus 6B
uccaauggccuuucuguuuuaa

SEQ ID NO: 333769 - RNA, 13 nt, Human herpesvirus 6B
uccaauuacauca

SEQ ID NO: 333770 - RNA, 14 nt, Human herpesvirus 6B
uccaauuacucaac

SEQ ID NO: 333771 - RNA, 20 nt, Human herpesvirus 6B
uccaauuacucaacauuaaa

SEQ ID NO: 333772 - RNA, 21 nt, Human herpesvirus 6B
uccaauuuaauauaucuugaa

SEQ ID NO: 333773 - RNA, 19 nt, Human herpesvirus 6B
uccacacuguuuacuuaaa

SEQ ID NO: 333774 - RNA, 17 nt, Human herpesvirus 6B
uccacccacgugugauu

SEQ ID NO: 333775 - RNA, 13 nt, Human herpesvirus 6B
uccacccaucucc

SEQ ID NO: 333776 - RNA, 19 nt, Human herpesvirus 6B
uccaccuggaaaaacugac

SEQ ID NO: 333777 - RNA, 20 nt, Human herpesvirus 6B
uccaccuggaaaaacugacu

SEQ ID NO: 333778 - RNA, 17 nt, Human herpesvirus 6B
uccacgccccuccgucc

SEQ ID NO: 333779 - RNA, 20 nt, Human herpesvirus 6B
uccacgugcuugucugacaa

SEQ ID NO: 333780 - RNA, 15 nt, Human herpesvirus 6B
uccacugcauuucau

SEQ ID NO: 333781 - RNA, 17 nt, Human herpesvirus 6B
uccagaaaagcaaacau

SEQ ID NO: 333782 - RNA, 22 nt, Human herpesvirus 6B
ucuagcgaucauaaaacugcca

SEQ ID NO: 333783 - RNA, 23 nt, Human herpesvirus 6B
ucuagguacggcgucacacagca

SEQ ID NO: 333784 - RNA, 12 nt, Human herpesvirus 6B
ucuaucacuuau

SEQ ID NO: 333785 - RNA, 20 nt, Human herpesvirus 6B
ucuaugcagcgccagcauuc

SEQ ID NO: 333786 - RNA, 12 nt, Human herpesvirus 6B
ucuauguauuau

SEQ ID NO: 333787 - RNA, 21 nt, Human herpesvirus 6B
ucuauuagauaagagaguuuc

SEQ ID NO: 333788 - RNA, 23 nt, Human herpesvirus 6B
ucuauuauguaaaaccucagcaa

SEQ ID NO: 333789 - RNA, 21 nt, Human herpesvirus 6B
ucuauuguuuaaaaggaauag

SEQ ID NO: 333790 - RNA, 21 nt, Human herpesvirus 6B
ucucaaauuuuccaaacauua

SEQ ID NO: 333791 - RNA, 14 nt, Human herpesvirus 6B
ucucaagcacaaaa

SEQ ID NO: 333792 - RNA, 21 nt, Human herpesvirus 6B
ucucaagcacaaaaccaggaa

SEQ ID NO: 333793 - RNA, 12 nt, Human herpesvirus 6B
ucucagauauau

SEQ ID NO: 333794 - RNA, 15 nt, Human herpesvirus 6B
ucucauaugcaucag

SEQ ID NO: 333795 - RNA, 15 nt, Human herpesvirus 6B
ucuccacccaucucc

SEQ ID NO: 333796 - RNA, 16 nt, Human herpesvirus 6B
ucuccacccaucuccu

SEQ ID NO: 333797 - RNA, 20 nt, Human herpesvirus 6B
ucucccuacgcuaacgaaca

SEQ ID NO: 333798 - RNA, 13 nt, Human herpesvirus 6B
ucuccgcauguau

SEQ ID NO: 333799 - RNA, 18 nt, Human herpesvirus 6B
ucuccgcccuccugggua

SEQ ID NO: 333800 - RNA, 12 nt, Human herpesvirus 6B
ucuccgucucag

SEQ ID NO: 333801 - RNA, 23 nt, Human herpesvirus 6B
ucuccguuacccgggagcuucac

SEQ ID NO: 333802 - RNA, 13 nt, Human herpesvirus 6B
ucuccugaucuca

SEQ ID NO: 333803 - RNA, 20 nt, Human herpesvirus 6B
ucuccugucauuuuuacuca

SEQ ID NO: 333804 - RNA, 13 nt, Human herpesvirus 6B
ucucgaaaaagac

SEQ ID NO: 333805 - RNA, 15 nt, Human herpesvirus 6B
ucucgaaaaagacaa

SEQ ID NO: 333806 - RNA, 23 nt, Human herpesvirus 6B
ucucuaauccguuagucuacgca

SEQ ID NO: 333807 - RNA, 15 nt, Human herpesvirus 6B
ucucuacaucgauga

SEQ ID NO: 333808 - RNA, 13 nt, Human herpesvirus 6B
ucucugaagcaaa

SEQ ID NO: 333809 - RNA, 20 nt, Human herpesvirus 6B
ucucugaagcaaaagucuua

SEQ ID NO: 333810 - RNA, 22 nt, Human herpesvirus 6B
ucucugcaugucuuuagaugga

SEQ ID NO: 333811 - RNA, 14 nt, Human herpesvirus 6B
ucucuggggagcuu

SEQ ID NO: 333812 - RNA, 21 nt, Human herpesvirus 6B
ucucuguguguguugugcgcu

SEQ ID NO: 333813 - RNA, 22 nt, Human herpesvirus 6B
ucucuguuuugagagcuacaca

SEQ ID NO: 333814 - RNA, 20 nt, Human herpesvirus 6B
ucucuucccacaaaccauca

SEQ ID NO: 333815 - RNA, 20 nt, Human herpesvirus 6B
ucucuuuauagagcaauuca

SEQ ID NO: 333816 - RNA, 16 nt, Human herpesvirus 6B
ucugaaagucucuguc

SEQ ID NO: 333817 - RNA, 14 nt, Human herpesvirus 6B
ucugacucgugcca

SEQ ID NO: 333818 - RNA, 11 nt, Human herpesvirus 6B
ucugagauuug

SEQ ID NO: 333819 - RNA, 17 nt, Human herpesvirus 6B
ucugagauuugagaaag

SEQ ID NO: 333820 - RNA, 19 nt, Human herpesvirus 6B
ucugagauuuuucugggau

SEQ ID NO: 333821 - RNA, 17 nt, Human herpesvirus 6B
ucugagcucuccugggu

SEQ ID NO: 333822 - RNA, 13 nt, Human herpesvirus 6B
ucugcaagcucau

SEQ ID NO: 333823 - RNA, 18 nt, Human herpesvirus 6B
ucugccccccuucaucca

SEQ ID NO: 333824 - RNA, 19 nt, Human herpesvirus 6B
ucugccccccuucauccag

SEQ ID NO: 333825 - RNA, 13 nt, Human herpesvirus 6B
ucugccuguucaa

SEQ ID NO: 333826 - RNA, 22 nt, Human herpesvirus 6B
ucugcguuguuucaguuucaaa

SEQ ID NO: 333827 - RNA, 17 nt, Human herpesvirus 6B
ucugcuugcaaauauua

SEQ ID NO: 333828 - RNA, 21 nt, Human herpesvirus 6B
ucugcuuuacaucgaaucuca

SEQ ID NO: 333829 - RNA, 16 nt, Human herpesvirus 6B
ucuggauacugaugaa

SEQ ID NO: 333830 - RNA, 20 nt, Human herpesvirus 6B
ucuggccucggaacugcugg

SEQ ID NO: 333831 - RNA, 14 nt, Human herpesvirus 6B
ucuggugaauguuu

SEQ ID NO: 333832 - RNA, 16 nt, Human herpesvirus 6B
ucuguaggcaacuuaa

SEQ ID NO: 333833 - RNA, 17 nt, Human herpesvirus 6B
ucuguaggcaacuuaag

SEQ ID NO: 333834 - RNA, 16 nt, Human herpesvirus 6B
ucuguaugaauccaga

SEQ ID NO: 333835 - RNA, 20 nt, Human herpesvirus 6B
ucuguauuuuucuuuacaga

SEQ ID NO: 333836 - RNA, 17 nt, Human herpesvirus 6B
ucugugaagaggugcaa

SEQ ID NO: 333837 - RNA, 20 nt, Human herpesvirus 6B
ucugugaauucuaaauauca

SEQ ID NO: 333838 - RNA, 21 nt, Human herpesvirus 6B
ucugugcgucuauuagauaag

SEQ ID NO: 333839 - RNA, 14 nt, Human herpesvirus 6B
ucuguguauuguga

SEQ ID NO: 333840 - RNA, 19 nt, Human herpesvirus 6B
ucuuaaagcgugugauuca

SEQ ID NO: 333841 - RNA, 12 nt, Human herpesvirus 6B
ucuuaacauauu

SEQ ID NO: 333842 - RNA, 15 nt, Human herpesvirus 6B
ucuuagaagcauuug

SEQ ID NO: 333843 - RNA, 14 nt, Human herpesvirus 6B
ucuuauaacaccag

SEQ ID NO: 333844 - RNA, 22 nt, Human herpesvirus 6B
ucuuauaacaccaguacuucaa

SEQ ID NO: 333845 - RNA, 14 nt, Human herpesvirus 6B
ucuucaacauauca

SEQ ID NO: 333846 - RNA, 16 nt, Human herpesvirus 6B
ucuuccggaauuuuga

SEQ ID NO: 333847 - RNA, 20 nt, Human herpesvirus 6B
ucuucugcuaauucauaguu

SEQ ID NO: 333848 - RNA, 19 nt, Human herpesvirus 6B
ucuucuuugugcgucagcu

SEQ ID NO: 333849 - RNA, 22 nt, Human herpesvirus 6B
ucuugcagcugucuagauucua

SEQ ID NO: 333850 - RNA, 18 nt, Human herpesvirus 6B
ucuugguuuuauaagcuc

SEQ ID NO: 333851 - RNA, 21 nt, Human herpesvirus 6B
ucuuguguucuaacacauagu

SEQ ID NO: 333852 - RNA, 23 nt, Human herpesvirus 6B
ucuuuagauggaaaacugcagau

SEQ ID NO: 333853 - RNA, 19 nt, Human herpesvirus 6B
ucuuucaaaaugaccagag

SEQ ID NO: 333854 - RNA, 18 nt, Human herpesvirus 6B
ucuuugugcgucagcuuu

SEQ ID NO: 333855 - RNA, 17 nt, Human herpesvirus 6B
ucuuuuaguauuuacca

SEQ ID NO: 333856 - RNA, 16 nt, Human herpesvirus 6B
ugaaaaaacuuacuca

SEQ ID NO: 333857 - RNA, 15 nt, Human herpesvirus 6B
ugaaaagugcuuuau

SEQ ID NO: 333858 - RNA, 16 nt, Human herpesvirus 6B
ugaaaauaaacaguua

SEQ ID NO: 333859 - RNA, 14 nt, Human herpesvirus 6B
ugaaaauaaaggcu

SEQ ID NO: 333860 - RNA, 12 nt, Human herpesvirus 6B
ugaaaauaucau

SEQ ID NO: 333861 - RNA, 13 nt, Human herpesvirus 6B
ugaaacauaaaau

SEQ ID NO: 333862 - RNA, 15 nt, Human herpesvirus 6B
ugaaacguugugcug

SEQ ID NO: 333863 - RNA, 16 nt, Human herpesvirus 6B
ugaaacguugugcuga

SEQ ID NO: 333864 - RNA, 18 nt, Human herpesvirus 6B
ugaaacugagauguaaau

SEQ ID NO: 333865 - RNA, 20 nt, Human herpesvirus 6B
ugaaagaguuguauauggug

SEQ ID NO: 333866 - RNA, 10 nt, Human herpesvirus 6B
ugaaagcagu

SEQ ID NO: 333867 - RNA, 15 nt, Human herpesvirus 6B
ugaaagcgcgccaca

SEQ ID NO: 333868 - RNA, 19 nt, Human herpesvirus 6B
ugaaagucucugucuuccc

SEQ ID NO: 333869 - RNA, 17 nt, Human herpesvirus 6B
ugaacgacuuauuacaa

SEQ ID NO: 333870 - RNA, 18 nt, Human herpesvirus 6B
ugaacgcacuagacauca

SEQ ID NO: 333871 - RNA, 16 nt, Human herpesvirus 6B
ugaacgcagcguaaua

SEQ ID NO: 333872 - RNA, 17 nt, Human herpesvirus 6B
ugaacuaaauaaucaac

SEQ ID NO: 333873 - RNA, 17 nt, Human herpesvirus 6B
ugaacuacugagugcga

SEQ ID NO: 333874 - RNA, 17 nt, Human herpesvirus 6B
ugaagaauaaaagucca

SEQ ID NO: 333875 - RNA, 13 nt, Human herpesvirus 6B
ugaagaugugaua

SEQ ID NO: 333876 - RNA, 20 nt, Human herpesvirus 6B
ugaagaugugauacuauaaa

SEQ ID NO: 333877 - RNA, 14 nt, Human herpesvirus 6B
ugaagauguucaaa

SEQ ID NO: 333878 - RNA, 19 nt, Human herpesvirus 6B
ugaaggacuaucugagaca

SEQ ID NO: 333879 - RNA, 24 nt, Human herpesvirus 6B
ugaaggacuaucugagacagucaa

SEQ ID NO: 333880 - RNA, 13 nt, Human herpesvirus 6B
ugaagguaucaaa

SEQ ID NO: 333881 - RNA, 19 nt, Human herpesvirus 6B
ugaauacagcugcagggau

SEQ ID NO: 333882 - RNA, 13 nt, Human herpesvirus 6B
ugaaugaucacua

SEQ ID NO: 333883 - RNA, 15 nt, Human herpesvirus 6B
ugaauggaguaaauu

SEQ ID NO: 333884 - RNA, 14 nt, Human herpesvirus 6B
ugaauguaugagga

SEQ ID NO: 333885 - RNA, 11 nt, Human herpesvirus 6B
ugaaugugcuu

SEQ ID NO: 333886 - RNA, 23 nt, Human herpesvirus 6B
ugaauguuucugauuuguucuag

SEQ ID NO: 333887 - RNA, 19 nt, Human herpesvirus 6B
ugaauuccuggacauggug

SEQ ID NO: 333888 - RNA, 22 nt, Human herpesvirus 6B
ugaauuccuggacauggugaaa

SEQ ID NO: 333889 - RNA, 17 nt, Human herpesvirus 6B
ugaauugauaguacuua

SEQ ID NO: 333890 - RNA, 14 nt, Human herpesvirus 6B
ugaauuuaaugcaa

SEQ ID NO: 333891 - RNA, 15 nt, Human herpesvirus 6B
ugaauuuucugaaga

SEQ ID NO: 333892 - RNA, 16 nt, Human herpesvirus 6B
ugacaaaucugaaugu

SEQ ID NO: 333893 - RNA, 20 nt, Human herpesvirus 6B
ugacaagcuguccaucuuca

SEQ ID NO: 333894 - RNA, 12 nt, Human herpesvirus 6B
ugacacaaucag

SEQ ID NO: 333895 - RNA, 18 nt, Human herpesvirus 6B
ugcuuacuaaguuuugag

SEQ ID NO: 333896 - RNA, 20 nt, Human herpesvirus 6B
ugcuuauaagcaaaacucua

SEQ ID NO: 333897 - RNA, 16 nt, Human herpesvirus 6B
ugcuuaucaaauuaca

SEQ ID NO: 333898 - RNA, 21 nt, Human herpesvirus 6B
ugcuuucucuuuuuaauucca

SEQ ID NO: 333899 - RNA, 23 nt, Human herpesvirus 6B
uggaaaacaaggaacgauaugcu

SEQ ID NO: 333900 - RNA, 20 nt, Human herpesvirus 6B
uggaaaaccuuauacagaug

SEQ ID NO: 333901 - RNA, 17 nt, Human herpesvirus 6B
uggaaaacuaugugcau

SEQ ID NO: 333902 - RNA, 20 nt, Human herpesvirus 6B
uggaaacguguuugucugua

SEQ ID NO: 333903 - RNA, 21 nt, Human herpesvirus 6B
uggaaacguguuugucuguau

SEQ ID NO: 333904 - RNA, 18 nt, Human herpesvirus 6B
uggaaacuggagcuagag

SEQ ID NO: 333905 - RNA, 17 nt, Human herpesvirus 6B
uggaagcgaaucgcuua

SEQ ID NO: 333906 - RNA, 14 nt, Human herpesvirus 6B
uggaaucacaaccg

SEQ ID NO: 333907 - RNA, 17 nt, Human herpesvirus 6B
uggaauugggaagcaua

SEQ ID NO: 333908 - RNA, 21 nt, Human herpesvirus 6B
uggacaacgguguggagacac

SEQ ID NO: 333909 - RNA, 18 nt, Human herpesvirus 6B
uggacauuggacuuugcc

SEQ ID NO: 333910 - RNA, 22 nt, Human herpesvirus 6B
uggagaaucggauccaacucua

SEQ ID NO: 333911 - RNA, 23 nt, Human herpesvirus 6B
uggagacgaacgcggaaaaucaa

SEQ ID NO: 333912 - RNA, 16 nt, Human herpesvirus 6B
uggagauuugacuuug

SEQ ID NO: 333913 - RNA, 19 nt, Human herpesvirus 6B
uggauaaacaucgcuccau

SEQ ID NO: 333914 - RNA, 18 nt, Human herpesvirus 6B
uggauagagauauaauga

SEQ ID NO: 333915 - RNA, 21 nt, Human herpesvirus 6B
uggcacagguguacacuauga

SEQ ID NO: 333916 - RNA, 13 nt, Human herpesvirus 6B
uggcacucugaag

SEQ ID NO: 333917 - RNA, 13 nt, Human herpesvirus 6B
uggcauucuugca

SEQ ID NO: 333918 - RNA, 20 nt, Human herpesvirus 6B
uggccgaguuuagacagagu

SEQ ID NO: 333919 - RNA, 13 nt, Human herpesvirus 6B
uggcgccaaaaaa

SEQ ID NO: 333920 - RNA, 14 nt, Human herpesvirus 6B
uggcggagaaaguu

SEQ ID NO: 333921 - RNA, 23 nt, Human herpesvirus 6B
uggcuacguuuuuauacacgaac

SEQ ID NO: 333922 - RNA, 14 nt, Human herpesvirus 6B
uggcugagauucac

SEQ ID NO: 333923 - RNA, 18 nt, Human herpesvirus 6B
uggcugugcuaucugauu

SEQ ID NO: 333924 - RNA, 13 nt, Human herpesvirus 6B
ugggaaaucugac

SEQ ID NO: 333925 - RNA, 13 nt, Human herpesvirus 6B
ugggagaucugag

SEQ ID NO: 333926 - RNA, 13 nt, Human herpesvirus 6B
ugggagcucacug

SEQ ID NO: 333927 - RNA, 13 nt, Human herpesvirus 6B
ugggaggagccaa

SEQ ID NO: 333928 - RNA, 16 nt, Human herpesvirus 6B
ugggauggcagauugc

SEQ ID NO: 333929 - RNA, 17 nt, Human herpesvirus 6B
ugggauggcagauugca

SEQ ID NO: 333930 - RNA, 16 nt, Human herpesvirus 6B
ugggauguaaucaaug

SEQ ID NO: 333931 - RNA, 15 nt, Human herpesvirus 6B
ugggugaaaucgcau

SEQ ID NO: 333932 - RNA, 16 nt, Human herpesvirus 6B
ugguaggaaaugauga

SEQ ID NO: 333933 - RNA, 16 nt, Human herpesvirus 6B
uggucauuucauuugu

SEQ ID NO: 333934 - RNA, 15 nt, Human herpesvirus 6B
uggucguaaccauuc

SEQ ID NO: 333935 - RNA, 21 nt, Human herpesvirus 6B
uggucucucuuugcguccucu

SEQ ID NO: 333936 - RNA, 16 nt, Human herpesvirus 6B
uggucugcuugcaaau

SEQ ID NO: 333937 - RNA, 11 nt, Human herpesvirus 6B
ugguggauguu

SEQ ID NO: 333938 - RNA, 22 nt, Human herpesvirus 6B
ugguggauguuuuuacuugaug

SEQ ID NO: 333939 - RNA, 15 nt, Human herpesvirus 6B
ugguucaggauuugu

SEQ ID NO: 333940 - RNA, 15 nt, Human herpesvirus 6B
uguaaaaauucacug

SEQ ID NO: 333941 - RNA, 19 nt, Human herpesvirus 6B
uguaaacaaauucuuacaa

SEQ ID NO: 333942 - RNA, 14 nt, Human herpesvirus 6B
uguaacucuuuaua

SEQ ID NO: 333943 - RNA, 19 nt, Human herpesvirus 6B
uguaagauuaaaugugaac

SEQ ID NO: 333944 - RNA, 20 nt, Human herpesvirus 6B
uguaagauuaaaugugaaca

SEQ ID NO: 333945 - RNA, 23 nt, Human herpesvirus 6B
uguaaggacaaaggacaaaguuc

SEQ ID NO: 333946 - RNA, 16 nt, Human herpesvirus 6B
uguaaucaaugucaca

SEQ ID NO: 333947 - RNA, 23 nt, Human herpesvirus 6B
uguacaguuucucgaaaauacaa

SEQ ID NO: 333948 - RNA, 15 nt, Human herpesvirus 6B
uguacggagaguuua

SEQ ID NO: 333949 - RNA, 15 nt, Human herpesvirus 6B
uguagauaauuucca

SEQ ID NO: 333950 - RNA, 19 nt, Human herpesvirus 6B
uguagcucaguguuugcca

SEQ ID NO: 333951 - RNA, 16 nt, Human herpesvirus 6B
uguaugaacaggugcu

SEQ ID NO: 333952 - RNA, 22 nt, Human herpesvirus 6B
uguauggagauguuggauguua

SEQ ID NO: 333953 - RNA, 14 nt, Human herpesvirus 6B
uguauuuaacuuga

SEQ ID NO: 333954 - RNA, 15 nt, Human herpesvirus 6B
ugucaaagcuacuca

SEQ ID NO: 333955 - RNA, 16 nt, Human herpesvirus 6B
ugucaaggaaaacucu

SEQ ID NO: 333956 - RNA, 14 nt, Human herpesvirus 6B
ugucagucaaugca

SEQ ID NO: 333957 - RNA, 19 nt, Human herpesvirus 6B
ugucaguuuaauaguuugc

SEQ ID NO: 333958 - RNA, 14 nt, Human herpesvirus 6B
ugucauguuuacug

SEQ ID NO: 333959 - RNA, 23 nt, Human herpesvirus 6B
ugucauucugcauuuauaucaaa

SEQ ID NO: 333960 - RNA, 20 nt, Human herpesvirus 6B
ugucauucuuucuacauaaa

SEQ ID NO: 333961 - RNA, 23 nt, Human herpesvirus 6B
ugucauuuuuacucauacagauc

SEQ ID NO: 333962 - RNA, 19 nt, Human herpesvirus 6B
ugucauuuuuuaauccaua

SEQ ID NO: 333963 - RNA, 13 nt, Human herpesvirus 6B
uguccgugagaca

SEQ ID NO: 333964 - RNA, 21 nt, Human herpesvirus 6B
ugucgaacacgugggucagau

SEQ ID NO: 333965 - RNA, 16 nt, Human herpesvirus 6B
ugucgcacguguugaa

SEQ ID NO: 333966 - RNA, 21 nt, Human herpesvirus 6B
ugucggcgaugcguuugccau

SEQ ID NO: 333967 - RNA, 15 nt, Human herpesvirus 6B
ugucguuucugugaa

SEQ ID NO: 333968 - RNA, 14 nt, Human herpesvirus 6B
ugucuccucaugga

SEQ ID NO: 333969 - RNA, 15 nt, Human herpesvirus 6B
ugucuugcaaacagc

SEQ ID NO: 333970 - RNA, 13 nt, Human herpesvirus 6B
ugugaacaaguua

SEQ ID NO: 333971 - RNA, 18 nt, Human herpesvirus 6B
ugugaauauuaguauuag

SEQ ID NO: 333972 - RNA, 19 nt, Human herpesvirus 6B
ugugacacaauuucugacu

SEQ ID NO: 333973 - RNA, 21 nt, Human herpesvirus 6B
ugugacacaauuucugacucu

SEQ ID NO: 333974 - RNA, 22 nt, Human herpesvirus 6B
ugugacacaauuucugacucuc

SEQ ID NO: 333975 - RNA, 14 nt, Human herpesvirus 6B
ugugacgauagugu

SEQ ID NO: 333976 - RNA, 18 nt, Human herpesvirus 6B
ugugauacuauaaacaau

SEQ ID NO: 333977 - RNA, 15 nt, Human herpesvirus 6B
ugugaugccuugaug

SEQ ID NO: 333978 - RNA, 14 nt, Human herpesvirus 6B
ugugauuaugccaa

SEQ ID NO: 333979 - RNA, 23 nt, Human herpesvirus 6B
ugugauuccuucggggacaguga

SEQ ID NO: 333980 - RNA, 21 nt, Human herpesvirus 6B
ugugcaacacaacaaacaucc

SEQ ID NO: 333981 - RNA, 22 nt, Human herpesvirus 6B
ugugcagggugcuuugcuucag

SEQ ID NO: 333982 - RNA, 15 nt, Human herpesvirus 6B
ugugcaguucuuaca

SEQ ID NO: 333983 - RNA, 18 nt, Human herpesvirus 6B
ugugcgaauuguguugcu

SEQ ID NO: 333984 - RNA, 19 nt, Human herpesvirus 6B
ugugcugagcacuugucaa

SEQ ID NO: 333985 - RNA, 21 nt, Human herpesvirus 6B
ugugcuuaucaaauuacaauu

SEQ ID NO: 333986 - RNA, 14 nt, Human herpesvirus 6B
uguggaaaaacugu

SEQ ID NO: 333987 - RNA, 13 nt, Human herpesvirus 6B
uguggacaaugau

SEQ ID NO: 333988 - RNA, 13 nt, Human herpesvirus 6B
uguggagacaccu

SEQ ID NO: 333989 - RNA, 20 nt, Human herpesvirus 6B
uguggcagcaauccaaucaa

SEQ ID NO: 333990 - RNA, 16 nt, Human herpesvirus 6B
uguggcuauuugacaa

SEQ ID NO: 333991 - RNA, 22 nt, Human herpesvirus 6B
ugugggguguguauaugugcgc

SEQ ID NO: 333992 - RNA, 16 nt, Human herpesvirus 6B
uguguauuugugaaca

SEQ ID NO: 333993 - RNA, 22 nt, Human herpesvirus 6B
ugugugaaaguauuguacuuca

SEQ ID NO: 333994 - RNA, 16 nt, Human herpesvirus 6B
uguguucuaacacaua

SEQ ID NO: 333995 - RNA, 19 nt, Human herpesvirus 6B
uguguucuuacaauguucu

SEQ ID NO: 333996 - RNA, 13 nt, Human herpesvirus 6B
uguguugccgcgu

SEQ ID NO: 333997 - RNA, 16 nt, Human herpesvirus 6B
uguguuggucauuuca

SEQ ID NO: 333998 - RNA, 22 nt, Human herpesvirus 6B
uguguuugaaacguugugcuga

SEQ ID NO: 333999 - RNA, 22 nt, Human herpesvirus 6B
uguguuuguggacaaugauacu

SEQ ID NO: 334000 - RNA, 18 nt, Human herpesvirus 6B
uguuaaaagagaauacua

SEQ ID NO: 334001 - RNA, 19 nt, Human herpesvirus 6B
uguuaaaauaaaguuccaa

SEQ ID NO: 334002 - RNA, 22 nt, Human herpesvirus 6B
uguuaaaguauguauaauauaa

SEQ ID NO: 334003 - RNA, 14 nt, Human herpesvirus 6B
uguuaacauguaca

SEQ ID NO: 334004 - RNA, 21 nt, Human herpesvirus 6B
uguuauggggaagaucuauga

SEQ ID NO: 334005 - RNA, 21 nt, Human herpesvirus 6B
uguuauucucaauauucaugc

SEQ ID NO: 334006 - RNA, 22 nt, Human herpesvirus 6B
uguucaguguucuggcuuguca

SEQ ID NO: 334007 - RNA, 14 nt, Human herpesvirus 6B
uguucauagagcau

SEQ ID NO: 334008 - RNA, 22 nt, Human herpesvirus 6B
uuauuuugggugugacuuauau

SEQ ID NO: 334009 - RNA, 15 nt, Human herpesvirus 6B
uuauuuugucuucgu

SEQ ID NO: 334010 - RNA, 23 nt, Human herpesvirus 6B
uucaaaaagaaugggauugucau

SEQ ID NO: 334011 - RNA, 21 nt, Human herpesvirus 6B
uucaaaacugggcgaagaccu

SEQ ID NO: 334012 - RNA, 12 nt, Human herpesvirus 6B
uucaaagugaau

SEQ ID NO: 334013 - RNA, 17 nt, Human herpesvirus 6B
uucaaagugaauuccug

SEQ ID NO: 334014 - RNA, 15 nt, Human herpesvirus 6B
uucaaauacaccuca

SEQ ID NO: 334015 - RNA, 15 nt, Human herpesvirus 6B
uucaaauguagcaaa

SEQ ID NO: 334016 - RNA, 16 nt, Human herpesvirus 6B
uucaaauuuacucucc

SEQ ID NO: 334017 - RNA, 21 nt, Human herpesvirus 6B
uucaacgucuucaaauuuacu

SEQ ID NO: 334018 - RNA, 21 nt, Human herpesvirus 6B
uucaagaaugggaugcauuau

SEQ ID NO: 334019 - RNA, 22 nt, Human herpesvirus 6B
uucaauagaugaucagcauuca

SEQ ID NO: 334020 - RNA, 13 nt, Human herpesvirus 6B
uucaaugugaauc

SEQ ID NO: 334021 - RNA, 23 nt, Human herpesvirus 6B
uucacacaacuuaaccgcaaaaa

SEQ ID NO: 334022 - RNA, 16 nt, Human herpesvirus 6B
uucacaguguuuccaa

SEQ ID NO: 334023 - RNA, 23 nt, Human herpesvirus 6B
uucacauuaccucugcaauagca

SEQ ID NO: 334024 - RNA, 19 nt, Human herpesvirus 6B
uucaccacugugauaugca

SEQ ID NO: 334025 - RNA, 15 nt, Human herpesvirus 6B
uucaccauguccagg

SEQ ID NO: 334026 - RNA, 16 nt, Human herpesvirus 6B
uucaccgucucugaag

SEQ ID NO: 334027 - RNA, 22 nt, Human herpesvirus 6B
uucacuggaggcgaacuaagaa

SEQ ID NO: 334028 - RNA, 15 nt, Human herpesvirus 6B
uucagaauguuccaa

SEQ ID NO: 334029 - RNA, 17 nt, Human herpesvirus 6B
uucagccguagcgauaa

SEQ ID NO: 334030 - RNA, 14 nt, Human herpesvirus 6B
uucagcguauucag

SEQ ID NO: 334031 - RNA, 19 nt, Human herpesvirus 6B
uucaggaaguucuucaaaa

SEQ ID NO: 334032 - RNA, 16 nt, Human herpesvirus 6B
uucaggauuuguaaaa

SEQ ID NO: 334033 - RNA, 22 nt, Human herpesvirus 6B
uucagggggcgcggggacacau

SEQ ID NO: 334034 - RNA, 17 nt, Human herpesvirus 6B
uucagguugccaauaaa

SEQ ID NO: 334035 - RNA, 14 nt, Human herpesvirus 6B
uucaguaagauuua

SEQ ID NO: 334036 - RNA, 20 nt, Human herpesvirus 6B
uucagucucagcaaucacca

SEQ ID NO: 334037 - RNA, 19 nt, Human herpesvirus 6B
uucauaacgacaaaagaca

SEQ ID NO: 334038 - RNA, 17 nt, Human herpesvirus 6B
uucauacuguauggcaa

SEQ ID NO: 334039 - RNA, 16 nt, Human herpesvirus 6B
uucaucaaauccucua

SEQ ID NO: 334040 - RNA, 19 nt, Human herpesvirus 6B
uucaucagccauuucgcca

SEQ ID NO: 334041 - RNA, 16 nt, Human herpesvirus 6B
uucaucauuuacaaaa

SEQ ID NO: 334042 - RNA, 21 nt, Human herpesvirus 6B
uucauccaaauacacuuucau

SEQ ID NO: 334043 - RNA, 19 nt, Human herpesvirus 6B
uucaugauauuccaggcaa

SEQ ID NO: 334044 - RNA, 19 nt, Human herpesvirus 6B
uucauuaaaacucccagca

SEQ ID NO: 334045 - RNA, 15 nt, Human herpesvirus 6B
uucauuuguuccgau

SEQ ID NO: 334046 - RNA, 22 nt, Human herpesvirus 6B
uuccaaacuacggaaaaucuca

SEQ ID NO: 334047 - RNA, 20 nt, Human herpesvirus 6B
uuccagaauacgaacagaaa

SEQ ID NO: 334048 - RNA, 19 nt, Human herpesvirus 6B
uuccaggcaauaaucauua

SEQ ID NO: 334049 - RNA, 16 nt, Human herpesvirus 6B
uuccagggaacuugau

SEQ ID NO: 334050 - RNA, 20 nt, Human herpesvirus 6B
uuccagugagaacauauaaa

SEQ ID NO: 334051 - RNA, 19 nt, Human herpesvirus 6B
uuccauccgcuaagagauu

SEQ ID NO: 334052 - RNA, 13 nt, Human herpesvirus 6B
uuccauuguuuga

SEQ ID NO: 334053 - RNA, 16 nt, Human herpesvirus 6B
uucccacagauugcau

SEQ ID NO: 334054 - RNA, 14 nt, Human herpesvirus 6B
uucccuaucacaau

SEQ ID NO: 334055 - RNA, 13 nt, Human herpesvirus 6B
uuccugaacuaca

SEQ ID NO: 334056 - RNA, 21 nt, Human herpesvirus 6B
uuccuguccgugagacaccgc

SEQ ID NO: 334057 - RNA, 15 nt, Human herpesvirus 6B
uuccuucaaagugaa

SEQ ID NO: 334058 - RNA, 16 nt, Human herpesvirus 6B
uuccuuuuuguugacu

SEQ ID NO: 334059 - RNA, 21 nt, Human herpesvirus 6B
uucgaauaguuucaugauucu

SEQ ID NO: 334060 - RNA, 14 nt, Human herpesvirus 6B
uucgauugccaaag

SEQ ID NO: 334061 - RNA, 18 nt, Human herpesvirus 6B
uucgccaaaaauuuucga

SEQ ID NO: 334062 - RNA, 13 nt, Human herpesvirus 6B
uucgccauauaag

SEQ ID NO: 334063 - RNA, 16 nt, Human herpesvirus 6B
uucgccucucccgccg

SEQ ID NO: 334064 - RNA, 22 nt, Human herpesvirus 6B
uucggagaacucgcugauuugu

SEQ ID NO: 334065 - RNA, 23 nt, Human herpesvirus 6B
uucggauuuguucgauugccaaa

SEQ ID NO: 334066 - RNA, 13 nt, Human herpesvirus 6B
uucggcugcuuau

SEQ ID NO: 334067 - RNA, 14 nt, Human herpesvirus 6B
uucggggacaguga

SEQ ID NO: 334068 - RNA, 16 nt, Human herpesvirus 6B
uucgucugauacuuga

SEQ ID NO: 334069 - RNA, 17 nt, Human herpesvirus 6B
uucgucugauacuugaa

SEQ ID NO: 334070 - RNA, 19 nt, Human herpesvirus 6B
uucguguucgccauauaag

SEQ ID NO: 334071 - RNA, 22 nt, Human herpesvirus 6B
uucguugccggcuaaacuuuac

SEQ ID NO: 334072 - RNA, 14 nt, Human herpesvirus 6B
uucuaguguuauuc

SEQ ID NO: 334073 - RNA, 18 nt, Human herpesvirus 6B
uucuauguacugaucucu

SEQ ID NO: 334074 - RNA, 16 nt, Human herpesvirus 6B
uucuauguauuaucau

SEQ ID NO: 334075 - RNA, 18 nt, Human herpesvirus 6B
uucuauucguucagaaug

SEQ ID NO: 334076 - RNA, 19 nt, Human herpesvirus 6B
uucucgaaaauacaaugac

SEQ ID NO: 334077 - RNA, 14 nt, Human herpesvirus 6B
uucucggucuugcu

SEQ ID NO: 334078 - RNA, 15 nt, Human herpesvirus 6B
uucucuacaugccac

SEQ ID NO: 334079 - RNA, 20 nt, Human herpesvirus 6B
uucucucucaccugccuuca

SEQ ID NO: 334080 - RNA, 21 nt, Human herpesvirus 6B
uucucuggggagcuucagguu

SEQ ID NO: 334081 - RNA, 17 nt, Human herpesvirus 6B
uucucuuuuuaauucca

SEQ ID NO: 334082 - RNA, 18 nt, Human herpesvirus 6B
uucucuuuuuaauuccaa

SEQ ID NO: 334083 - RNA, 13 nt, Human herpesvirus 6B
uucugauggaaaa

SEQ ID NO: 334084 - RNA, 16 nt, Human herpesvirus 6B
uucugauuauuaucac

SEQ ID NO: 334085 - RNA, 13 nt, Human herpesvirus 6B
uucugcaaaacaa

SEQ ID NO: 334086 - RNA, 17 nt, Human herpesvirus 6B
uucugcucucgaugaaa

SEQ ID NO: 334087 - RNA, 18 nt, Human herpesvirus 6B
uucugguccguugucgaa

SEQ ID NO: 334088 - RNA, 17 nt, Human herpesvirus 6B
uucuguaggcaacuuaa

SEQ ID NO: 334089 - RNA, 20 nt, Human herpesvirus 6B
uucuuaaagcgugugauuca

SEQ ID NO: 334090 - RNA, 12 nt, Human herpesvirus 6B
uucuuaaggugc

SEQ ID NO: 334091 - RNA, 15 nt, Human herpesvirus 6B
uucuuaaggugcuuu

SEQ ID NO: 334092 - RNA, 18 nt, Human herpesvirus 6B
uucuuaccaagaaaucac

SEQ ID NO: 334093 - RNA, 20 nt, Human herpesvirus 6B
uucuuagaaccaaucuguga

SEQ ID NO: 334094 - RNA, 17 nt, Human herpesvirus 6B
uucuugaagaugugaua

SEQ ID NO: 334095 - RNA, 16 nt, Human herpesvirus 6B
uucuugcguucugcgu

SEQ ID NO: 334096 - RNA, 23 nt, Human herpesvirus 6B
uucuuucuacgguaggcagggaa

SEQ ID NO: 334097 - RNA, 17 nt, Human herpesvirus 6B
uucuuugaacagugaca

SEQ ID NO: 334098 - RNA, 14 nt, Human herpesvirus 6B
uucuuugacauuua

SEQ ID NO: 334099 - RNA, 21 nt, Human herpesvirus 6B
uucuuugacauuuaccagaga

SEQ ID NO: 334100 - RNA, 20 nt, Human herpesvirus 6B
uucuuuggagauugauucca

SEQ ID NO: 334101 - RNA, 18 nt, Human herpesvirus 6B
uucuuuuaguauuuacca

SEQ ID NO: 334102 - RNA, 14 nt, Human herpesvirus 6B
uucuuuuccuccuc

SEQ ID NO: 334103 - RNA, 16 nt, Human herpesvirus 6B
uugaaaaaaaacugcc

SEQ ID NO: 334104 - RNA, 12 nt, Human herpesvirus 6B
uugaaaaggugu

SEQ ID NO: 334105 - RNA, 19 nt, Human herpesvirus 6B
uugaaagaguuguauuuau

SEQ ID NO: 334106 - RNA, 15 nt, Human herpesvirus 6B
uugaaggaaaugugg

SEQ ID NO: 334107 - RNA, 13 nt, Human herpesvirus 6B
uugaagucuuucc

SEQ ID NO: 334108 - RNA, 21 nt, Human herpesvirus 6B
uugaaugaacgcacuagacau

SEQ ID NO: 334109 - RNA, 17 nt, Human herpesvirus 6B
uugacauagcaauucuu

SEQ ID NO: 334110 - RNA, 19 nt, Human herpesvirus 6B
uugacaugagcuaaaccau

SEQ ID NO: 334111 - RNA, 15 nt, Human herpesvirus 6B
uugacauugauucca

SEQ ID NO: 334112 - RNA, 20 nt, Human herpesvirus 6B
uugacgguucaccacuguga

SEQ ID NO: 334113 - RNA, 21 nt, Human herpesvirus 6B
uugacgguucaccacugugau

SEQ ID NO: 334114 - RNA, 16 nt, Human herpesvirus 6B
uugacuccaacgcaca

SEQ ID NO: 334115 - RNA, 14 nt, Human herpesvirus 6B
uugacugaucugua

SEQ ID NO: 334116 - RNA, 20 nt, Human herpesvirus 6B
uugaguuguauuuaacuuga

SEQ ID NO: 334117 - RNA, 15 nt, Human herpesvirus 6B
uugauacaaacguga

SEQ ID NO: 334118 - RNA, 18 nt, Human herpesvirus 6B
uugauagagaagcacgga

SEQ ID NO: 334119 - RNA, 11 nt, Human herpesvirus 6B
uugaugguguc

SEQ ID NO: 334120 - RNA, 20 nt, Human herpesvirus 6B
uugauguagacgugcugucu

SEQ ID NO: 334121 - RNA, 19 nt, Human herpesvirus 6B
uuugcugucacacucugaa

SEQ ID NO: 334122 - RNA, 19 nt, Human herpesvirus 6B
uuugcuuuuuuaguuuuga

SEQ ID NO: 334123 - RNA, 17 nt, Human herpesvirus 6B
uuuggauaagcagaaga

SEQ ID NO: 334124 - RNA, 21 nt, Human herpesvirus 6B
uuuggcugugacgaggaugga

SEQ ID NO: 334125 - RNA, 15 nt, Human herpesvirus 6B
uuugggaaaucugac

SEQ ID NO: 334126 - RNA, 14 nt, Human herpesvirus 6B
uuugguggacacca

SEQ ID NO: 334127 - RNA, 14 nt, Human herpesvirus 6B
uuuguagcaauuuu

SEQ ID NO: 334128 - RNA, 23 nt, Human herpesvirus 6B
uuugucggcacguauaagaacug

SEQ ID NO: 334129 - RNA, 14 nt, Human herpesvirus 6B
uuugugauggguga

SEQ ID NO: 334130 - RNA, 16 nt, Human herpesvirus 6B
uuuguuuuuuuaaucc

SEQ ID NO: 334131 - RNA, 23 nt, Human herpesvirus 6B
uuuuaauguugaguaauuggaca

SEQ ID NO: 334132 - RNA, 14 nt, Human herpesvirus 6B
uuuuaauuccaagu

SEQ ID NO: 334133 - RNA, 20 nt, Human herpesvirus 6B
uuuuaccauguugcuuauaa

SEQ ID NO: 334134 - RNA, 22 nt, Human herpesvirus 6B
uuuuacuuacaucgauccaaaa

SEQ ID NO: 334135 - RNA, 18 nt, Human herpesvirus 6B
uuuuagaggagaaaugau

SEQ ID NO: 334136 - RNA, 13 nt, Human herpesvirus 6B
uuuuauaagcuca

SEQ ID NO: 334137 - RNA, 17 nt, Human herpesvirus 6B
uuuuauaucgucgcaga

SEQ ID NO: 334138 - RNA, 15 nt, Human herpesvirus 6B
uuuuauuaguauccu

SEQ ID NO: 334139 - RNA, 23 nt, Human herpesvirus 6B
uuuuauuuauauuuggcauuaga

SEQ ID NO: 334140 - RNA, 16 nt, Human herpesvirus 6B
uuuuccaaacauuaua

SEQ ID NO: 334141 - RNA, 12 nt, Human herpesvirus 6B
uuuuccagugag

SEQ ID NO: 334142 - RNA, 19 nt, Human herpesvirus 6B
uuuucgccaucaaucucua

SEQ ID NO: 334143 - RNA, 20 nt, Human herpesvirus 6B
uuuucguauaaaaugguauu

SEQ ID NO: 334144 - RNA, 15 nt, Human herpesvirus 6B
uuuucuaucacuuau

SEQ ID NO: 334145 - RNA, 23 nt, Human herpesvirus 6B
uuuucuuuaaacgguaaauucaa

SEQ ID NO: 334146 - RNA, 14 nt, Human herpesvirus 6B
uuuugagacuuaga

SEQ ID NO: 334147 - RNA, 13 nt, Human herpesvirus 6B
uuuugaugguguc

SEQ ID NO: 334148 - RNA, 16 nt, Human herpesvirus 6B
uuuugauugcaaucac

SEQ ID NO: 334149 - RNA, 13 nt, Human herpesvirus 6B
uuuugcaacuuaa

SEQ ID NO: 334150 - RNA, 19 nt, Human herpesvirus 6B
uuuuguccgccauugggua

SEQ ID NO: 334151 - RNA, 20 nt, Human herpesvirus 6B
uuuugucuucgugucugaga

SEQ ID NO: 334152 - RNA, 12 nt, Human herpesvirus 6B
uuuugugacuau

SEQ ID NO: 334153 - RNA, 12 nt, Human herpesvirus 6B
uuuuuaauucca

SEQ ID NO: 334154 - RNA, 23 nt, Human herpesvirus 6B
uuuuucgaacaugauagggaaua

SEQ ID NO: 334155 - RNA, 17 nt, Human herpesvirus 6B
uuuuucgauguuuccag

SEQ ID NO: 334156 - RNA, 23 nt, Human herpesvirus 6B
uuuuuguaaaaauggcucagaga

SEQ ID NO: 334157 - RNA, 14 nt, Human herpesvirus 6B
uuuuuucccaaaag

SEQ ID NO: 334158 - RNA, 12 nt, Human herpesvirus 6B
uuuuuugcaauu

SEQ ID NO: 334159 - RNA, 13 nt, Human herpesvirus 6B
uuuuuugcaguau

SEQ ID NO: 334160 - RNA, 17 nt, Human herpesvirus 6B
aacugacuuauaaguca

SEQ ID NO: 334161 - RNA, 19 nt, Human herpesvirus 6B
aacugacuuauaagucauc

SEQ ID NO: 334162 - RNA, 17 nt, Human herpesvirus 6B
aacugcuggcugagauu

SEQ ID NO: 334163 - RNA, 20 nt, Human herpesvirus 6B
aacugcuggcugagauucac

SEQ ID NO: 334164 - RNA, 21 nt, Human herpesvirus 6B
aacugcuggcugagauucacu

SEQ ID NO: 334165 - RNA, 24 nt, Human herpesvirus 6B
aacugcuggcugagauucacucua

SEQ ID NO: 334166 - RNA, 18 nt, Human herpesvirus 6B
aacugggcgaagaccuau

SEQ ID NO: 334167 - RNA, 22 nt, Human herpesvirus 6B
aacugggugauugggagcucac

SEQ ID NO: 334168 - RNA, 18 nt, Human herpesvirus 6B
aauaauuuggguugugcu

SEQ ID NO: 334169 - RNA, 12 nt, Human herpesvirus 6B
aauacaauagua

SEQ ID NO: 334170 - RNA, 17 nt, Human herpesvirus 6B
aauacaaugacuaucaa

SEQ ID NO: 334171 - RNA, 22 nt, Human herpesvirus 6B
aauacagcugcagggauguggu

SEQ ID NO: 334172 - RNA, 21 nt, Human herpesvirus 6B
aauaccaauuccuuauuucua

SEQ ID NO: 334173 - RNA, 13 nt, Human herpesvirus 6B
aauaccauuuuau

SEQ ID NO: 334174 - RNA, 19 nt, Human herpesvirus 6B
aauacuacagugacuuuca

SEQ ID NO: 334175 - RNA, 21 nt, Human herpesvirus 6B
aauacuuuuuucaauaaugcu

SEQ ID NO: 334176 - RNA, 21 nt, Human herpesvirus 6B
aauagcagaaguuuaccuaga

SEQ ID NO: 334177 - RNA, 19 nt, Human herpesvirus 6B
aauagcauucuguucuuca

SEQ ID NO: 334178 - RNA, 22 nt, Human herpesvirus 6B
aauaguagauuuucauuuugau

SEQ ID NO: 334179 - RNA, 22 nt, Human herpesvirus 6B
aauaguuucaugauucuuuguc

SEQ ID NO: 334180 - RNA, 14 nt, Human herpesvirus 6B
aauauaauucugac

SEQ ID NO: 334181 - RNA, 18 nt, Human herpesvirus 6B
aauaucgcgcagaccaua

SEQ ID NO: 334182 - RNA, 14 nt, Human herpesvirus 6B
aauaucuugucaaa

SEQ ID NO: 334183 - RNA, 22 nt, Human herpesvirus 6B
aauaugguuccacuuggaagac

SEQ ID NO: 334184 - RNA, 13 nt, Human herpesvirus 6B
aauauuaauuaca

SEQ ID NO: 334185 - RNA, 14 nt, Human herpesvirus 6B
aauauucaugcgcu

SEQ ID NO: 334186 - RNA, 15 nt, Human herpesvirus 6B
aauauucuacuucau

SEQ ID NO: 334187 - RNA, 18 nt, Human herpesvirus 6B
aauauuuugaaaaggugu

SEQ ID NO: 334188 - RNA, 15 nt, Human herpesvirus 6B
aaucaaaaaaaugau

SEQ ID NO: 334189 - RNA, 24 nt, Human herpesvirus 6B
aaucaacacugccuuaauguaugc

SEQ ID NO: 334190 - RNA, 11 nt, Human herpesvirus 6B
aaucaaugagu

SEQ ID NO: 334191 - RNA, 16 nt, Human herpesvirus 6B
aaucacaaaaugauua

SEQ ID NO: 334192 - RNA, 15 nt, Human herpesvirus 6B
aaucagauaucugaa

SEQ ID NO: 334193 - RNA, 21 nt, Human herpesvirus 6B
aaucaucggaggcaccuugug

SEQ ID NO: 334194 - RNA, 17 nt, Human herpesvirus 6B
aaucaugagagccuuua

SEQ ID NO: 334195 - RNA, 16 nt, Human herpesvirus 6B
aaucaugagauacaaa

SEQ ID NO: 334196 - RNA, 20 nt, Human herpesvirus 6B
aaucauuaccaguagcacga

SEQ ID NO: 334197 - RNA, 18 nt, Human herpesvirus 6B
aaucauucgauuaaugcc

SEQ ID NO: 334198 - RNA, 16 nt, Human herpesvirus 6B
aauccacugcauuuca

SEQ ID NO: 334199 - RNA, 20 nt, Human herpesvirus 6B
aauccacugcauuucauuuc

SEQ ID NO: 334200 - RNA, 19 nt, Human herpesvirus 6B
aauccaggaguaaugauug

SEQ ID NO: 334201 - RNA, 19 nt, Human herpesvirus 6B
aauccaugaacuacaguga

SEQ ID NO: 334202 - RNA, 24 nt, Human herpesvirus 6B
aauccuauauuacuaacgacggaa

SEQ ID NO: 334203 - RNA, 22 nt, Human herpesvirus 6B
aaucgcaaaaacauguuguucu

SEQ ID NO: 334204 - RNA, 16 nt, Human herpesvirus 6B
aaucgcgccauaucac

SEQ ID NO: 334205 - RNA, 18 nt, Human herpesvirus 6B
aaucuaauaaaauacaca

SEQ ID NO: 334206 - RNA, 21 nt, Human herpesvirus 6B
aaucuaauaaaauacacaucu

SEQ ID NO: 334207 - RNA, 22 nt, Human herpesvirus 6B
aaucuaauaaaauacacaucug

SEQ ID NO: 334208 - RNA, 16 nt, Human herpesvirus 6B
aaucucacacacaggu

SEQ ID NO: 334209 - RNA, 22 nt, Human herpesvirus 6B
aaucuccaaaagcgccugccua

SEQ ID NO: 334210 - RNA, 22 nt, Human herpesvirus 6B
aaucugacaaccuugacagaua

SEQ ID NO: 334211 - RNA, 20 nt, Human herpesvirus 6B
aaucugugcaacacaacaaa

SEQ ID NO: 334212 - RNA, 15 nt, Human herpesvirus 6B
aaucuuccacugaag

SEQ ID NO: 334213 - RNA, 18 nt, Human herpesvirus 6B
aaucuuguagcucagugu

SEQ ID NO: 334214 - RNA, 21 nt, Human herpesvirus 6B
aaucuuguguucuaacacaua

SEQ ID NO: 334215 - RNA, 15 nt, Human herpesvirus 6B
aaucuuuccugcuaa

SEQ ID NO: 334216 - RNA, 20 nt, Human herpesvirus 6B
aaugaauucaagacgaucuc

SEQ ID NO: 334217 - RNA, 15 nt, Human herpesvirus 6B
aaugacucuaaauac

SEQ ID NO: 334218 - RNA, 18 nt, Human herpesvirus 6B
aaugagaggacagucaac

SEQ ID NO: 334219 - RNA, 22 nt, Human herpesvirus 6B
aaugagauagaaguuacaagaa

SEQ ID NO: 334220 - RNA, 22 nt, Human herpesvirus 6B
aaugaggucuauuuuggccuca

SEQ ID NO: 334221 - RNA, 17 nt, Human herpesvirus 6B
aaugauagacgacgcag

SEQ ID NO: 334222 - RNA, 20 nt, Human herpesvirus 6B
aaugaucgccccagacuuau

SEQ ID NO: 334223 - RNA, 16 nt, Human herpesvirus 6B
aaugauugcaaccaau

SEQ ID NO: 334224 - RNA, 17 nt, Human herpesvirus 6B
aaugcauucacaaggaa

SEQ ID NO: 334225 - RNA, 23 nt, Human herpesvirus 6B
aaugcccacaccaucuucagcuc

SEQ ID NO: 334226 - RNA, 16 nt, Human herpesvirus 6B
aaugcggaacaccagc

SEQ ID NO: 334227 - RNA, 15 nt, Human herpesvirus 6B
aaugcucaaccuaac

SEQ ID NO: 334228 - RNA, 22 nt, Human herpesvirus 6B
aaugcuccuagggaauuuaauc

SEQ ID NO: 334229 - RNA, 21 nt, Human herpesvirus 6B
aaugcuuugggaccuucagga

SEQ ID NO: 334230 - RNA, 18 nt, Human herpesvirus 6B
aauggaagaaggcuauca

SEQ ID NO: 334231 - RNA, 18 nt, Human herpesvirus 6B
aauguaaccaccaaaacg

SEQ ID NO: 334232 - RNA, 12 nt, Human herpesvirus 6B
aaugucaaagaa

SEQ ID NO: 334233 - RNA, 18 nt, Human herpesvirus 6B
aaugucgaaucucaagca

SEQ ID NO: 334234 - RNA, 19 nt, Human herpesvirus 6B
aaugugcagaucagucaaa

SEQ ID NO: 334235 - RNA, 21 nt, Human herpesvirus 6B
aaugugcuuacgugccguguu

SEQ ID NO: 334236 - RNA, 23 nt, Human herpesvirus 6B
aaugugcuuuggaccuugaaugu

SEQ ID NO: 334237 - RNA, 23 nt, Human herpesvirus 6B
aaugugggcauucgccauauacc

SEQ ID NO: 334238 - RNA, 19 nt, Human herpesvirus 6B
aaugugucuuaguguacaa

SEQ ID NO: 334239 - RNA, 19 nt, Human herpesvirus 6B
aauguguuggucauuucau

SEQ ID NO: 334240 - RNA, 16 nt, Human herpesvirus 6B
aauguucgaugauuau

SEQ ID NO: 334241 - RNA, 16 nt, Human herpesvirus 6B
aauguucuugacaaau

SEQ ID NO: 334242 - RNA, 18 nt, Human herpesvirus 6B
aauguuuacggauucgau

SEQ ID NO: 334243 - RNA, 18 nt, Human herpesvirus 6B
aauuaagucgucagaaca

SEQ ID NO: 334244 - RNA, 15 nt, Human herpesvirus 6B
aauuacacaucuuaa

SEQ ID NO: 334245 - RNA, 21 nt, Human herpesvirus 6B
aauuacauauagucaauggug

SEQ ID NO: 334246 - RNA, 14 nt, Human herpesvirus 6B
aauuacauuaucca

SEQ ID NO: 334247 - RNA, 11 nt, Human herpesvirus 6B
aauuaccucau

SEQ ID NO: 334248 - RNA, 16 nt, Human herpesvirus 6B
aauuacugaaagagag

SEQ ID NO: 334249 - RNA, 20 nt, Human herpesvirus 6B
aauuacugccagaaaaacua

SEQ ID NO: 334250 - RNA, 21 nt, Human herpesvirus 6B
aauuagaauaggcgucucaug

SEQ ID NO: 334251 - RNA, 15 nt, Human herpesvirus 6B
aauuaugaaaccgau

SEQ ID NO: 334252 - RNA, 19 nt, Human herpesvirus 6B
aauuaugacugacaaggua

SEQ ID NO: 334253 - RNA, 17 nt, Human herpesvirus 6B
aauuauugugacaaggu

SEQ ID NO: 334254 - RNA, 18 nt, Human herpesvirus 6B
aauuauugugacaaggua

SEQ ID NO: 334255 - RNA, 15 nt, Human herpesvirus 6B
aauucagucugcuaa

SEQ ID NO: 334256 - RNA, 18 nt, Human herpesvirus 6B
aauucagucugcuaaaaa

SEQ ID NO: 334257 - RNA, 23 nt, Human herpesvirus 6B
aauuccaugcgaguagauucucc

SEQ ID NO: 334258 - RNA, 15 nt, Human herpesvirus 6B
aauucuaaauaucau

SEQ ID NO: 334259 - RNA, 17 nt, Human herpesvirus 6B
aauucuaaauaucauga

SEQ ID NO: 334260 - RNA, 19 nt, Human herpesvirus 6B
aauucugauuauuaucaca

SEQ ID NO: 334261 - RNA, 12 nt, Human herpesvirus 6B
aauucuuacaag

SEQ ID NO: 334262 - RNA, 20 nt, Human herpesvirus 6B
aauucuuaccaagaaaucac

SEQ ID NO: 334263 - RNA, 19 nt, Human herpesvirus 6B
aauucuuauguaaacuaaa

SEQ ID NO: 334264 - RNA, 19 nt, Human herpesvirus 6B
aauucuuauuuaccuuccu

SEQ ID NO: 334265 - RNA, 15 nt, Human herpesvirus 6B
aauugauaguacuua

SEQ ID NO: 334266 - RNA, 23 nt, Human herpesvirus 6B
aauugcaaacgaucugugaauuc

SEQ ID NO: 334267 - RNA, 22 nt, Human herpesvirus 6B
aauugccuauccuauaaauacu

SEQ ID NO: 334268 - RNA, 21 nt, Human herpesvirus 6B
aauugcgugggaauaagaguu

SEQ ID NO: 334269 - RNA, 16 nt, Human herpesvirus 6B
aauuggacauuguuga

SEQ ID NO: 334270 - RNA, 23 nt, Human herpesvirus 6B
aauuuacucuccacccaucuccu

SEQ ID NO: 334271 - RNA, 22 nt, Human herpesvirus 6B
aauuuagccuauuaagcagccg

SEQ ID NO: 334272 - RNA, 22 nt, Human herpesvirus 6B
aauuuaucaaagagguacucau

SEQ ID NO: 334273 - RNA, 16 nt, Human herpesvirus 6B
aauuuaugucauuuca

SEQ ID NO: 334274 - RNA, 17 nt, Human herpesvirus 6B
aauuuaugucauuucau

SEQ ID NO: 334275 - RNA, 14 nt, Human herpesvirus 6B
aauuuccugucaug

SEQ ID NO: 334276 - RNA, 22 nt, Human herpesvirus 6B
aauuuccuuugugugauauuau

SEQ ID NO: 334277 - RNA, 15 nt, Human herpesvirus 6B
aauuuuacaaugagu

SEQ ID NO: 334278 - RNA, 16 nt, Human herpesvirus 6B
aauuuuaucaugcccu

SEQ ID NO: 334279 - RNA, 22 nt, Human herpesvirus 6B
aauuuuauucaaccaaucuaag

SEQ ID NO: 334280 - RNA, 18 nt, Human herpesvirus 6B
aauuuucgucugauacuu

SEQ ID NO: 334281 - RNA, 17 nt, Human herpesvirus 6B
aauuuucugaagacagc

SEQ ID NO: 334282 - RNA, 21 nt, Human herpesvirus 6B
aauuuuuuucuccugaucuca

SEQ ID NO: 334283 - RNA, 13 nt, Human herpesvirus 6B
acaaaacaaauau

SEQ ID NO: 334284 - RNA, 13 nt, Human herpesvirus 6B
acaaaacaaucua

SEQ ID NO: 334285 - RNA, 20 nt, Human herpesvirus 6B
acaaaacauggacaacuuau

SEQ ID NO: 334286 - RNA, 17 nt, Human herpesvirus 6B
acaaaacuguaccugaa

SEQ ID NO: 334287 - RNA, 15 nt, Human herpesvirus 6B
acaaaaugauugcaa

SEQ ID NO: 334288 - RNA, 14 nt, Human herpesvirus 6B
acaaaccaucagcc

SEQ ID NO: 334289 - RNA, 15 nt, Human herpesvirus 6B
acaaaccucucgccg

SEQ ID NO: 334290 - RNA, 15 nt, Human herpesvirus 6B
acaaaccugauuuca

SEQ ID NO: 334291 - RNA, 16 nt, Human herpesvirus 6B
acaaaccugauuucag

SEQ ID NO: 334292 - RNA, 15 nt, Human herpesvirus 6B
acaaaccuucccuau

SEQ ID NO: 334293 - RNA, 17 nt, Human herpesvirus 6B
acaaacugucacuuucc

SEQ ID NO: 334294 - RNA, 12 nt, Human herpesvirus 6B
aaaaaaaugugu

SEQ ID NO: 334295 - RNA, 13 nt, Human herpesvirus 6B
aaaaaagauuuau

SEQ ID NO: 334296 - RNA, 21 nt, Human herpesvirus 6B
aaaaacaaagcuuuacuuaca

SEQ ID NO: 334297 - RNA, 22 nt, Human herpesvirus 6B
aaaaacacacaucauauccuga

SEQ ID NO: 334298 - RNA, 12 nt, Human herpesvirus 6B
aaaaacauauaa

SEQ ID NO: 334299 - RNA, 21 nt, Human herpesvirus 6B
aaaaacauauaaagaggccaa

SEQ ID NO: 334300 - RNA, 23 nt, Human herpesvirus 6B
aaaaacaucguaauggcauucac

SEQ ID NO: 334301 - RNA, 11 nt, Human herpesvirus 6B
aaaaacauguu

SEQ ID NO: 334302 - RNA, 21 nt, Human herpesvirus 6B
aaaaaccaaaacaacaacuuu

SEQ ID NO: 334303 - RNA, 22 nt, Human herpesvirus 6B
aaaaacgaccugaucacagaga

SEQ ID NO: 334304 - RNA, 22 nt, Human herpesvirus 6B
aaaaacguuuuuguuauucuca

SEQ ID NO: 334305 - RNA, 11 nt, Human herpesvirus 6B
aaaaacuaaug

SEQ ID NO: 334306 - RNA, 21 nt, Human herpesvirus 6B
aaaaaguauacggaagugcau

SEQ ID NO: 334307 - RNA, 16 nt, Human herpesvirus 6B
aaaaagucaccuguau

SEQ ID NO: 334308 - RNA, 18 nt, Human herpesvirus 6B
aaaaauaaacgcugucuc

SEQ ID NO: 334309 - RNA, 13 nt, Human herpesvirus 6B
aaaaauacaguau

SEQ ID NO: 334310 - RNA, 19 nt, Human herpesvirus 6B
aaaaauauuaauuacauau

SEQ ID NO: 334311 - RNA, 16 nt, Human herpesvirus 6B
aaaaaucaacacugcc

SEQ ID NO: 334312 - RNA, 13 nt, Human herpesvirus 6B
aaaaaucaucucg

SEQ ID NO: 334313 - RNA, 16 nt, Human herpesvirus 6B
aaaaauccgaaauuuc

SEQ ID NO: 334314 - RNA, 18 nt, Human herpesvirus 6B
aaaaaucgcaaacaggug

SEQ ID NO: 334315 - RNA, 16 nt, Human herpesvirus 6B
aaaaauggcucagaga

SEQ ID NO: 334316 - RNA, 16 nt, Human herpesvirus 6B
aaaaauuacugaaaga

SEQ ID NO: 334317 - RNA, 13 nt, Human herpesvirus 6B
aaaaauuuuguca

SEQ ID NO: 334318 - RNA, 16 nt, Human herpesvirus 6B
aaaacaaagcuuuacu

SEQ ID NO: 334319 - RNA, 12 nt, Human herpesvirus 6B
aaaacaaauauc

SEQ ID NO: 334320 - RNA, 20 nt, Human herpesvirus 6B
aaaacaaggaacgauaugcu

SEQ ID NO: 334321 - RNA, 12 nt, Human herpesvirus 6B
aaaacaaugcau

SEQ ID NO: 334322 - RNA, 19 nt, Human herpesvirus 6B
aaaacacacaucauauccu

SEQ ID NO: 334323 - RNA, 12 nt, Human herpesvirus 6B
aaaacacaguau

SEQ ID NO: 334324 - RNA, 14 nt, Human herpesvirus 6B
aaaacacaguauuu

SEQ ID NO: 334325 - RNA, 23 nt, Human herpesvirus 6B
aaaacacgauccaauuacaucaa

SEQ ID NO: 334326 - RNA, 19 nt, Human herpesvirus 6B
aaaacagacgaaucacauc

SEQ ID NO: 334327 - RNA, 15 nt, Human herpesvirus 6B
aaaacagauuuuacu

SEQ ID NO: 334328 - RNA, 15 nt, Human herpesvirus 6B
aaaacauuucuuaca

SEQ ID NO: 334329 - RNA, 23 nt, Human herpesvirus 6B
aaaaccaguauuaaugucuucga

SEQ ID NO: 334330 - RNA, 20 nt, Human herpesvirus 6B
aaaacgcucacaacaugauc

SEQ ID NO: 334331 - RNA, 21 nt, Human herpesvirus 6B
aaaacguggaagacgcugugu

SEQ ID NO: 334332 - RNA, 15 nt, Human herpesvirus 6B
aaaacuaugugcauu

SEQ ID NO: 334333 - RNA, 19 nt, Human herpesvirus 6B
aaaacucgcaccucugaaa

SEQ ID NO: 334334 - RNA, 21 nt, Human herpesvirus 6B
aaaacucuaaaaccugcuaac

SEQ ID NO: 334335 - RNA, 18 nt, Human herpesvirus 6B
aaaacucuugacauagca

SEQ ID NO: 334336 - RNA, 19 nt, Human herpesvirus 6B
aaaacucuugacauagcaa

SEQ ID NO: 334337 - RNA, 21 nt, Human herpesvirus 6B
aaaacucuugacauagcaauu

SEQ ID NO: 334338 - RNA, 13 nt, Human herpesvirus 6B
aaaagaacacaag

SEQ ID NO: 334339 - RNA, 13 nt, Human herpesvirus 6B
aaaagacaucaca

SEQ ID NO: 334340 - RNA, 20 nt, Human herpesvirus 6B
aaaagaggagaccaugccau

SEQ ID NO: 334341 - RNA, 19 nt, Human herpesvirus 6B
aaaagaguugggauuccaa

SEQ ID NO: 334342 - RNA, 13 nt, Human herpesvirus 6B
aaaagcugcuaac

SEQ ID NO: 334343 - RNA, 11 nt, Human herpesvirus 6B
aaaaggugauc

SEQ ID NO: 334344 - RNA, 22 nt, Human herpesvirus 6B
aaaaguagcacggggauuuagu

SEQ ID NO: 334345 - RNA, 21 nt, Human herpesvirus 6B
aaaaguauacggaagugcaug

SEQ ID NO: 334346 - RNA, 16 nt, Human herpesvirus 6B
aaaagucaccuguaua

SEQ ID NO: 334347 - RNA, 19 nt, Human herpesvirus 6B
aaaagucuuauaacaccag

SEQ ID NO: 334348 - RNA, 18 nt, Human herpesvirus 6B
aaaagugaggagugcgua

SEQ ID NO: 334349 - RNA, 16 nt, Human herpesvirus 6B
aaaagugcugugcucu

SEQ ID NO: 334350 - RNA, 13 nt, Human herpesvirus 6B
aaaagugcuuuau

SEQ ID NO: 334351 - RNA, 19 nt, Human herpesvirus 6B
aaaaguuccauuguuugau

SEQ ID NO: 334352 - RNA, 21 nt, Human herpesvirus 6B
aaaaguuuguuuuuccauaaa

SEQ ID NO: 334353 - RNA, 13 nt, Human herpesvirus 6B
aaaauaacaugug

SEQ ID NO: 334354 - RNA, 19 nt, Human herpesvirus 6B
aaaauaauugcacccuauc

SEQ ID NO: 334355 - RNA, 12 nt, Human herpesvirus 6B
aaaauacaguau

SEQ ID NO: 334356 - RNA, 18 nt, Human herpesvirus 6B
aaaauacgcuaagcagaa

SEQ ID NO: 334357 - RNA, 21 nt, Human herpesvirus 6B
aaaauacuauguggaaauuaa

SEQ ID NO: 334358 - RNA, 23 nt, Human herpesvirus 6B
aaaauaguuuuaauucaggaaca

SEQ ID NO: 334359 - RNA, 13 nt, Human herpesvirus 6B
aaaauaucauuaa

SEQ ID NO: 334360 - RNA, 13 nt, Human herpesvirus 6B
aaaaucaacacug

SEQ ID NO: 334361 - RNA, 18 nt, Human herpesvirus 6B
aaaaucaucucgugcaaa

SEQ ID NO: 334362 - RNA, 20 nt, Human herpesvirus 6B
aaaaucaucucgugcaaaag

SEQ ID NO: 334363 - RNA, 21 nt, Human herpesvirus 6B
aaaaucaucugacucgugcca

SEQ ID NO: 334364 - RNA, 12 nt, Human herpesvirus 6B
aaaaucugcuaa

SEQ ID NO: 334365 - RNA, 13 nt, Human herpesvirus 6B
aaaaucugcuaac

SEQ ID NO: 334366 - RNA, 21 nt, Human herpesvirus 6B
aaaaugaucgccccagacuua

SEQ ID NO: 334367 - RNA, 17 nt, Human herpesvirus 6B
aaaaugauugcaaccaa

SEQ ID NO: 334368 - RNA, 10 nt, Human herpesvirus 6B
aaaaugcaca

SEQ ID NO: 334369 - RNA, 18 nt, Human herpesvirus 6B
aaaaugcacaauuuagcc

SEQ ID NO: 334370 - RNA, 19 nt, Human herpesvirus 6B
aaaauguuggcgccaaaaa

SEQ ID NO: 334371 - RNA, 13 nt, Human herpesvirus 6B
aaaauuaauucaa

SEQ ID NO: 334372 - RNA, 18 nt, Human herpesvirus 6B
aaaauuacuaauguggau

SEQ ID NO: 334373 - RNA, 22 nt, Human herpesvirus 6B
aaaauuacugaaagagagucag

SEQ ID NO: 334374 - RNA, 15 nt, Human herpesvirus 6B
aaaauuggugugcau

SEQ ID NO: 334375 - RNA, 22 nt, Human herpesvirus 6B
aaaauuuauaaaagaagcauga

SEQ ID NO: 334376 - RNA, 19 nt, Human herpesvirus 6B
aaaauuucagccgaugaua

SEQ ID NO: 334377 - RNA, 19 nt, Human herpesvirus 6B
aaaauuugugcgaauugug

SEQ ID NO: 334378 - RNA, 13 nt, Human herpesvirus 6B
aaaauuuuaccua

SEQ ID NO: 334379 - RNA, 16 nt, Human herpesvirus 6B
aaaauuuugucacucu

SEQ ID NO: 334380 - RNA, 19 nt, Human herpesvirus 6B
aaacaaauucuuacaagua

SEQ ID NO: 334381 - RNA, 22 nt, Human herpesvirus 6B
aaacaaauucuuacaaguaugu

SEQ ID NO: 334382 - RNA, 15 nt, Human herpesvirus 6B
aaacaacuggaugaa

SEQ ID NO: 334383 - RNA, 14 nt, Human herpesvirus 6B
aaacaauaaauuac

SEQ ID NO: 334384 - RNA, 15 nt, Human herpesvirus 6B
aaacacaguauuuaa

SEQ ID NO: 334385 - RNA, 15 nt, Human herpesvirus 6B
aaacaccaacaugac

SEQ ID NO: 334386 - RNA, 11 nt, Human herpesvirus 6B
aaacaccacuu

SEQ ID NO: 334387 - RNA, 13 nt, Human herpesvirus 6B
aaacaccacuuga

SEQ ID NO: 334388 - RNA, 23 nt, Human herpesvirus 6B
aaacaccacuugaucacaacaua

SEQ ID NO: 334389 - RNA, 19 nt, Human herpesvirus 6B
aaacaccucacagucuagu

SEQ ID NO: 334390 - RNA, 13 nt, Human herpesvirus 6B
aaacacgauccaa

SEQ ID NO: 334391 - RNA, 19 nt, Human herpesvirus 6B
aaacacugacuaaacguac

SEQ ID NO: 334392 - RNA, 16 nt, Human herpesvirus 6B
aaacaggguugcgaua

SEQ ID NO: 334393 - RNA, 24 nt, Human herpesvirus 6B
aaacaugcaacccgccacucuaca

SEQ ID NO: 334394 - RNA, 20 nt, Human herpesvirus 6B
aaaccaauuugucgcacgug

SEQ ID NO: 334395 - RNA, 18 nt, Human herpesvirus 6B
aaaccagaaccugcaggg

SEQ ID NO: 334396 - RNA, 18 nt, Human herpesvirus 6B
aaaccuauuagauguccu

SEQ ID NO: 334397 - RNA, 19 nt, Human herpesvirus 6B
aaaccucaaaaaugcacaa

SEQ ID NO: 334398 - RNA, 21 nt, Human herpesvirus 6B
aaaccuucccuaucacaauac

SEQ ID NO: 334399 - RNA, 17 nt, Human herpesvirus 6B
aaaccuucguucugaua

SEQ ID NO: 334400 - RNA, 15 nt, Human herpesvirus 6B
aaacgaauagcauuc

SEQ ID NO: 334401 - RNA, 24 nt, Human herpesvirus 6B
aaacgacccgaugguacgguguuu

SEQ ID NO: 334402 - RNA, 21 nt, Human herpesvirus 6B
aaacgaccugaucacagagaa

SEQ ID NO: 334403 - RNA, 22 nt, Human herpesvirus 6B
aaacgcagacuaauccauauga

SEQ ID NO: 334404 - RNA, 18 nt, Human herpesvirus 6B
aaacggagacugcacaga

SEQ ID NO: 334405 - RNA, 14 nt, Human herpesvirus 6B
aaacguugugcuga

SEQ ID NO: 334406 - RNA, 18 nt, Human herpesvirus 6B
aaacuaaauagguucuau

SEQ ID NO: 334407 - RNA, 20 nt, Human herpesvirus 6B
aaacuaugaaaaccuuucaa

SEQ ID NO: 334408 - RNA, 21 nt, Human herpesvirus 6B
aaacuauuaauaaaccgcuua

SEQ ID NO: 334409 - RNA, 22 nt, Human herpesvirus 6B
aaacucagccgauaaauuugcc

SEQ ID NO: 334410 - RNA, 23 nt, Human herpesvirus 6B
aaacucagccgauaaauuugcca

SEQ ID NO: 334411 - RNA, 17 nt, Human herpesvirus 6B
aaacucgacuucuuuca

SEQ ID NO: 334412 - RNA, 18 nt, Human herpesvirus 6B
aaacucgacuucuuucau

SEQ ID NO: 334413 - RNA, 16 nt, Human herpesvirus 6B
aaacugaggcagaaau

SEQ ID NO: 334414 - RNA, 13 nt, Human herpesvirus 6B
aaacuggucugcu

SEQ ID NO: 334415 - RNA, 15 nt, Human herpesvirus 6B
aaacugucacuuucc

SEQ ID NO: 334416 - RNA, 15 nt, Human herpesvirus 6B
aaacuguucuuucaa

SEQ ID NO: 334417 - RNA, 21 nt, Human herpesvirus 6B
aaacuuaccauauauuggcac

SEQ ID NO: 334418 - RNA, 17 nt, Human herpesvirus 6B
aaacuuuuuuggcucga

SEQ ID NO: 334419 - RNA, 15 nt, Human herpesvirus 6B
aaagaacaguuuacc

SEQ ID NO: 334420 - RNA, 12 nt, Human herpesvirus 6B
aaagaacccauc

SEQ ID NO: 334421 - RNA, 13 nt, Human herpesvirus 6B
aaagaauggaagc

SEQ ID NO: 334422 - RNA, 18 nt, Human herpesvirus 6B
aaagaaugggauugucau

SEQ ID NO: 334423 - RNA, 15 nt, Human herpesvirus 6B
aaagacaaaccugau

SEQ ID NO: 334424 - RNA, 22 nt, Human herpesvirus 6B
aaagagaucaguacauagaauc

SEQ ID NO: 334425 - RNA, 23 nt, Human herpesvirus 6B
aaagaggagaccaugccauugaa

SEQ ID NO: 334426 - RNA, 19 nt, Human herpesvirus 6B
aaagagggugggaacuguc

SEQ ID NO: 334427 - RNA, 22 nt, Human herpesvirus 6B
aaagagggugggaacugucaag

SEQ ID NO: 334428 - RNA, 21 nt, Human herpesvirus 6B
aaagaucaagcaaguuccauu

SEQ ID NO: 334429 - RNA, 21 nt, Human herpesvirus 6B
aaagauuuggaggugagacau

SEQ ID NO: 334430 - RNA, 17 nt, Human herpesvirus 6B
aaagcaucucaaaaaac

SEQ ID NO: 334431 - RNA, 23 nt, Human herpesvirus 6B
aaagccagggcgucgucaacucc

SEQ ID NO: 334432 - RNA, 18 nt, Human herpesvirus 6B
aaagcgauagaggaugcu

SEQ ID NO: 334433 - RNA, 18 nt, Human herpesvirus 6B
aaagcuacucauccucag

SEQ ID NO: 334434 - RNA, 15 nt, Human herpesvirus 6B
aaagcugaccauuca

SEQ ID NO: 334435 - RNA, 13 nt, Human herpesvirus 6B
aaagcuuuacuua

SEQ ID NO: 334436 - RNA, 22 nt, Human herpesvirus 6B
aaagcuuuacuuacaacugaaa

SEQ ID NO: 334437 - RNA, 11 nt, Human herpesvirus 6B
aaaggauguuu

SEQ ID NO: 334438 - RNA, 18 nt, Human herpesvirus 6B
aaagguucaaacaaugca

SEQ ID NO: 334439 - RNA, 13 nt, Human herpesvirus 6B
aaagguugagaaa

SEQ ID NO: 334440 - RNA, 16 nt, Human herpesvirus 6B
aaaguauuguacuuca

SEQ ID NO: 334441 - RNA, 17 nt, Human herpesvirus 6B
aaagucucugucuuccc

SEQ ID NO: 334442 - RNA, 19 nt, Human herpesvirus 6B
aaagugguuuaauggaaac

SEQ ID NO: 334443 - RNA, 20 nt, Human herpesvirus 6B
aaaguuuguuuuuccauaaa

SEQ ID NO: 334444 - RNA, 20 nt, Human herpesvirus 6B
aaauaaaaaaaaagacauca

SEQ ID NO: 334445 - RNA, 14 nt, Human herpesvirus 6B
aaauaaaacaguau

SEQ ID NO: 334446 - RNA, 17 nt, Human herpesvirus 6B
aaauaaacgcugucuca

SEQ ID NO: 334447 - RNA, 14 nt, Human herpesvirus 6B
aaauaacaugugac

SEQ ID NO: 334448 - RNA, 21 nt, Human herpesvirus 6B
aaauaacgguguugaguuuau

SEQ ID NO: 334449 - RNA, 20 nt, Human herpesvirus 6B
aaauaauaaaaagucauaca

SEQ ID NO: 334450 - RNA, 16 nt, Human herpesvirus 6B
aaauaauugcacccua

SEQ ID NO: 334451 - RNA, 20 nt, Human herpesvirus 6B
aaauaauuuuuguagcaauu

SEQ ID NO: 334452 - RNA, 16 nt, Human herpesvirus 6B
aaauacaauaguaacu

SEQ ID NO: 334453 - RNA, 18 nt, Human herpesvirus 6B
aaauacaaugacuaucaa

SEQ ID NO: 334454 - RNA, 13 nt, Human herpesvirus 6B
aaauacacuaaca

SEQ ID NO: 334455 - RNA, 15 nt, Human herpesvirus 6B
aaauaccuaauucca

SEQ ID NO: 334456 - RNA, 17 nt, Human herpesvirus 6B
aaauaccuaauuccaau

SEQ ID NO: 334457 - RNA, 18 nt, Human herpesvirus 6B
aaauacguucacauuacc

SEQ ID NO: 334458 - RNA, 17 nt, Human herpesvirus 6B
aaauaguuuuaauucag

SEQ ID NO: 334459 - RNA, 14 nt, Human herpesvirus 6B
aaauaucaugaaga

SEQ ID NO: 334460 - RNA, 21 nt, Human herpesvirus 6B
aaauaucgagaccuacacuuu

SEQ ID NO: 334461 - RNA, 15 nt, Human herpesvirus 6B
aaauauucuacuuca

SEQ ID NO: 334462 - RNA, 16 nt, Human herpesvirus 6B
aaauauugcaugcauu

SEQ ID NO: 334463 - RNA, 12 nt, Human herpesvirus 6B
aaaucaaugagu

SEQ ID NO: 334464 - RNA, 19 nt, Human herpesvirus 6B
aaaucagacagguaagcag

SEQ ID NO: 334465 - RNA, 16 nt, Human herpesvirus 6B
aaauccagcaauccaa

SEQ ID NO: 334466 - RNA, 18 nt, Human herpesvirus 6B
aaaucgcaaaagaacaca

SEQ ID NO: 334467 - RNA, 17 nt, Human herpesvirus 6B
aaaucgcauuagucaca

SEQ ID NO: 334468 - RNA, 16 nt, Human herpesvirus 6B
aaaucuccaaaagcgc

SEQ ID NO: 334469 - RNA, 19 nt, Human herpesvirus 6B
aaaucuccugagaggcugg

SEQ ID NO: 334470 - RNA, 13 nt, Human herpesvirus 6B
auguguucuuaca

SEQ ID NO: 334471 - RNA, 12 nt, Human herpesvirus 6B
auguuagaucac

SEQ ID NO: 334472 - RNA, 22 nt, Human herpesvirus 6B
auguucaaaacugggcgaagac

SEQ ID NO: 334473 - RNA, 15 nt, Human herpesvirus 6B
auguucuugacaaau

SEQ ID NO: 334474 - RNA, 19 nt, Human herpesvirus 6B
auguugugaucaaguggug

SEQ ID NO: 334475 - RNA, 20 nt, Human herpesvirus 6B
auguuguugaucguguugug

SEQ ID NO: 334476 - RNA, 20 nt, Human herpesvirus 6B
auguuuccaugacugugagg

SEQ ID NO: 334477 - RNA, 20 nt, Human herpesvirus 6B
auguuucuguaugaauccag

SEQ ID NO: 334478 - RNA, 16 nt, Human herpesvirus 6B
auguuugugacucuga

SEQ ID NO: 334479 - RNA, 20 nt, Human herpesvirus 6B
auguuuuccccacaacaaga

SEQ ID NO: 334480 - RNA, 16 nt, Human herpesvirus 6B
auguuuuccuuuauga

SEQ ID NO: 334481 - RNA, 20 nt, Human herpesvirus 6B
auguuuuugaugugcuacgu

SEQ ID NO: 334482 - RNA, 15 nt, Human herpesvirus 6B
auuaaacuaacauga

SEQ ID NO: 334483 - RNA, 18 nt, Human herpesvirus 6B
auuaaacuaacaugacaa

SEQ ID NO: 334484 - RNA, 22 nt, Human herpesvirus 6B
auuaaauuacaugaaaacauuc

SEQ ID NO: 334485 - RNA, 16 nt, Human herpesvirus 6B
auuaaauuguuuuaaa

SEQ ID NO: 334486 - RNA, 21 nt, Human herpesvirus 6B
auuaaauuguuuuaaacauuc

SEQ ID NO: 334487 - RNA, 22 nt, Human herpesvirus 6B
auuaaauuguuuuaaacauucu

SEQ ID NO: 334488 - RNA, 17 nt, Human herpesvirus 6B
auuaacaauucucucaa

SEQ ID NO: 334489 - RNA, 22 nt, Human herpesvirus 6B
auuaacaauucucucaaugcgg

SEQ ID NO: 334490 - RNA, 13 nt, Human herpesvirus 6B
auuaacacauaca

SEQ ID NO: 334491 - RNA, 15 nt, Human herpesvirus 6B
auuaacauacagaug

SEQ ID NO: 334492 - RNA, 16 nt, Human herpesvirus 6B
auuaauaaaccgcuua

SEQ ID NO: 334493 - RNA, 20 nt, Human herpesvirus 6B
auuaauacaucauuaaaaua

SEQ ID NO: 334494 - RNA, 14 nt, Human herpesvirus 6B
auuaaugucuucga

SEQ ID NO: 334495 - RNA, 16 nt, Human herpesvirus 6B
auuacaagguacacaa

SEQ ID NO: 334496 - RNA, 18 nt, Human herpesvirus 6B
auuacaagguacacaaua

SEQ ID NO: 334497 - RNA, 23 nt, Human herpesvirus 6B
auuacaagguacacaauacacag

SEQ ID NO: 334498 - RNA, 15 nt, Human herpesvirus 6B
auuacaaucauguuu

SEQ ID NO: 334499 - RNA, 14 nt, Human herpesvirus 6B
auuacacaucuuaa

SEQ ID NO: 334500 - RNA, 15 nt, Human herpesvirus 6B
auuacauaagcaaau

SEQ ID NO: 334501 - RNA, 18 nt, Human herpesvirus 6B
auuacaugaaaacauuca

SEQ ID NO: 334502 - RNA, 21 nt, Human herpesvirus 6B
auuacccaucguucuuaacau

SEQ ID NO: 334503 - RNA, 19 nt, Human herpesvirus 6B
auuagaaauuacauaagca

SEQ ID NO: 334504 - RNA, 14 nt, Human herpesvirus 6B
auuaguuugugcag

SEQ ID NO: 334505 - RNA, 14 nt, Human herpesvirus 6B
auuauaaaaacaca

SEQ ID NO: 334506 - RNA, 20 nt, Human herpesvirus 6B
auuauaaauucucugcaugu

SEQ ID NO: 334507 - RNA, 12 nt, Human herpesvirus 6B
auuauaagcaaa

SEQ ID NO: 334508 - RNA, 17 nt, Human herpesvirus 6B
auuauagauagcuccaa

SEQ ID NO: 334509 - RNA, 14 nt, Human herpesvirus 6B
auuauagaugacug

SEQ ID NO: 334510 - RNA, 12 nt, Human herpesvirus 6B
auuaucuuucau

SEQ ID NO: 334511 - RNA, 17 nt, Human herpesvirus 6B
auuaugacugacaaggu

SEQ ID NO: 334512 - RNA, 18 nt, Human herpesvirus 6B
auuaugcgcaugaaaaua

SEQ ID NO: 334513 - RNA, 17 nt, Human herpesvirus 6B
auuauggcaacauaccc

SEQ ID NO: 334514 - RNA, 20 nt, Human herpesvirus 6B
auuauguaaaaccucagcaa

SEQ ID NO: 334515 - RNA, 20 nt, Human herpesvirus 6B
auuaugugauucggaaaaua

SEQ ID NO: 334516 - RNA, 15 nt, Human herpesvirus 6B
auuauuaacaaugaa

SEQ ID NO: 334517 - RNA, 13 nt, Human herpesvirus 6B
auuauugugacaa

SEQ ID NO: 334518 - RNA, 15 nt, Human herpesvirus 6B
auuauugugacaagg

SEQ ID NO: 334519 - RNA, 21 nt, Human herpesvirus 6B
auuauuuguuuaaugcauuca

SEQ ID NO: 334520 - RNA, 23 nt, Human herpesvirus 6B
auuauuuguuuaaugcauucaca

SEQ ID NO: 334521 - RNA, 18 nt, Human herpesvirus 6B
auucaagacgaucucaua

SEQ ID NO: 334522 - RNA, 19 nt, Human herpesvirus 6B
auucacaaggaaugugcag

SEQ ID NO: 334523 - RNA, 17 nt, Human herpesvirus 6B
auucacaguguuuccaa

SEQ ID NO: 334524 - RNA, 15 nt, Human herpesvirus 6B
auucagucucagcaa

SEQ ID NO: 334525 - RNA, 15 nt, Human herpesvirus 6B
auucauuguacgaua

SEQ ID NO: 334526 - RNA, 23 nt, Human herpesvirus 6B
auuccauacggucgaaugagcuu

SEQ ID NO: 334527 - RNA, 18 nt, Human herpesvirus 6B
auuccccucauacaucca

SEQ ID NO: 334528 - RNA, 14 nt, Human herpesvirus 6B
auucgauuaaugcc

SEQ ID NO: 334529 - RNA, 15 nt, Human herpesvirus 6B
auucgauuaaugcca

SEQ ID NO: 334530 - RNA, 15 nt, Human herpesvirus 6B
auucggaaaccauag

SEQ ID NO: 334531 - RNA, 21 nt, Human herpesvirus 6B
auucggcugcuuauaugcagc

SEQ ID NO: 334532 - RNA, 16 nt, Human herpesvirus 6B
auucguauacuuccuc

SEQ ID NO: 334533 - RNA, 14 nt, Human herpesvirus 6B
auucuaaauaccaa

SEQ ID NO: 334534 - RNA, 17 nt, Human herpesvirus 6B
auucucaaguuagacua

SEQ ID NO: 334535 - RNA, 16 nt, Human herpesvirus 6B
auucugauuauuauca

SEQ ID NO: 334536 - RNA, 21 nt, Human herpesvirus 6B
auucugcagaagguggaaggu

SEQ ID NO: 334537 - RNA, 19 nt, Human herpesvirus 6B
auucugcauuuauaucaaa

SEQ ID NO: 334538 - RNA, 20 nt, Human herpesvirus 6B
auucugcguguuaaugaaug

SEQ ID NO: 334539 - RNA, 17 nt, Human herpesvirus 6B
caaacuccgaaaaaggu

SEQ ID NO: 334540 - RNA, 19 nt, Human herpesvirus 6B
caaagaaaagauguacgau

SEQ ID NO: 334541 - RNA, 12 nt, Human herpesvirus 6B
caaagagaucag

SEQ ID NO: 334542 - RNA, 19 nt, Human herpesvirus 6B
caaagagaucaguacauag

SEQ ID NO: 334543 - RNA, 17 nt, Human herpesvirus 6B
caaagauagacagugaa

SEQ ID NO: 334544 - RNA, 21 nt, Human herpesvirus 6B
caaagcgucucgugguacaau

SEQ ID NO: 334545 - RNA, 20 nt, Human herpesvirus 6B
caaagcuauucuaaauacca

SEQ ID NO: 334546 - RNA, 19 nt, Human herpesvirus 6B
caaaguucaguaagauuua

SEQ ID NO: 334547 - RNA, 22 nt, Human herpesvirus 6B
caaauaauaaaaagucauacag

SEQ ID NO: 334548 - RNA, 20 nt, Human herpesvirus 6B
caaauacacuuucauaggaa

SEQ ID NO: 334549 - RNA, 17 nt, Human herpesvirus 6B
caaauaccgaaauuaua

SEQ ID NO: 334550 - RNA, 16 nt, Human herpesvirus 6B
caaauaccuaauucca

SEQ ID NO: 334551 - RNA, 22 nt, Human herpesvirus 6B
caaauacucgcaugucgauaaa

SEQ ID NO: 334552 - RNA, 22 nt, Human herpesvirus 6B
caaauaucgagaccuacacuuu

SEQ ID NO: 334553 - RNA, 21 nt, Human herpesvirus 6B
caaauauuauuuucccacaga

SEQ ID NO: 334554 - RNA, 14 nt, Human herpesvirus 6B
caaaucuccaaaag

SEQ ID NO: 334555 - RNA, 16 nt, Human herpesvirus 6B
caaauguagcaaauga

SEQ ID NO: 334556 - RNA, 13 nt, Human herpesvirus 6B
caaauuacaauua

SEQ ID NO: 334557 - RNA, 22 nt, Human herpesvirus 6B
caaauucugauuauuaucacaa

SEQ ID NO: 334558 - RNA, 20 nt, Human herpesvirus 6B
caaauugccuauccuauaaa

SEQ ID NO: 334559 - RNA, 19 nt, Human herpesvirus 6B
caaauuuuccaaacauuau

SEQ ID NO: 334560 - RNA, 16 nt, Human herpesvirus 6B
caacaacgaaaaagcu

SEQ ID NO: 334561 - RNA, 20 nt, Human herpesvirus 6B
caacaacuuuuaacuauccg

SEQ ID NO: 334562 - RNA, 16 nt, Human herpesvirus 6B
caacaauguccaauua

SEQ ID NO: 334563 - RNA, 14 nt, Human herpesvirus 6B
caacacaccugccu

SEQ ID NO: 334564 - RNA, 20 nt, Human herpesvirus 6B
caacaugacuggaaucacaa

SEQ ID NO: 334565 - RNA, 22 nt, Human herpesvirus 6B
caacaugaucgucauaaacaaa

SEQ ID NO: 334566 - RNA, 17 nt, Human herpesvirus 6B
caaccuucuaaugacgc

SEQ ID NO: 334567 - RNA, 18 nt, Human herpesvirus 6B
caacggaaagcaucucaa

SEQ ID NO: 334568 - RNA, 18 nt, Human herpesvirus 6B
caacgguguggagacacc

SEQ ID NO: 334569 - RNA, 18 nt, Human herpesvirus 6B
caacuaaaucaugucuua

SEQ ID NO: 334570 - RNA, 20 nt, Human herpesvirus 6B
caacuaaaucaugucuuaca

SEQ ID NO: 334571 - RNA, 22 nt, Human herpesvirus 6B
caacucacccgacaugcuucac

SEQ ID NO: 334572 - RNA, 18 nt, Human herpesvirus 6B
caacugauuaagauuauc

SEQ ID NO: 334573 - RNA, 22 nt, Human herpesvirus 6B
caacuuaaaauuuuuaaacaga

SEQ ID NO: 334574 - RNA, 20 nt, Human herpesvirus 6B
caagaaaucacguugaaaug

SEQ ID NO: 334575 - RNA, 17 nt, Human herpesvirus 6B
caagaauguaaaagagc

SEQ ID NO: 334576 - RNA, 13 nt, Human herpesvirus 6B
caagacgaucuca

SEQ ID NO: 334577 - RNA, 12 nt, Human herpesvirus 6B
caagacuacaga

SEQ ID NO: 334578 - RNA, 19 nt, Human herpesvirus 6B
caagacuacagacuccuca

SEQ ID NO: 334579 - RNA, 14 nt, Human herpesvirus 6B
caagacuuaauauc

SEQ ID NO: 334580 - RNA, 13 nt, Human herpesvirus 6B
caagaguaaaaaa

SEQ ID NO: 334581 - RNA, 17 nt, Human herpesvirus 6B
caagaguaaaaaaagau

SEQ ID NO: 334582 - RNA, 19 nt, Human herpesvirus 6B
caagauuguguuucugucu

SEQ ID NO: 334583 - RNA, 14 nt, Human herpesvirus 6B
caagcacaaaacca

SEQ ID NO: 334584 - RNA, 18 nt, Human herpesvirus 6B
caagcagccaaugauucu

SEQ ID NO: 334585 - RNA, 13 nt, Human herpesvirus 6B
caagcaugcauug

SEQ ID NO: 334586 - RNA, 19 nt, Human herpesvirus 6B
caagcaugcauuguguuac

SEQ ID NO: 334587 - RNA, 23 nt, Human herpesvirus 6B
caagcuagugaaucaaauaccua

SEQ ID NO: 334588 - RNA, 17 nt, Human herpesvirus 6B
caagcuguccaucuuca

SEQ ID NO: 334589 - RNA, 16 nt, Human herpesvirus 6B
caaggaacgauaugcu

SEQ ID NO: 334590 - RNA, 16 nt, Human herpesvirus 6B
caaggcuccuguuuac

SEQ ID NO: 334591 - RNA, 14 nt, Human herpesvirus 6B
caagguacacaaua

SEQ ID NO: 334592 - RNA, 23 nt, Human herpesvirus 6B
caagguacacaauacacaguaga

SEQ ID NO: 334593 - RNA, 16 nt, Human herpesvirus 6B
caagguaugaaacgaa

SEQ ID NO: 334594 - RNA, 18 nt, Human herpesvirus 6B
caaguuagaaauuacaca

SEQ ID NO: 334595 - RNA, 13 nt, Human herpesvirus 6B
caauaaaaacuca

SEQ ID NO: 334596 - RNA, 14 nt, Human herpesvirus 6B
caauaaaaacucaa

SEQ ID NO: 334597 - RNA, 13 nt, Human herpesvirus 6B
caauaaacaugau

SEQ ID NO: 334598 - RNA, 22 nt, Human herpesvirus 6B
caauaagccgaguuugauaauu

SEQ ID NO: 334599 - RNA, 13 nt, Human herpesvirus 6B
caauacacagaaa

SEQ ID NO: 334600 - RNA, 17 nt, Human herpesvirus 6B
caauaguagauuuucau

SEQ ID NO: 334601 - RNA, 19 nt, Human herpesvirus 6B
caauauuuccauaaguuaa

SEQ ID NO: 334602 - RNA, 18 nt, Human herpesvirus 6B
caaucauuaacauacaga

SEQ ID NO: 334603 - RNA, 11 nt, Human herpesvirus 6B
caaucugugag

SEQ ID NO: 334604 - RNA, 17 nt, Human herpesvirus 6B
caaucugugcaacacaa

SEQ ID NO: 334605 - RNA, 21 nt, Human herpesvirus 6B
caaucugugcaacacaacaaa

SEQ ID NO: 334606 - RNA, 19 nt, Human herpesvirus 6B
caaugaauacuucucuuua

SEQ ID NO: 334607 - RNA, 20 nt, Human herpesvirus 6B
caaugaguuuuuugcaauuu

SEQ ID NO: 334608 - RNA, 21 nt, Human herpesvirus 6B
caaugaguuuuuugcaauuug

SEQ ID NO: 334609 - RNA, 14 nt, Human herpesvirus 6B
caaugcaauuccac

SEQ ID NO: 334610 - RNA, 20 nt, Human herpesvirus 6B
caaugcaugucgaacagcuu

SEQ ID NO: 334611 - RNA, 14 nt, Human herpesvirus 6B
caaugcggaacacc

SEQ ID NO: 334612 - RNA, 21 nt, Human herpesvirus 6B
caaugcggaacaccagcaugu

SEQ ID NO: 334613 - RNA, 23 nt, Human herpesvirus 6B
caaugcggaacaccagcauguca

SEQ ID NO: 334614 - RNA, 19 nt, Human herpesvirus 6B
caaugcggguacuauagac

SEQ ID NO: 334615 - RNA, 22 nt, Human herpesvirus 6B
caauguccauuuuuucccaaaa

SEQ ID NO: 334616 - RNA, 23 nt, Human herpesvirus 6B
caauguuucuguaugaauccaga

SEQ ID NO: 334617 - RNA, 20 nt, Human herpesvirus 6B
caauuacaucaaaaaaugcu

SEQ ID NO: 334618 - RNA, 14 nt, Human herpesvirus 6B
caauuauguguuaa

SEQ ID NO: 334619 - RNA, 16 nt, Human herpesvirus 6B
caauugauugggucuu

SEQ ID NO: 334620 - RNA, 23 nt, Human herpesvirus 6B
caauuguauucuuggaaaaccuu

SEQ ID NO: 334621 - RNA, 16 nt, Human herpesvirus 6B
caauuuaugucauuuc

SEQ ID NO: 334622 - RNA, 18 nt, Human herpesvirus 6B
caauuuccugucauguga

SEQ ID NO: 334623 - RNA, 17 nt, Human herpesvirus 6B
caauuuuauucaaccaa

SEQ ID NO: 334624 - RNA, 15 nt, Human herpesvirus 6B
cacaaaaugauugca

SEQ ID NO: 334625 - RNA, 12 nt, Human herpesvirus 6B
cacaaacuaauc

SEQ ID NO: 334626 - RNA, 20 nt, Human herpesvirus 6B
cacaaaguuuaaguucucac

SEQ ID NO: 334627 - RNA, 19 nt, Human herpesvirus 6B
cacaacauaaaaaaacaca

SEQ ID NO: 334628 - RNA, 20 nt, Human herpesvirus 6B
cacaacuuaaccgcaaaaaa

SEQ ID NO: 334629 - RNA, 14 nt, Human herpesvirus 6B
cacaagaacagaga

SEQ ID NO: 334630 - RNA, 17 nt, Human herpesvirus 6B
cacaaggaaugugcaga

SEQ ID NO: 334631 - RNA, 15 nt, Human herpesvirus 6B
cacaauacacagaaa

SEQ ID NO: 334632 - RNA, 16 nt, Human herpesvirus 6B
cacaauuucugacucu

SEQ ID NO: 334633 - RNA, 16 nt, Human herpesvirus 6B
cacacacaagaacaga

SEQ ID NO: 334634 - RNA, 21 nt, Human herpesvirus 6B
cacacagaaaauugacaauga

SEQ ID NO: 334635 - RNA, 12 nt, Human herpesvirus 6B
cacacagcauga

SEQ ID NO: 334636 - RNA, 17 nt, Human herpesvirus 6B
cacaccaaugaucacac

SEQ ID NO: 334637 - RNA, 14 nt, Human herpesvirus 6B
cacacucugaacua

SEQ ID NO: 334638 - RNA, 21 nt, Human herpesvirus 6B
cacacuggccuacuauaacuu

SEQ ID NO: 334639 - RNA, 15 nt, Human herpesvirus 6B
cacagaauacaaaaa

SEQ ID NO: 334640 - RNA, 19 nt, Human herpesvirus 6B
cacagaauacaaaaacgac

SEQ ID NO: 334641 - RNA, 19 nt, Human herpesvirus 6B
cacagaaucgcaaacaguc

SEQ ID NO: 334642 - RNA, 15 nt, Human herpesvirus 6B
cacagagaaaaaaca

SEQ ID NO: 334643 - RNA, 19 nt, Human herpesvirus 6B
cacagagaaaaaacaaagc

SEQ ID NO: 334644 - RNA, 16 nt, Human herpesvirus 6B
cacaggcgcgugcacg

SEQ ID NO: 334645 - RNA, 15 nt, Human herpesvirus 6B
cacagucacacacaa

SEQ ID NO: 334646 - RNA, 14 nt, Human herpesvirus 6B
cacaguguuuccaa

SEQ ID NO: 334647 - RNA, 11 nt, Human herpesvirus 6B
cacaucauauc

SEQ ID NO: 334648 - RNA, 15 nt, Human herpesvirus 6B
cacaugccaugcaau

SEQ ID NO: 334649 - RNA, 16 nt, Human herpesvirus 6B
cacaugccaugcaaua

SEQ ID NO: 334650 - RNA, 13 nt, Human herpesvirus 6B
cacauuaccucug

SEQ ID NO: 334651 - RNA, 20 nt, Human herpesvirus 6B
cacauuauaagacgcugaua

SEQ ID NO: 334652 - RNA, 15 nt, Human herpesvirus 6B
cauaaaacugccaau

SEQ ID NO: 334653 - RNA, 17 nt, Human herpesvirus 6B
cauaacacgcaccuaaa

SEQ ID NO: 334654 - RNA, 14 nt, Human herpesvirus 6B
cauaacgauagcag

SEQ ID NO: 334655 - RNA, 21 nt, Human herpesvirus 6B
cauaacggaggagaugauuau

SEQ ID NO: 334656 - RNA, 17 nt, Human herpesvirus 6B
cauaagaauuacaauac

SEQ ID NO: 334657 - RNA, 15 nt, Human herpesvirus 6B
cauaaggcaaaaacc

SEQ ID NO: 334658 - RNA, 16 nt, Human herpesvirus 6B
cauaaguuaauuccag

SEQ ID NO: 334659 - RNA, 11 nt, Human herpesvirus 6B
cauaauccuuu

SEQ ID NO: 334660 - RNA, 22 nt, Human herpesvirus 6B
cauaaucuacgcauugacgggu

SEQ ID NO: 334661 - RNA, 14 nt, Human herpesvirus 6B
cauacauccagaaa

SEQ ID NO: 334662 - RNA, 19 nt, Human herpesvirus 6B
cauacggucgaaugagcuu

SEQ ID NO: 334663 - RNA, 23 nt, Human herpesvirus 6B
cauacuuguaaacuggucugcuu

SEQ ID NO: 334664 - RNA, 21 nt, Human herpesvirus 6B
cauacuuuccccauacugugu

SEQ ID NO: 334665 - RNA, 20 nt, Human herpesvirus 6B
cauagaucuuccccauaaca

SEQ ID NO: 334666 - RNA, 18 nt, Human herpesvirus 6B
cauagauuucauacugua

SEQ ID NO: 334667 - RNA, 23 nt, Human herpesvirus 6B
cauaguuuggaucuucugcuaau

SEQ ID NO: 334668 - RNA, 15 nt, Human herpesvirus 6B
cauaucacagcauuu

SEQ ID NO: 334669 - RNA, 17 nt, Human herpesvirus 6B
cauauuauuaacaauga

SEQ ID NO: 334670 - RNA, 22 nt, Human herpesvirus 6B
caucaaucucuaugagacuguu

SEQ ID NO: 334671 - RNA, 17 nt, Human herpesvirus 6B
caucacaugccaugcaa

SEQ ID NO: 334672 - RNA, 16 nt, Human herpesvirus 6B
caucaccacguauggu

SEQ ID NO: 334673 - RNA, 20 nt, Human herpesvirus 6B
caucacgcauagaccaacca

SEQ ID NO: 334674 - RNA, 19 nt, Human herpesvirus 6B
caucacggccguauaucua

SEQ ID NO: 334675 - RNA, 21 nt, Human herpesvirus 6B
caucacggccguauaucuacu

SEQ ID NO: 334676 - RNA, 20 nt, Human herpesvirus 6B
caucagaugaauugugcgug

SEQ ID NO: 334677 - RNA, 17 nt, Human herpesvirus 6B
caucagccauuucgcca

SEQ ID NO: 334678 - RNA, 22 nt, Human herpesvirus 6B
caucagccauuucgccaaaaau

SEQ ID NO: 334679 - RNA, 15 nt, Human herpesvirus 6B
caucaugugugccua

SEQ ID NO: 334680 - RNA, 20 nt, Human herpesvirus 6B
cauccaaaauacacuaacag

SEQ ID NO: 334681 - RNA, 13 nt, Human herpesvirus 6B
cauccaaauacac

SEQ ID NO: 334682 - RNA, 17 nt, Human herpesvirus 6B
cauccaaauacacuuuc

SEQ ID NO: 334683 - RNA, 18 nt, Human herpesvirus 6B
cauccaaauacacuuuca

SEQ ID NO: 334684 - RNA, 22 nt, Human herpesvirus 6B
caucccuaugucaaugugaaua

SEQ ID NO: 334685 - RNA, 19 nt, Human herpesvirus 6B
caucccuuaaaaaaacaca

SEQ ID NO: 334686 - RNA, 15 nt, Human herpesvirus 6B
cauccgcuaagagau

SEQ ID NO: 334687 - RNA, 19 nt, Human herpesvirus 6B
cauccguugagugugcauc

SEQ ID NO: 334688 - RNA, 16 nt, Human herpesvirus 6B
cauccuaauaagacag

SEQ ID NO: 334689 - RNA, 17 nt, Human herpesvirus 6B
cauccuaauaagacaga

SEQ ID NO: 334690 - RNA, 19 nt, Human herpesvirus 6B
cauccuuaaaugacacaga

SEQ ID NO: 334691 - RNA, 17 nt, Human herpesvirus 6B
caucgacgucccauuca

SEQ ID NO: 334692 - RNA, 17 nt, Human herpesvirus 6B
caucgucuuuuucuuca

SEQ ID NO: 334693 - RNA, 15 nt, Human herpesvirus 6B
caucguuauggguuu

SEQ ID NO: 334694 - RNA, 15 nt, Human herpesvirus 6B
caucuaugaugcugu

SEQ ID NO: 334695 - RNA, 19 nt, Human herpesvirus 6B
caucucaaaaaacauauaa

SEQ ID NO: 334696 - RNA, 11 nt, Human herpesvirus 6B
caucugcaaaa

SEQ ID NO: 334697 - RNA, 15 nt, Human herpesvirus 6B
caucuuaacagacua

SEQ ID NO: 334698 - RNA, 23 nt, Human herpesvirus 6B
caucuuucaaaagcaugaaauuu

SEQ ID NO: 334699 - RNA, 15 nt, Human herpesvirus 6B
caucuuuucaauuac

SEQ ID NO: 334700 - RNA, 20 nt, Human herpesvirus 6B
caugaaaaucauuaccagua

SEQ ID NO: 334701 - RNA, 15 nt, Human herpesvirus 6B
caugaacuacaguga

SEQ ID NO: 334702 - RNA, 23 nt, Human herpesvirus 6B
caugaauuccaugcgaguagauu

SEQ ID NO: 334703 - RNA, 18 nt, Human herpesvirus 6B
caugacaagaaagguauu

SEQ ID NO: 334704 - RNA, 20 nt, Human herpesvirus 6B
caugacuuugugugucgaau

SEQ ID NO: 334705 - RNA, 15 nt, Human herpesvirus 6B
caugagcuaaaccau

SEQ ID NO: 334706 - RNA, 14 nt, Human herpesvirus 6B
caugauagggaaua

SEQ ID NO: 334707 - RNA, 13 nt, Human herpesvirus 6B
caugauauuccag

SEQ ID NO: 334708 - RNA, 16 nt, Human herpesvirus 6B
caugauauuccaggca

SEQ ID NO: 334709 - RNA, 18 nt, Human herpesvirus 6B
caugauauuccaggcaau

SEQ ID NO: 334710 - RNA, 19 nt, Human herpesvirus 6B
caugauauuccaggcaaua

SEQ ID NO: 334711 - RNA, 20 nt, Human herpesvirus 6B
caugauauuccaggcaauaa

SEQ ID NO: 334712 - RNA, 14 nt, Human herpesvirus 6B
caugauugcaacaa

SEQ ID NO: 334713 - RNA, 18 nt, Human herpesvirus 6B
caugauugcaacaaaagg

SEQ ID NO: 334714 - RNA, 16 nt, Human herpesvirus 6B
caugcaauaggccaua

SEQ ID NO: 334715 - RNA, 22 nt, Human herpesvirus 6B
caugcgagcaaaaaauaguuuu

SEQ ID NO: 334716 - RNA, 14 nt, Human herpesvirus 6B
cauggcgacucaaa

SEQ ID NO: 334717 - RNA, 21 nt, Human herpesvirus 6B
cauggcgcacgcuaaaaagca

SEQ ID NO: 334718 - RNA, 20 nt, Human herpesvirus 6B
cauggcgucgaagcauugua

SEQ ID NO: 334719 - RNA, 15 nt, Human herpesvirus 6B
cauguacaaacgaca

SEQ ID NO: 334720 - RNA, 15 nt, Human herpesvirus 6B
cauguauucuccuca

SEQ ID NO: 334721 - RNA, 15 nt, Human herpesvirus 6B
caugucuuacagcuu

SEQ ID NO: 334722 - RNA, 24 nt, Human herpesvirus 6B
cauguuuauugucaaauagccaca

SEQ ID NO: 334723 - RNA, 17 nt, Human herpesvirus 6B
cauguuuuuacuugaua

SEQ ID NO: 334724 - RNA, 18 nt, Human herpesvirus 6B
cauuaaaaaaauagcaga

SEQ ID NO: 334725 - RNA, 14 nt, Human herpesvirus 6B
cauuaaaacuccca

SEQ ID NO: 334726 - RNA, 22 nt, Human herpesvirus 6B
cauuaacucugggugaguuuua

SEQ ID NO: 334727 - RNA, 14 nt, Human herpesvirus 6B
cauuaauacugguu

SEQ ID NO: 334728 - RNA, 20 nt, Human herpesvirus 6B
cauuaaugucacugucgaau

SEQ ID NO: 334729 - RNA, 22 nt, Human herpesvirus 6B
cauuaccucugcaauagcagaa

SEQ ID NO: 334730 - RNA, 19 nt, Human herpesvirus 6B
cauuauccaggcaugugau

SEQ ID NO: 334731 - RNA, 20 nt, Human herpesvirus 6B
cauucacaaggaaugugcag

SEQ ID NO: 334732 - RNA, 14 nt, Human herpesvirus 6B
cauucacaaucgca

SEQ ID NO: 334733 - RNA, 22 nt, Human herpesvirus 6B
cauucacaaucgcaguccagca

SEQ ID NO: 334734 - RNA, 16 nt, Human herpesvirus 6B
cauucccaaccauccc

SEQ ID NO: 334735 - RNA, 13 nt, Human herpesvirus 6B
cauuccgagcuuu

SEQ ID NO: 334736 - RNA, 16 nt, Human herpesvirus 6B
cauucgauuaaugcca

SEQ ID NO: 334737 - RNA, 18 nt, Human herpesvirus 6B
cauucgauuaaugccaca

SEQ ID NO: 334738 - RNA, 13 nt, Human herpesvirus 6B
cauucgccauaua

SEQ ID NO: 334739 - RNA, 21 nt, Human herpesvirus 6B
cauucgccauauaccuuguca

SEQ ID NO: 334740 - RNA, 14 nt, Human herpesvirus 6B
cauucugcauuuau

SEQ ID NO: 334741 - RNA, 14 nt, Human herpesvirus 6B
cauucuuaaauuca

SEQ ID NO: 334742 - RNA, 23 nt, Human herpesvirus 6B
cauugguaauccaugaacuacag

SEQ ID NO: 334743 - RNA, 18 nt, Human herpesvirus 6B
cauugguacucuuugucu

SEQ ID NO: 334744 - RNA, 18 nt, Human herpesvirus 6B
cauuguuccgaauucuua

SEQ ID NO: 334745 - RNA, 17 nt, Human herpesvirus 6B
cauuguuucucuaaucc

SEQ ID NO: 334746 - RNA, 13 nt, Human herpesvirus 6B
cauuuaccagaga

SEQ ID NO: 334747 - RNA, 20 nt, Human herpesvirus 6B
cauuuauuauaagcaaacau

SEQ ID NO: 334748 - RNA, 23 nt, Human herpesvirus 6B
cauuuauuauaagcaaacaugua

SEQ ID NO: 334749 - RNA, 22 nt, Human herpesvirus 6B
cauuucauuaaauaacgguguu

SEQ ID NO: 334750 - RNA, 16 nt, Human herpesvirus 6B
cauuucucuacaugcc

SEQ ID NO: 334751 - RNA, 19 nt, Human herpesvirus 6B
cauuucucuacaugccaca

SEQ ID NO: 334752 - RNA, 16 nt, Human herpesvirus 6B
cauuucuucgagcuuu

SEQ ID NO: 334753 - RNA, 22 nt, Human herpesvirus 6B
cauuugccgggaugagcuucaa

SEQ ID NO: 334754 - RNA, 14 nt, Human herpesvirus 6B
cauuugugcucgca

SEQ ID NO: 334755 - RNA, 13 nt, Human herpesvirus 6B
cauuuuuacucau

SEQ ID NO: 334756 - RNA, 21 nt, Human herpesvirus 6B
cauuuuuuaauccauauuugg

SEQ ID NO: 334757 - RNA, 19 nt, Human herpesvirus 6B
cauuuuuucccaaaagacu

SEQ ID NO: 334758 - RNA, 19 nt, Human herpesvirus 6B
ccaaaacaacaacuuuuaa

SEQ ID NO: 334759 - RNA, 13 nt, Human herpesvirus 6B
ccaaaauauaauu

SEQ ID NO: 334760 - RNA, 14 nt, Human herpesvirus 6B
ccaaccagcaaguu

SEQ ID NO: 334761 - RNA, 16 nt, Human herpesvirus 6B
ccaacgcacaugcuaa

SEQ ID NO: 334762 - RNA, 16 nt, Human herpesvirus 6B
ccaacgcuaaauuuau

SEQ ID NO: 334763 - RNA, 19 nt, Human herpesvirus 6B
ccaacgcuaaauuuaucaa

SEQ ID NO: 334764 - RNA, 14 nt, Human herpesvirus 6B
ccaacgucaugcaa

SEQ ID NO: 334765 - RNA, 19 nt, Human herpesvirus 6B
ccucaacuaaaucaugucu

SEQ ID NO: 334766 - RNA, 23 nt, Human herpesvirus 6B
ccucaacuaaaucaugucuuaca

SEQ ID NO: 334767 - RNA, 19 nt, Human herpesvirus 6B
ccucagcaaacaugugauu

SEQ ID NO: 334768 - RNA, 13 nt, Human herpesvirus 6B
ccuccaacaaaga

SEQ ID NO: 334769 - RNA, 23 nt, Human herpesvirus 6B
ccuccaacaaagauuacguccac

SEQ ID NO: 334770 - RNA, 14 nt, Human herpesvirus 6B
ccucugcaauagca

SEQ ID NO: 334771 - RNA, 21 nt, Human herpesvirus 6B
ccugaacacccgcguccucca

SEQ ID NO: 334772 - RNA, 18 nt, Human herpesvirus 6B
ccugauccaugagcaccc

SEQ ID NO: 334773 - RNA, 22 nt, Human herpesvirus 6B
ccugcagcgauauggaaacacu

SEQ ID NO: 334774 - RNA, 17 nt, Human herpesvirus 6B
ccugccuacacugcgaa

SEQ ID NO: 334775 - RNA, 17 nt, Human herpesvirus 6B
ccuggaaaaacugacug

SEQ ID NO: 334776 - RNA, 22 nt, Human herpesvirus 6B
ccuguccgugacacacagaaua

SEQ ID NO: 334777 - RNA, 19 nt, Human herpesvirus 6B
ccuguccgugagacaccgc

SEQ ID NO: 334778 - RNA, 15 nt, Human herpesvirus 6B
ccuguuuccagaaua

SEQ ID NO: 334779 - RNA, 21 nt, Human herpesvirus 6B
ccuuaaaaaaacacaguauuu

SEQ ID NO: 334780 - RNA, 17 nt, Human herpesvirus 6B
ccuuaaaugacacagaa

SEQ ID NO: 334781 - RNA, 17 nt, Human herpesvirus 6B
ccuuagaagcuuucaaa

SEQ ID NO: 334782 - RNA, 17 nt, Human herpesvirus 6B
ccuuauaaugugaacua

SEQ ID NO: 334783 - RNA, 20 nt, Human herpesvirus 6B
ccuuauaaugugaacuaaau

SEQ ID NO: 334784 - RNA, 21 nt, Human herpesvirus 6B
ccuuauaaugugaacuaaaua

SEQ ID NO: 334785 - RNA, 18 nt, Human herpesvirus 6B
ccuuaucgaaagacacgg

SEQ ID NO: 334786 - RNA, 15 nt, Human herpesvirus 6B
ccuucccuaucacaa

SEQ ID NO: 334787 - RNA, 16 nt, Human herpesvirus 6B
ccuucggggacaguga

SEQ ID NO: 334788 - RNA, 17 nt, Human herpesvirus 6B
ccuucggggacagugau

SEQ ID NO: 334789 - RNA, 17 nt, Human herpesvirus 6B
ccuucuuuuaguauuua

SEQ ID NO: 334790 - RNA, 20 nt, Human herpesvirus 6B
ccuuguaaucucuagguaaa

SEQ ID NO: 334791 - RNA, 23 nt, Human herpesvirus 6B
ccuuugcggugcauaacaucuca

SEQ ID NO: 334792 - RNA, 15 nt, Human herpesvirus 6B
ccuuuguccuuacaa

SEQ ID NO: 334793 - RNA, 23 nt, Human herpesvirus 6B
ccuuugugugauauuauucucaa

SEQ ID NO: 334794 - RNA, 23 nt, Human herpesvirus 6B
ccuuuucgcgccgcguacacgaa

SEQ ID NO: 334795 - RNA, 17 nt, Human herpesvirus 6B
cgaaaacuuuuugccga

SEQ ID NO: 334796 - RNA, 19 nt, Human herpesvirus 6B
cgaaagacguuugcuuuuu

SEQ ID NO: 334797 - RNA, 13 nt, Human herpesvirus 6B
cgaaauacuucuc

SEQ ID NO: 334798 - RNA, 22 nt, Human herpesvirus 6B
cgaaauagggucaacuguuacu

SEQ ID NO: 334799 - RNA, 11 nt, Human herpesvirus 6B
cgaaaucaaug

SEQ ID NO: 334800 - RNA, 14 nt, Human herpesvirus 6B
cgaaauccccagaa

SEQ ID NO: 334801 - RNA, 19 nt, Human herpesvirus 6B
cgaagaaaaugaauucaag

SEQ ID NO: 334802 - RNA, 14 nt, Human herpesvirus 6B
cgaagacauuaaua

SEQ ID NO: 334803 - RNA, 17 nt, Human herpesvirus 6B
cgaagccuguccgugac

SEQ ID NO: 334804 - RNA, 24 nt, Human herpesvirus 6B
cgaauagcauucuguucuucauca

SEQ ID NO: 334805 - RNA, 19 nt, Human herpesvirus 6B
cgaauaguuucaugauucu

SEQ ID NO: 334806 - RNA, 19 nt, Human herpesvirus 6B
cgaaucuaaauuggucucu

SEQ ID NO: 334807 - RNA, 16 nt, Human herpesvirus 6B
cgaaucucaagcacaa

SEQ ID NO: 334808 - RNA, 19 nt, Human herpesvirus 6B
cgaauggcacucugaagaa

SEQ ID NO: 334809 - RNA, 21 nt, Human herpesvirus 6B
cgaauguuacagauacaaaga

SEQ ID NO: 334810 - RNA, 20 nt, Human herpesvirus 6B
cgaauuguugucucuuuaua

SEQ ID NO: 334811 - RNA, 19 nt, Human herpesvirus 6B
cgacaaacuacugaucgcc

SEQ ID NO: 334812 - RNA, 20 nt, Human herpesvirus 6B
cgacaacgugcucgugaaaa

SEQ ID NO: 334813 - RNA, 16 nt, Human herpesvirus 6B
cgacaauccuaauuca

SEQ ID NO: 334814 - RNA, 14 nt, Human herpesvirus 6B
cgacaugcuucaca

SEQ ID NO: 334815 - RNA, 19 nt, Human herpesvirus 6B
cgacaugcuucacaucucg

SEQ ID NO: 334816 - RNA, 17 nt, Human herpesvirus 6B
cgacccuagcuuuucau

SEQ ID NO: 334817 - RNA, 13 nt, Human herpesvirus 6B
cgaccugaucaca

SEQ ID NO: 334818 - RNA, 14 nt, Human herpesvirus 6B
cgagaaaaaacauc

SEQ ID NO: 334819 - RNA, 13 nt, Human herpesvirus 6B
cgagaaucuuccu

SEQ ID NO: 334820 - RNA, 17 nt, Human herpesvirus 6B
cgagagcugacugaaag

SEQ ID NO: 334821 - RNA, 17 nt, Human herpesvirus 6B
cgauaaauugauaauaa

SEQ ID NO: 334822 - RNA, 13 nt, Human herpesvirus 6B
cgauauagauuau

SEQ ID NO: 334823 - RNA, 17 nt, Human herpesvirus 6B
cgaucauaaaacugcca

SEQ ID NO: 334824 - RNA, 18 nt, Human herpesvirus 6B
cgaucucauaugcaucag

SEQ ID NO: 334825 - RNA, 16 nt, Human herpesvirus 6B
cgaugcagaugccugu

SEQ ID NO: 334826 - RNA, 17 nt, Human herpesvirus 6B
cgaugcucucagaucau

SEQ ID NO: 334827 - RNA, 15 nt, Human herpesvirus 6B
cgauguggaacggaa

SEQ ID NO: 334828 - RNA, 11 nt, Human herpesvirus 6B
cgauguucucu

SEQ ID NO: 334829 - RNA, 14 nt, Human herpesvirus 6B
cgauuaaugccaca

SEQ ID NO: 334830 - RNA, 21 nt, Human herpesvirus 6B
cgauuacgucuuuuuguucag

SEQ ID NO: 334831 - RNA, 11 nt, Human herpesvirus 6B
cgauugccaaa

SEQ ID NO: 334832 - RNA, 20 nt, Human herpesvirus 6B
cgauugcgcgauuagguuag

SEQ ID NO: 334833 - RNA, 17 nt, Human herpesvirus 6B
cgauuguaauuacauua

SEQ ID NO: 334834 - RNA, 19 nt, Human herpesvirus 6B
cgauuuaauuuuaucaugc

SEQ ID NO: 334835 - RNA, 18 nt, Human herpesvirus 6B
cgcaaaaacauguuguuc

SEQ ID NO: 334836 - RNA, 14 nt, Human herpesvirus 6B
cgcaaacaggugua

SEQ ID NO: 334837 - RNA, 18 nt, Human herpesvirus 6B
cgcaaaggguaguuuuag

SEQ ID NO: 334838 - RNA, 21 nt, Human herpesvirus 6B
cgcagaggcggcgaccacagc

SEQ ID NO: 334839 - RNA, 20 nt, Human herpesvirus 6B
cgcagauaaaaaugaucgcc

SEQ ID NO: 334840 - RNA, 18 nt, Human herpesvirus 6B
cgcaggauuauaaaaaca

SEQ ID NO: 334841 - RNA, 21 nt, Human herpesvirus 6B
cgcaggauuauaaaaacacac

SEQ ID NO: 334842 - RNA, 21 nt, Human herpesvirus 6B
cgcaguuucuguuuuucucau

SEQ ID NO: 334843 - RNA, 19 nt, Human herpesvirus 6B
cgcauagaccaaccagcaa

SEQ ID NO: 334844 - RNA, 22 nt, Human herpesvirus 6B
cgcauagauggguaagugccua

SEQ ID NO: 334845 - RNA, 19 nt, Human herpesvirus 6B
cgccaaaaaaauacaguau

SEQ ID NO: 334846 - RNA, 18 nt, Human herpesvirus 6B
cgccaacggaaagcaucu

SEQ ID NO: 334847 - RNA, 17 nt, Human herpesvirus 6B
cgcgaacgugacuguau

SEQ ID NO: 334848 - RNA, 23 nt, Human herpesvirus 6B
cgcgaacgugacuguaucaaauu

SEQ ID NO: 334849 - RNA, 14 nt, Human herpesvirus 6B
cgcgcauguugcag

SEQ ID NO: 334850 - RNA, 18 nt, Human herpesvirus 6B
cgcgccauaucacagcau

SEQ ID NO: 334851 - RNA, 23 nt, Human herpesvirus 6B
cgcggggacacaucuauguguau

SEQ ID NO: 334852 - RNA, 18 nt, Human herpesvirus 6B
cgcuaaggugagccagau

SEQ ID NO: 334853 - RNA, 12 nt, Human herpesvirus 6B
cgcucacaacau

SEQ ID NO: 334854 - RNA, 18 nt, Human herpesvirus 6B
cgcucagcguggaauuug

SEQ ID NO: 334855 - RNA, 22 nt, Human herpesvirus 6B
cgcugauuccuguaaggucaaa

SEQ ID NO: 334856 - RNA, 12 nt, Human herpesvirus 6B
cgcuucuuucac

SEQ ID NO: 334857 - RNA, 21 nt, Human herpesvirus 6B
cggaaaaccgguacgcuucuu

SEQ ID NO: 334858 - RNA, 15 nt, Human herpesvirus 6B
cggaacauuguucua

SEQ ID NO: 334859 - RNA, 20 nt, Human herpesvirus 6B
cggaacccuagacacacaga

SEQ ID NO: 334860 - RNA, 15 nt, Human herpesvirus 6B
cggaagacguuucua

SEQ ID NO: 334861 - RNA, 17 nt, Human herpesvirus 6B
cggaagauacacugcaa

SEQ ID NO: 334862 - RNA, 17 nt, Human herpesvirus 6B
cggaagggcucuguuac

SEQ ID NO: 334863 - RNA, 21 nt, Human herpesvirus 6B
cggaauuaacaauucucucaa

SEQ ID NO: 334864 - RNA, 22 nt, Human herpesvirus 6B
cggaauuguucuucaacauauc

SEQ ID NO: 334865 - RNA, 16 nt, Human herpesvirus 6B
cggaauuuauugucga

SEQ ID NO: 334866 - RNA, 11 nt, Human herpesvirus 6B
cggagacacau

SEQ ID NO: 334867 - RNA, 14 nt, Human herpesvirus 6B
cggagagucuucau

SEQ ID NO: 334868 - RNA, 15 nt, Human herpesvirus 6B
cggagcuuccgucac

SEQ ID NO: 334869 - RNA, 13 nt, Human herpesvirus 6B
cggaguugcagua

SEQ ID NO: 334870 - RNA, 19 nt, Human herpesvirus 6B
cggauaacguucauuccca

SEQ ID NO: 334871 - RNA, 23 nt, Human herpesvirus 6B
cggauaugaggauuugcuuguca

SEQ ID NO: 334872 - RNA, 20 nt, Human herpesvirus 6B
cggauuuguucgauugccaa

SEQ ID NO: 334873 - RNA, 13 nt, Human herpesvirus 6B
cggcaugaauucc

SEQ ID NO: 334874 - RNA, 21 nt, Human herpesvirus 6B
cggcccguccaccgucccucu

SEQ ID NO: 334875 - RNA, 13 nt, Human herpesvirus 6B
cggcgaccacagc

SEQ ID NO: 334876 - RNA, 14 nt, Human herpesvirus 6B
cggcgucacacagc

SEQ ID NO: 334877 - RNA, 15 nt, Human herpesvirus 6B
cggcuucaagaaugc

SEQ ID NO: 334878 - RNA, 14 nt, Human herpesvirus 6B
uuacuaauguggau

SEQ ID NO: 334879 - RNA, 21 nt, Human herpesvirus 6B
uuacuaguaagaacauuaaga

SEQ ID NO: 334880 - RNA, 14 nt, Human herpesvirus 6B
uuacuagugauuau

SEQ ID NO: 334881 - RNA, 13 nt, Human herpesvirus 6B
uuacugacaccac

SEQ ID NO: 334882 - RNA, 21 nt, Human herpesvirus 6B
uuacugacaccacauaacaaa

SEQ ID NO: 334883 - RNA, 15 nt, Human herpesvirus 6B
uuagaaauuacacau

SEQ ID NO: 334884 - RNA, 23 nt, Human herpesvirus 6B
uuagaacaggaagcgccauaaaa

SEQ ID NO: 334885 - RNA, 18 nt, Human herpesvirus 6B
uuagaaccaaucugugag

SEQ ID NO: 334886 - RNA, 19 nt, Human herpesvirus 6B
uuagaauguggagcaguga

SEQ ID NO: 334887 - RNA, 18 nt, Human herpesvirus 6B
uuagauguaacucaucaa

SEQ ID NO: 334888 - RNA, 16 nt, Human herpesvirus 6B
uuagauucgagccaaa

SEQ ID NO: 334889 - RNA, 18 nt, Human herpesvirus 6B
uuagcaaucauuaacaua

SEQ ID NO: 334890 - RNA, 16 nt, Human herpesvirus 6B
uuagcgcuguauguua

SEQ ID NO: 334891 - RNA, 18 nt, Human herpesvirus 6B
uuagcggauggaauccaa

SEQ ID NO: 334892 - RNA, 14 nt, Human herpesvirus 6B
uuagcuagacgugu

SEQ ID NO: 334893 - RNA, 16 nt, Human herpesvirus 6B
uuaggacaugugguaa

SEQ ID NO: 334894 - RNA, 17 nt, Human herpesvirus 6B
uuaggggacagagccua

SEQ ID NO: 334895 - RNA, 16 nt, Human herpesvirus 6B
uuaggguuaggguuag

SEQ ID NO: 334896 - RNA, 21 nt, Human herpesvirus 6B
uuagucgcacacacaagaaca

SEQ ID NO: 334897 - RNA, 17 nt, Human herpesvirus 6B
uuaguuagaugcuuaac

SEQ ID NO: 334898 - RNA, 14 nt, Human herpesvirus 6B
uuaguuuacauaag

SEQ ID NO: 334899 - RNA, 23 nt, Human herpesvirus 6B
uuauaaacccauaggugauuuca

SEQ ID NO: 334900 - RNA, 20 nt, Human herpesvirus 6B
uuauaacaccaguacuucaa

SEQ ID NO: 334901 - RNA, 17 nt, Human herpesvirus 6B
uuauaagacgcugauaa

SEQ ID NO: 334902 - RNA, 19 nt, Human herpesvirus 6B
uuauaagucaucauacaau

SEQ ID NO: 334903 - RNA, 23 nt, Human herpesvirus 6B
uuauaauuagaauaggcgucuca

SEQ ID NO: 334904 - RNA, 17 nt, Human herpesvirus 6B
uuauacagaugccaagu

SEQ ID NO: 334905 - RNA, 18 nt, Human herpesvirus 6B
uuauacuggcaaagcaaa

SEQ ID NO: 334906 - RNA, 20 nt, Human herpesvirus 6B
uuauauacguuaaauaucua

SEQ ID NO: 334907 - RNA, 21 nt, Human herpesvirus 6B
uuauauuuggggaaaauaccu

SEQ ID NO: 334908 - RNA, 16 nt, Human herpesvirus 6B
uuaucaaagagguacu

SEQ ID NO: 334909 - RNA, 17 nt, Human herpesvirus 6B
uuaucaacuauacuuaa

SEQ ID NO: 334910 - RNA, 13 nt, Human herpesvirus 6B
uuaucaugcccua

SEQ ID NO: 334911 - RNA, 19 nt, Human herpesvirus 6B
uuaucuccaauagauuuca

SEQ ID NO: 334912 - RNA, 15 nt, Human herpesvirus 6B
uuauggcaacauacc

SEQ ID NO: 334913 - RNA, 16 nt, Human herpesvirus 6B
uuauggcaacauaccc

SEQ ID NO: 334914 - RNA, 14 nt, Human herpesvirus 6B
uuauuaaaucuuac

SEQ ID NO: 334915 - RNA, 21 nt, Human herpesvirus 6B
uuauuauaagcaaacauguau

SEQ ID NO: 334916 - RNA, 17 nt, Human herpesvirus 6B
uuauucaccauuacucu

SEQ ID NO: 334917 - RNA, 22 nt, Human herpesvirus 6B
uuauucauaagagaauagaucu

SEQ ID NO: 334918 - RNA, 14 nt, Human herpesvirus 6B
uuauucugucuuga

SEQ ID NO: 334919 - RNA, 14 nt, Human herpesvirus 6B
uuauuucuaaacac

SEQ ID NO: 334920 - RNA, 20 nt, Human herpesvirus 6B
uuauuuguuuaaugcauuca

SEQ ID NO: 334921 - RNA, 15 nt, Human herpesvirus 6B
uuauuuucaauauca

SEQ ID NO: 334922 - RNA, 21 nt, Human herpesvirus 6B
uuauuuuguggcuauuugaca

SEQ ID NO: 334923 - RNA, 22 nt, Human herpesvirus 6B
uucaaaaugaccagagauucua

SEQ ID NO: 334924 - RNA, 21 nt, Human herpesvirus 6B
uucaaagauagacagugaaaa

SEQ ID NO: 334925 - RNA, 22 nt, Human herpesvirus 6B
uucaaauguagcaaaugaaugu

SEQ ID NO: 334926 - RNA, 17 nt, Human herpesvirus 6B
uucaaauuuacucucca

SEQ ID NO: 334927 - RNA, 19 nt, Human herpesvirus 6B
uucaagaaugggaugcauu

SEQ ID NO: 334928 - RNA, 15 nt, Human herpesvirus 6B
uucaagacgaucuca

SEQ ID NO: 334929 - RNA, 15 nt, Human herpesvirus 6B
uucaagcaaagacau

SEQ ID NO: 334930 - RNA, 17 nt, Human herpesvirus 6B
uucaauacuacgugucu

SEQ ID NO: 334931 - RNA, 21 nt, Human herpesvirus 6B
uucaauuguuuuuuacuuccg

SEQ ID NO: 334932 - RNA, 19 nt, Human herpesvirus 6B
uucacaaggaaugugcaga

SEQ ID NO: 334933 - RNA, 15 nt, Human herpesvirus 6B
uucacacaacuuaac

SEQ ID NO: 334934 - RNA, 12 nt, Human herpesvirus 6B
uucacacagaug

SEQ ID NO: 334935 - RNA, 11 nt, Human herpesvirus 6B
uucacaucucg

SEQ ID NO: 334936 - RNA, 13 nt, Human herpesvirus 6B
uucaccaugucca

SEQ ID NO: 334937 - RNA, 13 nt, Human herpesvirus 6B
uucaccauuccag

SEQ ID NO: 334938 - RNA, 23 nt, Human herpesvirus 6B
uucacguccagcgcauccuuaaa

SEQ ID NO: 334939 - RNA, 13 nt, Human herpesvirus 6B
uucacuuccauuu

SEQ ID NO: 334940 - RNA, 16 nt, Human herpesvirus 6B
uucacuuuuugaagag

SEQ ID NO: 334941 - RNA, 23 nt, Human herpesvirus 6B
uucagaaaauuggugugcauuau

SEQ ID NO: 334942 - RNA, 15 nt, Human herpesvirus 6B
uucagacacgcuaaa

SEQ ID NO: 334943 - RNA, 23 nt, Human herpesvirus 6B
uucagcuuucauaagcucuacac

SEQ ID NO: 334944 - RNA, 14 nt, Human herpesvirus 6B
uucaggaacagaaa

SEQ ID NO: 334945 - RNA, 17 nt, Human herpesvirus 6B
uucaggcauuaaacuga

SEQ ID NO: 334946 - RNA, 21 nt, Human herpesvirus 6B
uucaggcggcaugaauuccau

SEQ ID NO: 334947 - RNA, 21 nt, Human herpesvirus 6B
uucaggugucucaaccuucau

SEQ ID NO: 334948 - RNA, 14 nt, Human herpesvirus 6B
uucaguauagacau

SEQ ID NO: 334949 - RNA, 17 nt, Human herpesvirus 6B
uucagucucagcaauca

SEQ ID NO: 334950 - RNA, 23 nt, Human herpesvirus 6B
uucauaaaaacgacauccaucgu

SEQ ID NO: 334951 - RNA, 22 nt, Human herpesvirus 6B
uucauaacagauggcacugaau

SEQ ID NO: 334952 - RNA, 21 nt, Human herpesvirus 6B
uucauacccgauguucucuca

SEQ ID NO: 334953 - RNA, 14 nt, Human herpesvirus 6B
uucaugauauucca

SEQ ID NO: 334954 - RNA, 15 nt, Human herpesvirus 6B
uucaugauauuccag

SEQ ID NO: 334955 - RNA, 18 nt, Human herpesvirus 6B
uuccacaucuaugaugcu

SEQ ID NO: 334956 - RNA, 22 nt, Human herpesvirus 6B
uuccacaucuaugaugcuguag

SEQ ID NO: 334957 - RNA, 21 nt, Human herpesvirus 6B
uuccagggaacuugauguuga

SEQ ID NO: 334958 - RNA, 21 nt, Human herpesvirus 6B
uuccagguggugguuucgggu

SEQ ID NO: 334959 - RNA, 18 nt, Human herpesvirus 6B
uuccagugagaacauaua

SEQ ID NO: 334960 - RNA, 18 nt, Human herpesvirus 6B
uuccauaaguuaauucca

SEQ ID NO: 334961 - RNA, 19 nt, Human herpesvirus 6B
uuccauaaguuaauuccag

SEQ ID NO: 334962 - RNA, 22 nt, Human herpesvirus 6B
uuccaugacugugaggugauuu

SEQ ID NO: 334963 - RNA, 13 nt, Human herpesvirus 6B
uuccccauaacac

SEQ ID NO: 334964 - RNA, 17 nt, Human herpesvirus 6B
uuccccucauacaucca

SEQ ID NO: 334965 - RNA, 19 nt, Human herpesvirus 6B
uucccgugcucaguaagaa

SEQ ID NO: 334966 - RNA, 23 nt, Human herpesvirus 6B
uuccguagcggccgcaaaaacaa

SEQ ID NO: 334967 - RNA, 15 nt, Human herpesvirus 6B
uuccugugaugccuu

SEQ ID NO: 334968 - RNA, 18 nt, Human herpesvirus 6B
uuccuuauuucuaaacac

SEQ ID NO: 334969 - RNA, 20 nt, Human herpesvirus 6B
uuccuuauuucuaaacacga

SEQ ID NO: 334970 - RNA, 22 nt, Human herpesvirus 6B
uuccuuuaugauacaugcgauu

SEQ ID NO: 334971 - RNA, 21 nt, Human herpesvirus 6B
uucgaacaugauagggaauau

SEQ ID NO: 334972 - RNA, 17 nt, Human herpesvirus 6B
uucgauguacaguuucu

SEQ ID NO: 334973 - RNA, 15 nt, Human herpesvirus 6B
uucgauuaaugccac

SEQ ID NO: 334974 - RNA, 16 nt, Human herpesvirus 6B
uucgcaaaccguccaa

SEQ ID NO: 334975 - RNA, 17 nt, Human herpesvirus 6B
uucgcaagacuacagac

SEQ ID NO: 334976 - RNA, 15 nt, Human herpesvirus 6B
uucggcugcuuauau

SEQ ID NO: 334977 - RNA, 17 nt, Human herpesvirus 6B
uucgggugcaaucaauc

SEQ ID NO: 334978 - RNA, 14 nt, Human herpesvirus 6B
uucgugucugagau

SEQ ID NO: 334979 - RNA, 20 nt, Human herpesvirus 6B
uucguguguguguaugcuuu

SEQ ID NO: 334980 - RNA, 18 nt, Human herpesvirus 6B
uucguucagaauguucca

SEQ ID NO: 334981 - RNA, 13 nt, Human herpesvirus 6B
uucuaaauaucau

SEQ ID NO: 334982 - RNA, 14 nt, Human herpesvirus 6B
uucuaauucuagau

SEQ ID NO: 334983 - RNA, 19 nt, Human herpesvirus 6B
uucuacauaaaacaggguu

SEQ ID NO: 334984 - RNA, 22 nt, Human herpesvirus 6B
uucuagcgaucauaaaacugcc

SEQ ID NO: 334985 - RNA, 23 nt, Human herpesvirus 6B
uucuagcgaucauaaaacugcca

SEQ ID NO: 334986 - RNA, 23 nt, Human herpesvirus 6B
uucuagguacggcgucacacagc

SEQ ID NO: 334987 - RNA, 14 nt, Human herpesvirus 6B
uucucagacagcuu

SEQ ID NO: 334988 - RNA, 11 nt, Human herpesvirus 6B
uucucauaaag

SEQ ID NO: 334989 - RNA, 14 nt, Human herpesvirus 6B
uucuccugaucuca

SEQ ID NO: 334990 - RNA, 20 nt, Human herpesvirus 6B
uucucgaaaauacaaugacu

SEQ ID NO: 334991 - RNA, 16 nt, Human herpesvirus 6B
uucucgggacuaggaa

SEQ ID NO: 334992 - RNA, 18 nt, Human herpesvirus 6B
uucucgugcgcaguguua

SEQ ID NO: 334993 - RNA, 17 nt, Human herpesvirus 6B
uucucuaaaaacuaaaa

SEQ ID NO: 334994 - RNA, 17 nt, Human herpesvirus 6B
uucucugcaugucuuua

SEQ ID NO: 334995 - RNA, 22 nt, Human herpesvirus 6B
uucugauuuguucuagugcgua

SEQ ID NO: 334996 - RNA, 22 nt, Human herpesvirus 6B
uucugcauuuauaucaaacuuu

SEQ ID NO: 334997 - RNA, 20 nt, Human herpesvirus 6B
uucugggauuauucugguaa

SEQ ID NO: 334998 - RNA, 13 nt, Human herpesvirus 6B
uucugucuugacg

SEQ ID NO: 334999 - RNA, 13 nt, Human herpesvirus 6B
uucugugcgucua

SEQ ID NO: 335000 - RNA, 13 nt, Human herpesvirus 6B
uucuuacauaaau

SEQ ID NO: 335001 - RNA, 13 nt, Human herpesvirus 6B
uucuuaccaagaa

SEQ ID NO: 335002 - RNA, 14 nt, Human herpesvirus 6B
uucuucaacauauc

SEQ ID NO: 335003 - RNA, 13 nt, Human herpesvirus 6B
uucuucgucuucu

SEQ ID NO: 335004 - RNA, 11 nt, Human herpesvirus 6B
uucuucugggc

SEQ ID NO: 335005 - RNA, 21 nt, Human herpesvirus 6B
uucuuucaaaaugaccagaga

SEQ ID NO: 335006 - RNA, 22 nt, Human herpesvirus 6B
uucuuucaaaaugaccagagau

SEQ ID NO: 335007 - RNA, 22 nt, Human herpesvirus 6B
uucuuugacauuuaccagagau

SEQ ID NO: 335008 - RNA, 21 nt, Human herpesvirus 6B
uucuuuggagauugauuccag

SEQ ID NO: 335009 - RNA, 21 nt, Human herpesvirus 6B
uucuuugugcgucagcuuuga

SEQ ID NO: 335010 - RNA, 23 nt, Human herpesvirus 6B
uucuuuuuggguguacauuguga

SEQ ID NO: 335011 - RNA, 18 nt, Human herpesvirus 6B
uugaaagaacaguuuacc

SEQ ID NO: 335012 - RNA, 23 nt, Human herpesvirus 6B
uugaaagaacaguuuaccuauca

SEQ ID NO: 335013 - RNA, 12 nt, Human herpesvirus 6B
uugaacagugac

SEQ ID NO: 335014 - RNA, 17 nt, Human herpesvirus 6B
uugaagaauaagccuaa

SEQ ID NO: 335015 - RNA, 19 nt, Human herpesvirus 6B
uugaaugaacgcacuagac

SEQ ID NO: 335016 - RNA, 23 nt, Human herpesvirus 6B
uugacauugcguuuugacaugag

SEQ ID NO: 335017 - RNA, 19 nt, Human herpesvirus 6B
uugaccagccagauacugc

SEQ ID NO: 335018 - RNA, 14 nt, Human herpesvirus 6B
uugacgguuuauau

SEQ ID NO: 335019 - RNA, 14 nt, Human herpesvirus 6B
uugagaaaacauga

SEQ ID NO: 335020 - RNA, 17 nt, Human herpesvirus 6B
uugagaaaguuguacag

SEQ ID NO: 335021 - RNA, 20 nt, Human herpesvirus 6B
uugaggaucacuaacuucaa

SEQ ID NO: 335022 - RNA, 16 nt, Human herpesvirus 6B
uugaguaauuggacau

SEQ ID NO: 335023 - RNA, 17 nt, Human herpesvirus 6B
uugagugugcaucagca

SEQ ID NO: 335024 - RNA, 18 nt, Human herpesvirus 6B
uugagugugcaucagcau

SEQ ID NO: 335025 - RNA, 18 nt, Human herpesvirus 6B
uugaguugggacuuggaa

SEQ ID NO: 335026 - RNA, 13 nt, Human herpesvirus 6B
uugauaguacuua

SEQ ID NO: 335027 - RNA, 22 nt, Human herpesvirus 6B
uugauaguacuuacguguguau

SEQ ID NO: 335028 - RNA, 15 nt, Human herpesvirus 6B
uugauauaauccugu

SEQ ID NO: 335029 - RNA, 12 nt, Human herpesvirus 6B
uugcaaucacau

SEQ ID NO: 335030 - RNA, 16 nt, Human herpesvirus 6B
uugcaguuaaucauuc

SEQ ID NO: 335031 - RNA, 18 nt, Human herpesvirus 6B
uugccaguaagucuucau

SEQ ID NO: 335032 - RNA, 23 nt, Human herpesvirus 6B
uugccggcuaaacuuuacaucaa

SEQ ID NO: 335033 - RNA, 17 nt, Human herpesvirus 6B
uugccguugucguguga

SEQ ID NO: 335034 - RNA, 18 nt, Human herpesvirus 6B
uugccguugucgugugau

SEQ ID NO: 335035 - RNA, 14 nt, Human herpesvirus 6B
uugcgggaugccau

SEQ ID NO: 335036 - RNA, 23 nt, Human herpesvirus 6B
uugcgugggaauaagaguuucau

SEQ ID NO: 335037 - RNA, 20 nt, Human herpesvirus 6B
uugcuguuuucgccaucaau

SEQ ID NO: 335038 - RNA, 14 nt, Human herpesvirus 6B
uugcuucguuucuu

SEQ ID NO: 335039 - RNA, 22 nt, Human herpesvirus 6B
uugcuuucucuuuuuaauucca

SEQ ID NO: 335040 - RNA, 15 nt, Human herpesvirus 6B
uugcuuuuuuaguuu

SEQ ID NO: 335041 - RNA, 19 nt, Human herpesvirus 6B
uuggaauugggaagcauaa

SEQ ID NO: 335042 - RNA, 14 nt, Human herpesvirus 6B
uuggagagacguug

SEQ ID NO: 335043 - RNA, 18 nt, Human herpesvirus 6B
uuggagaucaguucuccg

SEQ ID NO: 335044 - RNA, 19 nt, Human herpesvirus 6B
uuggagcuauaugcaucuc

SEQ ID NO: 335045 - RNA, 20 nt, Human herpesvirus 6B
uuggagcuauaugcaucucu

SEQ ID NO: 335046 - RNA, 11 nt, Human herpesvirus 6B
uuggaggucau

SEQ ID NO: 335047 - RNA, 20 nt, Human herpesvirus 6B
uuggaggucaucguccaacc

SEQ ID NO: 335048 - RNA, 21 nt, Human herpesvirus 6B
uuggguguacauugugacaag

SEQ ID NO: 335049 - RNA, 20 nt, Human herpesvirus 6B
uugguacucuuugucuuaga

SEQ ID NO: 335050 - RNA, 13 nt, Human herpesvirus 6B
uuggugugcauua

SEQ ID NO: 335051 - RNA, 22 nt, Human herpesvirus 6B
uugguguuugcgggaugccaua

SEQ ID NO: 335052 - RNA, 23 nt, Human herpesvirus 6B
uuguaaaaauucacuguggucaa

SEQ ID NO: 335053 - RNA, 16 nt, Human herpesvirus 6B
uuguaccaacauguau

SEQ ID NO: 335054 - RNA, 17 nt, Human herpesvirus 6B
uuguagauaauuuccaa

SEQ ID NO: 335055 - RNA, 18 nt, Human herpesvirus 6B
uuguagucguuuuuggau

SEQ ID NO: 335056 - RNA, 21 nt, Human herpesvirus 6B
uugucagucaaugcaauucca

SEQ ID NO: 335057 - RNA, 23 nt, Human herpesvirus 6B
uugucagucauaauucucauaga

SEQ ID NO: 335058 - RNA, 23 nt, Human herpesvirus 6B
uugucauucugcauuuauaucaa

SEQ ID NO: 335059 - RNA, 21 nt, Human herpesvirus 6B
uuguccucgccguguauuuca

SEQ ID NO: 335060 - RNA, 17 nt, Human herpesvirus 6B
uuguccuuacaaaccuu

SEQ ID NO: 335061 - RNA, 14 nt, Human herpesvirus 6B
uugucgcacguguu

SEQ ID NO: 335062 - RNA, 19 nt, Human herpesvirus 6B
uugucguuuguacauguua

SEQ ID NO: 335063 - RNA, 16 nt, Human herpesvirus 6B
uugugacaaguuucuu

SEQ ID NO: 335064 - RNA, 14 nt, Human herpesvirus 6B
uugugcagggugcu

SEQ ID NO: 335065 - RNA, 19 nt, Human herpesvirus 6B
uugugcgaauuguguugcu

SEQ ID NO: 335066 - RNA, 14 nt, Human herpesvirus 6B
uuguggacaaugau

SEQ ID NO: 335067 - RNA, 18 nt, Human herpesvirus 6B
uuguggacaaugauacua

SEQ ID NO: 335068 - RNA, 12 nt, Human herpesvirus 6B
uugugucuuugu

SEQ ID NO: 335069 - RNA, 14 nt, Human herpesvirus 6B
uuguguuucugucu

SEQ ID NO: 335070 - RNA, 18 nt, Human herpesvirus 6B
uuguucgauugccaaagg

SEQ ID NO: 335071 - RNA, 19 nt, Human herpesvirus 6B
uuuaaaagugcaacaaaga

SEQ ID NO: 335072 - RNA, 12 nt, Human herpesvirus 6B
uuuaaaauaccg

SEQ ID NO: 335073 - RNA, 14 nt, Human herpesvirus 6B
uuuaaaauaucugu

SEQ ID NO: 335074 - RNA, 21 nt, Human herpesvirus 6B
uuuaaacucgacuucuuucau

SEQ ID NO: 335075 - RNA, 11 nt, Human herpesvirus 6B
uuuaaagcagc

SEQ ID NO: 335076 - RNA, 14 nt, Human herpesvirus 6B
uuuaacauccaaaa

SEQ ID NO: 335077 - RNA, 14 nt, Human herpesvirus 6B
uuuaacuugaugua

SEQ ID NO: 335078 - RNA, 22 nt, Human herpesvirus 6B
uuuaauaaaauaacaugugaca

SEQ ID NO: 335079 - RNA, 15 nt, Human herpesvirus 6B
uuuaauauaucuuga

SEQ ID NO: 335080 - RNA, 23 nt, Human herpesvirus 6B
uuuaaucaugauugcaacaaaag

SEQ ID NO: 335081 - RNA, 19 nt, Human herpesvirus 6B
uuuaauccacugcauuuca

SEQ ID NO: 335082 - RNA, 23 nt, Human herpesvirus 6B
uuuaauguugaguaauuggacau

SEQ ID NO: 335083 - RNA, 17 nt, Human herpesvirus 6B
uuuaauuaaaacagaaa

SEQ ID NO: 335084 - RNA, 15 nt, Human herpesvirus 6B
uuuacaaaacuguua

SEQ ID NO: 335085 - RNA, 23 nt, Human herpesvirus 6B
uuuacauaagaauuacaauacag

SEQ ID NO: 335086 - RNA, 19 nt, Human herpesvirus 6B
uuuaccagagauacgugau

SEQ ID NO: 335087 - RNA, 17 nt, Human herpesvirus 6B
uuuacgaauucaauguc

SEQ ID NO: 335088 - RNA, 19 nt, Human herpesvirus 6B
uuuacggcagaagcuugau

SEQ ID NO: 335089 - RNA, 13 nt, Human herpesvirus 6B
uuuacugcaugcu

SEQ ID NO: 335090 - RNA, 21 nt, Human herpesvirus 6B
uuuacuuacaucgauccaaaa

SEQ ID NO: 335091 - RNA, 11 nt, Human herpesvirus 6B
uuuagacagag

SEQ ID NO: 335092 - RNA, 23 nt, Human herpesvirus 6B
uuuagcaugggugaguguauuau

SEQ ID NO: 335093 - RNA, 16 nt, Human herpesvirus 6B
uuuauagagcaauuca

SEQ ID NO: 335094 - RNA, 19 nt, Human herpesvirus 6B
uuuauauugcuauagauua

SEQ ID NO: 335095 - RNA, 14 nt, Human herpesvirus 6B
uuuaucaaaagcca

SEQ ID NO: 335096 - RNA, 15 nt, Human herpesvirus 6B
uuuaucgagaccgac

SEQ ID NO: 335097 - RNA, 21 nt, Human herpesvirus 6B
uuuaucggaacacauagugaa

SEQ ID NO: 335098 - RNA, 20 nt, Human herpesvirus 6B
uuuauucaaccaaucuaaga

SEQ ID NO: 335099 - RNA, 15 nt, Human herpesvirus 6B
uuucaaaagcaugaa

SEQ ID NO: 335100 - RNA, 18 nt, Human herpesvirus 6B
uuucaagauuguguuucu

SEQ ID NO: 335101 - RNA, 17 nt, Human herpesvirus 6B
uuucaccauguccagga

SEQ ID NO: 335102 - RNA, 20 nt, Human herpesvirus 6B
uuucaggcggcaugaauucc

SEQ ID NO: 335103 - RNA, 16 nt, Human herpesvirus 6B
uuucaggcgucaaaga

SEQ ID NO: 335104 - RNA, 12 nt, Human herpesvirus 6B
uuucaguuucaa

SEQ ID NO: 335105 - RNA, 13 nt, Human herpesvirus 6B
uuucaucaaucac

SEQ ID NO: 335106 - RNA, 19 nt, Human herpesvirus 6B
uuucaucacaaagugagau

SEQ ID NO: 335107 - RNA, 17 nt, Human herpesvirus 6B
uuucaugauucuuuguc

SEQ ID NO: 335108 - RNA, 15 nt, Human herpesvirus 6B
uuucauuucuccaca

SEQ ID NO: 335109 - RNA, 13 nt, Human herpesvirus 6B
uuuccaaacauua

SEQ ID NO: 335110 - RNA, 14 nt, Human herpesvirus 6B
uuuccagugagaac

SEQ ID NO: 335111 - RNA, 18 nt, Human herpesvirus 6B
uuuccauaaguuaauucc

SEQ ID NO: 335112 - RNA, 17 nt, Human herpesvirus 6B
uuucccacagauugcau

SEQ ID NO: 335113 - RNA, 19 nt, Human herpesvirus 6B
uuucccacagauugcauau

SEQ ID NO: 335114 - RNA, 12 nt, Human herpesvirus 6B
uuucccaccuaa

SEQ ID NO: 335115 - RNA, 23 nt, Human herpesvirus 6B
uuuccggagauuaaagcauuagc

SEQ ID NO: 335116 - RNA, 23 nt, Human herpesvirus 6B
uuucgccaucaaucucuaugaga

SEQ ID NO: 335117 - RNA, 14 nt, Human herpesvirus 6B
uuucggcaacugaa

SEQ ID NO: 335118 - RNA, 17 nt, Human herpesvirus 6B
uuucuauguuauguaaa

SEQ ID NO: 335119 - RNA, 20 nt, Human herpesvirus 6B
uuucuccacacuguuuacuu

SEQ ID NO: 335120 - RNA, 18 nt, Human herpesvirus 6B
uuucuccugaucucacgu

SEQ ID NO: 335121 - RNA, 18 nt, Human herpesvirus 6B
uuucucuacaugccacag

SEQ ID NO: 335122 - RNA, 14 nt, Human herpesvirus 6B
uuucugaagacagc

SEQ ID NO: 335123 - RNA, 20 nt, Human herpesvirus 6B
uuucugagauuuuucuggga

SEQ ID NO: 335124 - RNA, 10 nt, Human herpesvirus 6B
uuucugcaaa

SEQ ID NO: 335125 - RNA, 17 nt, Human herpesvirus 6B
uuucuucgggauggaga

SEQ ID NO: 335126 - RNA, 18 nt, Human herpesvirus 6B
uuucuugaagaugugaua

SEQ ID NO: 335127 - RNA, 15 nt, Human herpesvirus 6B
uuucuuugacauuua

SEQ ID NO: 335128 - RNA, 23 nt, Human herpesvirus 6B
uuucuuugacauuuaccagagau

SEQ ID NO: 335129 - RNA, 21 nt, Human herpesvirus 6B
uuucuuuuuaaaaucaaaaaa

SEQ ID NO: 335130 - RNA, 22 nt, Human herpesvirus 6B
uuugaagauaugaaugaucacu

SEQ ID NO: 335131 - RNA, 18 nt, Human herpesvirus 6B
uuugaauucugcucguuu

SEQ ID NO: 335132 - RNA, 22 nt, Human herpesvirus 6B
uuugacgguucaccacugugau

SEQ ID NO: 335133 - RNA, 22 nt, Human herpesvirus 6B
uuugacuauuucgaaagaguua

SEQ ID NO: 335134 - RNA, 16 nt, Human herpesvirus 6B
uuugagagcuacacau

SEQ ID NO: 335135 - RNA, 17 nt, Human herpesvirus 6B
uuugauugcaaucacau

SEQ ID NO: 335136 - RNA, 11 nt, Human herpesvirus 6B
uuugcagauaa

SEQ ID NO: 335137 - RNA, 17 nt, Human herpesvirus 6B
uuugccugccgacagau

SEQ ID NO: 335138 - RNA, 16 nt, Human herpesvirus 6B
uuugcugucacacucu

SEQ ID NO: 335139 - RNA, 14 nt, Human herpesvirus 6B
uuuggcuacaacag

SEQ ID NO: 335140 - RNA, 21 nt, Human herpesvirus 6B
uuuggggcaggaucagauuug

SEQ ID NO: 335141 - RNA, 22 nt, Human herpesvirus 6B
uuuguaaaaauggcucagagaa

SEQ ID NO: 335142 - RNA, 14 nt, Human herpesvirus 6B
uuugucgcacgugu

SEQ ID NO: 335143 - RNA, 15 nt, Human herpesvirus 6B
uuugugcagggugcu

SEQ ID NO: 335144 - RNA, 20 nt, Human herpesvirus 6B
uuugugcgaauuguguugcu

SEQ ID NO: 335145 - RNA, 15 nt, Human herpesvirus 6B
uuuguggaaaaacug

SEQ ID NO: 335146 - RNA, 13 nt, Human herpesvirus 6B
uuuuaaucaugau

SEQ ID NO: 335147 - RNA, 14 nt, Human herpesvirus 6B
uuuuacaaugagcc

SEQ ID NO: 335148 - RNA, 15 nt, Human herpesvirus 6B
uuuuaccauguugcu

SEQ ID NO: 335149 - RNA, 16 nt, Human herpesvirus 6B
uuuuacuugaugcaug

SEQ ID NO: 335150 - RNA, 18 nt, Human herpesvirus 6B
uuuuagcagauccaugga

SEQ ID NO: 335151 - RNA, 14 nt, Human herpesvirus 6B
uuuuauaucguguu

SEQ ID NO: 335152 - RNA, 20 nt, Human herpesvirus 6B
uuuucaagaaugggaugcau

SEQ ID NO: 335153 - RNA, 19 nt, Human herpesvirus 6B
uuuucauuuugauaucgau

SEQ ID NO: 335154 - RNA, 13 nt, Human herpesvirus 6B
uuuuccagugaga

SEQ ID NO: 335155 - RNA, 12 nt, Human herpesvirus 6B
uuuuccauaaau

SEQ ID NO: 335156 - RNA, 15 nt, Human herpesvirus 6B
uuuucccaccuaaua

SEQ ID NO: 335157 - RNA, 16 nt, Human herpesvirus 6B
uuuucccaccuaauaa

SEQ ID NO: 335158 - RNA, 17 nt, Human herpesvirus 6B
uuuucccaccuaauaaa

SEQ ID NO: 335159 - RNA, 15 nt, Human herpesvirus 6B
uuuuccccacaacaa

SEQ ID NO: 335160 - RNA, 13 nt, Human herpesvirus 6B
uuuuccuugacag

SEQ ID NO: 335161 - RNA, 12 nt, Human herpesvirus 6B
uuuucgugugug

SEQ ID NO: 335162 - RNA, 16 nt, Human herpesvirus 6B
uuuucugaaagucucu

SEQ ID NO: 335163 - RNA, 17 nt, Human herpesvirus 6B
uuuucuguguauuguga

SEQ ID NO: 335164 - RNA, 22 nt, Human herpesvirus 6B
uuuucuuaugaucggcauuugu

SEQ ID NO: 335165 - RNA, 16 nt, Human herpesvirus 6B
uuuugaaauugguuua

SEQ ID NO: 335166 - RNA, 19 nt, Human herpesvirus 6B
uuuugaagaacuuccugaa

SEQ ID NO: 335167 - RNA, 14 nt, Human herpesvirus 6B
uuuugcaacuuaaa

SEQ ID NO: 335168 - RNA, 11 nt, Human herpesvirus 6B
uuuugcaauuu

SEQ ID NO: 335169 - RNA, 14 nt, Human herpesvirus 6B
uuuugcauuaaaca

SEQ ID NO: 335170 - RNA, 17 nt, Human herpesvirus 6B
uuuuggcucgaaucuaa

SEQ ID NO: 335171 - RNA, 17 nt, Human herpesvirus 6B
uuuugggaaaucugaca

SEQ ID NO: 335172 - RNA, 15 nt, Human herpesvirus 6B
uuuugguggacacca

SEQ ID NO: 335173 - RNA, 17 nt, Human herpesvirus 6B
uuuuguaccaacaugua

SEQ ID NO: 335174 - RNA, 18 nt, Human herpesvirus 6B
uuuugucuucgugucuga

SEQ ID NO: 335175 - RNA, 12 nt, Human herpesvirus 6B
uuuuucugcaaa

SEQ ID NO: 335176 - RNA, 23 nt, Human herpesvirus 6B
uuuuugauugcaaucacauuguu

SEQ ID NO: 335177 - RNA, 14 nt, Human herpesvirus 6B
ucaauacuacgugu

SEQ ID NO: 335178 - RNA, 19 nt, Human herpesvirus 6B
ucaauacuuuuuucaauaa

SEQ ID NO: 335179 - RNA, 21 nt, Human herpesvirus 6B
ucaauacuuuuuucaauaaug

SEQ ID NO: 335180 - RNA, 23 nt, Human herpesvirus 6B
ucaauauagaggacgcaaagaga

SEQ ID NO: 335181 - RNA, 18 nt, Human herpesvirus 6B
ucaauaucaccuuacaaa

SEQ ID NO: 335182 - RNA, 13 nt, Human herpesvirus 6B
ucaaucucuauga

SEQ ID NO: 335183 - RNA, 15 nt, Human herpesvirus 6B
ucaaugcaauuccac

SEQ ID NO: 335184 - RNA, 14 nt, Human herpesvirus 6B
ucaauguuuuucaa

SEQ ID NO: 335185 - RNA, 15 nt, Human herpesvirus 6B
ucaauuccugugaug

SEQ ID NO: 335186 - RNA, 18 nt, Human herpesvirus 6B
ucaauuccugugaugccu

SEQ ID NO: 335187 - RNA, 13 nt, Human herpesvirus 6B
ucacaaaacugua

SEQ ID NO: 335188 - RNA, 14 nt, Human herpesvirus 6B
ucacaaaacuguac

SEQ ID NO: 335189 - RNA, 21 nt, Human herpesvirus 6B
ucacaaaguuuaaguucucac

SEQ ID NO: 335190 - RNA, 12 nt, Human herpesvirus 6B
ucacaacaugau

SEQ ID NO: 335191 - RNA, 17 nt, Human herpesvirus 6B
ucacaaggaaugugcag

SEQ ID NO: 335192 - RNA, 13 nt, Human herpesvirus 6B
ucacaauacacag

SEQ ID NO: 335193 - RNA, 16 nt, Human herpesvirus 6B
ucacaaucgcagucca

SEQ ID NO: 335194 - RNA, 18 nt, Human herpesvirus 6B
ucacacacaaugugcuua

SEQ ID NO: 335195 - RNA, 15 nt, Human herpesvirus 6B
ucacaccaaugauca

SEQ ID NO: 335196 - RNA, 16 nt, Human herpesvirus 6B
ucacaccaaugaucac

SEQ ID NO: 335197 - RNA, 12 nt, Human herpesvirus 6B
ucacacucugaa

SEQ ID NO: 335198 - RNA, 14 nt, Human herpesvirus 6B
ucacagcauuuccg

SEQ ID NO: 335199 - RNA, 13 nt, Human herpesvirus 6B
ucacaguguuucc

SEQ ID NO: 335200 - RNA, 15 nt, Human herpesvirus 6B
ucacaguguuuccaa

SEQ ID NO: 335201 - RNA, 14 nt, Human herpesvirus 6B
ucacauuaccucug

SEQ ID NO: 335202 - RNA, 12 nt, Human herpesvirus 6B
ucaccaacguca

SEQ ID NO: 335203 - RNA, 17 nt, Human herpesvirus 6B
ucaccaacgucaugcaa

SEQ ID NO: 335204 - RNA, 21 nt, Human herpesvirus 6B
ucaccaacgucaugcaaaaca

SEQ ID NO: 335205 - RNA, 12 nt, Human herpesvirus 6B
ucaccacuguga

SEQ ID NO: 335206 - RNA, 16 nt, Human herpesvirus 6B
ucaccccccucuugca

SEQ ID NO: 335207 - RNA, 17 nt, Human herpesvirus 6B
ucaccccucgugaaaua

SEQ ID NO: 335208 - RNA, 14 nt, Human herpesvirus 6B
ucaccgucucugaa

SEQ ID NO: 335209 - RNA, 18 nt, Human herpesvirus 6B
ucaccgucucugaagcaa

SEQ ID NO: 335210 - RNA, 17 nt, Human herpesvirus 6B
ucaccugccuucacuuu

SEQ ID NO: 335211 - RNA, 21 nt, Human herpesvirus 6B
ucaccuugucaucaugugugc

SEQ ID NO: 335212 - RNA, 20 nt, Human herpesvirus 6B
ucacgagaucugcucauguc

SEQ ID NO: 335213 - RNA, 15 nt, Human herpesvirus 6B
ucacgcauagaccaa

SEQ ID NO: 335214 - RNA, 19 nt, Human herpesvirus 6B
ucacgcauagaccaaccag

SEQ ID NO: 335215 - RNA, 22 nt, Human herpesvirus 6B
ucacggacgaaaguucaucuuu

SEQ ID NO: 335216 - RNA, 23 nt, Human herpesvirus 6B
ucacguaucucugguaaauguca

SEQ ID NO: 335217 - RNA, 16 nt, Human herpesvirus 6B
ucacgucccauucaca

SEQ ID NO: 335218 - RNA, 17 nt, Human herpesvirus 6B
ucacguuauuacauaga

SEQ ID NO: 335219 - RNA, 18 nt, Human herpesvirus 6B
ucacuaacuucaagaauu

SEQ ID NO: 335220 - RNA, 19 nt, Human herpesvirus 6B
ucacucucaauuucacuua

SEQ ID NO: 335221 - RNA, 15 nt, Human herpesvirus 6B
ucacugacgauggcu

SEQ ID NO: 335222 - RNA, 16 nt, Human herpesvirus 6B
ucagaaaauuggugug

SEQ ID NO: 335223 - RNA, 21 nt, Human herpesvirus 6B
ucagaaaauuggugugcauua

SEQ ID NO: 335224 - RNA, 15 nt, Human herpesvirus 6B
ucagaauguuccaau

SEQ ID NO: 335225 - RNA, 22 nt, Human herpesvirus 6B
ucagaccguuaucggcauugau

SEQ ID NO: 335226 - RNA, 16 nt, Human herpesvirus 6B
ucagagcgggcuauaa

SEQ ID NO: 335227 - RNA, 21 nt, Human herpesvirus 6B
ucagauauauacuuacuugag

SEQ ID NO: 335228 - RNA, 15 nt, Human herpesvirus 6B
ucagcaaacauguga

SEQ ID NO: 335229 - RNA, 17 nt, Human herpesvirus 6B
ucagcaaacaugugauu

SEQ ID NO: 335230 - RNA, 11 nt, Human herpesvirus 6B
ucagcauucac

SEQ ID NO: 335231 - RNA, 12 nt, Human herpesvirus 6B
ucagccauuucg

SEQ ID NO: 335232 - RNA, 13 nt, Human herpesvirus 6B
ucagcguggaauu

SEQ ID NO: 335233 - RNA, 21 nt, Human herpesvirus 6B
ucagggggcgcggggacacau

SEQ ID NO: 335234 - RNA, 13 nt, Human herpesvirus 6B
ucagucaaugcaa

SEQ ID NO: 335235 - RNA, 15 nt, Human herpesvirus 6B
ucagucucagcaauc

SEQ ID NO: 335236 - RNA, 23 nt, Human herpesvirus 6B
ucagucugcuaaaaaucaucucg

SEQ ID NO: 335237 - RNA, 20 nt, Human herpesvirus 6B
ucaguguucuggcuugucau

SEQ ID NO: 335238 - RNA, 15 nt, Human herpesvirus 6B
ucaguguuugccaac

SEQ ID NO: 335239 - RNA, 16 nt, Human herpesvirus 6B
ucaguguuuguuuuua

SEQ ID NO: 335240 - RNA, 13 nt, Human herpesvirus 6B
ucaguuucaaaua

SEQ ID NO: 335241 - RNA, 14 nt, Human herpesvirus 6B
ucauaaacaaaccg

SEQ ID NO: 335242 - RNA, 15 nt, Human herpesvirus 6B
ucauaacgagaaaga

SEQ ID NO: 335243 - RNA, 21 nt, Human herpesvirus 6B
ucauaacgagaaagaaaacca

SEQ ID NO: 335244 - RNA, 16 nt, Human herpesvirus 6B
ucauacaauauuucca

SEQ ID NO: 335245 - RNA, 21 nt, Human herpesvirus 6B
ucauacagacauugcuuucuc

SEQ ID NO: 335246 - RNA, 13 nt, Human herpesvirus 6B
ucauagauuucau

SEQ ID NO: 335247 - RNA, 19 nt, Human herpesvirus 6B
ucauagauuucauacugua

SEQ ID NO: 335248 - RNA, 15 nt, Human herpesvirus 6B
ucauaggugugcgaa

SEQ ID NO: 335249 - RNA, 15 nt, Human herpesvirus 6B
ucaucacaugccaug

SEQ ID NO: 335250 - RNA, 23 nt, Human herpesvirus 6B
ucaucagccauuucgccaaaaau

SEQ ID NO: 335251 - RNA, 12 nt, Human herpesvirus 6B
ucaucauacaau

SEQ ID NO: 335252 - RNA, 16 nt, Human herpesvirus 6B
ucaucaugugugccua

SEQ ID NO: 335253 - RNA, 22 nt, Human herpesvirus 6B
ucaucaugugugccuacuuugg

SEQ ID NO: 335254 - RNA, 16 nt, Human herpesvirus 6B
ucauccucagucuuca

SEQ ID NO: 335255 - RNA, 18 nt, Human herpesvirus 6B
ucaugagccggcucaaga

SEQ ID NO: 335256 - RNA, 20 nt, Human herpesvirus 6B
ucaugauauuccaggcaaua

SEQ ID NO: 335257 - RNA, 16 nt, Human herpesvirus 6B
ucaugcacuccguuaa

SEQ ID NO: 335258 - RNA, 17 nt, Human herpesvirus 6B
ucaugcccuaaugugau

SEQ ID NO: 335259 - RNA, 15 nt, Human herpesvirus 6B
ucaugcuucuuuuau

SEQ ID NO: 335260 - RNA, 18 nt, Human herpesvirus 6B
ucauguuuauugucaaau

SEQ ID NO: 335261 - RNA, 20 nt, Human herpesvirus 6B
ucauuaaauuguuuuaaaca

SEQ ID NO: 335262 - RNA, 13 nt, Human herpesvirus 6B
ucauuaacauaca

SEQ ID NO: 335263 - RNA, 17 nt, Human herpesvirus 6B
ucauuccaguccaauga

SEQ ID NO: 335264 - RNA, 16 nt, Human herpesvirus 6B
ucauucgauuaaugcc

SEQ ID NO: 335265 - RNA, 20 nt, Human herpesvirus 6B
ucauucgauuaaugccacag

SEQ ID NO: 335266 - RNA, 20 nt, Human herpesvirus 6B
ucauuggcaucauaauacua

SEQ ID NO: 335267 - RNA, 15 nt, Human herpesvirus 6B
ucauuguuucacuuc

SEQ ID NO: 335268 - RNA, 19 nt, Human herpesvirus 6B
ucauuucaaauacaccuca

SEQ ID NO: 335269 - RNA, 19 nt, Human herpesvirus 6B
uccaaaagauuauggcaac

SEQ ID NO: 335270 - RNA, 19 nt, Human herpesvirus 6B
uccaaaagcgccugccuac

SEQ ID NO: 335271 - RNA, 14 nt, Human herpesvirus 6B
uccaaacuacggaa

SEQ ID NO: 335272 - RNA, 14 nt, Human herpesvirus 6B
uccaaggauuauga

SEQ ID NO: 335273 - RNA, 17 nt, Human herpesvirus 6B
uccaauaagaaacauua

SEQ ID NO: 335274 - RNA, 18 nt, Human herpesvirus 6B
uccaauaagaaacauuau

SEQ ID NO: 335275 - RNA, 14 nt, Human herpesvirus 6B
uccaauagauuuca

SEQ ID NO: 335276 - RNA, 14 nt, Human herpesvirus 6B
uccaauuacaucaa

SEQ ID NO: 335277 - RNA, 14 nt, Human herpesvirus 6B
uccacccacgugug

SEQ ID NO: 335278 - RNA, 13 nt, Human herpesvirus 6B
uccacccauauac

SEQ ID NO: 335279 - RNA, 20 nt, Human herpesvirus 6B
uccacucggauucaaagaaa

SEQ ID NO: 335280 - RNA, 14 nt, Human herpesvirus 6B
uccacugcauuuca

SEQ ID NO: 335281 - RNA, 15 nt, Human herpesvirus 6B
uccagaaguccuuca

SEQ ID NO: 335282 - RNA, 24 nt, Human herpesvirus 6B
uccagaaguccuucaugauauucc

SEQ ID NO: 335283 - RNA, 21 nt, Human herpesvirus 6B
uccagcacagcaugcauuugg

SEQ ID NO: 335284 - RNA, 13 nt, Human herpesvirus 6B
uccagcacuuuua

SEQ ID NO: 335285 - RNA, 14 nt, Human herpesvirus 6B
uccagcacuuuuac

SEQ ID NO: 335286 - RNA, 17 nt, Human herpesvirus 6B
uccagcguggugugcac

SEQ ID NO: 335287 - RNA, 19 nt, Human herpesvirus 6B
uccaggaauucacuuugaa

SEQ ID NO: 335288 - RNA, 15 nt, Human herpesvirus 6B
uccaggcaugugauu

SEQ ID NO: 335289 - RNA, 14 nt, Human herpesvirus 6B
uccagggaacuuga

SEQ ID NO: 335290 - RNA, 17 nt, Human herpesvirus 6B
uccagugagaacauaua

SEQ ID NO: 335291 - RNA, 19 nt, Human herpesvirus 6B
ucucagauauauacuuacu

SEQ ID NO: 335292 - RNA, 15 nt, Human herpesvirus 6B
ucucaggugagauuc

SEQ ID NO: 335293 - RNA, 13 nt, Human herpesvirus 6B
ucucauaugcauc

SEQ ID NO: 335294 - RNA, 21 nt, Human herpesvirus 6B
ucuccaaaagcgccugccuac

SEQ ID NO: 335295 - RNA, 17 nt, Human herpesvirus 6B
ucuccaauagauuucau

SEQ ID NO: 335296 - RNA, 19 nt, Human herpesvirus 6B
ucucccuacgcuaacgaac

SEQ ID NO: 335297 - RNA, 17 nt, Human herpesvirus 6B
ucuccucaacacucuca

SEQ ID NO: 335298 - RNA, 14 nt, Human herpesvirus 6B
ucuccugaucucac

SEQ ID NO: 335299 - RNA, 21 nt, Human herpesvirus 6B
ucucgcucagcguggaauuug

SEQ ID NO: 335300 - RNA, 17 nt, Human herpesvirus 6B
ucucugaagcaaaaguc

SEQ ID NO: 335301 - RNA, 16 nt, Human herpesvirus 6B
ucucugguaaauguca

SEQ ID NO: 335302 - RNA, 22 nt, Human herpesvirus 6B
ucucuguguguguugugcgcua

SEQ ID NO: 335303 - RNA, 14 nt, Human herpesvirus 6B
ucugaaagacauaa

SEQ ID NO: 335304 - RNA, 20 nt, Human herpesvirus 6B
ucugaagaauaaaaguccau

SEQ ID NO: 335305 - RNA, 18 nt, Human herpesvirus 6B
ucugaagcaaaagucuua

SEQ ID NO: 335306 - RNA, 15 nt, Human herpesvirus 6B
ucugaauuuaaugca

SEQ ID NO: 335307 - RNA, 22 nt, Human herpesvirus 6B
ucugacaagcuguccaucuuca

SEQ ID NO: 335308 - RNA, 16 nt, Human herpesvirus 6B
ucugacucucuuucag

SEQ ID NO: 335309 - RNA, 15 nt, Human herpesvirus 6B
ucugagacagucaau

SEQ ID NO: 335310 - RNA, 14 nt, Human herpesvirus 6B
ucugagcagaggua

SEQ ID NO: 335311 - RNA, 12 nt, Human herpesvirus 6B
ucugauacuuga

SEQ ID NO: 335312 - RNA, 13 nt, Human herpesvirus 6B
ucugauacuugaa

SEQ ID NO: 335313 - RNA, 13 nt, Human herpesvirus 6B
ucugauauggcaa

SEQ ID NO: 335314 - RNA, 12 nt, Human herpesvirus 6B
ucugaucccuua

SEQ ID NO: 335315 - RNA, 23 nt, Human herpesvirus 6B
ucugaucccuuagaagcuuucaa

SEQ ID NO: 335316 - RNA, 16 nt, Human herpesvirus 6B
ucugcaaaaacaaaug

SEQ ID NO: 335317 - RNA, 15 nt, Human herpesvirus 6B
ucugcaaaacaaaag

SEQ ID NO: 335318 - RNA, 13 nt, Human herpesvirus 6B
ucugcucauguca

SEQ ID NO: 335319 - RNA, 17 nt, Human herpesvirus 6B
ucugcucucgaugaaag

SEQ ID NO: 335320 - RNA, 21 nt, Human herpesvirus 6B
ucugcugcuucuucuuuuccu

SEQ ID NO: 335321 - RNA, 20 nt, Human herpesvirus 6B
ucugcuuuacaucgaaucuc

SEQ ID NO: 335322 - RNA, 12 nt, Human herpesvirus 6B
ucuggauacuga

SEQ ID NO: 335323 - RNA, 22 nt, Human herpesvirus 6B
ucuggcgaugcagaugccugua

SEQ ID NO: 335324 - RNA, 13 nt, Human herpesvirus 6B
ucuggcuugucau

SEQ ID NO: 335325 - RNA, 19 nt, Human herpesvirus 6B
ucugggcgggaagaaaauc

SEQ ID NO: 335326 - RNA, 19 nt, Human herpesvirus 6B
ucuggggagcuucagguug

SEQ ID NO: 335327 - RNA, 18 nt, Human herpesvirus 6B
ucuggggcgggcauuauu

SEQ ID NO: 335328 - RNA, 24 nt, Human herpesvirus 6B
ucugggugaguuuuaucacuuuca

SEQ ID NO: 335329 - RNA, 16 nt, Human herpesvirus 6B
ucugugaaucugcuga

SEQ ID NO: 335330 - RNA, 15 nt, Human herpesvirus 6B
ucugugcaacacaac

SEQ ID NO: 335331 - RNA, 17 nt, Human herpesvirus 6B
ucugugcaacacaacaa

SEQ ID NO: 335332 - RNA, 16 nt, Human herpesvirus 6B
ucuuagaagcauuugc

SEQ ID NO: 335333 - RNA, 20 nt, Human herpesvirus 6B
ucuuagcggauggaauccaa

SEQ ID NO: 335334 - RNA, 13 nt, Human herpesvirus 6B
ucuuauaacacca

SEQ ID NO: 335335 - RNA, 18 nt, Human herpesvirus 6B
ucuuaugaucggcauuug

SEQ ID NO: 335336 - RNA, 16 nt, Human herpesvirus 6B
ucuuauuaugugauuc

SEQ ID NO: 335337 - RNA, 14 nt, Human herpesvirus 6B
ucuuauuuaccuuc

SEQ ID NO: 335338 - RNA, 15 nt, Human herpesvirus 6B
ucuuauuuaccuucc

SEQ ID NO: 335339 - RNA, 16 nt, Human herpesvirus 6B
ucuuauuuaccuuccu

SEQ ID NO: 335340 - RNA, 18 nt, Human herpesvirus 6B
ucuucaaauuuacucucc

SEQ ID NO: 335341 - RNA, 19 nt, Human herpesvirus 6B
ucuucaaauuuacucucca

SEQ ID NO: 335342 - RNA, 22 nt, Human herpesvirus 6B
ucuucaaccuguuuccagaaua

SEQ ID NO: 335343 - RNA, 14 nt, Human herpesvirus 6B
ucuucaagcaaaga

SEQ ID NO: 335344 - RNA, 13 nt, Human herpesvirus 6B
ucuucagacauca

SEQ ID NO: 335345 - RNA, 20 nt, Human herpesvirus 6B
ucuucgaauaguuucaugau

SEQ ID NO: 335346 - RNA, 16 nt, Human herpesvirus 6B
ucuucuggauacugau

SEQ ID NO: 335347 - RNA, 18 nt, Human herpesvirus 6B
ucuucuggauacugauga

SEQ ID NO: 335348 - RNA, 19 nt, Human herpesvirus 6B
ucuucuggauacugaugaa

SEQ ID NO: 335349 - RNA, 22 nt, Human herpesvirus 6B
ucuucuggauacugaugaauuu

SEQ ID NO: 335350 - RNA, 12 nt, Human herpesvirus 6B
ucuucuguaaac

SEQ ID NO: 335351 - RNA, 18 nt, Human herpesvirus 6B
ucuugaaaucuaccauaa

SEQ ID NO: 335352 - RNA, 14 nt, Human herpesvirus 6B
ucuugaagauguga

SEQ ID NO: 335353 - RNA, 15 nt, Human herpesvirus 6B
ucuugcaaacagcuu

SEQ ID NO: 335354 - RNA, 19 nt, Human herpesvirus 6B
ucuuguguucuaacacaua

SEQ ID NO: 335355 - RNA, 22 nt, Human herpesvirus 6B
ucuuguguucuaacacauaguu

SEQ ID NO: 335356 - RNA, 20 nt, Human herpesvirus 6B
ucuuucaaaaugaccagaga

SEQ ID NO: 335357 - RNA, 20 nt, Human herpesvirus 6B
ucuuucccgugcucaguaag

SEQ ID NO: 335358 - RNA, 23 nt, Human herpesvirus 6B
ucuuucuacauaaaacaggguug

SEQ ID NO: 335359 - RNA, 19 nt, Human herpesvirus 6B
ucuuucuauuauguaaaac

SEQ ID NO: 335360 - RNA, 15 nt, Human herpesvirus 6B
ucuuugaacagugac

SEQ ID NO: 335361 - RNA, 17 nt, Human herpesvirus 6B
ucuuugaacagugacag

SEQ ID NO: 335362 - RNA, 20 nt, Human herpesvirus 6B
ucuuugacauuuaccagaga

SEQ ID NO: 335363 - RNA, 15 nt, Human herpesvirus 6B
ugaaaauaucauuaa

SEQ ID NO: 335364 - RNA, 18 nt, Human herpesvirus 6B
ugaaacacuaagugccgu

SEQ ID NO: 335365 - RNA, 19 nt, Human herpesvirus 6B
ugaaacuccacgaucuaca

SEQ ID NO: 335366 - RNA, 23 nt, Human herpesvirus 6B
ugaaagaacaguuuaccuaucaa

SEQ ID NO: 335367 - RNA, 15 nt, Human herpesvirus 6B
ugaaagaguaccgaa

SEQ ID NO: 335368 - RNA, 15 nt, Human herpesvirus 6B
ugaaagcagucagua

SEQ ID NO: 335369 - RNA, 16 nt, Human herpesvirus 6B
ugaaagcuucauuuau

SEQ ID NO: 335370 - RNA, 14 nt, Human herpesvirus 6B
ugaaauaaaguuua

SEQ ID NO: 335371 - RNA, 22 nt, Human herpesvirus 6B
ugaaaucacaccaaugaucaca

SEQ ID NO: 335372 - RNA, 19 nt, Human herpesvirus 6B
ugaaaucgcauuagucaca

SEQ ID NO: 335373 - RNA, 15 nt, Human herpesvirus 6B
ugaaaucuaccauaa

SEQ ID NO: 335374 - RNA, 17 nt, Human herpesvirus 6B
ugaaaucuuuccugcua

SEQ ID NO: 335375 - RNA, 18 nt, Human herpesvirus 6B
ugaaaucuuuccugcuaa

SEQ ID NO: 335376 - RNA, 15 nt, Human herpesvirus 6B
ugaaauggcuaacgu

SEQ ID NO: 335377 - RNA, 23 nt, Human herpesvirus 6B
ugaaaugucgaaucucaagcaca

SEQ ID NO: 335378 - RNA, 20 nt, Human herpesvirus 6B
ugaaauuuaauaaaguuugu

SEQ ID NO: 335379 - RNA, 14 nt, Human herpesvirus 6B
ugaacagagauuuu

SEQ ID NO: 335380 - RNA, 13 nt, Human herpesvirus 6B
ugaacaggugcuu

SEQ ID NO: 335381 - RNA, 16 nt, Human herpesvirus 6B
ugaacuacacgaugaa

SEQ ID NO: 335382 - RNA, 17 nt, Human herpesvirus 6B
ugaacuacacgaugaac

SEQ ID NO: 335383 - RNA, 17 nt, Human herpesvirus 6B
ugaacucucacggccau

SEQ ID NO: 335384 - RNA, 18 nt, Human herpesvirus 6B
ugaagaauaaaaguccau

SEQ ID NO: 335385 - RNA, 15 nt, Human herpesvirus 6B
ugaagaauaagccua

SEQ ID NO: 335386 - RNA, 23 nt, Human herpesvirus 6B
ugaauuuuuguccgccauugggu

SEQ ID NO: 335387 - RNA, 24 nt, Human herpesvirus 6B
ugacaaauacgagagcugacugaa

SEQ ID NO: 335388 - RNA, 24 nt, Human herpesvirus 6B
ugacaaguuucuuuugugacuaua

SEQ ID NO: 335389 - RNA, 15 nt, Human herpesvirus 6B
ugacacaauuucuga

SEQ ID NO: 335390 - RNA, 21 nt, Human herpesvirus 6B
ugacacaauuucugacucucu

SEQ ID NO: 335391 - RNA, 12 nt, Human herpesvirus 6B
ugacacagaauc

SEQ ID NO: 335392 - RNA, 14 nt, Human herpesvirus 6B
ugacaccacauaac

SEQ ID NO: 335393 - RNA, 15 nt, Human herpesvirus 6B
ugacaccacauaaca

SEQ ID NO: 335394 - RNA, 15 nt, Human herpesvirus 6B
ugacagcgagacaau

SEQ ID NO: 335395 - RNA, 20 nt, Human herpesvirus 6B
ugacagucaccgcauaucac

SEQ ID NO: 335396 - RNA, 21 nt, Human herpesvirus 6B
ugacaucacgucccauucaca

SEQ ID NO: 335397 - RNA, 22 nt, Human herpesvirus 6B
ugacaucggcuuggauagaaau

SEQ ID NO: 335398 - RNA, 13 nt, Human herpesvirus 6B
ugacaucuuuuau

SEQ ID NO: 335399 - RNA, 18 nt, Human herpesvirus 6B
ugacaugagcuaaaccau

SEQ ID NO: 335400 - RNA, 15 nt, Human herpesvirus 6B
ugacauugauuccac

SEQ ID NO: 335401 - RNA, 23 nt, Human herpesvirus 6B
ugacauugcguuuugacaugagc

SEQ ID NO: 335402 - RNA, 17 nt, Human herpesvirus 6B
ugacccgauguggaacg

SEQ ID NO: 335403 - RNA, 22 nt, Human herpesvirus 6B
ugaccgcagaggaucuguucau

SEQ ID NO: 335404 - RNA, 22 nt, Human herpesvirus 6B
ugaccguaggaagaucaugaca

SEQ ID NO: 335405 - RNA, 23 nt, Human herpesvirus 6B
ugaccguaggaagaucaugacaa

SEQ ID NO: 335406 - RNA, 18 nt, Human herpesvirus 6B
ugaccguucaccauucca

SEQ ID NO: 335407 - RNA, 20 nt, Human herpesvirus 6B
ugacgaccauacguggugau

SEQ ID NO: 335408 - RNA, 17 nt, Human herpesvirus 6B
ugacgaggauggaugug

SEQ ID NO: 335409 - RNA, 21 nt, Human herpesvirus 6B
ugacgguucaccacugugaua

SEQ ID NO: 335410 - RNA, 19 nt, Human herpesvirus 6B
ugacugaaaguuauauucu

SEQ ID NO: 335411 - RNA, 23 nt, Human herpesvirus 6B
ugacugugaggugauuugaacag

SEQ ID NO: 335412 - RNA, 19 nt, Human herpesvirus 6B
ugacuuauaagucaucaua

SEQ ID NO: 335413 - RNA, 18 nt, Human herpesvirus 6B
ugacuuugugugucgaau

SEQ ID NO: 335414 - RNA, 15 nt, Human herpesvirus 6B
ugagaccuauaaaaa

SEQ ID NO: 335415 - RNA, 14 nt, Human herpesvirus 6B
ugagcacuugucaa

SEQ ID NO: 335416 - RNA, 20 nt, Human herpesvirus 6B
ugagccagauucggcugcuu

SEQ ID NO: 335417 - RNA, 21 nt, Human herpesvirus 6B
ugagccagauucggcugcuua

SEQ ID NO: 335418 - RNA, 23 nt, Human herpesvirus 6B
ugagcugacaucugcaaaaacaa

SEQ ID NO: 335419 - RNA, 22 nt, Human herpesvirus 6B
ugagcuuguagauaauuuccaa

SEQ ID NO: 335420 - RNA, 15 nt, Human herpesvirus 6B
ugaggaggagggacc

SEQ ID NO: 335421 - RNA, 18 nt, Human herpesvirus 6B
ugaggauuugcuugucac

SEQ ID NO: 335422 - RNA, 16 nt, Human herpesvirus 6B
ugagguuaucuggaug

SEQ ID NO: 335423 - RNA, 21 nt, Human herpesvirus 6B
ugagguugagaaugauuuuaa

SEQ ID NO: 335424 - RNA, 15 nt, Human herpesvirus 6B
ugaguagcuuugaca

SEQ ID NO: 335425 - RNA, 17 nt, Human herpesvirus 6B
ugaguuuuuugcaauuu

SEQ ID NO: 335426 - RNA, 16 nt, Human herpesvirus 6B
ugauaaacuguacgcc

SEQ ID NO: 335427 - RNA, 13 nt, Human herpesvirus 6B
ugauaaucuugua

SEQ ID NO: 335428 - RNA, 15 nt, Human herpesvirus 6B
ugauacuacguguaa

SEQ ID NO: 335429 - RNA, 22 nt, Human herpesvirus 6B
ugauacucggucuacuguguau

SEQ ID NO: 335430 - RNA, 17 nt, Human herpesvirus 6B
ugauagcauaauccuuu

SEQ ID NO: 335431 - RNA, 20 nt, Human herpesvirus 6B
ugauaugcaaacugacugua

SEQ ID NO: 335432 - RNA, 15 nt, Human herpesvirus 6B
ugaucagcauucacu

SEQ ID NO: 335433 - RNA, 16 nt, Human herpesvirus 6B
ugaucaucacaugcca

SEQ ID NO: 335434 - RNA, 14 nt, Human herpesvirus 6B
ugauccaauguuuc

SEQ ID NO: 335435 - RNA, 16 nt, Human herpesvirus 6B
ugaucguggacaguaa

SEQ ID NO: 335436 - RNA, 18 nt, Human herpesvirus 6B
ugaucguguuguggacaa

SEQ ID NO: 335437 - RNA, 20 nt, Human herpesvirus 6B
ugaucugauucgacaaauca

SEQ ID NO: 335438 - RNA, 14 nt, Human herpesvirus 6B
ugaugaacaaaaaa

SEQ ID NO: 335439 - RNA, 11 nt, Human herpesvirus 6B
ugaugaucugc

SEQ ID NO: 335440 - RNA, 16 nt, Human herpesvirus 6B
ugaugaucugcuguug

SEQ ID NO: 335441 - RNA, 17 nt, Human herpesvirus 6B
ugaugccuugauguuuc

SEQ ID NO: 335442 - RNA, 19 nt, Human herpesvirus 6B
ugaugcgguucgacagaga

SEQ ID NO: 335443 - RNA, 15 nt, Human herpesvirus 6B
ugaugggauguaauc

SEQ ID NO: 335444 - RNA, 16 nt, Human herpesvirus 6B
ugaugggauguaauca

SEQ ID NO: 335445 - RNA, 20 nt, Human herpesvirus 6B
ugauguacguggccgucucc

SEQ ID NO: 335446 - RNA, 17 nt, Human herpesvirus 6B
ugauguuaacucaggug

SEQ ID NO: 335447 - RNA, 20 nt, Human herpesvirus 6B
ugauuauaucgcaagcaaaa

SEQ ID NO: 335448 - RNA, 16 nt, Human herpesvirus 6B
ugauuauggugccuca

SEQ ID NO: 335449 - RNA, 18 nt, Human herpesvirus 6B
ugauucuguuuucuacgu

SEQ ID NO: 335450 - RNA, 22 nt, Human herpesvirus 6B
ugauugauuuccguauucuuga

SEQ ID NO: 335451 - RNA, 15 nt, Human herpesvirus 6B
ugauugcaacaaaag

SEQ ID NO: 335452 - RNA, 14 nt, Human herpesvirus 6B
ugauugcaaucaca

SEQ ID NO: 335453 - RNA, 15 nt, Human herpesvirus 6B
ugauugcaaucacau

SEQ ID NO: 335454 - RNA, 19 nt, Human herpesvirus 6B
ugauugggagcucacugua

SEQ ID NO: 335455 - RNA, 17 nt, Human herpesvirus 6B
ugauuucagaauugagu

SEQ ID NO: 335456 - RNA, 15 nt, Human herpesvirus 6B
ugauuugucgaauca

SEQ ID NO: 335457 - RNA, 22 nt, Human herpesvirus 6B
ugauuuuucugccuauuucucu

SEQ ID NO: 335458 - RNA, 16 nt, Human herpesvirus 6B
ugcaaaaacaaaugaa

SEQ ID NO: 335459 - RNA, 15 nt, Human herpesvirus 6B
ugcaaacugacugua

SEQ ID NO: 335460 - RNA, 17 nt, Human herpesvirus 6B
ugcaaauauuauuuucc

SEQ ID NO: 335461 - RNA, 13 nt, Human herpesvirus 6B
ugcaaaugcucaa

SEQ ID NO: 335462 - RNA, 17 nt, Human herpesvirus 6B
ugcaacacaacaaacau

SEQ ID NO: 335463 - RNA, 17 nt, Human herpesvirus 6B
ugcaagcucaugaacau

SEQ ID NO: 335464 - RNA, 14 nt, Human herpesvirus 6B
ugcaauaggccaua

SEQ ID NO: 335465 - RNA, 11 nt, Human herpesvirus 6B
ugcaaucaauc

SEQ ID NO: 335466 - RNA, 18 nt, Human herpesvirus 6B
ugcacgaaaguggaugug

SEQ ID NO: 335467 - RNA, 18 nt, Human herpesvirus 6B
ugcacggcgucaccaaga

SEQ ID NO: 335468 - RNA, 13 nt, Human herpesvirus 6B
ugcagacgcugaa

SEQ ID NO: 335469 - RNA, 19 nt, Human herpesvirus 6B
ugcagaugccuguagggau

SEQ ID NO: 335470 - RNA, 15 nt, Human herpesvirus 6B
ugcagauuucacuuu

SEQ ID NO: 335471 - RNA, 13 nt, Human herpesvirus 6B
ugcagauuuuuaa

SEQ ID NO: 335472 - RNA, 22 nt, Human herpesvirus 6B
ugcagccuaccauggccaauca

SEQ ID NO: 335473 - RNA, 19 nt, Human herpesvirus 6B
ugcagcgauauggaaacac

SEQ ID NO: 335474 - RNA, 21 nt, Human herpesvirus 6B
ugcagcuuacggagacggguu

SEQ ID NO: 335475 - RNA, 11 nt, Human herpesvirus 6B
ugcaggugcug

SEQ ID NO: 335476 - RNA, 13 nt, Human herpesvirus 6B
ugcaggugcugcu

SEQ ID NO: 335477 - RNA, 22 nt, Human herpesvirus 6B
ugcauaacaucucagaucuaga

SEQ ID NO: 335478 - RNA, 16 nt, Human herpesvirus 6B
ugcauaugucuguuau

SEQ ID NO: 335479 - RNA, 20 nt, Human herpesvirus 6B
ugcauauuauuaacaaugaa

SEQ ID NO: 335480 - RNA, 11 nt, Human herpesvirus 6B
ugcaugcauug

SEQ ID NO: 335481 - RNA, 17 nt, Human herpesvirus 6B
ugcaugcuaauaaaaua

SEQ ID NO: 335482 - RNA, 15 nt, Human herpesvirus 6B
ugcaugucgaacagc

SEQ ID NO: 335483 - RNA, 22 nt, Human herpesvirus 6B
ugcauucacaaggaaugugcag

SEQ ID NO: 335484 - RNA, 13 nt, Human herpesvirus 6B
ugccaaccaaaug

SEQ ID NO: 335485 - RNA, 17 nt, Human herpesvirus 6B
ugccacagguacauugu

SEQ ID NO: 335486 - RNA, 16 nt, Human herpesvirus 6B
ugccagaaaaacuaua

SEQ ID NO: 335487 - RNA, 15 nt, Human herpesvirus 6B
ugccaguaagucuuc

SEQ ID NO: 335488 - RNA, 16 nt, Human herpesvirus 6B
ugccaguucacacaga

SEQ ID NO: 335489 - RNA, 22 nt, Human herpesvirus 6B
ugccccgguuuuguccugaaau

SEQ ID NO: 335490 - RNA, 22 nt, Human herpesvirus 6B
ugcccucguuuuccgaaaucaa

SEQ ID NO: 335491 - RNA, 15 nt, Human herpesvirus 6B
ugccgacaagcuuuu

SEQ ID NO: 335492 - RNA, 18 nt, Human herpesvirus 6B
ugccgcagaagacuuuaa

SEQ ID NO: 335493 - RNA, 22 nt, Human herpesvirus 6B
ugccuacauaugccgacuguuu

SEQ ID NO: 335494 - RNA, 16 nt, Human herpesvirus 6B
ugccuauccuauaaau

SEQ ID NO: 335495 - RNA, 16 nt, Human herpesvirus 6B
ugccuauuaaugcuua

SEQ ID NO: 335496 - RNA, 17 nt, Human herpesvirus 6B
ugccuauuaaugcuuau

SEQ ID NO: 335497 - RNA, 16 nt, Human herpesvirus 6B
ugccuguagggaugua

SEQ ID NO: 335498 - RNA, 18 nt, Human herpesvirus 6B
ugccuguagggauguaga

SEQ ID NO: 335499 - RNA, 19 nt, Human herpesvirus 6B
ugccuguagggauguagau

SEQ ID NO: 335500 - RNA, 14 nt, Human herpesvirus 6B
ugcgacaaagcuau

SEQ ID NO: 335501 - RNA, 15 nt, Human herpesvirus 6B
ugcgacagacaguca

SEQ ID NO: 335502 - RNA, 13 nt, Human herpesvirus 6B
ugcgaucuaauag

SEQ ID NO: 335503 - RNA, 15 nt, Human herpesvirus 6B
ugcgcaguguuauuc

SEQ ID NO: 335504 - RNA, 15 nt, Human herpesvirus 6B
ugcgcguucaggcau

SEQ ID NO: 335505 - RNA, 16 nt, Human herpesvirus 6B
ugcggaacaccagcau

SEQ ID NO: 335506 - RNA, 15 nt, Human herpesvirus 6B
ugcggugcauaacau

SEQ ID NO: 335507 - RNA, 12 nt, Human herpesvirus 6B
ugcgguguuuga

SEQ ID NO: 335508 - RNA, 15 nt, Human herpesvirus 6B
ugcgguuaugugcua

SEQ ID NO: 335509 - RNA, 17 nt, Human herpesvirus 6B
ugcguaaucgcaagaaa

SEQ ID NO: 335510 - RNA, 16 nt, Human herpesvirus 6B
ugcuaagggugccguu

SEQ ID NO: 335511 - RNA, 23 nt, Human herpesvirus 6B
ugcuacguaaccgaugcugauuc

SEQ ID NO: 335512 - RNA, 14 nt, Human herpesvirus 6B
ugcuagauaacuca

SEQ ID NO: 335513 - RNA, 12 nt, Human herpesvirus 6B
ugcuaggacuuc

SEQ ID NO: 335514 - RNA, 15 nt, Human herpesvirus 6B
ugcuauuaacacaua

SEQ ID NO: 335515 - RNA, 22 nt, Human herpesvirus 6B
ugcucaagcgaagucaugaauu

SEQ ID NO: 335516 - RNA, 16 nt, Human herpesvirus 6B
ugcucaugucaguauu

SEQ ID NO: 335517 - RNA, 19 nt, Human herpesvirus 6B
ugcuccuagggaauuuaau

SEQ ID NO: 335518 - RNA, 13 nt, Human herpesvirus 6B
ugcucucagauca

SEQ ID NO: 335519 - RNA, 18 nt, Human herpesvirus 6B
ugcugacccgauguggaa

SEQ ID NO: 335520 - RNA, 14 nt, Human herpesvirus 6B
ugcuggcugagauu

SEQ ID NO: 335521 - RNA, 16 nt, Human herpesvirus 6B
ugcuguaguugaugcu

SEQ ID NO: 335522 - RNA, 21 nt, Human herpesvirus 6B
ugcuguauagguaaaaaaaca

SEQ ID NO: 335523 - RNA, 17 nt, Human herpesvirus 6B
ugcugucacacucugaa

SEQ ID NO: 335524 - RNA, 14 nt, Human herpesvirus 6B
ugcuuaacuuacuu

SEQ ID NO: 335525 - RNA, 19 nt, Human herpesvirus 6B
ugcuucugcucucgaugaa

SEQ ID NO: 335526 - RNA, 23 nt, Human herpesvirus 6B
ugcuugcaaauauuauuuuccca

SEQ ID NO: 335527 - RNA, 11 nt, Human herpesvirus 6B
uggaaaaccuu

SEQ ID NO: 335528 - RNA, 14 nt, Human herpesvirus 6B
uggaaaacuauuaa

SEQ ID NO: 335529 - RNA, 15 nt, Human herpesvirus 6B
uggaaacguguuugu

SEQ ID NO: 335530 - RNA, 22 nt, Human herpesvirus 6B
uggaaacguguuugucuguaug

SEQ ID NO: 335531 - RNA, 13 nt, Human herpesvirus 6B
uggaagaaggaaa

SEQ ID NO: 335532 - RNA, 13 nt, Human herpesvirus 6B
uggacaacggugu

SEQ ID NO: 335533 - RNA, 22 nt, Human herpesvirus 6B
uggacaauauaaaagauuugaa

SEQ ID NO: 335534 - RNA, 11 nt, Human herpesvirus 6B
uggacaaugau

SEQ ID NO: 335535 - RNA, 12 nt, Human herpesvirus 6B
uggacaaugaua

SEQ ID NO: 335536 - RNA, 14 nt, Human herpesvirus 6B
uggagacaccucaa

SEQ ID NO: 335537 - RNA, 22 nt, Human herpesvirus 6B
uggagacgaacgcggaaaauca

SEQ ID NO: 335538 - RNA, 17 nt, Human herpesvirus 6B
uggagauguuggauguu

SEQ ID NO: 335539 - RNA, 14 nt, Human herpesvirus 6B
uggagcagugagac

SEQ ID NO: 335540 - RNA, 17 nt, Human herpesvirus 6B
uggaggucaucguccaa

SEQ ID NO: 335541 - RNA, 16 nt, Human herpesvirus 6B
uggaguaaaacgcuca

SEQ ID NO: 335542 - RNA, 20 nt, Human herpesvirus 6B
uggaguaaaacgcucacaac

SEQ ID NO: 335543 - RNA, 20 nt, Human herpesvirus 6B
uggauauacagaaaagaugu

SEQ ID NO: 335544 - RNA, 22 nt, Human herpesvirus 6B
uggauaugagugaauugugcaa

SEQ ID NO: 335545 - RNA, 15 nt, Human herpesvirus 6B
uggaucuucugcuaa

SEQ ID NO: 335546 - RNA, 20 nt, Human herpesvirus 6B
uggaucuucugcuaauucau

SEQ ID NO: 335547 - RNA, 19 nt, Human herpesvirus 6B
uggaugcagcguuggaaag

SEQ ID NO: 335548 - RNA, 11 nt, Human herpesvirus 6B
uggaugugcac

SEQ ID NO: 335549 - RNA, 13 nt, Human herpesvirus 6B
uggcaacauaccc

SEQ ID NO: 335550 - RNA, 13 nt, Human herpesvirus 6B
uggcaagcacuga

SEQ ID NO: 335551 - RNA, 16 nt, Human herpesvirus 6B
uggcaagugcugguac

SEQ ID NO: 335552 - RNA, 17 nt, Human herpesvirus 6B
uggccgauuaucuuaau

SEQ ID NO: 335553 - RNA, 18 nt, Human herpesvirus 6B
uggccuucgguacaguga

SEQ ID NO: 335554 - RNA, 15 nt, Human herpesvirus 6B
uggcgaaaagugcug

SEQ ID NO: 335555 - RNA, 18 nt, Human herpesvirus 6B
uggcgcagaaacugcuau

SEQ ID NO: 335556 - RNA, 19 nt, Human herpesvirus 6B
uggcggcgaaacugccauc

SEQ ID NO: 335557 - RNA, 15 nt, Human herpesvirus 6B
uggcuagugugccua

SEQ ID NO: 335558 - RNA, 14 nt, Human herpesvirus 6B
uggcugaaggaauc

SEQ ID NO: 335559 - RNA, 22 nt, Human herpesvirus 6B
ugggaccuucaggaacaaagua

SEQ ID NO: 335560 - RNA, 19 nt, Human herpesvirus 6B
ugggaggagccaacauaca

SEQ ID NO: 335561 - RNA, 20 nt, Human herpesvirus 6B
ugggagguuagguauaaaaa

SEQ ID NO: 335562 - RNA, 23 nt, Human herpesvirus 6B
ugggaguaauuauugugacaagg

SEQ ID NO: 335563 - RNA, 16 nt, Human herpesvirus 6B
ugggagucugcuuuac

SEQ ID NO: 335564 - RNA, 15 nt, Human herpesvirus 6B
ugggauguaaucaau

SEQ ID NO: 335565 - RNA, 22 nt, Human herpesvirus 6B
ugggcgaagaccuauauguguu

SEQ ID NO: 335566 - RNA, 20 nt, Human herpesvirus 6B
uggggacagacagggggauc

SEQ ID NO: 335567 - RNA, 23 nt, Human herpesvirus 6B
ugggguagugcggcgguaaacaa

SEQ ID NO: 335568 - RNA, 21 nt, Human herpesvirus 6B
ugggguuucaggcggcaugaa

SEQ ID NO: 335569 - RNA, 21 nt, Human herpesvirus 6B
uggguauucauuuuuucgucc

SEQ ID NO: 335570 - RNA, 20 nt, Human herpesvirus 6B
ugguacucuuugucuuagaa

SEQ ID NO: 335571 - RNA, 14 nt, Human herpesvirus 6B
uggucugcuugcaa

SEQ ID NO: 335572 - RNA, 13 nt, Human herpesvirus 6B
uggugaauguuuc

SEQ ID NO: 335573 - RNA, 17 nt, Human herpesvirus 6B
uggugcuauuaacacau

SEQ ID NO: 335574 - RNA, 13 nt, Human herpesvirus 6B
ugguggacaccaa

SEQ ID NO: 335575 - RNA, 21 nt, Human herpesvirus 6B
uggugguuucgggugcaauca

SEQ ID NO: 335576 - RNA, 22 nt, Human herpesvirus 6B
ugguguuguguuuguggacaau

SEQ ID NO: 335577 - RNA, 21 nt, Human herpesvirus 6B
ugguguuugcgggaugccaua

SEQ ID NO: 335578 - RNA, 15 nt, Human herpesvirus 6B
ugguuccgggaugua

SEQ ID NO: 335579 - RNA, 20 nt, Human herpesvirus 6B
uguaaaaauggcucagagaa

SEQ ID NO: 335580 - RNA, 13 nt, Human herpesvirus 6B
uguaaaagagcca

SEQ ID NO: 335581 - RNA, 16 nt, Human herpesvirus 6B
uguaaaagagccagag

SEQ ID NO: 335582 - RNA, 15 nt, Human herpesvirus 6B
uguaaaauuaccuca

SEQ ID NO: 335583 - RNA, 12 nt, Human herpesvirus 6B
uguaaauaugcu

SEQ ID NO: 335584 - RNA, 18 nt, Human herpesvirus 6B
uguaaauugauuagcaau

SEQ ID NO: 335585 - RNA, 19 nt, Human herpesvirus 6B
uguaacucuuuauauugcu

SEQ ID NO: 335586 - RNA, 14 nt, Human herpesvirus 6B
uguaacucuuucua

SEQ ID NO: 335587 - RNA, 18 nt, Human herpesvirus 6B
uguaauaagaaaaguuua

SEQ ID NO: 335588 - RNA, 14 nt, Human herpesvirus 6B
uguaaucaauguca

SEQ ID NO: 335589 - RNA, 17 nt, Human herpesvirus 6B
uguacaaaccaauuugu

SEQ ID NO: 335590 - RNA, 20 nt, Human herpesvirus 6B
uguacgaguagaucguaaua

SEQ ID NO: 335591 - RNA, 13 nt, Human herpesvirus 6B
uguacugaucucu

SEQ ID NO: 335592 - RNA, 14 nt, Human herpesvirus 6B
uguagaguugaaga

SEQ ID NO: 335593 - RNA, 12 nt, Human herpesvirus 6B
uguagcuggaua

SEQ ID NO: 335594 - RNA, 16 nt, Human herpesvirus 6B
uguaguugaugcuguu

SEQ ID NO: 335595 - RNA, 13 nt, Human herpesvirus 6B
uguauaauuuaca

SEQ ID NO: 335596 - RNA, 15 nt, Human herpesvirus 6B
uguaucaaauuuacc

SEQ ID NO: 335597 - RNA, 20 nt, Human herpesvirus 6B
uguaugaauccagauaaaca

SEQ ID NO: 335598 - RNA, 13 nt, Human herpesvirus 6B
uguauucuccuca

SEQ ID NO: 335599 - RNA, 23 nt, Human herpesvirus 6B
uguauuggaauugggaagcauaa

SEQ ID NO: 335600 - RNA, 17 nt, Human herpesvirus 6B
uguauuucaacgugaau

SEQ ID NO: 335601 - RNA, 18 nt, Human herpesvirus 6B
uguauuucaacgugaauc

SEQ ID NO: 335602 - RNA, 23 nt, Human herpesvirus 6B
ugucaaagaaacaguaaaucucu

SEQ ID NO: 335603 - RNA, 15 nt, Human herpesvirus 6B
ugucaacacgcauga

SEQ ID NO: 335604 - RNA, 21 nt, Human herpesvirus 6B
ugucaaggaaaacucuugaca

SEQ ID NO: 335605 - RNA, 19 nt, Human herpesvirus 6B
ugucacugucgaauaucuu

SEQ ID NO: 335606 - RNA, 22 nt, Human herpesvirus 6B
ugucauucugcauuuauaucaa

SEQ ID NO: 335607 - RNA, 22 nt, Human herpesvirus 6B
ugucgaaucagaucacucagau

SEQ ID NO: 335608 - RNA, 21 nt, Human herpesvirus 6B
ugucguucguuguauguguaa

SEQ ID NO: 335609 - RNA, 15 nt, Human herpesvirus 6B
ugucguuucauggga

SEQ ID NO: 335610 - RNA, 22 nt, Human herpesvirus 6B
ugucuaauuucgacaauccuaa

SEQ ID NO: 335611 - RNA, 21 nt, Human herpesvirus 6B
ugucucuuuauaaacuuaaaa

SEQ ID NO: 335612 - RNA, 22 nt, Human herpesvirus 6B
ugucugauauggcaaauuucaa

SEQ ID NO: 335613 - RNA, 19 nt, Human herpesvirus 6B
ugucugcaguggucaugau

SEQ ID NO: 335614 - RNA, 12 nt, Human herpesvirus 6B
ugucugugauuu

SEQ ID NO: 335615 - RNA, 13 nt, Human herpesvirus 6B
ugucuuacagcuu

SEQ ID NO: 335616 - RNA, 18 nt, Human herpesvirus 6B
ugucuuagaagcauuugc

SEQ ID NO: 335617 - RNA, 22 nt, Human herpesvirus 6B
ugucuuaguguacaaaccaauu

SEQ ID NO: 335618 - RNA, 16 nt, Human herpesvirus 6B
ugucuuccugugagaa

SEQ ID NO: 335619 - RNA, 19 nt, Human herpesvirus 6B
ugucuugcaaacagcuuua

SEQ ID NO: 335620 - RNA, 18 nt, Human herpesvirus 6B
ugucuugcagcugucuag

SEQ ID NO: 335621 - RNA, 19 nt, Human herpesvirus 6B
ugugaacaguauaaauucu

SEQ ID NO: 335622 - RNA, 18 nt, Human herpesvirus 6B
ugugaaucugcugaucuu

SEQ ID NO: 335623 - RNA, 20 nt, Human herpesvirus 6B
ugugauacggaaguugaaaa

SEQ ID NO: 335624 - RNA, 22 nt, Human herpesvirus 6B
ugugcacaaccgaauguucuca

SEQ ID NO: 335625 - RNA, 11 nt, Human herpesvirus 6B
ugugcagagug

SEQ ID NO: 335626 - RNA, 14 nt, Human herpesvirus 6B
ugugcaguuacaau

SEQ ID NO: 335627 - RNA, 19 nt, Human herpesvirus 6B
ugugcaguucuuacauauu

SEQ ID NO: 335628 - RNA, 22 nt, Human herpesvirus 6B
ugugccuacuuuggauuuugau

SEQ ID NO: 335629 - RNA, 20 nt, Human herpesvirus 6B
ugugcgaauggcacucugaa

SEQ ID NO: 335630 - RNA, 16 nt, Human herpesvirus 6B
ugugcuguaguugcau

SEQ ID NO: 335631 - RNA, 20 nt, Human herpesvirus 6B
uguggucgggguuauacaua

SEQ ID NO: 335632 - RNA, 18 nt, Human herpesvirus 6B
uguguaccuuguaaucuc

SEQ ID NO: 335633 - RNA, 20 nt, Human herpesvirus 6B
uguguccugauuaugccguc

SEQ ID NO: 335634 - RNA, 15 nt, Human herpesvirus 6B
uguguccuuaaauua

SEQ ID NO: 335635 - RNA, 14 nt, Human herpesvirus 6B
ugugucgaugucuu

SEQ ID NO: 335636 - RNA, 17 nt, Human herpesvirus 6B
ugugucuuuguuccaga

SEQ ID NO: 335637 - RNA, 17 nt, Human herpesvirus 6B
uguguucagucuaugca

SEQ ID NO: 335638 - RNA, 19 nt, Human herpesvirus 6B
uguuagaucacguucagga

SEQ ID NO: 335639 - RNA, 13 nt, Human herpesvirus 6B
uguuagcuuuuau

SEQ ID NO: 335640 - RNA, 13 nt, Human herpesvirus 6B
uguucacaguuuu

SEQ ID NO: 335641 - RNA, 16 nt, Human herpesvirus 6B
uguuccagauguaggu

SEQ ID NO: 335642 - RNA, 16 nt, Human herpesvirus 6B
uguucgauguacaguu

SEQ ID NO: 335643 - RNA, 14 nt, Human herpesvirus 6B
uguucgauugccaa

SEQ ID NO: 335644 - RNA, 14 nt, Human herpesvirus 6B
uguucgcacaaaau

SEQ ID NO: 335645 - RNA, 14 nt, Human herpesvirus 6B
uguucucagaugua

SEQ ID NO: 335646 - RNA, 15 nt, Human herpesvirus 6B
uguugaaugcuuacc

SEQ ID NO: 335647 - RNA, 12 nt, Human herpesvirus 6B
uguugagucucu

SEQ ID NO: 335648 - RNA, 19 nt, Human herpesvirus 6B
uguugaguuuaucgugcaa

SEQ ID NO: 335649 - RNA, 17 nt, Human herpesvirus 6B
uguugcaguuuaaggau

SEQ ID NO: 335650 - RNA, 18 nt, Human herpesvirus 6B
uguuguaaaauacauacu

SEQ ID NO: 335651 - RNA, 14 nt, Human herpesvirus 6B
uguuuacgaaugau

SEQ ID NO: 335652 - RNA, 13 nt, Human herpesvirus 6B
uguuuagugccua

SEQ ID NO: 335653 - RNA, 20 nt, Human herpesvirus 6B
uguuuauaaauggcauugaa

SEQ ID NO: 335654 - RNA, 14 nt, Human herpesvirus 6B
uguuucgcagagga

SEQ ID NO: 335655 - RNA, 17 nt, Human herpesvirus 6B
uguuucuaacaguugua

SEQ ID NO: 335656 - RNA, 13 nt, Human herpesvirus 6B
uguuucuuugaca

SEQ ID NO: 335657 - RNA, 14 nt, Human herpesvirus 6B
uguuucuuugacau

SEQ ID NO: 335658 - RNA, 23 nt, Human herpesvirus 6B
uguuucuuugacauuuaccagag

SEQ ID NO: 335659 - RNA, 23 nt, Human herpesvirus 6B
uguuugacgguucaccacuguga

SEQ ID NO: 335660 - RNA, 17 nt, Human herpesvirus 6B
uguuugccaaccaaaug

SEQ ID NO: 335661 - RNA, 15 nt, Human herpesvirus 6B
uguuuugugcccaac

SEQ ID NO: 335662 - RNA, 17 nt, Human herpesvirus 6B
uguuuuuaaagcacaga

SEQ ID NO: 335663 - RNA, 22 nt, Human herpesvirus 6B
uuaaaaaaaaaaacgauauuau

SEQ ID NO: 335664 - RNA, 14 nt, Human herpesvirus 6B
uuaaaaaaauagca

SEQ ID NO: 335665 - RNA, 19 nt, Human herpesvirus 6B
uuaaaacucccagcauuuu

SEQ ID NO: 335666 - RNA, 13 nt, Human herpesvirus 6B
uuaaaagugcaac

SEQ ID NO: 335667 - RNA, 13 nt, Human herpesvirus 6B
uuaaaauaccgac

SEQ ID NO: 335668 - RNA, 16 nt, Human herpesvirus 6B
uuaaaguuuacuguga

SEQ ID NO: 335669 - RNA, 15 nt, Human herpesvirus 6B
uuaaaugacacagaa

SEQ ID NO: 335670 - RNA, 18 nt, Human herpesvirus 6B
uuaacauacagaugugua

SEQ ID NO: 335671 - RNA, 21 nt, Human herpesvirus 6B
uuaacauuuuuauuccaaccu

SEQ ID NO: 335672 - RNA, 22 nt, Human herpesvirus 6B
uuaacggaacccuagacacaca

SEQ ID NO: 335673 - RNA, 17 nt, Human herpesvirus 6B
uuaacggagagucuuca

SEQ ID NO: 335674 - RNA, 19 nt, Human herpesvirus 6B
uuaacuaagauugugcagu

SEQ ID NO: 335675 - RNA, 20 nt, Human herpesvirus 6B
uuaacuaagauugugcaguu

SEQ ID NO: 335676 - RNA, 22 nt, Human herpesvirus 6B
uuaacuaagauugugcaguucu

SEQ ID NO: 335677 - RNA, 18 nt, Human herpesvirus 6B
uuaacuuaucaacuauac

SEQ ID NO: 335678 - RNA, 24 nt, Human herpesvirus 6B
uuaaggugcuuuuagagauuaugc

SEQ ID NO: 335679 - RNA, 22 nt, Human herpesvirus 6B
uuaauaaaauaacaugugacac

SEQ ID NO: 335680 - RNA, 23 nt, Human herpesvirus 6B
uuaauaaagauuuuggcuacaac

SEQ ID NO: 335681 - RNA, 13 nt, Human herpesvirus 6B
uuaauaacuacac

SEQ ID NO: 335682 - RNA, 20 nt, Human herpesvirus 6B
uuaauaaggaaaaauaucga

SEQ ID NO: 335683 - RNA, 13 nt, Human herpesvirus 6B
uuaaucucacaca

SEQ ID NO: 335684 - RNA, 19 nt, Human herpesvirus 6B
uuaaugagaggacagucaa

SEQ ID NO: 335685 - RNA, 18 nt, Human herpesvirus 6B
uuaaugauauauugcgau

SEQ ID NO: 335686 - RNA, 22 nt, Human herpesvirus 6B
uuaaugucacugucgaauaucu

SEQ ID NO: 335687 - RNA, 15 nt, Human herpesvirus 6B
uuaauucaaauguag

SEQ ID NO: 335688 - RNA, 16 nt, Human herpesvirus 6B
uuacaaaacaaauauc

SEQ ID NO: 335689 - RNA, 17 nt, Human herpesvirus 6B
uuacaaaacaaauaucg

SEQ ID NO: 335690 - RNA, 15 nt, Human herpesvirus 6B
uuacaaaacaaucua

SEQ ID NO: 335691 - RNA, 15 nt, Human herpesvirus 6B
uuacaaaacuguuaa

SEQ ID NO: 335692 - RNA, 19 nt, Human herpesvirus 6B
uuacaaaccuucccuauca

SEQ ID NO: 335693 - RNA, 21 nt, Human herpesvirus 6B
uuacaaaccuucccuaucaca

SEQ ID NO: 335694 - RNA, 17 nt, Human herpesvirus 6B
uuacaacugaaacucca

SEQ ID NO: 335695 - RNA, 18 nt, Human herpesvirus 6B
uuacaacugaaacuccac

SEQ ID NO: 335696 - RNA, 14 nt, Human herpesvirus 6B
uuacaagcaugcau

SEQ ID NO: 335697 - RNA, 23 nt, Human herpesvirus 6B
uuacaaucauguuuauugucaaa

SEQ ID NO: 335698 - RNA, 22 nt, Human herpesvirus 6B
uuacaaugaguuuuuugcaauu

SEQ ID NO: 335699 - RNA, 17 nt, Human herpesvirus 6B
uuacaauguucuugaca

SEQ ID NO: 335700 - RNA, 18 nt, Human herpesvirus 6B
uuacagcacuuugugccc

SEQ ID NO: 335701 - RNA, 13 nt, Human herpesvirus 6B
uuacauaagcaaa

SEQ ID NO: 335702 - RNA, 15 nt, Human herpesvirus 6B
uuacauauagucaau

SEQ ID NO: 335703 - RNA, 12 nt, Human herpesvirus 6B
uuacaucaaaaa

SEQ ID NO: 335704 - RNA, 18 nt, Human herpesvirus 6B
uuacaucaagacuacucu

SEQ ID NO: 335705 - RNA, 18 nt, Human herpesvirus 6B
uuacaugaaaacauucag

SEQ ID NO: 335706 - RNA, 17 nt, Human herpesvirus 6B
uuaccaccuguuuccaa

SEQ ID NO: 335707 - RNA, 17 nt, Human herpesvirus 6B
uuaccagagauacguga

SEQ ID NO: 335708 - RNA, 13 nt, Human herpesvirus 6B
uuaccauguugcu

SEQ ID NO: 335709 - RNA, 19 nt, Human herpesvirus 6B
uuaccgguaaagaacccau

SEQ ID NO: 335710 - RNA, 15 nt, Human herpesvirus 6B
uuaccuaucaacaau

SEQ ID NO: 335711 - RNA, 21 nt, Human herpesvirus 6B
uuaccuaucaacaauguccaa

SEQ ID NO: 335712 - RNA, 14 nt, Human herpesvirus 6B
uuaccugucuuaga

SEQ ID NO: 335713 - RNA, 14 nt, Human herpesvirus 6B
uuaccuuuuaagag

SEQ ID NO: 335714 - RNA, 20 nt, Human herpesvirus 6B
uuacgaugugucggagacua

SEQ ID NO: 335715 - RNA, 22 nt, Human herpesvirus 6B
uuacuaaguuuugagugcuauu

SEQ ID NO: 335716 - RNA, 13 nt, Human herpesvirus 6B
guaagauugcaga

SEQ ID NO: 335717 - RNA, 14 nt, Human herpesvirus 6B
guaagcaucugcug

SEQ ID NO: 335718 - RNA, 17 nt, Human herpesvirus 6B
guaagcaucugcugcuu

SEQ ID NO: 335719 - RNA, 15 nt, Human herpesvirus 6B
guaaucaaugucaca

SEQ ID NO: 335720 - RNA, 19 nt, Human herpesvirus 6B
guacaaaaucaaacucacc

SEQ ID NO: 335721 - RNA, 10 nt, Human herpesvirus 6B
guacagugaa

SEQ ID NO: 335722 - RNA, 17 nt, Human herpesvirus 6B
guacauauaaacagauu

SEQ ID NO: 335723 - RNA, 13 nt, Human herpesvirus 6B
guaccaacaugua

SEQ ID NO: 335724 - RNA, 20 nt, Human herpesvirus 6B
guaccgaccugacacaauca

SEQ ID NO: 335725 - RNA, 22 nt, Human herpesvirus 6B
guaccgcgguugaagucuuucc

SEQ ID NO: 335726 - RNA, 14 nt, Human herpesvirus 6B
guacgcuucuuuca

SEQ ID NO: 335727 - RNA, 16 nt, Human herpesvirus 6B
guacuauagacgccau

SEQ ID NO: 335728 - RNA, 22 nt, Human herpesvirus 6B
guacugcgguuggggucuuucc

SEQ ID NO: 335729 - RNA, 14 nt, Human herpesvirus 6B
guagcaaaugaaug

SEQ ID NO: 335730 - RNA, 21 nt, Human herpesvirus 6B
guagcaaaugaauguguucau

SEQ ID NO: 335731 - RNA, 12 nt, Human herpesvirus 6B
guaggcaacuua

SEQ ID NO: 335732 - RNA, 17 nt, Human herpesvirus 6B
guagucgagaucaucau

SEQ ID NO: 335733 - RNA, 14 nt, Human herpesvirus 6B
guagucgcauuugu

SEQ ID NO: 335734 - RNA, 22 nt, Human herpesvirus 6B
guagugcucaagcgaagucaug

SEQ ID NO: 335735 - RNA, 12 nt, Human herpesvirus 6B
guauaccauucc

SEQ ID NO: 335736 - RNA, 13 nt, Human herpesvirus 6B
guauaccauuccc

SEQ ID NO: 335737 - RNA, 23 nt, Human herpesvirus 6B
guauccucguggaguaaaacgcu

SEQ ID NO: 335738 - RNA, 19 nt, Human herpesvirus 6B
guaucgucauuccagucca

SEQ ID NO: 335739 - RNA, 23 nt, Human herpesvirus 6B
guaucugccccccuucauccagc

SEQ ID NO: 335740 - RNA, 23 nt, Human herpesvirus 6B
guaugaauccagauaaacaaaaa

SEQ ID NO: 335741 - RNA, 19 nt, Human herpesvirus 6B
guaugcauuaacucugggu

SEQ ID NO: 335742 - RNA, 22 nt, Human herpesvirus 6B
guauggucgucauuucaaauac

SEQ ID NO: 335743 - RNA, 15 nt, Human herpesvirus 6B
guauguauaauauaa

SEQ ID NO: 335744 - RNA, 16 nt, Human herpesvirus 6B
guauuaauguuuuuca

SEQ ID NO: 335745 - RNA, 17 nt, Human herpesvirus 6B
guauuauaaaaacuaau

SEQ ID NO: 335746 - RNA, 18 nt, Human herpesvirus 6B
guauucuuggaaaaccuu

SEQ ID NO: 335747 - RNA, 18 nt, Human herpesvirus 6B
guauuuugauggugucga

SEQ ID NO: 335748 - RNA, 18 nt, Human herpesvirus 6B
gucaaaacaguaaauucc

SEQ ID NO: 335749 - RNA, 11 nt, Human herpesvirus 6B
gucaacaaaca

SEQ ID NO: 335750 - RNA, 20 nt, Human herpesvirus 6B
gucaagaguuuuccuugaca

SEQ ID NO: 335751 - RNA, 12 nt, Human herpesvirus 6B
gucaaugcaauu

SEQ ID NO: 335752 - RNA, 14 nt, Human herpesvirus 6B
gucacaaaucugua

SEQ ID NO: 335753 - RNA, 17 nt, Human herpesvirus 6B
gucacguauaccauucc

SEQ ID NO: 335754 - RNA, 20 nt, Human herpesvirus 6B
gucacguauaccauucccaa

SEQ ID NO: 335755 - RNA, 14 nt, Human herpesvirus 6B
gucagucaaugcaa

SEQ ID NO: 335756 - RNA, 16 nt, Human herpesvirus 6B
gucagucaaugcaauu

SEQ ID NO: 335757 - RNA, 20 nt, Human herpesvirus 6B
gucagucaaugcaauuccac

SEQ ID NO: 335758 - RNA, 14 nt, Human herpesvirus 6B
gucauaauucucau

SEQ ID NO: 335759 - RNA, 18 nt, Human herpesvirus 6B
gucaucaugugugccuac

SEQ ID NO: 335760 - RNA, 15 nt, Human herpesvirus 6B
guccaaugaauacuu

SEQ ID NO: 335761 - RNA, 12 nt, Human herpesvirus 6B
guccauucucag

SEQ ID NO: 335762 - RNA, 17 nt, Human herpesvirus 6B
gucccugucugugauuu

SEQ ID NO: 335763 - RNA, 17 nt, Human herpesvirus 6B
guccguugucgaacucu

SEQ ID NO: 335764 - RNA, 20 nt, Human herpesvirus 6B
guccguuuuuucugcaaaac

SEQ ID NO: 335765 - RNA, 19 nt, Human herpesvirus 6B
guccuauguuaacauugug

SEQ ID NO: 335766 - RNA, 11 nt, Human herpesvirus 6B
guccuauucag

SEQ ID NO: 335767 - RNA, 18 nt, Human herpesvirus 6B
guccuuacaaaccuuccc

SEQ ID NO: 335768 - RNA, 18 nt, Human herpesvirus 6B
guccuucaugauauucca

SEQ ID NO: 335769 - RNA, 12 nt, Human herpesvirus 6B
gucgaaucucaa

SEQ ID NO: 335770 - RNA, 15 nt, Human herpesvirus 6B
gucgcacacacaaga

SEQ ID NO: 335771 - RNA, 22 nt, Human herpesvirus 6B
gucgguccguuuuuucugcaaa

SEQ ID NO: 335772 - RNA, 15 nt, Human herpesvirus 6B
gucguuguguccuga

SEQ ID NO: 335773 - RNA, 22 nt, Human herpesvirus 6B
gucguuucugugaaucugcuga

SEQ ID NO: 335774 - RNA, 15 nt, Human herpesvirus 6B
gucuacgcauucacu

SEQ ID NO: 335775 - RNA, 15 nt, Human herpesvirus 6B
gucucaggugagauu

SEQ ID NO: 335776 - RNA, 16 nt, Human herpesvirus 6B
gucuccugggaacucu

SEQ ID NO: 335777 - RNA, 20 nt, Human herpesvirus 6B
gucucgcguugauacauccc

SEQ ID NO: 335778 - RNA, 13 nt, Human herpesvirus 6B
gucucugucuucc

SEQ ID NO: 335779 - RNA, 19 nt, Human herpesvirus 6B
gucugaauuuaaugcaaaa

SEQ ID NO: 335780 - RNA, 20 nt, Human herpesvirus 6B
gucugaauuuaaugcaaaau

SEQ ID NO: 335781 - RNA, 18 nt, Human herpesvirus 6B
gucugacaagcuguccau

SEQ ID NO: 335782 - RNA, 13 nt, Human herpesvirus 6B
gucugauacuuga

SEQ ID NO: 335783 - RNA, 17 nt, Human herpesvirus 6B
gucuuagaagcauuugc

SEQ ID NO: 335784 - RNA, 23 nt, Human herpesvirus 6B
gucuuauaacaccaguacuucaa

SEQ ID NO: 335785 - RNA, 20 nt, Human herpesvirus 6B
gucuucaaauuuacucucca

SEQ ID NO: 335786 - RNA, 15 nt, Human herpesvirus 6B
gucuucaagcaaaga

SEQ ID NO: 335787 - RNA, 14 nt, Human herpesvirus 6B
gucuucaauaaaaa

SEQ ID NO: 335788 - RNA, 20 nt, Human herpesvirus 6B
gucuucauuaaaacucccag

SEQ ID NO: 335789 - RNA, 14 nt, Human herpesvirus 6B
gucuucccagguac

SEQ ID NO: 335790 - RNA, 19 nt, Human herpesvirus 6B
gucuucucgggacuaggaa

SEQ ID NO: 335791 - RNA, 18 nt, Human herpesvirus 6B
gucuuguuaucuuaugua

SEQ ID NO: 335792 - RNA, 15 nt, Human herpesvirus 6B
gugaaauucgaaaua

SEQ ID NO: 335793 - RNA, 11 nt, Human herpesvirus 6B
gugaacugugu

SEQ ID NO: 335794 - RNA, 23 nt, Human herpesvirus 6B
gugaaucugcugaucuuucucga

SEQ ID NO: 335795 - RNA, 12 nt, Human herpesvirus 6B
gugaauuccugg

SEQ ID NO: 335796 - RNA, 20 nt, Human herpesvirus 6B
gugaccguaucccucccugc

SEQ ID NO: 335797 - RNA, 19 nt, Human herpesvirus 6B
gugacuauauuaucuuuca

SEQ ID NO: 335798 - RNA, 14 nt, Human herpesvirus 6B
gugagaacauauaa

SEQ ID NO: 335799 - RNA, 11 nt, Human herpesvirus 6B
gugagacaucg

SEQ ID NO: 335800 - RNA, 22 nt, Human herpesvirus 6B
gugauacucggucuacugugua

SEQ ID NO: 335801 - RNA, 19 nt, Human herpesvirus 6B
gugaucugauucgacaaau

SEQ ID NO: 335802 - RNA, 19 nt, Human herpesvirus 6B
gugaugccuugauguuucc

SEQ ID NO: 335803 - RNA, 18 nt, Human herpesvirus 6B
gugauguuuuccuuuaug

SEQ ID NO: 335804 - RNA, 14 nt, Human herpesvirus 6B
gugauuauggugcc

SEQ ID NO: 335805 - RNA, 21 nt, Human herpesvirus 6B
gugauugggagcucacuguac

SEQ ID NO: 335806 - RNA, 13 nt, Human herpesvirus 6B
gugcaagcuguac

SEQ ID NO: 335807 - RNA, 22 nt, Human herpesvirus 6B
gugcacgaaaguggauguggau

SEQ ID NO: 335808 - RNA, 18 nt, Human herpesvirus 6B
gugcuauuaacacauaca

SEQ ID NO: 335809 - RNA, 12 nt, Human herpesvirus 6B
guggacaaugau

SEQ ID NO: 335810 - RNA, 16 nt, Human herpesvirus 6B
guggacaaugauacua

SEQ ID NO: 335811 - RNA, 13 nt, Human herpesvirus 6B
guggauacgccag

SEQ ID NO: 335812 - RNA, 13 nt, Human herpesvirus 6B
guggauaucucaa

SEQ ID NO: 335813 - RNA, 17 nt, Human herpesvirus 6B
guggggaugacgagcug

SEQ ID NO: 335814 - RNA, 17 nt, Human herpesvirus 6B
gugguaaugacuauucc

SEQ ID NO: 335815 - RNA, 13 nt, Human herpesvirus 6B
gugguaugagcug

SEQ ID NO: 335816 - RNA, 11 nt, Human herpesvirus 6B
guguaacucuu

SEQ ID NO: 335817 - RNA, 15 nt, Human herpesvirus 6B
guguacacuaugagu

SEQ ID NO: 335818 - RNA, 19 nt, Human herpesvirus 6B
guguauuuuauguguguau

SEQ ID NO: 335819 - RNA, 21 nt, Human herpesvirus 6B
guguauuuuuuuguguguauu

SEQ ID NO: 335820 - RNA, 22 nt, Human herpesvirus 6B
guguauuuuuuuguguguguau

SEQ ID NO: 335821 - RNA, 22 nt, Human herpesvirus 6B
gugucauguuuacugcaugcua

SEQ ID NO: 335822 - RNA, 16 nt, Human herpesvirus 6B
gugugccuacuuugga

SEQ ID NO: 335823 - RNA, 17 nt, Human herpesvirus 6B
guguuaaagaaugcuga

SEQ ID NO: 335824 - RNA, 22 nt, Human herpesvirus 6B
guguuauucggaguuuucaaga

SEQ ID NO: 335825 - RNA, 12 nt, Human herpesvirus 6B
guguucgccaua

SEQ ID NO: 335826 - RNA, 15 nt, Human herpesvirus 6B
guguucgccauauaa

SEQ ID NO: 335827 - RNA, 15 nt, Human herpesvirus 6B
guguucguugucuga

SEQ ID NO: 335828 - RNA, 15 nt, Human herpesvirus 6B
guguucuaacacaua

SEQ ID NO: 335829 - RNA, 16 nt, Human herpesvirus 6B
guguucuggcuuguca

SEQ ID NO: 335830 - RNA, 18 nt, Human herpesvirus 6B
uaaaccaucgacuucaaa

SEQ ID NO: 335831 - RNA, 21 nt, Human herpesvirus 6B
uaaaccaucgacuucaaacac

SEQ ID NO: 335832 - RNA, 14 nt, Human herpesvirus 6B
uaaacgagugugaa

SEQ ID NO: 335833 - RNA, 15 nt, Human herpesvirus 6B
uaaacgauaucaauu

SEQ ID NO: 335834 - RNA, 21 nt, Human herpesvirus 6B
uaaacgcugucucagauauau

SEQ ID NO: 335835 - RNA, 16 nt, Human herpesvirus 6B
uaaacggaauuaacaa

SEQ ID NO: 335836 - RNA, 20 nt, Human herpesvirus 6B
uaaacggagacugcacagaa

SEQ ID NO: 335837 - RNA, 16 nt, Human herpesvirus 6B
uaaacgguaaauucaa

SEQ ID NO: 335838 - RNA, 14 nt, Human herpesvirus 6B
uaaacuaacaugac

SEQ ID NO: 335839 - RNA, 19 nt, Human herpesvirus 6B
uaaacuuugguucggagag

SEQ ID NO: 335840 - RNA, 22 nt, Human herpesvirus 6B
uaaagaaacaaaauuaauucaa

SEQ ID NO: 335841 - RNA, 10 nt, Human herpesvirus 6B
uaaagaaugc

SEQ ID NO: 335842 - RNA, 16 nt, Human herpesvirus 6B
uaaagcgugugauuca

SEQ ID NO: 335843 - RNA, 20 nt, Human herpesvirus 6B
uaaaggauguuugugacucu

SEQ ID NO: 335844 - RNA, 18 nt, Human herpesvirus 6B
uaaaguuucagagcuaag

SEQ ID NO: 335845 - RNA, 13 nt, Human herpesvirus 6B
uaaauaacggugu

SEQ ID NO: 335846 - RNA, 17 nt, Human herpesvirus 6B
uaaauauaacaguagga

SEQ ID NO: 335847 - RNA, 16 nt, Human herpesvirus 6B
uaaauauuaacuaaaa

SEQ ID NO: 335848 - RNA, 14 nt, Human herpesvirus 6B
uaaauauucugggg

SEQ ID NO: 335849 - RNA, 14 nt, Human herpesvirus 6B
uaaaucgccauaau

SEQ ID NO: 335850 - RNA, 18 nt, Human herpesvirus 6B
uaaaugacacagaaucua

SEQ ID NO: 335851 - RNA, 20 nt, Human herpesvirus 6B
uaaauuacaugaaaacauuc

SEQ ID NO: 335852 - RNA, 14 nt, Human herpesvirus 6B
uaaauucucugcau

SEQ ID NO: 335853 - RNA, 13 nt, Human herpesvirus 6B
uaaauugaauaca

SEQ ID NO: 335854 - RNA, 20 nt, Human herpesvirus 6B
uaaauugaugaaauugugac

SEQ ID NO: 335855 - RNA, 22 nt, Human herpesvirus 6B
uaaauugaugaaauugugacua

SEQ ID NO: 335856 - RNA, 12 nt, Human herpesvirus 6B
uaaauuugccac

SEQ ID NO: 335857 - RNA, 17 nt, Human herpesvirus 6B
uaacagauggcacugaa

SEQ ID NO: 335858 - RNA, 14 nt, Human herpesvirus 6B
uaacaucucagauc

SEQ ID NO: 335859 - RNA, 22 nt, Human herpesvirus 6B
uaacccaugaaaaucauuacca

SEQ ID NO: 335860 - RNA, 17 nt, Human herpesvirus 6B
uaacccucgaugcguua

SEQ ID NO: 335861 - RNA, 18 nt, Human herpesvirus 6B
uaacgaacaaaucuccaa

SEQ ID NO: 335862 - RNA, 21 nt, Human herpesvirus 6B
uaacgagaaagaaaaccagua

SEQ ID NO: 335863 - RNA, 17 nt, Human herpesvirus 6B
uaacgcgucaacaaaca

SEQ ID NO: 335864 - RNA, 20 nt, Human herpesvirus 6B
uaacgcgucaacaaacaauu

SEQ ID NO: 335865 - RNA, 19 nt, Human herpesvirus 6B
uaacgcgucgguaaacaau

SEQ ID NO: 335866 - RNA, 20 nt, Human herpesvirus 6B
uaacggaaauccuugacuuu

SEQ ID NO: 335867 - RNA, 13 nt, Human herpesvirus 6B
uaacuuacuuaau

SEQ ID NO: 335868 - RNA, 19 nt, Human herpesvirus 6B
uaagaaaggcggagacaca

SEQ ID NO: 335869 - RNA, 18 nt, Human herpesvirus 6B
uaagaaauauugcaugca

SEQ ID NO: 335870 - RNA, 19 nt, Human herpesvirus 6B
uaagaaauauugcaugcau

SEQ ID NO: 335871 - RNA, 21 nt, Human herpesvirus 6B
uaagaaugcuggcgcugcaua

SEQ ID NO: 335872 - RNA, 16 nt, Human herpesvirus 6B
uaagaauuacaauaca

SEQ ID NO: 335873 - RNA, 15 nt, Human herpesvirus 6B
uaagacgcugauaac

SEQ ID NO: 335874 - RNA, 16 nt, Human herpesvirus 6B
uaagacgcugauaacu

SEQ ID NO: 335875 - RNA, 11 nt, Human herpesvirus 6B
uaagagauuua

SEQ ID NO: 335876 - RNA, 21 nt, Human herpesvirus 6B
uaagauagccagggcauucac

SEQ ID NO: 335877 - RNA, 22 nt, Human herpesvirus 6B
uaagauagccagggcauucaca

SEQ ID NO: 335878 - RNA, 15 nt, Human herpesvirus 6B
uaagcaaacauguau

SEQ ID NO: 335879 - RNA, 15 nt, Human herpesvirus 6B
uaagcagcaaaacaa

SEQ ID NO: 335880 - RNA, 19 nt, Human herpesvirus 6B
uaagcaucugcugcuucuu

SEQ ID NO: 335881 - RNA, 17 nt, Human herpesvirus 6B
uaagccguacugcuggu

SEQ ID NO: 335882 - RNA, 23 nt, Human herpesvirus 6B
uaagcucaagaggguuuuuuaca

SEQ ID NO: 335883 - RNA, 15 nt, Human herpesvirus 6B
uaaggaaaaauaucg

SEQ ID NO: 335884 - RNA, 18 nt, Human herpesvirus 6B
uaagguaucgucauucca

SEQ ID NO: 335885 - RNA, 15 nt, Human herpesvirus 6B
uaagugccguggcag

SEQ ID NO: 335886 - RNA, 17 nt, Human herpesvirus 6B
uaaguggguacaaugaa

SEQ ID NO: 335887 - RNA, 15 nt, Human herpesvirus 6B
uaauaaaaagucaua

SEQ ID NO: 335888 - RNA, 14 nt, Human herpesvirus 6B
uaauaaaaguucca

SEQ ID NO: 335889 - RNA, 13 nt, Human herpesvirus 6B
uaauaaaauacac

SEQ ID NO: 335890 - RNA, 18 nt, Human herpesvirus 6B
uaauaaaauacacaucug

SEQ ID NO: 335891 - RNA, 19 nt, Human herpesvirus 6B
uaauaaaauacacaucuga

SEQ ID NO: 335892 - RNA, 22 nt, Human herpesvirus 6B
uaauaaaggauguuugugacuc

SEQ ID NO: 335893 - RNA, 17 nt, Human herpesvirus 6B
uaauagguuauuuacaa

SEQ ID NO: 335894 - RNA, 19 nt, Human herpesvirus 6B
uaauaguauugucugauau

SEQ ID NO: 335895 - RNA, 16 nt, Human herpesvirus 6B
uaauaugcaacggugu

SEQ ID NO: 335896 - RNA, 19 nt, Human herpesvirus 6B
uaauauuccugaacuacac

SEQ ID NO: 335897 - RNA, 15 nt, Human herpesvirus 6B
uaaucaaugucacaa

SEQ ID NO: 335898 - RNA, 19 nt, Human herpesvirus 6B
uaaucaugauugcaacaaa

SEQ ID NO: 335899 - RNA, 22 nt, Human herpesvirus 6B
uaaucauucgauuaaugccaca

SEQ ID NO: 335900 - RNA, 13 nt, Human herpesvirus 6B
uaauccacugcau

SEQ ID NO: 335901 - RNA, 15 nt, Human herpesvirus 6B
uaauccacugcauuu

SEQ ID NO: 335902 - RNA, 19 nt, Human herpesvirus 6B
uaauccaugaacuacagug

SEQ ID NO: 335903 - RNA, 18 nt, Human herpesvirus 6B
uaaucgcaaaaacauguu

SEQ ID NO: 335904 - RNA, 20 nt, Human herpesvirus 6B
uaaucgcaaaaacauguugu

SEQ ID NO: 335905 - RNA, 18 nt, Human herpesvirus 6B
uaaucuuguagcucagug

SEQ ID NO: 335906 - RNA, 16 nt, Human herpesvirus 6B
uaaugaaucauugcuu

SEQ ID NO: 335907 - RNA, 14 nt, Human herpesvirus 6B
uaaugaaugugcuu

SEQ ID NO: 335908 - RNA, 18 nt, Human herpesvirus 6B
uaaugauuggaaucacaa

SEQ ID NO: 335909 - RNA, 17 nt, Human herpesvirus 6B
uaaugcaugauggugcu

SEQ ID NO: 335910 - RNA, 20 nt, Human herpesvirus 6B
uaauggcauucaccggugau

SEQ ID NO: 335911 - RNA, 20 nt, Human herpesvirus 6B
uaauguguuggucauuucau

SEQ ID NO: 335912 - RNA, 15 nt, Human herpesvirus 6B
uaauguugaguaauu

SEQ ID NO: 335913 - RNA, 12 nt, Human herpesvirus 6B
uaauuacauaua

SEQ ID NO: 335914 - RNA, 18 nt, Human herpesvirus 6B
uaauucaaauguagcaaa

SEQ ID NO: 335915 - RNA, 19 nt, Human herpesvirus 6B
uaauucaaauguagcaaau

SEQ ID NO: 335916 - RNA, 13 nt, Human herpesvirus 6B
uaauucugacugc

SEQ ID NO: 335917 - RNA, 17 nt, Human herpesvirus 6B
uaauugaugggauguaa

SEQ ID NO: 335918 - RNA, 20 nt, Human herpesvirus 6B
uaauugaugggauguaauca

SEQ ID NO: 335919 - RNA, 15 nt, Human herpesvirus 6B
uaauuggacauuguu

SEQ ID NO: 335920 - RNA, 19 nt, Human herpesvirus 6B
uaauuggacauuguugaua

SEQ ID NO: 335921 - RNA, 15 nt, Human herpesvirus 6B
uaauuuuaucaugcc

SEQ ID NO: 335922 - RNA, 11 nt, Human herpesvirus 6B
uacaaaacugu

SEQ ID NO: 335923 - RNA, 17 nt, Human herpesvirus 6B
uacaaaaucaaacucac

SEQ ID NO: 335924 - RNA, 13 nt, Human herpesvirus 6B
uacaaaccuuccc

SEQ ID NO: 335925 - RNA, 22 nt, Human herpesvirus 6B
uacaaacgacaaaaccgaaaua

SEQ ID NO: 335926 - RNA, 16 nt, Human herpesvirus 6B
uacaacugaaacucca

SEQ ID NO: 335927 - RNA, 22 nt, Human herpesvirus 6B
uacaacugaaacuccacgaucu

SEQ ID NO: 335928 - RNA, 13 nt, Human herpesvirus 6B
uacaagcaugcau

SEQ ID NO: 335929 - RNA, 16 nt, Human herpesvirus 6B
uacaaugacuaucaaa

SEQ ID NO: 335930 - RNA, 21 nt, Human herpesvirus 6B
uacaaugaguuuuuugcaauu

SEQ ID NO: 335931 - RNA, 22 nt, Human herpesvirus 6B
uacaaugaguuuuuugcaauuu

SEQ ID NO: 335932 - RNA, 14 nt, Human herpesvirus 6B
uacacaauacacag

SEQ ID NO: 335933 - RNA, 19 nt, Human herpesvirus 6B
uacacauucuccuuguaaa

SEQ ID NO: 335934 - RNA, 16 nt, Human herpesvirus 6B
uacaccaggaguuuaa

SEQ ID NO: 335935 - RNA, 20 nt, Human herpesvirus 6B
uacacguauguacuccgggg

SEQ ID NO: 335936 - RNA, 12 nt, Human herpesvirus 6B
uacacuaugagu

SEQ ID NO: 335937 - RNA, 22 nt, Human herpesvirus 6B
uacacucucguagucgcauuug

SEQ ID NO: 335938 - RNA, 17 nt, Human herpesvirus 6B
uacacuuauagacuaaa

SEQ ID NO: 335939 - RNA, 24 nt, Human herpesvirus 6B
uacacuuuuccagugagaacauau

SEQ ID NO: 335940 - RNA, 19 nt, Human herpesvirus 6B
uacagagauacguagucac

SEQ ID NO: 335941 - RNA, 13 nt, Human herpesvirus 6B
uacagagccagac

SEQ ID NO: 335942 - RNA, 15 nt, Human herpesvirus 6B
uacagagccagacau

SEQ ID NO: 335943 - RNA, 18 nt, Human herpesvirus 6B
uauaacaccaguacuuca

SEQ ID NO: 335944 - RNA, 14 nt, Human herpesvirus 6B
uauaauccugucuc

SEQ ID NO: 335945 - RNA, 20 nt, Human herpesvirus 6B
uauacuuacuugagugaugg

SEQ ID NO: 335946 - RNA, 20 nt, Human herpesvirus 6B
uauagauuagaaauuacaua

SEQ ID NO: 335947 - RNA, 21 nt, Human herpesvirus 6B
uauaggaaucuuguguucuaa

SEQ ID NO: 335948 - RNA, 14 nt, Human herpesvirus 6B
uauaggauuucccu

SEQ ID NO: 335949 - RNA, 17 nt, Human herpesvirus 6B
uauauaguuuucugaug

SEQ ID NO: 335950 - RNA, 20 nt, Human herpesvirus 6B
uauauaguuuucugauggaa

SEQ ID NO: 335951 - RNA, 20 nt, Human herpesvirus 6B
uauaucagagcgggcuauaa

SEQ ID NO: 335952 - RNA, 14 nt, Human herpesvirus 6B
uauaucuacugcag

SEQ ID NO: 335953 - RNA, 21 nt, Human herpesvirus 6B
uauaucuagauaaacguugua

SEQ ID NO: 335954 - RNA, 16 nt, Human herpesvirus 6B
uauaugcaggugcugc

SEQ ID NO: 335955 - RNA, 17 nt, Human herpesvirus 6B
uauauugccuucgcaga

SEQ ID NO: 335956 - RNA, 17 nt, Human herpesvirus 6B
uauauuggcacguguac

SEQ ID NO: 335957 - RNA, 13 nt, Human herpesvirus 6B
uauauuuugaugg

SEQ ID NO: 335958 - RNA, 12 nt, Human herpesvirus 6B
uaucaaaagcca

SEQ ID NO: 335959 - RNA, 15 nt, Human herpesvirus 6B
uaucaaaagccagau

SEQ ID NO: 335960 - RNA, 22 nt, Human herpesvirus 6B
uaucacaaaguuuaaguucuca

SEQ ID NO: 335961 - RNA, 13 nt, Human herpesvirus 6B
uaucacaauacac

SEQ ID NO: 335962 - RNA, 14 nt, Human herpesvirus 6B
uaucacaauacaca

SEQ ID NO: 335963 - RNA, 15 nt, Human herpesvirus 6B
uaucacaauacacag

SEQ ID NO: 335964 - RNA, 21 nt, Human herpesvirus 6B
uaucacacaucgagcccugcu

SEQ ID NO: 335965 - RNA, 19 nt, Human herpesvirus 6B
uaucagagcgggcuauaau

SEQ ID NO: 335966 - RNA, 17 nt, Human herpesvirus 6B
uaucaugagagagcaaa

SEQ ID NO: 335967 - RNA, 15 nt, Human herpesvirus 6B
uauccggccaauuca

SEQ ID NO: 335968 - RNA, 12 nt, Human herpesvirus 6B
uaucgaguuuag

SEQ ID NO: 335969 - RNA, 14 nt, Human herpesvirus 6B
uaucgaguuuagca

SEQ ID NO: 335970 - RNA, 12 nt, Human herpesvirus 6B
uaucgcaaugau

SEQ ID NO: 335971 - RNA, 19 nt, Human herpesvirus 6B
uaucgcgcagaccauaaaa

SEQ ID NO: 335972 - RNA, 21 nt, Human herpesvirus 6B
uaucucaaauuuuccaaacau

SEQ ID NO: 335973 - RNA, 20 nt, Human herpesvirus 6B
uaucuccaauagauuucaua

SEQ ID NO: 335974 - RNA, 23 nt, Human herpesvirus 6B
uaucugcauacagaaauuggaga

SEQ ID NO: 335975 - RNA, 21 nt, Human herpesvirus 6B
uaucugccccccuucauccag

SEQ ID NO: 335976 - RNA, 22 nt, Human herpesvirus 6B
uaucugccccccuucauccagc

SEQ ID NO: 335977 - RNA, 22 nt, Human herpesvirus 6B
uaucuuaaaguuggggucucau

SEQ ID NO: 335978 - RNA, 23 nt, Human herpesvirus 6B
uaugaaaagcuggaaaacuauua

SEQ ID NO: 335979 - RNA, 13 nt, Human herpesvirus 6B
uaugaaaauugcu

SEQ ID NO: 335980 - RNA, 15 nt, Human herpesvirus 6B
uaugacaauugcaga

SEQ ID NO: 335981 - RNA, 16 nt, Human herpesvirus 6B
uaugacugacaaggua

SEQ ID NO: 335982 - RNA, 22 nt, Human herpesvirus 6B
uaugacuuggagagaacugucu

SEQ ID NO: 335983 - RNA, 14 nt, Human herpesvirus 6B
uaugcaacgguguu

SEQ ID NO: 335984 - RNA, 17 nt, Human herpesvirus 6B
uaugcaacgguguucca

SEQ ID NO: 335985 - RNA, 21 nt, Human herpesvirus 6B
uauggaguccuuguuaguuua

SEQ ID NO: 335986 - RNA, 22 nt, Human herpesvirus 6B
uauggcgcguguacgaguagau

SEQ ID NO: 335987 - RNA, 16 nt, Human herpesvirus 6B
uauggugccucagggu

SEQ ID NO: 335988 - RNA, 14 nt, Human herpesvirus 6B
uauguaaagaaaca

SEQ ID NO: 335989 - RNA, 15 nt, Human herpesvirus 6B
uauguaguacacaga

SEQ ID NO: 335990 - RNA, 15 nt, Human herpesvirus 6B
uauguaugaacaggu

SEQ ID NO: 335991 - RNA, 16 nt, Human herpesvirus 6B
uauguauuggaauugg

SEQ ID NO: 335992 - RNA, 17 nt, Human herpesvirus 6B
uaugucguuucauggga

SEQ ID NO: 335993 - RNA, 24 nt, Human herpesvirus 6B
uaugugauucggaaaauaauugca

SEQ ID NO: 335994 - RNA, 16 nt, Human herpesvirus 6B
uauuaauuacauauag

SEQ ID NO: 335995 - RNA, 15 nt, Human herpesvirus 6B
uauuacaauuugaca

SEQ ID NO: 335996 - RNA, 21 nt, Human herpesvirus 6B
uauuaucauaagcgcacauuu

SEQ ID NO: 335997 - RNA, 15 nt, Human herpesvirus 6B
uauucaaccaaucua

SEQ ID NO: 335998 - RNA, 19 nt, Human herpesvirus 6B
uauucagaggugcugauga

SEQ ID NO: 335999 - RNA, 15 nt, Human herpesvirus 6B
uauucagaguacuuu

SEQ ID NO: 336000 - RNA, 16 nt, Human herpesvirus 6B
uauuccaggcaauaau

SEQ ID NO: 336001 - RNA, 20 nt, Human herpesvirus 6B
uauucccauggcgacucaaa

SEQ ID NO: 336002 - RNA, 13 nt, Human herpesvirus 6B
uauucuaauuaua

SEQ ID NO: 336003 - RNA, 21 nt, Human herpesvirus 6B
uauucucaauauucaugcgcu

SEQ ID NO: 336004 - RNA, 20 nt, Human herpesvirus 6B
uauucuccucaacuaaauca

SEQ ID NO: 336005 - RNA, 19 nt, Human herpesvirus 6B
uauucuggcgaugcagaug

SEQ ID NO: 336006 - RNA, 15 nt, Human herpesvirus 6B
uauugcaugcauugc

SEQ ID NO: 336007 - RNA, 15 nt, Human herpesvirus 6B
uauuguccagcacuu

SEQ ID NO: 336008 - RNA, 18 nt, Human herpesvirus 6B
uauugucugauauggcaa

SEQ ID NO: 336009 - RNA, 14 nt, Human herpesvirus 6B
uauuguuguaaaau

SEQ ID NO: 336010 - RNA, 22 nt, Human herpesvirus 6B
uauuguuguaaaauacauacuu

SEQ ID NO: 336011 - RNA, 13 nt, Human herpesvirus 6B
uauuuaacaucca

SEQ ID NO: 336012 - RNA, 14 nt, Human herpesvirus 6B
uauuuaacauccaa

SEQ ID NO: 336013 - RNA, 21 nt, Human herpesvirus 6B
uauuuccauaaguuaauucca

SEQ ID NO: 336014 - RNA, 13 nt, Human herpesvirus 6B
uauuucuaaacac

SEQ ID NO: 336015 - RNA, 17 nt, Human herpesvirus 6B
uauuugucgugugcuac

SEQ ID NO: 336016 - RNA, 22 nt, Human herpesvirus 6B
uauuuguuuaaugcauucacaa

SEQ ID NO: 336017 - RNA, 15 nt, Human herpesvirus 6B
uauuuuaugugugua

SEQ ID NO: 336018 - RNA, 21 nt, Human herpesvirus 6B
uauuuuggcaaaaagacccca

SEQ ID NO: 336019 - RNA, 16 nt, Human herpesvirus 6B
uauuuuuuugugugua

SEQ ID NO: 336020 - RNA, 18 nt, Human herpesvirus 6B
uauuuuuuugugugugua

SEQ ID NO: 336021 - RNA, 17 nt, Human herpesvirus 6B
ucaaaaaaugcuuuuau

SEQ ID NO: 336022 - RNA, 22 nt, Human herpesvirus 6B
ucaaaaagaaugggauugucau

SEQ ID NO: 336023 - RNA, 21 nt, Human herpesvirus 6B
ucaaaacggggguugaaauuu

SEQ ID NO: 336024 - RNA, 14 nt, Human herpesvirus 6B
ucaaaagcaugaaa

SEQ ID NO: 336025 - RNA, 13 nt, Human herpesvirus 6B
ucaaaagccagau

SEQ ID NO: 336026 - RNA, 17 nt, Human herpesvirus 6B
ucaaaaugaccagagau

SEQ ID NO: 336027 - RNA, 21 nt, Human herpesvirus 6B
ucaaacuuuuuuugaagguau

SEQ ID NO: 336028 - RNA, 22 nt, Human herpesvirus 6B
ucaaagugaauuccuggacaug

SEQ ID NO: 336029 - RNA, 18 nt, Human herpesvirus 6B
ucaaauaccuaauuccaa

SEQ ID NO: 336030 - RNA, 13 nt, Human herpesvirus 6B
cuaaauaaucaac

SEQ ID NO: 336031 - RNA, 15 nt, Human herpesvirus 6B
cuaaauaccauuuua

SEQ ID NO: 336032 - RNA, 19 nt, Human herpesvirus 6B
cuaaaucgcgccauaucac

SEQ ID NO: 336033 - RNA, 23 nt, Human herpesvirus 6B
cuaaauuuaucaaagagguacuc

SEQ ID NO: 336034 - RNA, 16 nt, Human herpesvirus 6B
cuaacaauaauugcau

SEQ ID NO: 336035 - RNA, 13 nt, Human herpesvirus 6B
cuaacccaugaaa

SEQ ID NO: 336036 - RNA, 18 nt, Human herpesvirus 6B
cuaacgaacaaaucucca

SEQ ID NO: 336037 - RNA, 19 nt, Human herpesvirus 6B
cuaacgaacaaaucuccaa

SEQ ID NO: 336038 - RNA, 22 nt, Human herpesvirus 6B
cuaacuaaaucgcgccauauca

SEQ ID NO: 336039 - RNA, 23 nt, Human herpesvirus 6B
cuaacuaaaucgcgccauaucac

SEQ ID NO: 336040 - RNA, 15 nt, Human herpesvirus 6B
cuaagaaauauugca

SEQ ID NO: 336041 - RNA, 18 nt, Human herpesvirus 6B
cuaagacgagauguuucu

SEQ ID NO: 336042 - RNA, 21 nt, Human herpesvirus 6B
cuaagauaguuuugcauuaaa

SEQ ID NO: 336043 - RNA, 21 nt, Human herpesvirus 6B
cuaagauugugcaguucuuac

SEQ ID NO: 336044 - RNA, 17 nt, Human herpesvirus 6B
cuaagcgacuuuuuaac

SEQ ID NO: 336045 - RNA, 18 nt, Human herpesvirus 6B
cuaaggugacucuucucu

SEQ ID NO: 336046 - RNA, 20 nt, Human herpesvirus 6B
cuaaguuuugagugcuauuu

SEQ ID NO: 336047 - RNA, 16 nt, Human herpesvirus 6B
cuaauaaaauacacau

SEQ ID NO: 336048 - RNA, 20 nt, Human herpesvirus 6B
cuaauaaaauacacaucuga

SEQ ID NO: 336049 - RNA, 14 nt, Human herpesvirus 6B
cuaauagcccuuca

SEQ ID NO: 336050 - RNA, 20 nt, Human herpesvirus 6B
cuaaugcuagauaacucaga

SEQ ID NO: 336051 - RNA, 21 nt, Human herpesvirus 6B
cuaaugcuagauaacucagau

SEQ ID NO: 336052 - RNA, 17 nt, Human herpesvirus 6B
cuacacgccgucuucaa

SEQ ID NO: 336053 - RNA, 23 nt, Human herpesvirus 6B
cuacagaaguuucggcaacugaa

SEQ ID NO: 336054 - RNA, 14 nt, Human herpesvirus 6B
cuacagacuccuca

SEQ ID NO: 336055 - RNA, 13 nt, Human herpesvirus 6B
cuacauaguguag

SEQ ID NO: 336056 - RNA, 14 nt, Human herpesvirus 6B
cuacauaugccgac

SEQ ID NO: 336057 - RNA, 17 nt, Human herpesvirus 6B
cuacaugccacagaaca

SEQ ID NO: 336058 - RNA, 17 nt, Human herpesvirus 6B
cuacgaucucauaugca

SEQ ID NO: 336059 - RNA, 20 nt, Human herpesvirus 6B
cuacggccagagacaugacc

SEQ ID NO: 336060 - RNA, 22 nt, Human herpesvirus 6B
cuacguuuuuauacacgaacua

SEQ ID NO: 336061 - RNA, 17 nt, Human herpesvirus 6B
cuacugaucgccaaaug

SEQ ID NO: 336062 - RNA, 14 nt, Human herpesvirus 6B
cuagacacacagaa

SEQ ID NO: 336063 - RNA, 15 nt, Human herpesvirus 6B
cuagacacacagaaa

SEQ ID NO: 336064 - RNA, 11 nt, Human herpesvirus 6B
cuagaucugcc

SEQ ID NO: 336065 - RNA, 17 nt, Human herpesvirus 6B
cuagaucugccauggga

SEQ ID NO: 336066 - RNA, 18 nt, Human herpesvirus 6B
cuagauuuaggguuuauc

SEQ ID NO: 336067 - RNA, 21 nt, Human herpesvirus 6B
cuagcaagcuagugaaucaaa

SEQ ID NO: 336068 - RNA, 20 nt, Human herpesvirus 6B
cuagcuuuucauaugaaaag

SEQ ID NO: 336069 - RNA, 22 nt, Human herpesvirus 6B
cuaggaagaugguaucuaaaga

SEQ ID NO: 336070 - RNA, 18 nt, Human herpesvirus 6B
cuaguuuuuuuucuuuac

SEQ ID NO: 336071 - RNA, 19 nt, Human herpesvirus 6B
cuauaaacaauuguauucu

SEQ ID NO: 336072 - RNA, 21 nt, Human herpesvirus 6B
cuauaacuuuucuaucacuua

SEQ ID NO: 336073 - RNA, 16 nt, Human herpesvirus 6B
cuauauuaucuuucau

SEQ ID NO: 336074 - RNA, 16 nt, Human herpesvirus 6B
cuaucacaauacacag

SEQ ID NO: 336075 - RNA, 21 nt, Human herpesvirus 6B
cuaucggacaggcgcaccacg

SEQ ID NO: 336076 - RNA, 22 nt, Human herpesvirus 6B
cuaucggacaggcgcaccacgg

SEQ ID NO: 336077 - RNA, 19 nt, Human herpesvirus 6B
cuaucgucuacccuaucga

SEQ ID NO: 336078 - RNA, 21 nt, Human herpesvirus 6B
cuaucgucuaugacaauugca

SEQ ID NO: 336079 - RNA, 18 nt, Human herpesvirus 6B
cuaugacuggagcagucu

SEQ ID NO: 336080 - RNA, 21 nt, Human herpesvirus 6B
cuaugagaauuaugacugaca

SEQ ID NO: 336081 - RNA, 14 nt, Human herpesvirus 6B
cuaugggaguaauu

SEQ ID NO: 336082 - RNA, 15 nt, Human herpesvirus 6B
cuaugucaaugugaa

SEQ ID NO: 336083 - RNA, 21 nt, Human herpesvirus 6B
gaauauauaaaaaaaacuaaa

SEQ ID NO: 336084 - RNA, 16 nt, Human herpesvirus 6B
gaauauuaguauuagu

SEQ ID NO: 336085 - RNA, 21 nt, Human herpesvirus 6B
gaaucaaauaccuaauuccaa

SEQ ID NO: 336086 - RNA, 18 nt, Human herpesvirus 6B
gaauccagauaaacaaaa

SEQ ID NO: 336087 - RNA, 12 nt, Human herpesvirus 6B
gaauccuauuca

SEQ ID NO: 336088 - RNA, 21 nt, Human herpesvirus 6B
gaaucggauccaacucuacua

SEQ ID NO: 336089 - RNA, 17 nt, Human herpesvirus 6B
gaaucucuggucauuuu

SEQ ID NO: 336090 - RNA, 22 nt, Human herpesvirus 6B
gaaucuuguguucuaacacaua

SEQ ID NO: 336091 - RNA, 19 nt, Human herpesvirus 6B
gaaugaacgcacuagacau

SEQ ID NO: 336092 - RNA, 21 nt, Human herpesvirus 6B
gaaugacuguacacaaaaacc

SEQ ID NO: 336093 - RNA, 18 nt, Human herpesvirus 6B
gaaugaucacuaucaggg

SEQ ID NO: 336094 - RNA, 16 nt, Human herpesvirus 6B
gaauguaaaagagcca

SEQ ID NO: 336095 - RNA, 19 nt, Human herpesvirus 6B
gaauguaaaagagccagag

SEQ ID NO: 336096 - RNA, 16 nt, Human herpesvirus 6B
gaauguacacagucac

SEQ ID NO: 336097 - RNA, 19 nt, Human herpesvirus 6B
gaauguguucauagagcau

SEQ ID NO: 336098 - RNA, 14 nt, Human herpesvirus 6B
gaauguuaaaguau

SEQ ID NO: 336099 - RNA, 16 nt, Human herpesvirus 6B
gaauuaacaauucucu

SEQ ID NO: 336100 - RNA, 21 nt, Human herpesvirus 6B
gaauuacaauacagcaauaaa

SEQ ID NO: 336101 - RNA, 16 nt, Human herpesvirus 6B
gaauugauaguacuua

SEQ ID NO: 336102 - RNA, 16 nt, Human herpesvirus 6B
gaauugggaagcauaa

SEQ ID NO: 336103 - RNA, 22 nt, Human herpesvirus 6B
gaauuguucuucaacauaucac

SEQ ID NO: 336104 - RNA, 14 nt, Human herpesvirus 6B
gaauuguugucucu

SEQ ID NO: 336105 - RNA, 22 nt, Human herpesvirus 6B
gaauuuaauccacugcauuuca

SEQ ID NO: 336106 - RNA, 14 nt, Human herpesvirus 6B
gacaaaaccgaaau

SEQ ID NO: 336107 - RNA, 22 nt, Human herpesvirus 6B
gacaacgauagaguucaucuaa

SEQ ID NO: 336108 - RNA, 23 nt, Human herpesvirus 6B
gacaacgauagaguucaucuaac

SEQ ID NO: 336109 - RNA, 21 nt, Human herpesvirus 6B
gacaagggugugaaacuauga

SEQ ID NO: 336110 - RNA, 16 nt, Human herpesvirus 6B
gacaaguaagauugca

SEQ ID NO: 336111 - RNA, 18 nt, Human herpesvirus 6B
gacacaauuucugacucu

SEQ ID NO: 336112 - RNA, 17 nt, Human herpesvirus 6B
gacacacaacacaucua

SEQ ID NO: 336113 - RNA, 14 nt, Human herpesvirus 6B
gacacacagaaaau

SEQ ID NO: 336114 - RNA, 17 nt, Human herpesvirus 6B
gacaccacauaacaaaa

SEQ ID NO: 336115 - RNA, 15 nt, Human herpesvirus 6B
gacacgcgcggugga

SEQ ID NO: 336116 - RNA, 21 nt, Human herpesvirus 6B
gacagagccuagaccaagaau

SEQ ID NO: 336117 - RNA, 14 nt, Human herpesvirus 6B
gacaucacauuaua

SEQ ID NO: 336118 - RNA, 19 nt, Human herpesvirus 6B
gacaucacgucccauucac

SEQ ID NO: 336119 - RNA, 20 nt, Human herpesvirus 6B
gacaucacgucccauucaca

SEQ ID NO: 336120 - RNA, 13 nt, Human herpesvirus 6B
gacaucugcaaaa

SEQ ID NO: 336121 - RNA, 21 nt, Human herpesvirus 6B
gacaucugcaaaaacaaauga

SEQ ID NO: 336122 - RNA, 20 nt, Human herpesvirus 6B
gacauugauuccaccuuuau

SEQ ID NO: 336123 - RNA, 14 nt, Human herpesvirus 6B
gacauuggacuuug

SEQ ID NO: 336124 - RNA, 14 nt, Human herpesvirus 6B
gaccaaucugugca

SEQ ID NO: 336125 - RNA, 19 nt, Human herpesvirus 6B
gaccauacguggugaugau

SEQ ID NO: 336126 - RNA, 22 nt, Human herpesvirus 6B
gaccuacggccagagacaugac

SEQ ID NO: 336127 - RNA, 19 nt, Human herpesvirus 6B
gaccuucuuuuaguauuua

SEQ ID NO: 336128 - RNA, 14 nt, Human herpesvirus 6B
gacgacggggacua

SEQ ID NO: 336129 - RNA, 14 nt, Human herpesvirus 6B
gacgauaguguucu

SEQ ID NO: 336130 - RNA, 13 nt, Human herpesvirus 6B
gacgcacucggaa

SEQ ID NO: 336131 - RNA, 17 nt, Human herpesvirus 6B
gacggcgaggggacgga

SEQ ID NO: 336132 - RNA, 18 nt, Human herpesvirus 6B
gacgguucaccacuguga

SEQ ID NO: 336133 - RNA, 19 nt, Human herpesvirus 6B
gacgguucaccacugugau

SEQ ID NO: 336134 - RNA, 17 nt, Human herpesvirus 6B
gacguacagagccagac

SEQ ID NO: 336135 - RNA, 20 nt, Human herpesvirus 6B
gacgucuccgaacaugauca

SEQ ID NO: 336136 - RNA, 13 nt, Human herpesvirus 6B
gacuaaacuuaac

SEQ ID NO: 336137 - RNA, 20 nt, Human herpesvirus 6B
gacuacgauugcugucuucc

SEQ ID NO: 336138 - RNA, 18 nt, Human herpesvirus 6B
gacuacguuuuguguuaa

SEQ ID NO: 336139 - RNA, 17 nt, Human herpesvirus 6B
gacuaggaauacguuag

SEQ ID NO: 336140 - RNA, 16 nt, Human herpesvirus 6B
gacuaucaaaauaaaa

SEQ ID NO: 336141 - RNA, 19 nt, Human herpesvirus 6B
gacuaucugagacagucaa

SEQ ID NO: 336142 - RNA, 23 nt, Human herpesvirus 6B
gacuauuaaacuaacaugacaaa

SEQ ID NO: 336143 - RNA, 14 nt, Human herpesvirus 6B
gacucgccgaugaa

SEQ ID NO: 336144 - RNA, 20 nt, Human herpesvirus 6B
gacucgccgaugaaacuguc

SEQ ID NO: 336145 - RNA, 23 nt, Human herpesvirus 6B
gacucuacauaguguagaaaaca

SEQ ID NO: 336146 - RNA, 23 nt, Human herpesvirus 6B
gacugcguuacaagcaugcauug

SEQ ID NO: 336147 - RNA, 20 nt, Human herpesvirus 6B
gacuggaaaacuaugugcau

SEQ ID NO: 336148 - RNA, 19 nt, Human herpesvirus 6B
gacuguacacaaaaaccgu

SEQ ID NO: 336149 - RNA, 20 nt, Human herpesvirus 6B
gacuuauaagucaucauaca

SEQ ID NO: 336150 - RNA, 15 nt, Human herpesvirus 6B
gacuuauaauauucc

SEQ ID NO: 336151 - RNA, 14 nt, Human herpesvirus 6B
gacuuuuuaacaaa

SEQ ID NO: 336152 - RNA, 18 nt, Human herpesvirus 6B
auccgcuaagagauuuac

SEQ ID NO: 336153 - RNA, 22 nt, Human herpesvirus 6B
auccguugagugugcaucagca

SEQ ID NO: 336154 - RNA, 10 nt, Human herpesvirus 6B
auccuaauaa

SEQ ID NO: 336155 - RNA, 23 nt, Human herpesvirus 6B
auccuauucauaacagauggcac

SEQ ID NO: 336156 - RNA, 13 nt, Human herpesvirus 6B
auccucagucuuc

SEQ ID NO: 336157 - RNA, 14 nt, Human herpesvirus 6B
auccucagucuuca

SEQ ID NO: 336158 - RNA, 17 nt, Human herpesvirus 6B
auccugaccgacuuuga

SEQ ID NO: 336159 - RNA, 14 nt, Human herpesvirus 6B
auccuguuuuccca

SEQ ID NO: 336160 - RNA, 14 nt, Human herpesvirus 6B
aucgaaauacuucu

SEQ ID NO: 336161 - RNA, 15 nt, Human herpesvirus 6B
aucgaaauacuucuc

SEQ ID NO: 336162 - RNA, 19 nt, Human herpesvirus 6B
aucgaaauacuucuccgca

SEQ ID NO: 336163 - RNA, 13 nt, Human herpesvirus 6B
aucgaacucuucg

SEQ ID NO: 336164 - RNA, 20 nt, Human herpesvirus 6B
aucgaaucucacaugcgagc

SEQ ID NO: 336165 - RNA, 18 nt, Human herpesvirus 6B
aucgacgaccaggcacca

SEQ ID NO: 336166 - RNA, 23 nt, Human herpesvirus 6B
aucgacuauuaaacuaacaugac

SEQ ID NO: 336167 - RNA, 23 nt, Human herpesvirus 6B
aucgagaucguuuugcaacuuaa

SEQ ID NO: 336168 - RNA, 13 nt, Human herpesvirus 6B
aucgauccaaaag

SEQ ID NO: 336169 - RNA, 17 nt, Human herpesvirus 6B
aucgcaaaagaacacaa

SEQ ID NO: 336170 - RNA, 11 nt, Human herpesvirus 6B
aucgcaaugau

SEQ ID NO: 336171 - RNA, 17 nt, Human herpesvirus 6B
aucgccauagugaaaga

SEQ ID NO: 336172 - RNA, 20 nt, Human herpesvirus 6B
aucggcauuuguguuuuuaa

SEQ ID NO: 336173 - RNA, 16 nt, Human herpesvirus 6B
aucggcgaauguacac

SEQ ID NO: 336174 - RNA, 16 nt, Human herpesvirus 6B
aucgguaaacuucaga

SEQ ID NO: 336175 - RNA, 19 nt, Human herpesvirus 6B
aucgucauaccgaucccag

SEQ ID NO: 336176 - RNA, 13 nt, Human herpesvirus 6B
aucgucauuccag

SEQ ID NO: 336177 - RNA, 16 nt, Human herpesvirus 6B
aucgucauuccagucc

SEQ ID NO: 336178 - RNA, 19 nt, Human herpesvirus 6B
aucgucauuccaguccaau

SEQ ID NO: 336179 - RNA, 19 nt, Human herpesvirus 6B
aucgucccugucugugauu

SEQ ID NO: 336180 - RNA, 20 nt, Human herpesvirus 6B
aucgucccugucugugauuu

SEQ ID NO: 336181 - RNA, 15 nt, Human herpesvirus 6B
aucgucuacccuauc

SEQ ID NO: 336182 - RNA, 17 nt, Human herpesvirus 6B
aucgucuccuccaacaa

SEQ ID NO: 336183 - RNA, 23 nt, Human herpesvirus 6B
aucgugauccgaauccugacuac

SEQ ID NO: 336184 - RNA, 17 nt, Human herpesvirus 6B
aucguuaaaugagauag

SEQ ID NO: 336185 - RNA, 16 nt, Human herpesvirus 6B
aucguucuuaacauau

SEQ ID NO: 336186 - RNA, 18 nt, Human herpesvirus 6B
aucguuuugcaacuuaaa

SEQ ID NO: 336187 - RNA, 15 nt, Human herpesvirus 6B
aucguuuuuauucau

SEQ ID NO: 336188 - RNA, 18 nt, Human herpesvirus 6B
aucuaauaaaauacacau

SEQ ID NO: 336189 - RNA, 23 nt, Human herpesvirus 6B
aucuaauagcccuucaccgucuc

SEQ ID NO: 336190 - RNA, 16 nt, Human herpesvirus 6B
auacuguguaacucuu

SEQ ID NO: 336191 - RNA, 17 nt, Human herpesvirus 6B
auacuguguaacucuuu

SEQ ID NO: 336192 - RNA, 21 nt, Human herpesvirus 6B
auacuuuuuucaauaaugcuc

SEQ ID NO: 336193 - RNA, 15 nt, Human herpesvirus 6B
auagaccaaccagca

SEQ ID NO: 336194 - RNA, 19 nt, Human herpesvirus 6B
auagacuaaacuuaacuua

SEQ ID NO: 336195 - RNA, 15 nt, Human herpesvirus 6B
auagagcauccuguu

SEQ ID NO: 336196 - RNA, 23 nt, Human herpesvirus 6B
auagaggaugcuuugcuguuuac

SEQ ID NO: 336197 - RNA, 19 nt, Human herpesvirus 6B
auagaucuuccccauaaca

SEQ ID NO: 336198 - RNA, 12 nt, Human herpesvirus 6B
auagaugaucag

SEQ ID NO: 336199 - RNA, 19 nt, Human herpesvirus 6B
auagaugaucagcauucac

SEQ ID NO: 336200 - RNA, 22 nt, Human herpesvirus 6B
auagauuguuacuagugauuau

SEQ ID NO: 336201 - RNA, 20 nt, Human herpesvirus 6B
auagauuuauuagccgugau

SEQ ID NO: 336202 - RNA, 17 nt, Human herpesvirus 6B
auagauuucauacugua

SEQ ID NO: 336203 - RNA, 15 nt, Human herpesvirus 6B
auagcagaaguuuac

SEQ ID NO: 336204 - RNA, 18 nt, Human herpesvirus 6B
auagcagaaguuuaccua

SEQ ID NO: 336205 - RNA, 19 nt, Human herpesvirus 6B
auagcagcucugcaauuug

SEQ ID NO: 336206 - RNA, 21 nt, Human herpesvirus 6B
auagcaggcaucgacuauuaa

SEQ ID NO: 336207 - RNA, 18 nt, Human herpesvirus 6B
auagccagggcauucaca

SEQ ID NO: 336208 - RNA, 15 nt, Human herpesvirus 6B
auaggaaguaaauac

SEQ ID NO: 336209 - RNA, 22 nt, Human herpesvirus 6B
auaggcgucucaugcgaucuaa

SEQ ID NO: 336210 - RNA, 21 nt, Human herpesvirus 6B
auagguaaacuguucuuucaa

SEQ ID NO: 336211 - RNA, 17 nt, Human herpesvirus 6B
auagguguuugcagaua

SEQ ID NO: 336212 - RNA, 13 nt, Human herpesvirus 6B
auagucaugcacu

SEQ ID NO: 336213 - RNA, 14 nt, Human herpesvirus 6B
auagucugcugaua

SEQ ID NO: 336214 - RNA, 17 nt, Human herpesvirus 6B
auagugaaacggaguua

SEQ ID NO: 336215 - RNA, 19 nt, Human herpesvirus 6B
auagugaaagaguaccgaa

SEQ ID NO: 336216 - RNA, 12 nt, Human herpesvirus 6B
auaguguucucu

SEQ ID NO: 336217 - RNA, 21 nt, Human herpesvirus 6B
auaguuuggaucuucugcuaa

SEQ ID NO: 336218 - RNA, 23 nt, Human herpesvirus 6B
auaguuuuauucucggucuugcu

SEQ ID NO: 336219 - RNA, 17 nt, Human herpesvirus 6B
auaguuuucugauggaa

SEQ ID NO: 336220 - RNA, 20 nt, Human herpesvirus 6B
auaguuuugcguguagaguu

SEQ ID NO: 336221 - RNA, 17 nt, Human herpesvirus 6B
auauaaaaaagugcaug

SEQ ID NO: 336222 - RNA, 18 nt, Human herpesvirus 6B
auauaaaaaagugcauga

SEQ ID NO: 336223 - RNA, 23 nt, Human herpesvirus 6B
auauaauguguuggucauuucau

SEQ ID NO: 336224 - RNA, 12 nt, Human herpesvirus 6B
agcgaagucaug

SEQ ID NO: 336225 - RNA, 23 nt, Human herpesvirus 6B
agcgagacaauaacaauuauuca

SEQ ID NO: 336226 - RNA, 14 nt, Human herpesvirus 6B
agcgauauggaaac

SEQ ID NO: 336227 - RNA, 19 nt, Human herpesvirus 6B
agcgaucauaaaacugcca

SEQ ID NO: 336228 - RNA, 22 nt, Human herpesvirus 6B
agcgccaacggaaagcaucuca

SEQ ID NO: 336229 - RNA, 12 nt, Human herpesvirus 6B
agcgcuguaugu

SEQ ID NO: 336230 - RNA, 19 nt, Human herpesvirus 6B
agcggcaguuuuuuuucaa

SEQ ID NO: 336231 - RNA, 19 nt, Human herpesvirus 6B
agcguauucagaguacuuu

SEQ ID NO: 336232 - RNA, 15 nt, Human herpesvirus 6B
agcguggauaucuca

SEQ ID NO: 336233 - RNA, 20 nt, Human herpesvirus 6B
agcguuuacaaaacuguuaa

SEQ ID NO: 336234 - RNA, 18 nt, Human herpesvirus 6B
agcuagacgugucuucau

SEQ ID NO: 336235 - RNA, 23 nt, Human herpesvirus 6B
agcuagagaaaauuauagcuuca

SEQ ID NO: 336236 - RNA, 20 nt, Human herpesvirus 6B
agcuauaaaaacacacauca

SEQ ID NO: 336237 - RNA, 19 nt, Human herpesvirus 6B
agcuauaugcaucucuacu

SEQ ID NO: 336238 - RNA, 21 nt, Human herpesvirus 6B
agcuauguaugaacaggugcu

SEQ ID NO: 336239 - RNA, 15 nt, Human herpesvirus 6B
agcuauugaaacugg

SEQ ID NO: 336240 - RNA, 14 nt, Human herpesvirus 6B
agcucagacaaaug

SEQ ID NO: 336241 - RNA, 18 nt, Human herpesvirus 6B
agcucaguguuugccaac

SEQ ID NO: 336242 - RNA, 14 nt, Human herpesvirus 6B
agcugaaauagaca

SEQ ID NO: 336243 - RNA, 16 nt, Human herpesvirus 6B
agcugacaucugcaaa

SEQ ID NO: 336244 - RNA, 16 nt, Human herpesvirus 6B
agcugacguucccaac

SEQ ID NO: 336245 - RNA, 17 nt, Human herpesvirus 6B
agcugcuaaaugugaua

SEQ ID NO: 336246 - RNA, 22 nt, Human herpesvirus 6B
agcugcuaaaugugauacggaa

SEQ ID NO: 336247 - RNA, 16 nt, Human herpesvirus 6B
agcugcuaacggagca

SEQ ID NO: 336248 - RNA, 17 nt, Human herpesvirus 6B
agcuggcgaaaagugcu

SEQ ID NO: 336249 - RNA, 23 nt, Human herpesvirus 6B
agcuuauuuaugaaaauugcucu

SEQ ID NO: 336250 - RNA, 14 nt, Human herpesvirus 6B
agcuucagguugcc

SEQ ID NO: 336251 - RNA, 14 nt, Human herpesvirus 6B
agcuuuauucccau

SEQ ID NO: 336252 - RNA, 23 nt, Human herpesvirus 6B
agcuuuuuuugaagcaucccuau

SEQ ID NO: 336253 - RNA, 21 nt, Human herpesvirus 6B
aggaaaacgcagcaugaugau

SEQ ID NO: 336254 - RNA, 12 nt, Human herpesvirus 6B
aggaaaagaaga

SEQ ID NO: 336255 - RNA, 12 nt, Human herpesvirus 6B
aggaaaugauga

SEQ ID NO: 336256 - RNA, 16 nt, Human herpesvirus 6B
aggaaaugaugauuaa

SEQ ID NO: 336257 - RNA, 16 nt, Human herpesvirus 6B
aggaacugaugagaaa

SEQ ID NO: 336258 - RNA, 18 nt, Human herpesvirus 6B
aggaagaugguaucuaaa

SEQ ID NO: 336259 - RNA, 19 nt, Human herpesvirus 6B
aggaauagcaggcaucgac

SEQ ID NO: 336260 - RNA, 12 nt, Human herpesvirus 6B
aggaaugugcag

SEQ ID NO: 336261 - RNA, 20 nt, Human herpesvirus 6B
aggacuaucugagacaguca

SEQ ID NO: 336262 - RNA, 18 nt, Human herpesvirus 6B
aggagaccaugccauuga

SEQ ID NO: 336263 - RNA, 15 nt, Human herpesvirus 6B
aggagcauucacaua

SEQ ID NO: 336264 - RNA, 22 nt, Human herpesvirus 6B
aggagcauucacauaagacuua

SEQ ID NO: 336265 - RNA, 15 nt, Human herpesvirus 6B
aggagccaacauaca

SEQ ID NO: 336266 - RNA, 17 nt, Human herpesvirus 6B
aggagccaacauacaca

SEQ ID NO: 336267 - RNA, 16 nt, Human herpesvirus 6B
aggagcccacagcauc

SEQ ID NO: 336268 - RNA, 20 nt, Human herpesvirus 6B
aggagcuaguuacggggaag

SEQ ID NO: 336269 - RNA, 23 nt, Human herpesvirus 6B
aggaggucucaggugagauuccg

SEQ ID NO: 336270 - RNA, 18 nt, Human herpesvirus 6B
aggaucgaacucuucgau

SEQ ID NO: 336271 - RNA, 20 nt, Human herpesvirus 6B
aggaugcuuugcuguuuacg

SEQ ID NO: 336272 - RNA, 20 nt, Human herpesvirus 6B
aggauguuugugacucugaa

SEQ ID NO: 336273 - RNA, 16 nt, Human herpesvirus 6B
aggauuugcuugucac

SEQ ID NO: 336274 - RNA, 21 nt, Human herpesvirus 6B
aggccaauuuaugucauuuca

SEQ ID NO: 336275 - RNA, 16 nt, Human herpesvirus 6B
aggccggcacauacac

SEQ ID NO: 336276 - RNA, 14 nt, Human herpesvirus 6B
aggcgcaccacggc

SEQ ID NO: 336277 - RNA, 20 nt, Human herpesvirus 6B
aggcggagauucaauacuac

SEQ ID NO: 336278 - RNA, 22 nt, Human herpesvirus 6B
aggcggcaugaauuccaugcga

SEQ ID NO: 336279 - RNA, 21 nt, Human herpesvirus 6B
aggcgucucaugcgaucuaau

SEQ ID NO: 336280 - RNA, 12 nt, Human herpesvirus 6B
aggcguuuaccg

SEQ ID NO: 336281 - RNA, 14 nt, Human herpesvirus 6B
aggcuaaacacuga

SEQ ID NO: 336282 - RNA, 14 nt, Human herpesvirus 6B
aggcuaucacuuag

SEQ ID NO: 336283 - RNA, 22 nt, Human herpesvirus 6B
aggcugaacuguuuccagagca

SEQ ID NO: 336284 - RNA, 15 nt, Human herpesvirus 6B
aggcuuaaugaaugu

SEQ ID NO: 336285 - RNA, 18 nt, Human herpesvirus 6B
aggcuuaaugaaugugcu

SEQ ID NO: 336286 - RNA, 21 nt, Human herpesvirus 6B
agggaagguuuguaaggacaa

SEQ ID NO: 336287 - RNA, 16 nt, Human herpesvirus 6B
agggaauugugucuuu

SEQ ID NO: 336288 - RNA, 21 nt, Human herpesvirus 6B
agggacccacacgcggggauc

SEQ ID NO: 336289 - RNA, 19 nt, Human herpesvirus 6B
agggagaaacggacacgcg

SEQ ID NO: 336290 - RNA, 20 nt, Human herpesvirus 6B
aggguugcgauaggugugcu

SEQ ID NO: 336291 - RNA, 12 nt, Human herpesvirus 6B
agguaaacuguu

SEQ ID NO: 336292 - RNA, 16 nt, Human herpesvirus 6B
agguaaacuguucuuu

SEQ ID NO: 336293 - RNA, 19 nt, Human herpesvirus 6B
agguacacaauacacagua

SEQ ID NO: 336294 - RNA, 21 nt, Human herpesvirus 6B
agguacacaauacacaguaga

SEQ ID NO: 336295 - RNA, 22 nt, Human herpesvirus 6B
agguaucgucauuccaguccaa

SEQ ID NO: 336296 - RNA, 14 nt, Human herpesvirus 6B
aggucaucguccaa

SEQ ID NO: 336297 - RNA, 20 nt, Human herpesvirus 6B
aggucucaggugagauuccg

SEQ ID NO: 336298 - RNA, 14 nt, Human herpesvirus 6B
aggugaaacauaaa

SEQ ID NO: 336299 - RNA, 13 nt, Human herpesvirus 6B
aggugagacaucg

SEQ ID NO: 336300 - RNA, 13 nt, Human herpesvirus 6B
aggugagauuccg

SEQ ID NO: 336301 - RNA, 19 nt, Human herpesvirus 6B
aggugcguguuauggggaa

SEQ ID NO: 336302 - RNA, 20 nt, Human herpesvirus 6B
aggugcguguuauggggaag

SEQ ID NO: 336303 - RNA, 17 nt, Human herpesvirus 6B
aggugcuuuuagagauu

SEQ ID NO: 336304 - RNA, 16 nt, Human herpesvirus 6B
agguugagaaugauuu

SEQ ID NO: 336305 - RNA, 22 nt, Human herpesvirus 6B
agguuucuccgcacgcuagcaa

SEQ ID NO: 336306 - RNA, 16 nt, Human herpesvirus 6B
agguuuguaaggacaa

SEQ ID NO: 336307 - RNA, 16 nt, Human herpesvirus 6B
aguaauaauagguuau

SEQ ID NO: 336308 - RNA, 15 nt, Human herpesvirus 6B
aguacauagaaucuc

SEQ ID NO: 336309 - RNA, 18 nt, Human herpesvirus 6B
aguacauagaaucucugg

SEQ ID NO: 336310 - RNA, 18 nt, Human herpesvirus 6B
aguacguugguaucagug

SEQ ID NO: 336311 - RNA, 16 nt, Human herpesvirus 6B
aguagauggaucggaa

SEQ ID NO: 336312 - RNA, 18 nt, Human herpesvirus 6B
aguaucacguaucucugg

SEQ ID NO: 336313 - RNA, 22 nt, Human herpesvirus 6B
aguaugccauaaagaacacagg

SEQ ID NO: 336314 - RNA, 18 nt, Human herpesvirus 6B
aguaugcuuugguaguga

SEQ ID NO: 336315 - RNA, 15 nt, Human herpesvirus 6B
aguauuaaugucuuc

SEQ ID NO: 336316 - RNA, 13 nt, Human herpesvirus 6B
agucaaugcaauu

SEQ ID NO: 336317 - RNA, 15 nt, Human herpesvirus 6B
agucaccgcauauca

SEQ ID NO: 336318 - RNA, 15 nt, Human herpesvirus 6B
agucauaauucucau

SEQ ID NO: 336319 - RNA, 14 nt, Human herpesvirus 6B
agucaugcacuccg

SEQ ID NO: 336320 - RNA, 14 nt, Human herpesvirus 6B
agucaugcuucuuu

SEQ ID NO: 336321 - RNA, 22 nt, Human herpesvirus 6B
aguccagaaguccuucaugaua

SEQ ID NO: 336322 - RNA, 19 nt, Human herpesvirus 6B
aguccuucaugauauucca

SEQ ID NO: 336323 - RNA, 14 nt, Human herpesvirus 6B
aguccuucuuuagu

SEQ ID NO: 336324 - RNA, 19 nt, Human herpesvirus 6B
aguccuuguuaguuuauac

SEQ ID NO: 336325 - RNA, 13 nt, Human herpesvirus 6B
agucuaugcagcg

SEQ ID NO: 336326 - RNA, 13 nt, Human herpesvirus 6B
agucucugucuuc

SEQ ID NO: 336327 - RNA, 22 nt, Human herpesvirus 6B
agucugaauuuaaugcaaaauc

SEQ ID NO: 336328 - RNA, 15 nt, Human herpesvirus 6B
agucuuauaacacca

SEQ ID NO: 336329 - RNA, 20 nt, Human herpesvirus 6B
agucuucuggauacugauga

SEQ ID NO: 336330 - RNA, 21 nt, Human herpesvirus 6B
agucuucuggauacugaugaa

SEQ ID NO: 336331 - RNA, 18 nt, Human herpesvirus 6B
agugaaucaaauaccuaa

SEQ ID NO: 336332 - RNA, 14 nt, Human herpesvirus 6B
agugaauugugcaa

SEQ ID NO: 336333 - RNA, 15 nt, Human herpesvirus 6B
agugaauugugcaag

SEQ ID NO: 336334 - RNA, 20 nt, Human herpesvirus 6B
agugacaucuuuuaucgcug

SEQ ID NO: 336335 - RNA, 15 nt, Human herpesvirus 6B
agugacuuucacucc

SEQ ID NO: 336336 - RNA, 19 nt, Human herpesvirus 6B
agugcacgaaaguggaugu

SEQ ID NO: 336337 - RNA, 14 nt, Human herpesvirus 6B
agugcuauuugcau

SEQ ID NO: 336338 - RNA, 22 nt, Human herpesvirus 6B
agugcuucugcucucgaugaaa

SEQ ID NO: 336339 - RNA, 14 nt, Human herpesvirus 6B
agaaaagcaaacau

SEQ ID NO: 336340 - RNA, 20 nt, Human herpesvirus 6B
agaaaauaaaaaaaaagaca

SEQ ID NO: 336341 - RNA, 18 nt, Human herpesvirus 6B
agaaaaugaauucaagac

SEQ ID NO: 336342 - RNA, 20 nt, Human herpesvirus 6B
agaaaccgauuuaccaccug

SEQ ID NO: 336343 - RNA, 19 nt, Human herpesvirus 6B
agaaaccuucguucugaua

SEQ ID NO: 336344 - RNA, 21 nt, Human herpesvirus 6B
agaaacuuggagcuauaugca

SEQ ID NO: 336345 - RNA, 22 nt, Human herpesvirus 6B
agaaacuuggagcuauaugcau

SEQ ID NO: 336346 - RNA, 20 nt, Human herpesvirus 6B
agaaaggagcgucguauuaa

SEQ ID NO: 336347 - RNA, 14 nt, Human herpesvirus 6B
agaaaucacguuga

SEQ ID NO: 336348 - RNA, 19 nt, Human herpesvirus 6B
agaaauugugucacauguu

SEQ ID NO: 336349 - RNA, 22 nt, Human herpesvirus 6B
agaaauuucuagcgaucauaaa

SEQ ID NO: 336350 - RNA, 13 nt, Human herpesvirus 6B
agaacacaagagu

SEQ ID NO: 336351 - RNA, 15 nt, Human herpesvirus 6B
agaacagcgcauaaa

SEQ ID NO: 336352 - RNA, 16 nt, Human herpesvirus 6B
agaacaguuuaccuau

SEQ ID NO: 336353 - RNA, 20 nt, Human herpesvirus 6B
agaacaguuuaccuaucaac

SEQ ID NO: 336354 - RNA, 15 nt, Human herpesvirus 6B
agaacugucuugcag

SEQ ID NO: 336355 - RNA, 23 nt, Human herpesvirus 6B
agaagaguuuuuuaaaagugcaa

SEQ ID NO: 336356 - RNA, 18 nt, Human herpesvirus 6B
agaaggccaucaugcugu

SEQ ID NO: 336357 - RNA, 18 nt, Human herpesvirus 6B
agaaguccuucaugauau

SEQ ID NO: 336358 - RNA, 13 nt, Human herpesvirus 6B
agaauacgaacag

SEQ ID NO: 336359 - RNA, 14 nt, Human herpesvirus 6B
agaaucuuccacug

SEQ ID NO: 336360 - RNA, 12 nt, Human herpesvirus 6B
agaaugcaacau

SEQ ID NO: 336361 - RNA, 13 nt, Human herpesvirus 6B
agaaugccgugaa

SEQ ID NO: 336362 - RNA, 21 nt, Human herpesvirus 6B
agaaugcuggcgcugcauaga

SEQ ID NO: 336363 - RNA, 16 nt, Human herpesvirus 6B
agaauguuccaauuga

SEQ ID NO: 336364 - RNA, 16 nt, Human herpesvirus 6B
agacacgcuaaaaaca

SEQ ID NO: 336365 - RNA, 14 nt, Human herpesvirus 6B
agacagggggaucg

SEQ ID NO: 336366 - RNA, 18 nt, Human herpesvirus 6B
agacauucaacauuccca

SEQ ID NO: 336367 - RNA, 19 nt, Human herpesvirus 6B
agacauucaacauucccac

SEQ ID NO: 336368 - RNA, 20 nt, Human herpesvirus 6B
agacgucuccgaacaugauc

SEQ ID NO: 336369 - RNA, 16 nt, Human herpesvirus 6B
agacgugcugucugca

SEQ ID NO: 336370 - RNA, 17 nt, Human herpesvirus 6B
agacuaaacuuaacuua

SEQ ID NO: 336371 - RNA, 18 nt, Human herpesvirus 6B
agacuaaacuuaacuuau

SEQ ID NO: 336372 - RNA, 17 nt, Human herpesvirus 6B
agacuacagacuccuca

SEQ ID NO: 336373 - RNA, 18 nt, Human herpesvirus 6B
agacuacagacuccucac

SEQ ID NO: 336374 - RNA, 13 nt, Human herpesvirus 6B
agacuacucuggc

SEQ ID NO: 336375 - RNA, 19 nt, Human herpesvirus 6B
agacuacucuggcugaagg

SEQ ID NO: 336376 - RNA, 21 nt, Human herpesvirus 6B
agacuagauuuaggguuuauc

SEQ ID NO: 336377 - RNA, 16 nt, Human herpesvirus 6B
agacucgccgaugaaa

SEQ ID NO: 336378 - RNA, 20 nt, Human herpesvirus 6B
agacucggaagauacacugc

SEQ ID NO: 336379 - RNA, 23 nt, Human herpesvirus 6B
agacucggaagauacacugcaag

SEQ ID NO: 336380 - RNA, 23 nt, Human herpesvirus 6B
agacugaggaugaguagcuuuga

SEQ ID NO: 336381 - RNA, 18 nt, Human herpesvirus 6B
agacuuacagagcuuuua

SEQ ID NO: 336382 - RNA, 13 nt, Human herpesvirus 6B
agacuuaucuccg

SEQ ID NO: 336383 - RNA, 16 nt, Human herpesvirus 6B
agagaaugaacgcagc

SEQ ID NO: 336384 - RNA, 15 nt, Human herpesvirus 6B
agagaggagcauuca

SEQ ID NO: 336385 - RNA, 14 nt, Human herpesvirus 6B
agagauaucugcau

SEQ ID NO: 336386 - RNA, 16 nt, Human herpesvirus 6B
agagauuuacuguuuc

SEQ ID NO: 336387 - RNA, 21 nt, Human herpesvirus 6B
agagcugccgagcugagcgga

SEQ ID NO: 336388 - RNA, 16 nt, Human herpesvirus 6B
agaggagaccaugcca

SEQ ID NO: 336389 - RNA, 14 nt, Human herpesvirus 6B
agaggaucuguuca

SEQ ID NO: 336390 - RNA, 23 nt, Human herpesvirus 6B
agaggccaauuuaugucauuuca

SEQ ID NO: 336391 - RNA, 20 nt, Human herpesvirus 6B
agaggguuccuccgcgggac

SEQ ID NO: 336392 - RNA, 17 nt, Human herpesvirus 6B
agagguaauaaaaacac

SEQ ID NO: 336393 - RNA, 21 nt, Human herpesvirus 6B
agagguaauaaaaacaccucu

SEQ ID NO: 336394 - RNA, 17 nt, Human herpesvirus 6B
agaggugcaaaugcuca

SEQ ID NO: 336395 - RNA, 21 nt, Human herpesvirus 6B
agagugauucaagguggaggu

SEQ ID NO: 336396 - RNA, 20 nt, Human herpesvirus 6B
agagugcgagacuggaaaac

SEQ ID NO: 336397 - RNA, 13 nt, Human herpesvirus 6B
agaguucaucuaa

SEQ ID NO: 336398 - RNA, 21 nt, Human herpesvirus 6B
agaguucgguccaaggauuau

SEQ ID NO: 336399 - RNA, 24 nt, Human herpesvirus 6B
agaguucgguccaaggauuaugau

SEQ ID NO: 336400 - RNA, 14 nt, Human herpesvirus 6B
agauaauuuccaau

SEQ ID NO: 336401 - RNA, 18 nt, Human herpesvirus 6B
agauaauuuccaauagaa

SEQ ID NO: 336402 - RNA, 14 nt, Human herpesvirus 6B
agauacacugcaag

SEQ ID NO: 336403 - RNA, 17 nt, Human herpesvirus 6B
agauacacugcaagaac

SEQ ID NO: 336404 - RNA, 23 nt, Human herpesvirus 6B
agauacauguuuuugaugugcua

SEQ ID NO: 336405 - RNA, 18 nt, Human herpesvirus 6B
agauaccgcuauuauuug

SEQ ID NO: 336406 - RNA, 15 nt, Human herpesvirus 6B
agauacgugauacuc

SEQ ID NO: 336407 - RNA, 14 nt, Human herpesvirus 6B
agauagacagugaa

SEQ ID NO: 336408 - RNA, 20 nt, Human herpesvirus 6B
agauagccagggcauucaca

SEQ ID NO: 336409 - RNA, 13 nt, Human herpesvirus 6B
agauaguuuugca

SEQ ID NO: 336410 - RNA, 17 nt, Human herpesvirus 6B
agauaguuuugcgugua

SEQ ID NO: 336411 - RNA, 19 nt, Human herpesvirus 6B
agauauuucauuguuucac

SEQ ID NO: 336412 - RNA, 12 nt, Human herpesvirus 6B
agaucaguacau

SEQ ID NO: 336413 - RNA, 12 nt, Human herpesvirus 6B
agaucaguucuc

SEQ ID NO: 336414 - RNA, 22 nt, Human herpesvirus 6B
agaucaucgccauagugaaaga

SEQ ID NO: 336415 - RNA, 21 nt, Human herpesvirus 6B
agaucauuaaaucggacaaug

SEQ ID NO: 336416 - RNA, 20 nt, Human herpesvirus 6B
agauccccgccugcagcgau

SEQ ID NO: 336417 - RNA, 17 nt, Human herpesvirus 6B
agaucugcucaugucag

SEQ ID NO: 336418 - RNA, 22 nt, Human herpesvirus 6B
agaugacagcgagacaauaaca

SEQ ID NO: 336419 - RNA, 17 nt, Human herpesvirus 6B
agaugaucagcauucac

SEQ ID NO: 336420 - RNA, 19 nt, Human herpesvirus 6B
agaugcaaccgaugacaaa

SEQ ID NO: 336421 - RNA, 14 nt, Human herpesvirus 6B
agaugcuuaacuua

SEQ ID NO: 336422 - RNA, 19 nt, Human herpesvirus 6B
agaugcuuaacuuacuuaa

SEQ ID NO: 336423 - RNA, 18 nt, Human herpesvirus 6B
agauggaaaacugcagau

SEQ ID NO: 336424 - RNA, 20 nt, Human herpesvirus 6B
agauggugcuauuaacacau

SEQ ID NO: 336425 - RNA, 22 nt, Human herpesvirus 6B
agauggugcuauuaacacauac

SEQ ID NO: 336426 - RNA, 17 nt, Human herpesvirus 6B
agauguauuucuuccuc

SEQ ID NO: 336427 - RNA, 23 nt, Human herpesvirus 6B
agauguccuuuguauuuuucgag

SEQ ID NO: 336428 - RNA, 22 nt, Human herpesvirus 6B
agauuacccaucguucuuaaca

SEQ ID NO: 336429 - RNA, 19 nt, Human herpesvirus 6B
agauuagaaauuacauaag

SEQ ID NO: 336430 - RNA, 22 nt, Human herpesvirus 6B
agauuaugccacacccauuucc

SEQ ID NO: 336431 - RNA, 15 nt, Human herpesvirus 6B
agauuauggcaacau

SEQ ID NO: 336432 - RNA, 17 nt, Human herpesvirus 6B
agauuauggcaacauac

SEQ ID NO: 336433 - RNA, 19 nt, Human herpesvirus 6B
agauucgcaagacuacaga

SEQ ID NO: 336434 - RNA, 17 nt, Human herpesvirus 6B
agauucggggggagaca

SEQ ID NO: 336435 - RNA, 14 nt, Human herpesvirus 6B
agauugugcaguuc

SEQ ID NO: 336436 - RNA, 14 nt, Human herpesvirus 6B
agauuguuacuagu

SEQ ID NO: 336437 - RNA, 13 nt, Human herpesvirus 6B
agauuguuuucau

SEQ ID NO: 336438 - RNA, 22 nt, Human herpesvirus 6B
agauuuaauaaaauaacaugug

SEQ ID NO: 336439 - RNA, 12 nt, Human herpesvirus 6B
agauuuacuguu

SEQ ID NO: 336440 - RNA, 13 nt, Human herpesvirus 6B
agauuuacuguuu

SEQ ID NO: 336441 - RNA, 18 nt, Human herpesvirus 6B
agauuuaucaaaagccag

SEQ ID NO: 336442 - RNA, 21 nt, Human herpesvirus 6B
agauuucuuauuaugugauuc

SEQ ID NO: 336443 - RNA, 14 nt, Human herpesvirus 6B
agauuuggagguga

SEQ ID NO: 336444 - RNA, 13 nt, Human herpesvirus 6B
agauuuuacuucu

SEQ ID NO: 336445 - RNA, 17 nt, Human herpesvirus 6B
agcaaaaaauaguuuua

SEQ ID NO: 336446 - RNA, 12 nt, Human herpesvirus 6B
agcaaacaugca

SEQ ID NO: 336447 - RNA, 12 nt, Human herpesvirus 6B
agcaaacaugua

SEQ ID NO: 336448 - RNA, 15 nt, Human herpesvirus 6B
agcaaacaugugauu

SEQ ID NO: 336449 - RNA, 16 nt, Human herpesvirus 6B
agcaaagcacccugca

SEQ ID NO: 336450 - RNA, 19 nt, Human herpesvirus 6B
agcaaucaccaucaacaca

SEQ ID NO: 336451 - RNA, 15 nt, Human herpesvirus 6B
agcaauccaaucaac

SEQ ID NO: 336452 - RNA, 16 nt, Human herpesvirus 6B
augcuuugguagugag

SEQ ID NO: 336453 - RNA, 14 nt, Human herpesvirus 6B
auggaaaacugcag

SEQ ID NO: 336454 - RNA, 17 nt, Human herpesvirus 6B
auggaaaacugcagauu

SEQ ID NO: 336455 - RNA, 15 nt, Human herpesvirus 6B
auggaaaccuauuag

SEQ ID NO: 336456 - RNA, 22 nt, Human herpesvirus 6B
auggacaacgguguggagacac

SEQ ID NO: 336457 - RNA, 19 nt, Human herpesvirus 6B
auggagcccgcucggucuc

SEQ ID NO: 336458 - RNA, 16 nt, Human herpesvirus 6B
auggcaacauacccuu

SEQ ID NO: 336459 - RNA, 22 nt, Human herpesvirus 6B
augggaguaauuauugugacaa

SEQ ID NO: 336460 - RNA, 23 nt, Human herpesvirus 6B
augggaguaauuauugugacaag

SEQ ID NO: 336461 - RNA, 17 nt, Human herpesvirus 6B
auggggaagaucuauga

SEQ ID NO: 336462 - RNA, 15 nt, Human herpesvirus 6B
augguagugcucaag

SEQ ID NO: 336463 - RNA, 23 nt, Human herpesvirus 6B
auggugccucaggguuggaguuu

SEQ ID NO: 336464 - RNA, 15 nt, Human herpesvirus 6B
augguuaugacaaag

SEQ ID NO: 336465 - RNA, 23 nt, Human herpesvirus 6B
augguucgauugcgcgauuaggu

SEQ ID NO: 336466 - RNA, 13 nt, Human herpesvirus 6B
augguugugugag

SEQ ID NO: 336467 - RNA, 14 nt, Human herpesvirus 6B
auguaaaagagcca

SEQ ID NO: 336468 - RNA, 17 nt, Human herpesvirus 6B
auguaaaagagccagag

SEQ ID NO: 336469 - RNA, 16 nt, Human herpesvirus 6B
auguaaaauuaccuca

SEQ ID NO: 336470 - RNA, 17 nt, Human herpesvirus 6B
auguaaaauuaccucau

SEQ ID NO: 336471 - RNA, 20 nt, Human herpesvirus 6B
auguaaaauuaccucauccc

SEQ ID NO: 336472 - RNA, 14 nt, Human herpesvirus 6B
auguaaacuaaaua

SEQ ID NO: 336473 - RNA, 21 nt, Human herpesvirus 6B
auguaacucaucaacguaaga

SEQ ID NO: 336474 - RNA, 20 nt, Human herpesvirus 6B
auguagacgugcugucugca

SEQ ID NO: 336475 - RNA, 21 nt, Human herpesvirus 6B
auguagacgugcugucugcag

SEQ ID NO: 336476 - RNA, 22 nt, Human herpesvirus 6B
auguagcaaaugaauguguuca

SEQ ID NO: 336477 - RNA, 15 nt, Human herpesvirus 6B
auguauucuccucaa

SEQ ID NO: 336478 - RNA, 22 nt, Human herpesvirus 6B
augucaagaguuuuccuugaca

SEQ ID NO: 336479 - RNA, 21 nt, Human herpesvirus 6B
augucacaaaucuguaagauu

SEQ ID NO: 336480 - RNA, 21 nt, Human herpesvirus 6B
auguccauucucagacagcuu

SEQ ID NO: 336481 - RNA, 22 nt, Human herpesvirus 6B
auguccauuucuucgagcuuuu

SEQ ID NO: 336482 - RNA, 20 nt, Human herpesvirus 6B
augucgaaucucaagcacaa

SEQ ID NO: 336483 - RNA, 22 nt, Human herpesvirus 6B
augucgugguggucuuguuauc

SEQ ID NO: 336484 - RNA, 13 nt, Human herpesvirus 6B
augucucgaaaaa

SEQ ID NO: 336485 - RNA, 21 nt, Human herpesvirus 6B
augucuucucgggacuaggaa

SEQ ID NO: 336486 - RNA, 19 nt, Human herpesvirus 6B
augugaacuaaauaaucaa

SEQ ID NO: 336487 - RNA, 15 nt, Human herpesvirus 6B
augugacacaauuuc

SEQ ID NO: 336488 - RNA, 18 nt, Human herpesvirus 6B
augugcagaucagucaaa

SEQ ID NO: 336489 - RNA, 19 nt, Human herpesvirus 6B
auguggaacggaaacauga

SEQ ID NO: 336490 - RNA, 12 nt, Human herpesvirus 6B
auguggccugua

SEQ ID NO: 336491 - RNA, 15 nt, Human herpesvirus 6B
augugucuuagugua

SEQ ID NO: 336492 - RNA, 19 nt, Human herpesvirus 6B
auguguuaaagaaugcuga

SEQ ID NO: 336493 - RNA, 20 nt, Human herpesvirus 6B
acagacgaaucacauccgcu

SEQ ID NO: 336494 - RNA, 13 nt, Human herpesvirus 6B
acagacuccucac

SEQ ID NO: 336495 - RNA, 18 nt, Human herpesvirus 6B
acagagacugguugaguu

SEQ ID NO: 336496 - RNA, 13 nt, Human herpesvirus 6B
acagagaugcggc

SEQ ID NO: 336497 - RNA, 16 nt, Human herpesvirus 6B
acagagccuagaccaa

SEQ ID NO: 336498 - RNA, 23 nt, Human herpesvirus 6B
acagagguaauaaaaacaccucu

SEQ ID NO: 336499 - RNA, 17 nt, Human herpesvirus 6B
acagagugcaucuuuaa

SEQ ID NO: 336500 - RNA, 22 nt, Human herpesvirus 6B
acagauggcacugaaucagaaa

SEQ ID NO: 336501 - RNA, 11 nt, Human herpesvirus 6B
acagcaugcau

SEQ ID NO: 336502 - RNA, 17 nt, Human herpesvirus 6B
acagccuugauaaucug

SEQ ID NO: 336503 - RNA, 13 nt, Human herpesvirus 6B
acagcgagacaau

SEQ ID NO: 336504 - RNA, 20 nt, Human herpesvirus 6B
acaggauuccccucauacau

SEQ ID NO: 336505 - RNA, 16 nt, Human herpesvirus 6B
acagggagugauugau

SEQ ID NO: 336506 - RNA, 19 nt, Human herpesvirus 6B
acagggagugauugaugaa

SEQ ID NO: 336507 - RNA, 13 nt, Human herpesvirus 6B
acaggugcuucuu

SEQ ID NO: 336508 - RNA, 22 nt, Human herpesvirus 6B
acaguauaacggaaauccuuga

SEQ ID NO: 336509 - RNA, 18 nt, Human herpesvirus 6B
acagugauuaggauguuu

SEQ ID NO: 336510 - RNA, 15 nt, Human herpesvirus 6B
acaguuauacuggca

SEQ ID NO: 336511 - RNA, 13 nt, Human herpesvirus 6B
acaguuuaccuau

SEQ ID NO: 336512 - RNA, 16 nt, Human herpesvirus 6B
acaguuuaccuaucaa

SEQ ID NO: 336513 - RNA, 12 nt, Human herpesvirus 6B
acauaagacuua

SEQ ID NO: 336514 - RNA, 21 nt, Human herpesvirus 6B
acauaagacuuauaauauucc

SEQ ID NO: 336515 - RNA, 23 nt, Human herpesvirus 6B
acauaguuuggaucuucugcuaa

SEQ ID NO: 336516 - RNA, 21 nt, Human herpesvirus 6B
acaucaacuauuuaacaucca

SEQ ID NO: 336517 - RNA, 22 nt, Human herpesvirus 6B
acaucaacuauuuaacauccaa

SEQ ID NO: 336518 - RNA, 18 nt, Human herpesvirus 6B
acaucacgucccauucac

SEQ ID NO: 336519 - RNA, 22 nt, Human herpesvirus 6B
acauccagaaaagcaaacaugc

SEQ ID NO: 336520 - RNA, 13 nt, Human herpesvirus 6B
acaucgaaucuca

SEQ ID NO: 336521 - RNA, 15 nt, Human herpesvirus 6B
acaucgaaucucaca

SEQ ID NO: 336522 - RNA, 21 nt, Human herpesvirus 6B
acaucgcuaagauaauggauc

SEQ ID NO: 336523 - RNA, 15 nt, Human herpesvirus 6B
acaucguaauggcau

SEQ ID NO: 336524 - RNA, 19 nt, Human herpesvirus 6B
acaucguaauggcauucac

SEQ ID NO: 336525 - RNA, 22 nt, Human herpesvirus 6B
acaucgucauaccgaucccagc

SEQ ID NO: 336526 - RNA, 16 nt, Human herpesvirus 6B
acaucuaugaugcugu

SEQ ID NO: 336527 - RNA, 22 nt, Human herpesvirus 6B
acaucuauguguauaaugguuu

SEQ ID NO: 336528 - RNA, 22 nt, Human herpesvirus 6B
acaucucuucccacaaaccauc

SEQ ID NO: 336529 - RNA, 11 nt, Human herpesvirus 6B
acaucugcaaa

SEQ ID NO: 336530 - RNA, 15 nt, Human herpesvirus 6B
acaugauagggaaua

SEQ ID NO: 336531 - RNA, 21 nt, Human herpesvirus 6B
acaugccacagaacaccugcu

SEQ ID NO: 336532 - RNA, 21 nt, Human herpesvirus 6B
acaugccaugcaauaggccau

SEQ ID NO: 336533 - RNA, 16 nt, Human herpesvirus 6B
acaugcuucacaucuc

SEQ ID NO: 336534 - RNA, 17 nt, Human herpesvirus 6B
acauggacaacuuaucg

SEQ ID NO: 336535 - RNA, 21 nt, Human herpesvirus 6B
acauguauccucguggaguaa

SEQ ID NO: 336536 - RNA, 17 nt, Human herpesvirus 6B
acauguauucuccucaa

SEQ ID NO: 336537 - RNA, 23 nt, Human herpesvirus 6B
acauguuauuuuauuaaaucuua

SEQ ID NO: 336538 - RNA, 18 nt, Human herpesvirus 6B
acauguuuuugaugugcu

SEQ ID NO: 336539 - RNA, 22 nt, Human herpesvirus 6B
acauuauaccuauuagcuauaa

SEQ ID NO: 336540 - RNA, 23 nt, Human herpesvirus 6B
acauucugcguguuaaugaaugu

SEQ ID NO: 336541 - RNA, 14 nt, Human herpesvirus 6B
acauuuaccagaga

SEQ ID NO: 336542 - RNA, 16 nt, Human herpesvirus 6B
acauuuaccagagaua

SEQ ID NO: 336543 - RNA, 22 nt, Human herpesvirus 6B
acauuucgguuuaauagauuuu

SEQ ID NO: 336544 - RNA, 22 nt, Human herpesvirus 6B
acauuugccgggaugagcuuca

SEQ ID NO: 336545 - RNA, 15 nt, Human herpesvirus 6B
accaaaacaacaacu

SEQ ID NO: 336546 - RNA, 17 nt, Human herpesvirus 6B
accaaaacgagagucua

SEQ ID NO: 336547 - RNA, 12 nt, Human herpesvirus 6B
accaacaugacu

SEQ ID NO: 336548 - RNA, 24 nt, Human herpesvirus 6B
accaagucaccaacgucaugcaaa

SEQ ID NO: 336549 - RNA, 14 nt, Human herpesvirus 6B
accaaugaucacac

SEQ ID NO: 336550 - RNA, 20 nt, Human herpesvirus 6B
accaauuugucgcacguguu

SEQ ID NO: 336551 - RNA, 16 nt, Human herpesvirus 6B
accacugugauaugca

SEQ ID NO: 336552 - RNA, 14 nt, Human herpesvirus 6B
accagagauucuau

SEQ ID NO: 336553 - RNA, 17 nt, Human herpesvirus 6B
accagagauucuaugua

SEQ ID NO: 336554 - RNA, 22 nt, Human herpesvirus 6B
accaggaauccuauucauaaca

SEQ ID NO: 336555 - RNA, 16 nt, Human herpesvirus 6B
accaguagauggugcu

SEQ ID NO: 336556 - RNA, 16 nt, Human herpesvirus 6B
accaguauuaaugucu

SEQ ID NO: 336557 - RNA, 18 nt, Human herpesvirus 6B
accauacguggugaugau

SEQ ID NO: 336558 - RNA, 19 nt, Human herpesvirus 6B
accauacguggugaugauu

SEQ ID NO: 336559 - RNA, 18 nt, Human herpesvirus 6B
accaucaacacaccugcc

SEQ ID NO: 336560 - RNA, 19 nt, Human herpesvirus 6B
accaucaacacaccugccu

SEQ ID NO: 336561 - RNA, 16 nt, Human herpesvirus 6B
accaucuucagcucag

SEQ ID NO: 336562 - RNA, 17 nt, Human herpesvirus 6B
accaucuucagcucaga

SEQ ID NO: 336563 - RNA, 18 nt, Human herpesvirus 6B
accaucuucagcucagac

SEQ ID NO: 336564 - RNA, 18 nt, Human herpesvirus 6B
accaugccauugaauaca

SEQ ID NO: 336565 - RNA, 21 nt, Human herpesvirus 6B
accauuguauuggauaugugu

SEQ ID NO: 336566 - RNA, 17 nt, Human herpesvirus 6B
acccaucgacgucccau

SEQ ID NO: 336567 - RNA, 19 nt, Human herpesvirus 6B
accccuuuauaagauuuac

SEQ ID NO: 336568 - RNA, 18 nt, Human herpesvirus 6B
acccggcgaacugagaua

SEQ ID NO: 336569 - RNA, 22 nt, Human herpesvirus 6B
acccuagcuuuucauaugaaaa

SEQ ID NO: 336570 - RNA, 21 nt, Human herpesvirus 6B
acccuaucgauccagauuucu

SEQ ID NO: 336571 - RNA, 12 nt, Human herpesvirus 6B
acuguaccugaa

SEQ ID NO: 336572 - RNA, 20 nt, Human herpesvirus 6B
acugucacuuuccgauauca

SEQ ID NO: 336573 - RNA, 14 nt, Human herpesvirus 6B
acugugauaugcaa

SEQ ID NO: 336574 - RNA, 19 nt, Human herpesvirus 6B
acuguuuacuuaaacggaa

SEQ ID NO: 336575 - RNA, 11 nt, Human herpesvirus 6B
acuguuuccag

SEQ ID NO: 336576 - RNA, 18 nt, Human herpesvirus 6B
acuguuucuuugacauuu

SEQ ID NO: 336577 - RNA, 18 nt, Human herpesvirus 6B
acuuaaaagaaucaaaug

SEQ ID NO: 336578 - RNA, 22 nt, Human herpesvirus 6B
acuuaaaauuuuuaaacagauu

SEQ ID NO: 336579 - RNA, 11 nt, Human herpesvirus 6B
acuuaacuuau

SEQ ID NO: 336580 - RNA, 13 nt, Human herpesvirus 6B
acuuaaggcagcu

SEQ ID NO: 336581 - RNA, 19 nt, Human herpesvirus 6B
acuuaauaacuacacuuau

SEQ ID NO: 336582 - RNA, 13 nt, Human herpesvirus 6B
acuuaauaucuga

SEQ ID NO: 336583 - RNA, 14 nt, Human herpesvirus 6B
acuuacaacugaaa

SEQ ID NO: 336584 - RNA, 16 nt, Human herpesvirus 6B
acuuacaucgauccaa

SEQ ID NO: 336585 - RNA, 14 nt, Human herpesvirus 6B
acuuacguguguau

SEQ ID NO: 336586 - RNA, 22 nt, Human herpesvirus 6B
acuuacuuaauaacuacacuua

SEQ ID NO: 336587 - RNA, 19 nt, Human herpesvirus 6B
acuuaucaacuauacuuaa

SEQ ID NO: 336588 - RNA, 17 nt, Human herpesvirus 6B
acuuaucguucacugac

SEQ ID NO: 336589 - RNA, 19 nt, Human herpesvirus 6B
acuuaucguucacugacga

SEQ ID NO: 336590 - RNA, 21 nt, Human herpesvirus 6B
acuuauugaggaaaugcagca

SEQ ID NO: 336591 - RNA, 17 nt, Human herpesvirus 6B
acuucaaaaucugcuaa

SEQ ID NO: 336592 - RNA, 20 nt, Human herpesvirus 6B
acuucaagaaaaucgcaaaa

SEQ ID NO: 336593 - RNA, 19 nt, Human herpesvirus 6B
acuucgacggacgauccca

SEQ ID NO: 336594 - RNA, 20 nt, Human herpesvirus 6B
acuugaaccaagucaccaac

SEQ ID NO: 336595 - RNA, 18 nt, Human herpesvirus 6B
acuugagugauggaguua

SEQ ID NO: 336596 - RNA, 16 nt, Human herpesvirus 6B
acuugauaaacuguac

SEQ ID NO: 336597 - RNA, 17 nt, Human herpesvirus 6B
acuugaucacaacauaa

SEQ ID NO: 336598 - RNA, 13 nt, Human herpesvirus 6B
acuugaugcaugu

SEQ ID NO: 336599 - RNA, 12 nt, Human herpesvirus 6B
acuugauguaug

SEQ ID NO: 336600 - RNA, 21 nt, Human herpesvirus 6B
acuuggaagacggaaccauga

SEQ ID NO: 336601 - RNA, 21 nt, Human herpesvirus 6B
acuuggagagaacugucuugc

SEQ ID NO: 336602 - RNA, 19 nt, Human herpesvirus 6B
acuuggccgaguuuagaca

SEQ ID NO: 336603 - RNA, 20 nt, Human herpesvirus 6B
acuuguaaacuggucugcuu

SEQ ID NO: 336604 - RNA, 18 nt, Human herpesvirus 6B
acuuuccccauacugugu

SEQ ID NO: 336605 - RNA, 18 nt, Human herpesvirus 6B
acuuucuguggaacuuuu

SEQ ID NO: 336606 - RNA, 22 nt, Human herpesvirus 6B
acuuugggugauggaugugcac

SEQ ID NO: 336607 - RNA, 19 nt, Human herpesvirus 6B
acuuugugcccauacuugu

SEQ ID NO: 336608 - RNA, 16 nt, Human herpesvirus 6B
acuuuguuuagcuuua

SEQ ID NO: 336609 - RNA, 21 nt, Human herpesvirus 6B
acuuuuaaaaaauuugaucca

SEQ ID NO: 336610 - RNA, 12 nt, Human herpesvirus 6B
acuuuucuauca

SEQ ID NO: 336611 - RNA, 19 nt, Human herpesvirus 6B
acuuuuuaacgaaaaccau

SEQ ID NO: 336612 - RNA, 22 nt, Human herpesvirus 6B
agaaaaaacaaagcuuuacuua

SEQ ID NO: 336613 - RNA, 18 nt, Human herpesvirus 6B
agaaaaacuauagccuag

SEQ ID NO: 336614 - RNA, 22 nt, Human herpesvirus 6B
agaaaacguuucauccaaauac

SEQ ID NO: 336615 - RNA, 23 nt, Human herpesvirus 6B
agaaaagaaacaaugcuuuggga

SEQ ID NO: 336616 - RNA, 16 nt, Human herpesvirus 6B
agaaaauccagcaauc

SEQ ID NO: 336617 - RNA, 17 nt, Human herpesvirus 6B
agaaaaucgcaaaagaa

SEQ ID NO: 336618 - RNA, 14 nt, Human herpesvirus 6B
agaaaaugaauuca

SEQ ID NO: 336619 - RNA, 16 nt, Human herpesvirus 6B
agaaaauugacaauga

SEQ ID NO: 336620 - RNA, 18 nt, Human herpesvirus 6B
agaaaauugacaaugagg

SEQ ID NO: 336621 - RNA, 17 nt, Human herpesvirus 6B
agaaaauuggugugcau

SEQ ID NO: 336622 - RNA, 19 nt, Human herpesvirus 6B
agaaaccgauuuaccaccu

SEQ ID NO: 336623 - RNA, 14 nt, Human herpesvirus 6B
agaaacgcccugaa

SEQ ID NO: 336624 - RNA, 21 nt, Human herpesvirus 6B
agaaacguuaauguuuacgga

SEQ ID NO: 336625 - RNA, 14 nt, Human herpesvirus 6B
agaaagaaaaccag

SEQ ID NO: 336626 - RNA, 16 nt, Human herpesvirus 6B
agaaagaaaaccagua

SEQ ID NO: 336627 - RNA, 24 nt, Human herpesvirus 6B
agaaaggcggagacacauagccuu

SEQ ID NO: 336628 - RNA, 19 nt, Human herpesvirus 6B
agaaaguugauugagaauu

SEQ ID NO: 336629 - RNA, 17 nt, Human herpesvirus 6B
agaaauauugcaugcau

SEQ ID NO: 336630 - RNA, 19 nt, Human herpesvirus 6B
agaaauauugcaugcauug

SEQ ID NO: 336631 - RNA, 20 nt, Human herpesvirus 6B
agaaaucacguugaaauguc

SEQ ID NO: 336632 - RNA, 20 nt, Human herpesvirus 6B
agaaaucguaccggucugca

SEQ ID NO: 336633 - RNA, 13 nt, Human herpesvirus 6B
agaaaugaucaau

SEQ ID NO: 336634 - RNA, 17 nt, Human herpesvirus 6B
agaaaugaucaauacuu

SEQ ID NO: 336635 - RNA, 14 nt, Human herpesvirus 6B
agaaauuacacauc

SEQ ID NO: 336636 - RNA, 18 nt, Human herpesvirus 6B
agaaauuacacaucuuaa

SEQ ID NO: 336637 - RNA, 18 nt, Human herpesvirus 6B
agaaauuacauaagcaaa

SEQ ID NO: 336638 - RNA, 19 nt, Human herpesvirus 6B
agaacacaggacccuuccc

SEQ ID NO: 336639 - RNA, 18 nt, Human herpesvirus 6B
agaacaggaagcgccaua

SEQ ID NO: 336640 - RNA, 14 nt, Human herpesvirus 6B
agaacaguuuaccu

SEQ ID NO: 336641 - RNA, 19 nt, Human herpesvirus 6B
agaacaguuuaccuaucaa

SEQ ID NO: 336642 - RNA, 22 nt, Human herpesvirus 6B
agaacaguuuaccuaucaacaa

SEQ ID NO: 336643 - RNA, 17 nt, Human herpesvirus 6B
agaacugagagaaccgc

SEQ ID NO: 336644 - RNA, 12 nt, Human herpesvirus 6B
agaagcauuugc

SEQ ID NO: 336645 - RNA, 15 nt, Human herpesvirus 6B
agaagcauuugcuga

SEQ ID NO: 336646 - RNA, 22 nt, Human herpesvirus 6B
agaagggcuuuaaaaauuacua

SEQ ID NO: 336647 - RNA, 16 nt, Human herpesvirus 6B
agaauaaaaguccauu

SEQ ID NO: 336648 - RNA, 17 nt, Human herpesvirus 6B
agaauaauuauggacaa

SEQ ID NO: 336649 - RNA, 19 nt, Human herpesvirus 6B
agaauacaaaaacgaccug

SEQ ID NO: 336650 - RNA, 16 nt, Human herpesvirus 6B
agaauaggcgucucau

SEQ ID NO: 336651 - RNA, 13 nt, Human herpesvirus 6B
agaaucucugguc

SEQ ID NO: 336652 - RNA, 14 nt, Human herpesvirus 6B
agaaucucugguca

SEQ ID NO: 336653 - RNA, 19 nt, Human herpesvirus 6B
agaaugccgugaacugugu

SEQ ID NO: 336654 - RNA, 19 nt, Human herpesvirus 6B
agaauguaaaagagccaga

SEQ ID NO: 336655 - RNA, 13 nt, Human herpesvirus 6B
agaauguuccaau

SEQ ID NO: 336656 - RNA, 15 nt, Human herpesvirus 6B
agaauuacaauacag

SEQ ID NO: 336657 - RNA, 18 nt, Human herpesvirus 6B
agaauuacuaugugacau

SEQ ID NO: 336658 - RNA, 22 nt, Human herpesvirus 6B
agacuuagcuagacgugucuuc

SEQ ID NO: 336659 - RNA, 17 nt, Human herpesvirus 6B
agagaaucuuccacuga

SEQ ID NO: 336660 - RNA, 23 nt, Human herpesvirus 6B
agagagucagaaauugugucaca

SEQ ID NO: 336661 - RNA, 18 nt, Human herpesvirus 6B
agagaucaguacauagaa

SEQ ID NO: 336662 - RNA, 20 nt, Human herpesvirus 6B
agagaucaguacauagaauc

SEQ ID NO: 336663 - RNA, 15 nt, Human herpesvirus 6B
agagauuacaaggua

SEQ ID NO: 336664 - RNA, 18 nt, Human herpesvirus 6B
agagauucuauguacuga

SEQ ID NO: 336665 - RNA, 22 nt, Human herpesvirus 6B
agagauucuauguacugaucuc

SEQ ID NO: 336666 - RNA, 17 nt, Human herpesvirus 6B
agagcgggcacacgucc

SEQ ID NO: 336667 - RNA, 14 nt, Human herpesvirus 6B
agagcugacugaaa

SEQ ID NO: 336668 - RNA, 14 nt, Human herpesvirus 6B
agagcuucuuagga

SEQ ID NO: 336669 - RNA, 11 nt, Human herpesvirus 6B
agaggagacca

SEQ ID NO: 336670 - RNA, 22 nt, Human herpesvirus 6B
agaggagaccaugccauugaau

SEQ ID NO: 336671 - RNA, 21 nt, Human herpesvirus 6B
agaggccggcacauacacacg

SEQ ID NO: 336672 - RNA, 13 nt, Human herpesvirus 6B
agaggcgcgggac

SEQ ID NO: 336673 - RNA, 16 nt, Human herpesvirus 6B
agagggaggagaggga

SEQ ID NO: 336674 - RNA, 12 nt, Human herpesvirus 6B
agaguacuuucg

SEQ ID NO: 336675 - RNA, 17 nt, Human herpesvirus 6B
agagugcgagacuggaa

SEQ ID NO: 336676 - RNA, 14 nt, Human herpesvirus 6B
agaguucaucuaac

SEQ ID NO: 336677 - RNA, 20 nt, Human herpesvirus 6B
agaguuuuccuugacaguuc

SEQ ID NO: 336678 - RNA, 22 nt, Human herpesvirus 6B
agauaacucagauucgcaagac

SEQ ID NO: 336679 - RNA, 15 nt, Human herpesvirus 6B
agauaauaaaacacg

SEQ ID NO: 336680 - RNA, 12 nt, Human herpesvirus 6B
agauaauuucca

SEQ ID NO: 336681 - RNA, 13 nt, Human herpesvirus 6B
agauaauuuccaa

SEQ ID NO: 336682 - RNA, 22 nt, Human herpesvirus 6B
agauacauguuuuugaugugcu

SEQ ID NO: 336683 - RNA, 13 nt, Human herpesvirus 6B
agauagacaguga

SEQ ID NO: 336684 - RNA, 20 nt, Human herpesvirus 6B
agauagcuccaacggagaaa

SEQ ID NO: 336685 - RNA, 21 nt, Human herpesvirus 6B
agauaugaaugaucacuauca

SEQ ID NO: 336686 - RNA, 16 nt, Human herpesvirus 6B
agauaugucguuucau

SEQ ID NO: 336687 - RNA, 18 nt, Human herpesvirus 6B
agaucacguucaggauga

SEQ ID NO: 336688 - RNA, 13 nt, Human herpesvirus 6B
agaucaguacaua

SEQ ID NO: 336689 - RNA, 17 nt, Human herpesvirus 6B
agaucaguacauagaau

SEQ ID NO: 336690 - RNA, 22 nt, Human herpesvirus 6B
agauccguccauuaaauccuag

SEQ ID NO: 336691 - RNA, 19 nt, Human herpesvirus 6B
agaugaucagcauucacuc

SEQ ID NO: 336692 - RNA, 20 nt, Human herpesvirus 6B
agaugaucagcauucacucu

SEQ ID NO: 336693 - RNA, 18 nt, Human herpesvirus 6B
agaugcaaccgaugacaa

SEQ ID NO: 336694 - RNA, 20 nt, Human herpesvirus 6B
agaugccuguagggauguag

SEQ ID NO: 336695 - RNA, 24 nt, Human herpesvirus 6B
agauguauaauuuacacaauccua

SEQ ID NO: 336696 - RNA, 14 nt, Human herpesvirus 6B
agauuaaagcauua

SEQ ID NO: 336697 - RNA, 14 nt, Human herpesvirus 6B
agauuaacaacugc

SEQ ID NO: 336698 - RNA, 17 nt, Human herpesvirus 6B
agauuacaagguacaca

SEQ ID NO: 336699 - RNA, 20 nt, Human herpesvirus 6B
agauuaggggagagacaucc

SEQ ID NO: 336700 - RNA, 24 nt, Human herpesvirus 6B
agauucaauacuacgugucucagu

SEQ ID NO: 336701 - RNA, 13 nt, Human herpesvirus 6B
agauucacucuac

SEQ ID NO: 336702 - RNA, 18 nt, Human herpesvirus 6B
agauugaucaucucccau

SEQ ID NO: 336703 - RNA, 21 nt, Human herpesvirus 6B
agauugauuccaggugguggu

SEQ ID NO: 336704 - RNA, 19 nt, Human herpesvirus 6B
agauugcaaaauugauaca

SEQ ID NO: 336705 - RNA, 15 nt, Human herpesvirus 6B
agauugcacgcuggg

SEQ ID NO: 336706 - RNA, 19 nt, Human herpesvirus 6B
agauugcauaugucuguua

SEQ ID NO: 336707 - RNA, 17 nt, Human herpesvirus 6B
agauuguuacuagugau

SEQ ID NO: 336708 - RNA, 17 nt, Human herpesvirus 6B
agauuuaucaaaagcca

SEQ ID NO: 336709 - RNA, 19 nt, Human herpesvirus 6B
agauuuaucaaaagccaga

SEQ ID NO: 336710 - RNA, 22 nt, Human herpesvirus 6B
agauuuugaggaucacuaacuu

SEQ ID NO: 336711 - RNA, 19 nt, Human herpesvirus 6B
agcaaaagucuuauaacac

SEQ ID NO: 336712 - RNA, 13 nt, Human herpesvirus 6B
agcaaacauguau

SEQ ID NO: 336713 - RNA, 15 nt, Human herpesvirus 6B
agcaaacauguaucc

SEQ ID NO: 336714 - RNA, 14 nt, Human herpesvirus 6B
agcaaacaugugau

SEQ ID NO: 336715 - RNA, 15 nt, Human herpesvirus 6B
agcaaauaaauacag

SEQ ID NO: 336716 - RNA, 15 nt, Human herpesvirus 6B
agcaaauguaacucu

SEQ ID NO: 336717 - RNA, 21 nt, Human herpesvirus 6B
agcaaauucugauuauuauca

SEQ ID NO: 336718 - RNA, 20 nt, Human herpesvirus 6B
agcaaauuuaguuaauucuc

SEQ ID NO: 336719 - RNA, 16 nt, Human herpesvirus 6B
agcaaccgcaguuccu

SEQ ID NO: 336720 - RNA, 19 nt, Human herpesvirus 6B
agcaaccgcaguuccuguu

SEQ ID NO: 336721 - RNA, 22 nt, Human herpesvirus 6B
agcaagcuagugaaucaaauac

SEQ ID NO: 336722 - RNA, 21 nt, Human herpesvirus 6B
agcaaguucaucagccauuuc

SEQ ID NO: 336723 - RNA, 14 nt, Human herpesvirus 6B
agcaaucaccauca

SEQ ID NO: 336724 - RNA, 23 nt, Human herpesvirus 6B
agcaaucaccaucaacacaccug

SEQ ID NO: 336725 - RNA, 15 nt, Human herpesvirus 6B
agcacagcaugcauu

SEQ ID NO: 336726 - RNA, 16 nt, Human herpesvirus 6B
agcacgaaccaaaaug

SEQ ID NO: 336727 - RNA, 12 nt, Human herpesvirus 6B
agcacuuuuacc

SEQ ID NO: 336728 - RNA, 20 nt, Human herpesvirus 6B
agcagaaaacguuucaucca

SEQ ID NO: 336729 - RNA, 13 nt, Human herpesvirus 6B
agcagaaguuuac

SEQ ID NO: 336730 - RNA, 14 nt, Human herpesvirus 6B
agcagaaguuuacc

SEQ ID NO: 336731 - RNA, 16 nt, Human herpesvirus 6B
agcagaaguuuaccua

SEQ ID NO: 336732 - RNA, 17 nt, Human herpesvirus 6B
agcagaaguuuaccuag

SEQ ID NO: 336733 - RNA, 18 nt, Human herpesvirus 6B
agcaggaaccgagauuug

SEQ ID NO: 336734 - RNA, 16 nt, Human herpesvirus 6B
agcaguaugccauaaa

SEQ ID NO: 336735 - RNA, 12 nt, Human herpesvirus 6B
agcaugaacucu

SEQ ID NO: 336736 - RNA, 14 nt, Human herpesvirus 6B
agcaugaacucuca

SEQ ID NO: 336737 - RNA, 17 nt, Human herpesvirus 6B
agcauucuguucuucau

SEQ ID NO: 336738 - RNA, 13 nt, Human herpesvirus 6B
agccacaaaauaa

SEQ ID NO: 336739 - RNA, 14 nt, Human herpesvirus 6B
agccagggcauuca

SEQ ID NO: 336740 - RNA, 16 nt, Human herpesvirus 6B
agccauuucgccaaaa

SEQ ID NO: 336741 - RNA, 23 nt, Human herpesvirus 6B
agcccuucaccgucucugaagca

SEQ ID NO: 336742 - RNA, 22 nt, Human herpesvirus 6B
agccgauaaauuugccaccaga

SEQ ID NO: 336743 - RNA, 22 nt, Human herpesvirus 6B
agccuaaacggagacugcacag

SEQ ID NO: 336744 - RNA, 23 nt, Human herpesvirus 6B
agccuaaacggagacugcacaga

SEQ ID NO: 336745 - RNA, 19 nt, Human herpesvirus 6B
agccuaagaaauauugcau

SEQ ID NO: 336746 - RNA, 14 nt, Human herpesvirus 6B
agccuggaagaagg

SEQ ID NO: 336747 - RNA, 22 nt, Human herpesvirus 6B
agccuuuccccagcacaccucg

SEQ ID NO: 336748 - RNA, 18 nt, Human herpesvirus 6B
agcgauuaguuugugcag

SEQ ID NO: 336749 - RNA, 23 nt, Human herpesvirus 6B
agcgccaacggaaagcaucucaa

SEQ ID NO: 336750 - RNA, 14 nt, Human herpesvirus 6B
agcgcccgaugcca

SEQ ID NO: 336751 - RNA, 12 nt, Human herpesvirus 6B
agcugacugaaa

SEQ ID NO: 336752 - RNA, 19 nt, Human herpesvirus 6B
agcuguccaucuucagaca

SEQ ID NO: 336753 - RNA, 23 nt, Human herpesvirus 6B
agcuguccaucuucagacaucac

SEQ ID NO: 336754 - RNA, 18 nt, Human herpesvirus 6B
agcuucccgacuuucugu

SEQ ID NO: 336755 - RNA, 18 nt, Human herpesvirus 6B
agcuucuucuacuuuauc

SEQ ID NO: 336756 - RNA, 16 nt, Human herpesvirus 6B
agcuuuaaagcagcua

SEQ ID NO: 336757 - RNA, 13 nt, Human herpesvirus 6B
agcuuuauuccca

SEQ ID NO: 336758 - RNA, 22 nt, Human herpesvirus 6B
aggaaaagaagaagcagcagau

SEQ ID NO: 336759 - RNA, 13 nt, Human herpesvirus 6B
aggaaaugaugau

SEQ ID NO: 336760 - RNA, 22 nt, Human herpesvirus 6B
aggaaccgagauuuguguucaa

SEQ ID NO: 336761 - RNA, 19 nt, Human herpesvirus 6B
aggaaguaacggaaaaauu

SEQ ID NO: 336762 - RNA, 23 nt, Human herpesvirus 6B
aggaagucugaauuuaaugcaaa

SEQ ID NO: 336763 - RNA, 14 nt, Human herpesvirus 6B
aggaauccuauuca

SEQ ID NO: 336764 - RNA, 23 nt, Human herpesvirus 6B
aggaaucuuguguucuaacacau

SEQ ID NO: 336765 - RNA, 15 nt, Human herpesvirus 6B
aggaauucacuuuga

SEQ ID NO: 336766 - RNA, 22 nt, Human herpesvirus 6B
aggacaguuaggauuacacugu

SEQ ID NO: 336767 - RNA, 14 nt, Human herpesvirus 6B
aggagaccaugcca

SEQ ID NO: 336768 - RNA, 16 nt, Human herpesvirus 6B
aggagccaacauacac

SEQ ID NO: 336769 - RNA, 18 nt, Human herpesvirus 6B
aggauuacacugucuugu

SEQ ID NO: 336770 - RNA, 13 nt, Human herpesvirus 6B
aggauuugcuugu

SEQ ID NO: 336771 - RNA, 21 nt, Human herpesvirus 6B
aggcacgacgaaaacuuuuaa

SEQ ID NO: 336772 - RNA, 14 nt, Human herpesvirus 6B
aggcacugauuuga

SEQ ID NO: 336773 - RNA, 11 nt, Human herpesvirus 6B
aggcagaucau

SEQ ID NO: 336774 - RNA, 23 nt, Human herpesvirus 6B
aggcagaucauuaaaucggacaa

SEQ ID NO: 336775 - RNA, 18 nt, Human herpesvirus 6B
aggcagggaaacuuugug

SEQ ID NO: 336776 - RNA, 22 nt, Human herpesvirus 6B
aggcaucgacuauuaaacuaac

SEQ ID NO: 336777 - RNA, 15 nt, Human herpesvirus 6B
aggcauuaaacugag

SEQ ID NO: 336778 - RNA, 22 nt, Human herpesvirus 6B
aggccaauuuaugucauuucau

SEQ ID NO: 336779 - RNA, 17 nt, Human herpesvirus 6B
aggccauuggauuccau

SEQ ID NO: 336780 - RNA, 20 nt, Human herpesvirus 6B
aggccgcguaggcaugucug

SEQ ID NO: 336781 - RNA, 18 nt, Human herpesvirus 6B
aggcggagacacauagcc

SEQ ID NO: 336782 - RNA, 19 nt, Human herpesvirus 6B
aggcgucucaugcgaucua

SEQ ID NO: 336783 - RNA, 22 nt, Human herpesvirus 6B
aggcgugguaggaaaugaugau

SEQ ID NO: 336784 - RNA, 17 nt, Human herpesvirus 6B
aggcguguucguuaaaa

SEQ ID NO: 336785 - RNA, 15 nt, Human herpesvirus 6B
aggcuaaacacugac

SEQ ID NO: 336786 - RNA, 16 nt, Human herpesvirus 6B
aggcuaaacacugacu

SEQ ID NO: 336787 - RNA, 17 nt, Human herpesvirus 6B
aggcuggaaaaauuuaa

SEQ ID NO: 336788 - RNA, 20 nt, Human herpesvirus 6B
agggaaucaugagagccuuu

SEQ ID NO: 336789 - RNA, 15 nt, Human herpesvirus 6B
agggacccacacgcg

SEQ ID NO: 336790 - RNA, 13 nt, Human herpesvirus 6B
agggagugauuga

SEQ ID NO: 336791 - RNA, 19 nt, Human herpesvirus 6B
agggggcgcggggacacau

SEQ ID NO: 336792 - RNA, 15 nt, Human herpesvirus 6B
agggguaugucugug

SEQ ID NO: 336793 - RNA, 21 nt, Human herpesvirus 6B
agggucgaagacauucaacau

SEQ ID NO: 336794 - RNA, 15 nt, Human herpesvirus 6B
agggugacaccuuga

SEQ ID NO: 336795 - RNA, 17 nt, Human herpesvirus 6B
agggugggaacugucaa

SEQ ID NO: 336796 - RNA, 22 nt, Human herpesvirus 6B
aggguugcgauaggugugcuuu

SEQ ID NO: 336797 - RNA, 17 nt, Human herpesvirus 6B
aggguuuuuuacaauga

SEQ ID NO: 336798 - RNA, 14 nt, Human herpesvirus 6B
agguaagcaccuua

SEQ ID NO: 336799 - RNA, 23 nt, Human herpesvirus 6B
agguaccgaccugacacaaucag

SEQ ID NO: 336800 - RNA, 15 nt, Human herpesvirus 6B
aggucucaggugaga

SEQ ID NO: 336801 - RNA, 12 nt, Human herpesvirus 6B
aggugauuugaa

SEQ ID NO: 336802 - RNA, 18 nt, Human herpesvirus 6B
agguguuaaacgaaaacu

SEQ ID NO: 336803 - RNA, 17 nt, Human herpesvirus 6B
agguucaaacaaugcaa

SEQ ID NO: 336804 - RNA, 15 nt, Human herpesvirus 6B
agguugagaaaacau

SEQ ID NO: 336805 - RNA, 14 nt, Human herpesvirus 6B
agguuggagacgaa

SEQ ID NO: 336806 - RNA, 16 nt, Human herpesvirus 6B
agguuuuugcugucac

SEQ ID NO: 336807 - RNA, 13 nt, Human herpesvirus 6B
aguaaaacaugua

SEQ ID NO: 336808 - RNA, 23 nt, Human herpesvirus 6B
aguaagaaauaaauuuguucgca

SEQ ID NO: 336809 - RNA, 16 nt, Human herpesvirus 6B
aguaagucuucauuaa

SEQ ID NO: 336810 - RNA, 17 nt, Human herpesvirus 6B
aguaauuauugugacaa

SEQ ID NO: 336811 - RNA, 13 nt, Human herpesvirus 6B
aguacuucaagaa

SEQ ID NO: 336812 - RNA, 24 nt, Human herpesvirus 6B
aguagcacgaaccaaaaugacucu

SEQ ID NO: 336813 - RNA, 13 nt, Human herpesvirus 6B
aguaguugcuugu

SEQ ID NO: 336814 - RNA, 14 nt, Human herpesvirus 6B
aguauaaauucuuu

SEQ ID NO: 336815 - RNA, 17 nt, Human herpesvirus 6B
aguauacggaagugcau

SEQ ID NO: 336816 - RNA, 23 nt, Human herpesvirus 6B
aguauguauaauauaaauucuua

SEQ ID NO: 336817 - RNA, 17 nt, Human herpesvirus 6B
aguaugucucgaaaaag

SEQ ID NO: 336818 - RNA, 15 nt, Human herpesvirus 6B
agucaaauugaauac

SEQ ID NO: 336819 - RNA, 17 nt, Human herpesvirus 6B
agucaaugcaauuccac

SEQ ID NO: 336820 - RNA, 15 nt, Human herpesvirus 6B
agucacguacauaaa

SEQ ID NO: 336821 - RNA, 13 nt, Human herpesvirus 6B
agucaucauacaa

SEQ ID NO: 336822 - RNA, 22 nt, Human herpesvirus 6B
agucaucauacaauauuuccau

SEQ ID NO: 336823 - RNA, 12 nt, Human herpesvirus 6B
agucaugcacuc

SEQ ID NO: 336824 - RNA, 18 nt, Human herpesvirus 6B
aguccagaaguccuucau

SEQ ID NO: 336825 - RNA, 16 nt, Human herpesvirus 6B
agucgcauuugugcuc

SEQ ID NO: 336826 - RNA, 23 nt, Human herpesvirus 6B
agucggugauuauagauagcucc

SEQ ID NO: 336827 - RNA, 14 nt, Human herpesvirus 6B
agucguuacaguaa

SEQ ID NO: 336828 - RNA, 20 nt, Human herpesvirus 6B
agucguuguguccugauuau

SEQ ID NO: 336829 - RNA, 18 nt, Human herpesvirus 6B
agucguuuuuggauuucu

SEQ ID NO: 336830 - RNA, 14 nt, Human herpesvirus 6B
agucuacgcauuca

SEQ ID NO: 336831 - RNA, 15 nt, Human herpesvirus 6B
agucuacgcauucac

SEQ ID NO: 336832 - RNA, 19 nt, Human herpesvirus 6B
agucucagcaaucaccauc

SEQ ID NO: 336833 - RNA, 20 nt, Human herpesvirus 6B
agucucagcaaucaccauca

SEQ ID NO: 336834 - RNA, 22 nt, Human herpesvirus 6B
agucucaggagaggaugaagaa

SEQ ID NO: 336835 - RNA, 14 nt, Human herpesvirus 6B
agucucugucuucc

SEQ ID NO: 336836 - RNA, 19 nt, Human herpesvirus 6B
agucugaauuuaaugcaaa

SEQ ID NO: 336837 - RNA, 20 nt, Human herpesvirus 6B
agucugaauuuaaugcaaaa

SEQ ID NO: 336838 - RNA, 12 nt, Human herpesvirus 6B
agucugcuaaaa

SEQ ID NO: 336839 - RNA, 14 nt, Human herpesvirus 6B
agucugcuaaaaau

SEQ ID NO: 336840 - RNA, 21 nt, Human herpesvirus 6B
agucugcuaaaaaucaucucg

SEQ ID NO: 336841 - RNA, 22 nt, Human herpesvirus 6B
agucugcuuuacaucgaaucuc

SEQ ID NO: 336842 - RNA, 17 nt, Human herpesvirus 6B
agucuuauaacaccagu

SEQ ID NO: 336843 - RNA, 23 nt, Human herpesvirus 6B
agucuuauaacaccaguacuuca

SEQ ID NO: 336844 - RNA, 17 nt, Human herpesvirus 6B
agucuucaauaaaaacu

SEQ ID NO: 336845 - RNA, 20 nt, Human herpesvirus 6B
agucuucaauaaaaacucaa

SEQ ID NO: 336846 - RNA, 12 nt, Human herpesvirus 6B
agucuucuggau

SEQ ID NO: 336847 - RNA, 22 nt, Human herpesvirus 6B
agugaaacggaguuaagacauu

SEQ ID NO: 336848 - RNA, 19 nt, Human herpesvirus 6B
agugaaagcagucaguaau

SEQ ID NO: 336849 - RNA, 21 nt, Human herpesvirus 6B
auguuugggagaucugaggac

SEQ ID NO: 336850 - RNA, 15 nt, Human herpesvirus 6B
auguuuuuacuugau

SEQ ID NO: 336851 - RNA, 18 nt, Human herpesvirus 6B
auuaaagcauuagcaaca

SEQ ID NO: 336852 - RNA, 23 nt, Human herpesvirus 6B
auuaaaguuuacugugauuucac

SEQ ID NO: 336853 - RNA, 21 nt, Human herpesvirus 6B
auuaaaugugaacaguauaaa

SEQ ID NO: 336854 - RNA, 14 nt, Human herpesvirus 6B
auuaacaauucucu

SEQ ID NO: 336855 - RNA, 13 nt, Human herpesvirus 6B
auuaaugccacag

SEQ ID NO: 336856 - RNA, 19 nt, Human herpesvirus 6B
auuacaagggaaauccuau

SEQ ID NO: 336857 - RNA, 17 nt, Human herpesvirus 6B
auuacaagguacacaau

SEQ ID NO: 336858 - RNA, 22 nt, Human herpesvirus 6B
auuacacugucuuguaguauau

SEQ ID NO: 336859 - RNA, 23 nt, Human herpesvirus 6B
auuacauuauccaggcaugugau

SEQ ID NO: 336860 - RNA, 23 nt, Human herpesvirus 6B
auuaccaguagauggugcuauua

SEQ ID NO: 336861 - RNA, 18 nt, Human herpesvirus 6B
auuaccaguagcacgaac

SEQ ID NO: 336862 - RNA, 14 nt, Human herpesvirus 6B
auuaccucugcaau

SEQ ID NO: 336863 - RNA, 15 nt, Human herpesvirus 6B
auuaccucugcaaua

SEQ ID NO: 336864 - RNA, 21 nt, Human herpesvirus 6B
auuacuaacgacggaauuuac

SEQ ID NO: 336865 - RNA, 17 nt, Human herpesvirus 6B
auuacuaauguggauuc

SEQ ID NO: 336866 - RNA, 10 nt, Human herpesvirus 6B
auuacugaaa

SEQ ID NO: 336867 - RNA, 18 nt, Human herpesvirus 6B
auuagaauaauuauggac

SEQ ID NO: 336868 - RNA, 21 nt, Human herpesvirus 6B
auuagcaaucauuaacauaca

SEQ ID NO: 336869 - RNA, 22 nt, Human herpesvirus 6B
auuagcuauaaaaacacacauc

SEQ ID NO: 336870 - RNA, 18 nt, Human herpesvirus 6B
auuaggcucgagcuuuca

SEQ ID NO: 336871 - RNA, 17 nt, Human herpesvirus 6B
auuaggggacagagccu

SEQ ID NO: 336872 - RNA, 14 nt, Human herpesvirus 6B
auuauaagcaaaca

SEQ ID NO: 336873 - RNA, 21 nt, Human herpesvirus 6B
auuauaagcaaacauguaucc

SEQ ID NO: 336874 - RNA, 16 nt, Human herpesvirus 6B
auuauaccuauuagcu

SEQ ID NO: 336875 - RNA, 23 nt, Human herpesvirus 6B
auuaucacaaaguuuaaguucuc

SEQ ID NO: 336876 - RNA, 19 nt, Human herpesvirus 6B
auuauccaggcaugugauu

SEQ ID NO: 336877 - RNA, 15 nt, Human herpesvirus 6B
auuaucgucccuguc

SEQ ID NO: 336878 - RNA, 16 nt, Human herpesvirus 6B
auuaugacugacaagg

SEQ ID NO: 336879 - RNA, 15 nt, Human herpesvirus 6B
auuaugccgucuuau

SEQ ID NO: 336880 - RNA, 19 nt, Human herpesvirus 6B
auuaugcgcaugaaaauau

SEQ ID NO: 336881 - RNA, 18 nt, Human herpesvirus 6B
auuauguaaauaugcuua

SEQ ID NO: 336882 - RNA, 12 nt, Human herpesvirus 6B
auuaugugauuc

SEQ ID NO: 336883 - RNA, 16 nt, Human herpesvirus 6B
auuauucaccauuacu

SEQ ID NO: 336884 - RNA, 17 nt, Human herpesvirus 6B
auuauucugguaaaaau

SEQ ID NO: 336885 - RNA, 13 nt, Human herpesvirus 6B
auuauugauagca

SEQ ID NO: 336886 - RNA, 16 nt, Human herpesvirus 6B
auuauuuugucuucgu

SEQ ID NO: 336887 - RNA, 15 nt, Human herpesvirus 6B
auucaaacuccgaaa

SEQ ID NO: 336888 - RNA, 15 nt, Human herpesvirus 6B
auucaacauucccac

SEQ ID NO: 336889 - RNA, 17 nt, Human herpesvirus 6B
auucaaccaaucuaaga

SEQ ID NO: 336890 - RNA, 16 nt, Human herpesvirus 6B
auucaagacgaucuca

SEQ ID NO: 336891 - RNA, 14 nt, Human herpesvirus 6B
auucaauacuacgu

SEQ ID NO: 336892 - RNA, 18 nt, Human herpesvirus 6B
auucacaaucgcagucca

SEQ ID NO: 336893 - RNA, 18 nt, Human herpesvirus 6B
auucacucuucggcauaa

SEQ ID NO: 336894 - RNA, 15 nt, Human herpesvirus 6B
auucaggaacagaaa

SEQ ID NO: 336895 - RNA, 21 nt, Human herpesvirus 6B
auucaggaacagaaacuugga

SEQ ID NO: 336896 - RNA, 16 nt, Human herpesvirus 6B
auucagucugcuaaaa

SEQ ID NO: 336897 - RNA, 16 nt, Human herpesvirus 6B
auucauaguuaugcgu

SEQ ID NO: 336898 - RNA, 21 nt, Human herpesvirus 6B
auucaucaaauccucuacgua

SEQ ID NO: 336899 - RNA, 16 nt, Human herpesvirus 6B
auuccagggaacuuga

SEQ ID NO: 336900 - RNA, 22 nt, Human herpesvirus 6B
auuccagggaacuugauguuga

SEQ ID NO: 336901 - RNA, 13 nt, Human herpesvirus 6B
auuccgagcuuuu

SEQ ID NO: 336902 - RNA, 15 nt, Human herpesvirus 6B
auuccuggacauggu

SEQ ID NO: 336903 - RNA, 18 nt, Human herpesvirus 6B
auuccuggacauggugaa

SEQ ID NO: 336904 - RNA, 13 nt, Human herpesvirus 6B
auuccuucaaugu

SEQ ID NO: 336905 - RNA, 16 nt, Human herpesvirus 6B
auucgauuaaugccac

SEQ ID NO: 336906 - RNA, 17 nt, Human herpesvirus 6B
auucgauuaaugccaca

SEQ ID NO: 336907 - RNA, 20 nt, Human herpesvirus 6B
auucguaaguggguacaaug

SEQ ID NO: 336908 - RNA, 15 nt, Human herpesvirus 6B
auucguaaugugcag

SEQ ID NO: 336909 - RNA, 21 nt, Human herpesvirus 6B
auucgucuuuuauauagacac

SEQ ID NO: 336910 - RNA, 18 nt, Human herpesvirus 6B
auucucgugcgcaguguu

SEQ ID NO: 336911 - RNA, 22 nt, Human herpesvirus 6B
auucucgugcgcaguguuauuc

SEQ ID NO: 336912 - RNA, 17 nt, Human herpesvirus 6B
auucugacugcguuaca

SEQ ID NO: 336913 - RNA, 13 nt, Human herpesvirus 6B
auucugcauuuau

SEQ ID NO: 336914 - RNA, 15 nt, Human herpesvirus 6B
auucuguaauuuuga

SEQ ID NO: 336915 - RNA, 17 nt, Human herpesvirus 6B
auucuguuuucuacgua

SEQ ID NO: 336916 - RNA, 17 nt, Human herpesvirus 6B
auucuuauguaaacuaa

SEQ ID NO: 336917 - RNA, 19 nt, Human herpesvirus 6B
auucuuauguaaacuaaau

SEQ ID NO: 336918 - RNA, 20 nt, Human herpesvirus 6B
auucuuauguaaacuaaaua

SEQ ID NO: 336919 - RNA, 20 nt, Human herpesvirus 6B
auucuuuugugcuuaucaaa

SEQ ID NO: 336920 - RNA, 17 nt, Human herpesvirus 6B
auugauaguacuuacgu

SEQ ID NO: 336921 - RNA, 11 nt, Human herpesvirus 6B
auugcaaucac

SEQ ID NO: 336922 - RNA, 15 nt, Human herpesvirus 6B
auugcacgcugggcu

SEQ ID NO: 336923 - RNA, 18 nt, Human herpesvirus 6B
auugcauaugucuguuau

SEQ ID NO: 336924 - RNA, 18 nt, Human herpesvirus 6B
auugccaaaggcacugau

SEQ ID NO: 336925 - RNA, 21 nt, Human herpesvirus 6B
auugcuuucucuuuuuaauuc

SEQ ID NO: 336926 - RNA, 13 nt, Human herpesvirus 6B
auugcuuuuguua

SEQ ID NO: 336927 - RNA, 15 nt, Human herpesvirus 6B
auuggugugcauuau

SEQ ID NO: 336928 - RNA, 16 nt, Human herpesvirus 6B
auuguaauuacauuau

SEQ ID NO: 336929 - RNA, 14 nt, Human herpesvirus 6B
auuguacccagcag

SEQ ID NO: 336930 - RNA, 18 nt, Human herpesvirus 6B
auugucaaauagccacaa

SEQ ID NO: 336931 - RNA, 14 nt, Human herpesvirus 6B
auuguccuucaggg

SEQ ID NO: 336932 - RNA, 22 nt, Human herpesvirus 6B
auugugcaguucuuacauauuu

SEQ ID NO: 336933 - RNA, 20 nt, Human herpesvirus 6B
auugugggagcacgucuucu

SEQ ID NO: 336934 - RNA, 11 nt, Human herpesvirus 6B
auuguguuaca

SEQ ID NO: 336935 - RNA, 19 nt, Human herpesvirus 6B
auuguguuucugucuuuaa

SEQ ID NO: 336936 - RNA, 14 nt, Human herpesvirus 6B
auuguuaacaugua

SEQ ID NO: 336937 - RNA, 15 nt, Human herpesvirus 6B
auuguuaacauguac

SEQ ID NO: 336938 - RNA, 16 nt, Human herpesvirus 6B
auuguuaacauguaca

SEQ ID NO: 336939 - RNA, 17 nt, Human herpesvirus 6B
auuguucuucaacauau

SEQ ID NO: 336940 - RNA, 21 nt, Human herpesvirus 6B
auuguugccguugucguguga

SEQ ID NO: 336941 - RNA, 14 nt, Human herpesvirus 6B
auuuaaaagcgaua

SEQ ID NO: 336942 - RNA, 15 nt, Human herpesvirus 6B
auuuaaaugucagug

SEQ ID NO: 336943 - RNA, 12 nt, Human herpesvirus 6B
auuuaacaucca

SEQ ID NO: 336944 - RNA, 13 nt, Human herpesvirus 6B
auuuaacauccaa

SEQ ID NO: 336945 - RNA, 15 nt, Human herpesvirus 6B
auuuaacauccaaaa

SEQ ID NO: 336946 - RNA, 21 nt, Human herpesvirus 6B
auuuaauaaaauaacauguga

SEQ ID NO: 336947 - RNA, 16 nt, Human herpesvirus 6B
auuuaauccacugcau

SEQ ID NO: 336948 - RNA, 13 nt, Human herpesvirus 6B
auuuaaugcaaaa

SEQ ID NO: 336949 - RNA, 14 nt, Human herpesvirus 6B
auuuaccaccuguu

SEQ ID NO: 336950 - RNA, 19 nt, Human herpesvirus 6B
auuuagauucgagccaaaa

SEQ ID NO: 336951 - RNA, 18 nt, Human herpesvirus 6B
auuuagauuggaauuccg

SEQ ID NO: 336952 - RNA, 17 nt, Human herpesvirus 6B
auuuagccuauuaagca

SEQ ID NO: 336953 - RNA, 15 nt, Human herpesvirus 6B
auuuaucaaaagcca

SEQ ID NO: 336954 - RNA, 19 nt, Human herpesvirus 6B
auuuaucaaaagccagauc

SEQ ID NO: 336955 - RNA, 16 nt, Human herpesvirus 6B
auuuauuagccgugau

SEQ ID NO: 336956 - RNA, 21 nt, Human herpesvirus 6B
auuucaacgugaaucuucguc

SEQ ID NO: 336957 - RNA, 14 nt, Human herpesvirus 6B
auuucauacuguau

SEQ ID NO: 336958 - RNA, 18 nt, Human herpesvirus 6B
auuuccauaaguuaauuc

SEQ ID NO: 336959 - RNA, 23 nt, Human herpesvirus 6B
auuuccguauucuugagcuugua

SEQ ID NO: 336960 - RNA, 21 nt, Human herpesvirus 6B
auuucgguuuugucguuugua

SEQ ID NO: 336961 - RNA, 20 nt, Human herpesvirus 6B
auuucguucgggauguccau

SEQ ID NO: 336962 - RNA, 21 nt, Human herpesvirus 6B
auuucuaaacacgaaaugaac

SEQ ID NO: 336963 - RNA, 15 nt, Human herpesvirus 6B
auuucucuacaugcc

SEQ ID NO: 336964 - RNA, 16 nt, Human herpesvirus 6B
aauguuacagauacaa

SEQ ID NO: 336965 - RNA, 23 nt, Human herpesvirus 6B
aauguucgaugauuauucugucu

SEQ ID NO: 336966 - RNA, 17 nt, Human herpesvirus 6B
aauguuggcgccaaaaa

SEQ ID NO: 336967 - RNA, 14 nt, Human herpesvirus 6B
aauuaaaaaagagg

SEQ ID NO: 336968 - RNA, 20 nt, Human herpesvirus 6B
aauuaaaacagaaaggccau

SEQ ID NO: 336969 - RNA, 16 nt, Human herpesvirus 6B
aauuaaaacucuaaaa

SEQ ID NO: 336970 - RNA, 19 nt, Human herpesvirus 6B
aauuaaaguuuacugugau

SEQ ID NO: 336971 - RNA, 21 nt, Human herpesvirus 6B
aauuaacaauucucucaaugc

SEQ ID NO: 336972 - RNA, 20 nt, Human herpesvirus 6B
aauuacauaagcaaauguaa

SEQ ID NO: 336973 - RNA, 18 nt, Human herpesvirus 6B
aauuacaugaaaacauuc

SEQ ID NO: 336974 - RNA, 18 nt, Human herpesvirus 6B
aauuaugacugacaaggu

SEQ ID NO: 336975 - RNA, 20 nt, Human herpesvirus 6B
aauuaugacugacaagguau

SEQ ID NO: 336976 - RNA, 19 nt, Human herpesvirus 6B
aauuauugugacaagguau

SEQ ID NO: 336977 - RNA, 20 nt, Human herpesvirus 6B
aauucacuguggucaacuca

SEQ ID NO: 336978 - RNA, 13 nt, Human herpesvirus 6B
aauucacuuugaa

SEQ ID NO: 336979 - RNA, 16 nt, Human herpesvirus 6B
aauucaggaacagaaa

SEQ ID NO: 336980 - RNA, 22 nt, Human herpesvirus 6B
aauucaucaaauccucuacgua

SEQ ID NO: 336981 - RNA, 20 nt, Human herpesvirus 6B
aauuccuggacauggugaaa

SEQ ID NO: 336982 - RNA, 13 nt, Human herpesvirus 6B
aauuccugugaug

SEQ ID NO: 336983 - RNA, 22 nt, Human herpesvirus 6B
aauuccugugaugccuugaugu

SEQ ID NO: 336984 - RNA, 19 nt, Human herpesvirus 6B
aauucggauuuaaguaaac

SEQ ID NO: 336985 - RNA, 14 nt, Human herpesvirus 6B
aauucuagaucugc

SEQ ID NO: 336986 - RNA, 17 nt, Human herpesvirus 6B
aauucugauuauuauca

SEQ ID NO: 336987 - RNA, 11 nt, Human herpesvirus 6B
aauucuuacca

SEQ ID NO: 336988 - RNA, 15 nt, Human herpesvirus 6B
aauucuuaccaagaa

SEQ ID NO: 336989 - RNA, 18 nt, Human herpesvirus 6B
aauucuucucuacaucga

SEQ ID NO: 336990 - RNA, 13 nt, Human herpesvirus 6B
aauugacaaugag

SEQ ID NO: 336991 - RNA, 17 nt, Human herpesvirus 6B
aauugauaauaaguccu

SEQ ID NO: 336992 - RNA, 17 nt, Human herpesvirus 6B
aauugaugaaauuguga

SEQ ID NO: 336993 - RNA, 20 nt, Human herpesvirus 6B
aauugaugaaauugugacua

SEQ ID NO: 336994 - RNA, 18 nt, Human herpesvirus 6B
aauuggucucucuuugcg

SEQ ID NO: 336995 - RNA, 14 nt, Human herpesvirus 6B
aauuguaacuucau

SEQ ID NO: 336996 - RNA, 17 nt, Human herpesvirus 6B
aauuguuucacggaugg

SEQ ID NO: 336997 - RNA, 15 nt, Human herpesvirus 6B
aauuguuugugaugg

SEQ ID NO: 336998 - RNA, 23 nt, Human herpesvirus 6B
aauuguuuuuuuuuuuguuaaca

SEQ ID NO: 336999 - RNA, 19 nt, Human herpesvirus 6B
aauuuaggucuuuauccca

SEQ ID NO: 337000 - RNA, 12 nt, Human herpesvirus 6B
aauuucauagau

SEQ ID NO: 337001 - RNA, 16 nt, Human herpesvirus 6B
aauuuggguugugcug

SEQ ID NO: 337002 - RNA, 18 nt, Human herpesvirus 6B
aauuugugcgaauugugu

SEQ ID NO: 337003 - RNA, 15 nt, Human herpesvirus 6B
aauuuuaucaugccc

SEQ ID NO: 337004 - RNA, 20 nt, Human herpesvirus 6B
aauuuuauucaaccaaucua

SEQ ID NO: 337005 - RNA, 19 nt, Human herpesvirus 6B
acaaaacauggacaacuua

SEQ ID NO: 337006 - RNA, 22 nt, Human herpesvirus 6B
acaaaaccaggaauccuauuca

SEQ ID NO: 337007 - RNA, 12 nt, Human herpesvirus 6B
acaaaacuguac

SEQ ID NO: 337008 - RNA, 12 nt, Human herpesvirus 6B
acaaaacuguua

SEQ ID NO: 337009 - RNA, 11 nt, Human herpesvirus 6B
acaaaagccug

SEQ ID NO: 337010 - RNA, 14 nt, Human herpesvirus 6B
acaaaauaaaauac

SEQ ID NO: 337011 - RNA, 16 nt, Human herpesvirus 6B
acaaaaugauuaguua

SEQ ID NO: 337012 - RNA, 14 nt, Human herpesvirus 6B
acaaacauccaaag

SEQ ID NO: 337013 - RNA, 12 nt, Human herpesvirus 6B
acaaaccuuccc

SEQ ID NO: 337014 - RNA, 20 nt, Human herpesvirus 6B
acaaaccuucccuaucacaa

SEQ ID NO: 337015 - RNA, 12 nt, Human herpesvirus 6B
acaaacuaaucg

SEQ ID NO: 337016 - RNA, 18 nt, Human herpesvirus 6B
acaaacugucacuuuccg

SEQ ID NO: 337017 - RNA, 16 nt, Human herpesvirus 6B
acaaaucugaauguau

SEQ ID NO: 337018 - RNA, 21 nt, Human herpesvirus 6B
acaacgauagaguucaucuaa

SEQ ID NO: 337019 - RNA, 15 nt, Human herpesvirus 6B
acaacugaaacucca

SEQ ID NO: 337020 - RNA, 16 nt, Human herpesvirus 6B
acaacuggaugaaucu

SEQ ID NO: 337021 - RNA, 20 nt, Human herpesvirus 6B
acaacuguuaccgaaaucuc

SEQ ID NO: 337022 - RNA, 23 nt, Human herpesvirus 6B
acaacuuaaccgcaaaaaagcgc

SEQ ID NO: 337023 - RNA, 22 nt, Human herpesvirus 6B
acaagaaaacgagagaguucau

SEQ ID NO: 337024 - RNA, 22 nt, Human herpesvirus 6B
acaagaauguaaaagagccaga

SEQ ID NO: 337025 - RNA, 22 nt, Human herpesvirus 6B
acaagaguaaaaaaagauuuau

SEQ ID NO: 337026 - RNA, 13 nt, Human herpesvirus 6B
acaagcaugcauu

SEQ ID NO: 337027 - RNA, 17 nt, Human herpesvirus 6B
acaagcaugcauugugu

SEQ ID NO: 337028 - RNA, 20 nt, Human herpesvirus 6B
acaagcuguccaucuucaga

SEQ ID NO: 337029 - RNA, 13 nt, Human herpesvirus 6B
acaagcuuaauaa

SEQ ID NO: 337030 - RNA, 20 nt, Human herpesvirus 6B
acaaggaacgauaugcugcc

SEQ ID NO: 337031 - RNA, 13 nt, Human herpesvirus 6B
acaaggaaugugc

SEQ ID NO: 337032 - RNA, 15 nt, Human herpesvirus 6B
acaaggaaugugcag

SEQ ID NO: 337033 - RNA, 20 nt, Human herpesvirus 6B
acaagguacacaauacacag

SEQ ID NO: 337034 - RNA, 22 nt, Human herpesvirus 6B
acaauaaaaauauugguguugu

SEQ ID NO: 337035 - RNA, 14 nt, Human herpesvirus 6B
acaaugacuaucaa

SEQ ID NO: 337036 - RNA, 14 nt, Human herpesvirus 6B
acaaugcaaucgaa

SEQ ID NO: 337037 - RNA, 15 nt, Human herpesvirus 6B
aaccauucugcagaa

SEQ ID NO: 337038 - RNA, 18 nt, Human herpesvirus 6B
aaccccccacuacuaaag

SEQ ID NO: 337039 - RNA, 19 nt, Human herpesvirus 6B
aaccccccacuacuaaagc

SEQ ID NO: 337040 - RNA, 18 nt, Human herpesvirus 6B
aacccuaaaaucugcuaa

SEQ ID NO: 337041 - RNA, 18 nt, Human herpesvirus 6B
aaccgauuuaccaccugu

SEQ ID NO: 337042 - RNA, 13 nt, Human herpesvirus 6B
aaccgcaaaaaag

SEQ ID NO: 337043 - RNA, 13 nt, Human herpesvirus 6B
aaccgcaguuccu

SEQ ID NO: 337044 - RNA, 21 nt, Human herpesvirus 6B
aaccgcaguuucuguuuuucu

SEQ ID NO: 337045 - RNA, 20 nt, Human herpesvirus 6B
aaccgguacgcuucuuucac

SEQ ID NO: 337046 - RNA, 15 nt, Human herpesvirus 6B
aaccgucuacugcac

SEQ ID NO: 337047 - RNA, 19 nt, Human herpesvirus 6B
aaccucagcaaacauguga

SEQ ID NO: 337048 - RNA, 22 nt, Human herpesvirus 6B
aaccugauuucagaauugaguu

SEQ ID NO: 337049 - RNA, 16 nt, Human herpesvirus 6B
aaccuuauacagaugc

SEQ ID NO: 337050 - RNA, 14 nt, Human herpesvirus 6B
aacgaaaaccauua

SEQ ID NO: 337051 - RNA, 17 nt, Human herpesvirus 6B
aacgaaaacuuuuugcc

SEQ ID NO: 337052 - RNA, 14 nt, Human herpesvirus 6B
aacgacugggagaa

SEQ ID NO: 337053 - RNA, 22 nt, Human herpesvirus 6B
aacgaggcccacuucacguuau

SEQ ID NO: 337054 - RNA, 20 nt, Human herpesvirus 6B
aacgauagaguucaucuaac

SEQ ID NO: 337055 - RNA, 22 nt, Human herpesvirus 6B
aacgauaucaauuccugugaug

SEQ ID NO: 337056 - RNA, 18 nt, Human herpesvirus 6B
aacgauaucguuuuugcu

SEQ ID NO: 337057 - RNA, 19 nt, Human herpesvirus 6B
aacgaucugugaauucuaa

SEQ ID NO: 337058 - RNA, 15 nt, Human herpesvirus 6B
aacgcacuagacauc

SEQ ID NO: 337059 - RNA, 21 nt, Human herpesvirus 6B
aacgcagcaugaugaucugcu

SEQ ID NO: 337060 - RNA, 17 nt, Human herpesvirus 6B
aacgcucacaacaugau

SEQ ID NO: 337061 - RNA, 15 nt, Human herpesvirus 6B
aacggaaacaugaac

SEQ ID NO: 337062 - RNA, 16 nt, Human herpesvirus 6B
aacggaaacaugaacg

SEQ ID NO: 337063 - RNA, 16 nt, Human herpesvirus 6B
aacggaaagcaucuca

SEQ ID NO: 337064 - RNA, 17 nt, Human herpesvirus 6B
aacggaaagcaucucaa

SEQ ID NO: 337065 - RNA, 16 nt, Human herpesvirus 6B
aacggaauuaacaauu

SEQ ID NO: 337066 - RNA, 20 nt, Human herpesvirus 6B
aacggagcaaccgcaguucc

SEQ ID NO: 337067 - RNA, 20 nt, Human herpesvirus 6B
aacggagcaaccgcaguuuc

SEQ ID NO: 337068 - RNA, 13 nt, Human herpesvirus 6B
aacggauaguuaa

SEQ ID NO: 337069 - RNA, 20 nt, Human herpesvirus 6B
aacggccuggaauacaagac

SEQ ID NO: 337070 - RNA, 16 nt, Human herpesvirus 6B
aacguucguccggggu

SEQ ID NO: 337071 - RNA, 13 nt, Human herpesvirus 6B
aacguugugcuga

SEQ ID NO: 337072 - RNA, 18 nt, Human herpesvirus 6B
aacuaaaucgcgccauau

SEQ ID NO: 337073 - RNA, 20 nt, Human herpesvirus 6B
aacuaaaucgcgccauauca

SEQ ID NO: 337074 - RNA, 21 nt, Human herpesvirus 6B
aacuaaaucgcgccauaucac

SEQ ID NO: 337075 - RNA, 14 nt, Human herpesvirus 6B
aacuaacaugacaa

SEQ ID NO: 337076 - RNA, 15 nt, Human herpesvirus 6B
aacuaagauugugca

SEQ ID NO: 337077 - RNA, 15 nt, Human herpesvirus 6B
aacuagaaaaacaac

SEQ ID NO: 337078 - RNA, 21 nt, Human herpesvirus 6B
aacuauagccuagcaagcuag

SEQ ID NO: 337079 - RNA, 22 nt, Human herpesvirus 6B
aacuauagccuagcaagcuagu

SEQ ID NO: 337080 - RNA, 15 nt, Human herpesvirus 6B
aacuaugugcauucc

SEQ ID NO: 337081 - RNA, 16 nt, Human herpesvirus 6B
aacuauuuaacaucca

SEQ ID NO: 337082 - RNA, 19 nt, Human herpesvirus 6B
aacuauuuaacauccaaaa

SEQ ID NO: 337083 - RNA, 19 nt, Human herpesvirus 6B
aacucgacuucuuucauca

SEQ ID NO: 337084 - RNA, 18 nt, Human herpesvirus 6B
aacucuaaaaccugcuaa

SEQ ID NO: 337085 - RNA, 16 nt, Human herpesvirus 6B
aacucucacggccauu

SEQ ID NO: 337086 - RNA, 13 nt, Human herpesvirus 6B
aacugacugacaa

SEQ ID NO: 337087 - RNA, 14 nt, Human herpesvirus 6B
aacugacugacaaa

SEQ ID NO: 337088 - RNA, 13 nt, Human herpesvirus 6B
aacugagauauuu

SEQ ID NO: 337089 - RNA, 19 nt, Human herpesvirus 6B
aacuggcgcgcauguugca

SEQ ID NO: 337090 - RNA, 22 nt, Human herpesvirus 6B
aacuggcgcgcauguugcaguu

SEQ ID NO: 337091 - RNA, 23 nt, Human herpesvirus 6B
aacugggugauugggagcucacu

SEQ ID NO: 337092 - RNA, 18 nt, Human herpesvirus 6B
aacuggucugcuugcaaa

SEQ ID NO: 337093 - RNA, 17 nt, Human herpesvirus 6B
aacuggugucugucuau

SEQ ID NO: 337094 - RNA, 13 nt, Human herpesvirus 6B
aacuguaccugaa

SEQ ID NO: 337095 - RNA, 20 nt, Human herpesvirus 6B
aacugucuugcagcugucua

SEQ ID NO: 337096 - RNA, 14 nt, Human herpesvirus 6B
aacuguucuuucaa

SEQ ID NO: 337097 - RNA, 16 nt, Human herpesvirus 6B
aacuuaaccgcaaaaa

SEQ ID NO: 337098 - RNA, 22 nt, Human herpesvirus 6B
aacuuaauaaaugcuacccaca

SEQ ID NO: 337099 - RNA, 23 nt, Human herpesvirus 6B
aacuuacuuaauaacuacacuua

SEQ ID NO: 337100 - RNA, 15 nt, Human herpesvirus 6B
aacuuaucaacuaua

SEQ ID NO: 337101 - RNA, 22 nt, Human herpesvirus 6B
aacuuauugaggaaaugcagca

SEQ ID NO: 337102 - RNA, 22 nt, Human herpesvirus 6B
aacuucgacggacgaucccaua

SEQ ID NO: 337103 - RNA, 16 nt, Human herpesvirus 6B
aacuuuacaucaagac

SEQ ID NO: 337104 - RNA, 13 nt, Human herpesvirus 6B
aacuuuugcuuac

SEQ ID NO: 337105 - RNA, 21 nt, Human herpesvirus 6B
aagaaaccgaugaugaucugc

SEQ ID NO: 337106 - RNA, 14 nt, Human herpesvirus 6B
aagaacagaaucuu

SEQ ID NO: 337107 - RNA, 16 nt, Human herpesvirus 6B
aagaacaguuuaccua

SEQ ID NO: 337108 - RNA, 21 nt, Human herpesvirus 6B
aagaaggcuaucacuuagaca

SEQ ID NO: 337109 - RNA, 15 nt, Human herpesvirus 6B
aagaauaaaagucca

SEQ ID NO: 337110 - RNA, 17 nt, Human herpesvirus 6B
aagaaucaaauggaugg

SEQ ID NO: 337111 - RNA, 12 nt, Human herpesvirus 6B
aagaaucguuaa

SEQ ID NO: 337112 - RNA, 16 nt, Human herpesvirus 6B
aagaaugagauguccu

SEQ ID NO: 337113 - RNA, 18 nt, Human herpesvirus 6B
aagaaugagauguccuaa

SEQ ID NO: 337114 - RNA, 23 nt, Human herpesvirus 6B
aagaaugccgugaacuguguccu

SEQ ID NO: 337115 - RNA, 18 nt, Human herpesvirus 6B
aagaaugcugacuuugac

SEQ ID NO: 337116 - RNA, 23 nt, Human herpesvirus 6B
aagaaugggaugcauuauacuga

SEQ ID NO: 337117 - RNA, 20 nt, Human herpesvirus 6B
aagaauguaaaagagccaga

SEQ ID NO: 337118 - RNA, 14 nt, Human herpesvirus 6B
aagaauuacaauac

SEQ ID NO: 337119 - RNA, 18 nt, Human herpesvirus 6B
aagacaaaccugauuuca

SEQ ID NO: 337120 - RNA, 12 nt, Human herpesvirus 6B
aagacgaucuca

SEQ ID NO: 337121 - RNA, 17 nt, Human herpesvirus 6B
aagacgcuugcuguuuu

SEQ ID NO: 337122 - RNA, 14 nt, Human herpesvirus 6B
aagacuacagacuc

SEQ ID NO: 337123 - RNA, 22 nt, Human herpesvirus 6B
aagagagucagaaauuguguca

SEQ ID NO: 337124 - RNA, 20 nt, Human herpesvirus 6B
aagagaucaguacauagaau

SEQ ID NO: 337125 - RNA, 24 nt, Human herpesvirus 6B
aagagauuuacuguuucuuugaca

SEQ ID NO: 337126 - RNA, 15 nt, Human herpesvirus 6B
aagaggaggaaaaga

SEQ ID NO: 337127 - RNA, 18 nt, Human herpesvirus 6B
aagaggugcaaaugcuca

SEQ ID NO: 337128 - RNA, 22 nt, Human herpesvirus 6B
aagagugcacgaaaguggaugu

SEQ ID NO: 337129 - RNA, 18 nt, Human herpesvirus 6B
aagaguuucauccugacc

SEQ ID NO: 337130 - RNA, 13 nt, Human herpesvirus 6B
aagauacacugca

SEQ ID NO: 337131 - RNA, 16 nt, Human herpesvirus 6B
aagauacacugcaaga

SEQ ID NO: 337132 - RNA, 21 nt, Human herpesvirus 6B
aagauagccagggcauucaca

SEQ ID NO: 337133 - RNA, 17 nt, Human herpesvirus 6B
aagauguacgaugaacu

SEQ ID NO: 337134 - RNA, 18 nt, Human herpesvirus 6B
aagauguucaaaacuggg

SEQ ID NO: 337135 - RNA, 20 nt, Human herpesvirus 6B
aagauugugcaguucuuaca

SEQ ID NO: 337136 - RNA, 23 nt, Human herpesvirus 6B
aagauugugcaguucuuacauau

SEQ ID NO: 337137 - RNA, 18 nt, Human herpesvirus 6B
aagauuguguuucugucu

SEQ ID NO: 337138 - RNA, 19 nt, Human herpesvirus 6B
aagauuuaucaaaagccag

SEQ ID NO: 337139 - RNA, 20 nt, Human herpesvirus 6B
aagauuuaucaaaagccaga

SEQ ID NO: 337140 - RNA, 14 nt, Human herpesvirus 6B
aagcaaacauguau

SEQ ID NO: 337141 - RNA, 13 nt, Human herpesvirus 6B
aagcaaagcaccc

SEQ ID NO: 337142 - RNA, 17 nt, Human herpesvirus 6B
aagcaaguuccauuuuc

SEQ ID NO: 337143 - RNA, 17 nt, Human herpesvirus 6B
aagcagcagaugcuuac

SEQ ID NO: 337144 - RNA, 15 nt, Human herpesvirus 6B
aagcagccaaugauu

SEQ ID NO: 337145 - RNA, 16 nt, Human herpesvirus 6B
aagcaggaaccgagau

SEQ ID NO: 337146 - RNA, 14 nt, Human herpesvirus 6B
aagcaucucaaaaa

SEQ ID NO: 337147 - RNA, 21 nt, Human herpesvirus 6B
aagcaucucaaaaaacauaua

SEQ ID NO: 337148 - RNA, 15 nt, Human herpesvirus 6B
aagcaucugcugcuu

SEQ ID NO: 337149 - RNA, 13 nt, Human herpesvirus 6B
aagcaugcauugu

SEQ ID NO: 337150 - RNA, 15 nt, Human herpesvirus 6B
aagcaugcauugugu

SEQ ID NO: 337151 - RNA, 17 nt, Human herpesvirus 6B
aagcauuuuuugaugua

SEQ ID NO: 337152 - RNA, 14 nt, Human herpesvirus 6B
aaaaaaaaguguca

SEQ ID NO: 337153 - RNA, 12 nt, Human herpesvirus 6B
aaaaaacaaaga

SEQ ID NO: 337154 - RNA, 13 nt, Human herpesvirus 6B
aaaaaacaaagag

SEQ ID NO: 337155 - RNA, 13 nt, Human herpesvirus 6B
aaaaaagcgccaa

SEQ ID NO: 337156 - RNA, 13 nt, Human herpesvirus 6B
aaaaaagugucau

SEQ ID NO: 337157 - RNA, 17 nt, Human herpesvirus 6B
aaaaacaaagagaucag

SEQ ID NO: 337158 - RNA, 14 nt, Human herpesvirus 6B
aaaaacuuacucau

SEQ ID NO: 337159 - RNA, 13 nt, Human herpesvirus 6B
aaaaagacaucac

SEQ ID NO: 337160 - RNA, 23 nt, Human herpesvirus 6B
aaaaagauuuaucaaaagccaga

SEQ ID NO: 337161 - RNA, 11 nt, Human herpesvirus 6B
aaaaagucaua

SEQ ID NO: 337162 - RNA, 17 nt, Human herpesvirus 6B
aaaaagugcaugaugaa

SEQ ID NO: 337163 - RNA, 22 nt, Human herpesvirus 6B
aaaaauagcagaaguuuaccua

SEQ ID NO: 337164 - RNA, 14 nt, Human herpesvirus 6B
aaaaaugcuuuuau

SEQ ID NO: 337165 - RNA, 15 nt, Human herpesvirus 6B
aaaaaugugucuuag

SEQ ID NO: 337166 - RNA, 20 nt, Human herpesvirus 6B
aaaaauuucagccgaugaua

SEQ ID NO: 337167 - RNA, 21 nt, Human herpesvirus 6B
aaaaauuugugcgaauugugu

SEQ ID NO: 337168 - RNA, 14 nt, Human herpesvirus 6B
aaaaauuuuacaau

SEQ ID NO: 337169 - RNA, 21 nt, Human herpesvirus 6B
aaaaauuuugucacucucaau

SEQ ID NO: 337170 - RNA, 15 nt, Human herpesvirus 6B
aaaacaaaaguagca

SEQ ID NO: 337171 - RNA, 19 nt, Human herpesvirus 6B
aaaacacaccccgccugaa

SEQ ID NO: 337172 - RNA, 19 nt, Human herpesvirus 6B
aaaacacacuggccuacua

SEQ ID NO: 337173 - RNA, 24 nt, Human herpesvirus 6B
aaaacacgauccaauuacaucaaa

SEQ ID NO: 337174 - RNA, 20 nt, Human herpesvirus 6B
aaaacagauuuuacuucuac

SEQ ID NO: 337175 - RNA, 21 nt, Human herpesvirus 6B
aaaacaucguaauggcauuca

SEQ ID NO: 337176 - RNA, 17 nt, Human herpesvirus 6B
aaaacgagagaguucau

SEQ ID NO: 337177 - RNA, 19 nt, Human herpesvirus 6B
aaaacgcucacaacaugau

SEQ ID NO: 337178 - RNA, 14 nt, Human herpesvirus 6B
aaaacuaugugcau

SEQ ID NO: 337179 - RNA, 19 nt, Human herpesvirus 6B
aaaacuauuaauaaaccgc

SEQ ID NO: 337180 - RNA, 22 nt, Human herpesvirus 6B
aaaacuauuaauaaaccgcuua

SEQ ID NO: 337181 - RNA, 15 nt, Human herpesvirus 6B
aaaacuguaccugaa

SEQ ID NO: 337182 - RNA, 15 nt, Human herpesvirus 6B
aaaagacuauguagu

SEQ ID NO: 337183 - RNA, 22 nt, Human herpesvirus 6B
aaaagagggugggaacugucaa

SEQ ID NO: 337184 - RNA, 15 nt, Human herpesvirus 6B
aaaagauuuaucaaa

SEQ ID NO: 337185 - RNA, 22 nt, Human herpesvirus 6B
aaaagauuuaucaaaagccaga

SEQ ID NO: 337186 - RNA, 17 nt, Human herpesvirus 6B
aaaagccugcauaugau

SEQ ID NO: 337187 - RNA, 23 nt, Human herpesvirus 6B
aaaagcgccugccuacacugcga

SEQ ID NO: 337188 - RNA, 20 nt, Human herpesvirus 6B
aaaagcuaucgucuacccua

SEQ ID NO: 337189 - RNA, 14 nt, Human herpesvirus 6B
aaaagcuauugaaa

SEQ ID NO: 337190 - RNA, 13 nt, Human herpesvirus 6B
aaaagucaccugu

SEQ ID NO: 337191 - RNA, 13 nt, Human herpesvirus 6B
aaaagucuuauaa

SEQ ID NO: 337192 - RNA, 14 nt, Human herpesvirus 6B
aaaagugcugugcu

SEQ ID NO: 337193 - RNA, 15 nt, Human herpesvirus 6B
aaaagugcugugcuc

SEQ ID NO: 337194 - RNA, 22 nt, Human herpesvirus 6B
aaaauaaaaaaaaagacaucac

SEQ ID NO: 337195 - RNA, 19 nt, Human herpesvirus 6B
aaaauaaaaauuuuaccua

SEQ ID NO: 337196 - RNA, 18 nt, Human herpesvirus 6B
aaaauaaacgcugucuca

SEQ ID NO: 337197 - RNA, 21 nt, Human herpesvirus 6B
aaaauaccugacuguucugcc

SEQ ID NO: 337198 - RNA, 21 nt, Human herpesvirus 6B
aaaauagcagaaguuuaccua

SEQ ID NO: 337199 - RNA, 14 nt, Human herpesvirus 6B
aaaauauuauucaa

SEQ ID NO: 337200 - RNA, 16 nt, Human herpesvirus 6B
aaaauauucuacuuca

SEQ ID NO: 337201 - RNA, 23 nt, Human herpesvirus 6B
aaaaucaaacucaccgcauauau

SEQ ID NO: 337202 - RNA, 17 nt, Human herpesvirus 6B
aaaauccagcaauccaa

SEQ ID NO: 337203 - RNA, 19 nt, Human herpesvirus 6B
aaaaucgcaaaagaacaca

SEQ ID NO: 337204 - RNA, 13 nt, Human herpesvirus 6B
aaaaugacucuaa

SEQ ID NO: 337205 - RNA, 20 nt, Human herpesvirus 6B
aaaaugauugcaaccaauaa

SEQ ID NO: 337206 - RNA, 15 nt, Human herpesvirus 6B
aaaaugcguuuguca

SEQ ID NO: 337207 - RNA, 16 nt, Human herpesvirus 6B
aaaauguccauucuca

SEQ ID NO: 337208 - RNA, 17 nt, Human herpesvirus 6B
aaaauguuggcgccaaa

SEQ ID NO: 337209 - RNA, 12 nt, Human herpesvirus 6B
aaaauuaccuca

SEQ ID NO: 337210 - RNA, 17 nt, Human herpesvirus 6B
aaaauuacuaaugugga

SEQ ID NO: 337211 - RNA, 16 nt, Human herpesvirus 6B
aaaauuauuugugauu

SEQ ID NO: 337212 - RNA, 11 nt, Human herpesvirus 6B
aaaauucacug

SEQ ID NO: 337213 - RNA, 14 nt, Human herpesvirus 6B
aaaauugacaauga

SEQ ID NO: 337214 - RNA, 22 nt, Human herpesvirus 6B
aaaauuuucgaggaaaacucgc

SEQ ID NO: 337215 - RNA, 18 nt, Human herpesvirus 6B
aaaauuuugucacucuca

SEQ ID NO: 337216 - RNA, 12 nt, Human herpesvirus 6B
aaacaaauaucg

SEQ ID NO: 337217 - RNA, 16 nt, Human herpesvirus 6B
aaacaaauucuuacaa

SEQ ID NO: 337218 - RNA, 17 nt, Human herpesvirus 6B
aaacaagguaagcaccu

SEQ ID NO: 337219 - RNA, 14 nt, Human herpesvirus 6B
aaacacaccaucaa

SEQ ID NO: 337220 - RNA, 19 nt, Human herpesvirus 6B
aaacacacuggccuacuau

SEQ ID NO: 337221 - RNA, 16 nt, Human herpesvirus 6B
aaacaccaacaugacu

SEQ ID NO: 337222 - RNA, 21 nt, Human herpesvirus 6B
aaacaccaacaugacuggaau

SEQ ID NO: 337223 - RNA, 14 nt, Human herpesvirus 6B
aaacaccacuugau

SEQ ID NO: 337224 - RNA, 17 nt, Human herpesvirus 6B
aaacaccucacagucua

SEQ ID NO: 337225 - RNA, 22 nt, Human herpesvirus 6B
aaacacgauccaauuacaucaa

SEQ ID NO: 337226 - RNA, 16 nt, Human herpesvirus 6B
aaacacuaagugccgu

SEQ ID NO: 337227 - RNA, 16 nt, Human herpesvirus 6B
aaacagauuuuacuuc

SEQ ID NO: 337228 - RNA, 19 nt, Human herpesvirus 6B
aaacauccuaauaagacag

SEQ ID NO: 337229 - RNA, 16 nt, Human herpesvirus 6B
aaacaugauuguaaua

SEQ ID NO: 337230 - RNA, 17 nt, Human herpesvirus 6B
aaacaugauuguaauaa

SEQ ID NO: 337231 - RNA, 17 nt, Human herpesvirus 6B
aaacauuauaccuauua

SEQ ID NO: 337232 - RNA, 16 nt, Human herpesvirus 6B
aaacauucuuaaauuc

SEQ ID NO: 337233 - RNA, 19 nt, Human herpesvirus 6B
aaaccaggaauccuauuca

SEQ ID NO: 337234 - RNA, 17 nt, Human herpesvirus 6B
aaaccauagcuguccau

SEQ ID NO: 337235 - RNA, 20 nt, Human herpesvirus 6B
aaaccauagcuguccaugaa

SEQ ID NO: 337236 - RNA, 16 nt, Human herpesvirus 6B
aaaccaucgacuucaa

SEQ ID NO: 337237 - RNA, 20 nt, Human herpesvirus 6B
aaaccaucgacuucaaacac

SEQ ID NO: 337238 - RNA, 17 nt, Human herpesvirus 6B
aaaccgaaauacguuca

SEQ ID NO: 337239 - RNA, 16 nt, Human herpesvirus 6B
aaaccgaugaugaucu

SEQ ID NO: 337240 - RNA, 18 nt, Human herpesvirus 6B
aaaccgcuuaaagcguuu

SEQ ID NO: 337241 - RNA, 21 nt, Human herpesvirus 6B
aaaccgguacgcuucuuucac

SEQ ID NO: 337242 - RNA, 14 nt, Human herpesvirus 6B
aaaccucaaaaaug

SEQ ID NO: 337243 - RNA, 13 nt, Human herpesvirus 6B
aaaccucucgccg

SEQ ID NO: 337244 - RNA, 15 nt, Human herpesvirus 6B
aaaccuucccuauca

SEQ ID NO: 337245 - RNA, 18 nt, Human herpesvirus 6B
aaaccuucccuaucacaa

SEQ ID NO: 337246 - RNA, 16 nt, Human herpesvirus 6B
aaacgagagaguucau

SEQ ID NO: 337247 - RNA, 19 nt, Human herpesvirus 6B
aaacgccguguuucaccaa

SEQ ID NO: 337248 - RNA, 19 nt, Human herpesvirus 6B
aaacgcucacaacaugauc

SEQ ID NO: 337249 - RNA, 13 nt, Human herpesvirus 6B
aaacgcugucuca

SEQ ID NO: 337250 - RNA, 14 nt, Human herpesvirus 6B
aaacgguaaauuca

SEQ ID NO: 337251 - RNA, 15 nt, Human herpesvirus 6B
aaacgguaaauucaa

SEQ ID NO: 337252 - RNA, 14 nt, Human herpesvirus 6B
aaacuaacaugaca

SEQ ID NO: 337253 - RNA, 13 nt, Human herpesvirus 6B
aaacuaugugcau

SEQ ID NO: 337254 - RNA, 16 nt, Human herpesvirus 6B
aaacuaugugcauucc

SEQ ID NO: 337255 - RNA, 13 nt, Human herpesvirus 6B
aaacucaacugcu

SEQ ID NO: 337256 - RNA, 19 nt, Human herpesvirus 6B
aaacuccacgaucuacacg

SEQ ID NO: 337257 - RNA, 20 nt, Human herpesvirus 6B
aaacuccuuacucauuuuaa

SEQ ID NO: 337258 - RNA, 18 nt, Human herpesvirus 6B
aaacucuugacauagcaa

SEQ ID NO: 337259 - RNA, 18 nt, Human herpesvirus 6B
aaacugcuuaacuugcac

SEQ ID NO: 337260 - RNA, 17 nt, Human herpesvirus 6B
aaacuggagcuagagaa

SEQ ID NO: 337261 - RNA, 13 nt, Human herpesvirus 6B
aaacugggugauu

SEQ ID NO: 337262 - RNA, 13 nt, Human herpesvirus 6B
aaacuuaccauau

SEQ ID NO: 337263 - RNA, 20 nt, Human herpesvirus 6B
aaacuuggagcuauaugcau

SEQ ID NO: 337264 - RNA, 22 nt, Human herpesvirus 6B
aaagaaagcuccgcgcggccaa

SEQ ID NO: 337265 - RNA, 14 nt, Human herpesvirus 6B
aaagaacaguuuac

SEQ ID NO: 337266 - RNA, 17 nt, Human herpesvirus 6B
aaagaacaguuuaccua

SEQ ID NO: 337267 - RNA, 22 nt, Human herpesvirus 6B
aaagaacaguuuaccuaucaac

SEQ ID NO: 337268 - RNA, 16 nt, Human herpesvirus 6B
aaagaaucugcagauu

SEQ ID NO: 337269 - RNA, 19 nt, Human herpesvirus 6B
aaagaaugcugacuuugac

SEQ ID NO: 337270 - RNA, 14 nt, Human herpesvirus 6B
aaagacacggcgaa

SEQ ID NO: 337271 - RNA, 20 nt, Human herpesvirus 6B
aaagagaauacuacagugac

SEQ ID NO: 337272 - RNA, 15 nt, Human herpesvirus 6B
aaagagaucaguaca

SEQ ID NO: 337273 - RNA, 21 nt, Human herpesvirus 6B
aaagaggccaauuuaugucau

SEQ ID NO: 337274 - RNA, 17 nt, Human herpesvirus 6B
aaagaggcugaacuguu

SEQ ID NO: 337275 - RNA, 21 nt, Human herpesvirus 6B
aaagagggugggaacugucaa

SEQ ID NO: 337276 - RNA, 13 nt, Human herpesvirus 6B
aaagaguaccgaa

SEQ ID NO: 337277 - RNA, 20 nt, Human herpesvirus 6B
aaagaucaagcaaguuccau

SEQ ID NO: 337278 - RNA, 17 nt, Human herpesvirus 6B
aaagauguagcuggaua

SEQ ID NO: 337279 - RNA, 18 nt, Human herpesvirus 6B
aaagauguagcuggauau

SEQ ID NO: 337280 - RNA, 16 nt, Human herpesvirus 6B
aaagauuuaucaaaag

SEQ ID NO: 337281 - RNA, 21 nt, Human herpesvirus 6B
aaagauuuaucaaaagccaga

SEQ ID NO: 337282 - RNA, 19 nt, Human herpesvirus 6B
aaagcagaucgaguuacau

SEQ ID NO: 337283 - RNA, 14 nt, Human herpesvirus 6B
aaagcaucucaaaa

SEQ ID NO: 337284 - RNA, 22 nt, Human herpesvirus 6B
aaagcaucucaaaaaacauaua

SEQ ID NO: 337285 - RNA, 14 nt, Human herpesvirus 6B
aaagcgauagagga

SEQ ID NO: 337286 - RNA, 23 nt, Human herpesvirus 6B
aaagcgccugccuacacugcgaa

SEQ ID NO: 337287 - RNA, 24 nt, Human herpesvirus 6B
aaagcuacucauccucagucuuca

SEQ ID NO: 337288 - RNA, 18 nt, Human herpesvirus 6B
aaagcuauucuaaauacc

SEQ ID NO: 337289 - RNA, 23 nt, Human herpesvirus 6B
aaaggacaaaguucaguaagauu

SEQ ID NO: 337290 - RNA, 23 nt, Human herpesvirus 6B
aaaggauguuugugacucugaac

SEQ ID NO: 337291 - RNA, 22 nt, Human herpesvirus 6B
aaaggugaucguggacaguaaa

SEQ ID NO: 337292 - RNA, 15 nt, Human herpesvirus 6B
aaaguagcacgggga

SEQ ID NO: 337293 - RNA, 15 nt, Human herpesvirus 6B
aaaguggauguggau

SEQ ID NO: 337294 - RNA, 15 nt, Human herpesvirus 6B
aaaguucaucuuuca

SEQ ID NO: 337295 - RNA, 16 nt, Human herpesvirus 6B
aaaguucaucuuucaa

SEQ ID NO: 337296 - RNA, 23 nt, Human herpesvirus 6B
aaaguucggaucugugacaauuc

SEQ ID NO: 337297 - RNA, 17 nt, Human herpesvirus 6B
aaaguuuaaguucucac

SEQ ID NO: 337298 - RNA, 12 nt, Human herpesvirus 6B
aaaguuuacugu

SEQ ID NO: 337299 - RNA, 18 nt, Human herpesvirus 6B
aaaguuucuguggaauuc

SEQ ID NO: 337300 - RNA, 15 nt, Human herpesvirus 6B
aaaguuuggaugcaa

SEQ ID NO: 337301 - RNA, 22 nt, Human herpesvirus 6B
aaaguuuucgguuucgcugcua

SEQ ID NO: 337302 - RNA, 16 nt, Human herpesvirus 6B
aaauaaaacaguauaa

SEQ ID NO: 337303 - RNA, 15 nt, Human herpesvirus 6B
aaauaacaugugaca

SEQ ID NO: 337304 - RNA, 22 nt, Human herpesvirus 6B
aaauaagacuuagcuagacgug

SEQ ID NO: 337305 - RNA, 15 nt, Human herpesvirus 6B
aaauaaucaacuguu

SEQ ID NO: 337306 - RNA, 12 nt, Human herpesvirus 6B
aaauaauugcac

SEQ ID NO: 337307 - RNA, 23 nt, Human herpesvirus 6B
aaauacagagauacguagucacg

SEQ ID NO: 337308 - RNA, 14 nt, Human herpesvirus 6B
aaauaccuaauucc

SEQ ID NO: 337309 - RNA, 23 nt, Human herpesvirus 6B
aaauaccugacuguucugccuau

SEQ ID NO: 337310 - RNA, 16 nt, Human herpesvirus 6B
aaauacgagagcugac

SEQ ID NO: 337311 - RNA, 22 nt, Human herpesvirus 6B
aaauacuauuuuaguuacacau

SEQ ID NO: 337312 - RNA, 18 nt, Human herpesvirus 6B
aaauagggucaacuguua

SEQ ID NO: 337313 - RNA, 20 nt, Human herpesvirus 6B
aaauagggucaacuguuacu

SEQ ID NO: 337314 - RNA, 19 nt, Human herpesvirus 6B
aaauauaacaguaggagac

SEQ ID NO: 337315 - RNA, 13 nt, Human herpesvirus 6B
aaauaucauuaaa

SEQ ID NO: 337316 - RNA, 19 nt, Human herpesvirus 6B
aaauaucggauagguagaa

SEQ ID NO: 337317 - RNA, 16 nt, Human herpesvirus 6B
aaauaucgucauuaaa

SEQ ID NO: 337318 - RNA, 15 nt, Human herpesvirus 6B
aaauauucuggggua

SEQ ID NO: 337319 - RNA, 20 nt, Human herpesvirus 6B
aaaucacaccaaugaucaca

SEQ ID NO: 337320 - RNA, 18 nt, Human herpesvirus 6B
aaaucacguugaaauguc

SEQ ID NO: 337321 - RNA, 15 nt, Human herpesvirus 6B
aaaucaugucuuaca

SEQ ID NO: 337322 - RNA, 14 nt, Human herpesvirus 6B
aaauccagcaaucc

SEQ ID NO: 337323 - RNA, 17 nt, Human herpesvirus 6B
aaaucgcgccauaucac

SEQ ID NO: 337324 - RNA, 22 nt, Human herpesvirus 6B
aaaucuccaaaagcgccugccu

SEQ ID NO: 337325 - RNA, 21 nt, Human herpesvirus 6B
aaaucugagcucuccugggua

SEQ ID NO: 337326 - RNA, 22 nt, Human herpesvirus 6B
aaaucugagcucuccuggguau

SEQ ID NO: 337327 - RNA, 16 nt, Human herpesvirus 6B
aaaucuguaagauuaa

SEQ ID NO: 337328 - RNA, 15 nt, Human herpesvirus 6B
aaaugaccagagauu

SEQ ID NO: 337329 - RNA, 23 nt, Human herpesvirus 6B
aaaugaugauuaauacaucauua

SEQ ID NO: 337330 - RNA, 15 nt, Human herpesvirus 6B
aaaugcgacaaagcu

SEQ ID NO: 337331 - RNA, 17 nt, Human herpesvirus 6B
aaaugcgacaaagcuau

SEQ ID NO: 337332 - RNA, 24 nt, Human herpesvirus 6B
aaauggaaacuggagcuagagaaa

SEQ ID NO: 337333 - RNA, 23 nt, Human herpesvirus 6B
aaauggcucagagaaguggaacu

SEQ ID NO: 337334 - RNA, 15 nt, Human herpesvirus 6B
aaauggcugugcuau

SEQ ID NO: 337335 - RNA, 17 nt, Human herpesvirus 6B
aaaugguuaugacaaag

SEQ ID NO: 337336 - RNA, 13 nt, Human herpesvirus 6B
aaaugucaaagaa

SEQ ID NO: 337337 - RNA, 16 nt, Human herpesvirus 6B
aaaugucgaaucucaa

SEQ ID NO: 337338 - RNA, 15 nt, Human herpesvirus 6B
aaaugugaacaguau

SEQ ID NO: 337339 - RNA, 22 nt, Human herpesvirus 6B
aaaugugaacaguauaaauucu

SEQ ID NO: 337340 - RNA, 21 nt, Human herpesvirus 6B
aaauguuuuuuuguaccaaca

SEQ ID NO: 337341 - RNA, 20 nt, Human herpesvirus 6B
aaauuaaaguuuacugugau

SEQ ID NO: 337342 - RNA, 22 nt, Human herpesvirus 6B
aaauuacaugaaaacauucaga

SEQ ID NO: 337343 - RNA, 18 nt, Human herpesvirus 6B
aaauuacuaguaagaaca

SEQ ID NO: 337344 - RNA, 23 nt, Human herpesvirus 6B
aaauuauucuggcgaugcagaug

SEQ ID NO: 337345 - RNA, 13 nt, Human herpesvirus 6B
aaauucacagugu

SEQ ID NO: 337346 - RNA, 20 nt, Human herpesvirus 6B
aaauucugauuauuaucaca

SEQ ID NO: 337347 - RNA, 22 nt, Human herpesvirus 6B
aaauucuuuugugcuuaucaaa

SEQ ID NO: 337348 - RNA, 19 nt, Human herpesvirus 6B
aaauugaugaaauugugac

SEQ ID NO: 337349 - RNA, 14 nt, Human herpesvirus 6B
aaauuggugugcau

SEQ ID NO: 337350 - RNA, 12 nt, Human herpesvirus 6B
aaauugugucac

SEQ ID NO: 337351 - RNA, 15 nt, Human herpesvirus 6B
aaauuuacucuccac

SEQ ID NO: 337352 - RNA, 17 nt, Human herpesvirus 6B
aaauuuauaaaagaagc

SEQ ID NO: 337353 - RNA, 19 nt, Human herpesvirus 6B
aaauuuuccaaacauuaua

SEQ ID NO: 337354 - RNA, 17 nt, Human herpesvirus 6B
aacaaaagguuuucuga

SEQ ID NO: 337355 - RNA, 17 nt, Human herpesvirus 6B
aacaaagcuuuacuuac

SEQ ID NO: 337356 - RNA, 22 nt, Human herpesvirus 6B
aacaaaguaauaugauggacaa

SEQ ID NO: 337357 - RNA, 13 nt, Human herpesvirus 6B
aacaaaucuccaa

SEQ ID NO: 337358 - RNA, 15 nt, Human herpesvirus 6B
aacaacaacuuuuaa

SEQ ID NO: 337359 - RNA, 15 nt, Human herpesvirus 6B
aacaagaauguaaaa

SEQ ID NO: 337360 - RNA, 17 nt, Human herpesvirus 6B
aacaaggaacgauaugc

SEQ ID NO: 337361 - RNA, 18 nt, Human herpesvirus 6B
aacaagguaagcaccuua

SEQ ID NO: 337362 - RNA, 18 nt, Human herpesvirus 6B
aacaauaaauuacugcca

SEQ ID NO: 337363 - RNA, 15 nt, Human herpesvirus 6B
aacaauaauugcauu

SEQ ID NO: 337364 - RNA, 14 nt, Human herpesvirus 6B
aacaauucucucaa

SEQ ID NO: 337365 - RNA, 14 nt, Human herpesvirus 6B
aacacaccugccua

SEQ ID NO: 337366 - RNA, 15 nt, Human herpesvirus 6B
aacaccaacaugacu

SEQ ID NO: 337367 - RNA, 21 nt, Human herpesvirus 6B
aacacgauccaauuacaucaa

SEQ ID NO: 337368 - RNA, 10 nt, Human herpesvirus 6B
aacacucuca

SEQ ID NO: 337369 - RNA, 22 nt, Human herpesvirus 6B
aacagaaaaugcguuugucauu

SEQ ID NO: 337370 - RNA, 23 nt, Human herpesvirus 6B
aacagaaucuucuuugugcguca

SEQ ID NO: 337371 - RNA, 22 nt, Human herpesvirus 6B
aacagacuacuuuuaaaauacc

SEQ ID NO: 337372 - RNA, 22 nt, Human herpesvirus 6B
aacagagagaggagcauucaca

SEQ ID NO: 337373 - RNA, 17 nt, Human herpesvirus 6B
aacagauggcacugaau

SEQ ID NO: 337374 - RNA, 21 nt, Human herpesvirus 6B
aacagauuuugaggaucacua

SEQ ID NO: 337375 - RNA, 16 nt, Human herpesvirus 6B
aacagcuuuauuccca

SEQ ID NO: 337376 - RNA, 12 nt, Human herpesvirus 6B
aacagugacagu

SEQ ID NO: 337377 - RNA, 24 nt, Human herpesvirus 6B
aacaguuuaccuaucaacaauguc

SEQ ID NO: 337378 - RNA, 16 nt, Human herpesvirus 6B
aacauaucacuuguau

SEQ ID NO: 337379 - RNA, 23 nt, Human herpesvirus 6B
aacaucuuaacagacuacuuuua

SEQ ID NO: 337380 - RNA, 11 nt, Human herpesvirus 6B
aacaugacugg

SEQ ID NO: 337381 - RNA, 17 nt, Human herpesvirus 6B
aacauggacaacuuauc

SEQ ID NO: 337382 - RNA, 22 nt, Human herpesvirus 6B
aacauuauaccuauuagcuaua

SEQ ID NO: 337383 - RNA, 17 nt, Human herpesvirus 6B
aacauucccacuuucgu

SEQ ID NO: 337384 - RNA, 17 nt, Human herpesvirus 6B
aacauucuuaaauucaa

SEQ ID NO: 337385 - RNA, 14 nt, Human herpesvirus 6B
aaccaaaaugacuc

SEQ ID NO: 337386 - RNA, 16 nt, Human herpesvirus 6B
aaccaaucuaagauag

SEQ ID NO: 337387 - RNA, 22 nt, Human herpesvirus 6B
aaccaguauuaaugucuucgaa

SEQ ID NO: 337388 - RNA, 17 nt, Human herpesvirus 6B
aaccaucuuuucaauua

SEQ ID NO: 337389 - RNA, 24 nt, Human herpesvirus 6B
aaccauggcccuacuacaguggau

SEQ ID NO: 337390 - RNA, 21 nt, Human herpesvirus 6B
auagacauuuugugauuccuu

SEQ ID NO: 337391 - RNA, 19 nt, Human herpesvirus 6B
auagacgacgcagauuuac

SEQ ID NO: 337392 - RNA, 15 nt, Human herpesvirus 6B
auagaguucaucuaa

SEQ ID NO: 337393 - RNA, 20 nt, Human herpesvirus 6B
auagauggguaagugccuau

SEQ ID NO: 337394 - RNA, 19 nt, Human herpesvirus 6B
auagauuagaaauuacaua

SEQ ID NO: 337395 - RNA, 22 nt, Human herpesvirus 6B
auagauuauacgaaauuccgaa

SEQ ID NO: 337396 - RNA, 20 nt, Human herpesvirus 6B
auagauuuguccguauacag

SEQ ID NO: 337397 - RNA, 21 nt, Human herpesvirus 6B
auagcauucuguucuucauca

SEQ ID NO: 337398 - RNA, 20 nt, Human herpesvirus 6B
auaggaaucuuguguucuaa

SEQ ID NO: 337399 - RNA, 13 nt, Human herpesvirus 6B
auaggcgucucau

SEQ ID NO: 337400 - RNA, 15 nt, Human herpesvirus 6B
auagguaaacuguuc

SEQ ID NO: 337401 - RNA, 18 nt, Human herpesvirus 6B
auagguguuugcagauaa

SEQ ID NO: 337402 - RNA, 16 nt, Human herpesvirus 6B
auagucaauggugugu

SEQ ID NO: 337403 - RNA, 14 nt, Human herpesvirus 6B
auauaacaguagga

SEQ ID NO: 337404 - RNA, 22 nt, Human herpesvirus 6B
auauaauguguuggucauuuca

SEQ ID NO: 337405 - RNA, 14 nt, Human herpesvirus 6B
auauacuuacuuga

SEQ ID NO: 337406 - RNA, 14 nt, Human herpesvirus 6B
auauauugcgauuc

SEQ ID NO: 337407 - RNA, 16 nt, Human herpesvirus 6B
auaucacagcauuucc

SEQ ID NO: 337408 - RNA, 17 nt, Human herpesvirus 6B
auaucacccccauacac

SEQ ID NO: 337409 - RNA, 15 nt, Human herpesvirus 6B
auaucagcacccucu

SEQ ID NO: 337410 - RNA, 22 nt, Human herpesvirus 6B
auaucagcacccucugcaagcu

SEQ ID NO: 337411 - RNA, 13 nt, Human herpesvirus 6B
auaucaugaagaa

SEQ ID NO: 337412 - RNA, 17 nt, Human herpesvirus 6B
auaucgcgcagaccaua

SEQ ID NO: 337413 - RNA, 21 nt, Human herpesvirus 6B
auaucugaaaucgcauuucuc

SEQ ID NO: 337414 - RNA, 23 nt, Human herpesvirus 6B
auaucugcauacagaaauuggag

SEQ ID NO: 337415 - RNA, 15 nt, Human herpesvirus 6B
auaugaaugaucacu

SEQ ID NO: 337416 - RNA, 13 nt, Human herpesvirus 6B
auaugauggacaa

SEQ ID NO: 337417 - RNA, 14 nt, Human herpesvirus 6B
auaugcaggugcug

SEQ ID NO: 337418 - RNA, 18 nt, Human herpesvirus 6B
auaugcaggugcugcuaa

SEQ ID NO: 337419 - RNA, 21 nt, Human herpesvirus 6B
auaugcaggugcugcuaaaag

SEQ ID NO: 337420 - RNA, 12 nt, Human herpesvirus 6B
auaugcaucucu

SEQ ID NO: 337421 - RNA, 20 nt, Human herpesvirus 6B
auaugcugccauuauugaua

SEQ ID NO: 337422 - RNA, 20 nt, Human herpesvirus 6B
auauggcaaauuucaaaaag

SEQ ID NO: 337423 - RNA, 17 nt, Human herpesvirus 6B
auauguccgaucugugc

SEQ ID NO: 337424 - RNA, 16 nt, Human herpesvirus 6B
auauuaauuacauaua

SEQ ID NO: 337425 - RNA, 18 nt, Human herpesvirus 6B
auauuaauuacauauagu

SEQ ID NO: 337426 - RNA, 13 nt, Human herpesvirus 6B
auauuaucuuuca

SEQ ID NO: 337427 - RNA, 14 nt, Human herpesvirus 6B
auauuaucuuucau

SEQ ID NO: 337428 - RNA, 17 nt, Human herpesvirus 6B
auauuauuaacaaugaa

SEQ ID NO: 337429 - RNA, 14 nt, Human herpesvirus 6B
auauucuacuucau

SEQ ID NO: 337430 - RNA, 14 nt, Human herpesvirus 6B
auauugcaugcauu

SEQ ID NO: 337431 - RNA, 16 nt, Human herpesvirus 6B
auauugcaugcauugc

SEQ ID NO: 337432 - RNA, 19 nt, Human herpesvirus 6B
auauuucauuguuucacuu

SEQ ID NO: 337433 - RNA, 19 nt, Human herpesvirus 6B
auauuucguguucgccaua

SEQ ID NO: 337434 - RNA, 17 nt, Human herpesvirus 6B
auauuuggauggccgau

SEQ ID NO: 337435 - RNA, 17 nt, Human herpesvirus 6B
auauuuguuucgucaga

SEQ ID NO: 337436 - RNA, 18 nt, Human herpesvirus 6B
auauuuugaaaagguguu

SEQ ID NO: 337437 - RNA, 18 nt, Human herpesvirus 6B
aucaaagagguacucauc

SEQ ID NO: 337438 - RNA, 14 nt, Human herpesvirus 6B
aucaaauaccuaau

SEQ ID NO: 337439 - RNA, 18 nt, Human herpesvirus 6B
aucaaauaccuaauucca

SEQ ID NO: 337440 - RNA, 21 nt, Human herpesvirus 6B
aucaacaauguccaauuacuc

SEQ ID NO: 337441 - RNA, 22 nt, Human herpesvirus 6B
aucaacacugccuuaauguaug

SEQ ID NO: 337442 - RNA, 22 nt, Human herpesvirus 6B
aucaacuauuuaacauccaaaa

SEQ ID NO: 337443 - RNA, 17 nt, Human herpesvirus 6B
aucaaugucacaaaucu

SEQ ID NO: 337444 - RNA, 16 nt, Human herpesvirus 6B
aucacaaaacuguacc

SEQ ID NO: 337445 - RNA, 20 nt, Human herpesvirus 6B
aucacaaaacuguaccugaa

SEQ ID NO: 337446 - RNA, 15 nt, Human herpesvirus 6B
aucacaaacugucac

SEQ ID NO: 337447 - RNA, 13 nt, Human herpesvirus 6B
aucacaacauaaa

SEQ ID NO: 337448 - RNA, 21 nt, Human herpesvirus 6B
aucacagagaaaaaacaaagc

SEQ ID NO: 337449 - RNA, 12 nt, Human herpesvirus 6B
aucacagcauuu

SEQ ID NO: 337450 - RNA, 13 nt, Human herpesvirus 6B
aucacagcauuuc

SEQ ID NO: 337451 - RNA, 14 nt, Human herpesvirus 6B
aucacagcauuucc

SEQ ID NO: 337452 - RNA, 14 nt, Human herpesvirus 6B
aucaccaucaacac

SEQ ID NO: 337453 - RNA, 16 nt, Human herpesvirus 6B
aucacgcauagaccaa

SEQ ID NO: 337454 - RNA, 14 nt, Human herpesvirus 6B
aucacuaacuucaa

SEQ ID NO: 337455 - RNA, 21 nt, Human herpesvirus 6B
aucacuaagcgacuuuuuaac

SEQ ID NO: 337456 - RNA, 20 nt, Human herpesvirus 6B
aucagacagguaagcagcaa

SEQ ID NO: 337457 - RNA, 17 nt, Human herpesvirus 6B
aucauacaauauuucca

SEQ ID NO: 337458 - RNA, 13 nt, Human herpesvirus 6B
aucauacgaggau

SEQ ID NO: 337459 - RNA, 20 nt, Human herpesvirus 6B
aucauauccugaaaauaaac

SEQ ID NO: 337460 - RNA, 14 nt, Human herpesvirus 6B
aucaucacaugcca

SEQ ID NO: 337461 - RNA, 15 nt, Human herpesvirus 6B
aucaugauugcaaca

SEQ ID NO: 337462 - RNA, 16 nt, Human herpesvirus 6B
aucaugauugcaacaa

SEQ ID NO: 337463 - RNA, 21 nt, Human herpesvirus 6B
aucaugcccuaaugugauuau

SEQ ID NO: 337464 - RNA, 15 nt, Human herpesvirus 6B
aucaugugugccuac

SEQ ID NO: 337465 - RNA, 19 nt, Human herpesvirus 6B
aucaugugugccuacuuug

SEQ ID NO: 337466 - RNA, 20 nt, Human herpesvirus 6B
aucaugugugccuacuuugg

SEQ ID NO: 337467 - RNA, 22 nt, Human herpesvirus 6B
aucauuaggaucgaacucuucg

SEQ ID NO: 337468 - RNA, 18 nt, Human herpesvirus 6B
aucauucgauuaaugcca

SEQ ID NO: 337469 - RNA, 20 nt, Human herpesvirus 6B
aucauucgauuaaugccaca

SEQ ID NO: 337470 - RNA, 15 nt, Human herpesvirus 6B
auccaaaauacacua

SEQ ID NO: 337471 - RNA, 16 nt, Human herpesvirus 6B
auccaaucaacgugac

SEQ ID NO: 337472 - RNA, 12 nt, Human herpesvirus 6B
auccacccauau

SEQ ID NO: 337473 - RNA, 21 nt, Human herpesvirus 6B
auccagaaaagcaaacaugca

SEQ ID NO: 337474 - RNA, 13 nt, Human herpesvirus 6B
aucccagcucacc

SEQ ID NO: 337475 - RNA, 22 nt, Human herpesvirus 6B
aucccauauuguccagcacuuu

SEQ ID NO: 337476 - RNA, 16 nt, Human herpesvirus 6B
aucccuuaaaaaaaca

SEQ ID NO: 337477 - RNA, 14 nt, Human herpesvirus 6B
auccgagacuccua

SEQ ID NO: 337478 - RNA, 20 nt, Human herpesvirus 6B
auccgcaguuagugcaccga

SEQ ID NO: 337479 - RNA, 15 nt, Human herpesvirus 6B
auccguugagugugc

SEQ ID NO: 337480 - RNA, 14 nt, Human herpesvirus 6B
auccuauaaauacu

SEQ ID NO: 337481 - RNA, 16 nt, Human herpesvirus 6B
auccucagucuucaau

SEQ ID NO: 337482 - RNA, 19 nt, Human herpesvirus 6B
auccucagucuucaauaaa

SEQ ID NO: 337483 - RNA, 22 nt, Human herpesvirus 6B
auccuguaauaguauugucuga

SEQ ID NO: 337484 - RNA, 19 nt, Human herpesvirus 6B
auccuguuuucccaccuaa

SEQ ID NO: 337485 - RNA, 17 nt, Human herpesvirus 6B
auccuuaaaugacacag

SEQ ID NO: 337486 - RNA, 18 nt, Human herpesvirus 6B
auccuuaaaugacacaga

SEQ ID NO: 337487 - RNA, 18 nt, Human herpesvirus 6B
aucgaacucuucgaucca

SEQ ID NO: 337488 - RNA, 21 nt, Human herpesvirus 6B
aucgaacucuucgauccaaua

SEQ ID NO: 337489 - RNA, 12 nt, Human herpesvirus 6B
aucgauccaaaa

SEQ ID NO: 337490 - RNA, 15 nt, Human herpesvirus 6B
aucgcaaaagaacac

SEQ ID NO: 337491 - RNA, 21 nt, Human herpesvirus 6B
aucgcauuucucuacaugcca

SEQ ID NO: 337492 - RNA, 22 nt, Human herpesvirus 6B
aucgcauuucucuacaugccac

SEQ ID NO: 337493 - RNA, 23 nt, Human herpesvirus 6B
aucgcauuucucuacaugccaca

SEQ ID NO: 337494 - RNA, 16 nt, Human herpesvirus 6B
aucgcgcagaccauaa

SEQ ID NO: 337495 - RNA, 13 nt, Human herpesvirus 6B
aucgcuccauaau

SEQ ID NO: 337496 - RNA, 15 nt, Human herpesvirus 6B
aucgguugacucuac

SEQ ID NO: 337497 - RNA, 19 nt, Human herpesvirus 6B
aucguccaacccuauaaaa

SEQ ID NO: 337498 - RNA, 16 nt, Human herpesvirus 6B
aucgucuaugacaauu

SEQ ID NO: 337499 - RNA, 17 nt, Human herpesvirus 6B
aucguucuuaacauauu

SEQ ID NO: 337500 - RNA, 18 nt, Human herpesvirus 6B
aucguucuuaacauauuc

SEQ ID NO: 337501 - RNA, 19 nt, Human herpesvirus 6B
aucuaagauaguuuugcau

SEQ ID NO: 337502 - RNA, 16 nt, Human herpesvirus 6B
aucuacccaccugucc

SEQ ID NO: 337503 - RNA, 12 nt, Human herpesvirus 6B
aucuaugggagu

SEQ ID NO: 337504 - RNA, 17 nt, Human herpesvirus 6B
aucucaaaaaacauaua

SEQ ID NO: 337505 - RNA, 12 nt, Human herpesvirus 6B
aucucacgucac

SEQ ID NO: 337506 - RNA, 22 nt, Human herpesvirus 6B
aucuccaaaagcgccugccuac

SEQ ID NO: 337507 - RNA, 20 nt, Human herpesvirus 6B
aucucgcucagcguggaauu

SEQ ID NO: 337508 - RNA, 17 nt, Human herpesvirus 6B
aucucuguguguguugu

SEQ ID NO: 337509 - RNA, 23 nt, Human herpesvirus 6B
aucucuguuuugagagcuacaca

SEQ ID NO: 337510 - RNA, 18 nt, Human herpesvirus 6B
aucugaaaucgcauuucu

SEQ ID NO: 337511 - RNA, 20 nt, Human herpesvirus 6B
aucugacaaccuugacagau

SEQ ID NO: 337512 - RNA, 21 nt, Human herpesvirus 6B
aucugacaaccuugacagaua

SEQ ID NO: 337513 - RNA, 14 nt, Human herpesvirus 6B
aucugagacaguca

SEQ ID NO: 337514 - RNA, 16 nt, Human herpesvirus 6B
aucugagacagucaau

SEQ ID NO: 337515 - RNA, 18 nt, Human herpesvirus 6B
aucugauucgacaaauca

SEQ ID NO: 337516 - RNA, 21 nt, Human herpesvirus 6B
aucuggaugguugugugaguu

SEQ ID NO: 337517 - RNA, 15 nt, Human herpesvirus 6B
aucugugcaacacaa

SEQ ID NO: 337518 - RNA, 12 nt, Human herpesvirus 6B
aucuuacugaac

SEQ ID NO: 337519 - RNA, 13 nt, Human herpesvirus 6B
aucuuauguauau

SEQ ID NO: 337520 - RNA, 16 nt, Human herpesvirus 6B
aucuugaaaucuacca

SEQ ID NO: 337521 - RNA, 14 nt, Human herpesvirus 6B
aucuuguagcucag

SEQ ID NO: 337522 - RNA, 18 nt, Human herpesvirus 6B
augaaaaaaaaucaacac

SEQ ID NO: 337523 - RNA, 17 nt, Human herpesvirus 6B
augaaacgaaugccgac

SEQ ID NO: 337524 - RNA, 18 nt, Human herpesvirus 6B
augaacaggugcuucuuu

SEQ ID NO: 337525 - RNA, 14 nt, Human herpesvirus 6B
augaacgcacuaga

SEQ ID NO: 337526 - RNA, 21 nt, Human herpesvirus 6B
augaacgcacuagacaucaac

SEQ ID NO: 337527 - RNA, 22 nt, Human herpesvirus 6B
augaacuggcgcgcauguugca

SEQ ID NO: 337528 - RNA, 13 nt, Human herpesvirus 6B
augaaugaucacu

SEQ ID NO: 337529 - RNA, 15 nt, Human herpesvirus 6B
augaauguaacuggu

SEQ ID NO: 337530 - RNA, 13 nt, Human herpesvirus 6B
augaauguguuca

SEQ ID NO: 337531 - RNA, 16 nt, Human herpesvirus 6B
augaauguguucauag

SEQ ID NO: 337532 - RNA, 20 nt, Human herpesvirus 6B
augaauucaagacgaucuca

SEQ ID NO: 337533 - RNA, 22 nt, Human herpesvirus 6B
augaauucaagacgaucucaua

SEQ ID NO: 337534 - RNA, 20 nt, Human herpesvirus 6B
augacuuacggccaugauuu

SEQ ID NO: 337535 - RNA, 13 nt, Human herpesvirus 6B
augagaaaugacu

SEQ ID NO: 337536 - RNA, 23 nt, Human herpesvirus 6B
augagaacuucaaaaucugcuaa

SEQ ID NO: 337537 - RNA, 18 nt, Human herpesvirus 6B
augagaauuaugacugac

SEQ ID NO: 337538 - RNA, 14 nt, Human herpesvirus 6B
augagacuguuuau

SEQ ID NO: 337539 - RNA, 21 nt, Human herpesvirus 6B
augagccgccaccucuucucc

SEQ ID NO: 337540 - RNA, 19 nt, Human herpesvirus 6B
augaggaagucugaauuua

SEQ ID NO: 337541 - RNA, 14 nt, Human herpesvirus 6B
augaguuuuuugca

SEQ ID NO: 337542 - RNA, 16 nt, Human herpesvirus 6B
augauacuacguguaa

SEQ ID NO: 337543 - RNA, 14 nt, Human herpesvirus 6B
augaucaauacuuu

SEQ ID NO: 337544 - RNA, 16 nt, Human herpesvirus 6B
augaucagcauucacu

SEQ ID NO: 337545 - RNA, 17 nt, Human herpesvirus 6B
augaucagcauucacuc

SEQ ID NO: 337546 - RNA, 15 nt, Human herpesvirus 6B
augaucggcauuugu

SEQ ID NO: 337547 - RNA, 15 nt, Human herpesvirus 6B
augaucgucauaaac

SEQ ID NO: 337548 - RNA, 18 nt, Human herpesvirus 6B
augaucgucauaaacaaa

SEQ ID NO: 337549 - RNA, 14 nt, Human herpesvirus 6B
augauggacgucau

SEQ ID NO: 337550 - RNA, 16 nt, Human herpesvirus 6B
augauggugucuuuau

SEQ ID NO: 337551 - RNA, 22 nt, Human herpesvirus 6B
augcaacauucugcguguuaau

SEQ ID NO: 337552 - RNA, 16 nt, Human herpesvirus 6B
augcaaccgaugacaa

SEQ ID NO: 337553 - RNA, 15 nt, Human herpesvirus 6B
augcaauaggccaua

SEQ ID NO: 337554 - RNA, 23 nt, Human herpesvirus 6B
augcacuccguuaaucuaauaaa

SEQ ID NO: 337555 - RNA, 15 nt, Human herpesvirus 6B
augcagaugccugua

SEQ ID NO: 337556 - RNA, 22 nt, Human herpesvirus 6B
augcagcguuggaaagcuuuau

SEQ ID NO: 337557 - RNA, 21 nt, Human herpesvirus 6B
augcauguggcaagugcuggu

SEQ ID NO: 337558 - RNA, 17 nt, Human herpesvirus 6B
augcauugcgagauggu

SEQ ID NO: 337559 - RNA, 20 nt, Human herpesvirus 6B
augccacagaacaccugcuu

SEQ ID NO: 337560 - RNA, 16 nt, Human herpesvirus 6B
augccauaaagaacac

SEQ ID NO: 337561 - RNA, 14 nt, Human herpesvirus 6B
augccauaaucucu

SEQ ID NO: 337562 - RNA, 20 nt, Human herpesvirus 6B
augccaugcaauaggccaua

SEQ ID NO: 337563 - RNA, 16 nt, Human herpesvirus 6B
augccauugaauacac

SEQ ID NO: 337564 - RNA, 23 nt, Human herpesvirus 6B
augcccacaccaucuucagcuca

SEQ ID NO: 337565 - RNA, 14 nt, Human herpesvirus 6B
augccgacuguuuc

SEQ ID NO: 337566 - RNA, 16 nt, Human herpesvirus 6B
augccgugaacugugu

SEQ ID NO: 337567 - RNA, 16 nt, Human herpesvirus 6B
augccuguagggaugu

SEQ ID NO: 337568 - RNA, 12 nt, Human herpesvirus 6B
augccuugaugu

SEQ ID NO: 337569 - RNA, 18 nt, Human herpesvirus 6B
augccuugauguuuccug

SEQ ID NO: 337570 - RNA, 12 nt, Human herpesvirus 6B
augcgaauguua

SEQ ID NO: 337571 - RNA, 23 nt, Human herpesvirus 6B
augcgguuaugugcuaucugugu

SEQ ID NO: 337572 - RNA, 15 nt, Human herpesvirus 6B
augcguuugccauau

SEQ ID NO: 337573 - RNA, 15 nt, Human herpesvirus 6B
augcuagauaacuca

SEQ ID NO: 337574 - RNA, 16 nt, Human herpesvirus 6B
augcucagauguggaa

SEQ ID NO: 337575 - RNA, 14 nt, Human herpesvirus 6B
augcugacuuugac

SEQ ID NO: 337576 - RNA, 16 nt, Human herpesvirus 6B
augcugccauuauuga

SEQ ID NO: 337577 - RNA, 21 nt, Human herpesvirus 6B
augcuguugcuguuguuguag

SEQ ID NO: 337578 - RNA, 13 nt, Human herpesvirus 6B
augcuuaacuuac

SEQ ID NO: 337579 - RNA, 23 nt, Human herpesvirus 6B
augcuuaccgccuccgcagucau

SEQ ID NO: 337580 - RNA, 22 nt, Human herpesvirus 6B
augcuuugcuguuuacgaauga

SEQ ID NO: 337581 - RNA, 15 nt, Human herpesvirus 6B
auggacgucauguac

SEQ ID NO: 337582 - RNA, 15 nt, Human herpesvirus 6B
auggauguguggaag

SEQ ID NO: 337583 - RNA, 14 nt, Human herpesvirus 6B
auggcaacauaccc

SEQ ID NO: 337584 - RNA, 14 nt, Human herpesvirus 6B
auggcacucugaag

SEQ ID NO: 337585 - RNA, 20 nt, Human herpesvirus 6B
auggcgacgaccgauaaauu

SEQ ID NO: 337586 - RNA, 12 nt, Human herpesvirus 6B
auggcgacucaa

SEQ ID NO: 337587 - RNA, 13 nt, Human herpesvirus 6B
auggcgcacgcua

SEQ ID NO: 337588 - RNA, 19 nt, Human herpesvirus 6B
augggaguaauuauuguga

SEQ ID NO: 337589 - RNA, 17 nt, Human herpesvirus 6B
augggcaagcagccaau

SEQ ID NO: 337590 - RNA, 19 nt, Human herpesvirus 6B
auggggaagaucuaugaga

SEQ ID NO: 337591 - RNA, 17 nt, Human herpesvirus 6B
auggguuugucuucaag

SEQ ID NO: 337592 - RNA, 17 nt, Human herpesvirus 6B
augguuccgggauguag

SEQ ID NO: 337593 - RNA, 15 nt, Human herpesvirus 6B
auguacgaugaacua

SEQ ID NO: 337594 - RNA, 15 nt, Human herpesvirus 6B
auguacugaucucuu

SEQ ID NO: 337595 - RNA, 20 nt, Human herpesvirus 6B
auguaugaacaggugcuucu

SEQ ID NO: 337596 - RNA, 14 nt, Human herpesvirus 6B
augucaaugugaau

SEQ ID NO: 337597 - RNA, 18 nt, Human herpesvirus 6B
augucaaugugaauauua

SEQ ID NO: 337598 - RNA, 15 nt, Human herpesvirus 6B
auguccaauuacuca

SEQ ID NO: 337599 - RNA, 19 nt, Human herpesvirus 6B
auguccaggaauucacuuu

SEQ ID NO: 337600 - RNA, 22 nt, Human herpesvirus 6B
augucgaauuuucgucugauac

SEQ ID NO: 337601 - RNA, 16 nt, Human herpesvirus 6B
augugauuaugccaaa

SEQ ID NO: 337602 - RNA, 23 nt, Human herpesvirus 6B
augugauucggaaaauaauugca

SEQ ID NO: 337603 - RNA, 21 nt, Human herpesvirus 6B
auguggaacggaaacaugaac

SEQ ID NO: 337604 - RNA, 12 nt, Human herpesvirus 6B
augugucuuagu

SEQ ID NO: 337605 - RNA, 12 nt, Human herpesvirus 6B
augugugccuac

SEQ ID NO: 337606 - RNA, 21 nt, Human herpesvirus 6B
augugugccuacuuuggauuu

SEQ ID NO: 337607 - RNA, 15 nt, Human herpesvirus 6B
auguuaacauuguga

SEQ ID NO: 337608 - RNA, 16 nt, Human herpesvirus 6B
auguuaacauugugag

SEQ ID NO: 337609 - RNA, 17 nt, Human herpesvirus 6B
auguuaacucagguggu

SEQ ID NO: 337610 - RNA, 12 nt, Human herpesvirus 6B
auguuacagaua

SEQ ID NO: 337611 - RNA, 17 nt, Human herpesvirus 6B
auguuaguauacagaau

SEQ ID NO: 337612 - RNA, 12 nt, Human herpesvirus 6B
auguucagccuu

SEQ ID NO: 337613 - RNA, 22 nt, Human herpesvirus 6B
auguucucucacgcgccaacgc

SEQ ID NO: 337614 - RNA, 16 nt, Human herpesvirus 6B
auguucuugacaaaua

SEQ ID NO: 337615 - RNA, 17 nt, Human herpesvirus 6B
auguugcuuauaagcaa

SEQ ID NO: 337616 - RNA, 21 nt, Human herpesvirus 6B
auguugguaaacuuaccauau

SEQ ID NO: 337617 - RNA, 15 nt, Human herpesvirus 6B
auguuguuguguuga

SEQ ID NO: 337618 - RNA, 13 nt, Human herpesvirus 6B
auguuuacugcau

SEQ ID NO: 337619 - RNA, 17 nt, Human herpesvirus 6B
auguuuacugcaugcua

SEQ ID NO: 337620 - RNA, 21 nt, Human herpesvirus 6B
auguuuccaugacugugaggu

SEQ ID NO: 337621 - RNA, 16 nt, Human herpesvirus 6B
auuucucuacaugcca

SEQ ID NO: 337622 - RNA, 19 nt, Human herpesvirus 6B
auuucucuacaugccacag

SEQ ID NO: 337623 - RNA, 18 nt, Human herpesvirus 6B
auuucuuuuuaaaaucaa

SEQ ID NO: 337624 - RNA, 16 nt, Human herpesvirus 6B
auuugaauucugcucg

SEQ ID NO: 337625 - RNA, 16 nt, Human herpesvirus 6B
auuuggguugugcugu

SEQ ID NO: 337626 - RNA, 18 nt, Human herpesvirus 6B
auuugucgaaucagauca

SEQ ID NO: 337627 - RNA, 13 nt, Human herpesvirus 6B
auuugugauuaua

SEQ ID NO: 337628 - RNA, 21 nt, Human herpesvirus 6B
auuuuaacauuuuuauuccaa

SEQ ID NO: 337629 - RNA, 19 nt, Human herpesvirus 6B
auuuuagaggagaaaugau

SEQ ID NO: 337630 - RNA, 23 nt, Human herpesvirus 6B
auuuuagaggagaaaugaucaau

SEQ ID NO: 337631 - RNA, 15 nt, Human herpesvirus 6B
auuuuagcuauccau

SEQ ID NO: 337632 - RNA, 20 nt, Human herpesvirus 6B
auuuuagcuauccauuuuau

SEQ ID NO: 337633 - RNA, 15 nt, Human herpesvirus 6B
auuuuaguuacacau

SEQ ID NO: 337634 - RNA, 19 nt, Human herpesvirus 6B
auuuuauucaaccaaucua

SEQ ID NO: 337635 - RNA, 17 nt, Human herpesvirus 6B
auuuucguugaagaaua

SEQ ID NO: 337636 - RNA, 18 nt, Human herpesvirus 6B
auuuugaaaagguguugu

SEQ ID NO: 337637 - RNA, 19 nt, Human herpesvirus 6B
auuuugaaaagguguugug

SEQ ID NO: 337638 - RNA, 22 nt, Human herpesvirus 6B
auuuugaaagaacaguuuaccu

SEQ ID NO: 337639 - RNA, 20 nt, Human herpesvirus 6B
auuuugggugugacuuauau

SEQ ID NO: 337640 - RNA, 15 nt, Human herpesvirus 6B
auuuuguguccuuaa

SEQ ID NO: 337641 - RNA, 13 nt, Human herpesvirus 6B
auuuuugacaaaa

SEQ ID NO: 337642 - RNA, 23 nt, Human herpesvirus 6B
caaaaaaaaaaaacauacuuccu

SEQ ID NO: 337643 - RNA, 12 nt, Human herpesvirus 6B
caaaaaaagagg

SEQ ID NO: 337644 - RNA, 18 nt, Human herpesvirus 6B
caaaaaacucagccgaua

SEQ ID NO: 337645 - RNA, 16 nt, Human herpesvirus 6B
caaaaacgaccugauc

SEQ ID NO: 337646 - RNA, 20 nt, Human herpesvirus 6B
caaaaauccaggaguaauga

SEQ ID NO: 337647 - RNA, 19 nt, Human herpesvirus 6B
caaaacgagagucuacaca

SEQ ID NO: 337648 - RNA, 15 nt, Human herpesvirus 6B
caaaacucuauuccc

SEQ ID NO: 337649 - RNA, 12 nt, Human herpesvirus 6B
caaaacuguuaa

SEQ ID NO: 337650 - RNA, 18 nt, Human herpesvirus 6B
caaaacuguuaaaagaga

SEQ ID NO: 337651 - RNA, 23 nt, Human herpesvirus 6B
caaaagacuauguaguacacaga

SEQ ID NO: 337652 - RNA, 13 nt, Human herpesvirus 6B
caaaagcaugaaa

SEQ ID NO: 337653 - RNA, 14 nt, Human herpesvirus 6B
caaaagcaugaaau

SEQ ID NO: 337654 - RNA, 10 nt, Human herpesvirus 6B
caaaagccag

SEQ ID NO: 337655 - RNA, 17 nt, Human herpesvirus 6B
caaaaugaccagagauu

SEQ ID NO: 337656 - RNA, 21 nt, Human herpesvirus 6B
caaaaugaccagagauucuau

SEQ ID NO: 337657 - RNA, 19 nt, Human herpesvirus 6B
caaaaugauugcaaccaau

SEQ ID NO: 337658 - RNA, 20 nt, Human herpesvirus 6B
caaaauuuuucgugccucua

SEQ ID NO: 337659 - RNA, 19 nt, Human herpesvirus 6B
caaacagcuuuauucccau

SEQ ID NO: 337660 - RNA, 21 nt, Human herpesvirus 6B
caaacauccuaauaagacaga

SEQ ID NO: 337661 - RNA, 11 nt, Human herpesvirus 6B
caaacauguau

SEQ ID NO: 337662 - RNA, 15 nt, Human herpesvirus 6B
caaacauguauccuc

SEQ ID NO: 337663 - RNA, 13 nt, Human herpesvirus 6B
caaacaugugauu

SEQ ID NO: 337664 - RNA, 18 nt, Human herpesvirus 6B
caaaccaauuugucgcac

SEQ ID NO: 337665 - RNA, 17 nt, Human herpesvirus 6B
caaaccuucccuaucac

SEQ ID NO: 337666 - RNA, 21 nt, Human herpesvirus 6B
caaaccuucccuaucacaaua

SEQ ID NO: 337667 - RNA, 22 nt, Human herpesvirus 6B
caaacgugagcggcgcauaaua

SEQ ID NO: 337668 - RNA, 16 nt, Human herpesvirus 6B
caaacuacugaucgcc

SEQ ID NO: 337669 - RNA, 17 nt, Human herpesvirus 6B
caaacuuuuuuugaagg

SEQ ID NO: 337670 - RNA, 15 nt, Human herpesvirus 6B
caaagaaacaguaaa

SEQ ID NO: 337671 - RNA, 16 nt, Human herpesvirus 6B
caaagaaacaguaaau

SEQ ID NO: 337672 - RNA, 15 nt, Human herpesvirus 6B
caaagaaaguuucgu

SEQ ID NO: 337673 - RNA, 21 nt, Human herpesvirus 6B
caaagaaaguuucguacugga

SEQ ID NO: 337674 - RNA, 19 nt, Human herpesvirus 6B
caaagacaucgauuuguug

SEQ ID NO: 337675 - RNA, 17 nt, Human herpesvirus 6B
caaagagaucaguacau

SEQ ID NO: 337676 - RNA, 18 nt, Human herpesvirus 6B
caaagauagacagugaaa

SEQ ID NO: 337677 - RNA, 19 nt, Human herpesvirus 6B
caaagaugucggaggguuu

SEQ ID NO: 337678 - RNA, 21 nt, Human herpesvirus 6B
caaagcacccugcacaaacua

SEQ ID NO: 337679 - RNA, 19 nt, Human herpesvirus 6B
caaaggaauuuauuuucaa

SEQ ID NO: 337680 - RNA, 21 nt, Human herpesvirus 6B
caaaggaauuuauuuucaaua

SEQ ID NO: 337681 - RNA, 17 nt, Human herpesvirus 6B
caaaguuuaaguucuca

SEQ ID NO: 337682 - RNA, 20 nt, Human herpesvirus 6B
caaauacgagagcugacuga

SEQ ID NO: 337683 - RNA, 23 nt, Human herpesvirus 6B
caaauacuauuuuaguuacacau

SEQ ID NO: 337684 - RNA, 13 nt, Human herpesvirus 6B
caaaucuccaaaa

SEQ ID NO: 337685 - RNA, 16 nt, Human herpesvirus 6B
caaauguaacucuuuc

SEQ ID NO: 337686 - RNA, 21 nt, Human herpesvirus 6B
caaauguaacucuuucuauua

SEQ ID NO: 337687 - RNA, 12 nt, Human herpesvirus 6B
caacauacacac

SEQ ID NO: 337688 - RNA, 13 nt, Human herpesvirus 6B
caacauccuauua

SEQ ID NO: 337689 - RNA, 18 nt, Human herpesvirus 6B
caacauuaaaaaaauagc

SEQ ID NO: 337690 - RNA, 16 nt, Human herpesvirus 6B
caaccccccacuacua

SEQ ID NO: 337691 - RNA, 14 nt, Human herpesvirus 6B
caaccgcaguuccu

SEQ ID NO: 337692 - RNA, 15 nt, Human herpesvirus 6B
caaccgcaguuccug

SEQ ID NO: 337693 - RNA, 14 nt, Human herpesvirus 6B
caaccgcaguuucu

SEQ ID NO: 337694 - RNA, 13 nt, Human herpesvirus 6B
caacgaaaaagcu

SEQ ID NO: 337695 - RNA, 18 nt, Human herpesvirus 6B
caacgaggcccacuucac

SEQ ID NO: 337696 - RNA, 17 nt, Human herpesvirus 6B
caacggaaagcaucuca

SEQ ID NO: 337697 - RNA, 16 nt, Human herpesvirus 6B
caacuaguuuugagaa

SEQ ID NO: 337698 - RNA, 15 nt, Human herpesvirus 6B
caacuauacuuaacu

SEQ ID NO: 337699 - RNA, 18 nt, Human herpesvirus 6B
caacuauuuaacauccaa

SEQ ID NO: 337700 - RNA, 23 nt, Human herpesvirus 6B
caacucacccgacaugcuucaca

SEQ ID NO: 337701 - RNA, 21 nt, Human herpesvirus 6B
caacuuaauaaaugcuaccca

SEQ ID NO: 337702 - RNA, 18 nt, Human herpesvirus 6B
caagaaaaaacacaaaaa

SEQ ID NO: 337703 - RNA, 19 nt, Human herpesvirus 6B
caagaaaacgagagaguuc

SEQ ID NO: 337704 - RNA, 17 nt, Human herpesvirus 6B
caagaaaaucgcaaaag

SEQ ID NO: 337705 - RNA, 15 nt, Human herpesvirus 6B
caagaaagguauuga

SEQ ID NO: 337706 - RNA, 14 nt, Human herpesvirus 6B
caagaaaucacguu

SEQ ID NO: 337707 - RNA, 18 nt, Human herpesvirus 6B
caagaaucguuaaaugag

SEQ ID NO: 337708 - RNA, 14 nt, Human herpesvirus 6B
caagaauguaaaag

SEQ ID NO: 337709 - RNA, 14 nt, Human herpesvirus 6B
caagacgaucucau

SEQ ID NO: 337710 - RNA, 16 nt, Human herpesvirus 6B
caagacuuaauaucug

SEQ ID NO: 337711 - RNA, 13 nt, Human herpesvirus 6B
caagauacugguu

SEQ ID NO: 337712 - RNA, 22 nt, Human herpesvirus 6B
caagcuagcagaagaacagcua

SEQ ID NO: 337713 - RNA, 17 nt, Human herpesvirus 6B
caagcuagugaaucaaa

SEQ ID NO: 337714 - RNA, 14 nt, Human herpesvirus 6B
caaggaaugugcag

SEQ ID NO: 337715 - RNA, 15 nt, Human herpesvirus 6B
caaggcggagauuca

SEQ ID NO: 337716 - RNA, 14 nt, Human herpesvirus 6B
caaguaagauugca

SEQ ID NO: 337717 - RNA, 15 nt, Human herpesvirus 6B
caauaaaauucacag

SEQ ID NO: 337718 - RNA, 21 nt, Human herpesvirus 6B
caauaaacaugauuguaauaa

SEQ ID NO: 337719 - RNA, 22 nt, Human herpesvirus 6B
caauaaagugguuuaauggaaa

SEQ ID NO: 337720 - RNA, 15 nt, Human herpesvirus 6B
caauacacaguagac

SEQ ID NO: 337721 - RNA, 22 nt, Human herpesvirus 6B
caauagaugaucagcauucacu

SEQ ID NO: 337722 - RNA, 12 nt, Human herpesvirus 6B
caauagauuuca

SEQ ID NO: 337723 - RNA, 23 nt, Human herpesvirus 6B
caauaguagauuuucauuuugau

SEQ ID NO: 337724 - RNA, 17 nt, Human herpesvirus 6B
caauaucaccuuacaaa

SEQ ID NO: 337725 - RNA, 20 nt, Human herpesvirus 6B
caaucauguuuauugucaaa

SEQ ID NO: 337726 - RNA, 23 nt, Human herpesvirus 6B
caaucauguuuauugucaaauag

SEQ ID NO: 337727 - RNA, 16 nt, Human herpesvirus 6B
caaucauuaacauaca

SEQ ID NO: 337728 - RNA, 21 nt, Human herpesvirus 6B
caaucauuaacauacagaugu

SEQ ID NO: 337729 - RNA, 12 nt, Human herpesvirus 6B
caaucugugagc

SEQ ID NO: 337730 - RNA, 14 nt, Human herpesvirus 6B
caaucugugcaaca

SEQ ID NO: 337731 - RNA, 17 nt, Human herpesvirus 6B
caaugaguuuuuugcaa

SEQ ID NO: 337732 - RNA, 13 nt, Human herpesvirus 6B
caaugauacaucg

SEQ ID NO: 337733 - RNA, 17 nt, Human herpesvirus 6B
caaugauuuuguuuauu

SEQ ID NO: 337734 - RNA, 15 nt, Human herpesvirus 6B
caaugcguauuugau

SEQ ID NO: 337735 - RNA, 18 nt, Human herpesvirus 6B
caauguccaauuacucaa

SEQ ID NO: 337736 - RNA, 15 nt, Human herpesvirus 6B
gccaaccaaaugccu

SEQ ID NO: 337737 - RNA, 17 nt, Human herpesvirus 6B
gccaauuuaugucauuu

SEQ ID NO: 337738 - RNA, 20 nt, Human herpesvirus 6B
gccaauuuaugucauuucau

SEQ ID NO: 337739 - RNA, 20 nt, Human herpesvirus 6B
gccagcaccuuagcucuaau

SEQ ID NO: 337740 - RNA, 16 nt, Human herpesvirus 6B
gccagcauucuuauca

SEQ ID NO: 337741 - RNA, 15 nt, Human herpesvirus 6B
gccauaaaaauaucg

SEQ ID NO: 337742 - RNA, 17 nt, Human herpesvirus 6B
gccauaaagaacacagg

SEQ ID NO: 337743 - RNA, 17 nt, Human herpesvirus 6B
gccauaauggaagaagg

SEQ ID NO: 337744 - RNA, 22 nt, Human herpesvirus 6B
gccauauaagucuaaugcaaag

SEQ ID NO: 337745 - RNA, 19 nt, Human herpesvirus 6B
gccauaucacagcauuucc

SEQ ID NO: 337746 - RNA, 15 nt, Human herpesvirus 6B
gccauccacccauau

SEQ ID NO: 337747 - RNA, 16 nt, Human herpesvirus 6B
gccauuauugauagca

SEQ ID NO: 337748 - RNA, 13 nt, Human herpesvirus 6B
gcccacauuuccu

SEQ ID NO: 337749 - RNA, 24 nt, Human herpesvirus 6B
gcccuacuacaguggauguuagau

SEQ ID NO: 337750 - RNA, 22 nt, Human herpesvirus 6B
gcccucuagcgggguugcuaua

SEQ ID NO: 337751 - RNA, 13 nt, Human herpesvirus 6B
gccgacuuauauc

SEQ ID NO: 337752 - RNA, 15 nt, Human herpesvirus 6B
gccgaugaaacuguc

SEQ ID NO: 337753 - RNA, 15 nt, Human herpesvirus 6B
gccgcguacacgaaa

SEQ ID NO: 337754 - RNA, 17 nt, Human herpesvirus 6B
gccggaaaacaaugcau

SEQ ID NO: 337755 - RNA, 14 nt, Human herpesvirus 6B
gccgggaugagcuu

SEQ ID NO: 337756 - RNA, 21 nt, Human herpesvirus 6B
gccguacacucauuugcaauu

SEQ ID NO: 337757 - RNA, 14 nt, Human herpesvirus 6B
gccguccuauucag

SEQ ID NO: 337758 - RNA, 15 nt, Human herpesvirus 6B
gccguguuacugaca

SEQ ID NO: 337759 - RNA, 19 nt, Human herpesvirus 6B
gccguguuacugacaccac

SEQ ID NO: 337760 - RNA, 14 nt, Human herpesvirus 6B
gccuaucuguauuu

SEQ ID NO: 337761 - RNA, 15 nt, Human herpesvirus 6B
gccuauuaaugcuua

SEQ ID NO: 337762 - RNA, 16 nt, Human herpesvirus 6B
gccucccauguaugca

SEQ ID NO: 337763 - RNA, 22 nt, Human herpesvirus 6B
gccuccgccaccaccgcugaca

SEQ ID NO: 337764 - RNA, 20 nt, Human herpesvirus 6B
gccuccgccggguaugagcc

SEQ ID NO: 337765 - RNA, 16 nt, Human herpesvirus 6B
gccucggaacugcugg

SEQ ID NO: 337766 - RNA, 16 nt, Human herpesvirus 6B
gccucuaacuguuguu

SEQ ID NO: 337767 - RNA, 18 nt, Human herpesvirus 6B
gccugcauaugauccaau

SEQ ID NO: 337768 - RNA, 23 nt, Human herpesvirus 6B
gccuggaauacaagaccaucugc

SEQ ID NO: 337769 - RNA, 16 nt, Human herpesvirus 6B
gccuugauaaucugau

SEQ ID NO: 337770 - RNA, 15 nt, Human herpesvirus 6B
gccuuuuacuuacau

SEQ ID NO: 337771 - RNA, 12 nt, Human herpesvirus 6B
gcgaacuaagaa

SEQ ID NO: 337772 - RNA, 17 nt, Human herpesvirus 6B
gcgaauuguguugcuag

SEQ ID NO: 337773 - RNA, 13 nt, Human herpesvirus 6B
gcgacaaagcuau

SEQ ID NO: 337774 - RNA, 15 nt, Human herpesvirus 6B
gcgacagacagucac

SEQ ID NO: 337775 - RNA, 16 nt, Human herpesvirus 6B
gcgacauaguggcuau

SEQ ID NO: 337776 - RNA, 20 nt, Human herpesvirus 6B
gcgacgacggggacuaccga

SEQ ID NO: 337777 - RNA, 16 nt, Human herpesvirus 6B
gcgagaaacgcccuga

SEQ ID NO: 337778 - RNA, 17 nt, Human herpesvirus 6B
gcgauagucaugcacuc

SEQ ID NO: 337779 - RNA, 15 nt, Human herpesvirus 6B
gcgaugcguuugcca

SEQ ID NO: 337780 - RNA, 20 nt, Human herpesvirus 6B
gcgcauaaauaaaaugguuu

SEQ ID NO: 337781 - RNA, 16 nt, Human herpesvirus 6B
gcgcauguugcaguuu

SEQ ID NO: 337782 - RNA, 22 nt, Human herpesvirus 6B
gcgcauguugcaguuuaaggau

SEQ ID NO: 337783 - RNA, 21 nt, Human herpesvirus 6B
gcgccaacggaaagcaucuca

SEQ ID NO: 337784 - RNA, 22 nt, Human herpesvirus 6B
gcgccaacggaaagcaucucaa

SEQ ID NO: 337785 - RNA, 13 nt, Human herpesvirus 6B
gcgcgccgugaca

SEQ ID NO: 337786 - RNA, 16 nt, Human herpesvirus 6B
gcgcggaccacucggg

SEQ ID NO: 337787 - RNA, 17 nt, Human herpesvirus 6B
gcgcggccaaggcaacg

SEQ ID NO: 337788 - RNA, 13 nt, Human herpesvirus 6B
gcgcggggacaca

SEQ ID NO: 337789 - RNA, 17 nt, Human herpesvirus 6B
gcggaacaccagcaugu

SEQ ID NO: 337790 - RNA, 17 nt, Human herpesvirus 6B
gcggaguuuuauggcug

SEQ ID NO: 337791 - RNA, 18 nt, Human herpesvirus 6B
gcggcaugaauuccaugc

SEQ ID NO: 337792 - RNA, 20 nt, Human herpesvirus 6B
gcggcgaagggacacgagaa

SEQ ID NO: 337793 - RNA, 21 nt, Human herpesvirus 6B
gcgggaccuggcgggcaccga

SEQ ID NO: 337794 - RNA, 20 nt, Human herpesvirus 6B
gcgggcauuauuuugucuuc

SEQ ID NO: 337795 - RNA, 23 nt, Human herpesvirus 6B
gcgggcuauaaucacaaauaucc

SEQ ID NO: 337796 - RNA, 23 nt, Human herpesvirus 6B
gcgggcuuaauaaaggauguuug

SEQ ID NO: 337797 - RNA, 17 nt, Human herpesvirus 6B
gcgguugaagucuuucc

SEQ ID NO: 337798 - RNA, 23 nt, Human herpesvirus 6B
gcguaggcaugucugugcguguu

SEQ ID NO: 337799 - RNA, 13 nt, Human herpesvirus 6B
gcgucacacagca

SEQ ID NO: 337800 - RNA, 16 nt, Human herpesvirus 6B
gcguggauaucucaaa

SEQ ID NO: 337801 - RNA, 17 nt, Human herpesvirus 6B
gcguguagaguugaaga

SEQ ID NO: 337802 - RNA, 17 nt, Human herpesvirus 6B
gcguuacaagcaugcau

SEQ ID NO: 337803 - RNA, 16 nt, Human herpesvirus 6B
gcuaaacgccgacaac

SEQ ID NO: 337804 - RNA, 15 nt, Human herpesvirus 6B
gcuaacgaacaaauc

SEQ ID NO: 337805 - RNA, 13 nt, Human herpesvirus 6B
gcuaagagauuua

SEQ ID NO: 337806 - RNA, 16 nt, Human herpesvirus 6B
gcuagauaacucagau

SEQ ID NO: 337807 - RNA, 12 nt, Human herpesvirus 6B
gcuagcaaugau

SEQ ID NO: 337808 - RNA, 21 nt, Human herpesvirus 6B
gcuaguuguaugacuuggaga

SEQ ID NO: 337809 - RNA, 13 nt, Human herpesvirus 6B
gcuaucacuuaga

SEQ ID NO: 337810 - RNA, 14 nt, Human herpesvirus 6B
gcuaucacuuagac

SEQ ID NO: 337811 - RNA, 20 nt, Human herpesvirus 6B
gcuaucacuuagacacggcc

SEQ ID NO: 337812 - RNA, 14 nt, Human herpesvirus 6B
gcuauccauuuuau

SEQ ID NO: 337813 - RNA, 18 nt, Human herpesvirus 6B
gcuauccuuauaucugaa

SEQ ID NO: 337814 - RNA, 13 nt, Human herpesvirus 6B
gcuauuaacacau

SEQ ID NO: 337815 - RNA, 14 nt, Human herpesvirus 6B
gcuauuugcauuaa

SEQ ID NO: 337816 - RNA, 21 nt, Human herpesvirus 6B
gcucaagcgaagucaugaauu

SEQ ID NO: 337817 - RNA, 14 nt, Human herpesvirus 6B
gcucagauguggaa

SEQ ID NO: 337818 - RNA, 18 nt, Human herpesvirus 6B
gcucagcguggaauuugu

SEQ ID NO: 337819 - RNA, 22 nt, Human herpesvirus 6B
gcucaguguuugccaaccaaau

SEQ ID NO: 337820 - RNA, 14 nt, Human herpesvirus 6B
gcucauuugugcua

SEQ ID NO: 337821 - RNA, 15 nt, Human herpesvirus 6B
gcucauuugugcuag

SEQ ID NO: 337822 - RNA, 20 nt, Human herpesvirus 6B
gcucuauugugugucccgaa

SEQ ID NO: 337823 - RNA, 22 nt, Human herpesvirus 6B
gcucuauugugugucccgaaga

SEQ ID NO: 337824 - RNA, 21 nt, Human herpesvirus 6B
gcucuggcggagaaaguuucu

SEQ ID NO: 337825 - RNA, 15 nt, Human herpesvirus 6B
gcucuguuacuaugu

SEQ ID NO: 337826 - RNA, 23 nt, Human herpesvirus 6B
gcucuguuacuauguauuggaau

SEQ ID NO: 337827 - RNA, 17 nt, Human herpesvirus 6B
gcugacaucugcaaaaa

SEQ ID NO: 337828 - RNA, 18 nt, Human herpesvirus 6B
gcugacccgauguggaac

SEQ ID NO: 337829 - RNA, 18 nt, Human herpesvirus 6B
gcugauuccuucaauguu

SEQ ID NO: 337830 - RNA, 21 nt, Human herpesvirus 6B
gcugcuaaaagcuauguauga

SEQ ID NO: 337831 - RNA, 15 nt, Human herpesvirus 6B
gcugcuaucgucuau

SEQ ID NO: 337832 - RNA, 19 nt, Human herpesvirus 6B
gcuggaaaaauuuaaucaa

SEQ ID NO: 337833 - RNA, 20 nt, Human herpesvirus 6B
gcuggugacuguguucgcua

SEQ ID NO: 337834 - RNA, 23 nt, Human herpesvirus 6B
gcugucgaguaacuguggguuuu

SEQ ID NO: 337835 - RNA, 18 nt, Human herpesvirus 6B
gcuuaacuuacuuaauaa

SEQ ID NO: 337836 - RNA, 22 nt, Human herpesvirus 6B
gcuuauauuguuguaaaauaca

SEQ ID NO: 337837 - RNA, 17 nt, Human herpesvirus 6B
gcuucaguaugucucag

SEQ ID NO: 337838 - RNA, 19 nt, Human herpesvirus 6B
gcuugcgauuguucugcga

SEQ ID NO: 337839 - RNA, 18 nt, Human herpesvirus 6B
gcuuggccagccacugcg

SEQ ID NO: 337840 - RNA, 19 nt, Human herpesvirus 6B
gcuuggcuaucgcaaugau

SEQ ID NO: 337841 - RNA, 13 nt, Human herpesvirus 6B
gcuuuaucccaaa

SEQ ID NO: 337842 - RNA, 14 nt, Human herpesvirus 6B
gcuuuaucccaaaa

SEQ ID NO: 337843 - RNA, 21 nt, Human herpesvirus 6B
gcuuucucuuuuuaauuccaa

SEQ ID NO: 337844 - RNA, 20 nt, Human herpesvirus 6B
gcuuucuugaagaugugaua

SEQ ID NO: 337845 - RNA, 18 nt, Human herpesvirus 6B
gcuuuucaagaucugcca

SEQ ID NO: 337846 - RNA, 12 nt, Human herpesvirus 6B
gcuuuuguuauu

SEQ ID NO: 337847 - RNA, 18 nt, Human herpesvirus 6B
ggaaaaccuuauacagau

SEQ ID NO: 337848 - RNA, 16 nt, Human herpesvirus 6B
ggaaaagaagaagcag

SEQ ID NO: 337849 - RNA, 13 nt, Human herpesvirus 6B
uaaaaccugcuaa

SEQ ID NO: 337850 - RNA, 14 nt, Human herpesvirus 6B
uaaaaccugcuaac

SEQ ID NO: 337851 - RNA, 21 nt, Human herpesvirus 6B
uaaaagacgcuugcuguuuuc

SEQ ID NO: 337852 - RNA, 21 nt, Human herpesvirus 6B
uaaaagagaauacuacaguga

SEQ ID NO: 337853 - RNA, 22 nt, Human herpesvirus 6B
uaaaagcugcuaacggagcaac

SEQ ID NO: 337854 - RNA, 17 nt, Human herpesvirus 6B
uaaaauacauacuuucc

SEQ ID NO: 337855 - RNA, 22 nt, Human herpesvirus 6B
uaaaaucugcuaacggagcaac

SEQ ID NO: 337856 - RNA, 16 nt, Human herpesvirus 6B
uaaaauggcugugcua

SEQ ID NO: 337857 - RNA, 17 nt, Human herpesvirus 6B
uaaaauggcugugcuau

SEQ ID NO: 337858 - RNA, 19 nt, Human herpesvirus 6B
uaaaauggcugugcuaucu

SEQ ID NO: 337859 - RNA, 17 nt, Human herpesvirus 6B
uaaaauuuaauaaggaa

SEQ ID NO: 337860 - RNA, 17 nt, Human herpesvirus 6B
uaaaauuuggaagccug

SEQ ID NO: 337861 - RNA, 15 nt, Human herpesvirus 6B
uaaacaaaccgccuu

SEQ ID NO: 337862 - RNA, 20 nt, Human herpesvirus 6B
uaaacacugacuaaacguac

SEQ ID NO: 337863 - RNA, 19 nt, Human herpesvirus 6B
uaaacaguuauacuggcaa

SEQ ID NO: 337864 - RNA, 16 nt, Human herpesvirus 6B
uaaacaucgcuccaua

SEQ ID NO: 337865 - RNA, 13 nt, Human herpesvirus 6B
uaaacauucuuaa

SEQ ID NO: 337866 - RNA, 14 nt, Human herpesvirus 6B
uaaacggcauacau

SEQ ID NO: 337867 - RNA, 15 nt, Human herpesvirus 6B
uaaacggcauacauu

SEQ ID NO: 337868 - RNA, 17 nt, Human herpesvirus 6B
uaaacgucgaaacgaaa

SEQ ID NO: 337869 - RNA, 15 nt, Human herpesvirus 6B
uaaacucgacuucuu

SEQ ID NO: 337870 - RNA, 17 nt, Human herpesvirus 6B
uaaacucugccuguuca

SEQ ID NO: 337871 - RNA, 20 nt, Human herpesvirus 6B
uaaacuggucugcuugcaaa

SEQ ID NO: 337872 - RNA, 24 nt, Human herpesvirus 6B
uaaacuguucuuucaaaaugacca

SEQ ID NO: 337873 - RNA, 17 nt, Human herpesvirus 6B
uaaagaaucugcagauu

SEQ ID NO: 337874 - RNA, 19 nt, Human herpesvirus 6B
uaaagaaugcugacuuuga

SEQ ID NO: 337875 - RNA, 18 nt, Human herpesvirus 6B
uaaagauggaaaauuuau

SEQ ID NO: 337876 - RNA, 18 nt, Human herpesvirus 6B
uaaagauguagcuggaua

SEQ ID NO: 337877 - RNA, 19 nt, Human herpesvirus 6B
uaaagauuuggaggugaga

SEQ ID NO: 337878 - RNA, 21 nt, Human herpesvirus 6B
uaaagauuuggaggugagaca

SEQ ID NO: 337879 - RNA, 14 nt, Human herpesvirus 6B
uaaaggauguuugu

SEQ ID NO: 337880 - RNA, 17 nt, Human herpesvirus 6B
uaaagucguuuuggaga

SEQ ID NO: 337881 - RNA, 23 nt, Human herpesvirus 6B
uaaaguugaauugauaguacuua

SEQ ID NO: 337882 - RNA, 23 nt, Human herpesvirus 6B
uaaaguuugucacaccacucucu

SEQ ID NO: 337883 - RNA, 22 nt, Human herpesvirus 6B
uaaaucagacagguaagcagca

SEQ ID NO: 337884 - RNA, 14 nt, Human herpesvirus 6B
uaaaucaugucuua

SEQ ID NO: 337885 - RNA, 18 nt, Human herpesvirus 6B
uaaaucgcgagacagauc

SEQ ID NO: 337886 - RNA, 17 nt, Human herpesvirus 6B
uaaaucgcgccauauca

SEQ ID NO: 337887 - RNA, 14 nt, Human herpesvirus 6B
uaaaucggacaaug

SEQ ID NO: 337888 - RNA, 21 nt, Human herpesvirus 6B
uaaauggcauucuugcagauu

SEQ ID NO: 337889 - RNA, 20 nt, Human herpesvirus 6B
uaaauggcauugaagaugac

SEQ ID NO: 337890 - RNA, 20 nt, Human herpesvirus 6B
uaaauggcggacccgaccuc

SEQ ID NO: 337891 - RNA, 15 nt, Human herpesvirus 6B
uaaaugucaaagaaa

SEQ ID NO: 337892 - RNA, 17 nt, Human herpesvirus 6B
uaaauucaaacuccgaa

SEQ ID NO: 337893 - RNA, 19 nt, Human herpesvirus 6B
uaaauugaugaaauuguga

SEQ ID NO: 337894 - RNA, 14 nt, Human herpesvirus 6B
uaaauuuaacuaag

SEQ ID NO: 337895 - RNA, 18 nt, Human herpesvirus 6B
uaaauuugccaccagaua

SEQ ID NO: 337896 - RNA, 22 nt, Human herpesvirus 6B
uaacaaaaugguuaugacaaag

SEQ ID NO: 337897 - RNA, 15 nt, Human herpesvirus 6B
uaacaauucucucaa

SEQ ID NO: 337898 - RNA, 17 nt, Human herpesvirus 6B
uaacaccaguacuucaa

SEQ ID NO: 337899 - RNA, 13 nt, Human herpesvirus 6B
uaacauccaaaau

SEQ ID NO: 337900 - RNA, 20 nt, Human herpesvirus 6B
uaaccagaugugcacaaccg

SEQ ID NO: 337901 - RNA, 19 nt, Human herpesvirus 6B
uaaccgaugcugauuccuu

SEQ ID NO: 337902 - RNA, 12 nt, Human herpesvirus 6B
uaacgaaaacca

SEQ ID NO: 337903 - RNA, 19 nt, Human herpesvirus 6B
uaacgcgucaacaaacaau

SEQ ID NO: 337904 - RNA, 20 nt, Human herpesvirus 6B
uaacgcgucgguaaacaauu

SEQ ID NO: 337905 - RNA, 14 nt, Human herpesvirus 6B
uaacgcuucuaaca

SEQ ID NO: 337906 - RNA, 18 nt, Human herpesvirus 6B
uaacggaaauccuugacu

SEQ ID NO: 337907 - RNA, 16 nt, Human herpesvirus 6B
uaacggagagucuuca

SEQ ID NO: 337908 - RNA, 22 nt, Human herpesvirus 6B
uaacuaaaucgcgccauaucac

SEQ ID NO: 337909 - RNA, 14 nt, Human herpesvirus 6B
uaacuacacuuaua

SEQ ID NO: 337910 - RNA, 17 nt, Human herpesvirus 6B
uaacuguggguuuucag

SEQ ID NO: 337911 - RNA, 16 nt, Human herpesvirus 6B
uaacuucaagaauucu

SEQ ID NO: 337912 - RNA, 22 nt, Human herpesvirus 6B
uaacuucauacccgauguucuc

SEQ ID NO: 337913 - RNA, 9 nt, Human herpesvirus 6B
uaagaauga

SEQ ID NO: 337914 - RNA, 16 nt, Human herpesvirus 6B
uaagaaugagaugucc

SEQ ID NO: 337915 - RNA, 21 nt, Human herpesvirus 6B
uaagaauuacaauacagcaau

SEQ ID NO: 337916 - RNA, 22 nt, Human herpesvirus 6B
uaagacuuagcuagacgugucu

SEQ ID NO: 337917 - RNA, 16 nt, Human herpesvirus 6B
uaagaucuacagagua

SEQ ID NO: 337918 - RNA, 15 nt, Human herpesvirus 6B
uaagauugugcaguu

SEQ ID NO: 337919 - RNA, 14 nt, Human herpesvirus 6B
uaagcaaacaugua

SEQ ID NO: 337920 - RNA, 16 nt, Human herpesvirus 6B
uaagcagcaaaacaac

SEQ ID NO: 337921 - RNA, 17 nt, Human herpesvirus 6B
uaaguaaacugcuuaac

SEQ ID NO: 337922 - RNA, 16 nt, Human herpesvirus 6B
uaaguaguugcuugua

SEQ ID NO: 337923 - RNA, 17 nt, Human herpesvirus 6B
uaagucguuguguccug

SEQ ID NO: 337924 - RNA, 17 nt, Human herpesvirus 6B
uaagucuaaugcaaaga

SEQ ID NO: 337925 - RNA, 18 nt, Human herpesvirus 6B
uaaguggguacaaugaaa

SEQ ID NO: 337926 - RNA, 14 nt, Human herpesvirus 6B
uaaguuaauuccag

SEQ ID NO: 337927 - RNA, 21 nt, Human herpesvirus 6B
uaauaaaauauaacgcuucua

SEQ ID NO: 337928 - RNA, 14 nt, Human herpesvirus 6B
uaauaaacucugcc

SEQ ID NO: 337929 - RNA, 22 nt, Human herpesvirus 6B
uaauaaacucugccuguucaac

SEQ ID NO: 337930 - RNA, 12 nt, Human herpesvirus 6B
uaauaagacaga

SEQ ID NO: 337931 - RNA, 21 nt, Human herpesvirus 6B
uaauagcccuucaccgucucu

SEQ ID NO: 337932 - RNA, 20 nt, Human herpesvirus 6B
uaauagguuauuuacaaaag

SEQ ID NO: 337933 - RNA, 13 nt, Human herpesvirus 6B
uaauauaaauucu

SEQ ID NO: 337934 - RNA, 22 nt, Human herpesvirus 6B
uaauauaucuugaaaucuacca

SEQ ID NO: 337935 - RNA, 22 nt, Human herpesvirus 6B
uaauauuuuuucagcuuucaua

SEQ ID NO: 337936 - RNA, 17 nt, Human herpesvirus 6B
uaaucaugauugcaaca

SEQ ID NO: 337937 - RNA, 17 nt, Human herpesvirus 6B
uaauccaugaacuacag

SEQ ID NO: 337938 - RNA, 14 nt, Human herpesvirus 6B
uaaucgauuacaaa

SEQ ID NO: 337939 - RNA, 16 nt, Human herpesvirus 6B
uaaucuacgcauugac

SEQ ID NO: 337940 - RNA, 16 nt, Human herpesvirus 6B
uaaucuuguagcucag

SEQ ID NO: 337941 - RNA, 21 nt, Human herpesvirus 6B
uaaugauuggaaucacaaaau

SEQ ID NO: 337942 - RNA, 15 nt, Human herpesvirus 6B
uaaugcggaacauug

SEQ ID NO: 337943 - RNA, 22 nt, Human herpesvirus 6B
uaaugucacugucgaauaucuu

SEQ ID NO: 337944 - RNA, 22 nt, Human herpesvirus 6B
uaaugucuucgaauaguuucau

SEQ ID NO: 337945 - RNA, 14 nt, Human herpesvirus 6B
uaaugugaacuaaa

SEQ ID NO: 337946 - RNA, 20 nt, Human herpesvirus 6B
uaauuaaaacagaaaggcca

SEQ ID NO: 337947 - RNA, 16 nt, Human herpesvirus 6B
uaauuacauauaguca

SEQ ID NO: 337948 - RNA, 23 nt, Human herpesvirus 6B
uaauuauugugacaagguaugaa

SEQ ID NO: 337949 - RNA, 23 nt, Human herpesvirus 6B
uaauugaugggauguaaucaaug

SEQ ID NO: 337950 - RNA, 14 nt, Human herpesvirus 6B
uaauugcacccuau

SEQ ID NO: 337951 - RNA, 15 nt, Human herpesvirus 6B
uaauuggaacuauga

SEQ ID NO: 337952 - RNA, 13 nt, Human herpesvirus 6B
uaauuuccaauag

SEQ ID NO: 337953 - RNA, 19 nt, Human herpesvirus 6B
uaauuuggguugugcugua

SEQ ID NO: 337954 - RNA, 16 nt, Human herpesvirus 6B
uaauuuuaucaugccc

SEQ ID NO: 337955 - RNA, 20 nt, Human herpesvirus 6B
uaauuuuaucaugcccuaau

SEQ ID NO: 337956 - RNA, 14 nt, Human herpesvirus 6B
uaauuuuuguagca

SEQ ID NO: 337957 - RNA, 23 nt, Human herpesvirus 6B
uacaaaagccugcauaugaucca

SEQ ID NO: 337958 - RNA, 19 nt, Human herpesvirus 6B
uacaaaccuucccuaucac

SEQ ID NO: 337959 - RNA, 21 nt, Human herpesvirus 6B
uacaaaccuucccuaucacaa

SEQ ID NO: 337960 - RNA, 13 nt, Human herpesvirus 6B
uacaaagauuuua

SEQ ID NO: 337961 - RNA, 14 nt, Human herpesvirus 6B
uacaaagauuuuaa

SEQ ID NO: 337962 - RNA, 16 nt, Human herpesvirus 6B
uauaaaaacuaaugcg

SEQ ID NO: 337963 - RNA, 15 nt, Human herpesvirus 6B
uauaaaaguccucaa

SEQ ID NO: 337964 - RNA, 12 nt, Human herpesvirus 6B
uauaaacagauu

SEQ ID NO: 337965 - RNA, 15 nt, Human herpesvirus 6B
uauaaauggcauuga

SEQ ID NO: 337966 - RNA, 12 nt, Human herpesvirus 6B
uauaaauucuua

SEQ ID NO: 337967 - RNA, 21 nt, Human herpesvirus 6B
uauaaauucuuaccuuuuaag

SEQ ID NO: 337968 - RNA, 16 nt, Human herpesvirus 6B
uauaagucaucauaca

SEQ ID NO: 337969 - RNA, 18 nt, Human herpesvirus 6B
uauaagucuaaugcaaag

SEQ ID NO: 337970 - RNA, 15 nt, Human herpesvirus 6B
uauaauauaaauucu

SEQ ID NO: 337971 - RNA, 16 nt, Human herpesvirus 6B
uauaaucacaaauauc

SEQ ID NO: 337972 - RNA, 17 nt, Human herpesvirus 6B
uauaaucacaaauaucc

SEQ ID NO: 337973 - RNA, 21 nt, Human herpesvirus 6B
uauaauguguuggucauuuca

SEQ ID NO: 337974 - RNA, 18 nt, Human herpesvirus 6B
uauaauuuacacaauccu

SEQ ID NO: 337975 - RNA, 15 nt, Human herpesvirus 6B
uauacagaugccaag

SEQ ID NO: 337976 - RNA, 17 nt, Human herpesvirus 6B
uauacauaaggcaaaaa

SEQ ID NO: 337977 - RNA, 12 nt, Human herpesvirus 6B
uauaccauuccc

SEQ ID NO: 337978 - RNA, 13 nt, Human herpesvirus 6B
uauaccauuccca

SEQ ID NO: 337979 - RNA, 17 nt, Human herpesvirus 6B
uauacguuaaauaucua

SEQ ID NO: 337980 - RNA, 20 nt, Human herpesvirus 6B
uauagacuaaacuuaacuua

SEQ ID NO: 337981 - RNA, 18 nt, Human herpesvirus 6B
uauagauagcggcacguu

SEQ ID NO: 337982 - RNA, 21 nt, Human herpesvirus 6B
uauagcagcgcccgaugccaa

SEQ ID NO: 337983 - RNA, 17 nt, Human herpesvirus 6B
uauagcgguuggaugcc

SEQ ID NO: 337984 - RNA, 22 nt, Human herpesvirus 6B
uauauauccgaaaccgcuauuu

SEQ ID NO: 337985 - RNA, 23 nt, Human herpesvirus 6B
uauaucaaacuuuuuuugaaggu

SEQ ID NO: 337986 - RNA, 17 nt, Human herpesvirus 6B
uauaucgaaucaugaga

SEQ ID NO: 337987 - RNA, 15 nt, Human herpesvirus 6B
uauaugcaggugcug

SEQ ID NO: 337988 - RNA, 18 nt, Human herpesvirus 6B
uauaugcaggugcugcua

SEQ ID NO: 337989 - RNA, 15 nt, Human herpesvirus 6B
uauaugcgaauguua

SEQ ID NO: 337990 - RNA, 16 nt, Human herpesvirus 6B
uauauuaaagauugca

SEQ ID NO: 337991 - RNA, 15 nt, Human herpesvirus 6B
uauauuaucuuucau

SEQ ID NO: 337992 - RNA, 20 nt, Human herpesvirus 6B
uauauugaucgucauaacga

SEQ ID NO: 337993 - RNA, 13 nt, Human herpesvirus 6B
uaucaaaagccag

SEQ ID NO: 337994 - RNA, 14 nt, Human herpesvirus 6B
uaucaaaagccaga

SEQ ID NO: 337995 - RNA, 13 nt, Human herpesvirus 6B
uaucaaauuacaa

SEQ ID NO: 337996 - RNA, 14 nt, Human herpesvirus 6B
uaucaacaaugucc

SEQ ID NO: 337997 - RNA, 17 nt, Human herpesvirus 6B
uaucaacuauacuuaac

SEQ ID NO: 337998 - RNA, 17 nt, Human herpesvirus 6B
uaucaauuccugugaug

SEQ ID NO: 337999 - RNA, 17 nt, Human herpesvirus 6B
uaucacguaucucuggu

SEQ ID NO: 338000 - RNA, 15 nt, Human herpesvirus 6B
uaucacuuagacacg

SEQ ID NO: 338001 - RNA, 17 nt, Human herpesvirus 6B
uauccaggcaugugauu

SEQ ID NO: 338002 - RNA, 14 nt, Human herpesvirus 6B
uauccuauaaauac

SEQ ID NO: 338003 - RNA, 17 nt, Human herpesvirus 6B
uauccugaaaauaaaca

SEQ ID NO: 338004 - RNA, 20 nt, Human herpesvirus 6B
uaucgaaauaacgcaaucua

SEQ ID NO: 338005 - RNA, 14 nt, Human herpesvirus 6B
uaucgcgcagacca

SEQ ID NO: 338006 - RNA, 16 nt, Human herpesvirus 6B
uaucggcagugcaaag

SEQ ID NO: 338007 - RNA, 15 nt, Human herpesvirus 6B
uaucggucaaaacag

SEQ ID NO: 338008 - RNA, 15 nt, Human herpesvirus 6B
uaucgucuacccuau

SEQ ID NO: 338009 - RNA, 16 nt, Human herpesvirus 6B
uaucuacugcagucca

SEQ ID NO: 338010 - RNA, 14 nt, Human herpesvirus 6B
uaucucaaauuuuc

SEQ ID NO: 338011 - RNA, 17 nt, Human herpesvirus 6B
uaucugagacagucaau

SEQ ID NO: 338012 - RNA, 19 nt, Human herpesvirus 6B
uaucuguauuucguguauc

SEQ ID NO: 338013 - RNA, 16 nt, Human herpesvirus 6B
uaucuguugagucucu

SEQ ID NO: 338014 - RNA, 23 nt, Human herpesvirus 6B
uaugaaccacguuuuuccauguc

SEQ ID NO: 338015 - RNA, 9 nt, Human herpesvirus 6B
uaugagaau

SEQ ID NO: 338016 - RNA, 20 nt, Human herpesvirus 6B
uaugaggauuugcuugucac

SEQ ID NO: 338017 - RNA, 15 nt, Human herpesvirus 6B
uaugaucggcauuug

SEQ ID NO: 338018 - RNA, 16 nt, Human herpesvirus 6B
uaugaucggcauuugu

SEQ ID NO: 338019 - RNA, 16 nt, Human herpesvirus 6B
uaugccaaauguauug

SEQ ID NO: 338020 - RNA, 22 nt, Human herpesvirus 6B
uaugcuuauauuguuguaaaau

SEQ ID NO: 338021 - RNA, 18 nt, Human herpesvirus 6B
uauggacaacggugugga

SEQ ID NO: 338022 - RNA, 13 nt, Human herpesvirus 6B
uaugggaguaauu

SEQ ID NO: 338023 - RNA, 15 nt, Human herpesvirus 6B
uauggggaagaucua

SEQ ID NO: 338024 - RNA, 13 nt, Human herpesvirus 6B
uauguaaaaccuc

SEQ ID NO: 338025 - RNA, 14 nt, Human herpesvirus 6B
uauguacugaucuc

SEQ ID NO: 338026 - RNA, 15 nt, Human herpesvirus 6B
uauguacugaucucu

SEQ ID NO: 338027 - RNA, 18 nt, Human herpesvirus 6B
uauguaguacacagaauc

SEQ ID NO: 338028 - RNA, 13 nt, Human herpesvirus 6B
uaugucauuucau

SEQ ID NO: 338029 - RNA, 14 nt, Human herpesvirus 6B
uauguugugaucaa

SEQ ID NO: 338030 - RNA, 16 nt, Human herpesvirus 6B
uauuaaagauggaaaa

SEQ ID NO: 338031 - RNA, 19 nt, Human herpesvirus 6B
uauuaacuaaaauuuggaa

SEQ ID NO: 338032 - RNA, 16 nt, Human herpesvirus 6B
uauuauaaaaacuaau

SEQ ID NO: 338033 - RNA, 16 nt, Human herpesvirus 6B
uauucagaggugcuga

SEQ ID NO: 338034 - RNA, 19 nt, Human herpesvirus 6B
uauucagccguagcgauaa

SEQ ID NO: 338035 - RNA, 15 nt, Human herpesvirus 6B
uauuccaaccucuaa

SEQ ID NO: 338036 - RNA, 19 nt, Human herpesvirus 6B
uauuccaggcaauaaucau

SEQ ID NO: 338037 - RNA, 19 nt, Human herpesvirus 6B
uauucccccgcuguguuua

SEQ ID NO: 338038 - RNA, 14 nt, Human herpesvirus 6B
uauucguaaugugc

SEQ ID NO: 338039 - RNA, 12 nt, Human herpesvirus 6B
uauucuaaauac

SEQ ID NO: 338040 - RNA, 18 nt, Human herpesvirus 6B
uauucuggcgaugcagau

SEQ ID NO: 338041 - RNA, 21 nt, Human herpesvirus 6B
uauugcaguuaaucauucgau

SEQ ID NO: 338042 - RNA, 12 nt, Human herpesvirus 6B
uauugcaugcau

SEQ ID NO: 338043 - RNA, 14 nt, Human herpesvirus 6B
uauugcaugcauug

SEQ ID NO: 338044 - RNA, 15 nt, Human herpesvirus 6B
uauuggcacguguac

SEQ ID NO: 338045 - RNA, 19 nt, Human herpesvirus 6B
uauugucugauauggcaaa

SEQ ID NO: 338046 - RNA, 18 nt, Human herpesvirus 6B
uauuguguguacaacgac

SEQ ID NO: 338047 - RNA, 22 nt, Human herpesvirus 6B
uauuguugccguugucguguga

SEQ ID NO: 338048 - RNA, 19 nt, Human herpesvirus 6B
uauuguuguaaaauacaua

SEQ ID NO: 338049 - RNA, 22 nt, Human herpesvirus 6B
uauuuaacgcgucaacaaacaa

SEQ ID NO: 338050 - RNA, 15 nt, Human herpesvirus 6B
uauuuaccauuugac

SEQ ID NO: 338051 - RNA, 18 nt, Human herpesvirus 6B
uauuucauuguuucacuu

SEQ ID NO: 338052 - RNA, 20 nt, Human herpesvirus 6B
uauuuccauaaguuaauucc

SEQ ID NO: 338053 - RNA, 22 nt, Human herpesvirus 6B
uauuucgguuuugucguuugua

SEQ ID NO: 338054 - RNA, 19 nt, Human herpesvirus 6B
uauuuguuuaaugcauuca

SEQ ID NO: 338055 - RNA, 21 nt, Human herpesvirus 6B
uauuuucaauaucaccuuaca

SEQ ID NO: 338056 - RNA, 22 nt, Human herpesvirus 6B
uauuuucaauaucaccuuacaa

SEQ ID NO: 338057 - RNA, 20 nt, Human herpesvirus 6B
ucaaaacugggcgaagaccu

SEQ ID NO: 338058 - RNA, 13 nt, Human herpesvirus 6B
ucaaaaucugcua

SEQ ID NO: 338059 - RNA, 15 nt, Human herpesvirus 6B
ucaaaaucugcuaac

SEQ ID NO: 338060 - RNA, 19 nt, Human herpesvirus 6B
ucaaaaugaccagagauuc

SEQ ID NO: 338061 - RNA, 19 nt, Human herpesvirus 6B
ucaaacucaccgcauauau

SEQ ID NO: 338062 - RNA, 15 nt, Human herpesvirus 6B
ucaaagcuacucauc

SEQ ID NO: 338063 - RNA, 19 nt, Human herpesvirus 6B
ucaaauaccgaaauuauau

SEQ ID NO: 338064 - RNA, 20 nt, Human herpesvirus 6B
ucaaauuuacucuccaccca

SEQ ID NO: 338065 - RNA, 22 nt, Human herpesvirus 6B
ucaaauuuguguuuauuugcuc

SEQ ID NO: 338066 - RNA, 19 nt, Human herpesvirus 6B
ucaaauuuguuucuauugu

SEQ ID NO: 338067 - RNA, 17 nt, Human herpesvirus 6B
ucaacacgugcgacaaa

SEQ ID NO: 338068 - RNA, 17 nt, Human herpesvirus 6B
ucaacacucucaaugua

SEQ ID NO: 338069 - RNA, 18 nt, Human herpesvirus 6B
ucaacacucucaauguaa

SEQ ID NO: 338070 - RNA, 17 nt, Human herpesvirus 6B
ucaacuaaaucaugucu

SEQ ID NO: 338071 - RNA, 24 nt, Human herpesvirus 6B
ucaacuaguuuugagaaagccgau

SEQ ID NO: 338072 - RNA, 13 nt, Human herpesvirus 6B
ucaacuauacuua

SEQ ID NO: 338073 - RNA, 15 nt, Human herpesvirus 6B
ucaacuauacuuaac

SEQ ID NO: 338074 - RNA, 18 nt, Human herpesvirus 6B
ucaacuauuuaacaucca

SEQ ID NO: 338075 - RNA, 21 nt, Human herpesvirus 6B
ucaacuauuuaacauccaaaa

SEQ ID NO: 338076 - RNA, 20 nt, Human herpesvirus 6B
uccagaauacgaacagaaau

SEQ ID NO: 338077 - RNA, 13 nt, Human herpesvirus 6B
uccagauguaggu

SEQ ID NO: 338078 - RNA, 17 nt, Human herpesvirus 6B
uccagcacagcaugcau

SEQ ID NO: 338079 - RNA, 16 nt, Human herpesvirus 6B
uccaggcaugugauug

SEQ ID NO: 338080 - RNA, 20 nt, Human herpesvirus 6B
uccauacggucgaaugagcu

SEQ ID NO: 338081 - RNA, 21 nt, Human herpesvirus 6B
uccauacggucgaaugagcuu

SEQ ID NO: 338082 - RNA, 20 nt, Human herpesvirus 6B
uccauccgcuaagagauuua

SEQ ID NO: 338083 - RNA, 13 nt, Human herpesvirus 6B
uccaugacuguga

SEQ ID NO: 338084 - RNA, 16 nt, Human herpesvirus 6B
uccauuaaauccuaga

SEQ ID NO: 338085 - RNA, 13 nt, Human herpesvirus 6B
ucccaaaagacua

SEQ ID NO: 338086 - RNA, 19 nt, Human herpesvirus 6B
ucccaaaagacuauguagu

SEQ ID NO: 338087 - RNA, 15 nt, Human herpesvirus 6B
ucccaaaauauaauu

SEQ ID NO: 338088 - RNA, 23 nt, Human herpesvirus 6B
ucccaaccauggcccuacuacag

SEQ ID NO: 338089 - RNA, 22 nt, Human herpesvirus 6B
ucccagcauuuucaaaguuuuc

SEQ ID NO: 338090 - RNA, 23 nt, Human herpesvirus 6B
ucccaugguuccgggauguagca

SEQ ID NO: 338091 - RNA, 23 nt, Human herpesvirus 6B
ucccauguaugcauuaacucugg

SEQ ID NO: 338092 - RNA, 14 nt, Human herpesvirus 6B
ucccauucacauaa

SEQ ID NO: 338093 - RNA, 21 nt, Human herpesvirus 6B
ucccauucagucucagcaauc

SEQ ID NO: 338094 - RNA, 16 nt, Human herpesvirus 6B
ucccccgcuguguuua

SEQ ID NO: 338095 - RNA, 15 nt, Human herpesvirus 6B
uccccuauauagcua

SEQ ID NO: 338096 - RNA, 19 nt, Human herpesvirus 6B
uccccuauauagcuauccu

SEQ ID NO: 338097 - RNA, 16 nt, Human herpesvirus 6B
uccccucauacaucca

SEQ ID NO: 338098 - RNA, 19 nt, Human herpesvirus 6B
ucccuaugucaaugugaau

SEQ ID NO: 338099 - RNA, 21 nt, Human herpesvirus 6B
ucccuaugucaaugugaauau

SEQ ID NO: 338100 - RNA, 15 nt, Human herpesvirus 6B
ucccuuaaaaaaaca

SEQ ID NO: 338101 - RNA, 22 nt, Human herpesvirus 6B
ucccuuaaaaaaacacaguauu

SEQ ID NO: 338102 - RNA, 18 nt, Human herpesvirus 6B
uccgacgguuguucuggu

SEQ ID NO: 338103 - RNA, 16 nt, Human herpesvirus 6B
uccgacucgauuugau

SEQ ID NO: 338104 - RNA, 18 nt, Human herpesvirus 6B
uccgagcggugugcaguu

SEQ ID NO: 338105 - RNA, 23 nt, Human herpesvirus 6B
uccgcagaggcggcgaccacagc

SEQ ID NO: 338106 - RNA, 17 nt, Human herpesvirus 6B
uccggaauuguucuuca

SEQ ID NO: 338107 - RNA, 19 nt, Human herpesvirus 6B
uccggaauuguucuucaac

SEQ ID NO: 338108 - RNA, 17 nt, Human herpesvirus 6B
uccgggggaaaccucaa

SEQ ID NO: 338109 - RNA, 15 nt, Human herpesvirus 6B
uccguauucuugagc

SEQ ID NO: 338110 - RNA, 17 nt, Human herpesvirus 6B
uccguuuuuucugcaaa

SEQ ID NO: 338111 - RNA, 18 nt, Human herpesvirus 6B
uccguuuuuucugcaaaa

SEQ ID NO: 338112 - RNA, 15 nt, Human herpesvirus 6B
uccucaacacucuca

SEQ ID NO: 338113 - RNA, 16 nt, Human herpesvirus 6B
uccucaacacucucaa

SEQ ID NO: 338114 - RNA, 19 nt, Human herpesvirus 6B
uccucaacacucucaaugu

SEQ ID NO: 338115 - RNA, 14 nt, Human herpesvirus 6B
uccucaccgaaauc

SEQ ID NO: 338116 - RNA, 23 nt, Human herpesvirus 6B
uccucguggaguaaaacgcucac

SEQ ID NO: 338117 - RNA, 12 nt, Human herpesvirus 6B
uccugaucucac

SEQ ID NO: 338118 - RNA, 15 nt, Human herpesvirus 6B
uccugaucucacguc

SEQ ID NO: 338119 - RNA, 15 nt, Human herpesvirus 6B
uccuguucgauguac

SEQ ID NO: 338120 - RNA, 19 nt, Human herpesvirus 6B
uccuguuuuucucauaaag

SEQ ID NO: 338121 - RNA, 15 nt, Human herpesvirus 6B
uccuucaaagugaau

SEQ ID NO: 338122 - RNA, 12 nt, Human herpesvirus 6B
uccuucaugaua

SEQ ID NO: 338123 - RNA, 17 nt, Human herpesvirus 6B
uccuucaugauauucca

SEQ ID NO: 338124 - RNA, 16 nt, Human herpesvirus 6B
uccuuccacuuguccg

SEQ ID NO: 338125 - RNA, 19 nt, Human herpesvirus 6B
uccuucggggacagugauu

SEQ ID NO: 338126 - RNA, 16 nt, Human herpesvirus 6B
uccuuugccugcauua

SEQ ID NO: 338127 - RNA, 14 nt, Human herpesvirus 6B
ucgaaaaagacaag

SEQ ID NO: 338128 - RNA, 15 nt, Human herpesvirus 6B
ucgaaaauacaauga

SEQ ID NO: 338129 - RNA, 18 nt, Human herpesvirus 6B
ucgaaacgaaagcugaua

SEQ ID NO: 338130 - RNA, 16 nt, Human herpesvirus 6B
ucgaaagaguuauuaa

SEQ ID NO: 338131 - RNA, 20 nt, Human herpesvirus 6B
ucgaaggccuucaugagccg

SEQ ID NO: 338132 - RNA, 15 nt, Human herpesvirus 6B
ucgaaucgagaauuu

SEQ ID NO: 338133 - RNA, 14 nt, Human herpesvirus 6B
ucgaaugagcuuau

SEQ ID NO: 338134 - RNA, 22 nt, Human herpesvirus 6B
ucgaaugcuaggaagaugguau

SEQ ID NO: 338135 - RNA, 22 nt, Human herpesvirus 6B
ucgacacacaaagucaugcuuc

SEQ ID NO: 338136 - RNA, 13 nt, Human herpesvirus 6B
ucgacagagauau

SEQ ID NO: 338137 - RNA, 20 nt, Human herpesvirus 6B
ucgagaauacgcuguguuua

SEQ ID NO: 338138 - RNA, 14 nt, Human herpesvirus 6B
ucgagaaucuuccu

SEQ ID NO: 338139 - RNA, 17 nt, Human herpesvirus 6B
ucgagaccgacaguauu

SEQ ID NO: 338140 - RNA, 17 nt, Human herpesvirus 6B
ucgauccaaaagauuau

SEQ ID NO: 338141 - RNA, 18 nt, Human herpesvirus 6B
ucgaugauuauucugucu

SEQ ID NO: 338142 - RNA, 20 nt, Human herpesvirus 6B
ucgauuacaaaacaaucuau

SEQ ID NO: 338143 - RNA, 13 nt, Human herpesvirus 6B
ucgauucggagaa

SEQ ID NO: 338144 - RNA, 13 nt, Human herpesvirus 6B
ucgauugugaugu

SEQ ID NO: 338145 - RNA, 22 nt, Human herpesvirus 6B
ucgauuguucgcuugugucaug

SEQ ID NO: 338146 - RNA, 14 nt, Human herpesvirus 6B
ucgcaaaaacaugu

SEQ ID NO: 338147 - RNA, 17 nt, Human herpesvirus 6B
ucgcaaaagaacacaag

SEQ ID NO: 338148 - RNA, 15 nt, Human herpesvirus 6B
ucgcaaaccguccaa

SEQ ID NO: 338149 - RNA, 15 nt, Human herpesvirus 6B
ucgcaagacuacaga

SEQ ID NO: 338150 - RNA, 22 nt, Human herpesvirus 6B
ucgcaagacuacagacuccuca

SEQ ID NO: 338151 - RNA, 11 nt, Human herpesvirus 6B
ucgcaaugauu

SEQ ID NO: 338152 - RNA, 13 nt, Human herpesvirus 6B
ucgcaguccagca

SEQ ID NO: 338153 - RNA, 19 nt, Human herpesvirus 6B
ucgccauagugaaagagua

SEQ ID NO: 338154 - RNA, 19 nt, Human herpesvirus 6B
ucgccgaugaaacugucga

SEQ ID NO: 338155 - RNA, 16 nt, Human herpesvirus 6B
ucgcgauagucaugca

SEQ ID NO: 338156 - RNA, 13 nt, Human herpesvirus 6B
ucgcguugauaca

SEQ ID NO: 338157 - RNA, 23 nt, Human herpesvirus 6B
ucgcuaaauugaauacagcugca

SEQ ID NO: 338158 - RNA, 23 nt, Human herpesvirus 6B
ucggacaaugcggaacaccagca

SEQ ID NO: 338159 - RNA, 14 nt, Human herpesvirus 6B
ucggcaacugaauu

SEQ ID NO: 338160 - RNA, 11 nt, Human herpesvirus 6B
ucggcauuugu

SEQ ID NO: 338161 - RNA, 20 nt, Human herpesvirus 6B
ucggcgcaaacguacauggc

SEQ ID NO: 338162 - RNA, 22 nt, Human herpesvirus 6B
ucggcguacauauaaacagauu

SEQ ID NO: 338163 - RNA, 13 nt, Human herpesvirus 6B
ucggcucuuugcu

SEQ ID NO: 338164 - RNA, 14 nt, Human herpesvirus 6B
ucgggauguccauu

SEQ ID NO: 338165 - RNA, 16 nt, Human herpesvirus 6B
ucggucaccaacauuc

SEQ ID NO: 338166 - RNA, 22 nt, Human herpesvirus 6B
ucgguccguuuuuucugcaaaa

SEQ ID NO: 338167 - RNA, 23 nt, Human herpesvirus 6B
ucggugauaccgucuuugcauau

SEQ ID NO: 338168 - RNA, 18 nt, Human herpesvirus 6B
ucguaaccauucugcaga

SEQ ID NO: 338169 - RNA, 22 nt, Human herpesvirus 6B
ucguaauggcauucaccgguga

SEQ ID NO: 338170 - RNA, 17 nt, Human herpesvirus 6B
ucgucggauuaaaucau

SEQ ID NO: 338171 - RNA, 14 nt, Human herpesvirus 6B
ucgucuacuccgau

SEQ ID NO: 338172 - RNA, 22 nt, Human herpesvirus 6B
ucgugagacauuuucuauaaag

SEQ ID NO: 338173 - RNA, 19 nt, Human herpesvirus 6B
ucguggucguugguguuua

SEQ ID NO: 338174 - RNA, 22 nt, Human herpesvirus 6B
ucguguucgccauauaagucua

SEQ ID NO: 338175 - RNA, 16 nt, Human herpesvirus 6B
ucguguucguugucug

SEQ ID NO: 338176 - RNA, 15 nt, Human herpesvirus 6B
ucguucuuaacauau

SEQ ID NO: 338177 - RNA, 14 nt, Human herpesvirus 6B
ucguucuugacaga

SEQ ID NO: 338178 - RNA, 20 nt, Human herpesvirus 6B
ucguugaagaauaagccuaa

SEQ ID NO: 338179 - RNA, 17 nt, Human herpesvirus 6B
ucuaaacacgaaaugaa

SEQ ID NO: 338180 - RNA, 15 nt, Human herpesvirus 6B
ucuaaauaucaugaa

SEQ ID NO: 338181 - RNA, 19 nt, Human herpesvirus 6B
ucuaaaucgcgagacagau

SEQ ID NO: 338182 - RNA, 15 nt, Human herpesvirus 6B
ucuaaauuggucucu

SEQ ID NO: 338183 - RNA, 22 nt, Human herpesvirus 6B
ucuaacccaugaaaaucauuac

SEQ ID NO: 338184 - RNA, 23 nt, Human herpesvirus 6B
ucuacacgccgucuucaaccugu

SEQ ID NO: 338185 - RNA, 18 nt, Human herpesvirus 6B
ucuacauaaaacaggguu

SEQ ID NO: 338186 - RNA, 14 nt, Human herpesvirus 6B
ucuacuuuaucuuu

SEQ ID NO: 338187 - RNA, 18 nt, Human herpesvirus 6B
ucuagaucugccauggga

SEQ ID NO: 338188 - RNA, 19 nt, Human herpesvirus 6B
ucuagaucugccaugggau

SEQ ID NO: 338189 - RNA, 14 nt, Human herpesvirus 6B
ugacacacagaaua

SEQ ID NO: 338190 - RNA, 15 nt, Human herpesvirus 6B
ugacacacagaauac

SEQ ID NO: 338191 - RNA, 21 nt, Human herpesvirus 6B
ugacacacagaauacaaaaac

SEQ ID NO: 338192 - RNA, 16 nt, Human herpesvirus 6B
ugacaccacauaacaa

SEQ ID NO: 338193 - RNA, 20 nt, Human herpesvirus 6B
ugacaucacgucccauucac

SEQ ID NO: 338194 - RNA, 22 nt, Human herpesvirus 6B
ugacaucacgucccauucacau

SEQ ID NO: 338195 - RNA, 15 nt, Human herpesvirus 6B
ugacaucgcuaagau

SEQ ID NO: 338196 - RNA, 16 nt, Human herpesvirus 6B
ugacauuuaccagaga

SEQ ID NO: 338197 - RNA, 17 nt, Human herpesvirus 6B
ugacauuuaccagagau

SEQ ID NO: 338198 - RNA, 23 nt, Human herpesvirus 6B
ugaccagagauucuauguacuga

SEQ ID NO: 338199 - RNA, 14 nt, Human herpesvirus 6B
ugacggacuuggaa

SEQ ID NO: 338200 - RNA, 20 nt, Human herpesvirus 6B
ugacuauaggaugacugagc

SEQ ID NO: 338201 - RNA, 19 nt, Human herpesvirus 6B
ugacuauauuaucuuucau

SEQ ID NO: 338202 - RNA, 16 nt, Human herpesvirus 6B
ugacuaucaaaauaaa

SEQ ID NO: 338203 - RNA, 19 nt, Human herpesvirus 6B
ugacucugaaccgcguaug

SEQ ID NO: 338204 - RNA, 14 nt, Human herpesvirus 6B
ugacucuucucuaa

SEQ ID NO: 338205 - RNA, 22 nt, Human herpesvirus 6B
ugacugcguuacaagcaugcau

SEQ ID NO: 338206 - RNA, 17 nt, Human herpesvirus 6B
ugacuggagcagucuuc

SEQ ID NO: 338207 - RNA, 14 nt, Human herpesvirus 6B
ugagaaaguuguac

SEQ ID NO: 338208 - RNA, 21 nt, Human herpesvirus 6B
ugagaauuaugacugacaagg

SEQ ID NO: 338209 - RNA, 23 nt, Human herpesvirus 6B
ugagaauuaugacugacaaggua

SEQ ID NO: 338210 - RNA, 12 nt, Human herpesvirus 6B
ugagacagucaa

SEQ ID NO: 338211 - RNA, 23 nt, Human herpesvirus 6B
ugagacuguuuauuuucucgaca

SEQ ID NO: 338212 - RNA, 15 nt, Human herpesvirus 6B
ugagacuuagaccaa

SEQ ID NO: 338213 - RNA, 15 nt, Human herpesvirus 6B
ugagauacaaaacau

SEQ ID NO: 338214 - RNA, 19 nt, Human herpesvirus 6B
ugagauacaaaacauggac

SEQ ID NO: 338215 - RNA, 21 nt, Human herpesvirus 6B
ugagauagaaguuacaagaaa

SEQ ID NO: 338216 - RNA, 12 nt, Human herpesvirus 6B
ugagauucacuc

SEQ ID NO: 338217 - RNA, 11 nt, Human herpesvirus 6B
ugagauuugag

SEQ ID NO: 338218 - RNA, 22 nt, Human herpesvirus 6B
ugagcgacauaguggcuaugaa

SEQ ID NO: 338219 - RNA, 16 nt, Human herpesvirus 6B
ugagcugacaucugca

SEQ ID NO: 338220 - RNA, 17 nt, Human herpesvirus 6B
ugaggauuugcuuguca

SEQ ID NO: 338221 - RNA, 14 nt, Human herpesvirus 6B
ugaggugauuugaa

SEQ ID NO: 338222 - RNA, 20 nt, Human herpesvirus 6B
ugaggugauuugaacagaga

SEQ ID NO: 338223 - RNA, 18 nt, Human herpesvirus 6B
ugaguaauuggacauugu

SEQ ID NO: 338224 - RNA, 11 nt, Human herpesvirus 6B
ugagugcuauu

SEQ ID NO: 338225 - RNA, 18 nt, Human herpesvirus 6B
ugagugugcaucagcaua

SEQ ID NO: 338226 - RNA, 17 nt, Human herpesvirus 6B
ugaguuuaucgugcaau

SEQ ID NO: 338227 - RNA, 14 nt, Human herpesvirus 6B
ugaguuuccugcaa

SEQ ID NO: 338228 - RNA, 15 nt, Human herpesvirus 6B
ugaguuuuuauugaa

SEQ ID NO: 338229 - RNA, 15 nt, Human herpesvirus 6B
ugaguuuuuugcaau

SEQ ID NO: 338230 - RNA, 16 nt, Human herpesvirus 6B
ugaguuuuuugcaauu

SEQ ID NO: 338231 - RNA, 13 nt, Human herpesvirus 6B
ugauaaacuguac

SEQ ID NO: 338232 - RNA, 24 nt, Human herpesvirus 6B
ugauacaucguuuguugaaugcuu

SEQ ID NO: 338233 - RNA, 19 nt, Human herpesvirus 6B
ugauaccgucuuugcauau

SEQ ID NO: 338234 - RNA, 22 nt, Human herpesvirus 6B
ugauaccgucuuugcauauuau

SEQ ID NO: 338235 - RNA, 21 nt, Human herpesvirus 6B
ugauacggcggcggaagugaa

SEQ ID NO: 338236 - RNA, 16 nt, Human herpesvirus 6B
ugauauauugcgauuc

SEQ ID NO: 338237 - RNA, 13 nt, Human herpesvirus 6B
ugaucaagacuua

SEQ ID NO: 338238 - RNA, 14 nt, Human herpesvirus 6B
ugaucaagacuuaa

SEQ ID NO: 338239 - RNA, 14 nt, Human herpesvirus 6B
ugaucagcauucac

SEQ ID NO: 338240 - RNA, 17 nt, Human herpesvirus 6B
ugaucgccccagacuua

SEQ ID NO: 338241 - RNA, 18 nt, Human herpesvirus 6B
ugaucgccccagacuuau

SEQ ID NO: 338242 - RNA, 20 nt, Human herpesvirus 6B
ugaucucacgucacaguuuu

SEQ ID NO: 338243 - RNA, 16 nt, Human herpesvirus 6B
ugaugaaagcuucauu

SEQ ID NO: 338244 - RNA, 16 nt, Human herpesvirus 6B
ugaugaaauugugacu

SEQ ID NO: 338245 - RNA, 23 nt, Human herpesvirus 6B
ugaugauuaauacaucauuaaaa

SEQ ID NO: 338246 - RNA, 16 nt, Human herpesvirus 6B
ugaugauuugucgaau

SEQ ID NO: 338247 - RNA, 22 nt, Human herpesvirus 6B
ugauggaguuauuggaccacga

SEQ ID NO: 338248 - RNA, 13 nt, Human herpesvirus 6B
ugauguaauugga

SEQ ID NO: 338249 - RNA, 17 nt, Human herpesvirus 6B
ugauuaauacaucauua

SEQ ID NO: 338250 - RNA, 23 nt, Human herpesvirus 6B
ugauuaggggacagagccuagac

SEQ ID NO: 338251 - RNA, 19 nt, Human herpesvirus 6B
ugauuauagauagcuccaa

SEQ ID NO: 338252 - RNA, 15 nt, Human herpesvirus 6B
ugauuauaucagagc

SEQ ID NO: 338253 - RNA, 13 nt, Human herpesvirus 6B
ugauuaugccaaa

SEQ ID NO: 338254 - RNA, 12 nt, Human herpesvirus 6B
ugauugcaacaa

SEQ ID NO: 338255 - RNA, 14 nt, Human herpesvirus 6B
ugauugcaaccaau

SEQ ID NO: 338256 - RNA, 11 nt, Human herpesvirus 6B
ugauugcaauc

SEQ ID NO: 338257 - RNA, 16 nt, Human herpesvirus 6B
ugauugggagcucacu

SEQ ID NO: 338258 - RNA, 15 nt, Human herpesvirus 6B
ugauuuuugacaaaa

SEQ ID NO: 338259 - RNA, 22 nt, Human herpesvirus 6B
ugcaacacaacaaacauccuaa

SEQ ID NO: 338260 - RNA, 19 nt, Human herpesvirus 6B
ugcacggcgucaccaagaa

SEQ ID NO: 338261 - RNA, 20 nt, Human herpesvirus 6B
ugcacggcgucaccaagaaa

SEQ ID NO: 338262 - RNA, 16 nt, Human herpesvirus 6B
ugcagaagaacaugaa

SEQ ID NO: 338263 - RNA, 20 nt, Human herpesvirus 6B
ugcagagugcgagacuggaa

SEQ ID NO: 338264 - RNA, 22 nt, Human herpesvirus 6B
ugcagaugccuguagggaugua

SEQ ID NO: 338265 - RNA, 14 nt, Human herpesvirus 6B
ugcaggugcugcua

SEQ ID NO: 338266 - RNA, 20 nt, Human herpesvirus 6B
ugcaguauuaauguuuuuca

SEQ ID NO: 338267 - RNA, 13 nt, Human herpesvirus 6B
ugcauaacaucuc

SEQ ID NO: 338268 - RNA, 14 nt, Human herpesvirus 6B
ugcauaacaucuca

SEQ ID NO: 338269 - RNA, 13 nt, Human herpesvirus 6B
ugcaucucuacuu

SEQ ID NO: 338270 - RNA, 15 nt, Human herpesvirus 6B
ugcaugucuuuagau

SEQ ID NO: 338271 - RNA, 20 nt, Human herpesvirus 6B
ugcauguggcaagugcuggu

SEQ ID NO: 338272 - RNA, 15 nt, Human herpesvirus 6B
ugcauuaaacaauaa

SEQ ID NO: 338273 - RNA, 16 nt, Human herpesvirus 6B
ugcauuaucgugagac

SEQ ID NO: 338274 - RNA, 21 nt, Human herpesvirus 6B
ugccaguucacacagaugcaa

SEQ ID NO: 338275 - RNA, 17 nt, Human herpesvirus 6B
ugccauuauugauagca

SEQ ID NO: 338276 - RNA, 16 nt, Human herpesvirus 6B
ugccguguuacugaca

SEQ ID NO: 338277 - RNA, 14 nt, Human herpesvirus 6B
ugccuacauaugcc

SEQ ID NO: 338278 - RNA, 22 nt, Human herpesvirus 6B
ugccucuaacuguuguucuugg

SEQ ID NO: 338279 - RNA, 19 nt, Human herpesvirus 6B
ugcgaauguuaaaguaugu

SEQ ID NO: 338280 - RNA, 17 nt, Human herpesvirus 6B
ugcgcaugaaaauauca

SEQ ID NO: 338281 - RNA, 21 nt, Human herpesvirus 6B
ugcggaacaccagcaugucau

SEQ ID NO: 338282 - RNA, 21 nt, Human herpesvirus 6B
ugcgguaaacggcauacauuu

SEQ ID NO: 338283 - RNA, 21 nt, Human herpesvirus 6B
ugcgucuguuuauuaccagua

SEQ ID NO: 338284 - RNA, 15 nt, Human herpesvirus 6B
ugcguguuaugggga

SEQ ID NO: 338285 - RNA, 15 nt, Human herpesvirus 6B
ugcguuacaagcaug

SEQ ID NO: 338286 - RNA, 19 nt, Human herpesvirus 6B
ugcguucugcguuguuuca

SEQ ID NO: 338287 - RNA, 15 nt, Human herpesvirus 6B
ugcuaguuguaugac

SEQ ID NO: 338288 - RNA, 14 nt, Human herpesvirus 6B
ugcuaucuguguug

SEQ ID NO: 338289 - RNA, 13 nt, Human herpesvirus 6B
ugcuauuaacaca

SEQ ID NO: 338290 - RNA, 13 nt, Human herpesvirus 6B
ugcucaaccuaac

SEQ ID NO: 338291 - RNA, 20 nt, Human herpesvirus 6B
ugcucggcucuuugcugauu

SEQ ID NO: 338292 - RNA, 14 nt, Human herpesvirus 6B
ugcucucagaucau

SEQ ID NO: 338293 - RNA, 19 nt, Human herpesvirus 6B
ugcucugagccgggcaguu

SEQ ID NO: 338294 - RNA, 18 nt, Human herpesvirus 6B
ugcucuuagagauaucug

SEQ ID NO: 338295 - RNA, 16 nt, Human herpesvirus 6B
ugcugagcacuuguca

SEQ ID NO: 338296 - RNA, 23 nt, Human herpesvirus 6B
ugcugauuggauagagauauaau

SEQ ID NO: 338297 - RNA, 21 nt, Human herpesvirus 6B
ugcugccauuauugauagcau

SEQ ID NO: 338298 - RNA, 15 nt, Human herpesvirus 6B
ugcuggcugagauuc

SEQ ID NO: 338299 - RNA, 16 nt, Human herpesvirus 6B
ugcugucugcagcuua

SEQ ID NO: 338300 - RNA, 17 nt, Human herpesvirus 6B
ugcugugagagaaugca

SEQ ID NO: 338301 - RNA, 14 nt, Human herpesvirus 6B
ugcuuaacuugcac

SEQ ID NO: 338302 - RNA, 21 nt, Human herpesvirus 6B
uguuccaggagcccacagcau

SEQ ID NO: 338303 - RNA, 23 nt, Human herpesvirus 6B
uguuccgaauucuuaccaagaaa

SEQ ID NO: 338304 - RNA, 21 nt, Human herpesvirus 6B
uguucgaugauuauucugucu

SEQ ID NO: 338305 - RNA, 18 nt, Human herpesvirus 6B
uguucguugucugacuua

SEQ ID NO: 338306 - RNA, 19 nt, Human herpesvirus 6B
uguucugccuauaugcgaa

SEQ ID NO: 338307 - RNA, 17 nt, Human herpesvirus 6B
uguucuuucaaaaugac

SEQ ID NO: 338308 - RNA, 13 nt, Human herpesvirus 6B
uguugacuuuuaa

SEQ ID NO: 338309 - RNA, 16 nt, Human herpesvirus 6B
uguugaguaauuggac

SEQ ID NO: 338310 - RNA, 23 nt, Human herpesvirus 6B
uguugucucuuuauaaacuuaaa

SEQ ID NO: 338311 - RNA, 23 nt, Human herpesvirus 6B
uguuucuuagaaccaaucuguga

SEQ ID NO: 338312 - RNA, 19 nt, Human herpesvirus 6B
uguuugaccucgcgggaag

SEQ ID NO: 338313 - RNA, 16 nt, Human herpesvirus 6B
uguuugccaaccaaau

SEQ ID NO: 338314 - RNA, 22 nt, Human herpesvirus 6B
uguuuuuacuugauaaacugua

SEQ ID NO: 338315 - RNA, 15 nt, Human herpesvirus 6B
uguuuuuccauaaau

SEQ ID NO: 338316 - RNA, 20 nt, Human herpesvirus 6B
uguuuuugauugcaaucaca

SEQ ID NO: 338317 - RNA, 21 nt, Human herpesvirus 6B
uguuuuuuuuuuucuguguau

SEQ ID NO: 338318 - RNA, 20 nt, Human herpesvirus 6B
uuaaaaacaucuuaacagac

SEQ ID NO: 338319 - RNA, 16 nt, Human herpesvirus 6B
uuaaaaagcaagguga

SEQ ID NO: 338320 - RNA, 12 nt, Human herpesvirus 6B
uuaaaauaccga

SEQ ID NO: 338321 - RNA, 19 nt, Human herpesvirus 6B
uuaaaauggauuagugaaa

SEQ ID NO: 338322 - RNA, 17 nt, Human herpesvirus 6B
uuaaaauuuuuaaacag

SEQ ID NO: 338323 - RNA, 18 nt, Human herpesvirus 6B
uuaaaauuuuuaaacaga

SEQ ID NO: 338324 - RNA, 21 nt, Human herpesvirus 6B
uuaaacgaaaacuuuuugccg

SEQ ID NO: 338325 - RNA, 17 nt, Human herpesvirus 6B
uuaaacggaauuaacaa

SEQ ID NO: 338326 - RNA, 22 nt, Human herpesvirus 6B
uuaaacgguaaauucaaacucc

SEQ ID NO: 338327 - RNA, 20 nt, Human herpesvirus 6B
uuaaagaaugcugacuuuga

SEQ ID NO: 338328 - RNA, 15 nt, Human herpesvirus 6B
uuaaagcguuuacaa

SEQ ID NO: 338329 - RNA, 14 nt, Human herpesvirus 6B
uuaaaugacacaga

SEQ ID NO: 338330 - RNA, 18 nt, Human herpesvirus 6B
uuaaaugacacagaaucu

SEQ ID NO: 338331 - RNA, 18 nt, Human herpesvirus 6B
uuaaaugugaacaguaua

SEQ ID NO: 338332 - RNA, 20 nt, Human herpesvirus 6B
uuaacaaaaugguuaugaca

SEQ ID NO: 338333 - RNA, 23 nt, Human herpesvirus 6B
uuaacaaaaugguuaugacaaag

SEQ ID NO: 338334 - RNA, 16 nt, Human herpesvirus 6B
uuaacaauucucucaa

SEQ ID NO: 338335 - RNA, 13 nt, Human herpesvirus 6B
uuaacacauacau

SEQ ID NO: 338336 - RNA, 22 nt, Human herpesvirus 6B
uuaacagacuacuuuuaaaaua

SEQ ID NO: 338337 - RNA, 12 nt, Human herpesvirus 6B
uuaacagugucu

SEQ ID NO: 338338 - RNA, 13 nt, Human herpesvirus 6B
uuaacauacagau

SEQ ID NO: 338339 - RNA, 16 nt, Human herpesvirus 6B
uuaacauugugagaac

SEQ ID NO: 338340 - RNA, 21 nt, Human herpesvirus 6B
uuaaccauguuuuuacuugau

SEQ ID NO: 338341 - RNA, 19 nt, Human herpesvirus 6B
uuaacgcgucaacaaacaa

SEQ ID NO: 338342 - RNA, 17 nt, Human herpesvirus 6B
uuaacuaagauugugca

SEQ ID NO: 338343 - RNA, 13 nt, Human herpesvirus 6B
uuaacuuacuuaa

SEQ ID NO: 338344 - RNA, 22 nt, Human herpesvirus 6B
uuaacuuaucaacuauacuuaa

SEQ ID NO: 338345 - RNA, 18 nt, Human herpesvirus 6B
uuaagaagaaacaaguug

SEQ ID NO: 338346 - RNA, 22 nt, Human herpesvirus 6B
uuaagauagccagggcauucac

SEQ ID NO: 338347 - RNA, 21 nt, Human herpesvirus 6B
uuaagauuaucggugcacaua

SEQ ID NO: 338348 - RNA, 15 nt, Human herpesvirus 6B
uuaaggauaagauga

SEQ ID NO: 338349 - RNA, 12 nt, Human herpesvirus 6B
uuaaguucucac

SEQ ID NO: 338350 - RNA, 16 nt, Human herpesvirus 6B
uuaaucucacacacag

SEQ ID NO: 338351 - RNA, 12 nt, Human herpesvirus 6B
uuaaugcauuca

SEQ ID NO: 338352 - RNA, 15 nt, Human herpesvirus 6B
uuaaugcauucacaa

SEQ ID NO: 338353 - RNA, 14 nt, Human herpesvirus 6B
uuaauuacauauag

SEQ ID NO: 338354 - RNA, 10 nt, Human herpesvirus 6B
uuaauuccaa

SEQ ID NO: 338355 - RNA, 17 nt, Human herpesvirus 6B
uuaauuccaagucacgu

SEQ ID NO: 338356 - RNA, 17 nt, Human herpesvirus 6B
uuaauuccagcuuucuu

SEQ ID NO: 338357 - RNA, 16 nt, Human herpesvirus 6B
uuacaagcaugcauug

SEQ ID NO: 338358 - RNA, 20 nt, Human herpesvirus 6B
uuacaauguucuugacaaau

SEQ ID NO: 338359 - RNA, 20 nt, Human herpesvirus 6B
uuacaauuaugcgcaugaaa

SEQ ID NO: 338360 - RNA, 22 nt, Human herpesvirus 6B
uuacauaagaauuacaauacag

SEQ ID NO: 338361 - RNA, 22 nt, Human herpesvirus 6B
uuacaucaagacuacucuggcu

SEQ ID NO: 338362 - RNA, 20 nt, Human herpesvirus 6B
uuaccaccuguuuccaaugu

SEQ ID NO: 338363 - RNA, 13 nt, Human herpesvirus 6B
uuaccguuucagg

SEQ ID NO: 338364 - RNA, 19 nt, Human herpesvirus 6B
uuaccuaucaacaaugucc

SEQ ID NO: 338365 - RNA, 21 nt, Human herpesvirus 6B
uuaccuuuuaagagugauuca

SEQ ID NO: 338366 - RNA, 23 nt, Human herpesvirus 6B
uuaccuuuuaagagugauucaag

SEQ ID NO: 338367 - RNA, 19 nt, Human herpesvirus 6B
uuacgauuugcuaugugua

SEQ ID NO: 338368 - RNA, 21 nt, Human herpesvirus 6B
uuacggacaaaccucucgccg

SEQ ID NO: 338369 - RNA, 16 nt, Human herpesvirus 6B
uuacggggaagaucua

SEQ ID NO: 338370 - RNA, 17 nt, Human herpesvirus 6B
uuacggggaagaucuau

SEQ ID NO: 338371 - RNA, 21 nt, Human herpesvirus 6B
uuacuaacgacggaauuuacu

SEQ ID NO: 338372 - RNA, 14 nt, Human herpesvirus 6B
uuacuaugugacau

SEQ ID NO: 338373 - RNA, 20 nt, Human herpesvirus 6B
uuacugacaccacauaacaa

SEQ ID NO: 338374 - RNA, 20 nt, Human herpesvirus 6B
uuacuguaaacaaauucuua

SEQ ID NO: 338375 - RNA, 15 nt, Human herpesvirus 6B
uuacuuacaacugaa

SEQ ID NO: 338376 - RNA, 16 nt, Human herpesvirus 6B
uuagaaaaaagugcaa

SEQ ID NO: 338377 - RNA, 17 nt, Human herpesvirus 6B
uuagaaaaaagugcaag

SEQ ID NO: 338378 - RNA, 22 nt, Human herpesvirus 6B
uuagaacaggaagcgccauaaa

SEQ ID NO: 338379 - RNA, 17 nt, Human herpesvirus 6B
uuagaauaggcgucuca

SEQ ID NO: 338380 - RNA, 20 nt, Human herpesvirus 6B
uuagaauaggcgucucaugc

SEQ ID NO: 338381 - RNA, 18 nt, Human herpesvirus 6B
uuagacucgccgaugaaa

SEQ ID NO: 338382 - RNA, 13 nt, Human herpesvirus 6B
uuagaugauguug

SEQ ID NO: 338383 - RNA, 15 nt, Human herpesvirus 6B
uuagaugauguugau

SEQ ID NO: 338384 - RNA, 17 nt, Human herpesvirus 6B
uuagauggaaaacugca

SEQ ID NO: 338385 - RNA, 15 nt, Human herpesvirus 6B
uuagauguaacucau

SEQ ID NO: 338386 - RNA, 17 nt, Human herpesvirus 6B
uuagcaacaccguccuu

SEQ ID NO: 338387 - RNA, 17 nt, Human herpesvirus 6B
uuagcaaucauuaacau

SEQ ID NO: 338388 - RNA, 15 nt, Human herpesvirus 6B
uuaguauacgaaaua

SEQ ID NO: 338389 - RNA, 13 nt, Human herpesvirus 6B
uuaguuaauucuc

SEQ ID NO: 338390 - RNA, 16 nt, Human herpesvirus 6B
uuauaaaaaacgugga

SEQ ID NO: 338391 - RNA, 13 nt, Human herpesvirus 6B
uuauaaaaacaca

SEQ ID NO: 338392 - RNA, 14 nt, Human herpesvirus 6B
uuauaaaaacacac

SEQ ID NO: 338393 - RNA, 13 nt, Human herpesvirus 6B
uuauaaaagaagc

SEQ ID NO: 338394 - RNA, 17 nt, Human herpesvirus 6B
uuauaacacgacaagua

SEQ ID NO: 338395 - RNA, 13 nt, Human herpesvirus 6B
uuauaagcucaag

SEQ ID NO: 338396 - RNA, 19 nt, Human herpesvirus 6B
uuauaaugugaacuaaaua

SEQ ID NO: 338397 - RNA, 14 nt, Human herpesvirus 6B
uuauagacuaaacu

SEQ ID NO: 338398 - RNA, 21 nt, Human herpesvirus 6B
uuauagauagcggcacguuga

SEQ ID NO: 338399 - RNA, 19 nt, Human herpesvirus 6B
uuauauacguuaaauaucu

SEQ ID NO: 338400 - RNA, 18 nt, Human herpesvirus 6B
uuauaugcaggugcugcu

SEQ ID NO: 338401 - RNA, 23 nt, Human herpesvirus 6B
uuauauuguuguaaaauacauac

SEQ ID NO: 338402 - RNA, 13 nt, Human herpesvirus 6B
uuaucaaaagcca

SEQ ID NO: 338403 - RNA, 16 nt, Human herpesvirus 6B
uuaucaaaagccagau

SEQ ID NO: 338404 - RNA, 15 nt, Human herpesvirus 6B
uuaucaacuauacuu

SEQ ID NO: 338405 - RNA, 19 nt, Human herpesvirus 6B
uuaugaaaauugcucuauu

SEQ ID NO: 338406 - RNA, 17 nt, Human herpesvirus 6B
uuaugaucggcauuugu

SEQ ID NO: 338407 - RNA, 16 nt, Human herpesvirus 6B
uuauggggaagaucua

SEQ ID NO: 338408 - RNA, 17 nt, Human herpesvirus 6B
uuauggggaagaucuau

SEQ ID NO: 338409 - RNA, 16 nt, Human herpesvirus 6B
uuauguaauuguuaac

SEQ ID NO: 338410 - RNA, 14 nt, Human herpesvirus 6B
uuauuacaauuuga

SEQ ID NO: 338411 - RNA, 19 nt, Human herpesvirus 6B
uuauucagccguagcgaua

SEQ ID NO: 338412 - RNA, 22 nt, Human herpesvirus 6B
uuauucugguaaaaauguaugu

SEQ ID NO: 338413 - RNA, 14 nt, Human herpesvirus 6B
uuauuggaccacga

SEQ ID NO: 338414 - RNA, 17 nt, Human herpesvirus 6B
uuauuuucuguauuaau

SEQ ID NO: 338415 - RNA, 12 nt, Human herpesvirus 6B
uugaugugcuac

SEQ ID NO: 338416 - RNA, 16 nt, Human herpesvirus 6B
uugauguuuccugaau

SEQ ID NO: 338417 - RNA, 18 nt, Human herpesvirus 6B
uugauuaggggacagagc

SEQ ID NO: 338418 - RNA, 19 nt, Human herpesvirus 6B
uugcaaauauuauuuuccc

SEQ ID NO: 338419 - RNA, 14 nt, Human herpesvirus 6B
uugcacccuaucac

SEQ ID NO: 338420 - RNA, 20 nt, Human herpesvirus 6B
uugcagcugucuagauucua

SEQ ID NO: 338421 - RNA, 12 nt, Human herpesvirus 6B
uugcaugcauug

SEQ ID NO: 338422 - RNA, 15 nt, Human herpesvirus 6B
uugcauuaaacaaua

SEQ ID NO: 338423 - RNA, 14 nt, Human herpesvirus 6B
uugccaaccaaaug

SEQ ID NO: 338424 - RNA, 14 nt, Human herpesvirus 6B
uugccaccagauag

SEQ ID NO: 338425 - RNA, 13 nt, Human herpesvirus 6B
uugcccucccgca

SEQ ID NO: 338426 - RNA, 20 nt, Human herpesvirus 6B
uugccguugucgugugauca

SEQ ID NO: 338427 - RNA, 15 nt, Human herpesvirus 6B
uugcgggaugccaua

SEQ ID NO: 338428 - RNA, 16 nt, Human herpesvirus 6B
uugcggugcauaacau

SEQ ID NO: 338429 - RNA, 17 nt, Human herpesvirus 6B
uugcugucacacucuga

SEQ ID NO: 338430 - RNA, 13 nt, Human herpesvirus 6B
uugcugucuuccu

SEQ ID NO: 338431 - RNA, 22 nt, Human herpesvirus 6B
uugcuuauaagcaaaacucuau

SEQ ID NO: 338432 - RNA, 11 nt, Human herpesvirus 6B
uugcuugucac

SEQ ID NO: 338433 - RNA, 19 nt, Human herpesvirus 6B
uuggaaaauguaaacacga

SEQ ID NO: 338434 - RNA, 15 nt, Human herpesvirus 6B
uuggaaagcuuuaug

SEQ ID NO: 338435 - RNA, 14 nt, Human herpesvirus 6B
uuggaaucacaaaa

SEQ ID NO: 338436 - RNA, 14 nt, Human herpesvirus 6B
uuggaccuugaaug

SEQ ID NO: 338437 - RNA, 20 nt, Human herpesvirus 6B
uuggagagaacugucuugca

SEQ ID NO: 338438 - RNA, 19 nt, Human herpesvirus 6B
uuggagauaauaaaacacg

SEQ ID NO: 338439 - RNA, 15 nt, Human herpesvirus 6B
uuggaggugagacau

SEQ ID NO: 338440 - RNA, 21 nt, Human herpesvirus 6B
uuggaugccuacauaugccga

SEQ ID NO: 338441 - RNA, 22 nt, Human herpesvirus 6B
uuggauuccauccgcuaagaga

SEQ ID NO: 338442 - RNA, 23 nt, Human herpesvirus 6B
uuggcuacggcuacggugcgauu

SEQ ID NO: 338443 - RNA, 13 nt, Human herpesvirus 6B
uugggaccuucag

SEQ ID NO: 338444 - RNA, 12 nt, Human herpesvirus 6B
uugggagcucac

SEQ ID NO: 338445 - RNA, 22 nt, Human herpesvirus 6B
uugggagcucacuguaccuuua

SEQ ID NO: 338446 - RNA, 16 nt, Human herpesvirus 6B
uuguaaaaauggcuca

SEQ ID NO: 338447 - RNA, 17 nt, Human herpesvirus 6B
uuguaccaacauguauu

SEQ ID NO: 338448 - RNA, 12 nt, Human herpesvirus 6B
uuguauagucua

SEQ ID NO: 338449 - RNA, 21 nt, Human herpesvirus 6B
uugucaaauagccacaaaaua

SEQ ID NO: 338450 - RNA, 20 nt, Human herpesvirus 6B
uugucgcauguuuauuucaa

SEQ ID NO: 338451 - RNA, 17 nt, Human herpesvirus 6B
uugucgccucaacacaa

SEQ ID NO: 338452 - RNA, 22 nt, Human herpesvirus 6B
uugucuucgugucugagaugau

SEQ ID NO: 338453 - RNA, 16 nt, Human herpesvirus 6B
uugucuugcaaacagc

SEQ ID NO: 338454 - RNA, 13 nt, Human herpesvirus 6B
uugugacaaggua

SEQ ID NO: 338455 - RNA, 16 nt, Human herpesvirus 6B
uugugacgauaguguu

SEQ ID NO: 338456 - RNA, 18 nt, Human herpesvirus 6B
uugugaucaagugguguu

SEQ ID NO: 338457 - RNA, 20 nt, Human herpesvirus 6B
uugugcaguucuuacauauu

SEQ ID NO: 338458 - RNA, 16 nt, Human herpesvirus 6B
uugugcucgcauuucu

SEQ ID NO: 338459 - RNA, 21 nt, Human herpesvirus 6B
uuguguuaaaauaaaguucca

SEQ ID NO: 338460 - RNA, 16 nt, Human herpesvirus 6B
uuguguucuaacacau

SEQ ID NO: 338461 - RNA, 21 nt, Human herpesvirus 6B
uuguuccagauguagguuuca

SEQ ID NO: 338462 - RNA, 16 nt, Human herpesvirus 6B
uuguuccgaauucuua

SEQ ID NO: 338463 - RNA, 22 nt, Human herpesvirus 6B
uuguucgcacaaaaugauugca

SEQ ID NO: 338464 - RNA, 13 nt, Human herpesvirus 6B
uuguuuuuuacuu

SEQ ID NO: 338465 - RNA, 20 nt, Human herpesvirus 6B
uuguuuuuuagcgcuguaug

SEQ ID NO: 338466 - RNA, 13 nt, Human herpesvirus 6B
uuuaaaagcgaua

SEQ ID NO: 338467 - RNA, 14 nt, Human herpesvirus 6B
uuuaaaagugcaac

SEQ ID NO: 338468 - RNA, 17 nt, Human herpesvirus 6B
uuuaacgaaaaccauua

SEQ ID NO: 338469 - RNA, 15 nt, Human herpesvirus 6B
uuuaaguucucacgu

SEQ ID NO: 338470 - RNA, 13 nt, Human herpesvirus 6B
uuuaauucaggaa

SEQ ID NO: 338471 - RNA, 22 nt, Human herpesvirus 6B
uuuacaaugaguuuuuugcaau

SEQ ID NO: 338472 - RNA, 14 nt, Human herpesvirus 6B
uuuacacaauccua

SEQ ID NO: 338473 - RNA, 19 nt, Human herpesvirus 6B
uuuacaucaacuauuuaac

SEQ ID NO: 338474 - RNA, 16 nt, Human herpesvirus 6B
uuuacaucgaaucuca

SEQ ID NO: 338475 - RNA, 13 nt, Human herpesvirus 6B
uuuaccagagaua

SEQ ID NO: 338476 - RNA, 12 nt, Human herpesvirus 6B
uuuaccuaucaa

SEQ ID NO: 338477 - RNA, 18 nt, Human herpesvirus 6B
uuuacuguuucuuugaca

SEQ ID NO: 338478 - RNA, 15 nt, Human herpesvirus 6B
uuuagagauuaugcc

SEQ ID NO: 338479 - RNA, 15 nt, Human herpesvirus 6B
uuuagcagauccaug

SEQ ID NO: 338480 - RNA, 14 nt, Human herpesvirus 6B
uuuagcaguaggac

SEQ ID NO: 338481 - RNA, 17 nt, Human herpesvirus 6B
uuuagcaugggugagug

SEQ ID NO: 338482 - RNA, 19 nt, Human herpesvirus 6B
uuuaguaauaauagguuau

SEQ ID NO: 338483 - RNA, 19 nt, Human herpesvirus 6B
uuuauacacgaacuaaaua

SEQ ID NO: 338484 - RNA, 20 nt, Human herpesvirus 6B
uuuauagagcaauucaucaa

SEQ ID NO: 338485 - RNA, 21 nt, Human herpesvirus 6B
uuuauagagcaauucaucaaa

SEQ ID NO: 338486 - RNA, 21 nt, Human herpesvirus 6B
uuuauagcgguuggaugccua

SEQ ID NO: 338487 - RNA, 18 nt, Human herpesvirus 6B
uuuauauuuggcauuaga

SEQ ID NO: 338488 - RNA, 17 nt, Human herpesvirus 6B
uuuaucaaaagccagau

SEQ ID NO: 338489 - RNA, 23 nt, Human herpesvirus 6B
uuuaucccucguacaagcuuaau

SEQ ID NO: 338490 - RNA, 16 nt, Human herpesvirus 6B
uuuaucggaacacaua

SEQ ID NO: 338491 - RNA, 16 nt, Human herpesvirus 6B
uuuauuaguauccuuc

SEQ ID NO: 338492 - RNA, 18 nt, Human herpesvirus 6B
uuucaaaaugaccagaga

SEQ ID NO: 338493 - RNA, 21 nt, Human herpesvirus 6B
uuucaagaaugggaugcauua

SEQ ID NO: 338494 - RNA, 22 nt, Human herpesvirus 6B
uuucaagaaugggaugcauuau

SEQ ID NO: 338495 - RNA, 16 nt, Human herpesvirus 6B
uuucaagaucugccau

SEQ ID NO: 338496 - RNA, 20 nt, Human herpesvirus 6B
uuucacacaacuuaaccgca

SEQ ID NO: 338497 - RNA, 21 nt, Human herpesvirus 6B
uuucacacgcauagaugggua

SEQ ID NO: 338498 - RNA, 18 nt, Human herpesvirus 6B
uuucacuuuguuuagcuu

SEQ ID NO: 338499 - RNA, 20 nt, Human herpesvirus 6B
uuucagacaugccgcagaag

SEQ ID NO: 338500 - RNA, 21 nt, Human herpesvirus 6B
uuucauaggaaguaaauacaa

SEQ ID NO: 338501 - RNA, 14 nt, Human herpesvirus 6B
uuucauuucuccac

SEQ ID NO: 338502 - RNA, 13 nt, Human herpesvirus 6B
uuucccaccuaau

SEQ ID NO: 338503 - RNA, 18 nt, Human herpesvirus 6B
uuuccccagcacaccucg

SEQ ID NO: 338504 - RNA, 19 nt, Human herpesvirus 6B
uuucgaggaaaacucgcac

SEQ ID NO: 338505 - RNA, 18 nt, Human herpesvirus 6B
uuucgcgauagucaugca

SEQ ID NO: 338506 - RNA, 23 nt, Human herpesvirus 6B
uuucggauuuguucgauugccaa

SEQ ID NO: 338507 - RNA, 16 nt, Human herpesvirus 6B
uuucgggugcaaucaa

SEQ ID NO: 338508 - RNA, 17 nt, Human herpesvirus 6B
uuucgguuucgcugcua

SEQ ID NO: 338509 - RNA, 18 nt, Human herpesvirus 6B
uuucgucugauacuugaa

SEQ ID NO: 338510 - RNA, 17 nt, Human herpesvirus 6B
uuucucgaaaauacaau

SEQ ID NO: 338511 - RNA, 20 nt, Human herpesvirus 6B
uuucucugucgcugugagcc

SEQ ID NO: 338512 - RNA, 13 nt, Human herpesvirus 6B
uuucugaagacag

SEQ ID NO: 338513 - RNA, 12 nt, Human herpesvirus 6B
uuucugcaaaac

SEQ ID NO: 338514 - RNA, 12 nt, Human herpesvirus 6B
uuucugucuuua

SEQ ID NO: 338515 - RNA, 16 nt, Human herpesvirus 6B
uuucuguguauuguga

SEQ ID NO: 338516 - RNA, 13 nt, Human herpesvirus 6B
uuucuucgggaug

SEQ ID NO: 338517 - RNA, 18 nt, Human herpesvirus 6B
uuugacauuuaccagaga

SEQ ID NO: 338518 - RNA, 21 nt, Human herpesvirus 6B
uuugacgucugggaucauugu

SEQ ID NO: 338519 - RNA, 16 nt, Human herpesvirus 6B
uuugacuccaacgcac

SEQ ID NO: 338520 - RNA, 21 nt, Human herpesvirus 6B
uuugacuuugcggaaccauac

SEQ ID NO: 338521 - RNA, 19 nt, Human herpesvirus 6B
uuugaggcguuuaccggua

SEQ ID NO: 338522 - RNA, 14 nt, Human herpesvirus 6B
uuugauugcaauca

SEQ ID NO: 338523 - RNA, 16 nt, Human herpesvirus 6B
uuugauugcaaucaca

SEQ ID NO: 338524 - RNA, 11 nt, Human herpesvirus 6B
uuugcaauuug

SEQ ID NO: 338525 - RNA, 17 nt, Human herpesvirus 6B
uuugcagaaugaaugua

SEQ ID NO: 338526 - RNA, 13 nt, Human herpesvirus 6B
uuugccauaauca

SEQ ID NO: 338527 - RNA, 14 nt, Human herpesvirus 6B
uuugccgaagauag

SEQ ID NO: 338528 - RNA, 20 nt, Human herpesvirus 6B
uuugcugacccgauguggaa

SEQ ID NO: 338529 - RNA, 16 nt, Human herpesvirus 7
aaaaugagauuuuucc

SEQ ID NO: 338530 - RNA, 21 nt, Human herpesvirus 7
aaaaugauuuuucuuaccgca

SEQ ID NO: 338531 - RNA, 18 nt, Human herpesvirus 7
aaaaugcugcaauguuca

SEQ ID NO: 338532 - RNA, 20 nt, Human herpesvirus 7
aaaaugcugcucagcuagaa

SEQ ID NO: 338533 - RNA, 21 nt, Human herpesvirus 7
aaaaugggcguaacugugacg

SEQ ID NO: 338534 - RNA, 13 nt, Human herpesvirus 7
aaaauguauacaa

SEQ ID NO: 338535 - RNA, 18 nt, Human herpesvirus 7
aaaaugucagaguuuaaa

SEQ ID NO: 338536 - RNA, 15 nt, Human herpesvirus 7
aaaaugucucuugaa

SEQ ID NO: 338537 - RNA, 15 nt, Human herpesvirus 7
aaaauguuaugugcu

SEQ ID NO: 338538 - RNA, 12 nt, Human herpesvirus 7
aaaauguuuaaa

SEQ ID NO: 338539 - RNA, 18 nt, Human herpesvirus 7
aaaauguuuugauuucac

SEQ ID NO: 338540 - RNA, 23 nt, Human herpesvirus 7
aaaauuaaauaaccaaaccacag

SEQ ID NO: 338541 - RNA, 15 nt, Human herpesvirus 7
aaaauuaacagcucu

SEQ ID NO: 338542 - RNA, 22 nt, Human herpesvirus 7
aaaauucaacgucuuacuugga

SEQ ID NO: 338543 - RNA, 15 nt, Human herpesvirus 7
aaaauuccauucgau

SEQ ID NO: 338544 - RNA, 20 nt, Human herpesvirus 7
aaaauucuccggcgcuuaaa

SEQ ID NO: 338545 - RNA, 14 nt, Human herpesvirus 7
aaaauuuaccuuua

SEQ ID NO: 338546 - RNA, 22 nt, Human herpesvirus 7
aaaauuuagaaaaaaaacauua

SEQ ID NO: 338547 - RNA, 21 nt, Human herpesvirus 7
aaaauuuagcaccaacugaau

SEQ ID NO: 338548 - RNA, 13 nt, Human herpesvirus 7
aaaauuuggagaa

SEQ ID NO: 338549 - RNA, 19 nt, Human herpesvirus 7
aaaauuuuaauugugcauc

SEQ ID NO: 338550 - RNA, 21 nt, Human herpesvirus 7
aaaauuuuacgaugacagucu

SEQ ID NO: 338551 - RNA, 14 nt, Human herpesvirus 7
aaaauuuuuagcuc

SEQ ID NO: 338552 - RNA, 16 nt, Human herpesvirus 7
aaaauuuuuuacuguc

SEQ ID NO: 338553 - RNA, 15 nt, Human herpesvirus 7
aaacaaaacaguuug

SEQ ID NO: 338554 - RNA, 15 nt, Human herpesvirus 7
aaacaaaauguauuc

SEQ ID NO: 338555 - RNA, 17 nt, Human herpesvirus 7
aaacaaaauguauucaa

SEQ ID NO: 338556 - RNA, 14 nt, Human herpesvirus 7
aaacaaacuauguc

SEQ ID NO: 338557 - RNA, 19 nt, Human herpesvirus 7
aaacaaacuauguccaaaa

SEQ ID NO: 338558 - RNA, 16 nt, Human herpesvirus 7
aaacaacauacauauu

SEQ ID NO: 338559 - RNA, 24 nt, Human herpesvirus 7
aaacaagaaagucagaacauuguc

SEQ ID NO: 338560 - RNA, 13 nt, Human herpesvirus 7
aaacaagauucua

SEQ ID NO: 338561 - RNA, 12 nt, Human herpesvirus 7
aaacaagcuuaa

SEQ ID NO: 338562 - RNA, 17 nt, Human herpesvirus 7
aaacaaucuggacauuu

SEQ ID NO: 338563 - RNA, 20 nt, Human herpesvirus 7
aaacaaugguguuaacaauc

SEQ ID NO: 338564 - RNA, 15 nt, Human herpesvirus 7
aaacacaguauauaa

SEQ ID NO: 338565 - RNA, 14 nt, Human herpesvirus 7
aaacacguccaaga

SEQ ID NO: 338566 - RNA, 21 nt, Human herpesvirus 7
aaacacguccaagaaauaugc

SEQ ID NO: 338567 - RNA, 22 nt, Human herpesvirus 7
aaacacguccaagaaauaugcu

SEQ ID NO: 338568 - RNA, 18 nt, Human herpesvirus 7
aaacagcauuuucucuua

SEQ ID NO: 338569 - RNA, 15 nt, Human herpesvirus 7
aaacagcgugucaaa

SEQ ID NO: 338570 - RNA, 18 nt, Human herpesvirus 7
aaacagcguucaaucaaa

SEQ ID NO: 338571 - RNA, 18 nt, Human herpesvirus 7
aaacaggcauuuaagaau

SEQ ID NO: 338572 - RNA, 11 nt, Human herpesvirus 7
aaacaguuuua

SEQ ID NO: 338573 - RNA, 21 nt, Human herpesvirus 7
aaacaucaauuuuaaugugcu

SEQ ID NO: 338574 - RNA, 15 nt, Human herpesvirus 7
aaacaucuaugugcu

SEQ ID NO: 338575 - RNA, 16 nt, Human herpesvirus 7
aaacaucuaugugcuc

SEQ ID NO: 338576 - RNA, 17 nt, Human herpesvirus 7
aaacaucuaugugcucu

SEQ ID NO: 338577 - RNA, 13 nt, Human herpesvirus 7
aaacaugauuuau

SEQ ID NO: 338578 - RNA, 16 nt, Human herpesvirus 7
aaacaugcaacauaau

SEQ ID NO: 338579 - RNA, 19 nt, Human herpesvirus 7
aaacaugcaacauaaucca

SEQ ID NO: 338580 - RNA, 13 nt, Human herpesvirus 7
aaacauguuccau

SEQ ID NO: 338581 - RNA, 17 nt, Human herpesvirus 7
aaacauguuccauucaa

SEQ ID NO: 338582 - RNA, 17 nt, Human herpesvirus 7
aaacauuacgaacugau

SEQ ID NO: 338583 - RNA, 21 nt, Human herpesvirus 7
aaacauuagcauugaaaucau

SEQ ID NO: 338584 - RNA, 14 nt, Human herpesvirus 7
aaacauuauauucc

SEQ ID NO: 338585 - RNA, 15 nt, Human herpesvirus 7
aaacauugaaaaagc

SEQ ID NO: 338586 - RNA, 12 nt, Human herpesvirus 7
aaacauugugag

SEQ ID NO: 338587 - RNA, 23 nt, Human herpesvirus 7
aaacauuucagaugacaacucaa

SEQ ID NO: 338588 - RNA, 20 nt, Human herpesvirus 7
aaacauuuuugaagcuuaaa

SEQ ID NO: 338589 - RNA, 12 nt, Human herpesvirus 7
aaaccacaaaaa

SEQ ID NO: 338590 - RNA, 23 nt, Human herpesvirus 7
aaaccacaaaaaucaaaguaaaa

SEQ ID NO: 338591 - RNA, 16 nt, Human herpesvirus 7
aaaccaggaacagauu

SEQ ID NO: 338592 - RNA, 21 nt, Human herpesvirus 7
aaaccaggaacagauucucca

SEQ ID NO: 338593 - RNA, 14 nt, Human herpesvirus 7
aaaccaugauguua

SEQ ID NO: 338594 - RNA, 21 nt, Human herpesvirus 7
aaaccaugauguuaaagaaca

SEQ ID NO: 338595 - RNA, 16 nt, Human herpesvirus 7
aaacccagagcuaaaa

SEQ ID NO: 338596 - RNA, 15 nt, Human herpesvirus 7
aaaccuuacaacaaa

SEQ ID NO: 338597 - RNA, 18 nt, Human herpesvirus 7
aaaccuucgugugucucu

SEQ ID NO: 338598 - RNA, 16 nt, Human herpesvirus 7
aaacgucccugugaca

SEQ ID NO: 338599 - RNA, 10 nt, Human herpesvirus 7
aaacgugccc

SEQ ID NO: 338600 - RNA, 21 nt, Human herpesvirus 7
aaacguuaccguuuaaugaaa

SEQ ID NO: 338601 - RNA, 14 nt, Human herpesvirus 7
aaacuaacuuaucu

SEQ ID NO: 338602 - RNA, 13 nt, Human herpesvirus 7
aaacuacauuuaa

SEQ ID NO: 338603 - RNA, 22 nt, Human herpesvirus 7
aaacuaccgaagguauuuugau

SEQ ID NO: 338604 - RNA, 21 nt, Human herpesvirus 7
aaacuauguccaaaaauuuag

SEQ ID NO: 338605 - RNA, 19 nt, Human herpesvirus 7
aaacucgaaacuggcaaua

SEQ ID NO: 338606 - RNA, 19 nt, Human herpesvirus 7
aaacucguggauuuucuac

SEQ ID NO: 338607 - RNA, 14 nt, Human herpesvirus 7
aaacugcaaaucca

SEQ ID NO: 338608 - RNA, 13 nt, Human herpesvirus 7
aaacuggcaauau

SEQ ID NO: 338609 - RNA, 16 nt, Human herpesvirus 7
aaacuguuuuuacuuc

SEQ ID NO: 338610 - RNA, 18 nt, Human herpesvirus 7
aaacuuauguacuauaca

SEQ ID NO: 338611 - RNA, 18 nt, Human herpesvirus 7
aaacuuggaaaacaauca

SEQ ID NO: 338612 - RNA, 19 nt, Human herpesvirus 7
aaacuuggaaaacaaucaa

SEQ ID NO: 338613 - RNA, 17 nt, Human herpesvirus 7
aaacuugugaaaauaac

SEQ ID NO: 338614 - RNA, 13 nt, Human herpesvirus 7
aaagaaaaaaagu

SEQ ID NO: 338615 - RNA, 15 nt, Human herpesvirus 7
aaagaacauguagua

SEQ ID NO: 338616 - RNA, 20 nt, Human herpesvirus 7
aaagaacauuuuucuugcuu

SEQ ID NO: 338617 - RNA, 21 nt, Human herpesvirus 7
aaagaacauuuuucuugcuug

SEQ ID NO: 338618 - RNA, 14 nt, Human herpesvirus 7
aaagaaccuaucaa

SEQ ID NO: 338619 - RNA, 18 nt, Human herpesvirus 7
aaagaacuuacauuucaa

SEQ ID NO: 338620 - RNA, 22 nt, Human herpesvirus 7
aaagaagaagaaaagaaaaagc

SEQ ID NO: 338621 - RNA, 23 nt, Human herpesvirus 7
aaagaagaagaaaagaaaaagca

SEQ ID NO: 338622 - RNA, 17 nt, Human herpesvirus 7
aaagaaugaacaccgca

SEQ ID NO: 338623 - RNA, 22 nt, Human herpesvirus 7
aaagaauggcgguuguacugua

SEQ ID NO: 338624 - RNA, 17 nt, Human herpesvirus 7
aaagacacuuauuugau

SEQ ID NO: 338625 - RNA, 14 nt, Human herpesvirus 7
aaagacaugaauca

SEQ ID NO: 338626 - RNA, 24 nt, Human herpesvirus 7
aaagaccuguacuguugcuaauua

SEQ ID NO: 338627 - RNA, 14 nt, Human herpesvirus 7
aaagagccucccac

SEQ ID NO: 338628 - RNA, 20 nt, Human herpesvirus 7
aaagaguauacaaaagacau

SEQ ID NO: 338629 - RNA, 18 nt, Human herpesvirus 7
aaagagucuauugacaua

SEQ ID NO: 338630 - RNA, 18 nt, Human herpesvirus 7
aaagauaauguuacauua

SEQ ID NO: 338631 - RNA, 16 nt, Human herpesvirus 7
aaagaucaaugcacac

SEQ ID NO: 338632 - RNA, 17 nt, Human herpesvirus 7
aaagaucguuguuaaau

SEQ ID NO: 338633 - RNA, 16 nt, Human herpesvirus 7
aaagauggaaaguuua

SEQ ID NO: 338634 - RNA, 22 nt, Human herpesvirus 7
aaagaugucuuaauugccgauu

SEQ ID NO: 338635 - RNA, 15 nt, Human herpesvirus 7
aaagauuacauuugc

SEQ ID NO: 338636 - RNA, 16 nt, Human herpesvirus 7
aaagauugaucacuuu

SEQ ID NO: 338637 - RNA, 23 nt, Human herpesvirus 7
aaagauuuaaaguaagaauggaa

SEQ ID NO: 338638 - RNA, 17 nt, Human herpesvirus 7
aaagauuucuauugaau

SEQ ID NO: 338639 - RNA, 23 nt, Human herpesvirus 7
aaagauuucuauugaauguggaa

SEQ ID NO: 338640 - RNA, 20 nt, Human herpesvirus 7
aaagauuuuguucuaucaag

SEQ ID NO: 338641 - RNA, 16 nt, Human herpesvirus 7
aaagcauaaagcacca

SEQ ID NO: 338642 - RNA, 13 nt, Human herpesvirus 7
aaagccacuguug

SEQ ID NO: 338643 - RNA, 16 nt, Human herpesvirus 7
aaagccagguauucaa

SEQ ID NO: 338644 - RNA, 21 nt, Human herpesvirus 7
aaauucaacaucuuucauaac

SEQ ID NO: 338645 - RNA, 22 nt, Human herpesvirus 7
aaauucaacaucuuucauaaca

SEQ ID NO: 338646 - RNA, 23 nt, Human herpesvirus 7
aaauucaaccacagacacaccau

SEQ ID NO: 338647 - RNA, 15 nt, Human herpesvirus 7
aaauuccauacaaag

SEQ ID NO: 338648 - RNA, 17 nt, Human herpesvirus 7
aaauuccauucgaucua

SEQ ID NO: 338649 - RNA, 12 nt, Human herpesvirus 7
aaauucuaauau

SEQ ID NO: 338650 - RNA, 12 nt, Human herpesvirus 7
aaauucugugga

SEQ ID NO: 338651 - RNA, 13 nt, Human herpesvirus 7
aaauucuguggag

SEQ ID NO: 338652 - RNA, 15 nt, Human herpesvirus 7
aaauugaaaagaaga

SEQ ID NO: 338653 - RNA, 17 nt, Human herpesvirus 7
aaauuggacaccaguau

SEQ ID NO: 338654 - RNA, 19 nt, Human herpesvirus 7
aaauuggacuuggcucuua

SEQ ID NO: 338655 - RNA, 17 nt, Human herpesvirus 7
aaauuguaaauucucca

SEQ ID NO: 338656 - RNA, 19 nt, Human herpesvirus 7
aaauuuaaauacugagaga

SEQ ID NO: 338657 - RNA, 18 nt, Human herpesvirus 7
aaauuuaagagacauuga

SEQ ID NO: 338658 - RNA, 21 nt, Human herpesvirus 7
aaauuucaaacguaaugcaaa

SEQ ID NO: 338659 - RNA, 18 nt, Human herpesvirus 7
aaauuuccuuuaugugau

SEQ ID NO: 338660 - RNA, 14 nt, Human herpesvirus 7
aaauuucuaucaca

SEQ ID NO: 338661 - RNA, 23 nt, Human herpesvirus 7
aaauuugucuguugugcaauuuu

SEQ ID NO: 338662 - RNA, 22 nt, Human herpesvirus 7
aaauuuugaauguuuacaugua

SEQ ID NO: 338663 - RNA, 20 nt, Human herpesvirus 7
aacaaaaaaaguaccauugc

SEQ ID NO: 338664 - RNA, 15 nt, Human herpesvirus 7
aacaaaacaguuugu

SEQ ID NO: 338665 - RNA, 13 nt, Human herpesvirus 7
aacaaaauuccaa

SEQ ID NO: 338666 - RNA, 13 nt, Human herpesvirus 7
aacaaacaaugag

SEQ ID NO: 338667 - RNA, 14 nt, Human herpesvirus 7
aacaaacaaugagc

SEQ ID NO: 338668 - RNA, 16 nt, Human herpesvirus 7
aacaaacaaugagcaa

SEQ ID NO: 338669 - RNA, 23 nt, Human herpesvirus 7
aacaaaggaucgaucucugucaa

SEQ ID NO: 338670 - RNA, 12 nt, Human herpesvirus 7
aacaaagugcau

SEQ ID NO: 338671 - RNA, 18 nt, Human herpesvirus 7
aacaaaguucaaguuuuc

SEQ ID NO: 338672 - RNA, 19 nt, Human herpesvirus 7
aacaaauccacucuggcac

SEQ ID NO: 338673 - RNA, 15 nt, Human herpesvirus 7
aacaaauuaaauacu

SEQ ID NO: 338674 - RNA, 18 nt, Human herpesvirus 7
aacaaauucaaccacaga

SEQ ID NO: 338675 - RNA, 16 nt, Human herpesvirus 7
aacaaauuccauuaaa

SEQ ID NO: 338676 - RNA, 23 nt, Human herpesvirus 7
aacaaauuguggagagauucaaa

SEQ ID NO: 338677 - RNA, 23 nt, Human herpesvirus 7
aacaacaacuaaaacuacauuua

SEQ ID NO: 338678 - RNA, 23 nt, Human herpesvirus 7
aacaacuaaagagaaugucgaau

SEQ ID NO: 338679 - RNA, 14 nt, Human herpesvirus 7
aacaagaagcgaga

SEQ ID NO: 338680 - RNA, 19 nt, Human herpesvirus 7
aacaagcuuaaauguguaa

SEQ ID NO: 338681 - RNA, 22 nt, Human herpesvirus 7
aacaaggacgaaucuacauuaa

SEQ ID NO: 338682 - RNA, 24 nt, Human herpesvirus 7
aacaagguucucauuuucgacaga

SEQ ID NO: 338683 - RNA, 14 nt, Human herpesvirus 7
aacaagguuuaaaa

SEQ ID NO: 338684 - RNA, 20 nt, Human herpesvirus 7
aacaaguaugucagccgcuu

SEQ ID NO: 338685 - RNA, 20 nt, Human herpesvirus 7
aacaaucccagaaauuucaa

SEQ ID NO: 338686 - RNA, 23 nt, Human herpesvirus 7
aacaaucgguaacaugucuucaa

SEQ ID NO: 338687 - RNA, 15 nt, Human herpesvirus 7
aacaaugagcaauuc

SEQ ID NO: 338688 - RNA, 21 nt, Human herpesvirus 7
aacaaugguguuaacaaucuu

SEQ ID NO: 338689 - RNA, 14 nt, Human herpesvirus 7
aacaauuucacaga

SEQ ID NO: 338690 - RNA, 13 nt, Human herpesvirus 7
aacacaaagccaa

SEQ ID NO: 338691 - RNA, 14 nt, Human herpesvirus 7
aacacauaaugugu

SEQ ID NO: 338692 - RNA, 19 nt, Human herpesvirus 7
aacaccagucucugaauua

SEQ ID NO: 338693 - RNA, 17 nt, Human herpesvirus 7
aacaccgcaaacauuuu

SEQ ID NO: 338694 - RNA, 15 nt, Human herpesvirus 7
aacacguccaagaaa

SEQ ID NO: 338695 - RNA, 18 nt, Human herpesvirus 7
aacacguuuccauuaaaa

SEQ ID NO: 338696 - RNA, 18 nt, Human herpesvirus 7
aacacucaaaacagaacu

SEQ ID NO: 338697 - RNA, 20 nt, Human herpesvirus 7
aacacucaaaacagaacuuu

SEQ ID NO: 338698 - RNA, 22 nt, Human herpesvirus 7
aacacucuuuauuuaagcuuca

SEQ ID NO: 338699 - RNA, 20 nt, Human herpesvirus 7
aacacuugcuagcugugaua

SEQ ID NO: 338700 - RNA, 19 nt, Human herpesvirus 7
aacacuuuuacgugacugu

SEQ ID NO: 338701 - RNA, 20 nt, Human herpesvirus 7
aacagaagcugacuuuguca

SEQ ID NO: 338702 - RNA, 21 nt, Human herpesvirus 7
aacagaccuccuaugucauga

SEQ ID NO: 338703 - RNA, 17 nt, Human herpesvirus 7
aacagagcgcuuugcuu

SEQ ID NO: 338704 - RNA, 15 nt, Human herpesvirus 7
aacagauuuuauuuc

SEQ ID NO: 338705 - RNA, 16 nt, Human herpesvirus 7
aacagcaauguuuuca

SEQ ID NO: 338706 - RNA, 12 nt, Human herpesvirus 7
aacagguuuguu

SEQ ID NO: 338707 - RNA, 18 nt, Human herpesvirus 7
aacagugggaaugcaucu

SEQ ID NO: 338708 - RNA, 13 nt, Human herpesvirus 7
aacaguucaagaa

SEQ ID NO: 338709 - RNA, 22 nt, Human herpesvirus 7
aacaguucaagaaauaaugaag

SEQ ID NO: 338710 - RNA, 24 nt, Human herpesvirus 7
aacauaaaaaauuuuuagcucuaa

SEQ ID NO: 338711 - RNA, 13 nt, Human herpesvirus 7
aacauaaauauuc

SEQ ID NO: 338712 - RNA, 20 nt, Human herpesvirus 7
aacauacagcaugacgugau

SEQ ID NO: 338713 - RNA, 23 nt, Human herpesvirus 7
aacauacgugcuuagacuuauca

SEQ ID NO: 338714 - RNA, 13 nt, Human herpesvirus 7
aacauacugaugu

SEQ ID NO: 338715 - RNA, 20 nt, Human herpesvirus 7
aacaucaauuuuaaugugcu

SEQ ID NO: 338716 - RNA, 22 nt, Human herpesvirus 7
aacaucaauuuuaaugugcuua

SEQ ID NO: 338717 - RNA, 12 nt, Human herpesvirus 7
aacaucagaccu

SEQ ID NO: 338718 - RNA, 23 nt, Human herpesvirus 7
aacaucccuuuccaauauagaca

SEQ ID NO: 338719 - RNA, 16 nt, Human herpesvirus 7
aacaucgagauuccaa

SEQ ID NO: 338720 - RNA, 16 nt, Human herpesvirus 7
aacaucuaugugcucu

SEQ ID NO: 338721 - RNA, 15 nt, Human herpesvirus 7
aacaucugucuauca

SEQ ID NO: 338722 - RNA, 15 nt, Human herpesvirus 7
aacaucuuaaauguc

SEQ ID NO: 338723 - RNA, 16 nt, Human herpesvirus 7
aacaugaaaacuaaca

SEQ ID NO: 338724 - RNA, 14 nt, Human herpesvirus 7
aacaugcaacauaa

SEQ ID NO: 338725 - RNA, 15 nt, Human herpesvirus 7
aacauguaguacaau

SEQ ID NO: 338726 - RNA, 14 nt, Human herpesvirus 7
aacaugucuucaac

SEQ ID NO: 338727 - RNA, 15 nt, Human herpesvirus 7
aacauguuccauuca

SEQ ID NO: 338728 - RNA, 16 nt, Human herpesvirus 7
aacauguuccauucaa

SEQ ID NO: 338729 - RNA, 18 nt, Human herpesvirus 7
aacauguuccauucaaua

SEQ ID NO: 338730 - RNA, 14 nt, Human herpesvirus 7
aacauguugaaaga

SEQ ID NO: 338731 - RNA, 16 nt, Human herpesvirus 7
aacauuacgucauccc

SEQ ID NO: 338732 - RNA, 20 nt, Human herpesvirus 7
aacauuauucgcgacauuau

SEQ ID NO: 338733 - RNA, 20 nt, Human herpesvirus 7
aacauugucaaagaaugcaa

SEQ ID NO: 338734 - RNA, 17 nt, Human herpesvirus 7
aacauuucagaugacaa

SEQ ID NO: 338735 - RNA, 15 nt, Human herpesvirus 7
aacauuuuguaugaa

SEQ ID NO: 338736 - RNA, 18 nt, Human herpesvirus 7
aaccacaacugugacaaa

SEQ ID NO: 338737 - RNA, 11 nt, Human herpesvirus 7
aaccacagaca

SEQ ID NO: 338738 - RNA, 17 nt, Human herpesvirus 7
aaccacagacacaccau

SEQ ID NO: 338739 - RNA, 14 nt, Human herpesvirus 7
aaccacagaggcgu

SEQ ID NO: 338740 - RNA, 11 nt, Human herpesvirus 7
aaccacugugu

SEQ ID NO: 338741 - RNA, 15 nt, Human herpesvirus 7
aaccaggaacagauu

SEQ ID NO: 338742 - RNA, 22 nt, Human herpesvirus 7
aaccauuaaacgaacucuuguu

SEQ ID NO: 338743 - RNA, 23 nt, Human herpesvirus 7
aaccgccauucuuuucaaugcaa

SEQ ID NO: 338744 - RNA, 21 nt, Human herpesvirus 7
aaccgguaaagaaccuaucaa

SEQ ID NO: 338745 - RNA, 13 nt, Human herpesvirus 7
aaccuacuguuaa

SEQ ID NO: 338746 - RNA, 17 nt, Human herpesvirus 7
aaccuaucaaaauucca

SEQ ID NO: 338747 - RNA, 18 nt, Human herpesvirus 7
aaccuaucaaaauuccau

SEQ ID NO: 338748 - RNA, 21 nt, Human herpesvirus 7
aaccucgugaaauaagaugcu

SEQ ID NO: 338749 - RNA, 17 nt, Human herpesvirus 7
aaccugcuaacaaguau

SEQ ID NO: 338750 - RNA, 15 nt, Human herpesvirus 7
aaccuuacaacaaag

SEQ ID NO: 338751 - RNA, 17 nt, Human herpesvirus 7
aacgaaaggaaucuuaa

SEQ ID NO: 338752 - RNA, 19 nt, Human herpesvirus 7
aacgaacacuuucuaauaa

SEQ ID NO: 338753 - RNA, 17 nt, Human herpesvirus 7
aacgaacucuuguucau

SEQ ID NO: 338754 - RNA, 14 nt, Human herpesvirus 7
aacgagaaaacuua

SEQ ID NO: 338755 - RNA, 17 nt, Human herpesvirus 7
aacgauccuaaauacgg

SEQ ID NO: 338756 - RNA, 22 nt, Human herpesvirus 7
aacgauuugguguacuacauau

SEQ ID NO: 338757 - RNA, 21 nt, Human herpesvirus 7
aacgcuaaccaucugcuggaa

SEQ ID NO: 338758 - RNA, 14 nt, Human herpesvirus 7
aagguacauuuugc

SEQ ID NO: 338759 - RNA, 18 nt, Human herpesvirus 7
aaggucuuucaugcauug

SEQ ID NO: 338760 - RNA, 21 nt, Human herpesvirus 7
aaggucuuucaugcauugcau

SEQ ID NO: 338761 - RNA, 19 nt, Human herpesvirus 7
aaggugguuacauauccaa

SEQ ID NO: 338762 - RNA, 20 nt, Human herpesvirus 7
aaggugguuacauauccaau

SEQ ID NO: 338763 - RNA, 21 nt, Human herpesvirus 7
aagguucauauacuucuugcc

SEQ ID NO: 338764 - RNA, 15 nt, Human herpesvirus 7
aaguaaaaacuuuuc

SEQ ID NO: 338765 - RNA, 15 nt, Human herpesvirus 7
aaguaaauaauccau

SEQ ID NO: 338766 - RNA, 21 nt, Human herpesvirus 7
aaguaaauuucucacaccuua

SEQ ID NO: 338767 - RNA, 11 nt, Human herpesvirus 7
aaguaaggaag

SEQ ID NO: 338768 - RNA, 19 nt, Human herpesvirus 7
aaguaaucaaggacaugau

SEQ ID NO: 338769 - RNA, 19 nt, Human herpesvirus 7
aaguagaaggaaaccaauu

SEQ ID NO: 338770 - RNA, 14 nt, Human herpesvirus 7
aagucacaauuaca

SEQ ID NO: 338771 - RNA, 18 nt, Human herpesvirus 7
aagucacaauuacacaaa

SEQ ID NO: 338772 - RNA, 14 nt, Human herpesvirus 7
aagucagaacauug

SEQ ID NO: 338773 - RNA, 20 nt, Human herpesvirus 7
aaguccuucaauagcagaga

SEQ ID NO: 338774 - RNA, 13 nt, Human herpesvirus 7
aaguccuuugaua

SEQ ID NO: 338775 - RNA, 21 nt, Human herpesvirus 7
aagucuuuauaaaggaccaug

SEQ ID NO: 338776 - RNA, 13 nt, Human herpesvirus 7
aagugaacuguua

SEQ ID NO: 338777 - RNA, 14 nt, Human herpesvirus 7
aagugaaugugcuu

SEQ ID NO: 338778 - RNA, 19 nt, Human herpesvirus 7
aagugauacugaaucugaa

SEQ ID NO: 338779 - RNA, 15 nt, Human herpesvirus 7
aagugcugucuugcu

SEQ ID NO: 338780 - RNA, 16 nt, Human herpesvirus 7
aaguggagacaaucua

SEQ ID NO: 338781 - RNA, 19 nt, Human herpesvirus 7
aagugugaucuggauucaa

SEQ ID NO: 338782 - RNA, 16 nt, Human herpesvirus 7
aaguuguuauagccac

SEQ ID NO: 338783 - RNA, 15 nt, Human herpesvirus 7
aaguuuaucuuggac

SEQ ID NO: 338784 - RNA, 19 nt, Human herpesvirus 7
aaguuugguuaaaguguga

SEQ ID NO: 338785 - RNA, 21 nt, Human herpesvirus 7
aauaaaaauuuggcgccaaaa

SEQ ID NO: 338786 - RNA, 19 nt, Human herpesvirus 7
aauaaaagggcagacacua

SEQ ID NO: 338787 - RNA, 21 nt, Human herpesvirus 7
aauaaaaugguugugcaauuu

SEQ ID NO: 338788 - RNA, 13 nt, Human herpesvirus 7
aauaaacaaugug

SEQ ID NO: 338789 - RNA, 19 nt, Human herpesvirus 7
aauaaagagucuauugaca

SEQ ID NO: 338790 - RNA, 21 nt, Human herpesvirus 7
aauaaaguuuuguaacuauaa

SEQ ID NO: 338791 - RNA, 13 nt, Human herpesvirus 7
aauaaaucuguaa

SEQ ID NO: 338792 - RNA, 13 nt, Human herpesvirus 7
aauaaaucuucau

SEQ ID NO: 338793 - RNA, 17 nt, Human herpesvirus 7
aauaacaggaaaccaca

SEQ ID NO: 338794 - RNA, 19 nt, Human herpesvirus 7
aauaaguccgugugcaaaa

SEQ ID NO: 338795 - RNA, 20 nt, Human herpesvirus 7
aauaaguccgugugcaaaac

SEQ ID NO: 338796 - RNA, 21 nt, Human herpesvirus 7
aauaauaugcuuucacuacua

SEQ ID NO: 338797 - RNA, 14 nt, Human herpesvirus 7
aauaauauuaguau

SEQ ID NO: 338798 - RNA, 13 nt, Human herpesvirus 7
aauaaucaauaaa

SEQ ID NO: 338799 - RNA, 14 nt, Human herpesvirus 7
aauaauucaaaaac

SEQ ID NO: 338800 - RNA, 15 nt, Human herpesvirus 7
aauaauucaaaaacu

SEQ ID NO: 338801 - RNA, 18 nt, Human herpesvirus 7
aauaauuuaaaauuauua

SEQ ID NO: 338802 - RNA, 15 nt, Human herpesvirus 7
aauaauuucuauuaa

SEQ ID NO: 338803 - RNA, 16 nt, Human herpesvirus 7
aauacaugaauuaucu

SEQ ID NO: 338804 - RNA, 21 nt, Human herpesvirus 7
aauacauggggcauuaauucu

SEQ ID NO: 338805 - RNA, 12 nt, Human herpesvirus 7
aauacauucuca

SEQ ID NO: 338806 - RNA, 13 nt, Human herpesvirus 7
aauaccaaaaacc

SEQ ID NO: 338807 - RNA, 15 nt, Human herpesvirus 7
aauaccaaaaaccug

SEQ ID NO: 338808 - RNA, 19 nt, Human herpesvirus 7
aauaccgucguuugugucu

SEQ ID NO: 338809 - RNA, 14 nt, Human herpesvirus 7
aauacguccaaaaa

SEQ ID NO: 338810 - RNA, 22 nt, Human herpesvirus 7
aauacuaguauuucgucuuucc

SEQ ID NO: 338811 - RNA, 22 nt, Human herpesvirus 7
aauacugagagaauaaguucau

SEQ ID NO: 338812 - RNA, 16 nt, Human herpesvirus 7
aauacuugcaaugcaa

SEQ ID NO: 338813 - RNA, 15 nt, Human herpesvirus 7
aauagacacauuuau

SEQ ID NO: 338814 - RNA, 20 nt, Human herpesvirus 7
aauagcagagaauauguuau

SEQ ID NO: 338815 - RNA, 22 nt, Human herpesvirus 7
aauagcagagaauauguuauca

SEQ ID NO: 338816 - RNA, 19 nt, Human herpesvirus 7
aauagcauaugcuggaucu

SEQ ID NO: 338817 - RNA, 18 nt, Human herpesvirus 7
aauaggcgaauuggugcu

SEQ ID NO: 338818 - RNA, 22 nt, Human herpesvirus 7
aauauagaugcagaaaaaucca

SEQ ID NO: 338819 - RNA, 22 nt, Human herpesvirus 7
aauauauaagguuuagcagaaa

SEQ ID NO: 338820 - RNA, 16 nt, Human herpesvirus 7
aauaucauuuuugucu

SEQ ID NO: 338821 - RNA, 16 nt, Human herpesvirus 7
aauaucccagaauauc

SEQ ID NO: 338822 - RNA, 22 nt, Human herpesvirus 7
aauaucccuagaagaugacuca

SEQ ID NO: 338823 - RNA, 20 nt, Human herpesvirus 7
aauaucuuuuucaaauggau

SEQ ID NO: 338824 - RNA, 16 nt, Human herpesvirus 7
aauaugcaugcaauuu

SEQ ID NO: 338825 - RNA, 22 nt, Human herpesvirus 7
aauaugugaaaauaaacaggaa

SEQ ID NO: 338826 - RNA, 16 nt, Human herpesvirus 7
aauauguggcacauaa

SEQ ID NO: 338827 - RNA, 15 nt, Human herpesvirus 7
aauauugauaaccua

SEQ ID NO: 338828 - RNA, 16 nt, Human herpesvirus 7
aauauugcuagucuca

SEQ ID NO: 338829 - RNA, 19 nt, Human herpesvirus 7
aauauuuccaacgcauuca

SEQ ID NO: 338830 - RNA, 23 nt, Human herpesvirus 7
aauauuuugaaaauauauuccaa

SEQ ID NO: 338831 - RNA, 14 nt, Human herpesvirus 7
aaucaaaaaacacg

SEQ ID NO: 338832 - RNA, 19 nt, Human herpesvirus 7
aaucaaaaaacacguccaa

SEQ ID NO: 338833 - RNA, 23 nt, Human herpesvirus 7
aaucaaaaaauaauuccuucuag

SEQ ID NO: 338834 - RNA, 18 nt, Human herpesvirus 7
aaucaaacauguaaucaa

SEQ ID NO: 338835 - RNA, 22 nt, Human herpesvirus 7
aaucaaaguuuuaaaguaugcu

SEQ ID NO: 338836 - RNA, 21 nt, Human herpesvirus 7
aaucaaauuauaccucagcuu

SEQ ID NO: 338837 - RNA, 20 nt, Human herpesvirus 7
aaucaagacgcuguaugcaa

SEQ ID NO: 338838 - RNA, 22 nt, Human herpesvirus 7
aaucaagccacgaugacuucca

SEQ ID NO: 338839 - RNA, 17 nt, Human herpesvirus 7
aaucaaugcaucuuuaa

SEQ ID NO: 338840 - RNA, 15 nt, Human herpesvirus 7
aaucaauuuuugaca

SEQ ID NO: 338841 - RNA, 19 nt, Human herpesvirus 7
aaucacaguugcuugugaa

SEQ ID NO: 338842 - RNA, 22 nt, Human herpesvirus 7
aaucacaguugcuugugaagga

SEQ ID NO: 338843 - RNA, 16 nt, Human herpesvirus 7
aaucacauacucuauu

SEQ ID NO: 338844 - RNA, 21 nt, Human herpesvirus 7
aaucacaucagauacagagag

SEQ ID NO: 338845 - RNA, 13 nt, Human herpesvirus 7
aaucaccaaagag

SEQ ID NO: 338846 - RNA, 20 nt, Human herpesvirus 7
aaucaccuuccucguugcca

SEQ ID NO: 338847 - RNA, 18 nt, Human herpesvirus 7
aaucacgagaaaaauauu

SEQ ID NO: 338848 - RNA, 23 nt, Human herpesvirus 7
aaucacugcucaaaucaaccaga

SEQ ID NO: 338849 - RNA, 21 nt, Human herpesvirus 7
aaucagacaauuucacacaau

SEQ ID NO: 338850 - RNA, 22 nt, Human herpesvirus 7
aaucauaauuuucaugaacaca

SEQ ID NO: 338851 - RNA, 13 nt, Human herpesvirus 7
aaucauaccauaa

SEQ ID NO: 338852 - RNA, 22 nt, Human herpesvirus 7
aaucauaccauaaauaccaaaa

SEQ ID NO: 338853 - RNA, 16 nt, Human herpesvirus 7
aaucauauaugcauua

SEQ ID NO: 338854 - RNA, 22 nt, Human herpesvirus 7
aaucauaucuugcuuagaugcu

SEQ ID NO: 338855 - RNA, 18 nt, Human herpesvirus 7
aaucauuuugcuguuuaa

SEQ ID NO: 338856 - RNA, 19 nt, Human herpesvirus 7
aaucauuuugcuguuuaaa

SEQ ID NO: 338857 - RNA, 13 nt, Human herpesvirus 7
aauccaugacaga

SEQ ID NO: 338858 - RNA, 18 nt, Human herpesvirus 7
aauccguaucuagagaau

SEQ ID NO: 338859 - RNA, 17 nt, Human herpesvirus 7
aauccuaugacugagaa

SEQ ID NO: 338860 - RNA, 15 nt, Human herpesvirus 7
aaucgauuaugaugu

SEQ ID NO: 338861 - RNA, 16 nt, Human herpesvirus 7
aaucgcuuauuuaaca

SEQ ID NO: 338862 - RNA, 20 nt, Human herpesvirus 7
aaucgguaacaugucuucaa

SEQ ID NO: 338863 - RNA, 17 nt, Human herpesvirus 7
aaucgugggacuugaua

SEQ ID NO: 338864 - RNA, 21 nt, Human herpesvirus 7
aaucuacauuaaacagcauuu

SEQ ID NO: 338865 - RNA, 19 nt, Human herpesvirus 7
aaucuacuguaaucugacu

SEQ ID NO: 338866 - RNA, 22 nt, Human herpesvirus 7
aaucuauauaaaauaucuuuuu

SEQ ID NO: 338867 - RNA, 14 nt, Human herpesvirus 7
aaucuauauuugau

SEQ ID NO: 338868 - RNA, 16 nt, Human herpesvirus 7
aaucuaucaccaagaa

SEQ ID NO: 338869 - RNA, 21 nt, Human herpesvirus 7
aaucuaucaccaagaacaaua

SEQ ID NO: 338870 - RNA, 20 nt, Human herpesvirus 7
aaucuaugcaaagcaagcau

SEQ ID NO: 338871 - RNA, 12 nt, Human herpesvirus 7
aaucuccuugau

SEQ ID NO: 338872 - RNA, 18 nt, Human herpesvirus 7
aauuucucguuauuuuca

SEQ ID NO: 338873 - RNA, 19 nt, Human herpesvirus 7
aauuucucguuauuuucaa

SEQ ID NO: 338874 - RNA, 21 nt, Human herpesvirus 7
aauuucuuuguuugcuauuau

SEQ ID NO: 338875 - RNA, 23 nt, Human herpesvirus 7
aauuucuuuuugcuuuuggcaua

SEQ ID NO: 338876 - RNA, 17 nt, Human herpesvirus 7
aauuugaauauugcuag

SEQ ID NO: 338877 - RNA, 15 nt, Human herpesvirus 7
aauuugacauuugca

SEQ ID NO: 338878 - RNA, 13 nt, Human herpesvirus 7
aauuugagaauuu

SEQ ID NO: 338879 - RNA, 16 nt, Human herpesvirus 7
aauuuggcgccaaaaa

SEQ ID NO: 338880 - RNA, 15 nt, Human herpesvirus 7
aauuuggcucugauc

SEQ ID NO: 338881 - RNA, 20 nt, Human herpesvirus 7
aauuugucuguugugcaauu

SEQ ID NO: 338882 - RNA, 19 nt, Human herpesvirus 7
aauuuguucaaucacauac

SEQ ID NO: 338883 - RNA, 17 nt, Human herpesvirus 7
aauuuguucaauugcca

SEQ ID NO: 338884 - RNA, 18 nt, Human herpesvirus 7
aauuuguucaauugccac

SEQ ID NO: 338885 - RNA, 15 nt, Human herpesvirus 7
aauuuuaaaacugaa

SEQ ID NO: 338886 - RNA, 16 nt, Human herpesvirus 7
aauuuuaauugugcau

SEQ ID NO: 338887 - RNA, 17 nt, Human herpesvirus 7
aauuuuaauugugcauc

SEQ ID NO: 338888 - RNA, 14 nt, Human herpesvirus 7
aauuuuacaaugca

SEQ ID NO: 338889 - RNA, 15 nt, Human herpesvirus 7
aauuuuacaaugcag

SEQ ID NO: 338890 - RNA, 19 nt, Human herpesvirus 7
aauuuuacaaugcagccua

SEQ ID NO: 338891 - RNA, 20 nt, Human herpesvirus 7
aauuuuacaccgauuccagc

SEQ ID NO: 338892 - RNA, 14 nt, Human herpesvirus 7
aauuuuacgaugac

SEQ ID NO: 338893 - RNA, 13 nt, Human herpesvirus 7
aauuuuauuuucc

SEQ ID NO: 338894 - RNA, 14 nt, Human herpesvirus 7
aauuuuauuuuccc

SEQ ID NO: 338895 - RNA, 14 nt, Human herpesvirus 7
aauuuuccauucau

SEQ ID NO: 338896 - RNA, 18 nt, Human herpesvirus 7
aauuuucuuagcuuucau

SEQ ID NO: 338897 - RNA, 21 nt, Human herpesvirus 7
aauuuuguaagaaacaucuau

SEQ ID NO: 338898 - RNA, 15 nt, Human herpesvirus 7
aauuuuucggauaaa

SEQ ID NO: 338899 - RNA, 18 nt, Human herpesvirus 7
aauuuuuuccuguuguca

SEQ ID NO: 338900 - RNA, 18 nt, Human herpesvirus 7
acaaaaaagguguugaua

SEQ ID NO: 338901 - RNA, 23 nt, Human herpesvirus 7
acaaaauaaagccagguauucaa

SEQ ID NO: 338902 - RNA, 16 nt, Human herpesvirus 7
acaaaauguauucaau

SEQ ID NO: 338903 - RNA, 12 nt, Human herpesvirus 7
acaaaauuccaa

SEQ ID NO: 338904 - RNA, 19 nt, Human herpesvirus 7
acaaacaaaaauauuuuga

SEQ ID NO: 338905 - RNA, 15 nt, Human herpesvirus 7
acaaacaauaaauuu

SEQ ID NO: 338906 - RNA, 12 nt, Human herpesvirus 7
acaaacaaugag

SEQ ID NO: 338907 - RNA, 15 nt, Human herpesvirus 7
acaaacaaugagcaa

SEQ ID NO: 338908 - RNA, 17 nt, Human herpesvirus 7
acaaacauguuccauuc

SEQ ID NO: 338909 - RNA, 21 nt, Human herpesvirus 7
acaaagaaaaaacuaacuuau

SEQ ID NO: 338910 - RNA, 20 nt, Human herpesvirus 7
acaaagcaugaaaagcaacu

SEQ ID NO: 338911 - RNA, 18 nt, Human herpesvirus 7
acaaagugcgaaacgugu

SEQ ID NO: 338912 - RNA, 13 nt, Human herpesvirus 7
acaaauaauucaa

SEQ ID NO: 338913 - RNA, 21 nt, Human herpesvirus 7
acaaauaccaugaaaaauaug

SEQ ID NO: 338914 - RNA, 20 nt, Human herpesvirus 7
acaaauauacgaaugccauc

SEQ ID NO: 338915 - RNA, 23 nt, Human herpesvirus 7
acaaaucuauuuugugccccaaa

SEQ ID NO: 338916 - RNA, 16 nt, Human herpesvirus 7
acaaauuaaacaaucu

SEQ ID NO: 338917 - RNA, 13 nt, Human herpesvirus 7
acaaauuaaauac

SEQ ID NO: 338918 - RNA, 16 nt, Human herpesvirus 7
acaaauucaaccacag

SEQ ID NO: 338919 - RNA, 20 nt, Human herpesvirus 7
acaaauucaaccacagacac

SEQ ID NO: 338920 - RNA, 15 nt, Human herpesvirus 7
acaaauuccauuaaa

SEQ ID NO: 338921 - RNA, 21 nt, Human herpesvirus 7
acaaauugauccugcuauuca

SEQ ID NO: 338922 - RNA, 23 nt, Human herpesvirus 7
acaaauugguucagcgugacaga

SEQ ID NO: 338923 - RNA, 15 nt, Human herpesvirus 7
acaacaaacauucca

SEQ ID NO: 338924 - RNA, 15 nt, Human herpesvirus 7
acaacaaagcaugaa

SEQ ID NO: 338925 - RNA, 16 nt, Human herpesvirus 7
acaacaaagcaugaaa

SEQ ID NO: 338926 - RNA, 18 nt, Human herpesvirus 7
acaacacaaagccaauga

SEQ ID NO: 338927 - RNA, 14 nt, Human herpesvirus 7
acaacacucugcau

SEQ ID NO: 338928 - RNA, 21 nt, Human herpesvirus 7
acaacacucugcauuccacua

SEQ ID NO: 338929 - RNA, 22 nt, Human herpesvirus 7
acaacauauagauaaugaaguu

SEQ ID NO: 338930 - RNA, 15 nt, Human herpesvirus 7
acaaccacaaccaaa

SEQ ID NO: 338931 - RNA, 17 nt, Human herpesvirus 7
acaaccuggauguaaug

SEQ ID NO: 338932 - RNA, 14 nt, Human herpesvirus 7
acaacgacuacagg

SEQ ID NO: 338933 - RNA, 13 nt, Human herpesvirus 7
acaacgguauaca

SEQ ID NO: 338934 - RNA, 21 nt, Human herpesvirus 7
acaacuaaaacuacauuuaaa

SEQ ID NO: 338935 - RNA, 20 nt, Human herpesvirus 7
acaacuaaaauugacagcac

SEQ ID NO: 338936 - RNA, 20 nt, Human herpesvirus 7
acaacuagaaaauaacuuua

SEQ ID NO: 338937 - RNA, 22 nt, Human herpesvirus 7
acaacucaauaaaaaugucucu

SEQ ID NO: 338938 - RNA, 14 nt, Human herpesvirus 7
acaacugugacaaa

SEQ ID NO: 338939 - RNA, 15 nt, Human herpesvirus 7
acaacuucuacuaau

SEQ ID NO: 338940 - RNA, 14 nt, Human herpesvirus 7
acaagaaacacuac

SEQ ID NO: 338941 - RNA, 18 nt, Human herpesvirus 7
acaagaaacacuacacca

SEQ ID NO: 338942 - RNA, 18 nt, Human herpesvirus 7
acaagaagcgagauuuau

SEQ ID NO: 338943 - RNA, 19 nt, Human herpesvirus 7
acaagacagaaaugaaucu

SEQ ID NO: 338944 - RNA, 22 nt, Human herpesvirus 7
acaagaggacagucaacaaauc

SEQ ID NO: 338945 - RNA, 18 nt, Human herpesvirus 7
acaagaugcgaguccaaa

SEQ ID NO: 338946 - RNA, 18 nt, Human herpesvirus 7
acaagcuuaaauguguaa

SEQ ID NO: 338947 - RNA, 18 nt, Human herpesvirus 7
acaagguacauuuugcaa

SEQ ID NO: 338948 - RNA, 17 nt, Human herpesvirus 7
acaaguagugcuaauau

SEQ ID NO: 338949 - RNA, 12 nt, Human herpesvirus 7
acaaguuucaaa

SEQ ID NO: 338950 - RNA, 16 nt, Human herpesvirus 7
acaauaacauuuugua

SEQ ID NO: 338951 - RNA, 18 nt, Human herpesvirus 7
acaauaaugcugugauuu

SEQ ID NO: 338952 - RNA, 13 nt, Human herpesvirus 7
acaauacaugaau

SEQ ID NO: 338953 - RNA, 14 nt, Human herpesvirus 7
acaauacaugaauu

SEQ ID NO: 338954 - RNA, 19 nt, Human herpesvirus 7
acaauagugaacaugugcu

SEQ ID NO: 338955 - RNA, 20 nt, Human herpesvirus 7
acaauauaaaagaaacuuua

SEQ ID NO: 338956 - RNA, 19 nt, Human herpesvirus 7
acaauaugacgacuuugaa

SEQ ID NO: 338957 - RNA, 21 nt, Human herpesvirus 7
acaauaugacgacuuugaaga

SEQ ID NO: 338958 - RNA, 18 nt, Human herpesvirus 7
acaauauuaaacuaggcu

SEQ ID NO: 338959 - RNA, 14 nt, Human herpesvirus 7
acaaucaaacaugu

SEQ ID NO: 338960 - RNA, 17 nt, Human herpesvirus 7
acaaucagcauuuacca

SEQ ID NO: 338961 - RNA, 18 nt, Human herpesvirus 7
acaaucccagaaauuuca

SEQ ID NO: 338962 - RNA, 20 nt, Human herpesvirus 7
acaaucccagaaauuucaaa

SEQ ID NO: 338963 - RNA, 17 nt, Human herpesvirus 7
acaaucgauaaacuuug

SEQ ID NO: 338964 - RNA, 19 nt, Human herpesvirus 7
acaaucgauugcaguugaa

SEQ ID NO: 338965 - RNA, 18 nt, Human herpesvirus 7
acaaucuggacauuucaa

SEQ ID NO: 338966 - RNA, 12 nt, Human herpesvirus 7
acaaucuuacaa

SEQ ID NO: 338967 - RNA, 17 nt, Human herpesvirus 7
acaaucuuacaaaaagu

SEQ ID NO: 338968 - RNA, 20 nt, Human herpesvirus 7
acaaugcagccuacuuuuaa

SEQ ID NO: 338969 - RNA, 20 nt, Human herpesvirus 7
acaauggaacagcaaaaagg

SEQ ID NO: 338970 - RNA, 16 nt, Human herpesvirus 7
acaauggugugucugu

SEQ ID NO: 338971 - RNA, 22 nt, Human herpesvirus 7
acaaugguguuaacaaucuuac

SEQ ID NO: 338972 - RNA, 19 nt, Human herpesvirus 7
acaaugguuuuuuugacaa

SEQ ID NO: 338973 - RNA, 11 nt, Human herpesvirus 7
acaaugucaau

SEQ ID NO: 338974 - RNA, 18 nt, Human herpesvirus 7
acaauuucuggcaauaaa

SEQ ID NO: 338975 - RNA, 19 nt, Human herpesvirus 7
acaauuugcauaauccucu

SEQ ID NO: 338976 - RNA, 13 nt, Human herpesvirus 7
acacaaauugauc

SEQ ID NO: 338977 - RNA, 24 nt, Human herpesvirus 7
acacaggaauugcugucuauuuca

SEQ ID NO: 338978 - RNA, 16 nt, Human herpesvirus 7
acacaucuucaauguu

SEQ ID NO: 338979 - RNA, 14 nt, Human herpesvirus 7
acacauuuauccau

SEQ ID NO: 338980 - RNA, 15 nt, Human herpesvirus 7
acaccaacaucuguc

SEQ ID NO: 338981 - RNA, 22 nt, Human herpesvirus 7
acaccaguaugaaaucaaaaau

SEQ ID NO: 338982 - RNA, 15 nt, Human herpesvirus 7
acaccauuguucaac

SEQ ID NO: 338983 - RNA, 13 nt, Human herpesvirus 7
acaccccaaaauc

SEQ ID NO: 338984 - RNA, 19 nt, Human herpesvirus 7
acaccgauuccagcacuuu

SEQ ID NO: 338985 - RNA, 20 nt, Human herpesvirus 7
acaccuuucuuaagcuuuug

SEQ ID NO: 338986 - RNA, 13 nt, Human herpesvirus 7
acacguacaauau

SEQ ID NO: 338987 - RNA, 16 nt, Human herpesvirus 7
accgauucuaaauuaa

SEQ ID NO: 338988 - RNA, 15 nt, Human herpesvirus 7
accgcaugugaaaau

SEQ ID NO: 338989 - RNA, 16 nt, Human herpesvirus 7
accgccaccuucuuau

SEQ ID NO: 338990 - RNA, 14 nt, Human herpesvirus 7
accggaccauuucc

SEQ ID NO: 338991 - RNA, 21 nt, Human herpesvirus 7
accgucguuugugucuuuuaa

SEQ ID NO: 338992 - RNA, 19 nt, Human herpesvirus 7
accgucuuuugauuuugcc

SEQ ID NO: 338993 - RNA, 20 nt, Human herpesvirus 7
accguuuaaugaaaaagcca

SEQ ID NO: 338994 - RNA, 21 nt, Human herpesvirus 7
accguuuaaugaaaaagccau

SEQ ID NO: 338995 - RNA, 22 nt, Human herpesvirus 7
accguuuaaugaaaaagccaua

SEQ ID NO: 338996 - RNA, 14 nt, Human herpesvirus 7
accuacgacuaucg

SEQ ID NO: 338997 - RNA, 17 nt, Human herpesvirus 7
accuaucaaaauuccau

SEQ ID NO: 338998 - RNA, 15 nt, Human herpesvirus 7
accuauuacgccaaa

SEQ ID NO: 338999 - RNA, 16 nt, Human herpesvirus 7
accuccuaugucauga

SEQ ID NO: 339000 - RNA, 16 nt, Human herpesvirus 7
accugaaaaacaugag

SEQ ID NO: 339001 - RNA, 15 nt, Human herpesvirus 7
accugaaucaaaauc

SEQ ID NO: 339002 - RNA, 20 nt, Human herpesvirus 7
accugauaaauacucaugaa

SEQ ID NO: 339003 - RNA, 22 nt, Human herpesvirus 7
accugauaaauacucaugaagg

SEQ ID NO: 339004 - RNA, 16 nt, Human herpesvirus 7
accugcuaacaaguau

SEQ ID NO: 339005 - RNA, 21 nt, Human herpesvirus 7
accuguauggaaccuacugaa

SEQ ID NO: 339006 - RNA, 19 nt, Human herpesvirus 7
accuuaacauacugaugua

SEQ ID NO: 339007 - RNA, 22 nt, Human herpesvirus 7
accuuaaguuuuuuauacuuuu

SEQ ID NO: 339008 - RNA, 15 nt, Human herpesvirus 7
accuuacaacaaaga

SEQ ID NO: 339009 - RNA, 13 nt, Human herpesvirus 7
accuuacuuuuaa

SEQ ID NO: 339010 - RNA, 22 nt, Human herpesvirus 7
accuuacuuuuaauucuucuaa

SEQ ID NO: 339011 - RNA, 13 nt, Human herpesvirus 7
accuuagaaucac

SEQ ID NO: 339012 - RNA, 23 nt, Human herpesvirus 7
accuuagaaucacaacauauaga

SEQ ID NO: 339013 - RNA, 17 nt, Human herpesvirus 7
accuucauggcacauau

SEQ ID NO: 339014 - RNA, 15 nt, Human herpesvirus 7
accuucuuagccaga

SEQ ID NO: 339015 - RNA, 21 nt, Human herpesvirus 7
accuuuuaacaacagccaaau

SEQ ID NO: 339016 - RNA, 18 nt, Human herpesvirus 7
acgaaaauauguugcuca

SEQ ID NO: 339017 - RNA, 17 nt, Human herpesvirus 7
acgaaauuuaaugcuuu

SEQ ID NO: 339018 - RNA, 19 nt, Human herpesvirus 7
acgaaauuuaaugcuuugu

SEQ ID NO: 339019 - RNA, 17 nt, Human herpesvirus 7
acgacacugaaugucaa

SEQ ID NO: 339020 - RNA, 22 nt, Human herpesvirus 7
acgagauggauugagugcaugc

SEQ ID NO: 339021 - RNA, 13 nt, Human herpesvirus 7
acgaguaugucca

SEQ ID NO: 339022 - RNA, 18 nt, Human herpesvirus 7
acgaguauguccaaucaa

SEQ ID NO: 339023 - RNA, 19 nt, Human herpesvirus 7
acgaguauguccaaucaaa

SEQ ID NO: 339024 - RNA, 23 nt, Human herpesvirus 7
acgaguauguccaaucaaaaacu

SEQ ID NO: 339025 - RNA, 21 nt, Human herpesvirus 7
acgauaugguuugaaaaccau

SEQ ID NO: 339026 - RNA, 19 nt, Human herpesvirus 7
acgauccaguacuugcauc

SEQ ID NO: 339027 - RNA, 22 nt, Human herpesvirus 7
acgaugaauuaauucuuuccac

SEQ ID NO: 339028 - RNA, 18 nt, Human herpesvirus 7
acgaugacagucuacuau

SEQ ID NO: 339029 - RNA, 19 nt, Human herpesvirus 7
acgauuaugucuaaggaau

SEQ ID NO: 339030 - RNA, 13 nt, Human herpesvirus 7
acgauuuugugac

SEQ ID NO: 339031 - RNA, 18 nt, Human herpesvirus 7
acgcauauguacgugugc

SEQ ID NO: 339032 - RNA, 23 nt, Human herpesvirus 7
acgcccacucuggaaaugucaag

SEQ ID NO: 339033 - RNA, 19 nt, Human herpesvirus 7
acgcucccauaaaacaaga

SEQ ID NO: 339034 - RNA, 16 nt, Human herpesvirus 7
acgcucucaaucaaaa

SEQ ID NO: 339035 - RNA, 21 nt, Human herpesvirus 7
acgcucucaaucaaaaucuug

SEQ ID NO: 339036 - RNA, 14 nt, Human herpesvirus 7
acgcuuccaucaca

SEQ ID NO: 339037 - RNA, 16 nt, Human herpesvirus 7
acggacuuauguccag

SEQ ID NO: 339038 - RNA, 18 nt, Human herpesvirus 7
acgggaaaaaggauuuga

SEQ ID NO: 339039 - RNA, 23 nt, Human herpesvirus 7
acguaaauuauuugguuccgaaa

SEQ ID NO: 339040 - RNA, 22 nt, Human herpesvirus 7
acguaacaacagcagcugcuaa

SEQ ID NO: 339041 - RNA, 20 nt, Human herpesvirus 7
acguagaaaaaaacaaugaa

SEQ ID NO: 339042 - RNA, 13 nt, Human herpesvirus 7
acguagugucauc

SEQ ID NO: 339043 - RNA, 16 nt, Human herpesvirus 7
acgucaaucacaucag

SEQ ID NO: 339044 - RNA, 17 nt, Human herpesvirus 7
acguccauugauuaaaa

SEQ ID NO: 339045 - RNA, 13 nt, Human herpesvirus 7
acgugagcaauac

SEQ ID NO: 339046 - RNA, 15 nt, Human herpesvirus 7
acgugagcacggcac

SEQ ID NO: 339047 - RNA, 19 nt, Human herpesvirus 7
acgugagggggacaauuau

SEQ ID NO: 339048 - RNA, 17 nt, Human herpesvirus 7
acgugauuaagauuccu

SEQ ID NO: 339049 - RNA, 17 nt, Human herpesvirus 7
acgugccgcguuuuaaa

SEQ ID NO: 339050 - RNA, 18 nt, Human herpesvirus 7
acgugcuuagacuuauca

SEQ ID NO: 339051 - RNA, 18 nt, Human herpesvirus 7
acgugugaaaacaauuaa

SEQ ID NO: 339052 - RNA, 12 nt, Human herpesvirus 7
acuaacuuaucu

SEQ ID NO: 339053 - RNA, 21 nt, Human herpesvirus 7
acuacaugaauggaucuggua

SEQ ID NO: 339054 - RNA, 13 nt, Human herpesvirus 7
acuacuacaugaa

SEQ ID NO: 339055 - RNA, 18 nt, Human herpesvirus 7
acuacucagaagacauau

SEQ ID NO: 339056 - RNA, 20 nt, Human herpesvirus 7
acuagagaagccacuucuaa

SEQ ID NO: 339057 - RNA, 16 nt, Human herpesvirus 7
acuagcaaacagugcu

SEQ ID NO: 339058 - RNA, 17 nt, Human herpesvirus 7
acuagcaaacagugcug

SEQ ID NO: 339059 - RNA, 23 nt, Human herpesvirus 7
acuaucaaauccgagucaguaua

SEQ ID NO: 339060 - RNA, 20 nt, Human herpesvirus 7
acuaucgcaacaacuaaaga

SEQ ID NO: 339061 - RNA, 20 nt, Human herpesvirus 7
acuaucuccuaaaugaauuu

SEQ ID NO: 339062 - RNA, 21 nt, Human herpesvirus 7
acuaugaacuggcacauuaua

SEQ ID NO: 339063 - RNA, 14 nt, Human herpesvirus 7
acuauguccaaaaa

SEQ ID NO: 339064 - RNA, 14 nt, Human herpesvirus 7
acuauucgaaaaua

SEQ ID NO: 339065 - RNA, 16 nt, Human herpesvirus 7
acuauucgaaaauauc

SEQ ID NO: 339066 - RNA, 15 nt, Human herpesvirus 7
acuauuuuaggauau

SEQ ID NO: 339067 - RNA, 14 nt, Human herpesvirus 7
acucaaaagacaga

SEQ ID NO: 339068 - RNA, 21 nt, Human herpesvirus 7
acucaauaaagauugaucacu

SEQ ID NO: 339069 - RNA, 15 nt, Human herpesvirus 7
acucacuccuugcau

SEQ ID NO: 339070 - RNA, 19 nt, Human herpesvirus 7
acucagauucgacuucuaa

SEQ ID NO: 339071 - RNA, 13 nt, Human herpesvirus 7
acucaugaaggau

SEQ ID NO: 339072 - RNA, 17 nt, Human herpesvirus 7
acuccauucgguuuuca

SEQ ID NO: 339073 - RNA, 16 nt, Human herpesvirus 7
acuccuucuaccucuu

SEQ ID NO: 339074 - RNA, 22 nt, Human herpesvirus 7
acucgaugcuucaauucaccaa

SEQ ID NO: 339075 - RNA, 22 nt, Human herpesvirus 7
acucgauuagguaauagcuuua

SEQ ID NO: 339076 - RNA, 19 nt, Human herpesvirus 7
acucgugaaguaaauucag

SEQ ID NO: 339077 - RNA, 19 nt, Human herpesvirus 7
acucugcauuccacuaaaa

SEQ ID NO: 339078 - RNA, 20 nt, Human herpesvirus 7
acucuggcacgcuaugcgaa

SEQ ID NO: 339079 - RNA, 15 nt, Human herpesvirus 7
acucuucucgaagaa

SEQ ID NO: 339080 - RNA, 22 nt, Human herpesvirus 7
acucuuguucauaaaccugcua

SEQ ID NO: 339081 - RNA, 23 nt, Human herpesvirus 7
acucuuucugacauuggaacuuu

SEQ ID NO: 339082 - RNA, 12 nt, Human herpesvirus 7
acugaaccaguu

SEQ ID NO: 339083 - RNA, 19 nt, Human herpesvirus 7
acugaccagagauguuuua

SEQ ID NO: 339084 - RNA, 19 nt, Human herpesvirus 7
acugauguaaaauuaauuc

SEQ ID NO: 339085 - RNA, 21 nt, Human herpesvirus 7
acugcauuaggcagcgcuuga

SEQ ID NO: 339086 - RNA, 18 nt, Human herpesvirus 7
acugcuucucccauucaa

SEQ ID NO: 339087 - RNA, 17 nt, Human herpesvirus 7
acugguacaagguguuc

SEQ ID NO: 339088 - RNA, 16 nt, Human herpesvirus 7
acuguaucuccaaagu

SEQ ID NO: 339089 - RNA, 19 nt, Human herpesvirus 7
acuguauuuguugaucuuc

SEQ ID NO: 339090 - RNA, 21 nt, Human herpesvirus 7
acuguauuuguugaucuucaa

SEQ ID NO: 339091 - RNA, 16 nt, Human herpesvirus 7
acuguccaaaacaauc

SEQ ID NO: 339092 - RNA, 21 nt, Human herpesvirus 7
acuguccaacacaagguacau

SEQ ID NO: 339093 - RNA, 11 nt, Human herpesvirus 7
acugugcauga

SEQ ID NO: 339094 - RNA, 18 nt, Human herpesvirus 7
acugugccgccuggccag

SEQ ID NO: 339095 - RNA, 12 nt, Human herpesvirus 7
acugugucauca

SEQ ID NO: 339096 - RNA, 14 nt, Human herpesvirus 7
acuguuacaacuuu

SEQ ID NO: 339097 - RNA, 17 nt, Human herpesvirus 7
acuguuacaacuuugcc

SEQ ID NO: 339098 - RNA, 15 nt, Human herpesvirus 7
acuguuuacacauua

SEQ ID NO: 339099 - RNA, 17 nt, Human herpesvirus 7
acuguuuguaaggccaa

SEQ ID NO: 339100 - RNA, 21 nt, Human herpesvirus 7
acuguuuucaguuaugaugau

SEQ ID NO: 339101 - RNA, 23 nt, Human herpesvirus 7
agagauguuuuaauugagauuau

SEQ ID NO: 339102 - RNA, 19 nt, Human herpesvirus 7
agagccggaaagcaaugua

SEQ ID NO: 339103 - RNA, 18 nt, Human herpesvirus 7
agagccucccaccauggc

SEQ ID NO: 339104 - RNA, 17 nt, Human herpesvirus 7
agaggaguauguugcau

SEQ ID NO: 339105 - RNA, 14 nt, Human herpesvirus 7
agaggccgaaaauc

SEQ ID NO: 339106 - RNA, 15 nt, Human herpesvirus 7
agagguccaauagaa

SEQ ID NO: 339107 - RNA, 18 nt, Human herpesvirus 7
agaguacaugugucguca

SEQ ID NO: 339108 - RNA, 23 nt, Human herpesvirus 7
agaguagaacuaggaaacacaau

SEQ ID NO: 339109 - RNA, 19 nt, Human herpesvirus 7
agaguauacaaaagacaua

SEQ ID NO: 339110 - RNA, 16 nt, Human herpesvirus 7
agagucaaucugugaa

SEQ ID NO: 339111 - RNA, 16 nt, Human herpesvirus 7
agaguuguggcaaaag

SEQ ID NO: 339112 - RNA, 20 nt, Human herpesvirus 7
agauaagcaauacauucuca

SEQ ID NO: 339113 - RNA, 13 nt, Human herpesvirus 7
agauaaugacaaa

SEQ ID NO: 339114 - RNA, 15 nt, Human herpesvirus 7
agauaguucgcaaug

SEQ ID NO: 339115 - RNA, 17 nt, Human herpesvirus 7
agauaguucgcaauggu

SEQ ID NO: 339116 - RNA, 18 nt, Human herpesvirus 7
agauaguucgcaauggua

SEQ ID NO: 339117 - RNA, 20 nt, Human herpesvirus 7
agauaguucgcaaugguaua

SEQ ID NO: 339118 - RNA, 18 nt, Human herpesvirus 7
agauauacauaauucaau

SEQ ID NO: 339119 - RNA, 12 nt, Human herpesvirus 7
agauauuauuaa

SEQ ID NO: 339120 - RNA, 18 nt, Human herpesvirus 7
agauauugaugacguuau

SEQ ID NO: 339121 - RNA, 20 nt, Human herpesvirus 7
agaucauaauuacauugcag

SEQ ID NO: 339122 - RNA, 21 nt, Human herpesvirus 7
agaucauaauuacauugcagu

SEQ ID NO: 339123 - RNA, 22 nt, Human herpesvirus 7
agaucgaacuguuacaacuuug

SEQ ID NO: 339124 - RNA, 14 nt, Human herpesvirus 7
agaucguucauuga

SEQ ID NO: 339125 - RNA, 17 nt, Human herpesvirus 7
agaugaaggaagcuuua

SEQ ID NO: 339126 - RNA, 14 nt, Human herpesvirus 7
agaugacaacucaa

SEQ ID NO: 339127 - RNA, 15 nt, Human herpesvirus 7
agaugauagccauaa

SEQ ID NO: 339128 - RNA, 13 nt, Human herpesvirus 7
agaugaucuuacu

SEQ ID NO: 339129 - RNA, 20 nt, Human herpesvirus 7
agaugauguuuccuugccag

SEQ ID NO: 339130 - RNA, 15 nt, Human herpesvirus 7
agaugcagaaaaauc

SEQ ID NO: 339131 - RNA, 20 nt, Human herpesvirus 7
agaugcagaaaaauccaaaa

SEQ ID NO: 339132 - RNA, 16 nt, Human herpesvirus 7
agaugcaugcuaauau

SEQ ID NO: 339133 - RNA, 13 nt, Human herpesvirus 7
agauggaaaguuu

SEQ ID NO: 339134 - RNA, 10 nt, Human herpesvirus 7
agauggauug

SEQ ID NO: 339135 - RNA, 23 nt, Human herpesvirus 7
agaugucuaaaaguacaguguau

SEQ ID NO: 339136 - RNA, 21 nt, Human herpesvirus 7
agaugucugcauagacaguaa

SEQ ID NO: 339137 - RNA, 21 nt, Human herpesvirus 7
agauguuuuaauugagauuau

SEQ ID NO: 339138 - RNA, 14 nt, Human herpesvirus 7
agauuaaagcuauu

SEQ ID NO: 339139 - RNA, 20 nt, Human herpesvirus 7
agauuaaauagcaaaguuag

SEQ ID NO: 339140 - RNA, 16 nt, Human herpesvirus 7
agauuagcuucgauuc

SEQ ID NO: 339141 - RNA, 16 nt, Human herpesvirus 7
agauuauacaaaucca

SEQ ID NO: 339142 - RNA, 17 nt, Human herpesvirus 7
agauuauacaaauccaa

SEQ ID NO: 339143 - RNA, 15 nt, Human herpesvirus 7
agauugaaauuccau

SEQ ID NO: 339144 - RNA, 15 nt, Human herpesvirus 7
agauugacuaugaau

SEQ ID NO: 339145 - RNA, 15 nt, Human herpesvirus 7
agauugaucacuuug

SEQ ID NO: 339146 - RNA, 19 nt, Human herpesvirus 7
agauugcuugcacuguaau

SEQ ID NO: 339147 - RNA, 17 nt, Human herpesvirus 7
agauuguuggaaaggga

SEQ ID NO: 339148 - RNA, 19 nt, Human herpesvirus 7
agauuuaauaacaauuuga

SEQ ID NO: 339149 - RNA, 18 nt, Human herpesvirus 7
agauuucuggcaacaguu

SEQ ID NO: 339150 - RNA, 22 nt, Human herpesvirus 7
agauuucuggcaacaguucaaa

SEQ ID NO: 339151 - RNA, 17 nt, Human herpesvirus 7
agauuugguucauuaca

SEQ ID NO: 339152 - RNA, 20 nt, Human herpesvirus 7
agauuuucuagagcauauac

SEQ ID NO: 339153 - RNA, 16 nt, Human herpesvirus 7
agauuuuguagguugu

SEQ ID NO: 339154 - RNA, 21 nt, Human herpesvirus 7
agauuuuguagguuguugcaa

SEQ ID NO: 339155 - RNA, 22 nt, Human herpesvirus 7
agcaaaaaaagguacuaucuau

SEQ ID NO: 339156 - RNA, 23 nt, Human herpesvirus 7
agcaaaauaugcaaaacaaaaua

SEQ ID NO: 339157 - RNA, 22 nt, Human herpesvirus 7
agcaaaccuuacaacaaagaaa

SEQ ID NO: 339158 - RNA, 15 nt, Human herpesvirus 7
agcaaagacuugcaa

SEQ ID NO: 339159 - RNA, 13 nt, Human herpesvirus 7
agcaacaaauguu

SEQ ID NO: 339160 - RNA, 17 nt, Human herpesvirus 7
agcaacugugcaugaaa

SEQ ID NO: 339161 - RNA, 13 nt, Human herpesvirus 7
agcaauacauucu

SEQ ID NO: 339162 - RNA, 15 nt, Human herpesvirus 7
agcaauacauucuca

SEQ ID NO: 339163 - RNA, 17 nt, Human herpesvirus 7
agcaaugcaugaugcac

SEQ ID NO: 339164 - RNA, 17 nt, Human herpesvirus 7
agcaauguauauaagca

SEQ ID NO: 339165 - RNA, 14 nt, Human herpesvirus 7
agcaauguauguca

SEQ ID NO: 339166 - RNA, 16 nt, Human herpesvirus 7
agcacauguacagaca

SEQ ID NO: 339167 - RNA, 19 nt, Human herpesvirus 7
agcaccgaagcagggaaaa

SEQ ID NO: 339168 - RNA, 17 nt, Human herpesvirus 7
agcacucauacuaauag

SEQ ID NO: 339169 - RNA, 19 nt, Human herpesvirus 7
agcacugggagcaaugcau

SEQ ID NO: 339170 - RNA, 22 nt, Human herpesvirus 7
agcacugggagcaaugcaugau

SEQ ID NO: 339171 - RNA, 21 nt, Human herpesvirus 7
agcagaaaauucuuuuucaag

SEQ ID NO: 339172 - RNA, 16 nt, Human herpesvirus 7
agcagacaaggggcau

SEQ ID NO: 339173 - RNA, 16 nt, Human herpesvirus 7
agcagcuugaugaauc

SEQ ID NO: 339174 - RNA, 15 nt, Human herpesvirus 7
agcaggaagcacaaa

SEQ ID NO: 339175 - RNA, 20 nt, Human herpesvirus 7
agcagugauuucaucaccac

SEQ ID NO: 339176 - RNA, 14 nt, Human herpesvirus 7
agcauaaagcacca

SEQ ID NO: 339177 - RNA, 18 nt, Human herpesvirus 7
agcauacuuuaaaacuuu

SEQ ID NO: 339178 - RNA, 21 nt, Human herpesvirus 7
agcauacuuuaaaacuuugau

SEQ ID NO: 339179 - RNA, 17 nt, Human herpesvirus 7
agcaucccuauugcauc

SEQ ID NO: 339180 - RNA, 20 nt, Human herpesvirus 7
agcaugcguaaaaaaucaag

SEQ ID NO: 339181 - RNA, 23 nt, Human herpesvirus 7
agcauggaucguagcaacagaga

SEQ ID NO: 339182 - RNA, 21 nt, Human herpesvirus 7
agcauuaauuugguaucacuu

SEQ ID NO: 339183 - RNA, 22 nt, Human herpesvirus 7
agcauuaauuugguaucacuuc

SEQ ID NO: 339184 - RNA, 13 nt, Human herpesvirus 7
agcauuauuggau

SEQ ID NO: 339185 - RNA, 21 nt, Human herpesvirus 7
agcauuauuggauaauaucag

SEQ ID NO: 339186 - RNA, 13 nt, Human herpesvirus 7
agcauucaugccu

SEQ ID NO: 339187 - RNA, 17 nt, Human herpesvirus 7
agccauaaaugcuuaaa

SEQ ID NO: 339188 - RNA, 18 nt, Human herpesvirus 7
agccaucuaauugcagac

SEQ ID NO: 339189 - RNA, 16 nt, Human herpesvirus 7
agcccagucccaagag

SEQ ID NO: 339190 - RNA, 21 nt, Human herpesvirus 7
agcccagucccaagagacucc

SEQ ID NO: 339191 - RNA, 16 nt, Human herpesvirus 7
agcccugaauuuuaca

SEQ ID NO: 339192 - RNA, 15 nt, Human herpesvirus 7
agccggaaagcaaug

SEQ ID NO: 339193 - RNA, 19 nt, Human herpesvirus 7
agccuauucacauaccugu

SEQ ID NO: 339194 - RNA, 21 nt, Human herpesvirus 7
agccucuaagagcuuuugcaa

SEQ ID NO: 339195 - RNA, 13 nt, Human herpesvirus 7
agccuguacaaau

SEQ ID NO: 339196 - RNA, 21 nt, Human herpesvirus 7
agccuguacaaauuucuccac

SEQ ID NO: 339197 - RNA, 17 nt, Human herpesvirus 7
agccuucagacuugauu

SEQ ID NO: 339198 - RNA, 14 nt, Human herpesvirus 7
agccuuucacuuga

SEQ ID NO: 339199 - RNA, 20 nt, Human herpesvirus 7
agcgaaucaucuuaaaagua

SEQ ID NO: 339200 - RNA, 14 nt, Human herpesvirus 7
agcgacagguguug

SEQ ID NO: 339201 - RNA, 19 nt, Human herpesvirus 7
agcgauuuaaugucugugu

SEQ ID NO: 339202 - RNA, 17 nt, Human herpesvirus 7
agcgcauggagcacaau

SEQ ID NO: 339203 - RNA, 20 nt, Human herpesvirus 7
agcgcauggagcacaauuac

SEQ ID NO: 339204 - RNA, 23 nt, Human herpesvirus 7
agcgcugaaauaaauucaaggaa

SEQ ID NO: 339205 - RNA, 18 nt, Human herpesvirus 7
agcgcugagaucuuccaa

SEQ ID NO: 339206 - RNA, 18 nt, Human herpesvirus 7
agcggagguuugcuauug

SEQ ID NO: 339207 - RNA, 16 nt, Human herpesvirus 7
agcgucaauaguaauu

SEQ ID NO: 339208 - RNA, 17 nt, Human herpesvirus 7
agcguucguaacaaauu

SEQ ID NO: 339209 - RNA, 22 nt, Human herpesvirus 7
agcuaacgauccaguacuugca

SEQ ID NO: 339210 - RNA, 18 nt, Human herpesvirus 7
agcuaauucauuguauga

SEQ ID NO: 339211 - RNA, 21 nt, Human herpesvirus 7
agcuaauugagaaauuuuaca

SEQ ID NO: 339212 - RNA, 14 nt, Human herpesvirus 7
agcuacagcuuugg

SEQ ID NO: 339213 - RNA, 17 nt, Human herpesvirus 7
agcucauuucaucaucc

SEQ ID NO: 339214 - RNA, 15 nt, Human herpesvirus 7
agcuccaagcuuaaa

SEQ ID NO: 339215 - RNA, 19 nt, Human herpesvirus 7
aguguucaaaaaagauucc

SEQ ID NO: 339216 - RNA, 17 nt, Human herpesvirus 7
aguguuuaaaauguuau

SEQ ID NO: 339217 - RNA, 21 nt, Human herpesvirus 7
aguuauaugaaauuucaaaaa

SEQ ID NO: 339218 - RNA, 20 nt, Human herpesvirus 7
aguucaaccuuuuucugaaa

SEQ ID NO: 339219 - RNA, 21 nt, Human herpesvirus 7
aguuccuaaauaauucacauu

SEQ ID NO: 339220 - RNA, 15 nt, Human herpesvirus 7
aguucuaucucaaaa

SEQ ID NO: 339221 - RNA, 19 nt, Human herpesvirus 7
aguucuguuuugaguguua

SEQ ID NO: 339222 - RNA, 19 nt, Human herpesvirus 7
aguucuuuaauaucauuuu

SEQ ID NO: 339223 - RNA, 15 nt, Human herpesvirus 7
aguugacaaugucaa

SEQ ID NO: 339224 - RNA, 22 nt, Human herpesvirus 7
aguugcaacuagagaagccacu

SEQ ID NO: 339225 - RNA, 16 nt, Human herpesvirus 7
aguugcagcugugaua

SEQ ID NO: 339226 - RNA, 20 nt, Human herpesvirus 7
aguugcuuuucaugcuuugu

SEQ ID NO: 339227 - RNA, 13 nt, Human herpesvirus 7
aguuguacucaga

SEQ ID NO: 339228 - RNA, 21 nt, Human herpesvirus 7
aguuguacucagagaucauaa

SEQ ID NO: 339229 - RNA, 14 nt, Human herpesvirus 7
aguuguggcaaaag

SEQ ID NO: 339230 - RNA, 19 nt, Human herpesvirus 7
aguuguucucaauagcaua

SEQ ID NO: 339231 - RNA, 18 nt, Human herpesvirus 7
aguuuacugccaccauuu

SEQ ID NO: 339232 - RNA, 12 nt, Human herpesvirus 7
aguuuacugugg

SEQ ID NO: 339233 - RNA, 13 nt, Human herpesvirus 7
aguuuaucuugga

SEQ ID NO: 339234 - RNA, 22 nt, Human herpesvirus 7
aguuucaauugguuguucaaaa

SEQ ID NO: 339235 - RNA, 18 nt, Human herpesvirus 7
aguuucaguacauucuag

SEQ ID NO: 339236 - RNA, 14 nt, Human herpesvirus 7
aguuuccauugcug

SEQ ID NO: 339237 - RNA, 14 nt, Human herpesvirus 7
aguuucuacauguu

SEQ ID NO: 339238 - RNA, 14 nt, Human herpesvirus 7
aguuuguauuucau

SEQ ID NO: 339239 - RNA, 23 nt, Human herpesvirus 7
aguuuguuucaauaugcaugcaa

SEQ ID NO: 339240 - RNA, 13 nt, Human herpesvirus 7
aguuuuauuccca

SEQ ID NO: 339241 - RNA, 14 nt, Human herpesvirus 7
aguuuuauucccau

SEQ ID NO: 339242 - RNA, 22 nt, Human herpesvirus 7
aguuuuguuacgucaacuaaaa

SEQ ID NO: 339243 - RNA, 16 nt, Human herpesvirus 7
auaaaaaacaaauaac

SEQ ID NO: 339244 - RNA, 20 nt, Human herpesvirus 7
auaaaaaauuuuuagcucua

SEQ ID NO: 339245 - RNA, 21 nt, Human herpesvirus 7
auaaaaauuuggcgccaaaaa

SEQ ID NO: 339246 - RNA, 19 nt, Human herpesvirus 7
auaaaacaugcaacauaau

SEQ ID NO: 339247 - RNA, 17 nt, Human herpesvirus 7
auaaaaugaugaugaca

SEQ ID NO: 339248 - RNA, 17 nt, Human herpesvirus 7
auaaaaugguugugcaa

SEQ ID NO: 339249 - RNA, 18 nt, Human herpesvirus 7
auaaaaugguugugcaau

SEQ ID NO: 339250 - RNA, 20 nt, Human herpesvirus 7
auaaaaugguugugcaauuu

SEQ ID NO: 339251 - RNA, 21 nt, Human herpesvirus 7
auaaaauuuggagaaggaaaa

SEQ ID NO: 339252 - RNA, 14 nt, Human herpesvirus 7
auaaacacuugcua

SEQ ID NO: 339253 - RNA, 20 nt, Human herpesvirus 7
auaaacacuugcuagcugug

SEQ ID NO: 339254 - RNA, 23 nt, Human herpesvirus 7
auaaacacuugcuagcugugaua

SEQ ID NO: 339255 - RNA, 15 nt, Human herpesvirus 7
auaaacgguagaaug

SEQ ID NO: 339256 - RNA, 17 nt, Human herpesvirus 7
auaaacgguagaaugug

SEQ ID NO: 339257 - RNA, 18 nt, Human herpesvirus 7
auaaacguccauugauua

SEQ ID NO: 339258 - RNA, 16 nt, Human herpesvirus 7
auaaacucuaugucaa

SEQ ID NO: 339259 - RNA, 17 nt, Human herpesvirus 7
auaaagauuacauuugc

SEQ ID NO: 339260 - RNA, 14 nt, Human herpesvirus 7
auaaaggaaagaca

SEQ ID NO: 339261 - RNA, 15 nt, Human herpesvirus 7
auaaagugcugucuu

SEQ ID NO: 339262 - RNA, 21 nt, Human herpesvirus 7
auaaaguuuauauuuucuaua

SEQ ID NO: 339263 - RNA, 19 nt, Human herpesvirus 7
auaaauaguuucauugcgu

SEQ ID NO: 339264 - RNA, 16 nt, Human herpesvirus 7
auaaaucaaccaacau

SEQ ID NO: 339265 - RNA, 18 nt, Human herpesvirus 7
auaaaucaaccaacauuc

SEQ ID NO: 339266 - RNA, 18 nt, Human herpesvirus 7
auaaaucagaauauuucc

SEQ ID NO: 339267 - RNA, 20 nt, Human herpesvirus 7
auaaaugcuuaaauuuccau

SEQ ID NO: 339268 - RNA, 18 nt, Human herpesvirus 7
auaaauucaaggaauucu

SEQ ID NO: 339269 - RNA, 17 nt, Human herpesvirus 7
auaacaaacgauuuggu

SEQ ID NO: 339270 - RNA, 22 nt, Human herpesvirus 7
auaacaauauuuaaaguagcug

SEQ ID NO: 339271 - RNA, 19 nt, Human herpesvirus 7
auaacaggaaaccacagaa

SEQ ID NO: 339272 - RNA, 16 nt, Human herpesvirus 7
auaacauugcuucaga

SEQ ID NO: 339273 - RNA, 15 nt, Human herpesvirus 7
auaaccgauacagau

SEQ ID NO: 339274 - RNA, 18 nt, Human herpesvirus 7
auaaccgauacagaucau

SEQ ID NO: 339275 - RNA, 21 nt, Human herpesvirus 7
auaaccgguaaagaaccuauc

SEQ ID NO: 339276 - RNA, 14 nt, Human herpesvirus 7
auaacucaaaagac

SEQ ID NO: 339277 - RNA, 18 nt, Human herpesvirus 7
auaagaaaccagcuuuua

SEQ ID NO: 339278 - RNA, 19 nt, Human herpesvirus 7
auaagaugauagccauaaa

SEQ ID NO: 339279 - RNA, 12 nt, Human herpesvirus 7
auaagaugcuua

SEQ ID NO: 339280 - RNA, 18 nt, Human herpesvirus 7
auaagcaguuauaugaaa

SEQ ID NO: 339281 - RNA, 18 nt, Human herpesvirus 7
auaagccucuaagagcuu

SEQ ID NO: 339282 - RNA, 16 nt, Human herpesvirus 7
auaaguauaaacaguc

SEQ ID NO: 339283 - RNA, 18 nt, Human herpesvirus 7
auaaguucaucauguuug

SEQ ID NO: 339284 - RNA, 17 nt, Human herpesvirus 7
auaaguugacaauguca

SEQ ID NO: 339285 - RNA, 19 nt, Human herpesvirus 7
auaaguugacaaugucaau

SEQ ID NO: 339286 - RNA, 14 nt, Human herpesvirus 7
auaauagcggcuaa

SEQ ID NO: 339287 - RNA, 14 nt, Human herpesvirus 7
auaauaugcuuuca

SEQ ID NO: 339288 - RNA, 16 nt, Human herpesvirus 7
auaauaugcuuucacu

SEQ ID NO: 339289 - RNA, 15 nt, Human herpesvirus 7
auaaucaaaaaauuc

SEQ ID NO: 339290 - RNA, 13 nt, Human herpesvirus 7
auaaucaucuuuc

SEQ ID NO: 339291 - RNA, 17 nt, Human herpesvirus 7
auaauggcauuacuaca

SEQ ID NO: 339292 - RNA, 22 nt, Human herpesvirus 7
auaauggcauuacuacagugga

SEQ ID NO: 339293 - RNA, 19 nt, Human herpesvirus 7
auaaugguuugaauaucuc

SEQ ID NO: 339294 - RNA, 19 nt, Human herpesvirus 7
auaauguuuuuuucauaca

SEQ ID NO: 339295 - RNA, 13 nt, Human herpesvirus 7
auaauuaugaugu

SEQ ID NO: 339296 - RNA, 17 nt, Human herpesvirus 7
auaauuauguccauaaa

SEQ ID NO: 339297 - RNA, 18 nt, Human herpesvirus 7
auaauucauuuguuuaag

SEQ ID NO: 339298 - RNA, 15 nt, Human herpesvirus 7
auaauuuacaaaaca

SEQ ID NO: 339299 - RNA, 14 nt, Human herpesvirus 7
auaauuuucaugaa

SEQ ID NO: 339300 - RNA, 14 nt, Human herpesvirus 7
auacaaaagacaua

SEQ ID NO: 339301 - RNA, 18 nt, Human herpesvirus 7
auacaaaagacauaacaa

SEQ ID NO: 339302 - RNA, 18 nt, Human herpesvirus 7
auacaaauuuaagagaca

SEQ ID NO: 339303 - RNA, 22 nt, Human herpesvirus 7
auacaaauuuaagagacauuga

SEQ ID NO: 339304 - RNA, 19 nt, Human herpesvirus 7
auacaacauauagauuuau

SEQ ID NO: 339305 - RNA, 14 nt, Human herpesvirus 7
auacaacuaaaaau

SEQ ID NO: 339306 - RNA, 18 nt, Human herpesvirus 7
auacaacuaaaaaucuca

SEQ ID NO: 339307 - RNA, 12 nt, Human herpesvirus 7
auacaacuuuau

SEQ ID NO: 339308 - RNA, 15 nt, Human herpesvirus 7
auacaauagugaaca

SEQ ID NO: 339309 - RNA, 22 nt, Human herpesvirus 7
auacacccagucgucugcucaa

SEQ ID NO: 339310 - RNA, 23 nt, Human herpesvirus 7
auacacccagucgucugcucaau

SEQ ID NO: 339311 - RNA, 19 nt, Human herpesvirus 7
auacagauauuuuaauucu

SEQ ID NO: 339312 - RNA, 20 nt, Human herpesvirus 7
auacagauauuuuaauucua

SEQ ID NO: 339313 - RNA, 13 nt, Human herpesvirus 7
auacauaauucaa

SEQ ID NO: 339314 - RNA, 15 nt, Human herpesvirus 7
auacauaauucaaua

SEQ ID NO: 339315 - RNA, 18 nt, Human herpesvirus 7
auacauagaacgacucca

SEQ ID NO: 339316 - RNA, 18 nt, Human herpesvirus 7
auacaucuaggucuucca

SEQ ID NO: 339317 - RNA, 16 nt, Human herpesvirus 7
auaccaaaaaccugaa

SEQ ID NO: 339318 - RNA, 16 nt, Human herpesvirus 7
auaccauaaauaccaa

SEQ ID NO: 339319 - RNA, 21 nt, Human herpesvirus 7
auacgaaaacggucugagacg

SEQ ID NO: 339320 - RNA, 17 nt, Human herpesvirus 7
auacgaaucaguucaac

SEQ ID NO: 339321 - RNA, 13 nt, Human herpesvirus 7
auacguccaaaaa

SEQ ID NO: 339322 - RNA, 17 nt, Human herpesvirus 7
auacguuaguugcagcu

SEQ ID NO: 339323 - RNA, 23 nt, Human herpesvirus 7
auacuaauagaaaaauguacaau

SEQ ID NO: 339324 - RNA, 13 nt, Human herpesvirus 7
auacuagcagauc

SEQ ID NO: 339325 - RNA, 14 nt, Human herpesvirus 7
auacucaugaagga

SEQ ID NO: 339326 - RNA, 15 nt, Human herpesvirus 7
auacucuagaacaaa

SEQ ID NO: 339327 - RNA, 12 nt, Human herpesvirus 7
auacucuuguug

SEQ ID NO: 339328 - RNA, 14 nt, Human herpesvirus 7
auacugaaucugaa

SEQ ID NO: 339329 - RNA, 16 nt, Human herpesvirus 7
auacuggcaugucuca

SEQ ID NO: 339330 - RNA, 17 nt, Human herpesvirus 7
auccugcuauucauuuc

SEQ ID NO: 339331 - RNA, 16 nt, Human herpesvirus 7
auccuguuaugugguc

SEQ ID NO: 339332 - RNA, 17 nt, Human herpesvirus 7
auccuuaaauuuuacaa

SEQ ID NO: 339333 - RNA, 16 nt, Human herpesvirus 7
aucgaacuguuacaac

SEQ ID NO: 339334 - RNA, 15 nt, Human herpesvirus 7
aucgaucucugucaa

SEQ ID NO: 339335 - RNA, 23 nt, Human herpesvirus 7
aucgauguuuuaucuaacacugc

SEQ ID NO: 339336 - RNA, 16 nt, Human herpesvirus 7
aucgauugcaguugaa

SEQ ID NO: 339337 - RNA, 18 nt, Human herpesvirus 7
aucgcaacaacuaaagag

SEQ ID NO: 339338 - RNA, 20 nt, Human herpesvirus 7
aucgcaguguucauuaucac

SEQ ID NO: 339339 - RNA, 22 nt, Human herpesvirus 7
aucgccauuuucuugagccuug

SEQ ID NO: 339340 - RNA, 17 nt, Human herpesvirus 7
aucgcguuuucaugcuc

SEQ ID NO: 339341 - RNA, 19 nt, Human herpesvirus 7
aucgcguuuucaugcucau

SEQ ID NO: 339342 - RNA, 15 nt, Human herpesvirus 7
aucgucaucuucucu

SEQ ID NO: 339343 - RNA, 16 nt, Human herpesvirus 7
aucguucauugauuau

SEQ ID NO: 339344 - RNA, 21 nt, Human herpesvirus 7
aucuaaagacacuuauuugau

SEQ ID NO: 339345 - RNA, 16 nt, Human herpesvirus 7
aucuaaaguauggaaa

SEQ ID NO: 339346 - RNA, 20 nt, Human herpesvirus 7
aucuaacaguuucugcauac

SEQ ID NO: 339347 - RNA, 23 nt, Human herpesvirus 7
aucuaagagauuguggcaaugua

SEQ ID NO: 339348 - RNA, 14 nt, Human herpesvirus 7
aucuaauuaaucug

SEQ ID NO: 339349 - RNA, 14 nt, Human herpesvirus 7
aucuaauugcagac

SEQ ID NO: 339350 - RNA, 22 nt, Human herpesvirus 7
aucuaauugcagacuaauuaca

SEQ ID NO: 339351 - RNA, 12 nt, Human herpesvirus 7
aucuaccaucaa

SEQ ID NO: 339352 - RNA, 13 nt, Human herpesvirus 7
aucuacuguaauc

SEQ ID NO: 339353 - RNA, 17 nt, Human herpesvirus 7
aucuagaguaucuuuuc

SEQ ID NO: 339354 - RNA, 19 nt, Human herpesvirus 7
aucuauaguuuguauuuca

SEQ ID NO: 339355 - RNA, 22 nt, Human herpesvirus 7
aucuaugaugcauccgaaucuu

SEQ ID NO: 339356 - RNA, 16 nt, Human herpesvirus 7
aucuaugcaaagcaag

SEQ ID NO: 339357 - RNA, 18 nt, Human herpesvirus 7
aucuccgugacaaagcau

SEQ ID NO: 339358 - RNA, 22 nt, Human herpesvirus 7
aucugacugguacaagguguuc

SEQ ID NO: 339359 - RNA, 16 nt, Human herpesvirus 7
aucugcaaaaaaccau

SEQ ID NO: 339360 - RNA, 14 nt, Human herpesvirus 7
aucugcacuaucuc

SEQ ID NO: 339361 - RNA, 20 nt, Human herpesvirus 7
aucugcuggaaauuugugua

SEQ ID NO: 339362 - RNA, 16 nt, Human herpesvirus 7
aucuggaaucgaauac

SEQ ID NO: 339363 - RNA, 20 nt, Human herpesvirus 7
aucuggaaucgaauacaguu

SEQ ID NO: 339364 - RNA, 15 nt, Human herpesvirus 7
aucugguaaugucau

SEQ ID NO: 339365 - RNA, 22 nt, Human herpesvirus 7
aucugucauggacggcauuuaa

SEQ ID NO: 339366 - RNA, 17 nt, Human herpesvirus 7
aucuuaaaaguacaaau

SEQ ID NO: 339367 - RNA, 18 nt, Human herpesvirus 7
aucuuaaaugucaaugag

SEQ ID NO: 339368 - RNA, 16 nt, Human herpesvirus 7
aucuuacuuccuaauc

SEQ ID NO: 339369 - RNA, 22 nt, Human herpesvirus 7
aucuuacuuccuaaucuaacag

SEQ ID NO: 339370 - RNA, 18 nt, Human herpesvirus 7
aucuuauauuccuuugaa

SEQ ID NO: 339371 - RNA, 17 nt, Human herpesvirus 7
aucuucugcuaacucau

SEQ ID NO: 339372 - RNA, 13 nt, Human herpesvirus 7
aucuuguuuauuu

SEQ ID NO: 339373 - RNA, 23 nt, Human herpesvirus 7
aucuuuaauaaaaacaaagacua

SEQ ID NO: 339374 - RNA, 13 nt, Human herpesvirus 7
aucuuuacuuuca

SEQ ID NO: 339375 - RNA, 14 nt, Human herpesvirus 7
aucuuuacuuucau

SEQ ID NO: 339376 - RNA, 18 nt, Human herpesvirus 7
aucuuuacuuucauagcu

SEQ ID NO: 339377 - RNA, 19 nt, Human herpesvirus 7
aucuuuacuuucauagcuu

SEQ ID NO: 339378 - RNA, 21 nt, Human herpesvirus 7
aucuuucggagacguugcuca

SEQ ID NO: 339379 - RNA, 16 nt, Human herpesvirus 7
aucuuuuacagaagaa

SEQ ID NO: 339380 - RNA, 17 nt, Human herpesvirus 7
aucuuuuucaaauggau

SEQ ID NO: 339381 - RNA, 15 nt, Human herpesvirus 7
augaaaaaaacauua

SEQ ID NO: 339382 - RNA, 13 nt, Human herpesvirus 7
augaaaaagccau

SEQ ID NO: 339383 - RNA, 13 nt, Human herpesvirus 7
augaaaacagcug

SEQ ID NO: 339384 - RNA, 18 nt, Human herpesvirus 7
augaaaacugaauuggua

SEQ ID NO: 339385 - RNA, 13 nt, Human herpesvirus 7
augaaacuuccaa

SEQ ID NO: 339386 - RNA, 15 nt, Human herpesvirus 7
augaaacuuccaaua

SEQ ID NO: 339387 - RNA, 13 nt, Human herpesvirus 7
augaaaucuugaa

SEQ ID NO: 339388 - RNA, 14 nt, Human herpesvirus 7
augaacuggcacau

SEQ ID NO: 339389 - RNA, 16 nt, Human herpesvirus 7
augaagaauguaugaa

SEQ ID NO: 339390 - RNA, 16 nt, Human herpesvirus 7
augaagcgcugagauc

SEQ ID NO: 339391 - RNA, 22 nt, Human herpesvirus 7
augaagcgcugagaucuuccaa

SEQ ID NO: 339392 - RNA, 23 nt, Human herpesvirus 7
augaaggaugcguguguucaaaa

SEQ ID NO: 339393 - RNA, 15 nt, Human herpesvirus 7
augaaucaaauuuca

SEQ ID NO: 339394 - RNA, 11 nt, Human herpesvirus 7
augaaucugca

SEQ ID NO: 339395 - RNA, 16 nt, Human herpesvirus 7
augaauggaucuggua

SEQ ID NO: 339396 - RNA, 14 nt, Human herpesvirus 7
augaauuaucuaga

SEQ ID NO: 339397 - RNA, 14 nt, Human herpesvirus 7
augaauuugacagu

SEQ ID NO: 339398 - RNA, 17 nt, Human herpesvirus 7
augaauuugacagucca

SEQ ID NO: 339399 - RNA, 18 nt, Human herpesvirus 7
augaauuugacaguccau

SEQ ID NO: 339400 - RNA, 21 nt, Human herpesvirus 7
augacaaaacugcaaauccaa

SEQ ID NO: 339401 - RNA, 22 nt, Human herpesvirus 7
augacacgacacugaaugucaa

SEQ ID NO: 339402 - RNA, 18 nt, Human herpesvirus 7
augaccgcaugugaaaau

SEQ ID NO: 339403 - RNA, 14 nt, Human herpesvirus 7
augacugacauucu

SEQ ID NO: 339404 - RNA, 11 nt, Human herpesvirus 7
augacugagaa

SEQ ID NO: 339405 - RNA, 11 nt, Human herpesvirus 7
augacuuugaa

SEQ ID NO: 339406 - RNA, 14 nt, Human herpesvirus 7
augacuuugaauca

SEQ ID NO: 339407 - RNA, 21 nt, Human herpesvirus 7
augaucuuacuuccuaaucua

SEQ ID NO: 339408 - RNA, 15 nt, Human herpesvirus 7
augaugaaacuucca

SEQ ID NO: 339409 - RNA, 21 nt, Human herpesvirus 7
augaugacaacaaagcaugaa

SEQ ID NO: 339410 - RNA, 22 nt, Human herpesvirus 7
augaugacaacaaagcaugaaa

SEQ ID NO: 339411 - RNA, 15 nt, Human herpesvirus 7
augaugaugacaaaa

SEQ ID NO: 339412 - RNA, 9 nt, Human herpesvirus 7
augaugcau

SEQ ID NO: 339413 - RNA, 17 nt, Human herpesvirus 7
augauggauaacuauga

SEQ ID NO: 339414 - RNA, 13 nt, Human herpesvirus 7
augaugguugcaa

SEQ ID NO: 339415 - RNA, 15 nt, Human herpesvirus 7
augaugguugcaaua

SEQ ID NO: 339416 - RNA, 18 nt, Human herpesvirus 7
augauguuaaagaacaag

SEQ ID NO: 339417 - RNA, 21 nt, Human herpesvirus 7
augauuggauuuucuguaauc

SEQ ID NO: 339418 - RNA, 22 nt, Human herpesvirus 7
augauuugcagccagaacucaa

SEQ ID NO: 339419 - RNA, 13 nt, Human herpesvirus 7
augauuuugacau

SEQ ID NO: 339420 - RNA, 19 nt, Human herpesvirus 7
augcaagaaaguccaaagu

SEQ ID NO: 339421 - RNA, 16 nt, Human herpesvirus 7
augcaagcaacacuua

SEQ ID NO: 339422 - RNA, 16 nt, Human herpesvirus 7
augcagaaaaauccaa

SEQ ID NO: 339423 - RNA, 17 nt, Human herpesvirus 7
augcagaaaaauccaaa

SEQ ID NO: 339424 - RNA, 18 nt, Human herpesvirus 7
augcagaaaaauccaaaa

SEQ ID NO: 339425 - RNA, 21 nt, Human herpesvirus 7
augcagacugcgcuuggcaaa

SEQ ID NO: 339426 - RNA, 18 nt, Human herpesvirus 7
augcaucauagaguagaa

SEQ ID NO: 339427 - RNA, 13 nt, Human herpesvirus 7
augcauccaaaga

SEQ ID NO: 339428 - RNA, 13 nt, Human herpesvirus 7
augcaugcaauuu

SEQ ID NO: 339429 - RNA, 19 nt, Human herpesvirus 7
augccacaaaaaacuuuga

SEQ ID NO: 339430 - RNA, 21 nt, Human herpesvirus 7
augccagaaauuaaauacaaa

SEQ ID NO: 339431 - RNA, 16 nt, Human herpesvirus 7
augccagccuauucac

SEQ ID NO: 339432 - RNA, 21 nt, Human herpesvirus 7
augccauaauuucagcacugg

SEQ ID NO: 339433 - RNA, 19 nt, Human herpesvirus 7
augccggccgggugcugcg

SEQ ID NO: 339434 - RNA, 14 nt, Human herpesvirus 7
augccuauucaaac

SEQ ID NO: 339435 - RNA, 21 nt, Human herpesvirus 7
augccuguuuuuuaaugcuga

SEQ ID NO: 339436 - RNA, 21 nt, Human herpesvirus 7
augcgaaagccacuguugaug

SEQ ID NO: 339437 - RNA, 20 nt, Human herpesvirus 7
augcgauacuaguuuauuaa

SEQ ID NO: 339438 - RNA, 14 nt, Human herpesvirus 7
augcgauaucugac

SEQ ID NO: 339439 - RNA, 20 nt, Human herpesvirus 7
augcuaagaaagaacauuuu

SEQ ID NO: 339440 - RNA, 22 nt, Human herpesvirus 7
augcuagaagacugcaaccuga

SEQ ID NO: 339441 - RNA, 14 nt, Human herpesvirus 7
augcuaguguucac

SEQ ID NO: 339442 - RNA, 22 nt, Human herpesvirus 7
augcuaugguggcauauaugaa

SEQ ID NO: 339443 - RNA, 16 nt, Human herpesvirus 7
augcucaucgucucca

SEQ ID NO: 339444 - RNA, 20 nt, Human herpesvirus 7
augcucuagaaaaucuacca

SEQ ID NO: 339445 - RNA, 18 nt, Human herpesvirus 7
auucaaagcuucuacaaa

SEQ ID NO: 339446 - RNA, 17 nt, Human herpesvirus 7
auucaaauaagggauau

SEQ ID NO: 339447 - RNA, 14 nt, Human herpesvirus 7
auucaacacucgau

SEQ ID NO: 339448 - RNA, 22 nt, Human herpesvirus 7
auucaacacucgauuagguaau

SEQ ID NO: 339449 - RNA, 22 nt, Human herpesvirus 7
auucaacaucuuucauaacaaa

SEQ ID NO: 339450 - RNA, 14 nt, Human herpesvirus 7
auucaaccacagac

SEQ ID NO: 339451 - RNA, 17 nt, Human herpesvirus 7
auucaaggaauucugac

SEQ ID NO: 339452 - RNA, 18 nt, Human herpesvirus 7
auucaauaaaaagauaua

SEQ ID NO: 339453 - RNA, 20 nt, Human herpesvirus 7
auucaauaaaaagauauaca

SEQ ID NO: 339454 - RNA, 23 nt, Human herpesvirus 7
auucaauauaguuugguuaucca

SEQ ID NO: 339455 - RNA, 16 nt, Human herpesvirus 7
auucaaucuacuguac

SEQ ID NO: 339456 - RNA, 15 nt, Human herpesvirus 7
auucaaucugcaaaa

SEQ ID NO: 339457 - RNA, 17 nt, Human herpesvirus 7
auucaauggcaucuuau

SEQ ID NO: 339458 - RNA, 14 nt, Human herpesvirus 7
auucacauaccugu

SEQ ID NO: 339459 - RNA, 18 nt, Human herpesvirus 7
auucacauugucacugca

SEQ ID NO: 339460 - RNA, 19 nt, Human herpesvirus 7
auucacgcuuccaucacaa

SEQ ID NO: 339461 - RNA, 20 nt, Human herpesvirus 7
auucacgcuuccaucacaaa

SEQ ID NO: 339462 - RNA, 21 nt, Human herpesvirus 7
auucacgcuuccaucacaaaa

SEQ ID NO: 339463 - RNA, 21 nt, Human herpesvirus 7
auucaguauuuuuuaugaaga

SEQ ID NO: 339464 - RNA, 17 nt, Human herpesvirus 7
auucaguuuacugugga

SEQ ID NO: 339465 - RNA, 15 nt, Human herpesvirus 7
auucaucaggacaau

SEQ ID NO: 339466 - RNA, 18 nt, Human herpesvirus 7
auucaucaggacaaucaa

SEQ ID NO: 339467 - RNA, 22 nt, Human herpesvirus 7
auucauccaaaaagaaacuuuc

SEQ ID NO: 339468 - RNA, 14 nt, Human herpesvirus 7
auucauuguaugac

SEQ ID NO: 339469 - RNA, 15 nt, Human herpesvirus 7
auuccaacagcuuca

SEQ ID NO: 339470 - RNA, 18 nt, Human herpesvirus 7
auuccagauaugacaaau

SEQ ID NO: 339471 - RNA, 23 nt, Human herpesvirus 7
auuccgggagaaagcuguuucca

SEQ ID NO: 339472 - RNA, 17 nt, Human herpesvirus 7
auuccuauuaagcagcu

SEQ ID NO: 339473 - RNA, 13 nt, Human herpesvirus 7
auuccucaucucc

SEQ ID NO: 339474 - RNA, 16 nt, Human herpesvirus 7
auuccucaucucccac

SEQ ID NO: 339475 - RNA, 16 nt, Human herpesvirus 7
auuccuucuaaauucu

SEQ ID NO: 339476 - RNA, 21 nt, Human herpesvirus 7
auuccuucuagugaaacacau

SEQ ID NO: 339477 - RNA, 17 nt, Human herpesvirus 7
auucgaucuaagucuac

SEQ ID NO: 339478 - RNA, 15 nt, Human herpesvirus 7
auucgauuagcuguu

SEQ ID NO: 339479 - RNA, 18 nt, Human herpesvirus 7
auucgcaaggaauaugaa

SEQ ID NO: 339480 - RNA, 16 nt, Human herpesvirus 7
auucuacacaucuuca

SEQ ID NO: 339481 - RNA, 18 nt, Human herpesvirus 7
auucuacacaucuucaau

SEQ ID NO: 339482 - RNA, 17 nt, Human herpesvirus 7
auucuaggcuugcauuc

SEQ ID NO: 339483 - RNA, 19 nt, Human herpesvirus 7
auucuauaaaacgugugaa

SEQ ID NO: 339484 - RNA, 19 nt, Human herpesvirus 7
auucuauuuuaaaaaccau

SEQ ID NO: 339485 - RNA, 18 nt, Human herpesvirus 7
auucucauagauuucaga

SEQ ID NO: 339486 - RNA, 23 nt, Human herpesvirus 7
auucuccaguggcaguacuacua

SEQ ID NO: 339487 - RNA, 14 nt, Human herpesvirus 7
auucucgcuucaaa

SEQ ID NO: 339488 - RNA, 18 nt, Human herpesvirus 7
auucucucucuauuacac

SEQ ID NO: 339489 - RNA, 14 nt, Human herpesvirus 7
auucugcuugucuc

SEQ ID NO: 339490 - RNA, 17 nt, Human herpesvirus 7
auucugcuugucucugu

SEQ ID NO: 339491 - RNA, 23 nt, Human herpesvirus 7
auucugucuuggaagagucucuc

SEQ ID NO: 339492 - RNA, 15 nt, Human herpesvirus 7
auucuuaugccaggu

SEQ ID NO: 339493 - RNA, 15 nt, Human herpesvirus 7
auucuuauucuacac

SEQ ID NO: 339494 - RNA, 23 nt, Human herpesvirus 7
auucuuccagaaaggagacuuaa

SEQ ID NO: 339495 - RNA, 15 nt, Human herpesvirus 7
auucuuuuucaagau

SEQ ID NO: 339496 - RNA, 14 nt, Human herpesvirus 7
auugaaaguaaaaa

SEQ ID NO: 339497 - RNA, 17 nt, Human herpesvirus 7
auugaaauuccauacaa

SEQ ID NO: 339498 - RNA, 17 nt, Human herpesvirus 7
auugaaccuuaacauac

SEQ ID NO: 339499 - RNA, 15 nt, Human herpesvirus 7
auugaauguggaauu

SEQ ID NO: 339500 - RNA, 22 nt, Human herpesvirus 7
auugaauguggaauuaaaucca

SEQ ID NO: 339501 - RNA, 17 nt, Human herpesvirus 7
auugaguucaggucucu

SEQ ID NO: 339502 - RNA, 16 nt, Human herpesvirus 7
auugaguuuacugcca

SEQ ID NO: 339503 - RNA, 21 nt, Human herpesvirus 7
auugauccuccuugccugcaa

SEQ ID NO: 339504 - RNA, 16 nt, Human herpesvirus 7
auugaucguguguuac

SEQ ID NO: 339505 - RNA, 14 nt, Human herpesvirus 7
auugcgaccaaaga

SEQ ID NO: 339506 - RNA, 19 nt, Human herpesvirus 7
auugcuuuuagaaaaucaa

SEQ ID NO: 339507 - RNA, 14 nt, Human herpesvirus 7
auuggagaugucag

SEQ ID NO: 339508 - RNA, 21 nt, Human herpesvirus 7
auuggauaauaucaguacaac

SEQ ID NO: 339509 - RNA, 19 nt, Human herpesvirus 7
auuggcaugcuuacaguga

SEQ ID NO: 339510 - RNA, 19 nt, Human herpesvirus 7
auugguagaaaugugcgaa

SEQ ID NO: 339511 - RNA, 22 nt, Human herpesvirus 7
auugguagaaaugugcgaaggu

SEQ ID NO: 339512 - RNA, 20 nt, Human herpesvirus 7
auuggucguugcuuacuuug

SEQ ID NO: 339513 - RNA, 22 nt, Human herpesvirus 7
auuggucguugcuuacuuugcg

SEQ ID NO: 339514 - RNA, 22 nt, Human herpesvirus 7
auuguaaguaaauuuacuugau

SEQ ID NO: 339515 - RNA, 15 nt, Human herpesvirus 7
auuguacaauuacaa

SEQ ID NO: 339516 - RNA, 17 nt, Human herpesvirus 7
auuguccuuucaacgau

SEQ ID NO: 339517 - RNA, 21 nt, Human herpesvirus 7
auuguccuuucaacgaucuca

SEQ ID NO: 339518 - RNA, 21 nt, Human herpesvirus 7
auugucuacaauuucuggcaa

SEQ ID NO: 339519 - RNA, 17 nt, Human herpesvirus 7
auugucuuacagcacuu

SEQ ID NO: 339520 - RNA, 18 nt, Human herpesvirus 7
auugucuuacagcacuuu

SEQ ID NO: 339521 - RNA, 20 nt, Human herpesvirus 7
auugugcaucuccuguaacc

SEQ ID NO: 339522 - RNA, 15 nt, Human herpesvirus 7
auuguggggcauuca

SEQ ID NO: 339523 - RNA, 23 nt, Human herpesvirus 7
auugugguacaacaaacauucca

SEQ ID NO: 339524 - RNA, 21 nt, Human herpesvirus 7
auugugugucuuguguucaag

SEQ ID NO: 339525 - RNA, 19 nt, Human herpesvirus 7
auuuaaagauugcuugcac

SEQ ID NO: 339526 - RNA, 13 nt, Human herpesvirus 7
auuuaaaguaaga

SEQ ID NO: 339527 - RNA, 17 nt, Human herpesvirus 7
auuuaaaguagcugaau

SEQ ID NO: 339528 - RNA, 20 nt, Human herpesvirus 7
auuuaaauacugagagaaua

SEQ ID NO: 339529 - RNA, 17 nt, Human herpesvirus 7
auuuaacaaagugcaua

SEQ ID NO: 339530 - RNA, 16 nt, Human herpesvirus 7
auuuaagcuucaaaaa

SEQ ID NO: 339531 - RNA, 15 nt, Human herpesvirus 7
auuuaagugaacugu

SEQ ID NO: 339532 - RNA, 22 nt, Human herpesvirus 7
auuuaaugucugugucuaugag

SEQ ID NO: 339533 - RNA, 20 nt, Human herpesvirus 7
auuuacuugauuuucuuaca

SEQ ID NO: 339534 - RNA, 21 nt, Human herpesvirus 7
auuuacuugauuuucuuacac

SEQ ID NO: 339535 - RNA, 12 nt, Human herpesvirus 7
auuuagauuuaa

SEQ ID NO: 339536 - RNA, 23 nt, Human herpesvirus 7
auuuagucggcacacguacaaua

SEQ ID NO: 339537 - RNA, 21 nt, Human herpesvirus 7
auuuauauuugcuugcugaau

SEQ ID NO: 339538 - RNA, 18 nt, Human herpesvirus 7
auuuaucucauagcuuaa

SEQ ID NO: 339539 - RNA, 15 nt, Human herpesvirus 7
auuuauuuacagauu

SEQ ID NO: 339540 - RNA, 22 nt, Human herpesvirus 7
auuuauuuucguaucugugacu

SEQ ID NO: 339541 - RNA, 18 nt, Human herpesvirus 7
auuucaaacguaaugcaa

SEQ ID NO: 339542 - RNA, 21 nt, Human herpesvirus 7
auuucaauaaucaaugcaucu

SEQ ID NO: 339543 - RNA, 15 nt, Human herpesvirus 7
auuucacacaaugcc

SEQ ID NO: 339544 - RNA, 17 nt, Human herpesvirus 7
auuucacacaaugccuu

SEQ ID NO: 339545 - RNA, 18 nt, Human herpesvirus 7
auuucagaauuuccagaa

SEQ ID NO: 339546 - RNA, 16 nt, Human herpesvirus 7
auuucagcuccauguc

SEQ ID NO: 339547 - RNA, 13 nt, Human herpesvirus 7
auuucauaucuau

SEQ ID NO: 339548 - RNA, 19 nt, Human herpesvirus 7
auuucauaucuaugaugca

SEQ ID NO: 339549 - RNA, 13 nt, Human herpesvirus 7
auuuccaacgcau

SEQ ID NO: 339550 - RNA, 16 nt, Human herpesvirus 7
auuuccaacgcauuca

SEQ ID NO: 339551 - RNA, 17 nt, Human herpesvirus 7
auuuccaacgcauucaa

SEQ ID NO: 339552 - RNA, 22 nt, Human herpesvirus 7
auuuccacguuuuuuagcuuuu

SEQ ID NO: 339553 - RNA, 13 nt, Human herpesvirus 7
auuuccgagacag

SEQ ID NO: 339554 - RNA, 18 nt, Human herpesvirus 7
auuuccuuuaugugauau

SEQ ID NO: 339555 - RNA, 18 nt, Human herpesvirus 7
auuucgaauuuguucaau

SEQ ID NO: 339556 - RNA, 15 nt, Human herpesvirus 7
auuucguuauuccau

SEQ ID NO: 339557 - RNA, 19 nt, Human herpesvirus 7
auuucuaauagacaaauua

SEQ ID NO: 339558 - RNA, 13 nt, Human herpesvirus 7
auuucuacaauau

SEQ ID NO: 339559 - RNA, 14 nt, Human herpesvirus 7
caaauugaaccuua

SEQ ID NO: 339560 - RNA, 12 nt, Human herpesvirus 7
caaauugauccu

SEQ ID NO: 339561 - RNA, 20 nt, Human herpesvirus 7
caaauugauccugcuauuca

SEQ ID NO: 339562 - RNA, 21 nt, Human herpesvirus 7
caaauuuaucucauagcuuaa

SEQ ID NO: 339563 - RNA, 19 nt, Human herpesvirus 7
caaauuucuccacaguccu

SEQ ID NO: 339564 - RNA, 12 nt, Human herpesvirus 7
caacaaaaucua

SEQ ID NO: 339565 - RNA, 14 nt, Human herpesvirus 7
caacaaacauucca

SEQ ID NO: 339566 - RNA, 16 nt, Human herpesvirus 7
caacaaacauuccaac

SEQ ID NO: 339567 - RNA, 21 nt, Human herpesvirus 7
caacaaauuaaauacuugcaa

SEQ ID NO: 339568 - RNA, 21 nt, Human herpesvirus 7
caacaacuaaaacuacauuua

SEQ ID NO: 339569 - RNA, 13 nt, Human herpesvirus 7
caacaacuaaaga

SEQ ID NO: 339570 - RNA, 15 nt, Human herpesvirus 7
caacaacuaaagaga

SEQ ID NO: 339571 - RNA, 14 nt, Human herpesvirus 7
caacacaauuuuca

SEQ ID NO: 339572 - RNA, 17 nt, Human herpesvirus 7
caacacaauuuucacau

SEQ ID NO: 339573 - RNA, 15 nt, Human herpesvirus 7
caacacucugcauuc

SEQ ID NO: 339574 - RNA, 15 nt, Human herpesvirus 7
caacagagaacacca

SEQ ID NO: 339575 - RNA, 21 nt, Human herpesvirus 7
caacagagaacaccauaguca

SEQ ID NO: 339576 - RNA, 16 nt, Human herpesvirus 7
caacagcagcugcuaa

SEQ ID NO: 339577 - RNA, 20 nt, Human herpesvirus 7
caacagcuucagaugcuaug

SEQ ID NO: 339578 - RNA, 15 nt, Human herpesvirus 7
caacauacagcauga

SEQ ID NO: 339579 - RNA, 23 nt, Human herpesvirus 7
caacauaucgcgauguuggcacu

SEQ ID NO: 339580 - RNA, 17 nt, Human herpesvirus 7
caacaucuuaaauguca

SEQ ID NO: 339581 - RNA, 14 nt, Human herpesvirus 7
caaccacaaccaaa

SEQ ID NO: 339582 - RNA, 14 nt, Human herpesvirus 7
caaccggcaaucau

SEQ ID NO: 339583 - RNA, 22 nt, Human herpesvirus 7
caacgcauucaauggcaucuua

SEQ ID NO: 339584 - RNA, 22 nt, Human herpesvirus 7
caacuaaaauugacagcaccaa

SEQ ID NO: 339585 - RNA, 23 nt, Human herpesvirus 7
caacuagcaaacagugcuguacu

SEQ ID NO: 339586 - RNA, 22 nt, Human herpesvirus 7
caacuaguucuuuaauaucauu

SEQ ID NO: 339587 - RNA, 13 nt, Human herpesvirus 7
caacucuucuuca

SEQ ID NO: 339588 - RNA, 15 nt, Human herpesvirus 7
caacucuucuucaga

SEQ ID NO: 339589 - RNA, 13 nt, Human herpesvirus 7
caacugugacaaa

SEQ ID NO: 339590 - RNA, 13 nt, Human herpesvirus 7
caacuuauguguc

SEQ ID NO: 339591 - RNA, 15 nt, Human herpesvirus 7
caacuuaugugucac

SEQ ID NO: 339592 - RNA, 15 nt, Human herpesvirus 7
caacuucaacauaca

SEQ ID NO: 339593 - RNA, 16 nt, Human herpesvirus 7
caacuucuaguucuga

SEQ ID NO: 339594 - RNA, 14 nt, Human herpesvirus 7
caacuuugcgccga

SEQ ID NO: 339595 - RNA, 14 nt, Human herpesvirus 7
caacuuuucuuaaa

SEQ ID NO: 339596 - RNA, 16 nt, Human herpesvirus 7
caagaaaguccaaagu

SEQ ID NO: 339597 - RNA, 18 nt, Human herpesvirus 7
caagaaaguccaaaguga

SEQ ID NO: 339598 - RNA, 20 nt, Human herpesvirus 7
caagaacuucagauuuuagu

SEQ ID NO: 339599 - RNA, 21 nt, Human herpesvirus 7
caagacagaaaugaaucugca

SEQ ID NO: 339600 - RNA, 13 nt, Human herpesvirus 7
caagagacuccaa

SEQ ID NO: 339601 - RNA, 15 nt, Human herpesvirus 7
caagauagugacauu

SEQ ID NO: 339602 - RNA, 18 nt, Human herpesvirus 7
caagauuaauauauuuuc

SEQ ID NO: 339603 - RNA, 12 nt, Human herpesvirus 7
caagcacaugua

SEQ ID NO: 339604 - RNA, 14 nt, Human herpesvirus 7
caagcacauguaca

SEQ ID NO: 339605 - RNA, 15 nt, Human herpesvirus 7
caaggaauucugacu

SEQ ID NO: 339606 - RNA, 23 nt, Human herpesvirus 7
caagguguuccuuagcuauguuu

SEQ ID NO: 339607 - RNA, 16 nt, Human herpesvirus 7
caaguagaauaccaga

SEQ ID NO: 339608 - RNA, 20 nt, Human herpesvirus 7
caaguagccgaaaaagaauu

SEQ ID NO: 339609 - RNA, 12 nt, Human herpesvirus 7
caaguaugucag

SEQ ID NO: 339610 - RNA, 15 nt, Human herpesvirus 7
caagucuuugcugga

SEQ ID NO: 339611 - RNA, 22 nt, Human herpesvirus 7
caagucuuugcuggaucauaga

SEQ ID NO: 339612 - RNA, 15 nt, Human herpesvirus 7
caaguuaauuuugca

SEQ ID NO: 339613 - RNA, 20 nt, Human herpesvirus 7
caaguuucaaaaagugcaug

SEQ ID NO: 339614 - RNA, 14 nt, Human herpesvirus 7
caaguuucuucugg

SEQ ID NO: 339615 - RNA, 15 nt, Human herpesvirus 7
caaguuuuacagaaa

SEQ ID NO: 339616 - RNA, 22 nt, Human herpesvirus 7
caauaaauuuugaauguuuaca

SEQ ID NO: 339617 - RNA, 19 nt, Human herpesvirus 7
caauaacauuuuguaugaa

SEQ ID NO: 339618 - RNA, 12 nt, Human herpesvirus 7
caauaaucaaug

SEQ ID NO: 339619 - RNA, 24 nt, Human herpesvirus 7
caauaaugcaucauagaguagaac

SEQ ID NO: 339620 - RNA, 17 nt, Human herpesvirus 7
caauaauggcauuacua

SEQ ID NO: 339621 - RNA, 16 nt, Human herpesvirus 7
caauaauuucuauuaa

SEQ ID NO: 339622 - RNA, 14 nt, Human herpesvirus 7
caauacaugaauua

SEQ ID NO: 339623 - RNA, 16 nt, Human herpesvirus 7
caauacaugaauuauc

SEQ ID NO: 339624 - RNA, 20 nt, Human herpesvirus 7
caauagaaaacaaaucugau

SEQ ID NO: 339625 - RNA, 18 nt, Human herpesvirus 7
caauagauuacgcacaaa

SEQ ID NO: 339626 - RNA, 23 nt, Human herpesvirus 7
caauagauuacgcacaaauuucu

SEQ ID NO: 339627 - RNA, 19 nt, Human herpesvirus 7
caauagugaacaugugcug

SEQ ID NO: 339628 - RNA, 17 nt, Human herpesvirus 7
caauaucccagaauauc

SEQ ID NO: 339629 - RNA, 17 nt, Human herpesvirus 7
caauaugacgacuuuga

SEQ ID NO: 339630 - RNA, 18 nt, Human herpesvirus 7
caauaugcaugcaauuuu

SEQ ID NO: 339631 - RNA, 21 nt, Human herpesvirus 7
caauaugcaugcaauuuucac

SEQ ID NO: 339632 - RNA, 20 nt, Human herpesvirus 7
caauauuuaaaguagcugaa

SEQ ID NO: 339633 - RNA, 16 nt, Human herpesvirus 7
caaucaaacauguaau

SEQ ID NO: 339634 - RNA, 23 nt, Human herpesvirus 7
caaucacauacucuauuggguca

SEQ ID NO: 339635 - RNA, 21 nt, Human herpesvirus 7
caaucacaucagauacagaga

SEQ ID NO: 339636 - RNA, 20 nt, Human herpesvirus 7
caaucagcauuuaccauuuc

SEQ ID NO: 339637 - RNA, 15 nt, Human herpesvirus 7
caaucauaauucaau

SEQ ID NO: 339638 - RNA, 15 nt, Human herpesvirus 7
caaucgauaaacuuu

SEQ ID NO: 339639 - RNA, 20 nt, Human herpesvirus 7
caaucgauaaacuuugucaa

SEQ ID NO: 339640 - RNA, 12 nt, Human herpesvirus 7
caaucuuacaaa

SEQ ID NO: 339641 - RNA, 19 nt, Human herpesvirus 7
caaucuuacaaaaaguaga

SEQ ID NO: 339642 - RNA, 13 nt, Human herpesvirus 7
caaugaacaaguu

SEQ ID NO: 339643 - RNA, 14 nt, Human herpesvirus 7
caaugagcaauuca

SEQ ID NO: 339644 - RNA, 14 nt, Human herpesvirus 7
caaugauguuugca

SEQ ID NO: 339645 - RNA, 19 nt, Human herpesvirus 7
caaugcagccuacuuuuaa

SEQ ID NO: 339646 - RNA, 14 nt, Human herpesvirus 7
caaugcaucuuuaa

SEQ ID NO: 339647 - RNA, 20 nt, Human herpesvirus 7
caaugcauuggaaaaaugcu

SEQ ID NO: 339648 - RNA, 16 nt, Human herpesvirus 7
caauggacguuuauuu

SEQ ID NO: 339649 - RNA, 20 nt, Human herpesvirus 7
caaugguauaaagugcuguc

SEQ ID NO: 339650 - RNA, 12 nt, Human herpesvirus 7
caauguaugugc

SEQ ID NO: 339651 - RNA, 17 nt, Human herpesvirus 7
caauuaaugcauuggaa

SEQ ID NO: 339652 - RNA, 19 nt, Human herpesvirus 7
caauuacaaaauguauaca

SEQ ID NO: 339653 - RNA, 20 nt, Human herpesvirus 7
caauuacaaaauguauacaa

SEQ ID NO: 339654 - RNA, 12 nt, Human herpesvirus 7
caauuacuuguc

SEQ ID NO: 339655 - RNA, 20 nt, Human herpesvirus 7
caauuauagaaacauuccuc

SEQ ID NO: 339656 - RNA, 14 nt, Human herpesvirus 7
caauucuuuuacaa

SEQ ID NO: 339657 - RNA, 18 nt, Human herpesvirus 7
caauugaguuuacugcca

SEQ ID NO: 339658 - RNA, 22 nt, Human herpesvirus 7
caauuuauccuaagcuuuucag

SEQ ID NO: 339659 - RNA, 14 nt, Human herpesvirus 7
caauuucacacaau

SEQ ID NO: 339660 - RNA, 20 nt, Human herpesvirus 7
caauuucacacaaugccuuu

SEQ ID NO: 339661 - RNA, 13 nt, Human herpesvirus 7
caauuucuggcaa

SEQ ID NO: 339662 - RNA, 17 nt, Human herpesvirus 7
caauuucuggcaauaaa

SEQ ID NO: 339663 - RNA, 18 nt, Human herpesvirus 7
caauuuggcucugaucua

SEQ ID NO: 339664 - RNA, 16 nt, Human herpesvirus 7
cacaaaaaacuuugaa

SEQ ID NO: 339665 - RNA, 21 nt, Human herpesvirus 7
cacaaagccaaugagugcaga

SEQ ID NO: 339666 - RNA, 20 nt, Human herpesvirus 7
cacaaaugucuuauccuguu

SEQ ID NO: 339667 - RNA, 15 nt, Human herpesvirus 7
cacaaucagcauuua

SEQ ID NO: 339668 - RNA, 13 nt, Human herpesvirus 7
cacaauggaacag

SEQ ID NO: 339669 - RNA, 19 nt, Human herpesvirus 7
cacaauuacacaaauugau

SEQ ID NO: 339670 - RNA, 19 nt, Human herpesvirus 7
cacaauuguaaauggcaaa

SEQ ID NO: 339671 - RNA, 22 nt, Human herpesvirus 7
cacaauuuuaacgcugaauuca

SEQ ID NO: 339672 - RNA, 14 nt, Human herpesvirus 7
cacacaaugccuuu

SEQ ID NO: 339673 - RNA, 15 nt, Human herpesvirus 7
cacacguacaauauu

SEQ ID NO: 339674 - RNA, 22 nt, Human herpesvirus 7
caggcagccgauguccacgacc

SEQ ID NO: 339675 - RNA, 19 nt, Human herpesvirus 7
caggcuagaaguuuagaga

SEQ ID NO: 339676 - RNA, 15 nt, Human herpesvirus 7
caggugauauucuuu

SEQ ID NO: 339677 - RNA, 14 nt, Human herpesvirus 7
caguaaauugcaac

SEQ ID NO: 339678 - RNA, 13 nt, Human herpesvirus 7
caguacuugcauc

SEQ ID NO: 339679 - RNA, 20 nt, Human herpesvirus 7
caguauaucguuuuuaguuc

SEQ ID NO: 339680 - RNA, 14 nt, Human herpesvirus 7
cagucaacaaaucc

SEQ ID NO: 339681 - RNA, 16 nt, Human herpesvirus 7
cagucccagauaauua

SEQ ID NO: 339682 - RNA, 14 nt, Human herpesvirus 7
cagucgucaaauau

SEQ ID NO: 339683 - RNA, 18 nt, Human herpesvirus 7
cagucgucugcucaaugg

SEQ ID NO: 339684 - RNA, 18 nt, Human herpesvirus 7
cagugggaaugcaucuga

SEQ ID NO: 339685 - RNA, 14 nt, Human herpesvirus 7
caguguacuguuga

SEQ ID NO: 339686 - RNA, 19 nt, Human herpesvirus 7
caguguacuguugauacaa

SEQ ID NO: 339687 - RNA, 17 nt, Human herpesvirus 7
caguguuuaaaauguua

SEQ ID NO: 339688 - RNA, 19 nt, Human herpesvirus 7
caguguuuuuuucugguaa

SEQ ID NO: 339689 - RNA, 18 nt, Human herpesvirus 7
caguuacuuuuacuccuc

SEQ ID NO: 339690 - RNA, 14 nt, Human herpesvirus 7
caguucaaccuuuu

SEQ ID NO: 339691 - RNA, 22 nt, Human herpesvirus 7
caguucccauaaauauugauaa

SEQ ID NO: 339692 - RNA, 15 nt, Human herpesvirus 7
caguucuaucucaaa

SEQ ID NO: 339693 - RNA, 21 nt, Human herpesvirus 7
caguugaauucguuaagcacc

SEQ ID NO: 339694 - RNA, 14 nt, Human herpesvirus 7
caguuucugcauac

SEQ ID NO: 339695 - RNA, 23 nt, Human herpesvirus 7
caguuucuuuuucauuaacuuuu

SEQ ID NO: 339696 - RNA, 19 nt, Human herpesvirus 7
caguuugcaacaaauucca

SEQ ID NO: 339697 - RNA, 19 nt, Human herpesvirus 7
cauaaaaaaucuaauuaau

SEQ ID NO: 339698 - RNA, 23 nt, Human herpesvirus 7
cauaaaaaauuuuuagcucuaaa

SEQ ID NO: 339699 - RNA, 12 nt, Human herpesvirus 7
cauaaaacaaga

SEQ ID NO: 339700 - RNA, 14 nt, Human herpesvirus 7
cauaaaacaugcaa

SEQ ID NO: 339701 - RNA, 13 nt, Human herpesvirus 7
cauaaacuaucaa

SEQ ID NO: 339702 - RNA, 17 nt, Human herpesvirus 7
cauaaauaauaacaauu

SEQ ID NO: 339703 - RNA, 13 nt, Human herpesvirus 7
cauaaauaccaaa

SEQ ID NO: 339704 - RNA, 14 nt, Human herpesvirus 7
cauaacccacuaac

SEQ ID NO: 339705 - RNA, 19 nt, Human herpesvirus 7
cauaaucauggaaaaugga

SEQ ID NO: 339706 - RNA, 19 nt, Human herpesvirus 7
cauaaugacacgacacuga

SEQ ID NO: 339707 - RNA, 24 nt, Human herpesvirus 7
cauaauguuguuuggucuauugaa

SEQ ID NO: 339708 - RNA, 21 nt, Human herpesvirus 7
cauaauuacauugcagucaaa

SEQ ID NO: 339709 - RNA, 15 nt, Human herpesvirus 7
cauaauuuucaugaa

SEQ ID NO: 339710 - RNA, 15 nt, Human herpesvirus 7
cauacaaugaauuag

SEQ ID NO: 339711 - RNA, 19 nt, Human herpesvirus 7
cauacauagaacgacucca

SEQ ID NO: 339712 - RNA, 20 nt, Human herpesvirus 7
cauacauagaacgacuccaa

SEQ ID NO: 339713 - RNA, 16 nt, Human herpesvirus 7
cauacucuagaacaaa

SEQ ID NO: 339714 - RNA, 21 nt, Human herpesvirus 7
cauacucuagaacaaacugua

SEQ ID NO: 339715 - RNA, 20 nt, Human herpesvirus 7
cauacucuauugggucauac

SEQ ID NO: 339716 - RNA, 15 nt, Human herpesvirus 7
cauacuuuaaaacuu

SEQ ID NO: 339717 - RNA, 17 nt, Human herpesvirus 7
cauagaagaaugcaagc

SEQ ID NO: 339718 - RNA, 17 nt, Human herpesvirus 7
cauagauuaaauagcaa

SEQ ID NO: 339719 - RNA, 18 nt, Human herpesvirus 7
cauagauuaaauagcaaa

SEQ ID NO: 339720 - RNA, 12 nt, Human herpesvirus 7
cauagauuucag

SEQ ID NO: 339721 - RNA, 16 nt, Human herpesvirus 7
cauagcacucauacua

SEQ ID NO: 339722 - RNA, 17 nt, Human herpesvirus 7
cauagcaggaagcacaa

SEQ ID NO: 339723 - RNA, 15 nt, Human herpesvirus 7
cauagcuagaaauug

SEQ ID NO: 339724 - RNA, 10 nt, Human herpesvirus 7
cauagcuuaa

SEQ ID NO: 339725 - RNA, 22 nt, Human herpesvirus 7
cauagcuuaaaaaauacauuga

SEQ ID NO: 339726 - RNA, 22 nt, Human herpesvirus 7
cauagucuguagaugcaugcua

SEQ ID NO: 339727 - RNA, 18 nt, Human herpesvirus 7
cauauaucuuugauuacu

SEQ ID NO: 339728 - RNA, 20 nt, Human herpesvirus 7
cauauaugcauuauauccaa

SEQ ID NO: 339729 - RNA, 22 nt, Human herpesvirus 7
cauaucgcgauguuggcacugu

SEQ ID NO: 339730 - RNA, 11 nt, Human herpesvirus 7
cauauggacuu

SEQ ID NO: 339731 - RNA, 19 nt, Human herpesvirus 7
cauauuccauuaagccaga

SEQ ID NO: 339732 - RNA, 14 nt, Human herpesvirus 7
cauauuuaauuucu

SEQ ID NO: 339733 - RNA, 15 nt, Human herpesvirus 7
caucaaaacauauca

SEQ ID NO: 339734 - RNA, 18 nt, Human herpesvirus 7
caucaacauacgugcuua

SEQ ID NO: 339735 - RNA, 19 nt, Human herpesvirus 7
caucaagaaacaagguuua

SEQ ID NO: 339736 - RNA, 16 nt, Human herpesvirus 7
caucagaccuaacaaa

SEQ ID NO: 339737 - RNA, 21 nt, Human herpesvirus 7
caucauauacaauaaugcugu

SEQ ID NO: 339738 - RNA, 14 nt, Human herpesvirus 7
caucgaagaaauuc

SEQ ID NO: 339739 - RNA, 20 nt, Human herpesvirus 7
caucgaauuuuacaaugcag

SEQ ID NO: 339740 - RNA, 12 nt, Human herpesvirus 7
caucgcauauag

SEQ ID NO: 339741 - RNA, 21 nt, Human herpesvirus 7
caucgguuuucugagugcuaa

SEQ ID NO: 339742 - RNA, 23 nt, Human herpesvirus 7
caucgguuuucugagugcuaaaa

SEQ ID NO: 339743 - RNA, 20 nt, Human herpesvirus 7
caucuaggucuuccacuguu

SEQ ID NO: 339744 - RNA, 21 nt, Human herpesvirus 7
caucuaggucuuccacuguug

SEQ ID NO: 339745 - RNA, 13 nt, Human herpesvirus 7
caucuaugugcuc

SEQ ID NO: 339746 - RNA, 17 nt, Human herpesvirus 7
caucuccacaguggugc

SEQ ID NO: 339747 - RNA, 16 nt, Human herpesvirus 7
caucugucaggucaca

SEQ ID NO: 339748 - RNA, 20 nt, Human herpesvirus 7
caucuguguuauuguaucua

SEQ ID NO: 339749 - RNA, 19 nt, Human herpesvirus 7
caucuucugaaucugcaaa

SEQ ID NO: 339750 - RNA, 18 nt, Human herpesvirus 7
caucuugagaaauaugaa

SEQ ID NO: 339751 - RNA, 18 nt, Human herpesvirus 7
caucuuucguauugccuu

SEQ ID NO: 339752 - RNA, 20 nt, Human herpesvirus 7
caucuuucguauugccuuuc

SEQ ID NO: 339753 - RNA, 11 nt, Human herpesvirus 7
caucuuucuag

SEQ ID NO: 339754 - RNA, 15 nt, Human herpesvirus 7
caucuuuucagugaa

SEQ ID NO: 339755 - RNA, 22 nt, Human herpesvirus 7
caugaaaacuuggaaaacaauc

SEQ ID NO: 339756 - RNA, 15 nt, Human herpesvirus 7
caugaaacguuucaa

SEQ ID NO: 339757 - RNA, 13 nt, Human herpesvirus 7
caugaaaucuuga

SEQ ID NO: 339758 - RNA, 18 nt, Human herpesvirus 7
caugacuggacacaauca

SEQ ID NO: 339759 - RNA, 18 nt, Human herpesvirus 7
caugaugaauauaacaaa

SEQ ID NO: 339760 - RNA, 20 nt, Human herpesvirus 7
caugauguuaaagaacaaga

SEQ ID NO: 339761 - RNA, 21 nt, Human herpesvirus 7
caugauuauauaaguccuuca

SEQ ID NO: 339762 - RNA, 21 nt, Human herpesvirus 7
caugauugguaaaaaauuacu

SEQ ID NO: 339763 - RNA, 19 nt, Human herpesvirus 7
caugccuagagggcacguu

SEQ ID NO: 339764 - RNA, 19 nt, Human herpesvirus 7
caugcggaagaacaagcaa

SEQ ID NO: 339765 - RNA, 20 nt, Human herpesvirus 7
caugcggaagaacaagcaaa

SEQ ID NO: 339766 - RNA, 20 nt, Human herpesvirus 7
cauggaaaauggagcauuau

SEQ ID NO: 339767 - RNA, 16 nt, Human herpesvirus 7
cauggagcacaauuac

SEQ ID NO: 339768 - RNA, 22 nt, Human herpesvirus 7
cauggcaauagauuacgcacaa

SEQ ID NO: 339769 - RNA, 16 nt, Human herpesvirus 7
caugggcacauuugua

SEQ ID NO: 339770 - RNA, 14 nt, Human herpesvirus 7
cauggggcauuaau

SEQ ID NO: 339771 - RNA, 18 nt, Human herpesvirus 7
cauguaguacaaugcugu

SEQ ID NO: 339772 - RNA, 22 nt, Human herpesvirus 7
cauguauugucuuacagcacuu

SEQ ID NO: 339773 - RNA, 23 nt, Human herpesvirus 7
caugucugccucccgggcacacu

SEQ ID NO: 339774 - RNA, 22 nt, Human herpesvirus 7
caugucuucaacuucucuugga

SEQ ID NO: 339775 - RNA, 18 nt, Human herpesvirus 7
cauguguacuaaagccaa

SEQ ID NO: 339776 - RNA, 19 nt, Human herpesvirus 7
cauguguacuaaagccaau

SEQ ID NO: 339777 - RNA, 16 nt, Human herpesvirus 7
cauguuccauucaaua

SEQ ID NO: 339778 - RNA, 18 nt, Human herpesvirus 7
cauguuccauucaauaaa

SEQ ID NO: 339779 - RNA, 17 nt, Human herpesvirus 7
cauguuuuaugacucag

SEQ ID NO: 339780 - RNA, 19 nt, Human herpesvirus 7
cauuaacuuuuauaaaaua

SEQ ID NO: 339781 - RNA, 17 nt, Human herpesvirus 7
cauuaauaucaauuuga

SEQ ID NO: 339782 - RNA, 18 nt, Human herpesvirus 7
cauuaauaucaauuugaa

SEQ ID NO: 339783 - RNA, 15 nt, Human herpesvirus 7
cauuacgaacugaua

SEQ ID NO: 339784 - RNA, 18 nt, Human herpesvirus 7
cauuacgucaucccugcu

SEQ ID NO: 339785 - RNA, 22 nt, Human herpesvirus 7
cauuacuacaguggaugcugga

SEQ ID NO: 339786 - RNA, 16 nt, Human herpesvirus 7
cauuacucguguugca

SEQ ID NO: 339787 - RNA, 19 nt, Human herpesvirus 7
cauuacucguguugcaaau

SEQ ID NO: 339788 - RNA, 22 nt, Human herpesvirus 7
cccuggcguuacggguggcacu

SEQ ID NO: 339789 - RNA, 23 nt, Human herpesvirus 7
cccuuuccaauauagacauuucg

SEQ ID NO: 339790 - RNA, 13 nt, Human herpesvirus 7
ccgaaaaagaauu

SEQ ID NO: 339791 - RNA, 24 nt, Human herpesvirus 7
ccgaaaguguaggcaagaaggcca

SEQ ID NO: 339792 - RNA, 20 nt, Human herpesvirus 7
ccgaaauucgcaaaauuuca

SEQ ID NO: 339793 - RNA, 14 nt, Human herpesvirus 7
ccgauggaacugaa

SEQ ID NO: 339794 - RNA, 23 nt, Human herpesvirus 7
ccgauggaacugaaaacaaugca

SEQ ID NO: 339795 - RNA, 17 nt, Human herpesvirus 7
ccgcacaggcugcaucu

SEQ ID NO: 339796 - RNA, 12 nt, Human herpesvirus 7
ccgcagacuuuc

SEQ ID NO: 339797 - RNA, 23 nt, Human herpesvirus 7
ccggaaguugaggcuuuuagaaa

SEQ ID NO: 339798 - RNA, 16 nt, Human herpesvirus 7
ccggacaguuugcaac

SEQ ID NO: 339799 - RNA, 21 nt, Human herpesvirus 7
ccggaccauuuccucuggaaa

SEQ ID NO: 339800 - RNA, 12 nt, Human herpesvirus 7
ccggacuuugau

SEQ ID NO: 339801 - RNA, 14 nt, Human herpesvirus 7
ccgggcacacuuug

SEQ ID NO: 339802 - RNA, 15 nt, Human herpesvirus 7
ccgguccuuccucaa

SEQ ID NO: 339803 - RNA, 17 nt, Human herpesvirus 7
ccgguuaaaaugggaau

SEQ ID NO: 339804 - RNA, 16 nt, Human herpesvirus 7
ccguaaaacaaucgau

SEQ ID NO: 339805 - RNA, 19 nt, Human herpesvirus 7
ccguaaaacaaucgauugc

SEQ ID NO: 339806 - RNA, 20 nt, Human herpesvirus 7
ccguuuaaugaaaaagccau

SEQ ID NO: 339807 - RNA, 13 nt, Human herpesvirus 7
ccguuucauuuaa

SEQ ID NO: 339808 - RNA, 12 nt, Human herpesvirus 7
ccguuugcagcc

SEQ ID NO: 339809 - RNA, 20 nt, Human herpesvirus 7
ccguuugcagcccaauguug

SEQ ID NO: 339810 - RNA, 16 nt, Human herpesvirus 7
ccguuuugaaaaguca

SEQ ID NO: 339811 - RNA, 14 nt, Human herpesvirus 7
ccuaggauaccaaa

SEQ ID NO: 339812 - RNA, 15 nt, Human herpesvirus 7
ccuaggauaccaaac

SEQ ID NO: 339813 - RNA, 16 nt, Human herpesvirus 7
ccuaggauaccaaaca

SEQ ID NO: 339814 - RNA, 20 nt, Human herpesvirus 7
ccuauaauucucacagcuua

SEQ ID NO: 339815 - RNA, 20 nt, Human herpesvirus 7
ccuaucaaaauuccauucga

SEQ ID NO: 339816 - RNA, 14 nt, Human herpesvirus 7
ccuaugacugagaa

SEQ ID NO: 339817 - RNA, 21 nt, Human herpesvirus 7
ccuaugacugagaaaaacaga

SEQ ID NO: 339818 - RNA, 21 nt, Human herpesvirus 7
ccuaugucaugaaucuuugac

SEQ ID NO: 339819 - RNA, 18 nt, Human herpesvirus 7
ccuauucacauaccugua

SEQ ID NO: 339820 - RNA, 17 nt, Human herpesvirus 7
ccucaaccggcaaucau

SEQ ID NO: 339821 - RNA, 17 nt, Human herpesvirus 7
ccucauggccagugaau

SEQ ID NO: 339822 - RNA, 23 nt, Human herpesvirus 7
ccuccacucgaaggagagcccag

SEQ ID NO: 339823 - RNA, 12 nt, Human herpesvirus 7
ccuccauaugaa

SEQ ID NO: 339824 - RNA, 15 nt, Human herpesvirus 7
ccuccuugccugcaa

SEQ ID NO: 339825 - RNA, 23 nt, Human herpesvirus 7
ccuccuugccugcaauucuauuu

SEQ ID NO: 339826 - RNA, 16 nt, Human herpesvirus 7
ccucuauuauuucuac

SEQ ID NO: 339827 - RNA, 15 nt, Human herpesvirus 7
ccugaauuuuacacc

SEQ ID NO: 339828 - RNA, 23 nt, Human herpesvirus 7
ccugcuaaggcgaaaaacacuuu

SEQ ID NO: 339829 - RNA, 13 nt, Human herpesvirus 7
ccuggaacuucac

SEQ ID NO: 339830 - RNA, 18 nt, Human herpesvirus 7
ccuggaacuucaccacga

SEQ ID NO: 339831 - RNA, 20 nt, Human herpesvirus 7
ccuggaguuagcgaggcauu

SEQ ID NO: 339832 - RNA, 19 nt, Human herpesvirus 7
ccuggcguuacggguggca

SEQ ID NO: 339833 - RNA, 23 nt, Human herpesvirus 7
ccugguguuuuguauacaacuuu

SEQ ID NO: 339834 - RNA, 20 nt, Human herpesvirus 7
ccuguauggaaccuacugaa

SEQ ID NO: 339835 - RNA, 20 nt, Human herpesvirus 7
ccugucacacuuauuccaga

SEQ ID NO: 339836 - RNA, 17 nt, Human herpesvirus 7
ccugugugcaaugaugu

SEQ ID NO: 339837 - RNA, 18 nt, Human herpesvirus 7
ccuguuugacguaauuac

SEQ ID NO: 339838 - RNA, 18 nt, Human herpesvirus 7
ccuguuuucgcuguugau

SEQ ID NO: 339839 - RNA, 11 nt, Human herpesvirus 7
ccuuacaacaa

SEQ ID NO: 339840 - RNA, 23 nt, Human herpesvirus 7
ccuuagaagcuugcuagauucua

SEQ ID NO: 339841 - RNA, 22 nt, Human herpesvirus 7
ccuucaauagcagagaauaugu

SEQ ID NO: 339842 - RNA, 20 nt, Human herpesvirus 7
ccuucauuuacagagaauuu

SEQ ID NO: 339843 - RNA, 15 nt, Human herpesvirus 7
ccuucccaacuaaaa

SEQ ID NO: 339844 - RNA, 16 nt, Human herpesvirus 7
ccuucgcugcugugag

SEQ ID NO: 339845 - RNA, 18 nt, Human herpesvirus 7
ccuugccaaaagcuugaa

SEQ ID NO: 339846 - RNA, 20 nt, Human herpesvirus 7
ccuuuaugugauauacuuuu

SEQ ID NO: 339847 - RNA, 15 nt, Human herpesvirus 7
cgaaacaauacauga

SEQ ID NO: 339848 - RNA, 17 nt, Human herpesvirus 7
cgaaacagcgugucaaa

SEQ ID NO: 339849 - RNA, 22 nt, Human herpesvirus 7
cgaaagaauuuuguaagaaaca

SEQ ID NO: 339850 - RNA, 17 nt, Human herpesvirus 7
cgaacuguuacaacuuu

SEQ ID NO: 339851 - RNA, 18 nt, Human herpesvirus 7
cgaagcagggaaaaagca

SEQ ID NO: 339852 - RNA, 22 nt, Human herpesvirus 7
cgaagcagggaaaaagcauaaa

SEQ ID NO: 339853 - RNA, 13 nt, Human herpesvirus 7
cgaaggcaucaag

SEQ ID NO: 339854 - RNA, 14 nt, Human herpesvirus 7
cgaaucuacauuaa

SEQ ID NO: 339855 - RNA, 22 nt, Human herpesvirus 7
cgaaugccaucuauaaacauuc

SEQ ID NO: 339856 - RNA, 13 nt, Human herpesvirus 7
cgaauuuguucaa

SEQ ID NO: 339857 - RNA, 16 nt, Human herpesvirus 7
cgaauuuuacaaugca

SEQ ID NO: 339858 - RNA, 15 nt, Human herpesvirus 7
cgacacugaauguca

SEQ ID NO: 339859 - RNA, 16 nt, Human herpesvirus 7
cgacacugaaugucaa

SEQ ID NO: 339860 - RNA, 21 nt, Human herpesvirus 7
cgacuucuaaaaauacaacuu

SEQ ID NO: 339861 - RNA, 21 nt, Human herpesvirus 7
cgacuuugaagagcuuuuuaa

SEQ ID NO: 339862 - RNA, 18 nt, Human herpesvirus 7
cgagauuccaaagagccu

SEQ ID NO: 339863 - RNA, 15 nt, Human herpesvirus 7
cgagcgacagucacc

SEQ ID NO: 339864 - RNA, 21 nt, Human herpesvirus 7
cgagucaguuaucaaguagaa

SEQ ID NO: 339865 - RNA, 14 nt, Human herpesvirus 7
cgauacagaucauu

SEQ ID NO: 339866 - RNA, 23 nt, Human herpesvirus 7
cgauagcauuagagcauauucca

SEQ ID NO: 339867 - RNA, 21 nt, Human herpesvirus 7
cgauauauuggcaugcuuaca

SEQ ID NO: 339868 - RNA, 17 nt, Human herpesvirus 7
cgauccaguacuugcau

SEQ ID NO: 339869 - RNA, 18 nt, Human herpesvirus 7
cgauccaguacuugcauc

SEQ ID NO: 339870 - RNA, 20 nt, Human herpesvirus 7
cgauccucagaauguacaca

SEQ ID NO: 339871 - RNA, 15 nt, Human herpesvirus 7
cgaugagcaugaaaa

SEQ ID NO: 339872 - RNA, 20 nt, Human herpesvirus 7
cgauuagcuguucauaucaa

SEQ ID NO: 339873 - RNA, 14 nt, Human herpesvirus 7
cgauuccagcacuu

SEQ ID NO: 339874 - RNA, 21 nt, Human herpesvirus 7
cgauuuaagugaacuguuaca

SEQ ID NO: 339875 - RNA, 22 nt, Human herpesvirus 7
cgauuuaagugaacuguuacag

SEQ ID NO: 339876 - RNA, 14 nt, Human herpesvirus 7
cgcaaacauuuuga

SEQ ID NO: 339877 - RNA, 23 nt, Human herpesvirus 7
cgcaaugguauaaagugcugucu

SEQ ID NO: 339878 - RNA, 15 nt, Human herpesvirus 7
cgcaccgucauuuaa

SEQ ID NO: 339879 - RNA, 17 nt, Human herpesvirus 7
cgcacgaaagaccugua

SEQ ID NO: 339880 - RNA, 15 nt, Human herpesvirus 7
cgccaaaaaaacaca

SEQ ID NO: 339881 - RNA, 14 nt, Human herpesvirus 7
cgcguuucuucaaa

SEQ ID NO: 339882 - RNA, 12 nt, Human herpesvirus 7
cgcuaaccaucu

SEQ ID NO: 339883 - RNA, 14 nt, Human herpesvirus 7
cgcugaauucauuu

SEQ ID NO: 339884 - RNA, 22 nt, Human herpesvirus 7
cgcuucguaaauauaaucaaaa

SEQ ID NO: 339885 - RNA, 14 nt, Human herpesvirus 7
cggaagagacuguc

SEQ ID NO: 339886 - RNA, 19 nt, Human herpesvirus 7
cggaaguacuaaucacaag

SEQ ID NO: 339887 - RNA, 18 nt, Human herpesvirus 7
cggaauuuguaucuauga

SEQ ID NO: 339888 - RNA, 19 nt, Human herpesvirus 7
cggaauuuguaucuaugac

SEQ ID NO: 339889 - RNA, 22 nt, Human herpesvirus 7
cggacaaauauacgaaugccau

SEQ ID NO: 339890 - RNA, 23 nt, Human herpesvirus 7
cggacaguuugcaacaaauucca

SEQ ID NO: 339891 - RNA, 12 nt, Human herpesvirus 7
cggaccauuucc

SEQ ID NO: 339892 - RNA, 20 nt, Human herpesvirus 7
cggaguuugaguuucuucuu

SEQ ID NO: 339893 - RNA, 11 nt, Human herpesvirus 7
cggcacacaac

SEQ ID NO: 339894 - RNA, 13 nt, Human herpesvirus 7
cgguagaaugugu

SEQ ID NO: 339895 - RNA, 21 nt, Human herpesvirus 7
cgguauuuuguuuugcauauu

SEQ ID NO: 339896 - RNA, 16 nt, Human herpesvirus 7
cggugaauguagaagu

SEQ ID NO: 339897 - RNA, 20 nt, Human herpesvirus 7
cggugaauguagaaguugau

SEQ ID NO: 339898 - RNA, 20 nt, Human herpesvirus 7
cgguuuguuuaaucuggaau

SEQ ID NO: 339899 - RNA, 16 nt, Human herpesvirus 7
cguaaaaaaucaaguc

SEQ ID NO: 339900 - RNA, 14 nt, Human herpesvirus 7
cguaaacauuuguu

SEQ ID NO: 339901 - RNA, 21 nt, Human herpesvirus 7
cguaacaaauucaaccacaga

SEQ ID NO: 339902 - RNA, 15 nt, Human herpesvirus 7
cuauuuaaaauauua

SEQ ID NO: 339903 - RNA, 20 nt, Human herpesvirus 7
cuauuucaauuaaugcauug

SEQ ID NO: 339904 - RNA, 20 nt, Human herpesvirus 7
cuauuuuaaaaaccaugaaa

SEQ ID NO: 339905 - RNA, 16 nt, Human herpesvirus 7
cuauuuucuucgucua

SEQ ID NO: 339906 - RNA, 13 nt, Human herpesvirus 7
cucaaaacaaacu

SEQ ID NO: 339907 - RNA, 15 nt, Human herpesvirus 7
cucaaugguaagcaa

SEQ ID NO: 339908 - RNA, 13 nt, Human herpesvirus 7
cucaauuaaaaca

SEQ ID NO: 339909 - RNA, 18 nt, Human herpesvirus 7
cucacaccuuacuuuuaa

SEQ ID NO: 339910 - RNA, 15 nt, Human herpesvirus 7
cucagaacuguuuua

SEQ ID NO: 339911 - RNA, 21 nt, Human herpesvirus 7
cucagaagacauauuagauua

SEQ ID NO: 339912 - RNA, 18 nt, Human herpesvirus 7
cucagaauguacacagcu

SEQ ID NO: 339913 - RNA, 22 nt, Human herpesvirus 7
cucagauuagcuucgauucgga

SEQ ID NO: 339914 - RNA, 15 nt, Human herpesvirus 7
cucagcucuguaaua

SEQ ID NO: 339915 - RNA, 20 nt, Human herpesvirus 7
cucauaaucauaguacaucu

SEQ ID NO: 339916 - RNA, 23 nt, Human herpesvirus 7
cucauggcuaacgcuaaagagca

SEQ ID NO: 339917 - RNA, 17 nt, Human herpesvirus 7
cuccacuaugccacaaa

SEQ ID NO: 339918 - RNA, 20 nt, Human herpesvirus 7
cuccagaaauuauacuagca

SEQ ID NO: 339919 - RNA, 24 nt, Human herpesvirus 7
cuccaguggcaguacuacuaauca

SEQ ID NO: 339920 - RNA, 14 nt, Human herpesvirus 7
cucgaagaauucau

SEQ ID NO: 339921 - RNA, 21 nt, Human herpesvirus 7
cucguuauuuucaaacaugau

SEQ ID NO: 339922 - RNA, 19 nt, Human herpesvirus 7
cucuaagagcuuuugcaaa

SEQ ID NO: 339923 - RNA, 17 nt, Human herpesvirus 7
cucuaugauccagcaaa

SEQ ID NO: 339924 - RNA, 23 nt, Human herpesvirus 7
cucuaugccggccgggugcugcg

SEQ ID NO: 339925 - RNA, 13 nt, Human herpesvirus 7
cucuccugaaaua

SEQ ID NO: 339926 - RNA, 15 nt, Human herpesvirus 7
cucucuauuacacag

SEQ ID NO: 339927 - RNA, 16 nt, Human herpesvirus 7
cucugaauaauaugcu

SEQ ID NO: 339928 - RNA, 19 nt, Human herpesvirus 7
cucugaucauuugcauguu

SEQ ID NO: 339929 - RNA, 19 nt, Human herpesvirus 7
cucugauugacucgaauua

SEQ ID NO: 339930 - RNA, 15 nt, Human herpesvirus 7
cucuguccagccaaa

SEQ ID NO: 339931 - RNA, 12 nt, Human herpesvirus 7
cucugugcauuu

SEQ ID NO: 339932 - RNA, 16 nt, Human herpesvirus 7
cucuuuacaaaauuca

SEQ ID NO: 339933 - RNA, 23 nt, Human herpesvirus 7
cugaaaaaauaaauucugaaaua

SEQ ID NO: 339934 - RNA, 20 nt, Human herpesvirus 7
cugaagaacauuaauaucaa

SEQ ID NO: 339935 - RNA, 17 nt, Human herpesvirus 7
cugaauagacacauuua

SEQ ID NO: 339936 - RNA, 19 nt, Human herpesvirus 7
cugaaugugcgaccuauua

SEQ ID NO: 339937 - RNA, 15 nt, Human herpesvirus 7
cugaauuaaggugga

SEQ ID NO: 339938 - RNA, 16 nt, Human herpesvirus 7
cugaauuaucgcaauu

SEQ ID NO: 339939 - RNA, 17 nt, Human herpesvirus 7
cugaauugguaauguua

SEQ ID NO: 339940 - RNA, 17 nt, Human herpesvirus 7
cugacauuguacaauua

SEQ ID NO: 339941 - RNA, 18 nt, Human herpesvirus 7
cugagacggacuuauguc

SEQ ID NO: 339942 - RNA, 20 nt, Human herpesvirus 7
cugagacggacuuaugucca

SEQ ID NO: 339943 - RNA, 21 nt, Human herpesvirus 7
cugagacggacuuauguccag

SEQ ID NO: 339944 - RNA, 16 nt, Human herpesvirus 7
cugagagaaccugaaa

SEQ ID NO: 339945 - RNA, 21 nt, Human herpesvirus 7
cugagagaauaaguucaucau

SEQ ID NO: 339946 - RNA, 13 nt, Human herpesvirus 7
cugagccaucaaa

SEQ ID NO: 339947 - RNA, 19 nt, Human herpesvirus 7
cugauauuaaaucauacca

SEQ ID NO: 339948 - RNA, 15 nt, Human herpesvirus 7
cugauguagauuuag

SEQ ID NO: 339949 - RNA, 15 nt, Human herpesvirus 7
cugauucaacacucg

SEQ ID NO: 339950 - RNA, 16 nt, Human herpesvirus 7
cugauuucuacaauau

SEQ ID NO: 339951 - RNA, 18 nt, Human herpesvirus 7
cugcaaagaaaaauuaau

SEQ ID NO: 339952 - RNA, 21 nt, Human herpesvirus 7
cugcaaagaaaaauuaauugc

SEQ ID NO: 339953 - RNA, 12 nt, Human herpesvirus 7
cugcaaauccaa

SEQ ID NO: 339954 - RNA, 22 nt, Human herpesvirus 7
cugcaaauuguaaauucuccaa

SEQ ID NO: 339955 - RNA, 16 nt, Human herpesvirus 7
cugcaacaaauuaaau

SEQ ID NO: 339956 - RNA, 22 nt, Human herpesvirus 7
cugcaacuuugugccugaaaua

SEQ ID NO: 339957 - RNA, 15 nt, Human herpesvirus 7
cugcaagcugauuca

SEQ ID NO: 339958 - RNA, 16 nt, Human herpesvirus 7
cugcaauguucaucaa

SEQ ID NO: 339959 - RNA, 20 nt, Human herpesvirus 7
cugcacauuuuggcgcucuc

SEQ ID NO: 339960 - RNA, 19 nt, Human herpesvirus 7
cugcagcugaaagcgcaaa

SEQ ID NO: 339961 - RNA, 22 nt, Human herpesvirus 7
cugccaccauuucugaaaccuu

SEQ ID NO: 339962 - RNA, 19 nt, Human herpesvirus 7
cugccagagaaccacguga

SEQ ID NO: 339963 - RNA, 21 nt, Human herpesvirus 7
cugccagagaaccacgugacu

SEQ ID NO: 339964 - RNA, 13 nt, Human herpesvirus 7
cugccauuacuga

SEQ ID NO: 339965 - RNA, 16 nt, Human herpesvirus 7
cugccucccgggcaca

SEQ ID NO: 339966 - RNA, 19 nt, Human herpesvirus 7
cugcuaacaaguaugucag

SEQ ID NO: 339967 - RNA, 21 nt, Human herpesvirus 7
cugcucaaaucaaccagauuu

SEQ ID NO: 339968 - RNA, 18 nt, Human herpesvirus 7
cugcuggaaagcuuguga

SEQ ID NO: 339969 - RNA, 19 nt, Human herpesvirus 7
cugcuggaaagcuugugaa

SEQ ID NO: 339970 - RNA, 16 nt, Human herpesvirus 7
cugcuuaaauguaauu

SEQ ID NO: 339971 - RNA, 21 nt, Human herpesvirus 7
cugcuucggaauuugauucca

SEQ ID NO: 339972 - RNA, 19 nt, Human herpesvirus 7
cugcuucucccauucaaua

SEQ ID NO: 339973 - RNA, 19 nt, Human herpesvirus 7
cugcuuuuucaauguuucc

SEQ ID NO: 339974 - RNA, 15 nt, Human herpesvirus 7
cuggaaaacauuuca

SEQ ID NO: 339975 - RNA, 21 nt, Human herpesvirus 7
cuggaauuauacacugugaaa

SEQ ID NO: 339976 - RNA, 13 nt, Human herpesvirus 7
cuggaucauagag

SEQ ID NO: 339977 - RNA, 13 nt, Human herpesvirus 7
cuggauguauaaa

SEQ ID NO: 339978 - RNA, 20 nt, Human herpesvirus 7
cuggcaauaucccagaauau

SEQ ID NO: 339979 - RNA, 24 nt, Human herpesvirus 7
cuggcaauaucccagaauaucgau

SEQ ID NO: 339980 - RNA, 14 nt, Human herpesvirus 7
cuggcagaaauaua

SEQ ID NO: 339981 - RNA, 18 nt, Human herpesvirus 7
cuggcagaaauauaugaa

SEQ ID NO: 339982 - RNA, 18 nt, Human herpesvirus 7
cuggcaugucucauaaua

SEQ ID NO: 339983 - RNA, 11 nt, Human herpesvirus 7
cuggcauuccu

SEQ ID NO: 339984 - RNA, 23 nt, Human herpesvirus 7
cuggcucaagcacaaucacguga

SEQ ID NO: 339985 - RNA, 17 nt, Human herpesvirus 7
cugggaaaaaaaaauca

SEQ ID NO: 339986 - RNA, 17 nt, Human herpesvirus 7
cugggcguuaacacugu

SEQ ID NO: 339987 - RNA, 22 nt, Human herpesvirus 7
cugguaauaauaguggugaaau

SEQ ID NO: 339988 - RNA, 22 nt, Human herpesvirus 7
cuguaaaauuuaaauacugaga

SEQ ID NO: 339989 - RNA, 22 nt, Human herpesvirus 7
cuguaacagaccuccuauguca

SEQ ID NO: 339990 - RNA, 19 nt, Human herpesvirus 7
cuguaaucauauaugcauu

SEQ ID NO: 339991 - RNA, 20 nt, Human herpesvirus 7
cuguacaaugcugucucuga

SEQ ID NO: 339992 - RNA, 14 nt, Human herpesvirus 7
cuguacuguugcua

SEQ ID NO: 339993 - RNA, 18 nt, Human herpesvirus 7
cuguacuuuugaucaaaa

SEQ ID NO: 339994 - RNA, 22 nt, Human herpesvirus 7
cuguacuuuugaucaaaagcuu

SEQ ID NO: 339995 - RNA, 22 nt, Human herpesvirus 7
cuguaugcaagaaaguccaaag

SEQ ID NO: 339996 - RNA, 20 nt, Human herpesvirus 7
cuguauuuguugaucuucaa

SEQ ID NO: 339997 - RNA, 18 nt, Human herpesvirus 7
cugucacgcaagucacaa

SEQ ID NO: 339998 - RNA, 13 nt, Human herpesvirus 7
cugucaggcucau

SEQ ID NO: 339999 - RNA, 18 nt, Human herpesvirus 7
cugucuauuucaauuaau

SEQ ID NO: 340000 - RNA, 17 nt, Human herpesvirus 7
cugucuuggaguauuac

SEQ ID NO: 340001 - RNA, 16 nt, Human herpesvirus 7
cuguggagugagaaau

SEQ ID NO: 340002 - RNA, 12 nt, Human herpesvirus 7
cugugggugcaa

SEQ ID NO: 340003 - RNA, 13 nt, Human herpesvirus 7
cugugucuaugag

SEQ ID NO: 340004 - RNA, 17 nt, Human herpesvirus 7
cugugugugcaguguuu

SEQ ID NO: 340005 - RNA, 17 nt, Human herpesvirus 7
cuguguuauuguaucua

SEQ ID NO: 340006 - RNA, 15 nt, Human herpesvirus 7
cuguuaagaauucca

SEQ ID NO: 340007 - RNA, 20 nt, Human herpesvirus 7
cuguuaagaauuccagauuu

SEQ ID NO: 340008 - RNA, 18 nt, Human herpesvirus 7
cuguuacaacuuugccaa

SEQ ID NO: 340009 - RNA, 15 nt, Human herpesvirus 7
cuguucccacuggga

SEQ ID NO: 340010 - RNA, 18 nt, Human herpesvirus 7
cuguugagucgaaugcau

SEQ ID NO: 340011 - RNA, 15 nt, Human herpesvirus 7
cuguugauacaacua

SEQ ID NO: 340012 - RNA, 18 nt, Human herpesvirus 7
cuguugauacaacuaaaa

SEQ ID NO: 340013 - RNA, 14 nt, Human herpesvirus 7
cuguugguuaugca

SEQ ID NO: 340014 - RNA, 14 nt, Human herpesvirus 7
cuguuuauuuuggc

SEQ ID NO: 340015 - RNA, 16 nt, Human herpesvirus 7
cuguuuguaaggccaa

SEQ ID NO: 340016 - RNA, 13 nt, Human herpesvirus 7
cuuucugacauug

SEQ ID NO: 340017 - RNA, 22 nt, Human herpesvirus 7
cuuucuucacgugugacuguug

SEQ ID NO: 340018 - RNA, 15 nt, Human herpesvirus 7
cuuugaaaacgaaag

SEQ ID NO: 340019 - RNA, 18 nt, Human herpesvirus 7
cuuugaaaucauucugaa

SEQ ID NO: 340020 - RNA, 21 nt, Human herpesvirus 7
cuuugcauagauuaaauagca

SEQ ID NO: 340021 - RNA, 22 nt, Human herpesvirus 7
cuuugcauagauuaaauagcaa

SEQ ID NO: 340022 - RNA, 17 nt, Human herpesvirus 7
cuuugcgccgauuuacu

SEQ ID NO: 340023 - RNA, 18 nt, Human herpesvirus 7
cuuuggcagcuagccuau

SEQ ID NO: 340024 - RNA, 21 nt, Human herpesvirus 7
cuuuguaaaaaugaauucaac

SEQ ID NO: 340025 - RNA, 13 nt, Human herpesvirus 7
cuuugucacuuaa

SEQ ID NO: 340026 - RNA, 18 nt, Human herpesvirus 7
cuuugucaugaugaauau

SEQ ID NO: 340027 - RNA, 17 nt, Human herpesvirus 7
cuuugucugcugguaau

SEQ ID NO: 340028 - RNA, 17 nt, Human herpesvirus 7
cuuugucuuugcucuca

SEQ ID NO: 340029 - RNA, 16 nt, Human herpesvirus 7
cuuuguuugagacaau

SEQ ID NO: 340030 - RNA, 17 nt, Human herpesvirus 7
cuuuguuugagacaaua

SEQ ID NO: 340031 - RNA, 15 nt, Human herpesvirus 7
cuuuuaaaaccucgu

SEQ ID NO: 340032 - RNA, 14 nt, Human herpesvirus 7
cuuuuacagaagaa

SEQ ID NO: 340033 - RNA, 21 nt, Human herpesvirus 7
cuuuuaggggaagaaucaaga

SEQ ID NO: 340034 - RNA, 21 nt, Human herpesvirus 7
cuuuuauugguagauuuucua

SEQ ID NO: 340035 - RNA, 18 nt, Human herpesvirus 7
cuuuucaggcuaugacuu

SEQ ID NO: 340036 - RNA, 19 nt, Human herpesvirus 7
cuuuucagugaagcuaaaa

SEQ ID NO: 340037 - RNA, 11 nt, Human herpesvirus 7
cuuuucaugcu

SEQ ID NO: 340038 - RNA, 18 nt, Human herpesvirus 7
cuuuugaauaaucucaau

SEQ ID NO: 340039 - RNA, 18 nt, Human herpesvirus 7
cuuuugagcgcugaaaua

SEQ ID NO: 340040 - RNA, 18 nt, Human herpesvirus 7
cuuuugcgagaaaauacu

SEQ ID NO: 340041 - RNA, 21 nt, Human herpesvirus 7
cuuuuuaaaaaaucuauuaaa

SEQ ID NO: 340042 - RNA, 13 nt, Human herpesvirus 7
cuuuuucugaaaa

SEQ ID NO: 340043 - RNA, 19 nt, Human herpesvirus 7
cuuuuucuggaauguuggu

SEQ ID NO: 340044 - RNA, 21 nt, Human herpesvirus 7
gaaaaaaacaaaaucuacuuu

SEQ ID NO: 340045 - RNA, 15 nt, Human herpesvirus 7
gaaaaaaacaaugaa

SEQ ID NO: 340046 - RNA, 17 nt, Human herpesvirus 7
gaaaaaaagauuuaaca

SEQ ID NO: 340047 - RNA, 14 nt, Human herpesvirus 7
gaaaaaaaguacaa

SEQ ID NO: 340048 - RNA, 15 nt, Human herpesvirus 7
gaaaaaaaguacaag

SEQ ID NO: 340049 - RNA, 20 nt, Human herpesvirus 7
gaaaaaaaugcuuagaaucu

SEQ ID NO: 340050 - RNA, 14 nt, Human herpesvirus 7
gaaaaagcaacaaa

SEQ ID NO: 340051 - RNA, 12 nt, Human herpesvirus 7
gaaaaagcauaa

SEQ ID NO: 340052 - RNA, 15 nt, Human herpesvirus 7
gaaaaaggauuugaa

SEQ ID NO: 340053 - RNA, 17 nt, Human herpesvirus 7
gaaaaauaaacaauaua

SEQ ID NO: 340054 - RNA, 22 nt, Human herpesvirus 7
gaaaaauaucgauuuaacaaau

SEQ ID NO: 340055 - RNA, 18 nt, Human herpesvirus 7
gaaaaaugacaaaacugc

SEQ ID NO: 340056 - RNA, 20 nt, Human herpesvirus 7
gaaaaaugcugcaauguuca

SEQ ID NO: 340057 - RNA, 19 nt, Human herpesvirus 7
gaaaaauuaauugcagcuu

SEQ ID NO: 340058 - RNA, 17 nt, Human herpesvirus 7
gaaaaauuuuuuacugu

SEQ ID NO: 340059 - RNA, 12 nt, Human herpesvirus 7
gaaaacaauuaa

SEQ ID NO: 340060 - RNA, 14 nt, Human herpesvirus 7
gaaaacaucccuuu

SEQ ID NO: 340061 - RNA, 15 nt, Human herpesvirus 7
gaaaaccuacuguua

SEQ ID NO: 340062 - RNA, 21 nt, Human herpesvirus 7
gaaaacguuuuuaucugauaa

SEQ ID NO: 340063 - RNA, 24 nt, Human herpesvirus 7
gaaaacugaauugguaauguuacu

SEQ ID NO: 340064 - RNA, 18 nt, Human herpesvirus 7
gaaaacuuggaaaacaau

SEQ ID NO: 340065 - RNA, 20 nt, Human herpesvirus 7
gaaaagaaaaagcaacaaau

SEQ ID NO: 340066 - RNA, 18 nt, Human herpesvirus 7
gaaaagaaugaacaccgc

SEQ ID NO: 340067 - RNA, 16 nt, Human herpesvirus 7
gaaaagggagaucaau

SEQ ID NO: 340068 - RNA, 21 nt, Human herpesvirus 7
gaaaaguguacggauaugccu

SEQ ID NO: 340069 - RNA, 20 nt, Human herpesvirus 7
gaaaauaaacauguugaaag

SEQ ID NO: 340070 - RNA, 16 nt, Human herpesvirus 7
gaaaauaacaggaaac

SEQ ID NO: 340071 - RNA, 15 nt, Human herpesvirus 7
gaaaauauauuccaa

SEQ ID NO: 340072 - RNA, 14 nt, Human herpesvirus 7
gaaaauauguugcu

SEQ ID NO: 340073 - RNA, 15 nt, Human herpesvirus 7
gaaaaucucgaacag

SEQ ID NO: 340074 - RNA, 13 nt, Human herpesvirus 7
gaaaaugaugguu

SEQ ID NO: 340075 - RNA, 12 nt, Human herpesvirus 7
gaaaaugcauug

SEQ ID NO: 340076 - RNA, 20 nt, Human herpesvirus 7
gaaaauguuuuugcuagaaa

SEQ ID NO: 340077 - RNA, 12 nt, Human herpesvirus 7
gaaacaacacuc

SEQ ID NO: 340078 - RNA, 22 nt, Human herpesvirus 7
gaaacaacacucugcauuccac

SEQ ID NO: 340079 - RNA, 23 nt, Human herpesvirus 7
gaaacaagguuuaaaacauuuac

SEQ ID NO: 340080 - RNA, 19 nt, Human herpesvirus 7
gaaacagcgugucaaaaaa

SEQ ID NO: 340081 - RNA, 11 nt, Human herpesvirus 7
gaaacauagcu

SEQ ID NO: 340082 - RNA, 22 nt, Human herpesvirus 7
gaaacaucaauuuuaaugugcu

SEQ ID NO: 340083 - RNA, 16 nt, Human herpesvirus 7
gaaacaucuaugugcu

SEQ ID NO: 340084 - RNA, 13 nt, Human herpesvirus 7
gaaacauuccuca

SEQ ID NO: 340085 - RNA, 18 nt, Human herpesvirus 7
gaaaccaauuaauauuaa

SEQ ID NO: 340086 - RNA, 16 nt, Human herpesvirus 7
gaaaccagcuuuuauu

SEQ ID NO: 340087 - RNA, 19 nt, Human herpesvirus 7
gaaaccuucgcaacaauua

SEQ ID NO: 340088 - RNA, 21 nt, Human herpesvirus 7
gaaacggcuguugagucgaau

SEQ ID NO: 340089 - RNA, 15 nt, Human herpesvirus 7
gaaacgucaggaaaa

SEQ ID NO: 340090 - RNA, 17 nt, Human herpesvirus 7
gaaacgucccugugaca

SEQ ID NO: 340091 - RNA, 18 nt, Human herpesvirus 7
gaaacgucccugugacag

SEQ ID NO: 340092 - RNA, 19 nt, Human herpesvirus 7
gaaagaauuuuguaagaaa

SEQ ID NO: 340093 - RNA, 20 nt, Human herpesvirus 7
gaaagacaaacuauggugau

SEQ ID NO: 340094 - RNA, 22 nt, Human herpesvirus 7
gaaagacgugagcaauacaccc

SEQ ID NO: 340095 - RNA, 22 nt, Human herpesvirus 7
gaaagcaaaagccacagauauu

SEQ ID NO: 340096 - RNA, 17 nt, Human herpesvirus 7
gaaagccacuguugaug

SEQ ID NO: 340097 - RNA, 17 nt, Human herpesvirus 7
gaaagcgcaaaggaaaa

SEQ ID NO: 340098 - RNA, 15 nt, Human herpesvirus 7
gaaagcucauuucau

SEQ ID NO: 340099 - RNA, 20 nt, Human herpesvirus 7
gaaagggcaugucugccucc

SEQ ID NO: 340100 - RNA, 19 nt, Human herpesvirus 7
gaaagucagaacauuguca

SEQ ID NO: 340101 - RNA, 21 nt, Human herpesvirus 7
gaaagucagaacauugucaaa

SEQ ID NO: 340102 - RNA, 23 nt, Human herpesvirus 7
gaaagucaucugaggcuuggaga

SEQ ID NO: 340103 - RNA, 14 nt, Human herpesvirus 7
gaaaguccaaagug

SEQ ID NO: 340104 - RNA, 15 nt, Human herpesvirus 7
gaaauaaacauuuca

SEQ ID NO: 340105 - RNA, 21 nt, Human herpesvirus 7
gaaauaaacauuucaaaauca

SEQ ID NO: 340106 - RNA, 16 nt, Human herpesvirus 7
gaaauaauagaugucu

SEQ ID NO: 340107 - RNA, 22 nt, Human herpesvirus 7
gaaaucagauuaaagcuauuuu

SEQ ID NO: 340108 - RNA, 18 nt, Human herpesvirus 7
gaaaugaaaagucuguga

SEQ ID NO: 340109 - RNA, 20 nt, Human herpesvirus 7
gaaaugaaaagucugugaca

SEQ ID NO: 340110 - RNA, 15 nt, Human herpesvirus 7
gaaaugaaucugcac

SEQ ID NO: 340111 - RNA, 17 nt, Human herpesvirus 7
gaaauggguuugggaaa

SEQ ID NO: 340112 - RNA, 20 nt, Human herpesvirus 7
gaaaugguuaccuuuguuaa

SEQ ID NO: 340113 - RNA, 14 nt, Human herpesvirus 7
gaaaugucaagaac

SEQ ID NO: 340114 - RNA, 23 nt, Human herpesvirus 7
gaaaugucuuugucaugaugaau

SEQ ID NO: 340115 - RNA, 17 nt, Human herpesvirus 7
gaaauuaaaaggucauc

SEQ ID NO: 340116 - RNA, 22 nt, Human herpesvirus 7
gaaauuucuaaauaugaugaaa

SEQ ID NO: 340117 - RNA, 19 nt, Human herpesvirus 7
gaaauuuuacagccuguac

SEQ ID NO: 340118 - RNA, 22 nt, Human herpesvirus 7
gaaauuuuacagccuguacaaa

SEQ ID NO: 340119 - RNA, 19 nt, Human herpesvirus 7
gaacaaauuaugguucuua

SEQ ID NO: 340120 - RNA, 21 nt, Human herpesvirus 7
gaacaagauagcagaauauca

SEQ ID NO: 340121 - RNA, 16 nt, Human herpesvirus 7
gaacaaguagaaaaug

SEQ ID NO: 340122 - RNA, 19 nt, Human herpesvirus 7
gaacaaguagugcuaauau

SEQ ID NO: 340123 - RNA, 22 nt, Human herpesvirus 7
gaacacugcuucucccauucaa

SEQ ID NO: 340124 - RNA, 13 nt, Human herpesvirus 7
gaacagauucucc

SEQ ID NO: 340125 - RNA, 21 nt, Human herpesvirus 7
gaacaugagauaaacuuuuau

SEQ ID NO: 340126 - RNA, 21 nt, Human herpesvirus 7
gaacauuaauaucaauuugaa

SEQ ID NO: 340127 - RNA, 22 nt, Human herpesvirus 7
gaacauuaauaucaauuugaau

SEQ ID NO: 340128 - RNA, 21 nt, Human herpesvirus 7
gaacauugucaaagaaugcaa

SEQ ID NO: 340129 - RNA, 16 nt, Human herpesvirus 7
gaacgaagaauuaaua

SEQ ID NO: 340130 - RNA, 23 nt, Human herpesvirus 7
gacugguacaagguguuccuuag

SEQ ID NO: 340131 - RNA, 19 nt, Human herpesvirus 7
gacugugccgccuggccag

SEQ ID NO: 340132 - RNA, 15 nt, Human herpesvirus 7
gacuuggcucuuaau

SEQ ID NO: 340133 - RNA, 13 nt, Human herpesvirus 7
gacuuuacacggu

SEQ ID NO: 340134 - RNA, 16 nt, Human herpesvirus 7
gacuuucgugucacag

SEQ ID NO: 340135 - RNA, 20 nt, Human herpesvirus 7
gacuuugaaucaacagccau

SEQ ID NO: 340136 - RNA, 19 nt, Human herpesvirus 7
gacuuuuauaauacuggca

SEQ ID NO: 340137 - RNA, 20 nt, Human herpesvirus 7
gagaaaacguuuuuaucuga

SEQ ID NO: 340138 - RNA, 21 nt, Human herpesvirus 7
gagaaaacguuuuuaucugau

SEQ ID NO: 340139 - RNA, 21 nt, Human herpesvirus 7
gagaaaaucuuugaaucugcu

SEQ ID NO: 340140 - RNA, 15 nt, Human herpesvirus 7
gagaaagauuaauua

SEQ ID NO: 340141 - RNA, 19 nt, Human herpesvirus 7
gagaaaucgcuuauuuaac

SEQ ID NO: 340142 - RNA, 16 nt, Human herpesvirus 7
gagaaauuacaguaca

SEQ ID NO: 340143 - RNA, 22 nt, Human herpesvirus 7
gagaaccggacccggacuuuga

SEQ ID NO: 340144 - RNA, 18 nt, Human herpesvirus 7
gagaacgaagaauuaaua

SEQ ID NO: 340145 - RNA, 20 nt, Human herpesvirus 7
gagaauguucuaucaagaua

SEQ ID NO: 340146 - RNA, 22 nt, Human herpesvirus 7
gagaauuucuuuguuugcuauu

SEQ ID NO: 340147 - RNA, 18 nt, Human herpesvirus 7
gagacaagaggacaguca

SEQ ID NO: 340148 - RNA, 17 nt, Human herpesvirus 7
gagaccgaauauacuuu

SEQ ID NO: 340149 - RNA, 24 nt, Human herpesvirus 7
gagaccgcacaggcugcaucuuuu

SEQ ID NO: 340150 - RNA, 18 nt, Human herpesvirus 7
gagagcccagucccaaga

SEQ ID NO: 340151 - RNA, 17 nt, Human herpesvirus 7
gagauaguucgcaaugg

SEQ ID NO: 340152 - RNA, 19 nt, Human herpesvirus 7
gagauaguucgcaauggua

SEQ ID NO: 340153 - RNA, 18 nt, Human herpesvirus 7
gagauuucugaaaaucuc

SEQ ID NO: 340154 - RNA, 12 nt, Human herpesvirus 7
gagcaaugcaug

SEQ ID NO: 340155 - RNA, 21 nt, Human herpesvirus 7
gagcaauguaugugcaucaca

SEQ ID NO: 340156 - RNA, 22 nt, Human herpesvirus 7
gagcaauugauucacauuguca

SEQ ID NO: 340157 - RNA, 19 nt, Human herpesvirus 7
gagcaucuagcuuguuaaa

SEQ ID NO: 340158 - RNA, 15 nt, Human herpesvirus 7
gagcauucaugccua

SEQ ID NO: 340159 - RNA, 18 nt, Human herpesvirus 7
gagccggaaagcaaugua

SEQ ID NO: 340160 - RNA, 20 nt, Human herpesvirus 7
gagcuguguccacuacagau

SEQ ID NO: 340161 - RNA, 23 nt, Human herpesvirus 7
gaggaccaauucuuuuacaaggu

SEQ ID NO: 340162 - RNA, 19 nt, Human herpesvirus 7
gaggagaacucguagcauu

SEQ ID NO: 340163 - RNA, 14 nt, Human herpesvirus 7
gaggaguauguugc

SEQ ID NO: 340164 - RNA, 21 nt, Human herpesvirus 7
gaggccguacuuguaugcuau

SEQ ID NO: 340165 - RNA, 21 nt, Human herpesvirus 7
gaggugcuguuuccaugucuu

SEQ ID NO: 340166 - RNA, 23 nt, Human herpesvirus 7
gaguauacaaaagacauaacaaa

SEQ ID NO: 340167 - RNA, 13 nt, Human herpesvirus 7
gagucgucuugca

SEQ ID NO: 340168 - RNA, 15 nt, Human herpesvirus 7
gaguguggugacaga

SEQ ID NO: 340169 - RNA, 23 nt, Human herpesvirus 7
gaguguuaauuaaaguugcauug

SEQ ID NO: 340170 - RNA, 17 nt, Human herpesvirus 7
gaguucugacuaaagcu

SEQ ID NO: 340171 - RNA, 16 nt, Human herpesvirus 7
gaguugcacuccuaga

SEQ ID NO: 340172 - RNA, 23 nt, Human herpesvirus 7
gaguuucaaaauuuuauugucua

SEQ ID NO: 340173 - RNA, 15 nt, Human herpesvirus 7
gaguuucuucuucca

SEQ ID NO: 340174 - RNA, 14 nt, Human herpesvirus 7
gaguuugauuguau

SEQ ID NO: 340175 - RNA, 17 nt, Human herpesvirus 7
gauaaacuuuuauucag

SEQ ID NO: 340176 - RNA, 22 nt, Human herpesvirus 7
gauaaccaacagauugucuuau

SEQ ID NO: 340177 - RNA, 19 nt, Human herpesvirus 7
gauaacuaugaacuggcac

SEQ ID NO: 340178 - RNA, 13 nt, Human herpesvirus 7
gauaagaaaguug

SEQ ID NO: 340179 - RNA, 19 nt, Human herpesvirus 7
gauaagacugaagacaaaa

SEQ ID NO: 340180 - RNA, 12 nt, Human herpesvirus 7
gauaagauuucc

SEQ ID NO: 340181 - RNA, 12 nt, Human herpesvirus 7
gauaauuuacaa

SEQ ID NO: 340182 - RNA, 12 nt, Human herpesvirus 7
gauacaacuaaa

SEQ ID NO: 340183 - RNA, 19 nt, Human herpesvirus 7
gauacaacuaaaaaucuca

SEQ ID NO: 340184 - RNA, 22 nt, Human herpesvirus 7
gauacaaucgauaaacuuuguc

SEQ ID NO: 340185 - RNA, 23 nt, Human herpesvirus 7
gauacauucgcaaggaauaugaa

SEQ ID NO: 340186 - RNA, 21 nt, Human herpesvirus 7
gauacauuuuugcaauaugcu

SEQ ID NO: 340187 - RNA, 14 nt, Human herpesvirus 7
gauaccaaacaaaa

SEQ ID NO: 340188 - RNA, 21 nt, Human herpesvirus 7
gauacgaaaacggucugagac

SEQ ID NO: 340189 - RNA, 21 nt, Human herpesvirus 7
gauagaaauguaaauuaugug

SEQ ID NO: 340190 - RNA, 15 nt, Human herpesvirus 7
gauagaguacaugug

SEQ ID NO: 340191 - RNA, 17 nt, Human herpesvirus 7
gauagaguacauguguc

SEQ ID NO: 340192 - RNA, 22 nt, Human herpesvirus 7
gauagcggucaucucacuucag

SEQ ID NO: 340193 - RNA, 20 nt, Human herpesvirus 7
gauauaagaugauagccaua

SEQ ID NO: 340194 - RNA, 18 nt, Human herpesvirus 7
gauauaguuuguuucaau

SEQ ID NO: 340195 - RNA, 19 nt, Human herpesvirus 7
gauauauuggcaugcuuac

SEQ ID NO: 340196 - RNA, 20 nt, Human herpesvirus 7
gauauauuggcaugcuuaca

SEQ ID NO: 340197 - RNA, 20 nt, Human herpesvirus 7
gauaucuuaaaaacaauggu

SEQ ID NO: 340198 - RNA, 16 nt, Human herpesvirus 7
gauaucuuaaaauaug

SEQ ID NO: 340199 - RNA, 12 nt, Human herpesvirus 7
gauaugacaaau

SEQ ID NO: 340200 - RNA, 18 nt, Human herpesvirus 7
gauauuaguuucaaccac

SEQ ID NO: 340201 - RNA, 14 nt, Human herpesvirus 7
gauauucuaacaaa

SEQ ID NO: 340202 - RNA, 20 nt, Human herpesvirus 7
gauauuugguacuguagaua

SEQ ID NO: 340203 - RNA, 17 nt, Human herpesvirus 7
gaucaaaagcugcagcu

SEQ ID NO: 340204 - RNA, 14 nt, Human herpesvirus 7
gaucacuuugcauc

SEQ ID NO: 340205 - RNA, 15 nt, Human herpesvirus 7
gaucacuuugcauca

SEQ ID NO: 340206 - RNA, 14 nt, Human herpesvirus 7
gaucauaauuacau

SEQ ID NO: 340207 - RNA, 20 nt, Human herpesvirus 7
gaucauaauuacauugcagu

SEQ ID NO: 340208 - RNA, 16 nt, Human herpesvirus 7
gaucaucauugguaag

SEQ ID NO: 340209 - RNA, 20 nt, Human herpesvirus 7
gaucauuugcauguugcuag

SEQ ID NO: 340210 - RNA, 21 nt, Human herpesvirus 7
gauccagcaaagacuugcaaa

SEQ ID NO: 340211 - RNA, 20 nt, Human herpesvirus 7
gauccaguacuugcaucgaa

SEQ ID NO: 340212 - RNA, 17 nt, Human herpesvirus 7
gauccaucuguaacaga

SEQ ID NO: 340213 - RNA, 15 nt, Human herpesvirus 7
gauccgauuuaucaa

SEQ ID NO: 340214 - RNA, 17 nt, Human herpesvirus 7
gauccuaacaauaaagu

SEQ ID NO: 340215 - RNA, 17 nt, Human herpesvirus 7
gauccugcuauucauuu

SEQ ID NO: 340216 - RNA, 20 nt, Human herpesvirus 7
gauccugcuauucauuucac

SEQ ID NO: 340217 - RNA, 15 nt, Human herpesvirus 7
gaucgaacuguuaca

SEQ ID NO: 340218 - RNA, 22 nt, Human herpesvirus 7
gaucguuguugguguguuacau

SEQ ID NO: 340219 - RNA, 17 nt, Human herpesvirus 7
gaucuaaagacacuuau

SEQ ID NO: 340220 - RNA, 14 nt, Human herpesvirus 7
gaucuaagucuaca

SEQ ID NO: 340221 - RNA, 19 nt, Human herpesvirus 7
gaucucaaaauuauaacuu

SEQ ID NO: 340222 - RNA, 14 nt, Human herpesvirus 7
gaucuggauucaag

SEQ ID NO: 340223 - RNA, 21 nt, Human herpesvirus 7
gaucuuacuuccuaaucuaac

SEQ ID NO: 340224 - RNA, 14 nt, Human herpesvirus 7
gaugaaacuuccaa

SEQ ID NO: 340225 - RNA, 17 nt, Human herpesvirus 7
gaugaaacuuccaauaa

SEQ ID NO: 340226 - RNA, 17 nt, Human herpesvirus 7
gaugaauauaacaaaaa

SEQ ID NO: 340227 - RNA, 23 nt, Human herpesvirus 7
gaugacauuuuuaccuccauaug

SEQ ID NO: 340228 - RNA, 17 nt, Human herpesvirus 7
gaugcagaaaaauccaa

SEQ ID NO: 340229 - RNA, 21 nt, Human herpesvirus 7
gaugccagccuauucacauac

SEQ ID NO: 340230 - RNA, 19 nt, Human herpesvirus 7
gaugcgaaagccacuguug

SEQ ID NO: 340231 - RNA, 15 nt, Human herpesvirus 7
gauggauaacuauga

SEQ ID NO: 340232 - RNA, 21 nt, Human herpesvirus 7
gauguauccaccgauuacugu

SEQ ID NO: 340233 - RNA, 17 nt, Human herpesvirus 7
gaugucuuaauugccga

SEQ ID NO: 340234 - RNA, 16 nt, Human herpesvirus 7
gauguucuauucucau

SEQ ID NO: 340235 - RNA, 18 nt, Human herpesvirus 7
gauuaaaaaucuuuacac

SEQ ID NO: 340236 - RNA, 23 nt, Human herpesvirus 7
gauuacauccugcuaaggcgaaa

SEQ ID NO: 340237 - RNA, 23 nt, Human herpesvirus 7
gauuacauuugcuuuaccccaaa

SEQ ID NO: 340238 - RNA, 17 nt, Human herpesvirus 7
gauuagcuguucauauc

SEQ ID NO: 340239 - RNA, 20 nt, Human herpesvirus 7
gauuagguaauagcuuuaaa

SEQ ID NO: 340240 - RNA, 18 nt, Human herpesvirus 7
gauuauauaaguccuuca

SEQ ID NO: 340241 - RNA, 23 nt, Human herpesvirus 7
gauuauaugcaucaaaacauauc

SEQ ID NO: 340242 - RNA, 16 nt, Human herpesvirus 7
gauucacauugucacu

SEQ ID NO: 340243 - RNA, 17 nt, Human herpesvirus 7
gcgcaaaaaucuuuuau

SEQ ID NO: 340244 - RNA, 21 nt, Human herpesvirus 7
gcgcguuguuuguccucuauc

SEQ ID NO: 340245 - RNA, 18 nt, Human herpesvirus 7
gcgcuccguuuuuccaga

SEQ ID NO: 340246 - RNA, 23 nt, Human herpesvirus 7
gcggacaaauauacgaaugccau

SEQ ID NO: 340247 - RNA, 19 nt, Human herpesvirus 7
gcgugauuuuuuauuccca

SEQ ID NO: 340248 - RNA, 15 nt, Human herpesvirus 7
gcguguccauucaac

SEQ ID NO: 340249 - RNA, 14 nt, Human herpesvirus 7
gcguucguaacaaa

SEQ ID NO: 340250 - RNA, 18 nt, Human herpesvirus 7
gcuaaaaccaucauucuu

SEQ ID NO: 340251 - RNA, 18 nt, Human herpesvirus 7
gcuaagaaagaacauuuu

SEQ ID NO: 340252 - RNA, 17 nt, Human herpesvirus 7
gcuacacgagacaaaaa

SEQ ID NO: 340253 - RNA, 20 nt, Human herpesvirus 7
gcuagaaacgucccugugac

SEQ ID NO: 340254 - RNA, 12 nt, Human herpesvirus 7
gcuagaagacug

SEQ ID NO: 340255 - RNA, 16 nt, Human herpesvirus 7
gcuagauugacuauga

SEQ ID NO: 340256 - RNA, 11 nt, Human herpesvirus 7
gcuaguguuca

SEQ ID NO: 340257 - RNA, 20 nt, Human herpesvirus 7
gcuaucucuacaaacagaag

SEQ ID NO: 340258 - RNA, 16 nt, Human herpesvirus 7
gcuaucugauuuauau

SEQ ID NO: 340259 - RNA, 13 nt, Human herpesvirus 7
gcuaugacuuuga

SEQ ID NO: 340260 - RNA, 15 nt, Human herpesvirus 7
gcuauguauaaucaa

SEQ ID NO: 340261 - RNA, 20 nt, Human herpesvirus 7
gcuauuauuaaagcuuucaa

SEQ ID NO: 340262 - RNA, 15 nt, Human herpesvirus 7
gcuauucauuucacg

SEQ ID NO: 340263 - RNA, 18 nt, Human herpesvirus 7
gcuauuuaaucuaugcaa

SEQ ID NO: 340264 - RNA, 17 nt, Human herpesvirus 7
gcucauguugacgggaa

SEQ ID NO: 340265 - RNA, 18 nt, Human herpesvirus 7
gcucauguugacgggaaa

SEQ ID NO: 340266 - RNA, 22 nt, Human herpesvirus 7
gcucuaugccggccgggugcug

SEQ ID NO: 340267 - RNA, 17 nt, Human herpesvirus 7
gcucugucuccaaauca

SEQ ID NO: 340268 - RNA, 15 nt, Human herpesvirus 7
gcugaaacaucaauu

SEQ ID NO: 340269 - RNA, 17 nt, Human herpesvirus 7
gcugaacucugucauca

SEQ ID NO: 340270 - RNA, 23 nt, Human herpesvirus 7
gcugacauacgaaucaguucaac

SEQ ID NO: 340271 - RNA, 13 nt, Human herpesvirus 7
gcugcagcgagaa

SEQ ID NO: 340272 - RNA, 18 nt, Human herpesvirus 7
gcugcaucuuuucaguga

SEQ ID NO: 340273 - RNA, 19 nt, Human herpesvirus 7
gcugcaucuuuucagugaa

SEQ ID NO: 340274 - RNA, 15 nt, Human herpesvirus 7
gcugcucagcuagaa

SEQ ID NO: 340275 - RNA, 16 nt, Human herpesvirus 7
gcuggaucuucugcua

SEQ ID NO: 340276 - RNA, 16 nt, Human herpesvirus 7
gcuggcucaagcacaa

SEQ ID NO: 340277 - RNA, 17 nt, Human herpesvirus 7
gcuguacugaaaccaaa

SEQ ID NO: 340278 - RNA, 18 nt, Human herpesvirus 7
gcuguacugaaaccaaag

SEQ ID NO: 340279 - RNA, 21 nt, Human herpesvirus 7
gcuguucagcuccagccaaga

SEQ ID NO: 340280 - RNA, 13 nt, Human herpesvirus 7
gcuguugguuaug

SEQ ID NO: 340281 - RNA, 18 nt, Human herpesvirus 7
gcuguugguuaugcacau

SEQ ID NO: 340282 - RNA, 15 nt, Human herpesvirus 7
gcuuaaaaacaguaa

SEQ ID NO: 340283 - RNA, 14 nt, Human herpesvirus 7
gcuuaaaacuuuga

SEQ ID NO: 340284 - RNA, 22 nt, Human herpesvirus 7
gcuuaaaauuuuacgaugacag

SEQ ID NO: 340285 - RNA, 15 nt, Human herpesvirus 7
gcuuaaauuuccauc

SEQ ID NO: 340286 - RNA, 22 nt, Human herpesvirus 7
gcuuaagacaccccaaaaucaa

SEQ ID NO: 340287 - RNA, 13 nt, Human herpesvirus 7
gcuuacacuauuc

SEQ ID NO: 340288 - RNA, 22 nt, Human herpesvirus 7
gcuuacagugaaguaauuuaug

SEQ ID NO: 340289 - RNA, 17 nt, Human herpesvirus 7
gcuuacucuuucugaca

SEQ ID NO: 340290 - RNA, 14 nt, Human herpesvirus 7
gcuuagacuuauca

SEQ ID NO: 340291 - RNA, 22 nt, Human herpesvirus 7
gcuuauuuauauauggcaauaa

SEQ ID NO: 340292 - RNA, 15 nt, Human herpesvirus 7
gcuucaguacuugaa

SEQ ID NO: 340293 - RNA, 22 nt, Human herpesvirus 7
gcuucggaauuugauuccaucu

SEQ ID NO: 340294 - RNA, 15 nt, Human herpesvirus 7
gcuucucccauucaa

SEQ ID NO: 340295 - RNA, 11 nt, Human herpesvirus 7
gcuucuucuaa

SEQ ID NO: 340296 - RNA, 21 nt, Human herpesvirus 7
gcuugcacaaagauccucuga

SEQ ID NO: 340297 - RNA, 15 nt, Human herpesvirus 7
gcuugcauugcauau

SEQ ID NO: 340298 - RNA, 18 nt, Human herpesvirus 7
gcuugcauugcauaucau

SEQ ID NO: 340299 - RNA, 19 nt, Human herpesvirus 7
gcuugcuuaaaacuuugaa

SEQ ID NO: 340300 - RNA, 15 nt, Human herpesvirus 7
gcuugcuuugcauag

SEQ ID NO: 340301 - RNA, 18 nt, Human herpesvirus 7
gcuuuaagugauacugaa

SEQ ID NO: 340302 - RNA, 21 nt, Human herpesvirus 7
gcuuuagaguaugaguuugau

SEQ ID NO: 340303 - RNA, 14 nt, Human herpesvirus 7
gcuuuauaugucaa

SEQ ID NO: 340304 - RNA, 15 nt, Human herpesvirus 7
gcuuucaugauuuca

SEQ ID NO: 340305 - RNA, 17 nt, Human herpesvirus 7
gcuuucaugauuucaau

SEQ ID NO: 340306 - RNA, 17 nt, Human herpesvirus 7
gcuuucguaaucauuca

SEQ ID NO: 340307 - RNA, 18 nt, Human herpesvirus 7
gcuuuuagaaaucuuuca

SEQ ID NO: 340308 - RNA, 18 nt, Human herpesvirus 7
gcuuuugaauaaucucaa

SEQ ID NO: 340309 - RNA, 14 nt, Human herpesvirus 7
ggaaaacauuucag

SEQ ID NO: 340310 - RNA, 14 nt, Human herpesvirus 7
ggaaaauauauuaa

SEQ ID NO: 340311 - RNA, 19 nt, Human herpesvirus 7
ggaaaauucguuuauacga

SEQ ID NO: 340312 - RNA, 16 nt, Human herpesvirus 7
ggaaacauugaaaaag

SEQ ID NO: 340313 - RNA, 21 nt, Human herpesvirus 7
ggaaagacaaacuauggugau

SEQ ID NO: 340314 - RNA, 12 nt, Human herpesvirus 7
ggaaaugagauu

SEQ ID NO: 340315 - RNA, 17 nt, Human herpesvirus 7
ggaaaugaugauguaug

SEQ ID NO: 340316 - RNA, 16 nt, Human herpesvirus 7
ggaaauugcuuucuaa

SEQ ID NO: 340317 - RNA, 16 nt, Human herpesvirus 7
ggaaauuuucauagca

SEQ ID NO: 340318 - RNA, 13 nt, Human herpesvirus 7
ggaacaugagaua

SEQ ID NO: 340319 - RNA, 13 nt, Human herpesvirus 7
ggaagaaacagcu

SEQ ID NO: 340320 - RNA, 14 nt, Human herpesvirus 7
ggaagaaacagcug

SEQ ID NO: 340321 - RNA, 16 nt, Human herpesvirus 7
ggaagacgccaauaaa

SEQ ID NO: 340322 - RNA, 15 nt, Human herpesvirus 7
ggaagauuugacaaa

SEQ ID NO: 340323 - RNA, 15 nt, Human herpesvirus 7
ggaagcacaaaucaa

SEQ ID NO: 340324 - RNA, 14 nt, Human herpesvirus 7
ggaaguaaacaaaa

SEQ ID NO: 340325 - RNA, 23 nt, Human herpesvirus 7
ggaaucuauaguuuguauuucau

SEQ ID NO: 340326 - RNA, 18 nt, Human herpesvirus 7
ggaauuauacacugugaa

SEQ ID NO: 340327 - RNA, 18 nt, Human herpesvirus 7
ggaauuugauuccaucuc

SEQ ID NO: 340328 - RNA, 20 nt, Human herpesvirus 7
ggaauuugauuccaucucac

SEQ ID NO: 340329 - RNA, 15 nt, Human herpesvirus 7
ggacaauaacauuuu

SEQ ID NO: 340330 - RNA, 20 nt, Human herpesvirus 7
ggacaccaguaugaaaucaa

SEQ ID NO: 340331 - RNA, 13 nt, Human herpesvirus 7
ggacaguuugcaa

SEQ ID NO: 340332 - RNA, 16 nt, Human herpesvirus 7
ggacaguuugcaacaa

SEQ ID NO: 340333 - RNA, 14 nt, Human herpesvirus 7
ggacuuauguccag

SEQ ID NO: 340334 - RNA, 20 nt, Human herpesvirus 7
ggacuuuuaaauaaaccuua

SEQ ID NO: 340335 - RNA, 16 nt, Human herpesvirus 7
ggagaauguucgcaaa

SEQ ID NO: 340336 - RNA, 14 nt, Human herpesvirus 7
ggagcaaugcauga

SEQ ID NO: 340337 - RNA, 19 nt, Human herpesvirus 7
ggagcugauucugccauua

SEQ ID NO: 340338 - RNA, 17 nt, Human herpesvirus 7
ggaggugcuguuuccau

SEQ ID NO: 340339 - RNA, 19 nt, Human herpesvirus 7
ggagguuugcuauugacuu

SEQ ID NO: 340340 - RNA, 19 nt, Human herpesvirus 7
ggaguauguugcauaucau

SEQ ID NO: 340341 - RNA, 22 nt, Human herpesvirus 7
ggauaacuaugaacuggcacau

SEQ ID NO: 340342 - RNA, 19 nt, Human herpesvirus 7
ggaugcuggaaaacauuuc

SEQ ID NO: 340343 - RNA, 16 nt, Human herpesvirus 7
ggauguucuauucuca

SEQ ID NO: 340344 - RNA, 17 nt, Human herpesvirus 7
ggauucaaucuacugua

SEQ ID NO: 340345 - RNA, 15 nt, Human herpesvirus 7
ggauuuacauuucau

SEQ ID NO: 340346 - RNA, 16 nt, Human herpesvirus 7
ggauuugaagguugcc

SEQ ID NO: 340347 - RNA, 18 nt, Human herpesvirus 7
ggauuugaagguugccaa

SEQ ID NO: 340348 - RNA, 16 nt, Human herpesvirus 7
ggauuuuauccauuug

SEQ ID NO: 340349 - RNA, 15 nt, Human herpesvirus 7
ggauuuucuguaauc

SEQ ID NO: 340350 - RNA, 20 nt, Human herpesvirus 7
ggcacauaaguugacaaugu

SEQ ID NO: 340351 - RNA, 22 nt, Human herpesvirus 7
ggcagaaaugucuuuugauaag

SEQ ID NO: 340352 - RNA, 18 nt, Human herpesvirus 7
ggcauauaugaaucaaau

SEQ ID NO: 340353 - RNA, 14 nt, Human herpesvirus 7
ggcaucaagaaaca

SEQ ID NO: 340354 - RNA, 19 nt, Human herpesvirus 7
ggcauucauugagucuuca

SEQ ID NO: 340355 - RNA, 20 nt, Human herpesvirus 7
ggccuguuucuugauguaac

SEQ ID NO: 340356 - RNA, 20 nt, Human herpesvirus 7
ggcgaauuuuaucauuucaa

SEQ ID NO: 340357 - RNA, 12 nt, Human herpesvirus 7
ggcgaguuacau

SEQ ID NO: 340358 - RNA, 14 nt, Human herpesvirus 7
gucuuuauaaagga

SEQ ID NO: 340359 - RNA, 23 nt, Human herpesvirus 7
gucuuuccucacagauuuuccaa

SEQ ID NO: 340360 - RNA, 13 nt, Human herpesvirus 7
gucuuugucauga

SEQ ID NO: 340361 - RNA, 18 nt, Human herpesvirus 7
gugaaaauaaacaggaac

SEQ ID NO: 340362 - RNA, 21 nt, Human herpesvirus 7
gugaaaaugaugguugcaaua

SEQ ID NO: 340363 - RNA, 23 nt, Human herpesvirus 7
gugaagcuugcuuaaaacuuuga

SEQ ID NO: 340364 - RNA, 14 nt, Human herpesvirus 7
gugaaguuugcuga

SEQ ID NO: 340365 - RNA, 14 nt, Human herpesvirus 7
gugacccugucaca

SEQ ID NO: 340366 - RNA, 13 nt, Human herpesvirus 7
gugagaaauggaa

SEQ ID NO: 340367 - RNA, 17 nt, Human herpesvirus 7
gugagcacggcacacaa

SEQ ID NO: 340368 - RNA, 17 nt, Human herpesvirus 7
gugagugaacauuugaa

SEQ ID NO: 340369 - RNA, 17 nt, Human herpesvirus 7
gugaguuucuacauguu

SEQ ID NO: 340370 - RNA, 22 nt, Human herpesvirus 7
gugaguuucuacauguuuaaca

SEQ ID NO: 340371 - RNA, 20 nt, Human herpesvirus 7
gugauaauagugggccaaga

SEQ ID NO: 340372 - RNA, 17 nt, Human herpesvirus 7
gugauacugaaucugaa

SEQ ID NO: 340373 - RNA, 11 nt, Human herpesvirus 7
gugaucaaaau

SEQ ID NO: 340374 - RNA, 15 nt, Human herpesvirus 7
gugaucaaaauuaau

SEQ ID NO: 340375 - RNA, 15 nt, Human herpesvirus 7
gugaucuggauucaa

SEQ ID NO: 340376 - RNA, 22 nt, Human herpesvirus 7
gugaucuggauucaagaaauca

SEQ ID NO: 340377 - RNA, 17 nt, Human herpesvirus 7
gugaugccauaauuuca

SEQ ID NO: 340378 - RNA, 16 nt, Human herpesvirus 7
gugcaacauaaccaau

SEQ ID NO: 340379 - RNA, 11 nt, Human herpesvirus 7
gugcaaugaug

SEQ ID NO: 340380 - RNA, 18 nt, Human herpesvirus 7
gugcacacaaaggccagg

SEQ ID NO: 340381 - RNA, 23 nt, Human herpesvirus 7
gugcaucuccuguaaccauuuau

SEQ ID NO: 340382 - RNA, 14 nt, Human herpesvirus 7
gugcguacacugua

SEQ ID NO: 340383 - RNA, 13 nt, Human herpesvirus 7
gugcuaugaaaau

SEQ ID NO: 340384 - RNA, 21 nt, Human herpesvirus 7
gugcugcguauguccagugac

SEQ ID NO: 340385 - RNA, 16 nt, Human herpesvirus 7
guggaaaucuuuaaua

SEQ ID NO: 340386 - RNA, 21 nt, Human herpesvirus 7
guggaauccuaugacugagaa

SEQ ID NO: 340387 - RNA, 14 nt, Human herpesvirus 7
guggagagauucaa

SEQ ID NO: 340388 - RNA, 16 nt, Human herpesvirus 7
guggcaaaagauuuaa

SEQ ID NO: 340389 - RNA, 12 nt, Human herpesvirus 7
guggcaguacua

SEQ ID NO: 340390 - RNA, 16 nt, Human herpesvirus 7
guggcaguacuacuaa

SEQ ID NO: 340391 - RNA, 12 nt, Human herpesvirus 7
gugggaaagugu

SEQ ID NO: 340392 - RNA, 17 nt, Human herpesvirus 7
guguacuaaagccaaug

SEQ ID NO: 340393 - RNA, 15 nt, Human herpesvirus 7
gugucuagcuuuaua

SEQ ID NO: 340394 - RNA, 15 nt, Human herpesvirus 7
gugucuuguguucaa

SEQ ID NO: 340395 - RNA, 16 nt, Human herpesvirus 7
gugucuuuuaaugauc

SEQ ID NO: 340396 - RNA, 22 nt, Human herpesvirus 7
guguguuacuauuugacugggu

SEQ ID NO: 340397 - RNA, 16 nt, Human herpesvirus 7
guguuacuauuugacu

SEQ ID NO: 340398 - RNA, 16 nt, Human herpesvirus 7
guguuauuguaucuau

SEQ ID NO: 340399 - RNA, 19 nt, Human herpesvirus 7
guguucaggcaacauuaau

SEQ ID NO: 340400 - RNA, 13 nt, Human herpesvirus 7
guguucauuauca

SEQ ID NO: 340401 - RNA, 22 nt, Human herpesvirus 7
guguucugguuucuguugacua

SEQ ID NO: 340402 - RNA, 16 nt, Human herpesvirus 7
guguucuuuaaccaga

SEQ ID NO: 340403 - RNA, 13 nt, Human herpesvirus 7
guguuugaaugac

SEQ ID NO: 340404 - RNA, 19 nt, Human herpesvirus 7
guuaaaacuuggauaacca

SEQ ID NO: 340405 - RNA, 19 nt, Human herpesvirus 7
guuaaagacggaauuugua

SEQ ID NO: 340406 - RNA, 15 nt, Human herpesvirus 7
guuacggguggcacu

SEQ ID NO: 340407 - RNA, 17 nt, Human herpesvirus 7
guuacguguucauuuau

SEQ ID NO: 340408 - RNA, 16 nt, Human herpesvirus 7
guuaggccaguucuau

SEQ ID NO: 340409 - RNA, 19 nt, Human herpesvirus 7
guuaguugcagcugugaua

SEQ ID NO: 340410 - RNA, 18 nt, Human herpesvirus 7
guuaguugggcaaacagu

SEQ ID NO: 340411 - RNA, 17 nt, Human herpesvirus 7
guuaucgcccacuauuu

SEQ ID NO: 340412 - RNA, 16 nt, Human herpesvirus 7
guuaugcacauccaaa

SEQ ID NO: 340413 - RNA, 23 nt, Human herpesvirus 7
guuauuccaucugguaaugucau

SEQ ID NO: 340414 - RNA, 22 nt, Human herpesvirus 7
guucacgaucgucaucuucucu

SEQ ID NO: 340415 - RNA, 19 nt, Human herpesvirus 7
guucagauugaaauuccau

SEQ ID NO: 340416 - RNA, 18 nt, Human herpesvirus 7
guucagcgugacagagaa

SEQ ID NO: 340417 - RNA, 19 nt, Human herpesvirus 7
guucauauacuucuugccc

SEQ ID NO: 340418 - RNA, 12 nt, Human herpesvirus 7
guuccacacagg

SEQ ID NO: 340419 - RNA, 12 nt, Human herpesvirus 7
guuccacgucaa

SEQ ID NO: 340420 - RNA, 19 nt, Human herpesvirus 7
guucccauaaauauugaua

SEQ ID NO: 340421 - RNA, 16 nt, Human herpesvirus 7
guuccgaaaacaucag

SEQ ID NO: 340422 - RNA, 18 nt, Human herpesvirus 7
guuccugugugcaaugau

SEQ ID NO: 340423 - RNA, 12 nt, Human herpesvirus 7
guuccuuauauu

SEQ ID NO: 340424 - RNA, 18 nt, Human herpesvirus 7
guucgauaguaaucacau

SEQ ID NO: 340425 - RNA, 21 nt, Human herpesvirus 7
guucggcaacggccauucacc

SEQ ID NO: 340426 - RNA, 13 nt, Human herpesvirus 7
guucuauucucau

SEQ ID NO: 340427 - RNA, 22 nt, Human herpesvirus 7
guucuugcuggcucaagcacaa

SEQ ID NO: 340428 - RNA, 20 nt, Human herpesvirus 7
guugaauucguuaagcaccg

SEQ ID NO: 340429 - RNA, 14 nt, Human herpesvirus 7
guugacaaugucaa

SEQ ID NO: 340430 - RNA, 23 nt, Human herpesvirus 7
guugacgggaaaaaggauuugaa

SEQ ID NO: 340431 - RNA, 15 nt, Human herpesvirus 7
guugcuuacuuugcg

SEQ ID NO: 340432 - RNA, 14 nt, Human herpesvirus 7
guuggcacugugua

SEQ ID NO: 340433 - RNA, 22 nt, Human herpesvirus 7
guugggaaagacgugagcaaua

SEQ ID NO: 340434 - RNA, 14 nt, Human herpesvirus 7
guuguacucagaga

SEQ ID NO: 340435 - RNA, 16 nt, Human herpesvirus 7
guuguagugcuguuau

SEQ ID NO: 340436 - RNA, 13 nt, Human herpesvirus 7
guuguaugaugac

SEQ ID NO: 340437 - RNA, 13 nt, Human herpesvirus 7
guugugcaauuug

SEQ ID NO: 340438 - RNA, 19 nt, Human herpesvirus 7
guuguuaagaaucuauuua

SEQ ID NO: 340439 - RNA, 20 nt, Human herpesvirus 7
guuuaaaacauuuacaaaaa

SEQ ID NO: 340440 - RNA, 20 nt, Human herpesvirus 7
guuuaaugaaaaagccauaa

SEQ ID NO: 340441 - RNA, 18 nt, Human herpesvirus 7
guuuaccuucauggcaca

SEQ ID NO: 340442 - RNA, 22 nt, Human herpesvirus 7
guuuauacgaaaauauguugcu

SEQ ID NO: 340443 - RNA, 21 nt, Human herpesvirus 7
guuuaugaagaugauguuucc

SEQ ID NO: 340444 - RNA, 17 nt, Human herpesvirus 7
guuuauuaacuauauca

SEQ ID NO: 340445 - RNA, 19 nt, Human herpesvirus 7
guuucaauaugcaugcaau

SEQ ID NO: 340446 - RNA, 23 nt, Human herpesvirus 7
guuucacugggaaguauguuuca

SEQ ID NO: 340447 - RNA, 17 nt, Human herpesvirus 7
guuuccauaaauaaaaa

SEQ ID NO: 340448 - RNA, 19 nt, Human herpesvirus 7
guuuccauaaauaaaaaca

SEQ ID NO: 340449 - RNA, 15 nt, Human herpesvirus 7
guuuccgcauaaaaa

SEQ ID NO: 340450 - RNA, 13 nt, Human herpesvirus 7
guuuccuugccag

SEQ ID NO: 340451 - RNA, 22 nt, Human herpesvirus 7
guuucguguucgauaguaauca

SEQ ID NO: 340452 - RNA, 13 nt, Human herpesvirus 7
guuucuagcaaaa

SEQ ID NO: 340453 - RNA, 16 nt, Human herpesvirus 7
guuucucuguagauau

SEQ ID NO: 340454 - RNA, 17 nt, Human herpesvirus 7
guuucugagugauuuuu

SEQ ID NO: 340455 - RNA, 19 nt, Human herpesvirus 7
guuucugugggugcaauua

SEQ ID NO: 340456 - RNA, 19 nt, Human herpesvirus 7
guuugaagagugcacuucu

SEQ ID NO: 340457 - RNA, 21 nt, Human herpesvirus 7
guuugaucaaaaucuguagaa

SEQ ID NO: 340458 - RNA, 23 nt, Human herpesvirus 7
guuugaucgaggaagcuuucgua

SEQ ID NO: 340459 - RNA, 20 nt, Human herpesvirus 7
guuuggcaacaaacaaauaa

SEQ ID NO: 340460 - RNA, 15 nt, Human herpesvirus 7
guuugggaaacaucu

SEQ ID NO: 340461 - RNA, 12 nt, Human herpesvirus 7
guuuuaaagcug

SEQ ID NO: 340462 - RNA, 17 nt, Human herpesvirus 7
guuuuaaauagugaauc

SEQ ID NO: 340463 - RNA, 13 nt, Human herpesvirus 7
guuuuaauuugga

SEQ ID NO: 340464 - RNA, 16 nt, Human herpesvirus 7
guuuuaucuaacacug

SEQ ID NO: 340465 - RNA, 21 nt, Human herpesvirus 7
guuuuaucuaacacugcaagc

SEQ ID NO: 340466 - RNA, 14 nt, Human herpesvirus 7
guuuuauuucacau

SEQ ID NO: 340467 - RNA, 18 nt, Human herpesvirus 7
guuuucaaauuauuucca

SEQ ID NO: 340468 - RNA, 19 nt, Human herpesvirus 7
guuuucaaauuauuuccag

SEQ ID NO: 340469 - RNA, 16 nt, Human herpesvirus 7
guuuucugagugcuaa

SEQ ID NO: 340470 - RNA, 11 nt, Human herpesvirus 7
guuuucuuaua

SEQ ID NO: 340471 - RNA, 16 nt, Human herpesvirus 7
guuuugaaauugacau

SEQ ID NO: 340472 - RNA, 18 nt, Human herpesvirus 7
guuuugcaauaugcucac

SEQ ID NO: 340473 - RNA, 23 nt, Human herpesvirus 7
uaaauuuugaauguuuacaugua

SEQ ID NO: 340474 - RNA, 18 nt, Human herpesvirus 7
uaacaaaaaaauaccucu

SEQ ID NO: 340475 - RNA, 21 nt, Human herpesvirus 7
uaacaaaaaacgguuuugcua

SEQ ID NO: 340476 - RNA, 19 nt, Human herpesvirus 7
uaacaaaaaagguguugau

SEQ ID NO: 340477 - RNA, 19 nt, Human herpesvirus 7
uaacaaaauuguaaguaaa

SEQ ID NO: 340478 - RNA, 20 nt, Human herpesvirus 7
uaacaaacaauaaauuuuga

SEQ ID NO: 340479 - RNA, 15 nt, Human herpesvirus 7
uaacaaguaugucag

SEQ ID NO: 340480 - RNA, 20 nt, Human herpesvirus 7
uaacaauauuuaaaguagcu

SEQ ID NO: 340481 - RNA, 17 nt, Human herpesvirus 7
uaacaaucuuacaaaaa

SEQ ID NO: 340482 - RNA, 21 nt, Human herpesvirus 7
uaacacguagaaaaaaacaau

SEQ ID NO: 340483 - RNA, 17 nt, Human herpesvirus 7
uaacacucuuguacuuu

SEQ ID NO: 340484 - RNA, 19 nt, Human herpesvirus 7
uaacagcuccaagcuuaaa

SEQ ID NO: 340485 - RNA, 18 nt, Human herpesvirus 7
uaacagcucuaucgucau

SEQ ID NO: 340486 - RNA, 14 nt, Human herpesvirus 7
uaacauacugaugu

SEQ ID NO: 340487 - RNA, 15 nt, Human herpesvirus 7
uaacauacugaugua

SEQ ID NO: 340488 - RNA, 23 nt, Human herpesvirus 7
uaacauuacgucaucccugcuga

SEQ ID NO: 340489 - RNA, 23 nt, Human herpesvirus 7
uaacauugcuucagaaauaacaa

SEQ ID NO: 340490 - RNA, 21 nt, Human herpesvirus 7
uaacauuuuaauaugugaaaa

SEQ ID NO: 340491 - RNA, 13 nt, Human herpesvirus 7
uaaccaaacuaua

SEQ ID NO: 340492 - RNA, 17 nt, Human herpesvirus 7
uaaccacugugucauca

SEQ ID NO: 340493 - RNA, 19 nt, Human herpesvirus 7
uaacccacuaacauuuuaa

SEQ ID NO: 340494 - RNA, 21 nt, Human herpesvirus 7
uaaccgauauaguuuguuuca

SEQ ID NO: 340495 - RNA, 22 nt, Human herpesvirus 7
uaaccuuuuaacaacagccaaa

SEQ ID NO: 340496 - RNA, 21 nt, Human herpesvirus 7
uaacgaaggcaucaagaaaca

SEQ ID NO: 340497 - RNA, 16 nt, Human herpesvirus 7
uaacgaauuuuuccau

SEQ ID NO: 340498 - RNA, 18 nt, Human herpesvirus 7
uaacgaauuuuuccaugu

SEQ ID NO: 340499 - RNA, 18 nt, Human herpesvirus 7
uaacgauccaguacuugc

SEQ ID NO: 340500 - RNA, 16 nt, Human herpesvirus 7
uaacgcugaauucauu

SEQ ID NO: 340501 - RNA, 21 nt, Human herpesvirus 7
uaacuacaggcuuacacuauu

SEQ ID NO: 340502 - RNA, 17 nt, Human herpesvirus 7
uaacuauaaauggaauu

SEQ ID NO: 340503 - RNA, 18 nt, Human herpesvirus 7
uaacuaugaacuggcaca

SEQ ID NO: 340504 - RNA, 22 nt, Human herpesvirus 7
uaacuauuuuaggauauugaca

SEQ ID NO: 340505 - RNA, 13 nt, Human herpesvirus 7
uaacucaaaagac

SEQ ID NO: 340506 - RNA, 13 nt, Human herpesvirus 7
uaacucauaauua

SEQ ID NO: 340507 - RNA, 19 nt, Human herpesvirus 7
uaacucugccagucucuaa

SEQ ID NO: 340508 - RNA, 19 nt, Human herpesvirus 7
uaacugagaaaaaugacaa

SEQ ID NO: 340509 - RNA, 18 nt, Human herpesvirus 7
uaacuggaauuauacacu

SEQ ID NO: 340510 - RNA, 15 nt, Human herpesvirus 7
uaacuggagccugga

SEQ ID NO: 340511 - RNA, 12 nt, Human herpesvirus 7
uaacuuacuguu

SEQ ID NO: 340512 - RNA, 21 nt, Human herpesvirus 7
uaacuuuaucauuacucgugu

SEQ ID NO: 340513 - RNA, 16 nt, Human herpesvirus 7
uaacuuugcuauuuaa

SEQ ID NO: 340514 - RNA, 20 nt, Human herpesvirus 7
uaacuuuuauaaaauaugga

SEQ ID NO: 340515 - RNA, 20 nt, Human herpesvirus 7
uaagaaacaucuaugugcuc

SEQ ID NO: 340516 - RNA, 16 nt, Human herpesvirus 7
uaagaacagaaugaua

SEQ ID NO: 340517 - RNA, 22 nt, Human herpesvirus 7
uaagaaucauuuguauauucua

SEQ ID NO: 340518 - RNA, 15 nt, Human herpesvirus 7
uaagaauuuaaucau

SEQ ID NO: 340519 - RNA, 16 nt, Human herpesvirus 7
uaagaauuuaaucaua

SEQ ID NO: 340520 - RNA, 23 nt, Human herpesvirus 7
uaagagacauugaaaaugcauug

SEQ ID NO: 340521 - RNA, 17 nt, Human herpesvirus 7
uaagauccaggcuucuu

SEQ ID NO: 340522 - RNA, 17 nt, Human herpesvirus 7
uaagaugauagccauaa

SEQ ID NO: 340523 - RNA, 15 nt, Human herpesvirus 7
uaagcaauacauucu

SEQ ID NO: 340524 - RNA, 17 nt, Human herpesvirus 7
uaagcagcuugaugaau

SEQ ID NO: 340525 - RNA, 20 nt, Human herpesvirus 7
uaagcaguuauaugaaauuu

SEQ ID NO: 340526 - RNA, 18 nt, Human herpesvirus 7
uaagccuaggauaccaaa

SEQ ID NO: 340527 - RNA, 17 nt, Human herpesvirus 7
uaagccucuaagagcuu

SEQ ID NO: 340528 - RNA, 13 nt, Human herpesvirus 7
uaagcucaaaaag

SEQ ID NO: 340529 - RNA, 19 nt, Human herpesvirus 7
uaagcuucaaaaauguuua

SEQ ID NO: 340530 - RNA, 15 nt, Human herpesvirus 7
uaagugaaugugcuu

SEQ ID NO: 340531 - RNA, 21 nt, Human herpesvirus 7
uaaguggaaucucauaaucau

SEQ ID NO: 340532 - RNA, 15 nt, Human herpesvirus 7
uaaguuaaaucaguu

SEQ ID NO: 340533 - RNA, 14 nt, Human herpesvirus 7
uaaguugacaaugu

SEQ ID NO: 340534 - RNA, 17 nt, Human herpesvirus 7
uaaguugacaaugucaa

SEQ ID NO: 340535 - RNA, 19 nt, Human herpesvirus 7
uaaguuguucucaauagca

SEQ ID NO: 340536 - RNA, 15 nt, Human herpesvirus 7
uaauaaaacaaacua

SEQ ID NO: 340537 - RNA, 21 nt, Human herpesvirus 7
uaauaaaggaaagacaaacua

SEQ ID NO: 340538 - RNA, 16 nt, Human herpesvirus 7
uaauaagauccaggcu

SEQ ID NO: 340539 - RNA, 21 nt, Human herpesvirus 7
uaauacaacauauagauuuau

SEQ ID NO: 340540 - RNA, 16 nt, Human herpesvirus 7
uaauacuggcaugucu

SEQ ID NO: 340541 - RNA, 18 nt, Human herpesvirus 7
uaauacuggcaugucuca

SEQ ID NO: 340542 - RNA, 19 nt, Human herpesvirus 7
uaauagaaaaauguacaau

SEQ ID NO: 340543 - RNA, 23 nt, Human herpesvirus 7
uaauagugggccaagauccuuau

SEQ ID NO: 340544 - RNA, 13 nt, Human herpesvirus 7
uaauauauuuucc

SEQ ID NO: 340545 - RNA, 15 nt, Human herpesvirus 7
uaauaucaguacaac

SEQ ID NO: 340546 - RNA, 19 nt, Human herpesvirus 7
uaauaugcuuucacuacua

SEQ ID NO: 340547 - RNA, 14 nt, Human herpesvirus 7
uaauauuaguauua

SEQ ID NO: 340548 - RNA, 14 nt, Human herpesvirus 7
uaauauuaguauug

SEQ ID NO: 340549 - RNA, 18 nt, Human herpesvirus 7
uaaucaaaaaauucuucu

SEQ ID NO: 340550 - RNA, 22 nt, Human herpesvirus 7
uaaucaaaaaauucuucuacuu

SEQ ID NO: 340551 - RNA, 15 nt, Human herpesvirus 7
uaaucugacuugccc

SEQ ID NO: 340552 - RNA, 22 nt, Human herpesvirus 7
uaaucuugugaaguuugcugaa

SEQ ID NO: 340553 - RNA, 15 nt, Human herpesvirus 7
uaaugaaaaagccau

SEQ ID NO: 340554 - RNA, 17 nt, Human herpesvirus 7
uaaugaaaaagccauaa

SEQ ID NO: 340555 - RNA, 19 nt, Human herpesvirus 7
uaaugaaguuuaucuugga

SEQ ID NO: 340556 - RNA, 14 nt, Human herpesvirus 7
uaaugacaaacaaa

SEQ ID NO: 340557 - RNA, 17 nt, Human herpesvirus 7
uaaugacacgacacuga

SEQ ID NO: 340558 - RNA, 18 nt, Human herpesvirus 7
uaaugacacgacacugaa

SEQ ID NO: 340559 - RNA, 23 nt, Human herpesvirus 7
uaaugauuugcagccagaacuca

SEQ ID NO: 340560 - RNA, 12 nt, Human herpesvirus 7
uaaugccgucau

SEQ ID NO: 340561 - RNA, 17 nt, Human herpesvirus 7
uaaugcuuugucuuacg

SEQ ID NO: 340562 - RNA, 20 nt, Human herpesvirus 7
uaauggaagaacaacaacua

SEQ ID NO: 340563 - RNA, 23 nt, Human herpesvirus 7
uaaugguaccuuagaaucacaac

SEQ ID NO: 340564 - RNA, 13 nt, Human herpesvirus 7
uaaugucauaaaa

SEQ ID NO: 340565 - RNA, 23 nt, Human herpesvirus 7
uaaugucucuguucccacuggga

SEQ ID NO: 340566 - RNA, 15 nt, Human herpesvirus 7
uaauguguaucaaua

SEQ ID NO: 340567 - RNA, 13 nt, Human herpesvirus 7
uaauuacauugca

SEQ ID NO: 340568 - RNA, 17 nt, Human herpesvirus 7
uaauuacauugcaguca

SEQ ID NO: 340569 - RNA, 16 nt, Human herpesvirus 7
uaauuacuucuuugac

SEQ ID NO: 340570 - RNA, 23 nt, Human herpesvirus 7
uaauuaucuaccccgauccucag

SEQ ID NO: 340571 - RNA, 15 nt, Human herpesvirus 7
uaauucaguuuacug

SEQ ID NO: 340572 - RNA, 14 nt, Human herpesvirus 7
uaauuccgggagaa

SEQ ID NO: 340573 - RNA, 21 nt, Human herpesvirus 7
uaauucuucuaaggguuauau

SEQ ID NO: 340574 - RNA, 15 nt, Human herpesvirus 7
uaauugccgauuccu

SEQ ID NO: 340575 - RNA, 18 nt, Human herpesvirus 7
uaauugcgcaguguuuaa

SEQ ID NO: 340576 - RNA, 21 nt, Human herpesvirus 7
uaauugguuuucgguguguaa

SEQ ID NO: 340577 - RNA, 21 nt, Human herpesvirus 7
uaauuguuuuuuauuuagcua

SEQ ID NO: 340578 - RNA, 23 nt, Human herpesvirus 7
uaauuuccacguuuuuuagcuuu

SEQ ID NO: 340579 - RNA, 19 nt, Human herpesvirus 7
uaauuucucaaaucaaagu

SEQ ID NO: 340580 - RNA, 18 nt, Human herpesvirus 7
uaauuugcauaaacuauc

SEQ ID NO: 340581 - RNA, 13 nt, Human herpesvirus 7
uaauuuguucaau

SEQ ID NO: 340582 - RNA, 19 nt, Human herpesvirus 7
uaauuuuggcgaaacaaua

SEQ ID NO: 340583 - RNA, 18 nt, Human herpesvirus 7
uaauuuuguucuaucuag

SEQ ID NO: 340584 - RNA, 15 nt, Human herpesvirus 7
uacaaaaaaaagcuu

SEQ ID NO: 340585 - RNA, 17 nt, Human herpesvirus 7
uacaaaagacauaacaa

SEQ ID NO: 340586 - RNA, 22 nt, Human herpesvirus 7
uacaaacaauuuuuuguucaaa

SEQ ID NO: 340587 - RNA, 14 nt, Human herpesvirus 7
uagcauuagagcau

SEQ ID NO: 340588 - RNA, 17 nt, Human herpesvirus 7
uagcauuagagcauauu

SEQ ID NO: 340589 - RNA, 21 nt, Human herpesvirus 7
uagcauuagagcauauuccau

SEQ ID NO: 340590 - RNA, 21 nt, Human herpesvirus 7
uagcauugaaaucauuuugcu

SEQ ID NO: 340591 - RNA, 18 nt, Human herpesvirus 7
uagcauuuguuacagcuu

SEQ ID NO: 340592 - RNA, 23 nt, Human herpesvirus 7
uagcauuuguuacagcuuucauu

SEQ ID NO: 340593 - RNA, 16 nt, Human herpesvirus 7
uagccauaaaugcuua

SEQ ID NO: 340594 - RNA, 16 nt, Human herpesvirus 7
uagcgaauuugugcug

SEQ ID NO: 340595 - RNA, 17 nt, Human herpesvirus 7
uagcgcugaaauuucau

SEQ ID NO: 340596 - RNA, 11 nt, Human herpesvirus 7
uagcuaaugcu

SEQ ID NO: 340597 - RNA, 19 nt, Human herpesvirus 7
uagcuaaugcuuugcugca

SEQ ID NO: 340598 - RNA, 22 nt, Human herpesvirus 7
uagcucuaaacaaacaaugagc

SEQ ID NO: 340599 - RNA, 16 nt, Human herpesvirus 7
uagcuuggccauaaac

SEQ ID NO: 340600 - RNA, 22 nt, Human herpesvirus 7
uagcuuguuaaagaaaagcaaa

SEQ ID NO: 340601 - RNA, 19 nt, Human herpesvirus 7
uagcuuuugaauaaucuca

SEQ ID NO: 340602 - RNA, 21 nt, Human herpesvirus 7
uagcuuuugaauaaucucaau

SEQ ID NO: 340603 - RNA, 22 nt, Human herpesvirus 7
uaggaaucgcaguguucauuau

SEQ ID NO: 340604 - RNA, 23 nt, Human herpesvirus 7
uaggagauugguagugugcacac

SEQ ID NO: 340605 - RNA, 16 nt, Human herpesvirus 7
uaggauugaaaguaaa

SEQ ID NO: 340606 - RNA, 18 nt, Human herpesvirus 7
uaggccaguucuaucuca

SEQ ID NO: 340607 - RNA, 19 nt, Human herpesvirus 7
uaggcgaauuggugcucaa

SEQ ID NO: 340608 - RNA, 19 nt, Human herpesvirus 7
uaggggaagaaucaagacg

SEQ ID NO: 340609 - RNA, 19 nt, Human herpesvirus 7
uagguaucuuuacuuucau

SEQ ID NO: 340610 - RNA, 17 nt, Human herpesvirus 7
uaggucuuccacuguug

SEQ ID NO: 340611 - RNA, 17 nt, Human herpesvirus 7
uaggugcugcagcaguu

SEQ ID NO: 340612 - RNA, 20 nt, Human herpesvirus 7
uagguuacguguucauuuau

SEQ ID NO: 340613 - RNA, 15 nt, Human herpesvirus 7
uaguaugagugcuau

SEQ ID NO: 340614 - RNA, 20 nt, Human herpesvirus 7
uagugacauucccuuccuaa

SEQ ID NO: 340615 - RNA, 19 nt, Human herpesvirus 7
uagugauagaguacaugug

SEQ ID NO: 340616 - RNA, 16 nt, Human herpesvirus 7
uagugcguuuugacag

SEQ ID NO: 340617 - RNA, 16 nt, Human herpesvirus 7
uagugggaacauaaaa

SEQ ID NO: 340618 - RNA, 21 nt, Human herpesvirus 7
uaguguccccuucgcugcugu

SEQ ID NO: 340619 - RNA, 22 nt, Human herpesvirus 7
uaguguccccuucgcugcugug

SEQ ID NO: 340620 - RNA, 14 nt, Human herpesvirus 7
uagugugcacacaa

SEQ ID NO: 340621 - RNA, 19 nt, Human herpesvirus 7
uaguuaugacgaagcuaaa

SEQ ID NO: 340622 - RNA, 23 nt, Human herpesvirus 7
uaguugugauugcgaccaaagau

SEQ ID NO: 340623 - RNA, 18 nt, Human herpesvirus 7
uaguuucuagaagaaagu

SEQ ID NO: 340624 - RNA, 16 nt, Human herpesvirus 7
uaguuugguuauccaa

SEQ ID NO: 340625 - RNA, 23 nt, Human herpesvirus 7
uaguuuuggugucggaucuucau

SEQ ID NO: 340626 - RNA, 17 nt, Human herpesvirus 7
uaguuuuugcauaugga

SEQ ID NO: 340627 - RNA, 23 nt, Human herpesvirus 7
uauaaacacuugcuagcugugau

SEQ ID NO: 340628 - RNA, 13 nt, Human herpesvirus 7
uauaaacagucca

SEQ ID NO: 340629 - RNA, 13 nt, Human herpesvirus 7
uauaaacauucua

SEQ ID NO: 340630 - RNA, 15 nt, Human herpesvirus 7
uauaacaaaaaacgg

SEQ ID NO: 340631 - RNA, 15 nt, Human herpesvirus 7
uauaacauugcuuca

SEQ ID NO: 340632 - RNA, 15 nt, Human herpesvirus 7
uauaacucaaaagac

SEQ ID NO: 340633 - RNA, 13 nt, Human herpesvirus 7
uauaagcaguuau

SEQ ID NO: 340634 - RNA, 19 nt, Human herpesvirus 7
uauaaguccuucaauagca

SEQ ID NO: 340635 - RNA, 18 nt, Human herpesvirus 7
uauaauaaaggaaagaca

SEQ ID NO: 340636 - RNA, 20 nt, Human herpesvirus 7
uauaauaaaggaaagacaaa

SEQ ID NO: 340637 - RNA, 20 nt, Human herpesvirus 7
uauaauaacaaacgauuugg

SEQ ID NO: 340638 - RNA, 21 nt, Human herpesvirus 7
uauaauacuggcaugucucau

SEQ ID NO: 340639 - RNA, 15 nt, Human herpesvirus 7
uauaaucaagucuua

SEQ ID NO: 340640 - RNA, 20 nt, Human herpesvirus 7
uauaauucucacagcuuauu

SEQ ID NO: 340641 - RNA, 14 nt, Human herpesvirus 7
uauacaaaagacau

SEQ ID NO: 340642 - RNA, 16 nt, Human herpesvirus 7
uauacaaaagacauaa

SEQ ID NO: 340643 - RNA, 13 nt, Human herpesvirus 7
uauacaaauccaa

SEQ ID NO: 340644 - RNA, 12 nt, Human herpesvirus 7
uauacaauaaug

SEQ ID NO: 340645 - RNA, 18 nt, Human herpesvirus 7
uauacauaauucaauaua

SEQ ID NO: 340646 - RNA, 14 nt, Human herpesvirus 7
uauaccuacgacua

SEQ ID NO: 340647 - RNA, 23 nt, Human herpesvirus 7
uauacuuuagcgcugaaauuuca

SEQ ID NO: 340648 - RNA, 21 nt, Human herpesvirus 7
uauagaaaacaucccuuucca

SEQ ID NO: 340649 - RNA, 17 nt, Human herpesvirus 7
uauagucaggaucuccu

SEQ ID NO: 340650 - RNA, 20 nt, Human herpesvirus 7
uauaguuuguauuucauugu

SEQ ID NO: 340651 - RNA, 13 nt, Human herpesvirus 7
uauauaaacacuu

SEQ ID NO: 340652 - RNA, 18 nt, Human herpesvirus 7
uauauaaguccuucaaua

SEQ ID NO: 340653 - RNA, 14 nt, Human herpesvirus 7
uauaucaucaucuu

SEQ ID NO: 340654 - RNA, 14 nt, Human herpesvirus 7
uauauccaauaaug

SEQ ID NO: 340655 - RNA, 17 nt, Human herpesvirus 7
uauaucuuuuuauugaa

SEQ ID NO: 340656 - RNA, 18 nt, Human herpesvirus 7
uauaucuuuuuauugaau

SEQ ID NO: 340657 - RNA, 17 nt, Human herpesvirus 7
uauaugcuuuauuuaau

SEQ ID NO: 340658 - RNA, 16 nt, Human herpesvirus 7
uauauugaaggugucu

SEQ ID NO: 340659 - RNA, 18 nt, Human herpesvirus 7
uauauuucuuaucuccau

SEQ ID NO: 340660 - RNA, 14 nt, Human herpesvirus 7
uaucaaaauuccau

SEQ ID NO: 340661 - RNA, 15 nt, Human herpesvirus 7
uaucaaccauucaaa

SEQ ID NO: 340662 - RNA, 22 nt, Human herpesvirus 7
uaucaagauagugacauucccu

SEQ ID NO: 340663 - RNA, 16 nt, Human herpesvirus 7
uaucaaggucuuucau

SEQ ID NO: 340664 - RNA, 20 nt, Human herpesvirus 7
uaucaaggucuuucaugcau

SEQ ID NO: 340665 - RNA, 16 nt, Human herpesvirus 7
uaucaccauaugccaa

SEQ ID NO: 340666 - RNA, 22 nt, Human herpesvirus 7
uaucagaaaaucucgaacaguc

SEQ ID NO: 340667 - RNA, 16 nt, Human herpesvirus 7
uaucaguacaacgaca

SEQ ID NO: 340668 - RNA, 15 nt, Human herpesvirus 7
uauccaauaaugcau

SEQ ID NO: 340669 - RNA, 18 nt, Human herpesvirus 7
uauccaucaaaagucuug

SEQ ID NO: 340670 - RNA, 22 nt, Human herpesvirus 7
uaucccaccgguccuuccucaa

SEQ ID NO: 340671 - RNA, 19 nt, Human herpesvirus 7
uauccggaagagacuguca

SEQ ID NO: 340672 - RNA, 23 nt, Human herpesvirus 7
uauccguuaauggauaaccaaca

SEQ ID NO: 340673 - RNA, 13 nt, Human herpesvirus 7
uaucuaccaucaa

SEQ ID NO: 340674 - RNA, 13 nt, Human herpesvirus 7
uaucucaaaacaa

SEQ ID NO: 340675 - RNA, 15 nt, Human herpesvirus 7
uaucucauagcuuaa

SEQ ID NO: 340676 - RNA, 21 nt, Human herpesvirus 7
uaucuccacgcucccauaaaa

SEQ ID NO: 340677 - RNA, 17 nt, Human herpesvirus 7
uaucuccuauguugcaa

SEQ ID NO: 340678 - RNA, 14 nt, Human herpesvirus 7
uaucucuacaaaca

SEQ ID NO: 340679 - RNA, 15 nt, Human herpesvirus 7
uaucucuacaaacag

SEQ ID NO: 340680 - RNA, 16 nt, Human herpesvirus 7
uaucucuacaaacaga

SEQ ID NO: 340681 - RNA, 12 nt, Human herpesvirus 7
uaucugcauuga

SEQ ID NO: 340682 - RNA, 11 nt, Human herpesvirus 7
uaucugucaug

SEQ ID NO: 340683 - RNA, 15 nt, Human herpesvirus 7
uaucuuuucaaagga

SEQ ID NO: 340684 - RNA, 16 nt, Human herpesvirus 7
uaucuuuucaaaggaa

SEQ ID NO: 340685 - RNA, 20 nt, Human herpesvirus 7
uaugaaaaugcccucagaac

SEQ ID NO: 340686 - RNA, 18 nt, Human herpesvirus 7
uaugaacaagguucucau

SEQ ID NO: 340687 - RNA, 15 nt, Human herpesvirus 7
uaugaacuggcacau

SEQ ID NO: 340688 - RNA, 22 nt, Human herpesvirus 7
uaugaagcgcugagaucuucca

SEQ ID NO: 340689 - RNA, 19 nt, Human herpesvirus 7
uaugacugacauucuucca

SEQ ID NO: 340690 - RNA, 23 nt, Human herpesvirus 7
uaugacuuugaaucaacagccau

SEQ ID NO: 340691 - RNA, 16 nt, Human herpesvirus 7
uaugauacaaucgaua

SEQ ID NO: 340692 - RNA, 16 nt, Human herpesvirus 7
uaugaugaaacuucca

SEQ ID NO: 340693 - RNA, 15 nt, Human herpesvirus 7
uaugaugacaacaaa

SEQ ID NO: 340694 - RNA, 16 nt, Human herpesvirus 7
uaugauguuuccgcau

SEQ ID NO: 340695 - RNA, 20 nt, Human herpesvirus 7
uaugauguuuccgcauaaaa

SEQ ID NO: 340696 - RNA, 20 nt, Human herpesvirus 7
uaugcaagaaaguccaaagu

SEQ ID NO: 340697 - RNA, 13 nt, Human herpesvirus 7
uaugcacauccaa

SEQ ID NO: 340698 - RNA, 14 nt, Human herpesvirus 7
uaugcacauccaaa

SEQ ID NO: 340699 - RNA, 19 nt, Human herpesvirus 7
uaugcaucaaaacauauca

SEQ ID NO: 340700 - RNA, 15 nt, Human herpesvirus 7
uaugcaugcaauuuu

SEQ ID NO: 340701 - RNA, 20 nt, Human herpesvirus 7
uaugcauuauauccaauaau

SEQ ID NO: 340702 - RNA, 19 nt, Human herpesvirus 7
ucaccauaugccaaugaac

SEQ ID NO: 340703 - RNA, 23 nt, Human herpesvirus 7
ucacccuuuguuugagacaauau

SEQ ID NO: 340704 - RNA, 17 nt, Human herpesvirus 7
ucacgcucucaaucaaa

SEQ ID NO: 340705 - RNA, 21 nt, Human herpesvirus 7
ucacgcucucaaucaaaaucu

SEQ ID NO: 340706 - RNA, 20 nt, Human herpesvirus 7
ucacuuauuuuagaaaguga

SEQ ID NO: 340707 - RNA, 20 nt, Human herpesvirus 7
ucagaaauaacaaaauugua

SEQ ID NO: 340708 - RNA, 13 nt, Human herpesvirus 7
ucagaacuuuuaa

SEQ ID NO: 340709 - RNA, 16 nt, Human herpesvirus 7
ucagaauguacacagc

SEQ ID NO: 340710 - RNA, 13 nt, Human herpesvirus 7
ucagacaaguaaa

SEQ ID NO: 340711 - RNA, 14 nt, Human herpesvirus 7
ucagaccagcacaa

SEQ ID NO: 340712 - RNA, 13 nt, Human herpesvirus 7
ucagagaucauaa

SEQ ID NO: 340713 - RNA, 20 nt, Human herpesvirus 7
ucagaugcuaugguggcaua

SEQ ID NO: 340714 - RNA, 18 nt, Human herpesvirus 7
ucagauucugacauugua

SEQ ID NO: 340715 - RNA, 21 nt, Human herpesvirus 7
ucagauucugacauuguacaa

SEQ ID NO: 340716 - RNA, 21 nt, Human herpesvirus 7
ucagauugaaauuccauacaa

SEQ ID NO: 340717 - RNA, 20 nt, Human herpesvirus 7
ucagauuugguucauuacag

SEQ ID NO: 340718 - RNA, 13 nt, Human herpesvirus 7
ucagcaucucaga

SEQ ID NO: 340719 - RNA, 21 nt, Human herpesvirus 7
ucagcaucucagaaguuucaa

SEQ ID NO: 340720 - RNA, 18 nt, Human herpesvirus 7
ucagcauuuaccauuucg

SEQ ID NO: 340721 - RNA, 13 nt, Human herpesvirus 7
ucaggaaaaucac

SEQ ID NO: 340722 - RNA, 13 nt, Human herpesvirus 7
ucaggaaucuuuu

SEQ ID NO: 340723 - RNA, 19 nt, Human herpesvirus 7
ucaggacaaucaaacaugu

SEQ ID NO: 340724 - RNA, 14 nt, Human herpesvirus 7
ucaggcaacauuaa

SEQ ID NO: 340725 - RNA, 15 nt, Human herpesvirus 7
ucaggcaacauuaau

SEQ ID NO: 340726 - RNA, 20 nt, Human herpesvirus 7
ucaguacaacgacauugaaa

SEQ ID NO: 340727 - RNA, 14 nt, Human herpesvirus 7
ucaguaucacuuaa

SEQ ID NO: 340728 - RNA, 17 nt, Human herpesvirus 7
ucaguguaacucugcca

SEQ ID NO: 340729 - RNA, 19 nt, Human herpesvirus 7
ucaguuggagucguucuau

SEQ ID NO: 340730 - RNA, 20 nt, Human herpesvirus 7
ucaguuguuggaaauaccgu

SEQ ID NO: 340731 - RNA, 18 nt, Human herpesvirus 7
ucaguuucuuuuucauua

SEQ ID NO: 340732 - RNA, 17 nt, Human herpesvirus 7
ucauaaucauaguacau

SEQ ID NO: 340733 - RNA, 15 nt, Human herpesvirus 7
ucauaauuacauugc

SEQ ID NO: 340734 - RNA, 17 nt, Human herpesvirus 7
ucauaauuacauugcag

SEQ ID NO: 340735 - RNA, 13 nt, Human herpesvirus 7
ucauaauuuucau

SEQ ID NO: 340736 - RNA, 22 nt, Human herpesvirus 7
ucauaauuuucaugaacacaac

SEQ ID NO: 340737 - RNA, 20 nt, Human herpesvirus 7
ucauagauuucagaauuucc

SEQ ID NO: 340738 - RNA, 22 nt, Human herpesvirus 7
ucauagcaggaagcacaaauca

SEQ ID NO: 340739 - RNA, 22 nt, Human herpesvirus 7
ucauagcuuaaaaaauacauug

SEQ ID NO: 340740 - RNA, 14 nt, Human herpesvirus 7
ucauagguugcuau

SEQ ID NO: 340741 - RNA, 15 nt, Human herpesvirus 7
ucauagugggaacau

SEQ ID NO: 340742 - RNA, 12 nt, Human herpesvirus 7
ucauaucuauga

SEQ ID NO: 340743 - RNA, 22 nt, Human herpesvirus 7
ucaucauauacaauaaugcugu

SEQ ID NO: 340744 - RNA, 14 nt, Human herpesvirus 7
ucaucccugcugau

SEQ ID NO: 340745 - RNA, 17 nt, Human herpesvirus 7
ucaucuuaaaaguacaa

SEQ ID NO: 340746 - RNA, 21 nt, Human herpesvirus 7
ucaucuuucuuauaucugaga

SEQ ID NO: 340747 - RNA, 13 nt, Human herpesvirus 7
ucaugcauugcau

SEQ ID NO: 340748 - RNA, 14 nt, Human herpesvirus 7
ucaugcauugcauu

SEQ ID NO: 340749 - RNA, 18 nt, Human herpesvirus 7
ucaugcauugcauucgau

SEQ ID NO: 340750 - RNA, 21 nt, Human herpesvirus 7
ucaugcgauaucugacuggua

SEQ ID NO: 340751 - RNA, 14 nt, Human herpesvirus 7
ucauggacggcauu

SEQ ID NO: 340752 - RNA, 14 nt, Human herpesvirus 7
ucauggcacauaua

SEQ ID NO: 340753 - RNA, 20 nt, Human herpesvirus 7
ucauguaauuaggaaucaga

SEQ ID NO: 340754 - RNA, 15 nt, Human herpesvirus 7
ucauguuuuaugacu

SEQ ID NO: 340755 - RNA, 19 nt, Human herpesvirus 7
ucauuaaaaaaaccaggaa

SEQ ID NO: 340756 - RNA, 22 nt, Human herpesvirus 7
ucauuagaaacaaucccagaaa

SEQ ID NO: 340757 - RNA, 16 nt, Human herpesvirus 7
ucauuccaaaauacaa

SEQ ID NO: 340758 - RNA, 19 nt, Human herpesvirus 7
ucauugauccuccuugccu

SEQ ID NO: 340759 - RNA, 19 nt, Human herpesvirus 7
ucauuuacagagaauuuua

SEQ ID NO: 340760 - RNA, 13 nt, Human herpesvirus 7
ucauuucacggaa

SEQ ID NO: 340761 - RNA, 19 nt, Human herpesvirus 7
uccaaaaguuguuaagaau

SEQ ID NO: 340762 - RNA, 11 nt, Human herpesvirus 7
uccaaaaucag

SEQ ID NO: 340763 - RNA, 17 nt, Human herpesvirus 7
uccaaaauguaaaccaa

SEQ ID NO: 340764 - RNA, 18 nt, Human herpesvirus 7
uccaaguuuuacagaaau

SEQ ID NO: 340765 - RNA, 19 nt, Human herpesvirus 7
uccaauaaccgguaaagaa

SEQ ID NO: 340766 - RNA, 14 nt, Human herpesvirus 7
uccaauaaugcauc

SEQ ID NO: 340767 - RNA, 21 nt, Human herpesvirus 7
uccaaucauaauuuucaugaa

SEQ ID NO: 340768 - RNA, 23 nt, Human herpesvirus 7
uccacacagggaagaaacagcug

SEQ ID NO: 340769 - RNA, 15 nt, Human herpesvirus 7
uccacaguccucuag

SEQ ID NO: 340770 - RNA, 17 nt, Human herpesvirus 7
uccacgcucccauaaaa

SEQ ID NO: 340771 - RNA, 18 nt, Human herpesvirus 7
uccacuacagauauugau

SEQ ID NO: 340772 - RNA, 15 nt, Human herpesvirus 7
uccagacagcuguau

SEQ ID NO: 340773 - RNA, 19 nt, Human herpesvirus 7
uccagauccaucuguaaca

SEQ ID NO: 340774 - RNA, 19 nt, Human herpesvirus 7
uccagauuuucuguuucag

SEQ ID NO: 340775 - RNA, 19 nt, Human herpesvirus 7
uccagcaaagacuugcaaa

SEQ ID NO: 340776 - RNA, 16 nt, Human herpesvirus 7
uccaguacgucuugcu

SEQ ID NO: 340777 - RNA, 17 nt, Human herpesvirus 7
uccaguggcaguacuac

SEQ ID NO: 340778 - RNA, 16 nt, Human herpesvirus 7
uccauaaauaaaaaca

SEQ ID NO: 340779 - RNA, 19 nt, Human herpesvirus 7
uccauaaauaaaaacaugg

SEQ ID NO: 340780 - RNA, 12 nt, Human herpesvirus 7
uccaucaaaagu

SEQ ID NO: 340781 - RNA, 17 nt, Human herpesvirus 7
uccaucaucacgucaug

SEQ ID NO: 340782 - RNA, 12 nt, Human herpesvirus 7
uccaugucacau

SEQ ID NO: 340783 - RNA, 18 nt, Human herpesvirus 7
uccauuaaaaauuuaccu

SEQ ID NO: 340784 - RNA, 15 nt, Human herpesvirus 7
uccauucgguuuuca

SEQ ID NO: 340785 - RNA, 15 nt, Human herpesvirus 7
uccauuucaaaagaa

SEQ ID NO: 340786 - RNA, 23 nt, Human herpesvirus 7
uccauuugugauguacugcucau

SEQ ID NO: 340787 - RNA, 10 nt, Human herpesvirus 7
ucccaaaaua

SEQ ID NO: 340788 - RNA, 19 nt, Human herpesvirus 7
ucccaaaauagcacacaag

SEQ ID NO: 340789 - RNA, 16 nt, Human herpesvirus 7
ucccagaaauuucaaa

SEQ ID NO: 340790 - RNA, 15 nt, Human herpesvirus 7
ucccauucaauaaug

SEQ ID NO: 340791 - RNA, 15 nt, Human herpesvirus 7
ucccgcagagauuac

SEQ ID NO: 340792 - RNA, 23 nt, Human herpesvirus 7
ucccuagaagaugacucaugaga

SEQ ID NO: 340793 - RNA, 22 nt, Human herpesvirus 7
ucccucuaguggcaacgaggaa

SEQ ID NO: 340794 - RNA, 15 nt, Human herpesvirus 7
ucccugcugauacaa

SEQ ID NO: 340795 - RNA, 16 nt, Human herpesvirus 7
uccgagacagagucaa

SEQ ID NO: 340796 - RNA, 22 nt, Human herpesvirus 7
uccgugacaaagcauacuuuaa

SEQ ID NO: 340797 - RNA, 21 nt, Human herpesvirus 7
uccguuaauggauaaccaaca

SEQ ID NO: 340798 - RNA, 23 nt, Human herpesvirus 7
uccguuguuaaaaauuaacagcu

SEQ ID NO: 340799 - RNA, 11 nt, Human herpesvirus 7
uccguuucauu

SEQ ID NO: 340800 - RNA, 17 nt, Human herpesvirus 7
uccuaaaaaaaaaggaa

SEQ ID NO: 340801 - RNA, 19 nt, Human herpesvirus 7
uccuaaauacggaccaaga

SEQ ID NO: 340802 - RNA, 13 nt, Human herpesvirus 7
uccuaacuauaau

SEQ ID NO: 340803 - RNA, 12 nt, Human herpesvirus 7
uccuaugauaca

SEQ ID NO: 340804 - RNA, 17 nt, Human herpesvirus 7
uccucagaauguacaca

SEQ ID NO: 340805 - RNA, 16 nt, Human herpesvirus 7
uccugcuugcacaaag

SEQ ID NO: 340806 - RNA, 20 nt, Human herpesvirus 7
uccuggaaagcucauuucau

SEQ ID NO: 340807 - RNA, 17 nt, Human herpesvirus 7
uccuggauuucagcauu

SEQ ID NO: 340808 - RNA, 20 nt, Human herpesvirus 7
uccuuauauuaaaaaccaca

SEQ ID NO: 340809 - RNA, 20 nt, Human herpesvirus 7
uccuuggaaaaaugaugcuc

SEQ ID NO: 340810 - RNA, 16 nt, Human herpesvirus 7
uccuuguuguguuuua

SEQ ID NO: 340811 - RNA, 18 nt, Human herpesvirus 7
uccuuguuguguuuuauc

SEQ ID NO: 340812 - RNA, 21 nt, Human herpesvirus 7
ucgaaaccgucagcaucucag

SEQ ID NO: 340813 - RNA, 21 nt, Human herpesvirus 7
ucgaacuguuacaacuuugcc

SEQ ID NO: 340814 - RNA, 22 nt, Human herpesvirus 7
ucgaagaaauucgaaacacuua

SEQ ID NO: 340815 - RNA, 15 nt, Human herpesvirus 7
ucgaauuugugauau

SEQ ID NO: 340816 - RNA, 19 nt, Human herpesvirus 7
ucgaauuuuacaaugcagc

SEQ ID NO: 340817 - RNA, 23 nt, Human herpesvirus 7
ucuuauaaccgauauaguuuguu

SEQ ID NO: 340818 - RNA, 23 nt, Human herpesvirus 7
ucuuaugccagguuuuucaaaga

SEQ ID NO: 340819 - RNA, 20 nt, Human herpesvirus 7
ucuuauucuacacaucuuca

SEQ ID NO: 340820 - RNA, 14 nt, Human herpesvirus 7
ucuucaauaugcuu

SEQ ID NO: 340821 - RNA, 13 nt, Human herpesvirus 7
ucuucacguguga

SEQ ID NO: 340822 - RNA, 23 nt, Human herpesvirus 7
ucuuccaauucuuuguacuugua

SEQ ID NO: 340823 - RNA, 22 nt, Human herpesvirus 7
ucuuccuagcauuaauuuggua

SEQ ID NO: 340824 - RNA, 16 nt, Human herpesvirus 7
ucuuccuuucuuugag

SEQ ID NO: 340825 - RNA, 16 nt, Human herpesvirus 7
ucuucugcuaacucau

SEQ ID NO: 340826 - RNA, 13 nt, Human herpesvirus 7
ucuucuguaaaag

SEQ ID NO: 340827 - RNA, 15 nt, Human herpesvirus 7
ucuucuugcauuucc

SEQ ID NO: 340828 - RNA, 20 nt, Human herpesvirus 7
ucuucuuugugagaaaugga

SEQ ID NO: 340829 - RNA, 20 nt, Human herpesvirus 7
ucuugaagaacaacaugaaa

SEQ ID NO: 340830 - RNA, 16 nt, Human herpesvirus 7
ucuugaucccguaaag

SEQ ID NO: 340831 - RNA, 23 nt, Human herpesvirus 7
ucuugauuccgaagauacgcuag

SEQ ID NO: 340832 - RNA, 22 nt, Human herpesvirus 7
ucuuggaguuugucucauugac

SEQ ID NO: 340833 - RNA, 18 nt, Human herpesvirus 7
ucuugugaaguuugcuga

SEQ ID NO: 340834 - RNA, 19 nt, Human herpesvirus 7
ucuugugaaguuugcugaa

SEQ ID NO: 340835 - RNA, 13 nt, Human herpesvirus 7
ucuuuaacgguaa

SEQ ID NO: 340836 - RNA, 13 nt, Human herpesvirus 7
ucuuuacuuucau

SEQ ID NO: 340837 - RNA, 20 nt, Human herpesvirus 7
ucuuuacuuucauagcuuaa

SEQ ID NO: 340838 - RNA, 21 nt, Human herpesvirus 7
ucuuuagagucugugugugca

SEQ ID NO: 340839 - RNA, 18 nt, Human herpesvirus 7
ucuuuauaaaggaccaug

SEQ ID NO: 340840 - RNA, 22 nt, Human herpesvirus 7
ucuuuauaaaggaccaugggaa

SEQ ID NO: 340841 - RNA, 21 nt, Human herpesvirus 7
ucuuuauugguaauuagugaa

SEQ ID NO: 340842 - RNA, 21 nt, Human herpesvirus 7
ucuuucaucuucugaaucugc

SEQ ID NO: 340843 - RNA, 20 nt, Human herpesvirus 7
ucuuucaugcauugcauucg

SEQ ID NO: 340844 - RNA, 15 nt, Human herpesvirus 7
ucuuucuaguuccca

SEQ ID NO: 340845 - RNA, 14 nt, Human herpesvirus 7
ucuuucucaucacu

SEQ ID NO: 340846 - RNA, 20 nt, Human herpesvirus 7
ucuuucuccacuaugccaca

SEQ ID NO: 340847 - RNA, 22 nt, Human herpesvirus 7
ucuuugaaucgugggacuugau

SEQ ID NO: 340848 - RNA, 23 nt, Human herpesvirus 7
ucuuuggguacaaguccuuugau

SEQ ID NO: 340849 - RNA, 22 nt, Human herpesvirus 7
ucuuuguacuuguaccaaucaa

SEQ ID NO: 340850 - RNA, 18 nt, Human herpesvirus 7
ucuuugugagaaauggaa

SEQ ID NO: 340851 - RNA, 12 nt, Human herpesvirus 7
ucuuuucaguga

SEQ ID NO: 340852 - RNA, 21 nt, Human herpesvirus 7
ucuuuucagugaagcuaaaau

SEQ ID NO: 340853 - RNA, 15 nt, Human herpesvirus 7
ucuuuuucaaaugga

SEQ ID NO: 340854 - RNA, 15 nt, Human herpesvirus 7
ucuuuuugaacagaa

SEQ ID NO: 340855 - RNA, 23 nt, Human herpesvirus 7
ugaaaaaaagauuuaacaugugu

SEQ ID NO: 340856 - RNA, 20 nt, Human herpesvirus 7
ugaaaaaacaguucaagaaa

SEQ ID NO: 340857 - RNA, 18 nt, Human herpesvirus 7
ugaaaaaauaaauucuga

SEQ ID NO: 340858 - RNA, 15 nt, Human herpesvirus 7
ugaaaaaaucuugca

SEQ ID NO: 340859 - RNA, 17 nt, Human herpesvirus 7
ugaaaaagaauuuucug

SEQ ID NO: 340860 - RNA, 16 nt, Human herpesvirus 7
ugaaaaauaaauacua

SEQ ID NO: 340861 - RNA, 22 nt, Human herpesvirus 7
ugaaaacaauuaagaaucauuu

SEQ ID NO: 340862 - RNA, 22 nt, Human herpesvirus 7
ugaaaacauugcuguucuugcu

SEQ ID NO: 340863 - RNA, 14 nt, Human herpesvirus 7
ugaaaacgaaagga

SEQ ID NO: 340864 - RNA, 16 nt, Human herpesvirus 7
ugaaaacuaacaucuu

SEQ ID NO: 340865 - RNA, 16 nt, Human herpesvirus 7
ugaaaagcuuguuuaa

SEQ ID NO: 340866 - RNA, 16 nt, Human herpesvirus 7
ugaaaagucugugaca

SEQ ID NO: 340867 - RNA, 15 nt, Human herpesvirus 7
ugaaaauaaacagga

SEQ ID NO: 340868 - RNA, 16 nt, Human herpesvirus 7
ugaaaauaaacaggaa

SEQ ID NO: 340869 - RNA, 11 nt, Human herpesvirus 7
ugaaaauaaca

SEQ ID NO: 340870 - RNA, 15 nt, Human herpesvirus 7
ugaaaauaacaggaa

SEQ ID NO: 340871 - RNA, 19 nt, Human herpesvirus 7
ugaaaauauauuccaacuc

SEQ ID NO: 340872 - RNA, 21 nt, Human herpesvirus 7
ugaaaauauuuuacaaaaaga

SEQ ID NO: 340873 - RNA, 19 nt, Human herpesvirus 7
ugaaaaugaugguugcaau

SEQ ID NO: 340874 - RNA, 21 nt, Human herpesvirus 7
ugaaaaugcccucagaacugu

SEQ ID NO: 340875 - RNA, 16 nt, Human herpesvirus 7
ugaaaauuucuaucac

SEQ ID NO: 340876 - RNA, 20 nt, Human herpesvirus 7
ugaaacguuucaaaucaaug

SEQ ID NO: 340877 - RNA, 21 nt, Human herpesvirus 7
ugaaacucaucauugaagaaa

SEQ ID NO: 340878 - RNA, 20 nt, Human herpesvirus 7
ugaaagcguuucacugggaa

SEQ ID NO: 340879 - RNA, 13 nt, Human herpesvirus 7
ugaaagguuacaa

SEQ ID NO: 340880 - RNA, 13 nt, Human herpesvirus 7
ugaaaucaaaaau

SEQ ID NO: 340881 - RNA, 23 nt, Human herpesvirus 7
ugaaauggguuugggaaacaucu

SEQ ID NO: 340882 - RNA, 21 nt, Human herpesvirus 7
ugaaauguuuuuuuuacgguu

SEQ ID NO: 340883 - RNA, 17 nt, Human herpesvirus 7
ugaaauuuaauaacagc

SEQ ID NO: 340884 - RNA, 19 nt, Human herpesvirus 7
ugaacaaguagugcuaaua

SEQ ID NO: 340885 - RNA, 20 nt, Human herpesvirus 7
ugaacaaguagugcuaauau

SEQ ID NO: 340886 - RNA, 23 nt, Human herpesvirus 7
ugaacacaacauccagagucucu

SEQ ID NO: 340887 - RNA, 22 nt, Human herpesvirus 7
ugaacauuugaagauaaguaua

SEQ ID NO: 340888 - RNA, 18 nt, Human herpesvirus 7
ugaacccauagaagaaug

SEQ ID NO: 340889 - RNA, 13 nt, Human herpesvirus 7
ugaacuggcacau

SEQ ID NO: 340890 - RNA, 14 nt, Human herpesvirus 7
ugaacuguuacagu

SEQ ID NO: 340891 - RNA, 17 nt, Human herpesvirus 7
ugaacuguuacaguuaa

SEQ ID NO: 340892 - RNA, 14 nt, Human herpesvirus 7
ugaacuuguuuuga

SEQ ID NO: 340893 - RNA, 18 nt, Human herpesvirus 7
ugaagaacauuaauauca

SEQ ID NO: 340894 - RNA, 21 nt, Human herpesvirus 7
ugaagacagcucaaaaguaua

SEQ ID NO: 340895 - RNA, 20 nt, Human herpesvirus 7
ugaagagauuaaggugauaa

SEQ ID NO: 340896 - RNA, 17 nt, Human herpesvirus 7
ugaagagcguguuuuga

SEQ ID NO: 340897 - RNA, 19 nt, Human herpesvirus 7
ugaagaggagaauucugua

SEQ ID NO: 340898 - RNA, 20 nt, Human herpesvirus 7
ugaagauuguuggaaaggga

SEQ ID NO: 340899 - RNA, 16 nt, Human herpesvirus 7
ugaauagacacauuua

SEQ ID NO: 340900 - RNA, 22 nt, Human herpesvirus 7
ugaauagguaucuuuacuuuca

SEQ ID NO: 340901 - RNA, 23 nt, Human herpesvirus 7
ugaauagguaucuuuacuuucau

SEQ ID NO: 340902 - RNA, 11 nt, Human herpesvirus 7
ugaaucaaauu

SEQ ID NO: 340903 - RNA, 17 nt, Human herpesvirus 7
ugaaucauauuuuagua

SEQ ID NO: 340904 - RNA, 19 nt, Human herpesvirus 7
ugaaucgugggacuugaua

SEQ ID NO: 340905 - RNA, 18 nt, Human herpesvirus 7
ugaaucugcuaaggcuaa

SEQ ID NO: 340906 - RNA, 21 nt, Human herpesvirus 7
ugaaugugcuuuagaauuaga

SEQ ID NO: 340907 - RNA, 13 nt, Human herpesvirus 7
ugaauuaaggugg

SEQ ID NO: 340908 - RNA, 20 nt, Human herpesvirus 7
ugaauuaauucuagcagcuu

SEQ ID NO: 340909 - RNA, 23 nt, Human herpesvirus 7
ugaauucauuugugaaauugaca

SEQ ID NO: 340910 - RNA, 18 nt, Human herpesvirus 7
ugaauuuuaaguggaauc

SEQ ID NO: 340911 - RNA, 22 nt, Human herpesvirus 7
ugacaaauuucaggaaaaacgg

SEQ ID NO: 340912 - RNA, 17 nt, Human herpesvirus 7
ugacaacaaagcaugaa

SEQ ID NO: 340913 - RNA, 14 nt, Human herpesvirus 7
ugacaaucuuggca

SEQ ID NO: 340914 - RNA, 19 nt, Human herpesvirus 7
ugacaaugucaauaaucaa

SEQ ID NO: 340915 - RNA, 15 nt, Human herpesvirus 7
ugacaccaacaucug

SEQ ID NO: 340916 - RNA, 18 nt, Human herpesvirus 7
ugacacgacacugaaugu

SEQ ID NO: 340917 - RNA, 21 nt, Human herpesvirus 7
ugacacgacacugaaugucaa

SEQ ID NO: 340918 - RNA, 18 nt, Human herpesvirus 7
ugacagagggcauuugua

SEQ ID NO: 340919 - RNA, 13 nt, Human herpesvirus 7
ugacaguccauuc

SEQ ID NO: 340920 - RNA, 22 nt, Human herpesvirus 7
ugacaguuccuaaauaauucac

SEQ ID NO: 340921 - RNA, 18 nt, Human herpesvirus 7
ugacauuaguucuggccg

SEQ ID NO: 340922 - RNA, 16 nt, Human herpesvirus 7
ugacauugaagcuauu

SEQ ID NO: 340923 - RNA, 17 nt, Human herpesvirus 7
ugacauuggaacuuuau

SEQ ID NO: 340924 - RNA, 19 nt, Human herpesvirus 7
ugacggaaguacuaaucac

SEQ ID NO: 340925 - RNA, 22 nt, Human herpesvirus 7
ugacucggaaccgagaauguuc

SEQ ID NO: 340926 - RNA, 16 nt, Human herpesvirus 7
ugacuggacacaauca

SEQ ID NO: 340927 - RNA, 14 nt, Human herpesvirus 7
ugacuguaucucca

SEQ ID NO: 340928 - RNA, 19 nt, Human herpesvirus 7
ugacuuaccgucgggugaa

SEQ ID NO: 340929 - RNA, 13 nt, Human herpesvirus 7
ugacuuccaaguu

SEQ ID NO: 340930 - RNA, 17 nt, Human herpesvirus 7
ugcuauucacgcuucca

SEQ ID NO: 340931 - RNA, 22 nt, Human herpesvirus 7
ugcuauucacgcuuccaucaca

SEQ ID NO: 340932 - RNA, 23 nt, Human herpesvirus 7
ugcuauucacgcuuccaucacaa

SEQ ID NO: 340933 - RNA, 20 nt, Human herpesvirus 7
ugcucauuuuguuuugcaau

SEQ ID NO: 340934 - RNA, 20 nt, Human herpesvirus 7
ugcugaacucugucaucaaa

SEQ ID NO: 340935 - RNA, 17 nt, Human herpesvirus 7
ugcugaaucaacagagc

SEQ ID NO: 340936 - RNA, 15 nt, Human herpesvirus 7
ugcugauacaagaua

SEQ ID NO: 340937 - RNA, 23 nt, Human herpesvirus 7
ugcuggaaagcuugugaagacua

SEQ ID NO: 340938 - RNA, 22 nt, Human herpesvirus 7
ugcuggaucauagagaaaacau

SEQ ID NO: 340939 - RNA, 18 nt, Human herpesvirus 7
ugcuggcucaagcacaau

SEQ ID NO: 340940 - RNA, 20 nt, Human herpesvirus 7
ugcuggcucaagcacaauca

SEQ ID NO: 340941 - RNA, 14 nt, Human herpesvirus 7
ugcuguauguugaa

SEQ ID NO: 340942 - RNA, 22 nt, Human herpesvirus 7
ugcugucguguaagaugucuaa

SEQ ID NO: 340943 - RNA, 20 nt, Human herpesvirus 7
ugcugugauuuuccugaaaa

SEQ ID NO: 340944 - RNA, 15 nt, Human herpesvirus 7
ugcuguuugucaucg

SEQ ID NO: 340945 - RNA, 16 nt, Human herpesvirus 7
ugcuuaaaacuuugaa

SEQ ID NO: 340946 - RNA, 14 nt, Human herpesvirus 7
ugcuuaaauuucca

SEQ ID NO: 340947 - RNA, 14 nt, Human herpesvirus 7
ugcuuagaaucuuu

SEQ ID NO: 340948 - RNA, 19 nt, Human herpesvirus 7
ugcuuauuuauauauggca

SEQ ID NO: 340949 - RNA, 23 nt, Human herpesvirus 7
ugcuuauuuauauauggcaauaa

SEQ ID NO: 340950 - RNA, 18 nt, Human herpesvirus 7
ugcuucaauucaccaauu

SEQ ID NO: 340951 - RNA, 16 nt, Human herpesvirus 7
ugcuucagaaauaaca

SEQ ID NO: 340952 - RNA, 15 nt, Human herpesvirus 7
ugcuucggaauuuga

SEQ ID NO: 340953 - RNA, 17 nt, Human herpesvirus 7
ugcuugaaagaauauaa

SEQ ID NO: 340954 - RNA, 15 nt, Human herpesvirus 7
ugcuugcacaaagau

SEQ ID NO: 340955 - RNA, 19 nt, Human herpesvirus 7
ugcuugcacuguaauauaa

SEQ ID NO: 340956 - RNA, 12 nt, Human herpesvirus 7
ugcuuguuacag

SEQ ID NO: 340957 - RNA, 15 nt, Human herpesvirus 7
ugcuuguuacagugu

SEQ ID NO: 340958 - RNA, 12 nt, Human herpesvirus 7
ugcuuuccauca

SEQ ID NO: 340959 - RNA, 19 nt, Human herpesvirus 7
ugcuuucuaaguacuucug

SEQ ID NO: 340960 - RNA, 15 nt, Human herpesvirus 7
ugcuuugcugcaaca

SEQ ID NO: 340961 - RNA, 18 nt, Human herpesvirus 7
ugcuuuuucaauguuucc

SEQ ID NO: 340962 - RNA, 19 nt, Human herpesvirus 7
uggaaaauggagcauuauu

SEQ ID NO: 340963 - RNA, 20 nt, Human herpesvirus 7
uggaaauuacuggcagaaau

SEQ ID NO: 340964 - RNA, 19 nt, Human herpesvirus 7
uggaaauuguuugaucaaa

SEQ ID NO: 340965 - RNA, 21 nt, Human herpesvirus 7
uggaaccuacugaagagccaa

SEQ ID NO: 340966 - RNA, 19 nt, Human herpesvirus 7
uggaacuucaccacgaucc

SEQ ID NO: 340967 - RNA, 12 nt, Human herpesvirus 7
uggaagaacaac

SEQ ID NO: 340968 - RNA, 20 nt, Human herpesvirus 7
uggaauccuaugacugagaa

SEQ ID NO: 340969 - RNA, 14 nt, Human herpesvirus 7
uggaaucgaauaca

SEQ ID NO: 340970 - RNA, 19 nt, Human herpesvirus 7
uggaaucgaauacaguuga

SEQ ID NO: 340971 - RNA, 18 nt, Human herpesvirus 7
uggaauuauacacuguga

SEQ ID NO: 340972 - RNA, 21 nt, Human herpesvirus 7
uggacacaaucagcauuuacc

SEQ ID NO: 340973 - RNA, 17 nt, Human herpesvirus 7
uggacaccaguaugaaa

SEQ ID NO: 340974 - RNA, 18 nt, Human herpesvirus 7
uggacgcuaauuugcaua

SEQ ID NO: 340975 - RNA, 19 nt, Human herpesvirus 7
uggagaccguuaauguagu

SEQ ID NO: 340976 - RNA, 19 nt, Human herpesvirus 7
uggagacgaugagcaugaa

SEQ ID NO: 340977 - RNA, 18 nt, Human herpesvirus 7
uggagauaguucgcaaug

SEQ ID NO: 340978 - RNA, 20 nt, Human herpesvirus 7
uggagauaguucgcaauggu

SEQ ID NO: 340979 - RNA, 21 nt, Human herpesvirus 7
uggagauaguucgcaauggua

SEQ ID NO: 340980 - RNA, 14 nt, Human herpesvirus 7
uggagcgaagcuuu

SEQ ID NO: 340981 - RNA, 12 nt, Human herpesvirus 7
uggaguucagua

SEQ ID NO: 340982 - RNA, 22 nt, Human herpesvirus 7
uggauaaccaaacuauauugaa

SEQ ID NO: 340983 - RNA, 19 nt, Human herpesvirus 7
uggauucaaucuacuguac

SEQ ID NO: 340984 - RNA, 16 nt, Human herpesvirus 7
uggauucuacauagaa

SEQ ID NO: 340985 - RNA, 15 nt, Human herpesvirus 7
uggcaaaagauuuaa

SEQ ID NO: 340986 - RNA, 13 nt, Human herpesvirus 7
uggcaacaaacaa

SEQ ID NO: 340987 - RNA, 16 nt, Human herpesvirus 7
uggcaacaguucaaaa

SEQ ID NO: 340988 - RNA, 16 nt, Human herpesvirus 7
uggcaauuguaaaaau

SEQ ID NO: 340989 - RNA, 14 nt, Human herpesvirus 7
uggcauauaugaau

SEQ ID NO: 340990 - RNA, 21 nt, Human herpesvirus 7
uggccauaaacggaauacaug

SEQ ID NO: 340991 - RNA, 21 nt, Human herpesvirus 7
uggccuucuugccuacacuuu

SEQ ID NO: 340992 - RNA, 18 nt, Human herpesvirus 7
uggcgaguuacauuucac

SEQ ID NO: 340993 - RNA, 14 nt, Human herpesvirus 7
uggcucaagcacaa

SEQ ID NO: 340994 - RNA, 17 nt, Human herpesvirus 7
uggcucaagcacaauca

SEQ ID NO: 340995 - RNA, 18 nt, Human herpesvirus 7
uggcucugaucuaaagua

SEQ ID NO: 340996 - RNA, 21 nt, Human herpesvirus 7
uggcucuuaauaauuauuuga

SEQ ID NO: 340997 - RNA, 17 nt, Human herpesvirus 7
ugggaaaaaaaaaucac

SEQ ID NO: 340998 - RNA, 20 nt, Human herpesvirus 7
ugggauuaaaaaucuuuaca

SEQ ID NO: 340999 - RNA, 21 nt, Human herpesvirus 7
ugggauuugaaugaacaaaua

SEQ ID NO: 341000 - RNA, 22 nt, Human herpesvirus 7
ugggauuugaaugaacaaauaa

SEQ ID NO: 341001 - RNA, 16 nt, Human herpesvirus 7
ugggcguaacugugac

SEQ ID NO: 341002 - RNA, 19 nt, Human herpesvirus 7
uggggcauuaauucuuuca

SEQ ID NO: 341003 - RNA, 19 nt, Human herpesvirus 7
uggguacaaguccuuugau

SEQ ID NO: 341004 - RNA, 20 nt, Human herpesvirus 7
uggguacaaguccuuugaua

SEQ ID NO: 341005 - RNA, 19 nt, Human herpesvirus 7
ugguaaaaaauuacuugcu

SEQ ID NO: 341006 - RNA, 22 nt, Human herpesvirus 7
ugguaagaugcagacugcgcuu

SEQ ID NO: 341007 - RNA, 12 nt, Human herpesvirus 7
ugguaagcaaaa

SEQ ID NO: 341008 - RNA, 16 nt, Human herpesvirus 7
ugguaaggcagugauu

SEQ ID NO: 341009 - RNA, 14 nt, Human herpesvirus 7
ugguacaacaaaca

SEQ ID NO: 341010 - RNA, 20 nt, Human herpesvirus 7
ugguagauuuucuagagcau

SEQ ID NO: 341011 - RNA, 22 nt, Human herpesvirus 7
uggucacugagccaucaaaaaa

SEQ ID NO: 341012 - RNA, 16 nt, Human herpesvirus 7
ugguccggauguaggu

SEQ ID NO: 341013 - RNA, 22 nt, Human herpesvirus 7
ugguccggauguaggugcugca

SEQ ID NO: 341014 - RNA, 15 nt, Human herpesvirus 7
uggugcuuacgugau

SEQ ID NO: 341015 - RNA, 17 nt, Human herpesvirus 7
ugguggcauauaugaau

SEQ ID NO: 341016 - RNA, 20 nt, Human herpesvirus 7
ugguguguuacaucauguua

SEQ ID NO: 341017 - RNA, 15 nt, Human herpesvirus 7
ugguuacauauccaa

SEQ ID NO: 341018 - RNA, 18 nt, Human herpesvirus 7
ugguuauuggaaaugaga

SEQ ID NO: 341019 - RNA, 17 nt, Human herpesvirus 7
ugguucagcgugacaga

SEQ ID NO: 341020 - RNA, 13 nt, Human herpesvirus 7
ugguucucuggca

SEQ ID NO: 341021 - RNA, 13 nt, Human herpesvirus 7
ugguugugcaauu

SEQ ID NO: 341022 - RNA, 14 nt, Human herpesvirus 7
ugguuucauuugga

SEQ ID NO: 341023 - RNA, 18 nt, Human herpesvirus 7
ugguuucuguugacuaaa

SEQ ID NO: 341024 - RNA, 16 nt, Human herpesvirus 7
ugguuuuaaaauagaa

SEQ ID NO: 341025 - RNA, 16 nt, Human herpesvirus 7
uguaaacaugaaaaau

SEQ ID NO: 341026 - RNA, 16 nt, Human herpesvirus 7
uguaacaacuagcaaa

SEQ ID NO: 341027 - RNA, 22 nt, Human herpesvirus 7
uguaacaacuagcaaacagugc

SEQ ID NO: 341028 - RNA, 18 nt, Human herpesvirus 7
uguaaccauuuauuuaca

SEQ ID NO: 341029 - RNA, 13 nt, Human herpesvirus 7
uguaacuuucauc

SEQ ID NO: 341030 - RNA, 19 nt, Human herpesvirus 7
uguaaucauauaugcauua

SEQ ID NO: 341031 - RNA, 15 nt, Human herpesvirus 7
uguaauguugcaaau

SEQ ID NO: 341032 - RNA, 19 nt, Human herpesvirus 7
uguaauugaaagaccaaau

SEQ ID NO: 341033 - RNA, 14 nt, Human herpesvirus 7
uguaauuucucaaa

SEQ ID NO: 341034 - RNA, 13 nt, Human herpesvirus 7
uguacagacagaa

SEQ ID NO: 341035 - RNA, 15 nt, Human herpesvirus 7
uguacugcucaucaa

SEQ ID NO: 341036 - RNA, 19 nt, Human herpesvirus 7
uguacuguugauacaacua

SEQ ID NO: 341037 - RNA, 18 nt, Human herpesvirus 7
uguacuguugcuaauuac

SEQ ID NO: 341038 - RNA, 19 nt, Human herpesvirus 7
uguagacguagugucauca

SEQ ID NO: 341039 - RNA, 20 nt, Human herpesvirus 7
uguagaguaucuccgugaca

SEQ ID NO: 341040 - RNA, 22 nt, Human herpesvirus 7
uguagaguaucuccgugacaaa

SEQ ID NO: 341041 - RNA, 23 nt, Human herpesvirus 7
uguagauuuuguagguuguugca

SEQ ID NO: 341042 - RNA, 12 nt, Human herpesvirus 7
uguaggugcugc

SEQ ID NO: 341043 - RNA, 14 nt, Human herpesvirus 7
uguagguuguugca

SEQ ID NO: 341044 - RNA, 17 nt, Human herpesvirus 7
uuaaaucauaccauaaa

SEQ ID NO: 341045 - RNA, 15 nt, Human herpesvirus 7
uuaaauguguaacaa

SEQ ID NO: 341046 - RNA, 16 nt, Human herpesvirus 7
uuaaauguguaacaau

SEQ ID NO: 341047 - RNA, 14 nt, Human herpesvirus 7
uuaaauuuacuuac

SEQ ID NO: 341048 - RNA, 23 nt, Human herpesvirus 7
uuaacaacagccaaaugugguaa

SEQ ID NO: 341049 - RNA, 24 nt, Human herpesvirus 7
uuaacaauuauuuuaaauucuaau

SEQ ID NO: 341050 - RNA, 20 nt, Human herpesvirus 7
uuaacauguguauauuugcu

SEQ ID NO: 341051 - RNA, 22 nt, Human herpesvirus 7
uuaacauuaaccacaacuguga

SEQ ID NO: 341052 - RNA, 20 nt, Human herpesvirus 7
uuaacgaaacgcuagaaucu

SEQ ID NO: 341053 - RNA, 18 nt, Human herpesvirus 7
uuaacuuuuggaaugaua

SEQ ID NO: 341054 - RNA, 13 nt, Human herpesvirus 7
uuaagaauuccag

SEQ ID NO: 341055 - RNA, 17 nt, Human herpesvirus 7
uuaagacaccccaaaau

SEQ ID NO: 341056 - RNA, 21 nt, Human herpesvirus 7
uuaagacaccccaaaaucaaa

SEQ ID NO: 341057 - RNA, 15 nt, Human herpesvirus 7
uuaagagacauugaa

SEQ ID NO: 341058 - RNA, 21 nt, Human herpesvirus 7
uuaagauacauuuuugcaaua

SEQ ID NO: 341059 - RNA, 13 nt, Human herpesvirus 7
uuaagcagcagac

SEQ ID NO: 341060 - RNA, 22 nt, Human herpesvirus 7
uuaagccuaggauaccaaacaa

SEQ ID NO: 341061 - RNA, 19 nt, Human herpesvirus 7
uuaauacaaaauaaagcca

SEQ ID NO: 341062 - RNA, 16 nt, Human herpesvirus 7
uuaauauuaguauugu

SEQ ID NO: 341063 - RNA, 13 nt, Human herpesvirus 7
uuaaucaaacaau

SEQ ID NO: 341064 - RNA, 20 nt, Human herpesvirus 7
uuaaucacgugauugugcuu

SEQ ID NO: 341065 - RNA, 15 nt, Human herpesvirus 7
uuaaucauaucuugc

SEQ ID NO: 341066 - RNA, 13 nt, Human herpesvirus 7
uuaaucuggaauc

SEQ ID NO: 341067 - RNA, 20 nt, Human herpesvirus 7
uuaaucuugaaaaagaauuu

SEQ ID NO: 341068 - RNA, 16 nt, Human herpesvirus 7
uuaauggaagaacaac

SEQ ID NO: 341069 - RNA, 21 nt, Human herpesvirus 7
uuaaugguaccuuagaaucac

SEQ ID NO: 341070 - RNA, 11 nt, Human herpesvirus 7
uuaaugugcuu

SEQ ID NO: 341071 - RNA, 14 nt, Human herpesvirus 7
uuaauuaacacuca

SEQ ID NO: 341072 - RNA, 15 nt, Human herpesvirus 7
uuaauucuagcagcu

SEQ ID NO: 341073 - RNA, 14 nt, Human herpesvirus 7
uuaauucuuuccac

SEQ ID NO: 341074 - RNA, 11 nt, Human herpesvirus 7
uuacaaaaaga

SEQ ID NO: 341075 - RNA, 15 nt, Human herpesvirus 7
uuacaaacauguucc

SEQ ID NO: 341076 - RNA, 22 nt, Human herpesvirus 7
uuacaacaaagaaaaaacuaac

SEQ ID NO: 341077 - RNA, 22 nt, Human herpesvirus 7
uuacaaugcagccuacuuuuaa

SEQ ID NO: 341078 - RNA, 12 nt, Human herpesvirus 7
uuacacaggaau

SEQ ID NO: 341079 - RNA, 17 nt, Human herpesvirus 7
uuacagaggacuugaaa

SEQ ID NO: 341080 - RNA, 22 nt, Human herpesvirus 7
uuacagcuaucucuacaaacag

SEQ ID NO: 341081 - RNA, 18 nt, Human herpesvirus 7
uuacaguaaauugcaacu

SEQ ID NO: 341082 - RNA, 20 nt, Human herpesvirus 7
uuacaguuuuuuaauacaaa

SEQ ID NO: 341083 - RNA, 14 nt, Human herpesvirus 7
uuacauccugcuaa

SEQ ID NO: 341084 - RNA, 15 nt, Human herpesvirus 7
uuacauuucaaacaa

SEQ ID NO: 341085 - RNA, 21 nt, Human herpesvirus 7
uuacauuucaaacaacauauc

SEQ ID NO: 341086 - RNA, 23 nt, Human herpesvirus 7
uuacauuucaaacaacauaucgc

SEQ ID NO: 341087 - RNA, 21 nt, Human herpesvirus 7
uuaccgauucuaaauuaaaaa

SEQ ID NO: 341088 - RNA, 22 nt, Human herpesvirus 7
uuaccgucuuuugauuuugccg

SEQ ID NO: 341089 - RNA, 18 nt, Human herpesvirus 7
uuaccuuuaauugauauu

SEQ ID NO: 341090 - RNA, 18 nt, Human herpesvirus 7
uuaccuuuuuguuuuuga

SEQ ID NO: 341091 - RNA, 21 nt, Human herpesvirus 7
uuacgcaugcuugcuuugcau

SEQ ID NO: 341092 - RNA, 15 nt, Human herpesvirus 7
uuacuacgguuuuca

SEQ ID NO: 341093 - RNA, 13 nt, Human herpesvirus 7
uuacuauuugacu

SEQ ID NO: 341094 - RNA, 15 nt, Human herpesvirus 7
uuacuuccuaaucua

SEQ ID NO: 341095 - RNA, 20 nt, Human herpesvirus 7
uuacuugcagaaaaaauaau

SEQ ID NO: 341096 - RNA, 11 nt, Human herpesvirus 7
uuacuuucaua

SEQ ID NO: 341097 - RNA, 21 nt, Human herpesvirus 7
uuagaaaaacgcuaaccaucu

SEQ ID NO: 341098 - RNA, 16 nt, Human herpesvirus 7
uuagaaacaacacucu

SEQ ID NO: 341099 - RNA, 14 nt, Human herpesvirus 7
uuagaacuugcgaa

SEQ ID NO: 341100 - RNA, 13 nt, Human herpesvirus 7
uuagaauaucugu

SEQ ID NO: 341101 - RNA, 18 nt, Human herpesvirus 7
uuagaaucacaacauaua

SEQ ID NO: 341102 - RNA, 19 nt, Human herpesvirus 7
uuagaaucacaacauauag

SEQ ID NO: 341103 - RNA, 12 nt, Human herpesvirus 7
uuagaaucuuuu

SEQ ID NO: 341104 - RNA, 17 nt, Human herpesvirus 7
uuagagucgucuugcaa

SEQ ID NO: 341105 - RNA, 18 nt, Human herpesvirus 7
uuagagucgucuugcaaa

SEQ ID NO: 341106 - RNA, 16 nt, Human herpesvirus 7
uuagauaaugacaaac

SEQ ID NO: 341107 - RNA, 14 nt, Human herpesvirus 7
uuagaugcauccaa

SEQ ID NO: 341108 - RNA, 16 nt, Human herpesvirus 7
uuagaugcauccaaag

SEQ ID NO: 341109 - RNA, 17 nt, Human herpesvirus 7
uuagaugcauccaaaga

SEQ ID NO: 341110 - RNA, 18 nt, Human herpesvirus 7
uuagcaccaacugaauua

SEQ ID NO: 341111 - RNA, 20 nt, Human herpesvirus 7
uuagcggagguuugcuauug

SEQ ID NO: 341112 - RNA, 18 nt, Human herpesvirus 7
uuagcucuaaacaaacaa

SEQ ID NO: 341113 - RNA, 19 nt, Human herpesvirus 7
uuagcuuucaugauuucaa

SEQ ID NO: 341114 - RNA, 15 nt, Human herpesvirus 7
uuagggaauguaauu

SEQ ID NO: 341115 - RNA, 18 nt, Human herpesvirus 7
uuagguaauagcuuuaaa

SEQ ID NO: 341116 - RNA, 17 nt, Human herpesvirus 7
uuaguucuaauuuuggc

SEQ ID NO: 341117 - RNA, 22 nt, Human herpesvirus 7
uuauaaauguaacuuucaucug

SEQ ID NO: 341118 - RNA, 21 nt, Human herpesvirus 7
uuauaagaauuuggauagaua

SEQ ID NO: 341119 - RNA, 20 nt, Human herpesvirus 7
uuauacuuuuuuuacuuaaa

SEQ ID NO: 341120 - RNA, 14 nt, Human herpesvirus 7
uuauagaaguaccg

SEQ ID NO: 341121 - RNA, 17 nt, Human herpesvirus 7
uuauauaaguccuucaa

SEQ ID NO: 341122 - RNA, 19 nt, Human herpesvirus 7
uuauaugucaaauguuccu

SEQ ID NO: 341123 - RNA, 16 nt, Human herpesvirus 7
uuauauuuuaaguaau

SEQ ID NO: 341124 - RNA, 18 nt, Human herpesvirus 7
uuauauuuuauuguuacc

SEQ ID NO: 341125 - RNA, 13 nt, Human herpesvirus 7
uuaucauuuauca

SEQ ID NO: 341126 - RNA, 21 nt, Human herpesvirus 7
uuauccgucuguguuauacuu

SEQ ID NO: 341127 - RNA, 19 nt, Human herpesvirus 7
uuauccguuaauggauaac

SEQ ID NO: 341128 - RNA, 18 nt, Human herpesvirus 7
uuaucgaguucugacuaa

SEQ ID NO: 341129 - RNA, 16 nt, Human herpesvirus 7
uuaucgcccacuauuu

SEQ ID NO: 341130 - RNA, 15 nt, Human herpesvirus 7
uuaucuaacacugca

SEQ ID NO: 341131 - RNA, 18 nt, Human herpesvirus 7
uuaucuaauauuauaucu

SEQ ID NO: 341132 - RNA, 13 nt, Human herpesvirus 7
uuaucuaccauca

SEQ ID NO: 341133 - RNA, 23 nt, Human herpesvirus 7
uuaucuccauucuaaaccaaaua

SEQ ID NO: 341134 - RNA, 17 nt, Human herpesvirus 7
uuauguacucugauuga

SEQ ID NO: 341135 - RNA, 14 nt, Human herpesvirus 7
uuauuagauuccau

SEQ ID NO: 341136 - RNA, 13 nt, Human herpesvirus 7
uuauucauuugcu

SEQ ID NO: 341137 - RNA, 19 nt, Human herpesvirus 7
uuauuccagauaugacaaa

SEQ ID NO: 341138 - RNA, 22 nt, Human herpesvirus 7
uuauuccgugcuguacugaaac

SEQ ID NO: 341139 - RNA, 14 nt, Human herpesvirus 7
uuauucuacacauc

SEQ ID NO: 341140 - RNA, 19 nt, Human herpesvirus 7
uuauucuacacaucuucaa

SEQ ID NO: 341141 - RNA, 19 nt, Human herpesvirus 7
uuauugagcaauugauuca

SEQ ID NO: 341142 - RNA, 22 nt, Human herpesvirus 7
uuauugagcaauugauucacau

SEQ ID NO: 341143 - RNA, 15 nt, Human herpesvirus 7
uuauuggaaaugaga

SEQ ID NO: 341144 - RNA, 19 nt, Human herpesvirus 7
uuauuggagaugucagcaa

SEQ ID NO: 341145 - RNA, 19 nt, Human herpesvirus 7
uuauuuauauauggcaaua

SEQ ID NO: 341146 - RNA, 17 nt, Human herpesvirus 7
uuauuuguuuguucugu

SEQ ID NO: 341147 - RNA, 14 nt, Human herpesvirus 7
uuauuuuucaugcc

SEQ ID NO: 341148 - RNA, 19 nt, Human herpesvirus 7
uuauuuuuuccaugucaca

SEQ ID NO: 341149 - RNA, 14 nt, Human herpesvirus 7
uucaaaagcuaaaa

SEQ ID NO: 341150 - RNA, 22 nt, Human herpesvirus 7
uucaaaauauaucugauguaga

SEQ ID NO: 341151 - RNA, 24 nt, Human herpesvirus 7
uucaaaauauaucugauguagauu

SEQ ID NO: 341152 - RNA, 15 nt, Human herpesvirus 7
uucaaacaauaccca

SEQ ID NO: 341153 - RNA, 17 nt, Human herpesvirus 7
uucaaacgcuugaacaa

SEQ ID NO: 341154 - RNA, 19 nt, Human herpesvirus 7
uucaaauggauuuuaauac

SEQ ID NO: 341155 - RNA, 19 nt, Human herpesvirus 7
uucaacaccagucucugaa

SEQ ID NO: 341156 - RNA, 22 nt, Human herpesvirus 7
uucaacauacagcaugacguga

SEQ ID NO: 341157 - RNA, 21 nt, Human herpesvirus 7
uucaacaucuuucauaacaaa

SEQ ID NO: 341158 - RNA, 14 nt, Human herpesvirus 7
uugaaccuuaacau

SEQ ID NO: 341159 - RNA, 19 nt, Human herpesvirus 7
uugaagaacaacaugaaac

SEQ ID NO: 341160 - RNA, 14 nt, Human herpesvirus 7
uugaaguugaacaa

SEQ ID NO: 341161 - RNA, 18 nt, Human herpesvirus 7
uugaauauauacgcuuaa

SEQ ID NO: 341162 - RNA, 19 nt, Human herpesvirus 7
uugaauauugcuagucuca

SEQ ID NO: 341163 - RNA, 20 nt, Human herpesvirus 7
uugaaucugcuaaggcuaaa

SEQ ID NO: 341164 - RNA, 15 nt, Human herpesvirus 7
uugaauguaugucca

SEQ ID NO: 341165 - RNA, 19 nt, Human herpesvirus 7
uugaauguuuacauguaau

SEQ ID NO: 341166 - RNA, 17 nt, Human herpesvirus 7
uugaauuaauucuagca

SEQ ID NO: 341167 - RNA, 18 nt, Human herpesvirus 7
uugaauuaauucuagcag

SEQ ID NO: 341168 - RNA, 17 nt, Human herpesvirus 7
uugacaagcgcauuugu

SEQ ID NO: 341169 - RNA, 13 nt, Human herpesvirus 7
uugacaaucuugg

SEQ ID NO: 341170 - RNA, 13 nt, Human herpesvirus 7
uugacaaugucaa

SEQ ID NO: 341171 - RNA, 17 nt, Human herpesvirus 7
uugacaccaacaucugu

SEQ ID NO: 341172 - RNA, 21 nt, Human herpesvirus 7
uugacaguuccuaaauaauuc

SEQ ID NO: 341173 - RNA, 21 nt, Human herpesvirus 7
uugacguaauuuuccauucau

SEQ ID NO: 341174 - RNA, 15 nt, Human herpesvirus 7
uugacucagauucga

SEQ ID NO: 341175 - RNA, 22 nt, Human herpesvirus 7
uugacuggguaggaaaauaagu

SEQ ID NO: 341176 - RNA, 14 nt, Human herpesvirus 7
uugagaaauaugaa

SEQ ID NO: 341177 - RNA, 17 nt, Human herpesvirus 7
uugagcuuuucuuuccg

SEQ ID NO: 341178 - RNA, 19 nt, Human herpesvirus 7
uugaggaaaugucuuuguc

SEQ ID NO: 341179 - RNA, 21 nt, Human herpesvirus 7
uugagucucagagaacuagaa

SEQ ID NO: 341180 - RNA, 15 nt, Human herpesvirus 7
uugagugugcaaugg

SEQ ID NO: 341181 - RNA, 20 nt, Human herpesvirus 7
uugauaagacugaagacaaa

SEQ ID NO: 341182 - RNA, 17 nt, Human herpesvirus 7
uugauacaacuaaaaau

SEQ ID NO: 341183 - RNA, 20 nt, Human herpesvirus 7
uugauccuccuugccugcaa

SEQ ID NO: 341184 - RNA, 12 nt, Human herpesvirus 7
uugaugaagaca

SEQ ID NO: 341185 - RNA, 20 nt, Human herpesvirus 7
uugaugaaucaaaauuagac

SEQ ID NO: 341186 - RNA, 14 nt, Human herpesvirus 7
uugauuauuuugau

SEQ ID NO: 341187 - RNA, 18 nt, Human herpesvirus 7
uugcaaauguuccacgau

SEQ ID NO: 341188 - RNA, 15 nt, Human herpesvirus 7
uugcaacaaaaucua

SEQ ID NO: 341189 - RNA, 22 nt, Human herpesvirus 7
uugcaacaaaaucuaaggguau

SEQ ID NO: 341190 - RNA, 15 nt, Human herpesvirus 7
uugcaacaaauucca

SEQ ID NO: 341191 - RNA, 16 nt, Human herpesvirus 7
uugcaacaaauuccau

SEQ ID NO: 341192 - RNA, 12 nt, Human herpesvirus 7
uugcaauaugcu

SEQ ID NO: 341193 - RNA, 14 nt, Human herpesvirus 7
uugcaaugaaaggu

SEQ ID NO: 341194 - RNA, 20 nt, Human herpesvirus 7
uugcaaugcaaacuucugau

SEQ ID NO: 341195 - RNA, 17 nt, Human herpesvirus 7
uugcacaucuagauaaa

SEQ ID NO: 341196 - RNA, 18 nt, Human herpesvirus 7
uugcagaaaaaauaauau

SEQ ID NO: 341197 - RNA, 13 nt, Human herpesvirus 7
uugcagaggacca

SEQ ID NO: 341198 - RNA, 18 nt, Human herpesvirus 7
uugcagccagaacucaau

SEQ ID NO: 341199 - RNA, 12 nt, Human herpesvirus 7
uugcagcccaau

SEQ ID NO: 341200 - RNA, 16 nt, Human herpesvirus 7
uugcauaauccucuga

SEQ ID NO: 341201 - RNA, 11 nt, Human herpesvirus 7
uugcauaucau

SEQ ID NO: 341202 - RNA, 21 nt, Human herpesvirus 7
uugcaucaggaaaaucuauca

SEQ ID NO: 341203 - RNA, 22 nt, Human herpesvirus 7
uugcaucgaauuuuacaaugca

SEQ ID NO: 341204 - RNA, 15 nt, Human herpesvirus 7
uugcauugcauauca

SEQ ID NO: 341205 - RNA, 16 nt, Human herpesvirus 7
uugccauuguguuaaa

SEQ ID NO: 341206 - RNA, 16 nt, Human herpesvirus 7
uugcuaaccacugugu

SEQ ID NO: 341207 - RNA, 19 nt, Human herpesvirus 7
uugcuaaccacugugucau

SEQ ID NO: 341208 - RNA, 14 nt, Human herpesvirus 7
uugcuagcugugau

SEQ ID NO: 341209 - RNA, 16 nt, Human herpesvirus 7
uugcuauucacgcuuc

SEQ ID NO: 341210 - RNA, 13 nt, Human herpesvirus 7
uugcugcugucuu

SEQ ID NO: 341211 - RNA, 16 nt, Human herpesvirus 7
uugcuuaaaacuuuga

SEQ ID NO: 341212 - RNA, 16 nt, Human herpesvirus 7
uugcuucuuucuccac

SEQ ID NO: 341213 - RNA, 15 nt, Human herpesvirus 7
uugcuugcacuguaa

SEQ ID NO: 341214 - RNA, 17 nt, Human herpesvirus 7
uugcuuggcugacauac

SEQ ID NO: 341215 - RNA, 19 nt, Human herpesvirus 7
uuggaaaaaugcugcaaug

SEQ ID NO: 341216 - RNA, 17 nt, Human herpesvirus 7
uuggaaaugagauuucu

SEQ ID NO: 341217 - RNA, 21 nt, Human herpesvirus 7
uuggaaauuacuggcagaaau

SEQ ID NO: 341218 - RNA, 19 nt, Human herpesvirus 7
uuggagacgaugagcauga

SEQ ID NO: 341219 - RNA, 16 nt, Human herpesvirus 7
uuggagagauagcauu

SEQ ID NO: 341220 - RNA, 16 nt, Human herpesvirus 7
uuggcaaacagucuga

SEQ ID NO: 341221 - RNA, 18 nt, Human herpesvirus 7
uuggcauuguaucuaccg

SEQ ID NO: 341222 - RNA, 18 nt, Human herpesvirus 7
uuggcgcucucuggccag

SEQ ID NO: 341223 - RNA, 13 nt, Human herpesvirus 7
uugggacaugauu

SEQ ID NO: 341224 - RNA, 15 nt, Human herpesvirus 7
uuguaaaaauaaaga

SEQ ID NO: 341225 - RNA, 13 nt, Human herpesvirus 7
uuguaaacaugaa

SEQ ID NO: 341226 - RNA, 15 nt, Human herpesvirus 7
uuguaccaaucaagc

SEQ ID NO: 341227 - RNA, 17 nt, Human herpesvirus 7
uuguacuguaauuucuc

SEQ ID NO: 341228 - RNA, 22 nt, Human herpesvirus 7
uuguacuguaauuucucaaauc

SEQ ID NO: 341229 - RNA, 23 nt, Human herpesvirus 7
uuguacuguaauuucucaaauca

SEQ ID NO: 341230 - RNA, 20 nt, Human herpesvirus 7
uuguauaugaugacaacaaa

SEQ ID NO: 341231 - RNA, 23 nt, Human herpesvirus 7
uuguaugcuauuaaaugauuuca

SEQ ID NO: 341232 - RNA, 14 nt, Human herpesvirus 7
uuguaugucuacaa

SEQ ID NO: 341233 - RNA, 18 nt, Human herpesvirus 7
uuguauuaaaggaaacau

SEQ ID NO: 341234 - RNA, 13 nt, Human herpesvirus 7
uugucggugaaug

SEQ ID NO: 341235 - RNA, 15 nt, Human herpesvirus 7
uugucuggucacaua

SEQ ID NO: 341236 - RNA, 16 nt, Human herpesvirus 7
uugucuuacagcacuu

SEQ ID NO: 341237 - RNA, 15 nt, Human herpesvirus 7
uugucuuugcucuca

SEQ ID NO: 341238 - RNA, 19 nt, Human herpesvirus 7
uugugacucggaaccgaga

SEQ ID NO: 341239 - RNA, 15 nt, Human herpesvirus 7
uugugauaugacuga

SEQ ID NO: 341240 - RNA, 11 nt, Human herpesvirus 7
uugugcaauuu

SEQ ID NO: 341241 - RNA, 20 nt, Human herpesvirus 7
uugugcaauuuggcucugau

SEQ ID NO: 341242 - RNA, 17 nt, Human herpesvirus 7
uugugcugugucaauaa

SEQ ID NO: 341243 - RNA, 15 nt, Human herpesvirus 7
uuguuaccuaaaccu

SEQ ID NO: 341244 - RNA, 22 nt, Human herpesvirus 7
uuguuaggccaguucuaucuca

SEQ ID NO: 341245 - RNA, 21 nt, Human herpesvirus 7
uuguucaaucacauacucuau

SEQ ID NO: 341246 - RNA, 14 nt, Human herpesvirus 7
uuguucauaaaccu

SEQ ID NO: 341247 - RNA, 15 nt, Human herpesvirus 7
uuguuuaagacauua

SEQ ID NO: 341248 - RNA, 22 nt, Human herpesvirus 7
uuguuucaauaugcaugcaauu

SEQ ID NO: 341249 - RNA, 17 nt, Human herpesvirus 7
uuuaaaaaaucuauuaa

SEQ ID NO: 341250 - RNA, 15 nt, Human herpesvirus 7
uuuaaaaaccaugaa

SEQ ID NO: 341251 - RNA, 20 nt, Human herpesvirus 7
uuuaaaauuaauaauauuag

SEQ ID NO: 341252 - RNA, 22 nt, Human herpesvirus 7
uuuaaaauuaauaauauuagua

SEQ ID NO: 341253 - RNA, 20 nt, Human herpesvirus 7
uuuaaaauuauuaauauuag

SEQ ID NO: 341254 - RNA, 22 nt, Human herpesvirus 7
uuuaaaauuauuaauauuagua

SEQ ID NO: 341255 - RNA, 13 nt, Human herpesvirus 7
uuuaaaauuucau

SEQ ID NO: 341256 - RNA, 18 nt, Human herpesvirus 7
uuuaaacagcguucaauc

SEQ ID NO: 341257 - RNA, 21 nt, Human herpesvirus 7
uuuaaacauuacgaacugaua

SEQ ID NO: 341258 - RNA, 21 nt, Human herpesvirus 7
uuuaaaggugguuacauaucc

SEQ ID NO: 341259 - RNA, 22 nt, Human herpesvirus 7
uuuaaaguagcugaauuguacg

SEQ ID NO: 341260 - RNA, 14 nt, Human herpesvirus 7
uuuaaaguaugcuu

SEQ ID NO: 341261 - RNA, 16 nt, Human herpesvirus 7
uuuaaauuauuauuag

SEQ ID NO: 341262 - RNA, 17 nt, Human herpesvirus 7
uuuaacaacagccaaau

SEQ ID NO: 341263 - RNA, 14 nt, Human herpesvirus 7
uuuaacgcugaauu

SEQ ID NO: 341264 - RNA, 22 nt, Human herpesvirus 7
uuuaacgguaacggauuuacau

SEQ ID NO: 341265 - RNA, 20 nt, Human herpesvirus 7
uuuaacuauuguccuuucaa

SEQ ID NO: 341266 - RNA, 19 nt, Human herpesvirus 7
uuuaacuggaauuauacac

SEQ ID NO: 341267 - RNA, 19 nt, Human herpesvirus 7
uuuaagaacagaaugauaa

SEQ ID NO: 341268 - RNA, 14 nt, Human herpesvirus 7
uuuaauagucuaaa

SEQ ID NO: 341269 - RNA, 17 nt, Human herpesvirus 7
uuuaauccguaucuaga

SEQ ID NO: 341270 - RNA, 17 nt, Human herpesvirus 7
uuuaaugaaaaagccau

SEQ ID NO: 341271 - RNA, 19 nt, Human herpesvirus 7
uuuaauggaagaacaacaa

SEQ ID NO: 341272 - RNA, 18 nt, Human herpesvirus 7
uuuaauugagauuauuca

SEQ ID NO: 341273 - RNA, 21 nt, Human herpesvirus 7
uuuuaccaaauauguggcaca

SEQ ID NO: 341274 - RNA, 15 nt, Human herpesvirus 7
uuuuacugucuuuag

SEQ ID NO: 341275 - RNA, 23 nt, Human herpesvirus 7
uuuuagacgacgucuucuucuga

SEQ ID NO: 341276 - RNA, 17 nt, Human herpesvirus 7
uuuuauaauuaugucca

SEQ ID NO: 341277 - RNA, 23 nt, Human herpesvirus 7
uuuuaucgaugagaauguugagc

SEQ ID NO: 341278 - RNA, 21 nt, Human herpesvirus 7
uuuuauucaaagcuucuacaa

SEQ ID NO: 341279 - RNA, 22 nt, Human herpesvirus 7
uuuuauuccgugcuguacugaa

SEQ ID NO: 341280 - RNA, 12 nt, Human herpesvirus 7
uuuuauuucaca

SEQ ID NO: 341281 - RNA, 22 nt, Human herpesvirus 7
uuuucaaacaugauugguaaaa

SEQ ID NO: 341282 - RNA, 21 nt, Human herpesvirus 7
uuuucaggcuaugacuuugaa

SEQ ID NO: 341283 - RNA, 13 nt, Human herpesvirus 7
uuuucaugguauu

SEQ ID NO: 341284 - RNA, 12 nt, Human herpesvirus 7
uuuucgauucca

SEQ ID NO: 341285 - RNA, 21 nt, Human herpesvirus 7
uuuucuaaaucacuaguccua

SEQ ID NO: 341286 - RNA, 13 nt, Human herpesvirus 7
uuuucuccaugca

SEQ ID NO: 341287 - RNA, 15 nt, Human herpesvirus 7
uuuucucgugauuag

SEQ ID NO: 341288 - RNA, 17 nt, Human herpesvirus 7
uuuucugagugcuaaaa

SEQ ID NO: 341289 - RNA, 18 nt, Human herpesvirus 7
uuuugaaaauuucuauca

SEQ ID NO: 341290 - RNA, 22 nt, Human herpesvirus 7
uuuugauaagacugaagacaaa

SEQ ID NO: 341291 - RNA, 14 nt, Human herpesvirus 7
uuuugaucuuguca

SEQ ID NO: 341292 - RNA, 21 nt, Human herpesvirus 7
uuuugaugugcaacauaacca

SEQ ID NO: 341293 - RNA, 13 nt, Human herpesvirus 7
uuuugauuuugcc

SEQ ID NO: 341294 - RNA, 18 nt, Human herpesvirus 7
uuuugcaauaugcuagaa

SEQ ID NO: 341295 - RNA, 19 nt, Human herpesvirus 7
uuuugcacaucuagauaaa

SEQ ID NO: 341296 - RNA, 18 nt, Human herpesvirus 7
uuuugcagaaauuguucc

SEQ ID NO: 341297 - RNA, 20 nt, Human herpesvirus 7
uuuugcuuuccaucaucacg

SEQ ID NO: 341298 - RNA, 17 nt, Human herpesvirus 7
uuuuggcgaaacaauac

SEQ ID NO: 341299 - RNA, 20 nt, Human herpesvirus 7
uuuugugccccaaacuguau

SEQ ID NO: 341300 - RNA, 20 nt, Human herpesvirus 7
uuuuguuacgucaacuaaaa

SEQ ID NO: 341301 - RNA, 23 nt, Human herpesvirus 7
uuuuguuuuauagaaguaccgug

SEQ ID NO: 341302 - RNA, 18 nt, Human herpesvirus 7
uuuuuaaaaucuacugua

SEQ ID NO: 341303 - RNA, 19 nt, Human herpesvirus 7
uuuuucacagaaaucccaa

SEQ ID NO: 341304 - RNA, 14 nt, Human herpesvirus 7
uuuuucucugauca

SEQ ID NO: 341305 - RNA, 12 nt, Human herpesvirus 7
uuuuuucauaca

SEQ ID NO: 341306 - RNA, 21 nt, Human herpesvirus 7
uuuuuucccagagaccuauga

SEQ ID NO: 341307 - RNA, 13 nt, Human herpesvirus 7
uuuuuugccuuca

SEQ ID NO: 341308 - RNA, 13 nt, Human herpesvirus 7
auugacagcacca

SEQ ID NO: 341309 - RNA, 19 nt, Human herpesvirus 7
auugacauaaucauggaaa

SEQ ID NO: 341310 - RNA, 19 nt, Human herpesvirus 7
auugacuaugaauuugaca

SEQ ID NO: 341311 - RNA, 13 nt, Human herpesvirus 7
auugagucuucau

SEQ ID NO: 341312 - RNA, 16 nt, Human herpesvirus 7
auugaucacuuugcau

SEQ ID NO: 341313 - RNA, 17 nt, Human herpesvirus 7
auugaucacuuugcauc

SEQ ID NO: 341314 - RNA, 20 nt, Human herpesvirus 7
auugauccuccuugccugca

SEQ ID NO: 341315 - RNA, 14 nt, Human herpesvirus 7
auugauccugcuau

SEQ ID NO: 341316 - RNA, 17 nt, Human herpesvirus 7
auugauccugcuauuca

SEQ ID NO: 341317 - RNA, 20 nt, Human herpesvirus 7
auugcagacuaauuacagcu

SEQ ID NO: 341318 - RNA, 15 nt, Human herpesvirus 7
auugcauaucaugau

SEQ ID NO: 341319 - RNA, 18 nt, Human herpesvirus 7
auugcauaucaugauuau

SEQ ID NO: 341320 - RNA, 23 nt, Human herpesvirus 7
auugcccuuguguugucauacaa

SEQ ID NO: 341321 - RNA, 15 nt, Human herpesvirus 7
auugccgauuccuac

SEQ ID NO: 341322 - RNA, 19 nt, Human herpesvirus 7
auugccuuucccagaagaa

SEQ ID NO: 341323 - RNA, 15 nt, Human herpesvirus 7
auugcuagucucaau

SEQ ID NO: 341324 - RNA, 15 nt, Human herpesvirus 7
auugcugucuauuuc

SEQ ID NO: 341325 - RNA, 16 nt, Human herpesvirus 7
auugcugucuauuuca

SEQ ID NO: 341326 - RNA, 17 nt, Human herpesvirus 7
auugcugucuauuucaa

SEQ ID NO: 341327 - RNA, 14 nt, Human herpesvirus 7
auugcuuaacuuuu

SEQ ID NO: 341328 - RNA, 18 nt, Human herpesvirus 7
auugcuuuuagaaaauca

SEQ ID NO: 341329 - RNA, 21 nt, Human herpesvirus 7
auuggauuuucuguaaucaua

SEQ ID NO: 341330 - RNA, 17 nt, Human herpesvirus 7
auugggucauacguuau

SEQ ID NO: 341331 - RNA, 18 nt, Human herpesvirus 7
auuguacauuuuaccaaa

SEQ ID NO: 341332 - RNA, 22 nt, Human herpesvirus 7
auuguauaugaugacaacaaag

SEQ ID NO: 341333 - RNA, 15 nt, Human herpesvirus 7
auuguauuugucucu

SEQ ID NO: 341334 - RNA, 16 nt, Human herpesvirus 7
auugugaagucuuuau

SEQ ID NO: 341335 - RNA, 19 nt, Human herpesvirus 7
auugugaguuucuacaugu

SEQ ID NO: 341336 - RNA, 18 nt, Human herpesvirus 7
auugugguacaacaaaca

SEQ ID NO: 341337 - RNA, 20 nt, Human herpesvirus 7
auugugugucuuguguucaa

SEQ ID NO: 341338 - RNA, 20 nt, Human herpesvirus 7
auuuaaaaaaaaaaccacaa

SEQ ID NO: 341339 - RNA, 20 nt, Human herpesvirus 7
auuuaaacagcguucaauca

SEQ ID NO: 341340 - RNA, 18 nt, Human herpesvirus 7
auuuaaaccgaguguaau

SEQ ID NO: 341341 - RNA, 16 nt, Human herpesvirus 7
auuuaacaaagugcau

SEQ ID NO: 341342 - RNA, 13 nt, Human herpesvirus 7
auuuaagaauuua

SEQ ID NO: 341343 - RNA, 14 nt, Human herpesvirus 7
auuuaagaauuuaa

SEQ ID NO: 341344 - RNA, 19 nt, Human herpesvirus 7
auuuaagaauuuaaucaua

SEQ ID NO: 341345 - RNA, 21 nt, Human herpesvirus 7
aucacaguugcuugugaagga

SEQ ID NO: 341346 - RNA, 15 nt, Human herpesvirus 7
aucacaucagauaca

SEQ ID NO: 341347 - RNA, 15 nt, Human herpesvirus 7
aucacauuaucuuga

SEQ ID NO: 341348 - RNA, 14 nt, Human herpesvirus 7
aucaccauaugcca

SEQ ID NO: 341349 - RNA, 19 nt, Human herpesvirus 7
aucaccauaugccaaugaa

SEQ ID NO: 341350 - RNA, 16 nt, Human herpesvirus 7
aucacgcuagccucau

SEQ ID NO: 341351 - RNA, 15 nt, Human herpesvirus 7
aucacuuugcaucaa

SEQ ID NO: 341352 - RNA, 20 nt, Human herpesvirus 7
aucagacuaaauauggagca

SEQ ID NO: 341353 - RNA, 19 nt, Human herpesvirus 7
aucaguacaacgacauuga

SEQ ID NO: 341354 - RNA, 17 nt, Human herpesvirus 7
aucauaauuacauugca

SEQ ID NO: 341355 - RNA, 20 nt, Human herpesvirus 7
aucauaccauaaauaccaaa

SEQ ID NO: 341356 - RNA, 23 nt, Human herpesvirus 7
aucauaccauaaauaccaaaaac

SEQ ID NO: 341357 - RNA, 13 nt, Human herpesvirus 7
aucauacguuuac

SEQ ID NO: 341358 - RNA, 22 nt, Human herpesvirus 7
aucauagcaggaagcacaaauc

SEQ ID NO: 341359 - RNA, 12 nt, Human herpesvirus 7
aucauauaugca

SEQ ID NO: 341360 - RNA, 18 nt, Human herpesvirus 7
aucaugaaaacaguggga

SEQ ID NO: 341361 - RNA, 15 nt, Human herpesvirus 7
aucauggaaaaugga

SEQ ID NO: 341362 - RNA, 19 nt, Human herpesvirus 7
aucauggaaaauggagcau

SEQ ID NO: 341363 - RNA, 22 nt, Human herpesvirus 7
auccaaaaucagacaauuucac

SEQ ID NO: 341364 - RNA, 18 nt, Human herpesvirus 7
auccaaaccggccaauga

SEQ ID NO: 341365 - RNA, 23 nt, Human herpesvirus 7
auccaacagaauacuacucagaa

SEQ ID NO: 341366 - RNA, 19 nt, Human herpesvirus 7
auccaaguuuuaacaaucu

SEQ ID NO: 341367 - RNA, 17 nt, Human herpesvirus 7
auccaaguuuuacagaa

SEQ ID NO: 341368 - RNA, 21 nt, Human herpesvirus 7
auccaauaaugcaucauagag

SEQ ID NO: 341369 - RNA, 12 nt, Human herpesvirus 7
auccacauacuc

SEQ ID NO: 341370 - RNA, 15 nt, Human herpesvirus 7
auccagagucucuaa

SEQ ID NO: 341371 - RNA, 18 nt, Human herpesvirus 7
auccagcaaagacuugca

SEQ ID NO: 341372 - RNA, 20 nt, Human herpesvirus 7
auccagcaaagacuugcaaa

SEQ ID NO: 341373 - RNA, 19 nt, Human herpesvirus 7
auccaguacgucuugcugu

SEQ ID NO: 341374 - RNA, 19 nt, Human herpesvirus 7
auccaucuguaacagaccu

SEQ ID NO: 341375 - RNA, 18 nt, Human herpesvirus 7
auccauuugugauguacu

SEQ ID NO: 341376 - RNA, 20 nt, Human herpesvirus 7
aucccuagaagaugacucau

SEQ ID NO: 341377 - RNA, 16 nt, Human herpesvirus 7
aucccuauugcaucaa

SEQ ID NO: 341378 - RNA, 17 nt, Human herpesvirus 7
aucccugcugauacaag

SEQ ID NO: 341379 - RNA, 13 nt, Human herpesvirus 7
auccgaaucuguu

SEQ ID NO: 341380 - RNA, 16 nt, Human herpesvirus 7
auccgccgacaagaaa

SEQ ID NO: 341381 - RNA, 21 nt, Human herpesvirus 7
auccgcuugagagccauaguc

SEQ ID NO: 341382 - RNA, 18 nt, Human herpesvirus 7
auccgucaccgacaauau

SEQ ID NO: 341383 - RNA, 21 nt, Human herpesvirus 7
auccuaacaauaaaguuucca

SEQ ID NO: 341384 - RNA, 15 nt, Human herpesvirus 7
auccuaugacugaga

SEQ ID NO: 341385 - RNA, 18 nt, Human herpesvirus 7
auccucagaauguacaca

SEQ ID NO: 341386 - RNA, 16 nt, Human herpesvirus 7
auccuccuugccugca

SEQ ID NO: 341387 - RNA, 18 nt, Human herpesvirus 7
auccugcuauucauuuca

SEQ ID NO: 341388 - RNA, 15 nt, Human herpesvirus 7
aucgacaaacagaaa

SEQ ID NO: 341389 - RNA, 16 nt, Human herpesvirus 7
aucgaggaagcuuucg

SEQ ID NO: 341390 - RNA, 14 nt, Human herpesvirus 7
aucgcgauguuggc

SEQ ID NO: 341391 - RNA, 20 nt, Human herpesvirus 7
aucguguguuacuauuugac

SEQ ID NO: 341392 - RNA, 20 nt, Human herpesvirus 7
aucuaaagacacuuauuuga

SEQ ID NO: 341393 - RNA, 20 nt, Human herpesvirus 7
aucuaagucuacaucaucaa

SEQ ID NO: 341394 - RNA, 17 nt, Human herpesvirus 7
aucuaauauuauaucua

SEQ ID NO: 341395 - RNA, 16 nt, Human herpesvirus 7
aucuaauugcagacua

SEQ ID NO: 341396 - RNA, 17 nt, Human herpesvirus 7
aucuaccgcuguacaau

SEQ ID NO: 341397 - RNA, 22 nt, Human herpesvirus 7
aucuaccgcuguacaaugcugu

SEQ ID NO: 341398 - RNA, 13 nt, Human herpesvirus 7
aucuagacccuuu

SEQ ID NO: 341399 - RNA, 15 nt, Human herpesvirus 7
aucuaggucuuccac

SEQ ID NO: 341400 - RNA, 20 nt, Human herpesvirus 7
aucuaggucuuccacuguug

SEQ ID NO: 341401 - RNA, 14 nt, Human herpesvirus 7
aucuauaaacauuc

SEQ ID NO: 341402 - RNA, 15 nt, Human herpesvirus 7
aucuauaaacauucu

SEQ ID NO: 341403 - RNA, 20 nt, Human herpesvirus 7
aucuauaguuuguauuucau

SEQ ID NO: 341404 - RNA, 12 nt, Human herpesvirus 7
aucuauauuuga

SEQ ID NO: 341405 - RNA, 13 nt, Human herpesvirus 7
aucuauauuugau

SEQ ID NO: 341406 - RNA, 17 nt, Human herpesvirus 7
aucuauuuaaaauauua

SEQ ID NO: 341407 - RNA, 19 nt, Human herpesvirus 7
aucucaauuaaaacaucuc

SEQ ID NO: 341408 - RNA, 20 nt, Human herpesvirus 7
aucucaauuaaaacaucucu

SEQ ID NO: 341409 - RNA, 21 nt, Human herpesvirus 7
aucucacuucagaagauuugu

SEQ ID NO: 341410 - RNA, 15 nt, Human herpesvirus 7
aucuccuauguugca

SEQ ID NO: 341411 - RNA, 16 nt, Human herpesvirus 7
aucuccuauguugcaa

SEQ ID NO: 341412 - RNA, 14 nt, Human herpesvirus 7
aucucguaauuuaa

SEQ ID NO: 341413 - RNA, 13 nt, Human herpesvirus 7
aucugacuugccc

SEQ ID NO: 341414 - RNA, 23 nt, Human herpesvirus 7
aucugauguagauuuagauuuaa

SEQ ID NO: 341415 - RNA, 12 nt, Human herpesvirus 7
aucugauuuaua

SEQ ID NO: 341416 - RNA, 15 nt, Human herpesvirus 7
aucugcaaaaaacca

SEQ ID NO: 341417 - RNA, 13 nt, Human herpesvirus 7
aucugugacuuag

SEQ ID NO: 341418 - RNA, 16 nt, Human herpesvirus 7
aucuguuuuuuuucuc

SEQ ID NO: 341419 - RNA, 16 nt, Human herpesvirus 7
aucuuaaaaguacaaa

SEQ ID NO: 341420 - RNA, 12 nt, Human herpesvirus 7
aucuuacuuccu

SEQ ID NO: 341421 - RNA, 19 nt, Human herpesvirus 7
aucuucaggaauaucaaga

SEQ ID NO: 341422 - RNA, 22 nt, Human herpesvirus 7
aucuucugcuaacucauaauua

SEQ ID NO: 341423 - RNA, 19 nt, Human herpesvirus 7
aucuugaauuccgauuuaa

SEQ ID NO: 341424 - RNA, 17 nt, Human herpesvirus 7
aucuugagaaauaugaa

SEQ ID NO: 341425 - RNA, 13 nt, Human herpesvirus 7
aucuuggcauuga

SEQ ID NO: 341426 - RNA, 23 nt, Human herpesvirus 7
aucuugugaaguuugcugaaaua

SEQ ID NO: 341427 - RNA, 20 nt, Human herpesvirus 7
aucuuuaauaaaaacaaaga

SEQ ID NO: 341428 - RNA, 11 nt, Human herpesvirus 7
aucuuuacuuu

SEQ ID NO: 341429 - RNA, 21 nt, Human herpesvirus 7
aucuuuacuuucauagcuuaa

SEQ ID NO: 341430 - RNA, 20 nt, Human herpesvirus 7
aucuuuaucuuugucacuua

SEQ ID NO: 341431 - RNA, 21 nt, Human herpesvirus 7
auguugcuaguaugucagauu

SEQ ID NO: 341432 - RNA, 16 nt, Human herpesvirus 7
auguuuccgcauaaaa

SEQ ID NO: 341433 - RNA, 22 nt, Human herpesvirus 7
auguuuccgcauaaaaaaucua

SEQ ID NO: 341434 - RNA, 19 nt, Human herpesvirus 7
auguuuuaccgugucuucu

SEQ ID NO: 341435 - RNA, 22 nt, Human herpesvirus 7
auguuuucuuagaugcauccaa

SEQ ID NO: 341436 - RNA, 17 nt, Human herpesvirus 7
auguuuugcaagcacau

SEQ ID NO: 341437 - RNA, 15 nt, Human herpesvirus 7
auuaaacaaucugga

SEQ ID NO: 341438 - RNA, 22 nt, Human herpesvirus 7
auuaaacaaucuggacauuuca

SEQ ID NO: 341439 - RNA, 13 nt, Human herpesvirus 7
auuaaacuaggcu

SEQ ID NO: 341440 - RNA, 16 nt, Human herpesvirus 7
auuaaaggaaacauuu

SEQ ID NO: 341441 - RNA, 17 nt, Human herpesvirus 7
auuaaaggaaacauuuc

SEQ ID NO: 341442 - RNA, 18 nt, Human herpesvirus 7
auuaaaggaaacauuucu

SEQ ID NO: 341443 - RNA, 15 nt, Human herpesvirus 7
auuaaauacuugcaa

SEQ ID NO: 341444 - RNA, 20 nt, Human herpesvirus 7
auuaaauacuugcaaugcaa

SEQ ID NO: 341445 - RNA, 14 nt, Human herpesvirus 7
auuaacagcucuau

SEQ ID NO: 341446 - RNA, 17 nt, Human herpesvirus 7
auuaacauuaaccacaa

SEQ ID NO: 341447 - RNA, 15 nt, Human herpesvirus 7
auuaacuauaucauc

SEQ ID NO: 341448 - RNA, 22 nt, Human herpesvirus 7
auuaauaaaaagcccaugaaca

SEQ ID NO: 341449 - RNA, 23 nt, Human herpesvirus 7
auuaauaaaaagcccaugaacac

SEQ ID NO: 341450 - RNA, 16 nt, Human herpesvirus 7
auuaauacguccaaaa

SEQ ID NO: 341451 - RNA, 13 nt, Human herpesvirus 7
auuaaucugcaua

SEQ ID NO: 341452 - RNA, 16 nt, Human herpesvirus 7
auuaaucugcauauaa

SEQ ID NO: 341453 - RNA, 12 nt, Human herpesvirus 7
auuaauuuccac

SEQ ID NO: 341454 - RNA, 23 nt, Human herpesvirus 7
auuaauuuccacguuuuuuagcu

SEQ ID NO: 341455 - RNA, 22 nt, Human herpesvirus 7
auuaauuugguaucacuuccug

SEQ ID NO: 341456 - RNA, 22 nt, Human herpesvirus 7
auuacacaaauugauccugcua

SEQ ID NO: 341457 - RNA, 21 nt, Human herpesvirus 7
auuacgucaucccugcugaua

SEQ ID NO: 341458 - RNA, 18 nt, Human herpesvirus 7
auuacucgugaaguaaau

SEQ ID NO: 341459 - RNA, 23 nt, Human herpesvirus 7
auuacucgugaaguaaauucagc

SEQ ID NO: 341460 - RNA, 20 nt, Human herpesvirus 7
auuacucguguugcaaauca

SEQ ID NO: 341461 - RNA, 21 nt, Human herpesvirus 7
auuacuucuuugacaaaaaug

SEQ ID NO: 341462 - RNA, 20 nt, Human herpesvirus 7
auuagaaagcucacuucaaa

SEQ ID NO: 341463 - RNA, 14 nt, Human herpesvirus 7
auuagauaaugaca

SEQ ID NO: 341464 - RNA, 21 nt, Human herpesvirus 7
caaugcagaaugcguaacuuu

SEQ ID NO: 341465 - RNA, 22 nt, Human herpesvirus 7
caaugccaauugaagaagugca

SEQ ID NO: 341466 - RNA, 14 nt, Human herpesvirus 7
caauggaacagcaa

SEQ ID NO: 341467 - RNA, 14 nt, Human herpesvirus 7
caauguaugugcau

SEQ ID NO: 341468 - RNA, 19 nt, Human herpesvirus 7
caauguugccuucuaaaac

SEQ ID NO: 341469 - RNA, 13 nt, Human herpesvirus 7
caauuaaugcauu

SEQ ID NO: 341470 - RNA, 14 nt, Human herpesvirus 7
caauuaaugcauug

SEQ ID NO: 341471 - RNA, 16 nt, Human herpesvirus 7
caauuacaaaauguau

SEQ ID NO: 341472 - RNA, 16 nt, Human herpesvirus 7
caauuacuugucuuac

SEQ ID NO: 341473 - RNA, 15 nt, Human herpesvirus 7
caauucaucaggaca

SEQ ID NO: 341474 - RNA, 20 nt, Human herpesvirus 7
caauucuauuuuaaaaacca

SEQ ID NO: 341475 - RNA, 13 nt, Human herpesvirus 7
caauugauucaca

SEQ ID NO: 341476 - RNA, 23 nt, Human herpesvirus 7
caauugcccuuguguugucauac

SEQ ID NO: 341477 - RNA, 13 nt, Human herpesvirus 7
caauuguaaaaau

SEQ ID NO: 341478 - RNA, 19 nt, Human herpesvirus 7
caauuguaaaaauaaagac

SEQ ID NO: 341479 - RNA, 22 nt, Human herpesvirus 7
caauuucuauuagauaaugaca

SEQ ID NO: 341480 - RNA, 23 nt, Human herpesvirus 7
caauuuuaacgauuccaaaccua

SEQ ID NO: 341481 - RNA, 16 nt, Human herpesvirus 7
caauuuuaaugugcuu

SEQ ID NO: 341482 - RNA, 12 nt, Human herpesvirus 7
caauuuucauaa

SEQ ID NO: 341483 - RNA, 18 nt, Human herpesvirus 7
caauuuuucgcugaagaa

SEQ ID NO: 341484 - RNA, 22 nt, Human herpesvirus 7
caauuuuucucccgcagagauu

SEQ ID NO: 341485 - RNA, 12 nt, Human herpesvirus 7
cacaaaaaucaa

SEQ ID NO: 341486 - RNA, 12 nt, Human herpesvirus 7
cacaaaugucuu

SEQ ID NO: 341487 - RNA, 19 nt, Human herpesvirus 7
cacaacauauagauaauga

SEQ ID NO: 341488 - RNA, 20 nt, Human herpesvirus 7
cacaacauccagagucucua

SEQ ID NO: 341489 - RNA, 17 nt, Human herpesvirus 7
cacaaguuaauuuugca

SEQ ID NO: 341490 - RNA, 12 nt, Human herpesvirus 7
cacaauuacaca

SEQ ID NO: 341491 - RNA, 13 nt, Human herpesvirus 7
cacaauuacacaa

SEQ ID NO: 341492 - RNA, 17 nt, Human herpesvirus 7
cacaauuguauuucagu

SEQ ID NO: 341493 - RNA, 21 nt, Human herpesvirus 7
cacacaaaggccaggccucuc

SEQ ID NO: 341494 - RNA, 18 nt, Human herpesvirus 7
cacacacguuuucuguca

SEQ ID NO: 341495 - RNA, 13 nt, Human herpesvirus 7
cacacguacaaua

SEQ ID NO: 341496 - RNA, 23 nt, Human herpesvirus 7
cacacguuuucugucagaacuuu

SEQ ID NO: 341497 - RNA, 14 nt, Human herpesvirus 7
cacacuuauuccag

SEQ ID NO: 341498 - RNA, 22 nt, Human herpesvirus 7
cacacuuauuccagauaugaca

SEQ ID NO: 341499 - RNA, 19 nt, Human herpesvirus 7
cacagauauucuaacaaau

SEQ ID NO: 341500 - RNA, 21 nt, Human herpesvirus 7
cacagcuagauugacuaugaa

SEQ ID NO: 341501 - RNA, 23 nt, Human herpesvirus 7
cacaggaauugcugucuauuuca

SEQ ID NO: 341502 - RNA, 20 nt, Human herpesvirus 7
cacaguccucuagaucaaga

SEQ ID NO: 341503 - RNA, 20 nt, Human herpesvirus 7
cacauaaguugacaauguca

SEQ ID NO: 341504 - RNA, 22 nt, Human herpesvirus 7
cacauaaguugacaaugucaau

SEQ ID NO: 341505 - RNA, 14 nt, Human herpesvirus 7
cacauuaucuugac

SEQ ID NO: 341506 - RNA, 17 nt, Human herpesvirus 7
cacauugucacugcaaa

SEQ ID NO: 341507 - RNA, 16 nt, Human herpesvirus 7
cacauuuauccaucaa

SEQ ID NO: 341508 - RNA, 12 nt, Human herpesvirus 7
caccaauccuuu

SEQ ID NO: 341509 - RNA, 15 nt, Human herpesvirus 7
caccaauuucuauua

SEQ ID NO: 341510 - RNA, 14 nt, Human herpesvirus 7
caccauaugccaau

SEQ ID NO: 341511 - RNA, 15 nt, Human herpesvirus 7
caccauaugccaaug

SEQ ID NO: 341512 - RNA, 16 nt, Human herpesvirus 7
cacccuuuguuugaga

SEQ ID NO: 341513 - RNA, 17 nt, Human herpesvirus 7
caccgauuacuguauaa

SEQ ID NO: 341514 - RNA, 20 nt, Human herpesvirus 7
caccguugggaaagacguga

SEQ ID NO: 341515 - RNA, 14 nt, Human herpesvirus 7
cacgagaaaaauau

SEQ ID NO: 341516 - RNA, 19 nt, Human herpesvirus 7
cacgagacaaaaauaauau

SEQ ID NO: 341517 - RNA, 23 nt, Human herpesvirus 7
cacgaguacuccuucuaccucuu

SEQ ID NO: 341518 - RNA, 22 nt, Human herpesvirus 7
cacgcauauguacgugugcugc

SEQ ID NO: 341519 - RNA, 22 nt, Human herpesvirus 7
cacgccuacgcagcaauguaua

SEQ ID NO: 341520 - RNA, 13 nt, Human herpesvirus 7
cacgcuuccauca

SEQ ID NO: 341521 - RNA, 14 nt, Human herpesvirus 7
cacggaaaauuucc

SEQ ID NO: 341522 - RNA, 21 nt, Human herpesvirus 7
cacgugucgcagccauguugc

SEQ ID NO: 341523 - RNA, 14 nt, Human herpesvirus 7
cacgugugacuguu

SEQ ID NO: 341524 - RNA, 15 nt, Human herpesvirus 7
cacuaaaacaguaga

SEQ ID NO: 341525 - RNA, 15 nt, Human herpesvirus 7
cacuaauccaugaca

SEQ ID NO: 341526 - RNA, 22 nt, Human herpesvirus 7
cacuaauccaugacagagaauu

SEQ ID NO: 341527 - RNA, 20 nt, Human herpesvirus 7
cacuaaugccgucaucccaa

SEQ ID NO: 341528 - RNA, 13 nt, Human herpesvirus 7
cacuacaccaaua

SEQ ID NO: 341529 - RNA, 19 nt, Human herpesvirus 7
cacucuuucuucacgugug

SEQ ID NO: 341530 - RNA, 12 nt, Human herpesvirus 7
cacugaauguca

SEQ ID NO: 341531 - RNA, 13 nt, Human herpesvirus 7
cacugaaugucaa

SEQ ID NO: 341532 - RNA, 15 nt, Human herpesvirus 7
cacugcaaauuguaa

SEQ ID NO: 341533 - RNA, 17 nt, Human herpesvirus 7
cacugggagcaaugcau

SEQ ID NO: 341534 - RNA, 22 nt, Human herpesvirus 7
cacugggagcaaugcaugaugc

SEQ ID NO: 341535 - RNA, 17 nt, Human herpesvirus 7
cacuuaaagaacuccau

SEQ ID NO: 341536 - RNA, 13 nt, Human herpesvirus 7
cacuuauuugauu

SEQ ID NO: 341537 - RNA, 18 nt, Human herpesvirus 7
cacuugcuagcugugaua

SEQ ID NO: 341538 - RNA, 13 nt, Human herpesvirus 7
cauauagauuuau

SEQ ID NO: 341539 - RNA, 14 nt, Human herpesvirus 7
cauauaucuuugau

SEQ ID NO: 341540 - RNA, 22 nt, Human herpesvirus 7
cauauaugcauuauauccaaua

SEQ ID NO: 341541 - RNA, 20 nt, Human herpesvirus 7
cauauccgggggguugaaua

SEQ ID NO: 341542 - RNA, 12 nt, Human herpesvirus 7
cauaucuaugau

SEQ ID NO: 341543 - RNA, 23 nt, Human herpesvirus 7
cauaucuugcuuagaugcugaaa

SEQ ID NO: 341544 - RNA, 14 nt, Human herpesvirus 7
cauauguugauucu

SEQ ID NO: 341545 - RNA, 23 nt, Human herpesvirus 7
cauauuagauuauacaaauccaa

SEQ ID NO: 341546 - RNA, 13 nt, Human herpesvirus 7
cauauuugaacau

SEQ ID NO: 341547 - RNA, 16 nt, Human herpesvirus 7
caucaaaacauaucag

SEQ ID NO: 341548 - RNA, 24 nt, Human herpesvirus 7
caucaaaacauaucagauuuuauc

SEQ ID NO: 341549 - RNA, 21 nt, Human herpesvirus 7
caucaaaauuuuaauugugca

SEQ ID NO: 341550 - RNA, 13 nt, Human herpesvirus 7
caucaauguuuuc

SEQ ID NO: 341551 - RNA, 19 nt, Human herpesvirus 7
caucaauuuuaaugugcuu

SEQ ID NO: 341552 - RNA, 14 nt, Human herpesvirus 7
caucacaaaacucu

SEQ ID NO: 341553 - RNA, 18 nt, Human herpesvirus 7
caucaggacaaucaaaca

SEQ ID NO: 341554 - RNA, 16 nt, Human herpesvirus 7
caucauauacaauaau

SEQ ID NO: 341555 - RNA, 14 nt, Human herpesvirus 7
caucaucacgucau

SEQ ID NO: 341556 - RNA, 20 nt, Human herpesvirus 7
caucaucuuuuugaacagaa

SEQ ID NO: 341557 - RNA, 12 nt, Human herpesvirus 7
caucauuccuau

SEQ ID NO: 341558 - RNA, 14 nt, Human herpesvirus 7
caucauugaagaaa

SEQ ID NO: 341559 - RNA, 21 nt, Human herpesvirus 7
caucauugguaagaugcagac

SEQ ID NO: 341560 - RNA, 21 nt, Human herpesvirus 7
caucccaaaccaugauguuaa

SEQ ID NO: 341561 - RNA, 23 nt, Human herpesvirus 7
caucccaaaccaugauguuaaag

SEQ ID NO: 341562 - RNA, 14 nt, Human herpesvirus 7
caucccugcugaua

SEQ ID NO: 341563 - RNA, 21 nt, Human herpesvirus 7
caucccugcugauacaagaua

SEQ ID NO: 341564 - RNA, 14 nt, Human herpesvirus 7
caucgguagugucu

SEQ ID NO: 341565 - RNA, 19 nt, Human herpesvirus 7
caucgguagugucugguag

SEQ ID NO: 341566 - RNA, 22 nt, Human herpesvirus 7
caucgguuuucugagugcuaaa

SEQ ID NO: 341567 - RNA, 18 nt, Human herpesvirus 7
caucuauaaacauucuaa

SEQ ID NO: 341568 - RNA, 18 nt, Human herpesvirus 7
caucuccuguaaccauuu

SEQ ID NO: 341569 - RNA, 22 nt, Human herpesvirus 7
caucugguaaugucauaaaacu

SEQ ID NO: 341570 - RNA, 17 nt, Human herpesvirus 7
caucuuaaaaguacaaa

SEQ ID NO: 341571 - RNA, 17 nt, Human herpesvirus 7
caucuuaaaugucaaug

SEQ ID NO: 341572 - RNA, 23 nt, Human herpesvirus 7
caucuuaaguaaggaagguacau

SEQ ID NO: 341573 - RNA, 14 nt, Human herpesvirus 7
caucuucaauguuc

SEQ ID NO: 341574 - RNA, 16 nt, Human herpesvirus 7
caucuucaauguucga

SEQ ID NO: 341575 - RNA, 20 nt, Human herpesvirus 7
caucuuucuuauaucugaga

SEQ ID NO: 341576 - RNA, 21 nt, Human herpesvirus 7
caugaaaaauaaauacuauua

SEQ ID NO: 341577 - RNA, 15 nt, Human herpesvirus 7
caugaaaaauaugag

SEQ ID NO: 341578 - RNA, 18 nt, Human herpesvirus 7
caugaaaacagugggaau

SEQ ID NO: 341579 - RNA, 15 nt, Human herpesvirus 7
caugaaaagcaacuu

SEQ ID NO: 341580 - RNA, 19 nt, Human herpesvirus 7
caugaacacugcuucuccc

SEQ ID NO: 341581 - RNA, 22 nt, Human herpesvirus 7
caugaauuaucuagacccuuua

SEQ ID NO: 341582 - RNA, 14 nt, Human herpesvirus 7
auuuaagcuucaaa

SEQ ID NO: 341583 - RNA, 19 nt, Human herpesvirus 7
auuuacagcguggccuucu

SEQ ID NO: 341584 - RNA, 20 nt, Human herpesvirus 7
auuuaccuuuaauugauauu

SEQ ID NO: 341585 - RNA, 15 nt, Human herpesvirus 7
auuuacugauucuau

SEQ ID NO: 341586 - RNA, 18 nt, Human herpesvirus 7
auuuagcaccaacugaau

SEQ ID NO: 341587 - RNA, 20 nt, Human herpesvirus 7
auuuagcuaauucauuguau

SEQ ID NO: 341588 - RNA, 17 nt, Human herpesvirus 7
auuuauauauggcaaua

SEQ ID NO: 341589 - RNA, 19 nt, Human herpesvirus 7
auuuauauauggcaauaaa

SEQ ID NO: 341590 - RNA, 15 nt, Human herpesvirus 7
auuuauccaucaaaa

SEQ ID NO: 341591 - RNA, 13 nt, Human herpesvirus 7
auuuaugcuuuaa

SEQ ID NO: 341592 - RNA, 23 nt, Human herpesvirus 7
auuuauugagcaauugauucaca

SEQ ID NO: 341593 - RNA, 13 nt, Human herpesvirus 7
auuuauugcuuaa

SEQ ID NO: 341594 - RNA, 20 nt, Human herpesvirus 7
auuuauuuuuuccaugucac

SEQ ID NO: 341595 - RNA, 21 nt, Human herpesvirus 7
auuuauuuuuuccaugucaca

SEQ ID NO: 341596 - RNA, 19 nt, Human herpesvirus 7
auuucaaacguaaugcaaa

SEQ ID NO: 341597 - RNA, 18 nt, Human herpesvirus 7
auuucaauaaucaaugca

SEQ ID NO: 341598 - RNA, 17 nt, Human herpesvirus 7
auuucaauuaaugcauu

SEQ ID NO: 341599 - RNA, 22 nt, Human herpesvirus 7
auuucacauauaggaacaaauc

SEQ ID NO: 341600 - RNA, 19 nt, Human herpesvirus 7
auuucagaauuuccagaag

SEQ ID NO: 341601 - RNA, 14 nt, Human herpesvirus 7
auuucagaugacaa

SEQ ID NO: 341602 - RNA, 18 nt, Human herpesvirus 7
auuuccgaccugagauga

SEQ ID NO: 341603 - RNA, 14 nt, Human herpesvirus 7
auuucggguugcac

SEQ ID NO: 341604 - RNA, 20 nt, Human herpesvirus 7
auuucuaaauaugaugaaac

SEQ ID NO: 341605 - RNA, 15 nt, Human herpesvirus 7
auuucuauaaucacg

SEQ ID NO: 341606 - RNA, 20 nt, Human herpesvirus 7
auuucuauuagauaaugaca

SEQ ID NO: 341607 - RNA, 22 nt, Human herpesvirus 7
auuucuauuagauaaugacaaa

SEQ ID NO: 341608 - RNA, 22 nt, Human herpesvirus 7
auuucuggcaacaguucaaaaa

SEQ ID NO: 341609 - RNA, 15 nt, Human herpesvirus 7
auuucuggcaauaaa

SEQ ID NO: 341610 - RNA, 13 nt, Human herpesvirus 7
auuucugucaucu

SEQ ID NO: 341611 - RNA, 19 nt, Human herpesvirus 7
auuugaaaaaaagauuuaa

SEQ ID NO: 341612 - RNA, 22 nt, Human herpesvirus 7
auuugaauauugcuagucucaa

SEQ ID NO: 341613 - RNA, 17 nt, Human herpesvirus 7
auuugaaugaacaaaua

SEQ ID NO: 341614 - RNA, 18 nt, Human herpesvirus 7
auuugaaugaacaaauaa

SEQ ID NO: 341615 - RNA, 16 nt, Human herpesvirus 7
auuugauuccaucuca

SEQ ID NO: 341616 - RNA, 17 nt, Human herpesvirus 7
auuugauuccaucucac

SEQ ID NO: 341617 - RNA, 12 nt, Human herpesvirus 7
auuugauugauc

SEQ ID NO: 341618 - RNA, 16 nt, Human herpesvirus 7
auuugcauguugcuag

SEQ ID NO: 341619 - RNA, 20 nt, Human herpesvirus 7
auuugcugaacucugucauc

SEQ ID NO: 341620 - RNA, 15 nt, Human herpesvirus 7
auuugcuugcugaau

SEQ ID NO: 341621 - RNA, 16 nt, Human herpesvirus 7
auuugcuuuaccccaa

SEQ ID NO: 341622 - RNA, 20 nt, Human herpesvirus 7
auuuggcgccaaaaaaacac

SEQ ID NO: 341623 - RNA, 13 nt, Human herpesvirus 7
auuugggaaaaua

SEQ ID NO: 341624 - RNA, 17 nt, Human herpesvirus 7
auuugguacuguagaua

SEQ ID NO: 341625 - RNA, 23 nt, Human herpesvirus 7
auuugguaucacuuccuguccaa

SEQ ID NO: 341626 - RNA, 18 nt, Human herpesvirus 7
auuugguguacuacauau

SEQ ID NO: 341627 - RNA, 20 nt, Human herpesvirus 7
auuugguguacuacauauua

SEQ ID NO: 341628 - RNA, 18 nt, Human herpesvirus 7
auuuguaucuaugacaga

SEQ ID NO: 341629 - RNA, 22 nt, Human herpesvirus 7
auuuguucaaaauauuuaucug

SEQ ID NO: 341630 - RNA, 15 nt, Human herpesvirus 7
auuuguuccaaacuc

SEQ ID NO: 341631 - RNA, 19 nt, Human herpesvirus 7
auuuguuuguucuguuuau

SEQ ID NO: 341632 - RNA, 17 nt, Human herpesvirus 7
auuuuaaaaaagacacc

SEQ ID NO: 341633 - RNA, 15 nt, Human herpesvirus 7
auuuuaauagucuaa

SEQ ID NO: 341634 - RNA, 22 nt, Human herpesvirus 7
auuuuacauauuaguuuaacuu

SEQ ID NO: 341635 - RNA, 12 nt, Human herpesvirus 7
auuuucauaaag

SEQ ID NO: 341636 - RNA, 13 nt, Human herpesvirus 7
auuuucauaaaga

SEQ ID NO: 341637 - RNA, 20 nt, Human herpesvirus 7
auuuucccagauacagcaua

SEQ ID NO: 341638 - RNA, 13 nt, Human herpesvirus 7
auuuuccugaaaa

SEQ ID NO: 341639 - RNA, 14 nt, Human herpesvirus 7
auuuucgauuccau

SEQ ID NO: 341640 - RNA, 14 nt, Human herpesvirus 7
auuuucguaucugu

SEQ ID NO: 341641 - RNA, 19 nt, Human herpesvirus 7
auuuucguaucugugacuu

SEQ ID NO: 341642 - RNA, 18 nt, Human herpesvirus 7
auuuucuagagcauauac

SEQ ID NO: 341643 - RNA, 21 nt, Human herpesvirus 7
auuuucuucgucuaagucaau

SEQ ID NO: 341644 - RNA, 16 nt, Human herpesvirus 7
auuuucuugagccuug

SEQ ID NO: 341645 - RNA, 12 nt, Human herpesvirus 7
auuuugaaaaua

SEQ ID NO: 341646 - RNA, 23 nt, Human herpesvirus 7
auuuugccguugaguugcugcug

SEQ ID NO: 341647 - RNA, 17 nt, Human herpesvirus 7
auuuuggcgaaacaaua

SEQ ID NO: 341648 - RNA, 14 nt, Human herpesvirus 7
auuuuguaugaaaa

SEQ ID NO: 341649 - RNA, 18 nt, Human herpesvirus 7
auuuugugacccugucac

SEQ ID NO: 341650 - RNA, 15 nt, Human herpesvirus 7
auuuuguuuugcaau

SEQ ID NO: 341651 - RNA, 19 nt, Human herpesvirus 7
auuuuuaaacuugugaaaa

SEQ ID NO: 341652 - RNA, 14 nt, Human herpesvirus 7
auuuuuagcucuaa

SEQ ID NO: 341653 - RNA, 18 nt, Human herpesvirus 7
auuuuucgcugaagaaca

SEQ ID NO: 341654 - RNA, 19 nt, Human herpesvirus 7
auuuuucuauuaguaugag

SEQ ID NO: 341655 - RNA, 12 nt, Human herpesvirus 7
auuuuucuugcu

SEQ ID NO: 341656 - RNA, 22 nt, Human herpesvirus 7
auuuuuuaaagaaaagcuugua

SEQ ID NO: 341657 - RNA, 18 nt, Human herpesvirus 7
caaaaaaaauuaguucua

SEQ ID NO: 341658 - RNA, 15 nt, Human herpesvirus 7
caaaaaaacacagua

SEQ ID NO: 341659 - RNA, 13 nt, Human herpesvirus 7
caaaaaacacguc

SEQ ID NO: 341660 - RNA, 21 nt, Human herpesvirus 7
gacaccaguaugaaaucaaaa

SEQ ID NO: 341661 - RNA, 13 nt, Human herpesvirus 7
gacacgacacuga

SEQ ID NO: 341662 - RNA, 14 nt, Human herpesvirus 7
gacacugaauguca

SEQ ID NO: 341663 - RNA, 15 nt, Human herpesvirus 7
gacacugaaugucaa

SEQ ID NO: 341664 - RNA, 20 nt, Human herpesvirus 7
gacagaccuauguguuuaca

SEQ ID NO: 341665 - RNA, 19 nt, Human herpesvirus 7
gacagagucaaucugugaa

SEQ ID NO: 341666 - RNA, 16 nt, Human herpesvirus 7
gacagcuguauaucua

SEQ ID NO: 341667 - RNA, 13 nt, Human herpesvirus 7
gacagguguuguu

SEQ ID NO: 341668 - RNA, 16 nt, Human herpesvirus 7
gacagucaccaagggc

SEQ ID NO: 341669 - RNA, 15 nt, Human herpesvirus 7
gacauguuucuggau

SEQ ID NO: 341670 - RNA, 18 nt, Human herpesvirus 7
gacauugaaaaugcauug

SEQ ID NO: 341671 - RNA, 18 nt, Human herpesvirus 7
gacauugaagcuauuaaa

SEQ ID NO: 341672 - RNA, 17 nt, Human herpesvirus 7
gaccacaacaggauuaa

SEQ ID NO: 341673 - RNA, 22 nt, Human herpesvirus 7
gacccugucacacuuauuccag

SEQ ID NO: 341674 - RNA, 15 nt, Human herpesvirus 7
gaccguaaaacaauc

SEQ ID NO: 341675 - RNA, 21 nt, Human herpesvirus 7
gaccuaaacccagagcuaaaa

SEQ ID NO: 341676 - RNA, 16 nt, Human herpesvirus 7
gacgaauuucuuugcg

SEQ ID NO: 341677 - RNA, 16 nt, Human herpesvirus 7
gacgaugagcaugaaa

SEQ ID NO: 341678 - RNA, 21 nt, Human herpesvirus 7
gacgauuaugucuaaggaaug

SEQ ID NO: 341679 - RNA, 23 nt, Human herpesvirus 7
gacguaacaacagcagcugcuaa

SEQ ID NO: 341680 - RNA, 16 nt, Human herpesvirus 7
gacguuucuagcaaaa

SEQ ID NO: 341681 - RNA, 22 nt, Human herpesvirus 7
gacuaaauauggagcagcuuaa

SEQ ID NO: 341682 - RNA, 17 nt, Human herpesvirus 7
gacuaucgcaacaacua

SEQ ID NO: 341683 - RNA, 20 nt, Human herpesvirus 7
gacuccuguauuaaguguuu

SEQ ID NO: 341684 - RNA, 14 nt, Human herpesvirus 7
gacugaagacaaaa

SEQ ID NO: 341685 - RNA, 13 nt, Human herpesvirus 7
gacugcaaccuga

SEQ ID NO: 341686 - RNA, 16 nt, Human herpesvirus 7
gacugguacaaggugu

SEQ ID NO: 341687 - RNA, 20 nt, Human herpesvirus 7
gacuuaucaccauaugccaa

SEQ ID NO: 341688 - RNA, 21 nt, Human herpesvirus 7
gacuuaucaccauaugccaau

SEQ ID NO: 341689 - RNA, 14 nt, Human herpesvirus 7
gacuuauggugugg

SEQ ID NO: 341690 - RNA, 14 nt, Human herpesvirus 7
gacuucgaaaaaga

SEQ ID NO: 341691 - RNA, 22 nt, Human herpesvirus 7
gacuuucuucuagaaacuaaag

SEQ ID NO: 341692 - RNA, 21 nt, Human herpesvirus 7
gacuuugauccauuugugaug

SEQ ID NO: 341693 - RNA, 17 nt, Human herpesvirus 7
gagaaaauaaacauguu

SEQ ID NO: 341694 - RNA, 13 nt, Human herpesvirus 7
gagaaccacguga

SEQ ID NO: 341695 - RNA, 14 nt, Human herpesvirus 7
gagaaccacgugac

SEQ ID NO: 341696 - RNA, 22 nt, Human herpesvirus 7
gagaagacaacgacuacaggaa

SEQ ID NO: 341697 - RNA, 17 nt, Human herpesvirus 7
gagaauguucgcaaaug

SEQ ID NO: 341698 - RNA, 16 nt, Human herpesvirus 7
gagacucacuccuugc

SEQ ID NO: 341699 - RNA, 13 nt, Human herpesvirus 7
gagacugucauaa

SEQ ID NO: 341700 - RNA, 18 nt, Human herpesvirus 7
gagacugucauaaucuga

SEQ ID NO: 341701 - RNA, 23 nt, Human herpesvirus 7
gagaucauaauuacauugcaguc

SEQ ID NO: 341702 - RNA, 22 nt, Human herpesvirus 7
gagauugguagugugcacacaa

SEQ ID NO: 341703 - RNA, 18 nt, Human herpesvirus 7
gagcauuauuggauaaua

SEQ ID NO: 341704 - RNA, 14 nt, Human herpesvirus 7
gagcauucaugccu

SEQ ID NO: 341705 - RNA, 18 nt, Human herpesvirus 7
gagccugcguuugaaugu

SEQ ID NO: 341706 - RNA, 14 nt, Human herpesvirus 7
gagcgcuuugcuua

SEQ ID NO: 341707 - RNA, 15 nt, Human herpesvirus 7
gagcugauucugcca

SEQ ID NO: 341708 - RNA, 13 nt, Human herpesvirus 7
gaggacagucaac

SEQ ID NO: 341709 - RNA, 20 nt, Human herpesvirus 7
gaggaccaauucuuuuacaa

SEQ ID NO: 341710 - RNA, 18 nt, Human herpesvirus 7
gaggauuuugacaagcgc

SEQ ID NO: 341711 - RNA, 20 nt, Human herpesvirus 7
gaggcagaccuaaacccaga

SEQ ID NO: 341712 - RNA, 21 nt, Human herpesvirus 7
gaggcuuuuagaaaucuuuca

SEQ ID NO: 341713 - RNA, 15 nt, Human herpesvirus 7
cuuuuaaugaucucu

SEQ ID NO: 341714 - RNA, 15 nt, Human herpesvirus 7
cuuuuauaauacugg

SEQ ID NO: 341715 - RNA, 20 nt, Human herpesvirus 7
cuuuucaaugcaacuuuaau

SEQ ID NO: 341716 - RNA, 21 nt, Human herpesvirus 7
cuuuucaggcuaugacuuuga

SEQ ID NO: 341717 - RNA, 22 nt, Human herpesvirus 7
cuuuucaggcuaugacuuugaa

SEQ ID NO: 341718 - RNA, 22 nt, Human herpesvirus 7
cuuuugcgggaaaaaacgucua

SEQ ID NO: 341719 - RNA, 16 nt, Human herpesvirus 7
cuuuugcuuuccauca

SEQ ID NO: 341720 - RNA, 14 nt, Human herpesvirus 7
cuuuuggaaugaua

SEQ ID NO: 341721 - RNA, 14 nt, Human herpesvirus 7
cuuuuuauaauaau

SEQ ID NO: 341722 - RNA, 15 nt, Human herpesvirus 7
cuuuuucuguagaca

SEQ ID NO: 341723 - RNA, 13 nt, Human herpesvirus 7
gaaaaaaaaauca

SEQ ID NO: 341724 - RNA, 17 nt, Human herpesvirus 7
gaaaaaaacaaaaucua

SEQ ID NO: 341725 - RNA, 14 nt, Human herpesvirus 7
gaaaaaaacaauga

SEQ ID NO: 341726 - RNA, 11 nt, Human herpesvirus 7
gaaaaagccau

SEQ ID NO: 341727 - RNA, 16 nt, Human herpesvirus 7
gaaaaauaaauacuau

SEQ ID NO: 341728 - RNA, 17 nt, Human herpesvirus 7
gaaaaaugcugcaaugu

SEQ ID NO: 341729 - RNA, 23 nt, Human herpesvirus 7
gaaaacaacacaaagccaaugag

SEQ ID NO: 341730 - RNA, 14 nt, Human herpesvirus 7
gaaaacaaucaaua

SEQ ID NO: 341731 - RNA, 21 nt, Human herpesvirus 7
gaaaacaauuaagaaucauuu

SEQ ID NO: 341732 - RNA, 22 nt, Human herpesvirus 7
gaaaacaucccuuuccaauaua

SEQ ID NO: 341733 - RNA, 19 nt, Human herpesvirus 7
gaaaacauuagcauugaaa

SEQ ID NO: 341734 - RNA, 16 nt, Human herpesvirus 7
gaaaacgcgauaaugu

SEQ ID NO: 341735 - RNA, 17 nt, Human herpesvirus 7
gaaaacggucugagacg

SEQ ID NO: 341736 - RNA, 18 nt, Human herpesvirus 7
gaaaacugcaacuuugug

SEQ ID NO: 341737 - RNA, 13 nt, Human herpesvirus 7
gaaaagauuucua

SEQ ID NO: 341738 - RNA, 16 nt, Human herpesvirus 7
gaaaauaaaaguaaaa

SEQ ID NO: 341739 - RNA, 14 nt, Human herpesvirus 7
gaaaauaacaggaa

SEQ ID NO: 341740 - RNA, 14 nt, Human herpesvirus 7
gaaaauaacuuuaa

SEQ ID NO: 341741 - RNA, 16 nt, Human herpesvirus 7
gaaaauauauuaaucu

SEQ ID NO: 341742 - RNA, 21 nt, Human herpesvirus 7
gaaaauauauuaaucuugaaa

SEQ ID NO: 341743 - RNA, 19 nt, Human herpesvirus 7
gaaaaucacagcauuauug

SEQ ID NO: 341744 - RNA, 14 nt, Human herpesvirus 7
gaaaaucuccuuga

SEQ ID NO: 341745 - RNA, 16 nt, Human herpesvirus 7
gaaaaucuccuugaua

SEQ ID NO: 341746 - RNA, 13 nt, Human herpesvirus 7
gaaaaucuuugaa

SEQ ID NO: 341747 - RNA, 21 nt, Human herpesvirus 7
gaaaaucuuugaaucugcuaa

SEQ ID NO: 341748 - RNA, 19 nt, Human herpesvirus 7
gaaaaugaugguugcaaua

SEQ ID NO: 341749 - RNA, 17 nt, Human herpesvirus 7
gaaaaugucagaguuua

SEQ ID NO: 341750 - RNA, 19 nt, Human herpesvirus 7
gaaaauguuuaaauuacag

SEQ ID NO: 341751 - RNA, 20 nt, Human herpesvirus 7
gaaaauguuuaaauuacagu

SEQ ID NO: 341752 - RNA, 17 nt, Human herpesvirus 7
gaaaauuuauauuugcu

SEQ ID NO: 341753 - RNA, 20 nt, Human herpesvirus 7
gaaaauuuauauuugcuugc

SEQ ID NO: 341754 - RNA, 22 nt, Human herpesvirus 7
gaaaauuuauauuugcuugcug

SEQ ID NO: 341755 - RNA, 20 nt, Human herpesvirus 7
gaaaauuuauugagcaauug

SEQ ID NO: 341756 - RNA, 21 nt, Human herpesvirus 7
gaaaauuucuaucacaaccug

SEQ ID NO: 341757 - RNA, 22 nt, Human herpesvirus 7
gaaaauuucuaucacaaccugg

SEQ ID NO: 341758 - RNA, 19 nt, Human herpesvirus 7
gaaacacuuacuuguguug

SEQ ID NO: 341759 - RNA, 22 nt, Human herpesvirus 7
gaaacaucuuuauauguguucg

SEQ ID NO: 341760 - RNA, 14 nt, Human herpesvirus 7
gaaacauuccucau

SEQ ID NO: 341761 - RNA, 22 nt, Human herpesvirus 7
gaaacguguuuuugaugugcaa

SEQ ID NO: 341762 - RNA, 20 nt, Human herpesvirus 7
gaaacucguuuguguagaaa

SEQ ID NO: 341763 - RNA, 13 nt, Human herpesvirus 7
gaaacuggcaaua

SEQ ID NO: 341764 - RNA, 20 nt, Human herpesvirus 7
gaaacuuucuaugauuuguu

SEQ ID NO: 341765 - RNA, 21 nt, Human herpesvirus 7
gaaagacccagaccgcauaac

SEQ ID NO: 341766 - RNA, 19 nt, Human herpesvirus 7
gaaagcaaaagccacagau

SEQ ID NO: 341767 - RNA, 13 nt, Human herpesvirus 7
gaaagcaauguau

SEQ ID NO: 341768 - RNA, 20 nt, Human herpesvirus 7
gaaagcaauguaugucaaau

SEQ ID NO: 341769 - RNA, 14 nt, Human herpesvirus 7
gaaagccacuguug

SEQ ID NO: 341770 - RNA, 15 nt, Human herpesvirus 7
gaaagccgcugccuu

SEQ ID NO: 341771 - RNA, 15 nt, Human herpesvirus 7
cuuaaacaugauuua

SEQ ID NO: 341772 - RNA, 23 nt, Human herpesvirus 7
cuuaaagucuccgugucacuguc

SEQ ID NO: 341773 - RNA, 12 nt, Human herpesvirus 7
cuuaaauaaaga

SEQ ID NO: 341774 - RNA, 13 nt, Human herpesvirus 7
cuuaaaugucaau

SEQ ID NO: 341775 - RNA, 12 nt, Human herpesvirus 7
cuuaaaugugua

SEQ ID NO: 341776 - RNA, 21 nt, Human herpesvirus 7
cuuaaauuacgagauauuauu

SEQ ID NO: 341777 - RNA, 18 nt, Human herpesvirus 7
cuuaaauuuuacaaagac

SEQ ID NO: 341778 - RNA, 15 nt, Human herpesvirus 7
cuuaacgaaggcauc

SEQ ID NO: 341779 - RNA, 18 nt, Human herpesvirus 7
cuuaagacaccccaaaau

SEQ ID NO: 341780 - RNA, 19 nt, Human herpesvirus 7
cuuaauaaaguuuaauucu

SEQ ID NO: 341781 - RNA, 15 nt, Human herpesvirus 7
cuuaauuuguucaau

SEQ ID NO: 341782 - RNA, 10 nt, Human herpesvirus 7
cuuacaacaa

SEQ ID NO: 341783 - RNA, 21 nt, Human herpesvirus 7
cuuacacuauucucuacuuaa

SEQ ID NO: 341784 - RNA, 19 nt, Human herpesvirus 7
cuuacauuucaaacaacau

SEQ ID NO: 341785 - RNA, 13 nt, Human herpesvirus 7
cuuacuuguguug

SEQ ID NO: 341786 - RNA, 19 nt, Human herpesvirus 7
cuuacuuguguugugaaaa

SEQ ID NO: 341787 - RNA, 10 nt, Human herpesvirus 7
cuuacuuugc

SEQ ID NO: 341788 - RNA, 22 nt, Human herpesvirus 7
cuuagaagcuugcuagauucua

SEQ ID NO: 341789 - RNA, 20 nt, Human herpesvirus 7
cuuagaugcauccaaagaaa

SEQ ID NO: 341790 - RNA, 23 nt, Human herpesvirus 7
cuuagaugcugaaacaucaauuu

SEQ ID NO: 341791 - RNA, 14 nt, Human herpesvirus 7
cuuagcuaauugag

SEQ ID NO: 341792 - RNA, 22 nt, Human herpesvirus 7
cuuauaaauaaaauguuuuaga

SEQ ID NO: 341793 - RNA, 21 nt, Human herpesvirus 7
cuuauaaugauguaauguugc

SEQ ID NO: 341794 - RNA, 17 nt, Human herpesvirus 7
cuuauauuccuuugaaa

SEQ ID NO: 341795 - RNA, 22 nt, Human herpesvirus 7
cuuaucugucauggacggcauu

SEQ ID NO: 341796 - RNA, 14 nt, Human herpesvirus 7
cuuauguacucuga

SEQ ID NO: 341797 - RNA, 23 nt, Human herpesvirus 7
cuuauguccagauccaucuguaa

SEQ ID NO: 341798 - RNA, 16 nt, Human herpesvirus 7
cuuauuauauauguca

SEQ ID NO: 341799 - RNA, 18 nt, Human herpesvirus 7
cuuauuauauaugucaua

SEQ ID NO: 341800 - RNA, 17 nt, Human herpesvirus 7
cuucaaaaauguuuaca

SEQ ID NO: 341801 - RNA, 16 nt, Human herpesvirus 7
cuucaauucaccaauu

SEQ ID NO: 341802 - RNA, 20 nt, Human herpesvirus 7
cuucaauucaccaauuucua

SEQ ID NO: 341803 - RNA, 17 nt, Human herpesvirus 7
cuucaggaauaucaaga

SEQ ID NO: 341804 - RNA, 21 nt, Human herpesvirus 7
cuucagguuguugucauugaa

SEQ ID NO: 341805 - RNA, 17 nt, Human herpesvirus 7
cuucauggcacauauaa

SEQ ID NO: 341806 - RNA, 18 nt, Human herpesvirus 7
cuuccaauucuuuguacu

SEQ ID NO: 341807 - RNA, 15 nt, Human herpesvirus 7
cuucgucuaagucaa

SEQ ID NO: 341808 - RNA, 18 nt, Human herpesvirus 7
cuucuaaaaauacaacuu

SEQ ID NO: 341809 - RNA, 19 nt, Human herpesvirus 7
cuucuaaaaauacaacuuc

SEQ ID NO: 341810 - RNA, 16 nt, Human herpesvirus 7
cuucuaaauaaacaag

SEQ ID NO: 341811 - RNA, 19 nt, Human herpesvirus 7
cuucuaauugcgcaguguu

SEQ ID NO: 341812 - RNA, 21 nt, Human herpesvirus 7
cuucuaccucuuacauuugau

SEQ ID NO: 341813 - RNA, 15 nt, Human herpesvirus 7
cuucuauuauagaag

SEQ ID NO: 341814 - RNA, 17 nt, Human herpesvirus 7
cuucucccauucaauaa

SEQ ID NO: 341815 - RNA, 18 nt, Human herpesvirus 7
cuucugaguguguuaaau

SEQ ID NO: 341816 - RNA, 17 nt, Human herpesvirus 7
cuucugcuaacucauaa

SEQ ID NO: 341817 - RNA, 18 nt, Human herpesvirus 7
cuucugcuaacucauaau

SEQ ID NO: 341818 - RNA, 22 nt, Human herpesvirus 7
cuucuguaaaagaucuuuuaac

SEQ ID NO: 341819 - RNA, 18 nt, Human herpesvirus 7
cuucuucagauucaguau

SEQ ID NO: 341820 - RNA, 20 nt, Human herpesvirus 7
cuucuugcauuuccgagaca

SEQ ID NO: 341821 - RNA, 15 nt, Human herpesvirus 7
cuucuuugugagaaa

SEQ ID NO: 341822 - RNA, 17 nt, Human herpesvirus 7
cuugaaaaucaauccaa

SEQ ID NO: 341823 - RNA, 19 nt, Human herpesvirus 7
cuugaagaacaacaugaaa

SEQ ID NO: 341824 - RNA, 18 nt, Human herpesvirus 7
cuugaauagguaucuuua

SEQ ID NO: 341825 - RNA, 17 nt, Human herpesvirus 7
cuugaaugagcugacag

SEQ ID NO: 341826 - RNA, 15 nt, Human herpesvirus 7
cuugagaaauaugaa

SEQ ID NO: 341827 - RNA, 23 nt, Human herpesvirus 7
cuugagccagcaagaacagcaau

SEQ ID NO: 341828 - RNA, 16 nt, Human herpesvirus 7
ccuucauggcacauau

SEQ ID NO: 341829 - RNA, 18 nt, Human herpesvirus 7
ccuuccucguugccacua

SEQ ID NO: 341830 - RNA, 14 nt, Human herpesvirus 7
ccuucuaaaacagu

SEQ ID NO: 341831 - RNA, 22 nt, Human herpesvirus 7
ccuucuuauaaugauguaaugu

SEQ ID NO: 341832 - RNA, 11 nt, Human herpesvirus 7
ccuucuugccu

SEQ ID NO: 341833 - RNA, 19 nt, Human herpesvirus 7
ccuucuugccuacacuuuc

SEQ ID NO: 341834 - RNA, 15 nt, Human herpesvirus 7
ccuuguguugucaua

SEQ ID NO: 341835 - RNA, 18 nt, Human herpesvirus 7
ccuuguguugucauacaa

SEQ ID NO: 341836 - RNA, 11 nt, Human herpesvirus 7
ccuuguuugcu

SEQ ID NO: 341837 - RNA, 21 nt, Human herpesvirus 7
ccuuguuuuagggaauguaau

SEQ ID NO: 341838 - RNA, 23 nt, Human herpesvirus 7
ccuuuaauggaagaacaacaacu

SEQ ID NO: 341839 - RNA, 20 nt, Human herpesvirus 7
ccuuucaacgaucucaaaau

SEQ ID NO: 341840 - RNA, 13 nt, Human herpesvirus 7
ccuuucacuugaa

SEQ ID NO: 341841 - RNA, 12 nt, Human herpesvirus 7
ccuuucccagaa

SEQ ID NO: 341842 - RNA, 19 nt, Human herpesvirus 7
ccuuuuaacaacagccaaa

SEQ ID NO: 341843 - RNA, 14 nt, Human herpesvirus 7
ccuuuuucugaaaa

SEQ ID NO: 341844 - RNA, 22 nt, Human herpesvirus 7
ccuuuuuucuuccuagcauuaa

SEQ ID NO: 341845 - RNA, 14 nt, Human herpesvirus 7
cgaaaaacacuuua

SEQ ID NO: 341846 - RNA, 15 nt, Human herpesvirus 7
cgaaagccacuguug

SEQ ID NO: 341847 - RNA, 20 nt, Human herpesvirus 7
cgaaauucgcaaaauuucau

SEQ ID NO: 341848 - RNA, 22 nt, Human herpesvirus 7
cgaacuguuacaacuuugccaa

SEQ ID NO: 341849 - RNA, 17 nt, Human herpesvirus 7
cgaagaaauucgaaaca

SEQ ID NO: 341850 - RNA, 14 nt, Human herpesvirus 7
cgaagauacgcuag

SEQ ID NO: 341851 - RNA, 17 nt, Human herpesvirus 7
cgaagcagggaaaaagc

SEQ ID NO: 341852 - RNA, 22 nt, Human herpesvirus 7
cgaagguugucuguucucaugc

SEQ ID NO: 341853 - RNA, 14 nt, Human herpesvirus 7
cgaaucaguucaac

SEQ ID NO: 341854 - RNA, 21 nt, Human herpesvirus 7
cgaauuuguucaauugccacc

SEQ ID NO: 341855 - RNA, 16 nt, Human herpesvirus 7
cgacauuauaaaagau

SEQ ID NO: 341856 - RNA, 17 nt, Human herpesvirus 7
cgagaauguucuaucaa

SEQ ID NO: 341857 - RNA, 20 nt, Human herpesvirus 7
cgagauggauugagugcaug

SEQ ID NO: 341858 - RNA, 20 nt, Human herpesvirus 7
cgagcuguguccacuacaga

SEQ ID NO: 341859 - RNA, 19 nt, Human herpesvirus 7
cgauaagaaaguuguacuc

SEQ ID NO: 341860 - RNA, 20 nt, Human herpesvirus 7
cgauauaguuuguuucaaua

SEQ ID NO: 341861 - RNA, 22 nt, Human herpesvirus 7
cgaucccuaucgagacgccaga

SEQ ID NO: 341862 - RNA, 19 nt, Human herpesvirus 7
cgauccucagaauguacac

SEQ ID NO: 341863 - RNA, 12 nt, Human herpesvirus 7
cgaucuaaagac

SEQ ID NO: 341864 - RNA, 21 nt, Human herpesvirus 7
cgaucuaagucuacaucauca

SEQ ID NO: 341865 - RNA, 21 nt, Human herpesvirus 7
cgauguuuuaucuaacacugc

SEQ ID NO: 341866 - RNA, 20 nt, Human herpesvirus 7
cgauuagguaauagcuuuaa

SEQ ID NO: 341867 - RNA, 14 nt, Human herpesvirus 7
cgauuauauucaaa

SEQ ID NO: 341868 - RNA, 17 nt, Human herpesvirus 7
cgauuauauucaaauaa

SEQ ID NO: 341869 - RNA, 16 nt, Human herpesvirus 7
cgauugcaguugaauu

SEQ ID NO: 341870 - RNA, 13 nt, Human herpesvirus 7
cgauuuaagugaa

SEQ ID NO: 341871 - RNA, 21 nt, Human herpesvirus 7
cgauuuaucaagauagugaca

SEQ ID NO: 341872 - RNA, 22 nt, Human herpesvirus 7
cgauuugguguacuacauauua

SEQ ID NO: 341873 - RNA, 21 nt, Human herpesvirus 7
cgcaaaggaaaaaugcugcuc

SEQ ID NO: 341874 - RNA, 13 nt, Human herpesvirus 7
cgcagcaauguau

SEQ ID NO: 341875 - RNA, 17 nt, Human herpesvirus 7
cgcagcaauguauauaa

SEQ ID NO: 341876 - RNA, 15 nt, Human herpesvirus 7
cgcagccauguugcg

SEQ ID NO: 341877 - RNA, 15 nt, Human herpesvirus 7
cgcaguguucauuau

SEQ ID NO: 341878 - RNA, 18 nt, Human herpesvirus 7
cgcauaaaaaaucuaauu

SEQ ID NO: 341879 - RNA, 23 nt, Human herpesvirus 7
cgcauaacccacuaacauuuuaa

SEQ ID NO: 341880 - RNA, 18 nt, Human herpesvirus 7
cgcauggagcacaauuac

SEQ ID NO: 341881 - RNA, 23 nt, Human herpesvirus 7
cgcaugugaaaaugaugguugca

SEQ ID NO: 341882 - RNA, 14 nt, Human herpesvirus 7
cgccauaauuugaa

SEQ ID NO: 341883 - RNA, 17 nt, Human herpesvirus 7
cgccauaauuugaauua

SEQ ID NO: 341884 - RNA, 18 nt, Human herpesvirus 7
cgccauguauugucuuac

SEQ ID NO: 341885 - RNA, 19 nt, Human herpesvirus 7
cgcgguccauuuuuacuca

SEQ ID NO: 341886 - RNA, 21 nt, Human herpesvirus 7
cgcuaaagagcauucaugccu

SEQ ID NO: 341887 - RNA, 16 nt, Human herpesvirus 7
cgcugaaauaaauuca

SEQ ID NO: 341888 - RNA, 14 nt, Human herpesvirus 7
cgcugaaauuucau

SEQ ID NO: 341889 - RNA, 22 nt, Human herpesvirus 7
cgcuguaugcaagaaaguccaa

SEQ ID NO: 341890 - RNA, 23 nt, Human herpesvirus 7
cgcuguaugcaagaaaguccaaa

SEQ ID NO: 341891 - RNA, 12 nt, Human herpesvirus 7
cgcugucuuuaa

SEQ ID NO: 341892 - RNA, 22 nt, Human herpesvirus 7
cgcuucaaagauaccuucuuag

SEQ ID NO: 341893 - RNA, 12 nt, Human herpesvirus 7
cgcuuugcuuau

SEQ ID NO: 341894 - RNA, 19 nt, Human herpesvirus 7
cggaagaacaagcaaacga

SEQ ID NO: 341895 - RNA, 22 nt, Human herpesvirus 7
cggaaguacuaaucacaaguua

SEQ ID NO: 341896 - RNA, 23 nt, Human herpesvirus 7
cggaaguugaggcuuuuagaaau

SEQ ID NO: 341897 - RNA, 15 nt, Human herpesvirus 7
cggagacguugcuca

SEQ ID NO: 341898 - RNA, 22 nt, Human herpesvirus 7
cggauacguacgcaacagagcc

SEQ ID NO: 341899 - RNA, 20 nt, Human herpesvirus 7
cggauaugccuucaggcaca

SEQ ID NO: 341900 - RNA, 15 nt, Human herpesvirus 7
cggauuuacauuuca

SEQ ID NO: 341901 - RNA, 22 nt, Human herpesvirus 7
cgggaaaaaggauuugaagguu

SEQ ID NO: 341902 - RNA, 13 nt, Human herpesvirus 7
cgggcacacuuug

SEQ ID NO: 341903 - RNA, 16 nt, Human herpesvirus 7
cggggacauuccucau

SEQ ID NO: 341904 - RNA, 20 nt, Human herpesvirus 7
cgguaaagaaccuaucaaaa

SEQ ID NO: 341905 - RNA, 17 nt, Human herpesvirus 7
cgguaacaugucuucaa

SEQ ID NO: 341906 - RNA, 21 nt, Human herpesvirus 7
cgguaacggauuuacauuuca

SEQ ID NO: 341907 - RNA, 21 nt, Human herpesvirus 7
cgguacucccucuaguggcaa

SEQ ID NO: 341908 - RNA, 11 nt, Human herpesvirus 7
cgguagcacua

SEQ ID NO: 341909 - RNA, 14 nt, Human herpesvirus 7
cgguccuuccucaa

SEQ ID NO: 341910 - RNA, 20 nt, Human herpesvirus 7
cguaaaaaaucaagucugaa

SEQ ID NO: 341911 - RNA, 17 nt, Human herpesvirus 7
cguaaacauuuguugcu

SEQ ID NO: 341912 - RNA, 13 nt, Human herpesvirus 7
cguacaauauuaa

SEQ ID NO: 341913 - RNA, 18 nt, Human herpesvirus 7
cgucaugcggaagaacaa

SEQ ID NO: 341914 - RNA, 16 nt, Human herpesvirus 7
cgucuaagucaauuaa

SEQ ID NO: 341915 - RNA, 19 nt, Human herpesvirus 7
cgucucuuugccuguuaaa

SEQ ID NO: 341916 - RNA, 20 nt, Human herpesvirus 7
cgucucuuugccuguuaaaa

SEQ ID NO: 341917 - RNA, 23 nt, Human herpesvirus 7
cgucuucuucugaguguguuaaa

SEQ ID NO: 341918 - RNA, 19 nt, Human herpesvirus 7
cgugagcacggcacacaac

SEQ ID NO: 341919 - RNA, 13 nt, Human herpesvirus 7
cgugcuuagacuu

SEQ ID NO: 341920 - RNA, 22 nt, Human herpesvirus 7
cguggaaauuaaucaaacaauu

SEQ ID NO: 341921 - RNA, 19 nt, Human herpesvirus 7
cgugucaaaaaaaaaacaa

SEQ ID NO: 341922 - RNA, 23 nt, Human herpesvirus 7
cgugucaaaaaaaaaacaaucca

SEQ ID NO: 341923 - RNA, 23 nt, Human herpesvirus 7
cguguggccuuccggcgcugagu

SEQ ID NO: 341924 - RNA, 22 nt, Human herpesvirus 7
cguuaaaaacgaacacuuucua

SEQ ID NO: 341925 - RNA, 22 nt, Human herpesvirus 7
cguuaauguaguuguagugcug

SEQ ID NO: 341926 - RNA, 19 nt, Human herpesvirus 7
cguuacuucugucaccaca

SEQ ID NO: 341927 - RNA, 14 nt, Human herpesvirus 7
cguuaguugcagcu

SEQ ID NO: 341928 - RNA, 15 nt, Human herpesvirus 7
cguucuaaaaaacaa

SEQ ID NO: 341929 - RNA, 20 nt, Human herpesvirus 7
cguugaucguuguuggugug

SEQ ID NO: 341930 - RNA, 23 nt, Human herpesvirus 7
cguugcucauuuuguuuugcaau

SEQ ID NO: 341931 - RNA, 20 nt, Human herpesvirus 7
cguuuaaugaaaaagccaua

SEQ ID NO: 341932 - RNA, 14 nt, Human herpesvirus 7
cguuuauaaacucu

SEQ ID NO: 341933 - RNA, 15 nt, Human herpesvirus 7
cguuuauaaacucua

SEQ ID NO: 341934 - RNA, 20 nt, Human herpesvirus 7
cguuuauaaacucuauguca

SEQ ID NO: 341935 - RNA, 14 nt, Human herpesvirus 7
cguuucacugggaa

SEQ ID NO: 341936 - RNA, 21 nt, Human herpesvirus 7
cguuucuagcaaaauaugcaa

SEQ ID NO: 341937 - RNA, 16 nt, Human herpesvirus 7
cguuuuaaauagugaa

SEQ ID NO: 341938 - RNA, 12 nt, Human herpesvirus 7
cguuuucaugcu

SEQ ID NO: 341939 - RNA, 15 nt, Human herpesvirus 7
cguuuucaugcucau

SEQ ID NO: 341940 - RNA, 16 nt, Human herpesvirus 7
cuaaaaauacaacuuc

SEQ ID NO: 341941 - RNA, 15 nt, Human herpesvirus 7
cuaaaacuacauuua

SEQ ID NO: 341942 - RNA, 22 nt, Human herpesvirus 7
cuaaaagcaccgugagaaauuu

SEQ ID NO: 341943 - RNA, 15 nt, Human herpesvirus 7
cuaaaaguacagugu

SEQ ID NO: 341944 - RNA, 16 nt, Human herpesvirus 7
cuaaacaaacaaugag

SEQ ID NO: 341945 - RNA, 12 nt, Human herpesvirus 7
cuaaacccagag

SEQ ID NO: 341946 - RNA, 15 nt, Human herpesvirus 7
cuaaagcuacagcuu

SEQ ID NO: 341947 - RNA, 19 nt, Human herpesvirus 7
cuaaauaaaaaaaauugaa

SEQ ID NO: 341948 - RNA, 11 nt, Human herpesvirus 7
cuaaauaugac

SEQ ID NO: 341949 - RNA, 21 nt, Human herpesvirus 7
cuaaauaugaugaaacuucca

SEQ ID NO: 341950 - RNA, 17 nt, Human herpesvirus 7
cuaacaaaaaaauaccu

SEQ ID NO: 341951 - RNA, 17 nt, Human herpesvirus 7
cuaacaguuucugcaua

SEQ ID NO: 341952 - RNA, 21 nt, Human herpesvirus 7
cuaaggcgaaaaacacuuuaa

SEQ ID NO: 341953 - RNA, 16 nt, Human herpesvirus 7
cuaagucuacaucauc

SEQ ID NO: 341954 - RNA, 23 nt, Human herpesvirus 7
cuaauauuauaucuaaaguggag

SEQ ID NO: 341955 - RNA, 18 nt, Human herpesvirus 7
cuaaucucuuuucucucc

SEQ ID NO: 341956 - RNA, 16 nt, Human herpesvirus 7
cuaaugcuuugcugca

SEQ ID NO: 341957 - RNA, 17 nt, Human herpesvirus 7
cuaaugcuuugcugcaa

SEQ ID NO: 341958 - RNA, 15 nt, Human herpesvirus 7
cuaauugcagacuaa

SEQ ID NO: 341959 - RNA, 15 nt, Human herpesvirus 7
cuaauuuaugauacu

SEQ ID NO: 341960 - RNA, 21 nt, Human herpesvirus 7
cuaauuugcauaaacuaucaa

SEQ ID NO: 341961 - RNA, 21 nt, Human herpesvirus 7
cuaauuuuggcgaaacaauac

SEQ ID NO: 341962 - RNA, 20 nt, Human herpesvirus 7
cuacaauaugacgacuuuga

SEQ ID NO: 341963 - RNA, 19 nt, Human herpesvirus 7
cuacaauuucuggcaauaa

SEQ ID NO: 341964 - RNA, 15 nt, Human herpesvirus 7
cuacacaucuucaau

SEQ ID NO: 341965 - RNA, 17 nt, Human herpesvirus 7
cuacaggcuuacacuau

SEQ ID NO: 341966 - RNA, 15 nt, Human herpesvirus 7
cuacauaaagguaaa

SEQ ID NO: 341967 - RNA, 20 nt, Human herpesvirus 7
cuacaugaauggaucuggua

SEQ ID NO: 341968 - RNA, 19 nt, Human herpesvirus 7
cuaccucuuacauuugauu

SEQ ID NO: 341969 - RNA, 20 nt, Human herpesvirus 7
cuaccucuuacauuugauuu

SEQ ID NO: 341970 - RNA, 14 nt, Human herpesvirus 7
cuacuaaucaugaa

SEQ ID NO: 341971 - RNA, 17 nt, Human herpesvirus 7
cuacuauacucuugcac

SEQ ID NO: 341972 - RNA, 16 nt, Human herpesvirus 7
cuagaaaaacacuagc

SEQ ID NO: 341973 - RNA, 16 nt, Human herpesvirus 7
cuagaaaaucuaccaa

SEQ ID NO: 341974 - RNA, 13 nt, Human herpesvirus 7
cuagaaguuuaga

SEQ ID NO: 341975 - RNA, 12 nt, Human herpesvirus 7
cuagagauuaca

SEQ ID NO: 341976 - RNA, 19 nt, Human herpesvirus 7
cuagagggaguaccgaaag

SEQ ID NO: 341977 - RNA, 16 nt, Human herpesvirus 7
cuagauugacuaugaa

SEQ ID NO: 341978 - RNA, 17 nt, Human herpesvirus 7
cuagauugacuaugaau

SEQ ID NO: 341979 - RNA, 15 nt, Human herpesvirus 7
cuagcaaaauaugca

SEQ ID NO: 341980 - RNA, 15 nt, Human herpesvirus 7
cuagcggaguuugag

SEQ ID NO: 341981 - RNA, 19 nt, Human herpesvirus 7
cuaggaaacacaauuguau

SEQ ID NO: 341982 - RNA, 21 nt, Human herpesvirus 7
cuaggagauugguagugugca

SEQ ID NO: 341983 - RNA, 23 nt, Human herpesvirus 7
cuaggagauugguagugugcaca

SEQ ID NO: 341984 - RNA, 18 nt, Human herpesvirus 7
cuaguacgcccacucugg

SEQ ID NO: 341985 - RNA, 20 nt, Human herpesvirus 7
cuaguucccauuuucagaaa

SEQ ID NO: 341986 - RNA, 16 nt, Human herpesvirus 7
cuaguucugaaaucaa

SEQ ID NO: 341987 - RNA, 17 nt, Human herpesvirus 7
cuauaaaaagugcucug

SEQ ID NO: 341988 - RNA, 14 nt, Human herpesvirus 7
cuauaaauggaauu

SEQ ID NO: 341989 - RNA, 14 nt, Human herpesvirus 7
cuauaauagccuuu

SEQ ID NO: 341990 - RNA, 16 nt, Human herpesvirus 7
cuauaaucacgaaaua

SEQ ID NO: 341991 - RNA, 21 nt, Human herpesvirus 7
cuauaauucucacagcuuauu

SEQ ID NO: 341992 - RNA, 24 nt, Human herpesvirus 7
cuauaguuuguauuucauuguccc

SEQ ID NO: 341993 - RNA, 14 nt, Human herpesvirus 7
cuauauuugauuga

SEQ ID NO: 341994 - RNA, 15 nt, Human herpesvirus 7
ccaaacuauauugaa

SEQ ID NO: 341995 - RNA, 19 nt, Human herpesvirus 7
ccaaacuauauugaauuau

SEQ ID NO: 341996 - RNA, 17 nt, Human herpesvirus 7
ccaaagaguauacaaaa

SEQ ID NO: 341997 - RNA, 22 nt, Human herpesvirus 7
ccaaagaguauacaaaagacau

SEQ ID NO: 341998 - RNA, 14 nt, Human herpesvirus 7
ccaaagugaugaaa

SEQ ID NO: 341999 - RNA, 16 nt, Human herpesvirus 7
ccaaauacaaccacaa

SEQ ID NO: 342000 - RNA, 15 nt, Human herpesvirus 7
ccaaaucuaauuuau

SEQ ID NO: 342001 - RNA, 14 nt, Human herpesvirus 7
ccaacagcuucaga

SEQ ID NO: 342002 - RNA, 20 nt, Human herpesvirus 7
ccaacagcuucagaugcuau

SEQ ID NO: 342003 - RNA, 15 nt, Human herpesvirus 7
ccaauaaaucuucau

SEQ ID NO: 342004 - RNA, 21 nt, Human herpesvirus 7
ccaauaccgucgcaccgucau

SEQ ID NO: 342005 - RNA, 17 nt, Human herpesvirus 7
ccaaugaacaaguuuca

SEQ ID NO: 342006 - RNA, 13 nt, Human herpesvirus 7
ccaauguugccuu

SEQ ID NO: 342007 - RNA, 15 nt, Human herpesvirus 7
ccacagaugcuuaca

SEQ ID NO: 342008 - RNA, 14 nt, Human herpesvirus 7
ccacauacucuaga

SEQ ID NO: 342009 - RNA, 21 nt, Human herpesvirus 7
ccacauuuaaaaaaaaaacca

SEQ ID NO: 342010 - RNA, 17 nt, Human herpesvirus 7
ccaccgauuauauucaa

SEQ ID NO: 342011 - RNA, 16 nt, Human herpesvirus 7
ccacguuuuuuagcuu

SEQ ID NO: 342012 - RNA, 16 nt, Human herpesvirus 7
ccacuaauccaugaca

SEQ ID NO: 342013 - RNA, 18 nt, Human herpesvirus 7
ccacugugucaucacaga

SEQ ID NO: 342014 - RNA, 20 nt, Human herpesvirus 7
ccacuucuaaauaaacaaga

SEQ ID NO: 342015 - RNA, 19 nt, Human herpesvirus 7
ccagaaauuucaaaggaag

SEQ ID NO: 342016 - RNA, 10 nt, Human herpesvirus 7
ccagaacuug

SEQ ID NO: 342017 - RNA, 18 nt, Human herpesvirus 7
ccagaauaucgauuuuuc

SEQ ID NO: 342018 - RNA, 19 nt, Human herpesvirus 7
ccagacagcuguauaucua

SEQ ID NO: 342019 - RNA, 17 nt, Human herpesvirus 7
ccagaccgcauaaccca

SEQ ID NO: 342020 - RNA, 14 nt, Human herpesvirus 7
ccagauacagcaua

SEQ ID NO: 342021 - RNA, 23 nt, Human herpesvirus 7
ccagauuucauguuuuaugacuc

SEQ ID NO: 342022 - RNA, 15 nt, Human herpesvirus 7
ccagauuucuggcaa

SEQ ID NO: 342023 - RNA, 17 nt, Human herpesvirus 7
ccagguuuuucaaagac

SEQ ID NO: 342024 - RNA, 13 nt, Human herpesvirus 7
ccagucccaagag

SEQ ID NO: 342025 - RNA, 14 nt, Human herpesvirus 7
ccagugaaugauuu

SEQ ID NO: 342026 - RNA, 14 nt, Human herpesvirus 7
ccaguucuaucuca

SEQ ID NO: 342027 - RNA, 23 nt, Human herpesvirus 7
ccaguugaaugaggacugcagua

SEQ ID NO: 342028 - RNA, 17 nt, Human herpesvirus 7
ccauaauuugaauuaau

SEQ ID NO: 342029 - RNA, 18 nt, Human herpesvirus 7
ccauaugccaaugaacaa

SEQ ID NO: 342030 - RNA, 14 nt, Human herpesvirus 7
ccaucuaauugcag

SEQ ID NO: 342031 - RNA, 17 nt, Human herpesvirus 7
ccaucuauaaacauucu

SEQ ID NO: 342032 - RNA, 19 nt, Human herpesvirus 7
ccaugaaaaauaaauacua

SEQ ID NO: 342033 - RNA, 22 nt, Human herpesvirus 7
ccaugaaaaauaaauacuauua

SEQ ID NO: 342034 - RNA, 20 nt, Human herpesvirus 7
ccaugauguuaaagaacaag

SEQ ID NO: 342035 - RNA, 19 nt, Human herpesvirus 7
ccaugcauauuugaacaua

SEQ ID NO: 342036 - RNA, 23 nt, Human herpesvirus 7
ccauguauugucuuacagcacuu

SEQ ID NO: 342037 - RNA, 20 nt, Human herpesvirus 7
ccaugucuuguuaucuccac

SEQ ID NO: 342038 - RNA, 16 nt, Human herpesvirus 7
ccauuaagccagauuu

SEQ ID NO: 342039 - RNA, 22 nt, Human herpesvirus 7
ccauucaauaauggcauuacua

SEQ ID NO: 342040 - RNA, 14 nt, Human herpesvirus 7
ccauucauuuccuc

SEQ ID NO: 342041 - RNA, 14 nt, Human herpesvirus 7
caaacauguuccau

SEQ ID NO: 342042 - RNA, 16 nt, Human herpesvirus 7
caaacauguuccauuc

SEQ ID NO: 342043 - RNA, 17 nt, Human herpesvirus 7
caaacauguuccauuca

SEQ ID NO: 342044 - RNA, 18 nt, Human herpesvirus 7
caaacauguuccauucaa

SEQ ID NO: 342045 - RNA, 19 nt, Human herpesvirus 7
caaacauguuccauucaau

SEQ ID NO: 342046 - RNA, 22 nt, Human herpesvirus 7
caaacauguuccauucaauaaa

SEQ ID NO: 342047 - RNA, 12 nt, Human herpesvirus 7
caaacauuccaa

SEQ ID NO: 342048 - RNA, 16 nt, Human herpesvirus 7
caaacuauguccaaaa

SEQ ID NO: 342049 - RNA, 15 nt, Human herpesvirus 7
caaacuaugugcuua

SEQ ID NO: 342050 - RNA, 13 nt, Human herpesvirus 7
caaacucacuaau

SEQ ID NO: 342051 - RNA, 16 nt, Human herpesvirus 7
caaacuguacccaaaa

SEQ ID NO: 342052 - RNA, 21 nt, Human herpesvirus 7
caaacuguauuuguugaucuu

SEQ ID NO: 342053 - RNA, 13 nt, Human herpesvirus 7
caaagaaaaaacu

SEQ ID NO: 342054 - RNA, 19 nt, Human herpesvirus 7
caaagaacauguaguacaa

SEQ ID NO: 342055 - RNA, 13 nt, Human herpesvirus 7
caaagacgcaguc

SEQ ID NO: 342056 - RNA, 18 nt, Human herpesvirus 7
caaagaguauacaaaaga

SEQ ID NO: 342057 - RNA, 22 nt, Human herpesvirus 7
caaagaucguuguuaaauccaa

SEQ ID NO: 342058 - RNA, 13 nt, Human herpesvirus 7
caaagcaagcaug

SEQ ID NO: 342059 - RNA, 23 nt, Human herpesvirus 7
caaagcaucgauguuuuaucuaa

SEQ ID NO: 342060 - RNA, 16 nt, Human herpesvirus 7
caaaggaaaaauuucu

SEQ ID NO: 342061 - RNA, 14 nt, Human herpesvirus 7
caaaggaagacauc

SEQ ID NO: 342062 - RNA, 20 nt, Human herpesvirus 7
caaaguacacguagacugag

SEQ ID NO: 342063 - RNA, 17 nt, Human herpesvirus 7
caaaguagaacuugaaa

SEQ ID NO: 342064 - RNA, 12 nt, Human herpesvirus 7
caaaguagccuu

SEQ ID NO: 342065 - RNA, 18 nt, Human herpesvirus 7
caaauaaacguccauuga

SEQ ID NO: 342066 - RNA, 21 nt, Human herpesvirus 7
caaauaagggauaucuuaaaa

SEQ ID NO: 342067 - RNA, 21 nt, Human herpesvirus 7
caaauaccaugaaaaauauga

SEQ ID NO: 342068 - RNA, 15 nt, Human herpesvirus 7
caaauauguggcaca

SEQ ID NO: 342069 - RNA, 16 nt, Human herpesvirus 7
caaauauguggcacau

SEQ ID NO: 342070 - RNA, 17 nt, Human herpesvirus 7
caaauauguggcacaua

SEQ ID NO: 342071 - RNA, 17 nt, Human herpesvirus 7
caaaucaccgaugaauu

SEQ ID NO: 342072 - RNA, 11 nt, Human herpesvirus 7
caaauguucca

SEQ ID NO: 342073 - RNA, 21 nt, Human herpesvirus 7
caaauuaugcguuaaugucuc

SEQ ID NO: 342074 - RNA, 13 nt, Human herpesvirus 7
caaauuauuucca

SEQ ID NO: 342075 - RNA, 18 nt, Human herpesvirus 7
caaauucaaccacagaca

SEQ ID NO: 342076 - RNA, 15 nt, Human herpesvirus 7
caaauucauccaaaa

SEQ ID NO: 342077 - RNA, 16 nt, Human herpesvirus 7
caaauuccugcuugca

SEQ ID NO: 342078 - RNA, 20 nt, Human herpesvirus 7
caaauuguggagagauucaa

SEQ ID NO: 342079 - RNA, 19 nt, Human herpesvirus 7
caaauuuaagagacauuga

SEQ ID NO: 342080 - RNA, 20 nt, Human herpesvirus 7
caaauuuaagagacauugaa

SEQ ID NO: 342081 - RNA, 22 nt, Human herpesvirus 7
caaauuucaaacguaaugcaaa

SEQ ID NO: 342082 - RNA, 19 nt, Human herpesvirus 7
caacaaacaaauaauucaa

SEQ ID NO: 342083 - RNA, 15 nt, Human herpesvirus 7
caacaaacauuccaa

SEQ ID NO: 342084 - RNA, 14 nt, Human herpesvirus 7
caacaaagcaugaa

SEQ ID NO: 342085 - RNA, 16 nt, Human herpesvirus 7
caacaaggacgaaucu

SEQ ID NO: 342086 - RNA, 23 nt, Human herpesvirus 7
caacaaggacgaaucuacauuaa

SEQ ID NO: 342087 - RNA, 17 nt, Human herpesvirus 7
caacaauaaaagauuua

SEQ ID NO: 342088 - RNA, 17 nt, Human herpesvirus 7
caacacaaagccaauga

SEQ ID NO: 342089 - RNA, 23 nt, Human herpesvirus 7
caacacaaauuuaggacuuuaca

SEQ ID NO: 342090 - RNA, 21 nt, Human herpesvirus 7
caacacaagguacauuuugca

SEQ ID NO: 342091 - RNA, 19 nt, Human herpesvirus 7
caacagagcgcuuugcuua

SEQ ID NO: 342092 - RNA, 16 nt, Human herpesvirus 7
caacaucuuaaauguc

SEQ ID NO: 342093 - RNA, 22 nt, Human herpesvirus 7
caacaucuuaaaugucaaugag

SEQ ID NO: 342094 - RNA, 18 nt, Human herpesvirus 7
caacaugaaacguuucaa

SEQ ID NO: 342095 - RNA, 17 nt, Human herpesvirus 7
caaccggcaaucauaau

SEQ ID NO: 342096 - RNA, 14 nt, Human herpesvirus 7
caacgguauacauu

SEQ ID NO: 342097 - RNA, 15 nt, Human herpesvirus 7
caacuaaaaaucuca

SEQ ID NO: 342098 - RNA, 19 nt, Human herpesvirus 7
caacuaaaacuacauuuaa

SEQ ID NO: 342099 - RNA, 20 nt, Human herpesvirus 7
caacucaauaaaaaugucuc

SEQ ID NO: 342100 - RNA, 19 nt, Human herpesvirus 7
caacucuucuucagauuca

SEQ ID NO: 342101 - RNA, 19 nt, Human herpesvirus 7
caacuucuaguucugaaau

SEQ ID NO: 342102 - RNA, 15 nt, Human herpesvirus 7
caacuucucuuggag

SEQ ID NO: 342103 - RNA, 21 nt, Human herpesvirus 7
caagaaacaagguuuaaaaca

SEQ ID NO: 342104 - RNA, 19 nt, Human herpesvirus 7
caagaaaguccaaagugau

SEQ ID NO: 342105 - RNA, 22 nt, Human herpesvirus 7
caagaaaguccaaagugaugaa

SEQ ID NO: 342106 - RNA, 17 nt, Human herpesvirus 7
caagaaaucagauuaaa

SEQ ID NO: 342107 - RNA, 13 nt, Human herpesvirus 7
caagaacaauaaa

SEQ ID NO: 342108 - RNA, 17 nt, Human herpesvirus 7
caagaaggaaaauuuca

SEQ ID NO: 342109 - RNA, 23 nt, Human herpesvirus 7
caagacgccggggacauuccuca

SEQ ID NO: 342110 - RNA, 19 nt, Human herpesvirus 7
caagacgcuguaugcaaga

SEQ ID NO: 342111 - RNA, 14 nt, Human herpesvirus 7
caagauaagcaaua

SEQ ID NO: 342112 - RNA, 19 nt, Human herpesvirus 7
caagauaagcaauacauuc

SEQ ID NO: 342113 - RNA, 14 nt, Human herpesvirus 7
caagcaacacuuaa

SEQ ID NO: 342114 - RNA, 16 nt, Human herpesvirus 7
caagcuuaaauaagca

SEQ ID NO: 342115 - RNA, 23 nt, Human herpesvirus 7
caaggacgaaucuacauuaaaca

SEQ ID NO: 342116 - RNA, 18 nt, Human herpesvirus 7
caaggucuuucaugcauu

SEQ ID NO: 342117 - RNA, 22 nt, Human herpesvirus 7
ucuuaacgaaggcaucaagaaa

SEQ ID NO: 342118 - RNA, 19 nt, Human herpesvirus 7
ucuuaauaauuauuugacu

SEQ ID NO: 342119 - RNA, 15 nt, Human herpesvirus 7
ucuuacaacuagaaa

SEQ ID NO: 342120 - RNA, 15 nt, Human herpesvirus 7
ucuuacacuaugaga

SEQ ID NO: 342121 - RNA, 14 nt, Human herpesvirus 7
ucuuacgucuuuuc

SEQ ID NO: 342122 - RNA, 23 nt, Human herpesvirus 7
ucuuacgucuuuucuaccaacaa

SEQ ID NO: 342123 - RNA, 20 nt, Human herpesvirus 7
ucuuagaugcauccaaagaa

SEQ ID NO: 342124 - RNA, 20 nt, Human herpesvirus 7
ucuuagcguucgacagcaaa

SEQ ID NO: 342125 - RNA, 14 nt, Human herpesvirus 7
ucuuauaauuauga

SEQ ID NO: 342126 - RNA, 19 nt, Human herpesvirus 7
ucuuaugucugauucuuau

SEQ ID NO: 342127 - RNA, 18 nt, Human herpesvirus 7
ucuuauuacucgaugcuu

SEQ ID NO: 342128 - RNA, 14 nt, Human herpesvirus 7
ucuuauucuacaca

SEQ ID NO: 342129 - RNA, 20 nt, Human herpesvirus 7
ucuucaaagucuaagguuug

SEQ ID NO: 342130 - RNA, 22 nt, Human herpesvirus 7
ucuucagauucaguaucacuua

SEQ ID NO: 342131 - RNA, 19 nt, Human herpesvirus 7
ucuucaggaauaucaagaa

SEQ ID NO: 342132 - RNA, 15 nt, Human herpesvirus 7
ucuucauauuuucua

SEQ ID NO: 342133 - RNA, 14 nt, Human herpesvirus 7
ucuuccacuguugu

SEQ ID NO: 342134 - RNA, 22 nt, Human herpesvirus 7
ucuucuuuuuuugaacuguugc

SEQ ID NO: 342135 - RNA, 17 nt, Human herpesvirus 7
ucuugacucagauucga

SEQ ID NO: 342136 - RNA, 16 nt, Human herpesvirus 7
ucuugagaaauaugaa

SEQ ID NO: 342137 - RNA, 16 nt, Human herpesvirus 7
ucuugauguaacaaag

SEQ ID NO: 342138 - RNA, 13 nt, Human herpesvirus 7
ucuuggaguauua

SEQ ID NO: 342139 - RNA, 18 nt, Human herpesvirus 7
ucuuuaauaaaaacaaag

SEQ ID NO: 342140 - RNA, 16 nt, Human herpesvirus 7
ucuuuauaaaggacca

SEQ ID NO: 342141 - RNA, 14 nt, Human herpesvirus 7
ucuuuauaagcagu

SEQ ID NO: 342142 - RNA, 14 nt, Human herpesvirus 7
ucuuucaguuccca

SEQ ID NO: 342143 - RNA, 13 nt, Human herpesvirus 7
ucuuucauaacaa

SEQ ID NO: 342144 - RNA, 21 nt, Human herpesvirus 7
ucuuucuucaacacaauuuuc

SEQ ID NO: 342145 - RNA, 14 nt, Human herpesvirus 7
ugauagccauaaau

SEQ ID NO: 342146 - RNA, 14 nt, Human herpesvirus 7
ugauauacuuuuaa

SEQ ID NO: 342147 - RNA, 13 nt, Human herpesvirus 7
ugaucauuugcau

SEQ ID NO: 342148 - RNA, 17 nt, Human herpesvirus 7
ugaugacaacaaagcau

SEQ ID NO: 342149 - RNA, 22 nt, Human herpesvirus 7
ugaugacaacaaagcaugaaaa

SEQ ID NO: 342150 - RNA, 15 nt, Human herpesvirus 7
ugaugaccacaacag

SEQ ID NO: 342151 - RNA, 19 nt, Human herpesvirus 7
ugaugauuuaauauagaaa

SEQ ID NO: 342152 - RNA, 22 nt, Human herpesvirus 7
ugaugccauaauuucagcacug

SEQ ID NO: 342153 - RNA, 23 nt, Human herpesvirus 7
ugauggaaagcaaaagccacaga

SEQ ID NO: 342154 - RNA, 17 nt, Human herpesvirus 7
ugauguacugcucauca

SEQ ID NO: 342155 - RNA, 18 nt, Human herpesvirus 7
ugauguuuccgcauaaaa

SEQ ID NO: 342156 - RNA, 13 nt, Human herpesvirus 7
ugauuccaucuca

SEQ ID NO: 342157 - RNA, 14 nt, Human herpesvirus 7
ugauuccaucucac

SEQ ID NO: 342158 - RNA, 20 nt, Human herpesvirus 7
ugauucgcuaacuuugcuau

SEQ ID NO: 342159 - RNA, 12 nt, Human herpesvirus 7
ugauucugccau

SEQ ID NO: 342160 - RNA, 14 nt, Human herpesvirus 7
ugauucugccauua

SEQ ID NO: 342161 - RNA, 13 nt, Human herpesvirus 7
ugauugaauuugu

SEQ ID NO: 342162 - RNA, 14 nt, Human herpesvirus 7
ugauugacucgaau

SEQ ID NO: 342163 - RNA, 20 nt, Human herpesvirus 7
ugauuucaauaaucaaugca

SEQ ID NO: 342164 - RNA, 17 nt, Human herpesvirus 7
ugauuuuaaauuuacuu

SEQ ID NO: 342165 - RNA, 17 nt, Human herpesvirus 7
ugcaaaacaaaauaccg

SEQ ID NO: 342166 - RNA, 20 nt, Human herpesvirus 7
ugcaaaauagauuauauuac

SEQ ID NO: 342167 - RNA, 22 nt, Human herpesvirus 7
ugcaacuuuaauuaacacucaa

SEQ ID NO: 342168 - RNA, 18 nt, Human herpesvirus 7
ugcaagaaaguccaaagu

SEQ ID NO: 342169 - RNA, 14 nt, Human herpesvirus 7
ugcaagcacaugua

SEQ ID NO: 342170 - RNA, 22 nt, Human herpesvirus 7
ugcaagcugauucaacacucga

SEQ ID NO: 342171 - RNA, 14 nt, Human herpesvirus 7
ugcaauaugcucac

SEQ ID NO: 342172 - RNA, 14 nt, Human herpesvirus 7
ugcaauguucauca

SEQ ID NO: 342173 - RNA, 18 nt, Human herpesvirus 7
ugcaauuuggcucugauc

SEQ ID NO: 342174 - RNA, 16 nt, Human herpesvirus 7
ugcaauuuuauuuucc

SEQ ID NO: 342175 - RNA, 18 nt, Human herpesvirus 7
ugcacaaagauccucuga

SEQ ID NO: 342176 - RNA, 16 nt, Human herpesvirus 7
ugcagaaaaaauaaua

SEQ ID NO: 342177 - RNA, 15 nt, Human herpesvirus 7
ugcagaaaaauccaa

SEQ ID NO: 342178 - RNA, 16 nt, Human herpesvirus 7
ugcagaaaaauccaaa

SEQ ID NO: 342179 - RNA, 18 nt, Human herpesvirus 7
ugcagaaaaauccaaaau

SEQ ID NO: 342180 - RNA, 20 nt, Human herpesvirus 7
ugcagaaugcguaacuuugg

SEQ ID NO: 342181 - RNA, 21 nt, Human herpesvirus 7
ugcagaaugcguaacuuuggu

SEQ ID NO: 342182 - RNA, 16 nt, Human herpesvirus 7
ugcagaccguaaaaca

SEQ ID NO: 342183 - RNA, 18 nt, Human herpesvirus 7
ugcagaccguaaaacaau

SEQ ID NO: 342184 - RNA, 19 nt, Human herpesvirus 7
ugcagacugcgcuuggcaa

SEQ ID NO: 342185 - RNA, 23 nt, Human herpesvirus 7
ugcaggucgcuucguaaauauaa

SEQ ID NO: 342186 - RNA, 18 nt, Human herpesvirus 7
ugcauaaacuaucaaauc

SEQ ID NO: 342187 - RNA, 16 nt, Human herpesvirus 7
ugcauaaauaauaaca

SEQ ID NO: 342188 - RNA, 18 nt, Human herpesvirus 7
ugcauacaguuuauuuga

SEQ ID NO: 342189 - RNA, 12 nt, Human herpesvirus 7
ugcauaucauga

SEQ ID NO: 342190 - RNA, 18 nt, Human herpesvirus 7
ugcaucaaaacauaucag

SEQ ID NO: 342191 - RNA, 20 nt, Human herpesvirus 7
ugcaucaggaaaaucuauca

SEQ ID NO: 342192 - RNA, 22 nt, Human herpesvirus 7
ugcaucaggaaaaucuaucacc

SEQ ID NO: 342193 - RNA, 13 nt, Human herpesvirus 7
ugcauccaaagaa

SEQ ID NO: 342194 - RNA, 20 nt, Human herpesvirus 7
ugcaucgaauuuuacaaugc

SEQ ID NO: 342195 - RNA, 19 nt, Human herpesvirus 7
ugcaucuccuguaaccauu

SEQ ID NO: 342196 - RNA, 14 nt, Human herpesvirus 7
ugcaugaugcaccg

SEQ ID NO: 342197 - RNA, 23 nt, Human herpesvirus 7
ugcaugaugcaccgcacguugau

SEQ ID NO: 342198 - RNA, 13 nt, Human herpesvirus 7
ugcaugcuaauau

SEQ ID NO: 342199 - RNA, 17 nt, Human herpesvirus 7
ugcaugcuaauauuucc

SEQ ID NO: 342200 - RNA, 20 nt, Human herpesvirus 7
ugcauguguacuaaagccaa

SEQ ID NO: 342201 - RNA, 16 nt, Human herpesvirus 7
ugcauguugcuaguau

SEQ ID NO: 342202 - RNA, 21 nt, Human herpesvirus 7
ugcauguugcuaguaugucag

SEQ ID NO: 342203 - RNA, 23 nt, Human herpesvirus 7
ugccacuagagggaguaccgaaa

SEQ ID NO: 342204 - RNA, 15 nt, Human herpesvirus 7
ugccauaauuucagc

SEQ ID NO: 342205 - RNA, 19 nt, Human herpesvirus 7
ugccauaauuucagcacug

SEQ ID NO: 342206 - RNA, 12 nt, Human herpesvirus 7
ugccauuacuga

SEQ ID NO: 342207 - RNA, 21 nt, Human herpesvirus 7
ugccccuaaacaauuauauaa

SEQ ID NO: 342208 - RNA, 17 nt, Human herpesvirus 7
ugccggccgggugcugc

SEQ ID NO: 342209 - RNA, 18 nt, Human herpesvirus 7
ugccggccgggugcugcg

SEQ ID NO: 342210 - RNA, 13 nt, Human herpesvirus 7
ugccucugccucu

SEQ ID NO: 342211 - RNA, 23 nt, Human herpesvirus 7
ugccuuauuguuuuuuacuuauu

SEQ ID NO: 342212 - RNA, 16 nt, Human herpesvirus 7
ugccuuguuugcuggu

SEQ ID NO: 342213 - RNA, 15 nt, Human herpesvirus 7
ugccuuucccagaag

SEQ ID NO: 342214 - RNA, 16 nt, Human herpesvirus 7
ugcgaaagccacuguu

SEQ ID NO: 342215 - RNA, 23 nt, Human herpesvirus 7
ugcgcuuggcaaacagucugaaa

SEQ ID NO: 342216 - RNA, 19 nt, Human herpesvirus 7
ugcggaagaacaagcaaac

SEQ ID NO: 342217 - RNA, 17 nt, Human herpesvirus 7
ugcggauagcggucauc

SEQ ID NO: 342218 - RNA, 12 nt, Human herpesvirus 7
ugcggcucucug

SEQ ID NO: 342219 - RNA, 20 nt, Human herpesvirus 7
ugcggcucucuguucgcuug

SEQ ID NO: 342220 - RNA, 23 nt, Human herpesvirus 7
ugcgugcgccuuuaaaauuucau

SEQ ID NO: 342221 - RNA, 13 nt, Human herpesvirus 7
ugcguguguucaa

SEQ ID NO: 342222 - RNA, 13 nt, Human herpesvirus 7
ugcguuacuucug

SEQ ID NO: 342223 - RNA, 17 nt, Human herpesvirus 7
ugcuaacaaguauguca

SEQ ID NO: 342224 - RNA, 16 nt, Human herpesvirus 7
ugcuaaccacuguguc

SEQ ID NO: 342225 - RNA, 17 nt, Human herpesvirus 7
ugcuaaggcgaaaaaca

SEQ ID NO: 342226 - RNA, 12 nt, Human herpesvirus 7
ugcuagaaacca

SEQ ID NO: 342227 - RNA, 22 nt, Human herpesvirus 7
ugcuagaaacgucccugugaca

SEQ ID NO: 342228 - RNA, 23 nt, Human herpesvirus 7
ugcuagaaacgucccugugacag

SEQ ID NO: 342229 - RNA, 21 nt, Human herpesvirus 7
ugcuagaagacugcaaccuga

SEQ ID NO: 342230 - RNA, 16 nt, Human herpesvirus 7
ugcuagauucuauaaa

SEQ ID NO: 342231 - RNA, 18 nt, Human herpesvirus 7
ugcuagcaccgaaaaugg

SEQ ID NO: 342232 - RNA, 22 nt, Human herpesvirus 7
ugcuaugaaaauuuccuacaaa

SEQ ID NO: 342233 - RNA, 21 nt, Human herpesvirus 7
ugcucaaugguaagcaaaaaa

SEQ ID NO: 342234 - RNA, 18 nt, Human herpesvirus 7
ugcugaaacaucaauuuu

SEQ ID NO: 342235 - RNA, 19 nt, Human herpesvirus 7
ugcugcaauguucaucaau

SEQ ID NO: 342236 - RNA, 18 nt, Human herpesvirus 7
uauucuacggcuaaucuc

SEQ ID NO: 342237 - RNA, 13 nt, Human herpesvirus 7
uauucucauacaa

SEQ ID NO: 342238 - RNA, 14 nt, Human herpesvirus 7
uauugacauaauca

SEQ ID NO: 342239 - RNA, 15 nt, Human herpesvirus 7
uauugacauaaucau

SEQ ID NO: 342240 - RNA, 14 nt, Human herpesvirus 7
uauugagcaauuga

SEQ ID NO: 342241 - RNA, 21 nt, Human herpesvirus 7
uauugagcaauugauucacau

SEQ ID NO: 342242 - RNA, 10 nt, Human herpesvirus 7
uauugcauca

SEQ ID NO: 342243 - RNA, 17 nt, Human herpesvirus 7
uauuggagagauagcau

SEQ ID NO: 342244 - RNA, 21 nt, Human herpesvirus 7
uauuggagagauagcauuugu

SEQ ID NO: 342245 - RNA, 18 nt, Human herpesvirus 7
uauugguaauuagugaaa

SEQ ID NO: 342246 - RNA, 17 nt, Human herpesvirus 7
uauuguauaugaugaca

SEQ ID NO: 342247 - RNA, 14 nt, Human herpesvirus 7
uauugucauaaaau

SEQ ID NO: 342248 - RNA, 18 nt, Human herpesvirus 7
uauugucuuacagcacuu

SEQ ID NO: 342249 - RNA, 20 nt, Human herpesvirus 7
uauugucuuacagcacuuug

SEQ ID NO: 342250 - RNA, 17 nt, Human herpesvirus 7
uauuuaaacagcguuca

SEQ ID NO: 342251 - RNA, 16 nt, Human herpesvirus 7
uauuuacugauucuau

SEQ ID NO: 342252 - RNA, 14 nt, Human herpesvirus 7
uauuuauguucaaa

SEQ ID NO: 342253 - RNA, 18 nt, Human herpesvirus 7
uauuuccaacgcauucaa

SEQ ID NO: 342254 - RNA, 21 nt, Human herpesvirus 7
uauuucggcacccuaauugcc

SEQ ID NO: 342255 - RNA, 22 nt, Human herpesvirus 7
uauuucggcacccuaauugcca

SEQ ID NO: 342256 - RNA, 20 nt, Human herpesvirus 7
uauuucuaauagacaaauua

SEQ ID NO: 342257 - RNA, 13 nt, Human herpesvirus 7
uauuugacuuuuu

SEQ ID NO: 342258 - RNA, 16 nt, Human herpesvirus 7
uauuugcugagucucu

SEQ ID NO: 342259 - RNA, 20 nt, Human herpesvirus 7
uauuugcuguuuuugacuca

SEQ ID NO: 342260 - RNA, 15 nt, Human herpesvirus 7
uauuugcuugcugaa

SEQ ID NO: 342261 - RNA, 19 nt, Human herpesvirus 7
uauuugguacuguagauag

SEQ ID NO: 342262 - RNA, 17 nt, Human herpesvirus 7
uauuuguuccaguugaa

SEQ ID NO: 342263 - RNA, 16 nt, Human herpesvirus 7
uauuuguugaucuuca

SEQ ID NO: 342264 - RNA, 15 nt, Human herpesvirus 7
uauuuuaaguaauca

SEQ ID NO: 342265 - RNA, 13 nt, Human herpesvirus 7
uauuuuacaaaaa

SEQ ID NO: 342266 - RNA, 22 nt, Human herpesvirus 7
uauuuucccagauacagcauau

SEQ ID NO: 342267 - RNA, 17 nt, Human herpesvirus 7
uauuuucguaucuguga

SEQ ID NO: 342268 - RNA, 21 nt, Human herpesvirus 7
uauuuugaaaauauauuccaa

SEQ ID NO: 342269 - RNA, 19 nt, Human herpesvirus 7
uauuuugacaaucuuggca

SEQ ID NO: 342270 - RNA, 11 nt, Human herpesvirus 7
uauuuuuggcg

SEQ ID NO: 342271 - RNA, 11 nt, Human herpesvirus 7
ucaugccuugc

SEQ ID NO: 342272 - RNA, 14 nt, Human herpesvirus 7
ucaugccuugccaa

SEQ ID NO: 342273 - RNA, 23 nt, Human herpesvirus 7
ucaugccuugccaaaagcuugaa

SEQ ID NO: 342274 - RNA, 17 nt, Human herpesvirus 7
ucaugcuguauguugaa

SEQ ID NO: 342275 - RNA, 16 nt, Human herpesvirus 7
ucauggaaaauggagc

SEQ ID NO: 342276 - RNA, 20 nt, Human herpesvirus 7
ucauggaaaauggagcauua

SEQ ID NO: 342277 - RNA, 11 nt, Human herpesvirus 7
ucauguugacg

SEQ ID NO: 342278 - RNA, 14 nt, Human herpesvirus 7
ucauuaacuuuuau

SEQ ID NO: 342279 - RNA, 16 nt, Human herpesvirus 7
ucauuacagauugcuu

SEQ ID NO: 342280 - RNA, 22 nt, Human herpesvirus 7
ucauuacgccuuaaagucuccg

SEQ ID NO: 342281 - RNA, 19 nt, Human herpesvirus 7
ucauuacucguguugcaaa

SEQ ID NO: 342282 - RNA, 15 nt, Human herpesvirus 7
ucauuauuuguucaa

SEQ ID NO: 342283 - RNA, 14 nt, Human herpesvirus 7
ucauuccuauuaag

SEQ ID NO: 342284 - RNA, 19 nt, Human herpesvirus 7
ucauuccuauuaagcagcu

SEQ ID NO: 342285 - RNA, 10 nt, Human herpesvirus 7
ucauucugaa

SEQ ID NO: 342286 - RNA, 15 nt, Human herpesvirus 7
ucauugacauguuuc

SEQ ID NO: 342287 - RNA, 22 nt, Human herpesvirus 7
ucauugacauguuucuggaucu

SEQ ID NO: 342288 - RNA, 14 nt, Human herpesvirus 7
ucauugagucuuca

SEQ ID NO: 342289 - RNA, 22 nt, Human herpesvirus 7
ucauugauccuccuugccugca

SEQ ID NO: 342290 - RNA, 23 nt, Human herpesvirus 7
ucauugauccuccuugccugcaa

SEQ ID NO: 342291 - RNA, 14 nt, Human herpesvirus 7
ucauuggcauuauu

SEQ ID NO: 342292 - RNA, 18 nt, Human herpesvirus 7
ucauuggcauuauucuuc

SEQ ID NO: 342293 - RNA, 21 nt, Human herpesvirus 7
ucauuguacauuuuaccaaau

SEQ ID NO: 342294 - RNA, 12 nt, Human herpesvirus 7
ucauuugcaugu

SEQ ID NO: 342295 - RNA, 18 nt, Human herpesvirus 7
ucauuugugaaauugaca

SEQ ID NO: 342296 - RNA, 16 nt, Human herpesvirus 7
ucauuuuuuucuuaua

SEQ ID NO: 342297 - RNA, 18 nt, Human herpesvirus 7
uccaaaauacaauaguga

SEQ ID NO: 342298 - RNA, 19 nt, Human herpesvirus 7
uccaaaauguaaaccaaau

SEQ ID NO: 342299 - RNA, 17 nt, Human herpesvirus 7
uccaaaccggccaauga

SEQ ID NO: 342300 - RNA, 18 nt, Human herpesvirus 7
uccaaaguagaacuugaa

SEQ ID NO: 342301 - RNA, 20 nt, Human herpesvirus 7
uccaaaguagaacuugaaaa

SEQ ID NO: 342302 - RNA, 12 nt, Human herpesvirus 7
uccaacagaaua

SEQ ID NO: 342303 - RNA, 21 nt, Human herpesvirus 7
uccaacagcuucagaugcuau

SEQ ID NO: 342304 - RNA, 21 nt, Human herpesvirus 7
uccaaguuuuaacaaucuaag

SEQ ID NO: 342305 - RNA, 18 nt, Human herpesvirus 7
uccaaguuuugcgcaaaa

SEQ ID NO: 342306 - RNA, 13 nt, Human herpesvirus 7
uccaauaaugcau

SEQ ID NO: 342307 - RNA, 15 nt, Human herpesvirus 7
uccaauaaugcauca

SEQ ID NO: 342308 - RNA, 14 nt, Human herpesvirus 7
uccaaucaaaaacu

SEQ ID NO: 342309 - RNA, 20 nt, Human herpesvirus 7
uccacaguccucuagaucaa

SEQ ID NO: 342310 - RNA, 20 nt, Human herpesvirus 7
uccacauacucuagaacaaa

SEQ ID NO: 342311 - RNA, 15 nt, Human herpesvirus 7
uccaccgauuacugu

SEQ ID NO: 342312 - RNA, 14 nt, Human herpesvirus 7
uccagaguaugaau

SEQ ID NO: 342313 - RNA, 15 nt, Human herpesvirus 7
uccagaguccuuuca

SEQ ID NO: 342314 - RNA, 18 nt, Human herpesvirus 7
uccaggcuaaaacuguca

SEQ ID NO: 342315 - RNA, 14 nt, Human herpesvirus 7
uccaguacuugcau

SEQ ID NO: 342316 - RNA, 15 nt, Human herpesvirus 7
uccagugaccuuuua

SEQ ID NO: 342317 - RNA, 19 nt, Human herpesvirus 7
uccaguggcaguacuacua

SEQ ID NO: 342318 - RNA, 13 nt, Human herpesvirus 7
uccauacaaagaa

SEQ ID NO: 342319 - RNA, 15 nt, Human herpesvirus 7
uccauacaaagaaga

SEQ ID NO: 342320 - RNA, 11 nt, Human herpesvirus 7
uccaugucaca

SEQ ID NO: 342321 - RNA, 18 nt, Human herpesvirus 7
uccauucuaaaccaaaua

SEQ ID NO: 342322 - RNA, 20 nt, Human herpesvirus 7
uccauucuaaaccaaauaua

SEQ ID NO: 342323 - RNA, 15 nt, Human herpesvirus 7
ucccaaaaauuaaca

SEQ ID NO: 342324 - RNA, 15 nt, Human herpesvirus 7
ucccagaaauuucaa

SEQ ID NO: 342325 - RNA, 17 nt, Human herpesvirus 7
ucccagagaccuaugaa

SEQ ID NO: 342326 - RNA, 13 nt, Human herpesvirus 7
uccccauggcuuu

SEQ ID NO: 342327 - RNA, 14 nt, Human herpesvirus 7
ucccgcagagauua

SEQ ID NO: 342328 - RNA, 17 nt, Human herpesvirus 7
ucccgcagagauuaccu

SEQ ID NO: 342329 - RNA, 18 nt, Human herpesvirus 7
ucccuagaagaugacuca

SEQ ID NO: 342330 - RNA, 15 nt, Human herpesvirus 7
ucccuauugcaucaa

SEQ ID NO: 342331 - RNA, 15 nt, Human herpesvirus 7
uccgcauuugagggu

SEQ ID NO: 342332 - RNA, 18 nt, Human herpesvirus 7
uccggaagagacugucau

SEQ ID NO: 342333 - RNA, 19 nt, Human herpesvirus 7
uccggguaacgcaucucca

SEQ ID NO: 342334 - RNA, 15 nt, Human herpesvirus 7
uccguaacugcauua

SEQ ID NO: 342335 - RNA, 18 nt, Human herpesvirus 7
uccguugaaagcguuuca

SEQ ID NO: 342336 - RNA, 15 nt, Human herpesvirus 7
uccuaagcuuuucag

SEQ ID NO: 342337 - RNA, 16 nt, Human herpesvirus 7
uccuagaaacacggaa

SEQ ID NO: 342338 - RNA, 15 nt, Human herpesvirus 7
uccuaugacugagaa

SEQ ID NO: 342339 - RNA, 13 nt, Human herpesvirus 7
uccuaugauacaa

SEQ ID NO: 342340 - RNA, 14 nt, Human herpesvirus 7
uccuaugauacaau

SEQ ID NO: 342341 - RNA, 15 nt, Human herpesvirus 7
uccuauguuuggcaa

SEQ ID NO: 342342 - RNA, 12 nt, Human herpesvirus 7
uccucacagauu

SEQ ID NO: 342343 - RNA, 16 nt, Human herpesvirus 7
uccucagaauguacac

SEQ ID NO: 342344 - RNA, 14 nt, Human herpesvirus 7
uccucauagccagg

SEQ ID NO: 342345 - RNA, 16 nt, Human herpesvirus 7
uccucuaucucuguaa

SEQ ID NO: 342346 - RNA, 16 nt, Human herpesvirus 7
uccucucguguggccu

SEQ ID NO: 342347 - RNA, 12 nt, Human herpesvirus 7
uccucuggaucg

SEQ ID NO: 342348 - RNA, 17 nt, Human herpesvirus 7
uccugugugcaaugaug

SEQ ID NO: 342349 - RNA, 14 nt, Human herpesvirus 7
uccuucuaccucuu

SEQ ID NO: 342350 - RNA, 18 nt, Human herpesvirus 7
uccuucuaccucuuacau

SEQ ID NO: 342351 - RNA, 21 nt, Human herpesvirus 7
uccuuugaaaaggcaucgcau

SEQ ID NO: 342352 - RNA, 21 nt, Human herpesvirus 7
uccuuuuguugaaauuguagu

SEQ ID NO: 342353 - RNA, 15 nt, Human herpesvirus 7
ucgaaacuggcaaua

SEQ ID NO: 342354 - RNA, 18 nt, Human herpesvirus 7
ucgaaaugaaauauucua

SEQ ID NO: 342355 - RNA, 13 nt, Human herpesvirus 7
ucgaacuugucac

SEQ ID NO: 342356 - RNA, 19 nt, Human herpesvirus 7
ucgaauuuguucaauugcc

SEQ ID NO: 342357 - RNA, 17 nt, Human herpesvirus 7
ucgacagaaacauguau

SEQ ID NO: 342358 - RNA, 18 nt, Human herpesvirus 7
ucgacuucuaaaaauaca

SEQ ID NO: 342359 - RNA, 16 nt, Human herpesvirus 7
ucgaucuaagucuaca

SEQ ID NO: 342360 - RNA, 19 nt, Human herpesvirus 7
ucgaucucugucaaaagac

SEQ ID NO: 342361 - RNA, 21 nt, Human herpesvirus 7
ucgcaaugguauaaagugcug

SEQ ID NO: 342362 - RNA, 19 nt, Human herpesvirus 7
ucgcacgaaagaccuguac

SEQ ID NO: 342363 - RNA, 16 nt, Human herpesvirus 7
ucgcagccauguugcg

SEQ ID NO: 342364 - RNA, 18 nt, Human herpesvirus 7
ucgccaccguugggaaag

SEQ ID NO: 342365 - RNA, 17 nt, Human herpesvirus 7
ucgcgauaacacucuug

SEQ ID NO: 342366 - RNA, 16 nt, Human herpesvirus 7
ucgcuaacuuugcuau

SEQ ID NO: 342367 - RNA, 14 nt, Human herpesvirus 7
ucgcucaacuuaug

SEQ ID NO: 342368 - RNA, 22 nt, Human herpesvirus 7
ucgcugaagaacauuaauauca

SEQ ID NO: 342369 - RNA, 21 nt, Human herpesvirus 7
ucgcuuauuuaacacguagaa

SEQ ID NO: 342370 - RNA, 21 nt, Human herpesvirus 7
ucggaauuugauuccaucuca

SEQ ID NO: 342371 - RNA, 18 nt, Human herpesvirus 7
ucggcaauacuaguauuu

SEQ ID NO: 342372 - RNA, 16 nt, Human herpesvirus 7
ucggugucuucuugca

SEQ ID NO: 342373 - RNA, 13 nt, Human herpesvirus 7
ucguaucugugac

SEQ ID NO: 342374 - RNA, 21 nt, Human herpesvirus 7
ucguauugccuuucccagaag

SEQ ID NO: 342375 - RNA, 19 nt, Human herpesvirus 7
ucguuguuaaauccaauua

SEQ ID NO: 342376 - RNA, 22 nt, Human herpesvirus 7
ucuaaaauuuucuuagcuuuca

SEQ ID NO: 342377 - RNA, 21 nt, Human herpesvirus 7
ucuaaacaaacaaugagcaau

SEQ ID NO: 342378 - RNA, 20 nt, Human herpesvirus 7
ucuaaaguggagacaaucua

SEQ ID NO: 342379 - RNA, 22 nt, Human herpesvirus 7
ucuaaauaugaugaaacuucca

SEQ ID NO: 342380 - RNA, 14 nt, Human herpesvirus 7
ucuaaauucuuuaa

SEQ ID NO: 342381 - RNA, 19 nt, Human herpesvirus 7
ucuaagagcuuuugcaaag

SEQ ID NO: 342382 - RNA, 19 nt, Human herpesvirus 7
ucuaaggaauguggcuuaa

SEQ ID NO: 342383 - RNA, 12 nt, Human herpesvirus 7
ucuaagguuuag

SEQ ID NO: 342384 - RNA, 14 nt, Human herpesvirus 7
ucuaaguacuucug

SEQ ID NO: 342385 - RNA, 13 nt, Human herpesvirus 7
ucuaauuaaucug

SEQ ID NO: 342386 - RNA, 12 nt, Human herpesvirus 7
ucuaauugcaga

SEQ ID NO: 342387 - RNA, 21 nt, Human herpesvirus 7
uaacaauaaaguuuccauaaa

SEQ ID NO: 342388 - RNA, 13 nt, Human herpesvirus 7
uaacaaucuuaca

SEQ ID NO: 342389 - RNA, 14 nt, Human herpesvirus 7
uaacacucaaaaca

SEQ ID NO: 342390 - RNA, 13 nt, Human herpesvirus 7
uaacagaccuccu

SEQ ID NO: 342391 - RNA, 19 nt, Human herpesvirus 7
uaacaucggauuuuaucca

SEQ ID NO: 342392 - RNA, 15 nt, Human herpesvirus 7
uaacaugaguacugu

SEQ ID NO: 342393 - RNA, 14 nt, Human herpesvirus 7
uaacaugucuucaa

SEQ ID NO: 342394 - RNA, 15 nt, Human herpesvirus 7
uaacaugucuucaac

SEQ ID NO: 342395 - RNA, 10 nt, Human herpesvirus 7
uaacaugugu

SEQ ID NO: 342396 - RNA, 23 nt, Human herpesvirus 7
uaacauguguauauuugcuguuu

SEQ ID NO: 342397 - RNA, 14 nt, Human herpesvirus 7
uaacauuaaccaca

SEQ ID NO: 342398 - RNA, 15 nt, Human herpesvirus 7
uaacauugcuucaga

SEQ ID NO: 342399 - RNA, 16 nt, Human herpesvirus 7
uaacauuuuguaugaa

SEQ ID NO: 342400 - RNA, 17 nt, Human herpesvirus 7
uaacauuuuguaugaaa

SEQ ID NO: 342401 - RNA, 17 nt, Human herpesvirus 7
uaaccaaaaugugggau

SEQ ID NO: 342402 - RNA, 16 nt, Human herpesvirus 7
uaaccaaaccacagau

SEQ ID NO: 342403 - RNA, 18 nt, Human herpesvirus 7
uaaccacgcauaugcuaa

SEQ ID NO: 342404 - RNA, 19 nt, Human herpesvirus 7
uaaccacugugucaucaca

SEQ ID NO: 342405 - RNA, 20 nt, Human herpesvirus 7
uaaccgcaaaagccacugau

SEQ ID NO: 342406 - RNA, 13 nt, Human herpesvirus 7
uaaccuacauuuu

SEQ ID NO: 342407 - RNA, 12 nt, Human herpesvirus 7
uaaccugaauua

SEQ ID NO: 342408 - RNA, 19 nt, Human herpesvirus 7
uaacgaaggcaucaagaaa

SEQ ID NO: 342409 - RNA, 15 nt, Human herpesvirus 7
uaacgauccaguacu

SEQ ID NO: 342410 - RNA, 18 nt, Human herpesvirus 7
uaacgcuaaagagcauuc

SEQ ID NO: 342411 - RNA, 18 nt, Human herpesvirus 7
uaacguuuaucaccguaa

SEQ ID NO: 342412 - RNA, 19 nt, Human herpesvirus 7
uaacuauaauagccuuuca

SEQ ID NO: 342413 - RNA, 15 nt, Human herpesvirus 7
uaacuaucacccaca

SEQ ID NO: 342414 - RNA, 11 nt, Human herpesvirus 7
uaacuaugaac

SEQ ID NO: 342415 - RNA, 16 nt, Human herpesvirus 7
uaacuaugaacuggca

SEQ ID NO: 342416 - RNA, 21 nt, Human herpesvirus 7
uaacuaugaacuggcacauua

SEQ ID NO: 342417 - RNA, 23 nt, Human herpesvirus 7
uaacuaugaacuggcacauuaua

SEQ ID NO: 342418 - RNA, 12 nt, Human herpesvirus 7
uaacucugccag

SEQ ID NO: 342419 - RNA, 22 nt, Human herpesvirus 7
uaacuggaauuauacacuguga

SEQ ID NO: 342420 - RNA, 16 nt, Human herpesvirus 7
uaacugguaucaugaa

SEQ ID NO: 342421 - RNA, 16 nt, Human herpesvirus 7
uaacuuacuguuuaca

SEQ ID NO: 342422 - RNA, 23 nt, Human herpesvirus 7
uaacuuacuguuuacacauuaua

SEQ ID NO: 342423 - RNA, 16 nt, Human herpesvirus 7
uaacuuucaucugugu

SEQ ID NO: 342424 - RNA, 11 nt, Human herpesvirus 7
uaacuuuuugc

SEQ ID NO: 342425 - RNA, 15 nt, Human herpesvirus 7
uaagaaacaucuaug

SEQ ID NO: 342426 - RNA, 16 nt, Human herpesvirus 7
uaagaaaguuguacuc

SEQ ID NO: 342427 - RNA, 14 nt, Human herpesvirus 7
uaagaaucuauuua

SEQ ID NO: 342428 - RNA, 19 nt, Human herpesvirus 7
uaagacaccccaaaaucaa

SEQ ID NO: 342429 - RNA, 12 nt, Human herpesvirus 7
uaagacauuauu

SEQ ID NO: 342430 - RNA, 17 nt, Human herpesvirus 7
ggaguauuaccauuuau

SEQ ID NO: 342431 - RNA, 10 nt, Human herpesvirus 7
ggaguugcac

SEQ ID NO: 342432 - RNA, 23 nt, Human herpesvirus 7
ggaguuugaguuucuucuuccac

SEQ ID NO: 342433 - RNA, 23 nt, Human herpesvirus 7
ggaguuuuggguuuaugaugcau

SEQ ID NO: 342434 - RNA, 21 nt, Human herpesvirus 7
ggauaacuaugaacuggcaca

SEQ ID NO: 342435 - RNA, 20 nt, Human herpesvirus 7
ggauacggcagcggaaguga

SEQ ID NO: 342436 - RNA, 20 nt, Human herpesvirus 7
ggaugauguuauacauaaag

SEQ ID NO: 342437 - RNA, 18 nt, Human herpesvirus 7
ggauggcguguccauuca

SEQ ID NO: 342438 - RNA, 18 nt, Human herpesvirus 7
ggauucaaucuacuguac

SEQ ID NO: 342439 - RNA, 11 nt, Human herpesvirus 7
ggauucuuuga

SEQ ID NO: 342440 - RNA, 23 nt, Human herpesvirus 7
ggauuuauuauuuguuuguucug

SEQ ID NO: 342441 - RNA, 14 nt, Human herpesvirus 7
ggcaaacaguuuua

SEQ ID NO: 342442 - RNA, 17 nt, Human herpesvirus 7
ggcaccaauagaaaaca

SEQ ID NO: 342443 - RNA, 17 nt, Human herpesvirus 7
ggcaccccugccaguaa

SEQ ID NO: 342444 - RNA, 17 nt, Human herpesvirus 7
ggcacccuaauugccau

SEQ ID NO: 342445 - RNA, 18 nt, Human herpesvirus 7
ggcagaccuaaacccaga

SEQ ID NO: 342446 - RNA, 13 nt, Human herpesvirus 7
ggcauauaugaau

SEQ ID NO: 342447 - RNA, 19 nt, Human herpesvirus 7
ggcauauaugaaucaaauu

SEQ ID NO: 342448 - RNA, 16 nt, Human herpesvirus 7
ggccaguucuaucuca

SEQ ID NO: 342449 - RNA, 20 nt, Human herpesvirus 7
ggccccuggcguuacgggug

SEQ ID NO: 342450 - RNA, 14 nt, Human herpesvirus 7
ggccguuuaugaac

SEQ ID NO: 342451 - RNA, 16 nt, Human herpesvirus 7
ggcgaguuacauuuca

SEQ ID NO: 342452 - RNA, 14 nt, Human herpesvirus 7
ggcguaacugugac

SEQ ID NO: 342453 - RNA, 18 nt, Human herpesvirus 7
ggcguuacggguggcacu

SEQ ID NO: 342454 - RNA, 21 nt, Human herpesvirus 7
ggcuaacugagaaaaaugaca

SEQ ID NO: 342455 - RNA, 17 nt, Human herpesvirus 7
ggcuauuugucggugaa

SEQ ID NO: 342456 - RNA, 13 nt, Human herpesvirus 7
ggcugaugauaau

SEQ ID NO: 342457 - RNA, 15 nt, Human herpesvirus 7
gggaagaaucaagac

SEQ ID NO: 342458 - RNA, 22 nt, Human herpesvirus 7
ggggugauuguggggcauucau

SEQ ID NO: 342459 - RNA, 15 nt, Human herpesvirus 7
gggguuuuuuugccu

SEQ ID NO: 342460 - RNA, 16 nt, Human herpesvirus 7
ggguaauuaaaggaaa

SEQ ID NO: 342461 - RNA, 16 nt, Human herpesvirus 7
gguacaagguguuccu

SEQ ID NO: 342462 - RNA, 14 nt, Human herpesvirus 7
gguaggauugaaag

SEQ ID NO: 342463 - RNA, 16 nt, Human herpesvirus 7
ggucacaaaagcuuug

SEQ ID NO: 342464 - RNA, 16 nt, Human herpesvirus 7
ggucugacuucaauuu

SEQ ID NO: 342465 - RNA, 17 nt, Human herpesvirus 7
ggugacgucuagacauu

SEQ ID NO: 342466 - RNA, 12 nt, Human herpesvirus 7
gguguguuacau

SEQ ID NO: 342467 - RNA, 17 nt, Human herpesvirus 7
gguuaaaaaaaugaaua

SEQ ID NO: 342468 - RNA, 13 nt, Human herpesvirus 7
gguuacauaucca

SEQ ID NO: 342469 - RNA, 20 nt, Human herpesvirus 7
gguucauauacuucuugccc

SEQ ID NO: 342470 - RNA, 16 nt, Human herpesvirus 7
gguugacaucaauaaa

SEQ ID NO: 342471 - RNA, 19 nt, Human herpesvirus 7
gguugcuuggcugacauac

SEQ ID NO: 342472 - RNA, 23 nt, Human herpesvirus 7
gguuguucaaaaguagaggccga

SEQ ID NO: 342473 - RNA, 15 nt, Human herpesvirus 7
gguuuuauuucacau

SEQ ID NO: 342474 - RNA, 22 nt, Human herpesvirus 7
guaaaaauaaagacaugaauca

SEQ ID NO: 342475 - RNA, 19 nt, Human herpesvirus 7
guaaaaauuugacauuugc

SEQ ID NO: 342476 - RNA, 14 nt, Human herpesvirus 7
guaaaaguguucaa

SEQ ID NO: 342477 - RNA, 15 nt, Human herpesvirus 7
guaaacauuuguugc

SEQ ID NO: 342478 - RNA, 21 nt, Human herpesvirus 7
guaaaccuucgugugucucua

SEQ ID NO: 342479 - RNA, 17 nt, Human herpesvirus 7
guaaagauuuaacugau

SEQ ID NO: 342480 - RNA, 21 nt, Human herpesvirus 7
guaaauaaaaugguugugcaa

SEQ ID NO: 342481 - RNA, 23 nt, Human herpesvirus 7
guaaauaaaaugguugugcaauu

SEQ ID NO: 342482 - RNA, 14 nt, Human herpesvirus 7
guaaauauaaucaa

SEQ ID NO: 342483 - RNA, 16 nt, Human herpesvirus 7
guaaauauaaucaaaa

SEQ ID NO: 342484 - RNA, 15 nt, Human herpesvirus 7
guaaaugacugucag

SEQ ID NO: 342485 - RNA, 18 nt, Human herpesvirus 7
guaaauucuccaaucaua

SEQ ID NO: 342486 - RNA, 12 nt, Human herpesvirus 7
guaaauuuacuu

SEQ ID NO: 342487 - RNA, 23 nt, Human herpesvirus 7
guaaauuuacuugauuuucuuac

SEQ ID NO: 342488 - RNA, 21 nt, Human herpesvirus 7
guaacaacuagcaaacagugc

SEQ ID NO: 342489 - RNA, 18 nt, Human herpesvirus 7
guaacagauuuuauuuca

SEQ ID NO: 342490 - RNA, 20 nt, Human herpesvirus 7
guaacuguuuuucaaaaacg

SEQ ID NO: 342491 - RNA, 21 nt, Human herpesvirus 7
guaagaaacaucuaugugcuc

SEQ ID NO: 342492 - RNA, 21 nt, Human herpesvirus 7
guaauaauuuaaaauuauuaa

SEQ ID NO: 342493 - RNA, 17 nt, Human herpesvirus 7
guaaucauauaugcauu

SEQ ID NO: 342494 - RNA, 17 nt, Human herpesvirus 7
guaaucauucaagaaga

SEQ ID NO: 342495 - RNA, 22 nt, Human herpesvirus 7
guaauuuuuggcuaacugagaa

SEQ ID NO: 342496 - RNA, 22 nt, Human herpesvirus 7
guacaaccgccauucuuuucaa

SEQ ID NO: 342497 - RNA, 23 nt, Human herpesvirus 7
guacaaccgccauucuuuucaau

SEQ ID NO: 342498 - RNA, 18 nt, Human herpesvirus 7
guacaauaauuucuauua

SEQ ID NO: 342499 - RNA, 19 nt, Human herpesvirus 7
guacauaacucuaucuccu

SEQ ID NO: 342500 - RNA, 12 nt, Human herpesvirus 7
guacgucuugcu

SEQ ID NO: 342501 - RNA, 13 nt, Human herpesvirus 7
guacuaaucacaa

SEQ ID NO: 342502 - RNA, 13 nt, Human herpesvirus 7
guacuacauauua

SEQ ID NO: 342503 - RNA, 17 nt, Human herpesvirus 7
guacuccuucuaccucu

SEQ ID NO: 342504 - RNA, 16 nt, Human herpesvirus 7
guacuucuggcuuaag

SEQ ID NO: 342505 - RNA, 16 nt, Human herpesvirus 7
guacuuguaccaauca

SEQ ID NO: 342506 - RNA, 21 nt, Human herpesvirus 7
guacuuguaccaaucaagcca

SEQ ID NO: 342507 - RNA, 15 nt, Human herpesvirus 7
guacuuuugaucaaa

SEQ ID NO: 342508 - RNA, 14 nt, Human herpesvirus 7
guagaaaaugcugu

SEQ ID NO: 342509 - RNA, 20 nt, Human herpesvirus 7
guagaaggaaaccaauuaau

SEQ ID NO: 342510 - RNA, 20 nt, Human herpesvirus 7
guagauauuuugacaaucuu

SEQ ID NO: 342511 - RNA, 23 nt, Human herpesvirus 7
guagaugcaugcuaauauuucca

SEQ ID NO: 342512 - RNA, 12 nt, Human herpesvirus 7
guaggugcugca

SEQ ID NO: 342513 - RNA, 15 nt, Human herpesvirus 7
guagugugcacacaa

SEQ ID NO: 342514 - RNA, 16 nt, Human herpesvirus 7
guaguuguagugcugu

SEQ ID NO: 342515 - RNA, 17 nt, Human herpesvirus 7
guaguuguagugcuguu

SEQ ID NO: 342516 - RNA, 11 nt, Human herpesvirus 7
guauaaugcac

SEQ ID NO: 342517 - RNA, 22 nt, Human herpesvirus 7
guauacaaaagacauaacaaaa

SEQ ID NO: 342518 - RNA, 23 nt, Human herpesvirus 7
guauacaaaagacauaacaaaaa

SEQ ID NO: 342519 - RNA, 12 nt, Human herpesvirus 7
guauacaacuuu

SEQ ID NO: 342520 - RNA, 19 nt, Human herpesvirus 7
guaucuaccgcuguacaau

SEQ ID NO: 342521 - RNA, 15 nt, Human herpesvirus 7
guaugacaacacaag

SEQ ID NO: 342522 - RNA, 14 nt, Human herpesvirus 7
guaugaugacgcua

SEQ ID NO: 342523 - RNA, 22 nt, Human herpesvirus 7
guauguccaaucaaaaacugaa

SEQ ID NO: 342524 - RNA, 20 nt, Human herpesvirus 7
guauuaaaggaaacauuucu

SEQ ID NO: 342525 - RNA, 14 nt, Human herpesvirus 7
guauuaccauuuau

SEQ ID NO: 342526 - RNA, 17 nt, Human herpesvirus 7
guauucuuaugccaggu

SEQ ID NO: 342527 - RNA, 23 nt, Human herpesvirus 7
guauucuuaugccagguuuuuca

SEQ ID NO: 342528 - RNA, 15 nt, Human herpesvirus 7
guauuucgucuuucc

SEQ ID NO: 342529 - RNA, 20 nt, Human herpesvirus 7
gucaaaaaaaaaacaaucca

SEQ ID NO: 342530 - RNA, 17 nt, Human herpesvirus 7
gucaaaaaaaauuaaau

SEQ ID NO: 342531 - RNA, 22 nt, Human herpesvirus 7
gucaaauauauauuaagaaaua

SEQ ID NO: 342532 - RNA, 16 nt, Human herpesvirus 7
gucaaauguuccuuau

SEQ ID NO: 342533 - RNA, 21 nt, Human herpesvirus 7
gucaacaaauccacucuggca

SEQ ID NO: 342534 - RNA, 17 nt, Human herpesvirus 7
gucaaucugugaacuga

SEQ ID NO: 342535 - RNA, 15 nt, Human herpesvirus 7
gucacaauuacacaa

SEQ ID NO: 342536 - RNA, 16 nt, Human herpesvirus 7
gucacacuuauuccag

SEQ ID NO: 342537 - RNA, 23 nt, Human herpesvirus 7
gucacauaauguuguuuggucua

SEQ ID NO: 342538 - RNA, 19 nt, Human herpesvirus 7
gucacggauuagcuuucag

SEQ ID NO: 342539 - RNA, 22 nt, Human herpesvirus 7
gucacguucuaaaaaacaaaaa

SEQ ID NO: 342540 - RNA, 14 nt, Human herpesvirus 7
gucacuguccaaaa

SEQ ID NO: 342541 - RNA, 19 nt, Human herpesvirus 7
gucacuguccaaaacaauc

SEQ ID NO: 342542 - RNA, 22 nt, Human herpesvirus 7
gucauacaaugaauuagcuaaa

SEQ ID NO: 342543 - RNA, 23 nt, Human herpesvirus 7
gucauacaaugaauuagcuaaau

SEQ ID NO: 342544 - RNA, 16 nt, Human herpesvirus 7
gucaucccugcugaua

SEQ ID NO: 342545 - RNA, 17 nt, Human herpesvirus 7
gucaugaaucuuugacu

SEQ ID NO: 342546 - RNA, 20 nt, Human herpesvirus 7
gucaugaaucuuugacugua

SEQ ID NO: 342547 - RNA, 20 nt, Human herpesvirus 7
gucaugacuggacacaauca

SEQ ID NO: 342548 - RNA, 23 nt, Human herpesvirus 7
guccaaaaguuguuaagaaucua

SEQ ID NO: 342549 - RNA, 16 nt, Human herpesvirus 7
guccaaagugaugaaa

SEQ ID NO: 342550 - RNA, 21 nt, Human herpesvirus 7
guccaacacaagguacauuuu

SEQ ID NO: 342551 - RNA, 13 nt, Human herpesvirus 7
guccaaucaaaaa

SEQ ID NO: 342552 - RNA, 17 nt, Human herpesvirus 7
gucccaagagacuccaa

SEQ ID NO: 342553 - RNA, 23 nt, Human herpesvirus 7
gucccgcagacuuucgugucaca

SEQ ID NO: 342554 - RNA, 20 nt, Human herpesvirus 7
guccggauguaggugcugca

SEQ ID NO: 342555 - RNA, 17 nt, Human herpesvirus 7
guccucuaucucuguaa

SEQ ID NO: 342556 - RNA, 21 nt, Human herpesvirus 7
gucuacaauuucuggcaauaa

SEQ ID NO: 342557 - RNA, 22 nt, Human herpesvirus 7
gucuacaauuucuggcaauaaa

SEQ ID NO: 342558 - RNA, 12 nt, Human herpesvirus 7
gucuacauuuaa

SEQ ID NO: 342559 - RNA, 22 nt, Human herpesvirus 7
gucuauuucaauuaaugcauug

SEQ ID NO: 342560 - RNA, 11 nt, Human herpesvirus 7
gucucuuugcc

SEQ ID NO: 342561 - RNA, 21 nt, Human herpesvirus 7
gucugaaagccgcugccuucg

SEQ ID NO: 342562 - RNA, 14 nt, Human herpesvirus 7
gucugcccuuuuau

SEQ ID NO: 342563 - RNA, 22 nt, Human herpesvirus 7
gucugcucaaugguaagcaaaa

SEQ ID NO: 342564 - RNA, 19 nt, Human herpesvirus 7
gucuguagaugcaugcuaa

SEQ ID NO: 342565 - RNA, 20 nt, Human herpesvirus 7
gucugugguugaauuuguua

SEQ ID NO: 342566 - RNA, 15 nt, Human herpesvirus 7
gucuuacaacuagaa

SEQ ID NO: 342567 - RNA, 19 nt, Human herpesvirus 7
gucuugcuuggccgccaaa

SEQ ID NO: 342568 - RNA, 15 nt, Human herpesvirus 7
gucuuucaugcauug

SEQ ID NO: 342569 - RNA, 17 nt, Human herpesvirus 7
gucuuucaugcauugca

SEQ ID NO: 342570 - RNA, 18 nt, Human herpesvirus 7
gucuuucaugcauugcau

SEQ ID NO: 342571 - RNA, 15 nt, Human herpesvirus 7
gucuuuuaguuuuca

SEQ ID NO: 342572 - RNA, 14 nt, Human herpesvirus 7
gucuuuucuaccaa

SEQ ID NO: 342573 - RNA, 20 nt, Human herpesvirus 7
gugaaaauauuuuacaaaaa

SEQ ID NO: 342574 - RNA, 19 nt, Human herpesvirus 7
gugaaauaagaugcuuaag

SEQ ID NO: 342575 - RNA, 13 nt, Human herpesvirus 7
gugaacuguuaca

SEQ ID NO: 342576 - RNA, 18 nt, Human herpesvirus 7
gugacagagggcauuugu

SEQ ID NO: 342577 - RNA, 13 nt, Human herpesvirus 7
gugacgcuuuaau

SEQ ID NO: 342578 - RNA, 17 nt, Human herpesvirus 7
gugacuuggacuuacuu

SEQ ID NO: 342579 - RNA, 22 nt, Human herpesvirus 7
gugagaaauuuugaucuuguca

SEQ ID NO: 342580 - RNA, 23 nt, Human herpesvirus 7
gugaguucacgaucgucaucuuc

SEQ ID NO: 342581 - RNA, 21 nt, Human herpesvirus 7
gugauaugacugacauucuuc

SEQ ID NO: 342582 - RNA, 18 nt, Human herpesvirus 7
gugauugcgaccaaagau

SEQ ID NO: 342583 - RNA, 15 nt, Human herpesvirus 7
gugauuuuucauuua

SEQ ID NO: 342584 - RNA, 17 nt, Human herpesvirus 7
gugauuuuuuauuccca

SEQ ID NO: 342585 - RNA, 24 nt, Human herpesvirus 7
gugcaucuccuguaaccauuuauu

SEQ ID NO: 342586 - RNA, 23 nt, Human herpesvirus 7
gugccuugcgguagcacuagauu

SEQ ID NO: 342587 - RNA, 20 nt, Human herpesvirus 7
gugcucuuugucuuugcucu

SEQ ID NO: 342588 - RNA, 13 nt, Human herpesvirus 7
gugcuuacgugau

SEQ ID NO: 342589 - RNA, 19 nt, Human herpesvirus 7
gugcuuacgugaugccaua

SEQ ID NO: 342590 - RNA, 16 nt, Human herpesvirus 7
gugcuuagacuuauca

SEQ ID NO: 342591 - RNA, 19 nt, Human herpesvirus 7
gugcuuagacuuaucacca

SEQ ID NO: 342592 - RNA, 24 nt, Human herpesvirus 7
guggaaucucauaaucauaguaca

SEQ ID NO: 342593 - RNA, 14 nt, Human herpesvirus 7
guggccuucuugcc

SEQ ID NO: 342594 - RNA, 15 nt, Human herpesvirus 7
gugggaacauaaaaa

SEQ ID NO: 342595 - RNA, 19 nt, Human herpesvirus 7
gugguaaauuugcuugcuu

SEQ ID NO: 342596 - RNA, 13 nt, Human herpesvirus 7
gugguacaacaaa

SEQ ID NO: 342597 - RNA, 15 nt, Human herpesvirus 7
guguacuaaagccaa

SEQ ID NO: 342598 - RNA, 14 nt, Human herpesvirus 7
guguacuacauauu

SEQ ID NO: 342599 - RNA, 14 nt, Human herpesvirus 7
guguccacuacaga

SEQ ID NO: 342600 - RNA, 18 nt, Human herpesvirus 7
gugucuuuuaaugaucuc

SEQ ID NO: 342601 - RNA, 14 nt, Human herpesvirus 7
gugugaaaacaauu

SEQ ID NO: 342602 - RNA, 12 nt, Human herpesvirus 7
gugugcaaugau

SEQ ID NO: 342603 - RNA, 21 nt, Human herpesvirus 7
gugugcccgggaggcagacau

SEQ ID NO: 342604 - RNA, 20 nt, Human herpesvirus 7
guguggagggauaugaggaa

SEQ ID NO: 342605 - RNA, 15 nt, Human herpesvirus 7
guguggcaacaucuu

SEQ ID NO: 342606 - RNA, 21 nt, Human herpesvirus 7
guguuaaggagcuucauuuua

SEQ ID NO: 342607 - RNA, 18 nt, Human herpesvirus 7
guguuaauugugguacaa

SEQ ID NO: 342608 - RNA, 13 nt, Human herpesvirus 7
guguuauacuuau

SEQ ID NO: 342609 - RNA, 18 nt, Human herpesvirus 7
guguucaggcaacauuaa

SEQ ID NO: 342610 - RNA, 17 nt, Human herpesvirus 7
guguucuuuaaccagau

SEQ ID NO: 342611 - RNA, 21 nt, Human herpesvirus 7
guguuguaauaauucauuugu

SEQ ID NO: 342612 - RNA, 19 nt, Human herpesvirus 7
guguuuuaucuaccaucaa

SEQ ID NO: 342613 - RNA, 17 nt, Human herpesvirus 7
guuaaaaaaaugaauaa

SEQ ID NO: 342614 - RNA, 22 nt, Human herpesvirus 7
guuaaaagaucuuuuacagaag

SEQ ID NO: 342615 - RNA, 13 nt, Human herpesvirus 7
guuaaagaacaag

SEQ ID NO: 342616 - RNA, 16 nt, Human herpesvirus 7
guuaaaggaucaaaag

SEQ ID NO: 342617 - RNA, 14 nt, Human herpesvirus 7
guuaacaaucuuac

SEQ ID NO: 342618 - RNA, 19 nt, Human herpesvirus 7
guuaacaaucuuacaaaaa

SEQ ID NO: 342619 - RNA, 16 nt, Human herpesvirus 7
guuaacauauguugau

SEQ ID NO: 342620 - RNA, 13 nt, Human herpesvirus 7
guuaagcaccgaa

SEQ ID NO: 342621 - RNA, 22 nt, Human herpesvirus 7
guuaauguaguuguagugcugu

SEQ ID NO: 342622 - RNA, 17 nt, Human herpesvirus 7
guuaaugucucuguucc

SEQ ID NO: 342623 - RNA, 19 nt, Human herpesvirus 7
guuaauugugguacaacaa

SEQ ID NO: 342624 - RNA, 12 nt, Human herpesvirus 7
guuaauuuugca

SEQ ID NO: 342625 - RNA, 17 nt, Human herpesvirus 7
guuacacugauuucuac

SEQ ID NO: 342626 - RNA, 22 nt, Human herpesvirus 7
guuacacugauuucuacaauau

SEQ ID NO: 342627 - RNA, 15 nt, Human herpesvirus 7
guuacacugauuuuu

SEQ ID NO: 342628 - RNA, 19 nt, Human herpesvirus 7
guuacuauuugacugggua

SEQ ID NO: 342629 - RNA, 21 nt, Human herpesvirus 7
guuaggccaguucuaucucaa

SEQ ID NO: 342630 - RNA, 19 nt, Human herpesvirus 7
guuaguugggcaaacaguu

SEQ ID NO: 342631 - RNA, 21 nt, Human herpesvirus 7
guuaucauacguuuacaguuu

SEQ ID NO: 342632 - RNA, 13 nt, Human herpesvirus 7
guuauccaaguuu

SEQ ID NO: 342633 - RNA, 23 nt, Human herpesvirus 7
guuauuucuuauuggagauguca

SEQ ID NO: 342634 - RNA, 22 nt, Human herpesvirus 7
guucaaaauauuuaucugcauu

SEQ ID NO: 342635 - RNA, 20 nt, Human herpesvirus 7
guucaaauaugcauggagaa

SEQ ID NO: 342636 - RNA, 14 nt, Human herpesvirus 7
guucauaaugacac

SEQ ID NO: 342637 - RNA, 13 nt, Human herpesvirus 7
guuccgaaaacau

SEQ ID NO: 342638 - RNA, 23 nt, Human herpesvirus 7
guuccuaaauaauucacauuuau

SEQ ID NO: 342639 - RNA, 17 nt, Human herpesvirus 7
guuccuuauauuaaaaa

SEQ ID NO: 342640 - RNA, 23 nt, Human herpesvirus 7
guucuaauuuuggcgaaacaaua

SEQ ID NO: 342641 - RNA, 22 nt, Human herpesvirus 7
guucuccuuguuguguuuuauc

SEQ ID NO: 342642 - RNA, 14 nt, Human herpesvirus 7
guucugaaacaguc

SEQ ID NO: 342643 - RNA, 23 nt, Human herpesvirus 7
guucuugcuggcucaagcacaau

SEQ ID NO: 342644 - RNA, 15 nt, Human herpesvirus 7
guucuuuaauaucau

SEQ ID NO: 342645 - RNA, 18 nt, Human herpesvirus 7
guugaaacauagcuagaa

SEQ ID NO: 342646 - RNA, 22 nt, Human herpesvirus 7
guugaaagcguuucacugggaa

SEQ ID NO: 342647 - RNA, 16 nt, Human herpesvirus 7
guugagcuaucugauu

SEQ ID NO: 342648 - RNA, 22 nt, Human herpesvirus 7
guugcaaauguuccacgaucau

SEQ ID NO: 342649 - RNA, 15 nt, Human herpesvirus 7
guugcaacucuucuu

SEQ ID NO: 342650 - RNA, 20 nt, Human herpesvirus 7
guugcaauacaaauuccugc

SEQ ID NO: 342651 - RNA, 12 nt, Human herpesvirus 7
guugcucauguu

SEQ ID NO: 342652 - RNA, 14 nt, Human herpesvirus 7
guugucauacaaug

SEQ ID NO: 342653 - RNA, 22 nt, Human herpesvirus 7
guuguguuuuaucuaccaucaa

SEQ ID NO: 342654 - RNA, 10 nt, Human herpesvirus 7
guuguuaaaa

SEQ ID NO: 342655 - RNA, 18 nt, Human herpesvirus 7
guuguugguguguuacau

SEQ ID NO: 342656 - RNA, 14 nt, Human herpesvirus 7
guuguugucauuga

SEQ ID NO: 342657 - RNA, 19 nt, Human herpesvirus 7
guuuaaugaaaaagccaua

SEQ ID NO: 342658 - RNA, 16 nt, Human herpesvirus 7
guuuacuuauguguua

SEQ ID NO: 342659 - RNA, 16 nt, Human herpesvirus 7
guuuaugaacaagguu

SEQ ID NO: 342660 - RNA, 14 nt, Human herpesvirus 7
guuuaugaugcauu

SEQ ID NO: 342661 - RNA, 12 nt, Human herpesvirus 7
guuucauuuaaa

SEQ ID NO: 342662 - RNA, 13 nt, Human herpesvirus 7
guuucuacauguu

SEQ ID NO: 342663 - RNA, 19 nt, Human herpesvirus 7
guuucuagcaaaauaugca

SEQ ID NO: 342664 - RNA, 20 nt, Human herpesvirus 7
guuugaacaaguagugcuaa

SEQ ID NO: 342665 - RNA, 20 nt, Human herpesvirus 7
guuugaguuucuucuuccac

SEQ ID NO: 342666 - RNA, 12 nt, Human herpesvirus 7
guuugaucaaaa

SEQ ID NO: 342667 - RNA, 21 nt, Human herpesvirus 7
guuugcagcccaauguugccu

SEQ ID NO: 342668 - RNA, 15 nt, Human herpesvirus 7
guuuggagcuugguu

SEQ ID NO: 342669 - RNA, 15 nt, Human herpesvirus 7
guuuggcaacucuuc

SEQ ID NO: 342670 - RNA, 20 nt, Human herpesvirus 7
guuuguaaggccaaagguaa

SEQ ID NO: 342671 - RNA, 14 nt, Human herpesvirus 7
guuugucaucguaa

SEQ ID NO: 342672 - RNA, 21 nt, Human herpesvirus 7
guuuuaaagcugauuauucau

SEQ ID NO: 342673 - RNA, 15 nt, Human herpesvirus 7
guuuuaaauagugaa

SEQ ID NO: 342674 - RNA, 20 nt, Human herpesvirus 7
guuuuaaauagugaaucaua

SEQ ID NO: 342675 - RNA, 21 nt, Human herpesvirus 7
guuuuagggaauguaauuccg

SEQ ID NO: 342676 - RNA, 18 nt, Human herpesvirus 7
guuuuaugacucagacga

SEQ ID NO: 342677 - RNA, 18 nt, Human herpesvirus 7
guuuucucgcguuucuuc

SEQ ID NO: 342678 - RNA, 18 nt, Human herpesvirus 7
guuuucuuagaugcaucc

SEQ ID NO: 342679 - RNA, 20 nt, Human herpesvirus 7
guuuugaaaagucauuauuu

SEQ ID NO: 342680 - RNA, 14 nt, Human herpesvirus 7
guuuuuaaacuuau

SEQ ID NO: 342681 - RNA, 22 nt, Human herpesvirus 7
guuuuuuauuuagcuaauucau

SEQ ID NO: 342682 - RNA, 15 nt, Human herpesvirus 7
uaaaaaaaaaaccac

SEQ ID NO: 342683 - RNA, 16 nt, Human herpesvirus 7
uaaaaaaaaaaccaca

SEQ ID NO: 342684 - RNA, 15 nt, Human herpesvirus 7
uaaaaaaucuaauua

SEQ ID NO: 342685 - RNA, 20 nt, Human herpesvirus 7
uaaaaaaucuaauuaaucug

SEQ ID NO: 342686 - RNA, 13 nt, Human herpesvirus 7
uaaaaacaagcuu

SEQ ID NO: 342687 - RNA, 12 nt, Human herpesvirus 7
uaaaaacaguaa

SEQ ID NO: 342688 - RNA, 17 nt, Human herpesvirus 7
uaaaaacccuuuauuca

SEQ ID NO: 342689 - RNA, 23 nt, Human herpesvirus 7
uaaaaacgaacacuuucuaauaa

SEQ ID NO: 342690 - RNA, 21 nt, Human herpesvirus 7
uaaaaagaaucacauuuuugc

SEQ ID NO: 342691 - RNA, 14 nt, Human herpesvirus 7
uaaaaagacaauuu

SEQ ID NO: 342692 - RNA, 17 nt, Human herpesvirus 7
uaaaaagauauacauaa

SEQ ID NO: 342693 - RNA, 21 nt, Human herpesvirus 7
uaaaaagcccaugaacacugc

SEQ ID NO: 342694 - RNA, 23 nt, Human herpesvirus 7
uaaaaagugcucugucuccaaau

SEQ ID NO: 342695 - RNA, 16 nt, Human herpesvirus 7
uaaaaauuaacagcuc

SEQ ID NO: 342696 - RNA, 11 nt, Human herpesvirus 7
uaaaacaaacu

SEQ ID NO: 342697 - RNA, 19 nt, Human herpesvirus 7
uaaaacaaucgauugcagu

SEQ ID NO: 342698 - RNA, 23 nt, Human herpesvirus 7
uaaaacauuuacaaaaaaaagcu

SEQ ID NO: 342699 - RNA, 14 nt, Human herpesvirus 7
uaaaacgugugaaa

SEQ ID NO: 342700 - RNA, 14 nt, Human herpesvirus 7
uaaaacuacauuua

SEQ ID NO: 342701 - RNA, 15 nt, Human herpesvirus 7
uaaaacucaauguaa

SEQ ID NO: 342702 - RNA, 19 nt, Human herpesvirus 7
uaaaacuuauguacucuga

SEQ ID NO: 342703 - RNA, 12 nt, Human herpesvirus 7
uaaaacuuugaa

SEQ ID NO: 342704 - RNA, 13 nt, Human herpesvirus 7
uaaaacuuugaaa

SEQ ID NO: 342705 - RNA, 19 nt, Human herpesvirus 7
uaaaagagaaaauguuuaa

SEQ ID NO: 342706 - RNA, 16 nt, Human herpesvirus 7
uaaaagaucuuuuaca

SEQ ID NO: 342707 - RNA, 22 nt, Human herpesvirus 7
uaaaagggcagacacuacuuaa

SEQ ID NO: 342708 - RNA, 15 nt, Human herpesvirus 7
uaaaaguguucaaaa

SEQ ID NO: 342709 - RNA, 13 nt, Human herpesvirus 7
uaaaaguucauaa

SEQ ID NO: 342710 - RNA, 18 nt, Human herpesvirus 7
uaaaaguucauaaugaca

SEQ ID NO: 342711 - RNA, 19 nt, Human herpesvirus 7
uaaaauagaaaaugucaga

SEQ ID NO: 342712 - RNA, 19 nt, Human herpesvirus 7
uaaaauauguucagauuga

SEQ ID NO: 342713 - RNA, 21 nt, Human herpesvirus 7
uaaaaucuacuguaaucugac

SEQ ID NO: 342714 - RNA, 18 nt, Human herpesvirus 7
uaaaaugaccgcauguga

SEQ ID NO: 342715 - RNA, 20 nt, Human herpesvirus 7
uaaaaugaccgcaugugaaa

SEQ ID NO: 342716 - RNA, 15 nt, Human herpesvirus 7
uaaaaugaugaugac

SEQ ID NO: 342717 - RNA, 20 nt, Human herpesvirus 7
uaaaaugggcguaacuguga

SEQ ID NO: 342718 - RNA, 17 nt, Human herpesvirus 7
uaaaaugguugugcaau

SEQ ID NO: 342719 - RNA, 13 nt, Human herpesvirus 7
uaaaauuaauuca

SEQ ID NO: 342720 - RNA, 17 nt, Human herpesvirus 7
uaaaauugacagcacca

SEQ ID NO: 342721 - RNA, 18 nt, Human herpesvirus 7
uaaaauuuaaaaucaauu

SEQ ID NO: 342722 - RNA, 18 nt, Human herpesvirus 7
uaaaauuuucuuagcuuu

SEQ ID NO: 342723 - RNA, 22 nt, Human herpesvirus 7
uaaacaaaacaguuuguuguau

SEQ ID NO: 342724 - RNA, 20 nt, Human herpesvirus 7
uaaacaaucuggacauuuca

SEQ ID NO: 342725 - RNA, 21 nt, Human herpesvirus 7
uaaacacuugcuagcugugau

SEQ ID NO: 342726 - RNA, 18 nt, Human herpesvirus 7
uaaacagcguucaaucaa

SEQ ID NO: 342727 - RNA, 19 nt, Human herpesvirus 7
uaaacagcguucaaucaaa

SEQ ID NO: 342728 - RNA, 14 nt, Human herpesvirus 7
uaaacaugauuuau

SEQ ID NO: 342729 - RNA, 13 nt, Human herpesvirus 7
uaaacauuucaaa

SEQ ID NO: 342730 - RNA, 18 nt, Human herpesvirus 7
uaaacauuucaaaaucag

SEQ ID NO: 342731 - RNA, 23 nt, Human herpesvirus 7
uaaacccagagcuaaaacaugga

SEQ ID NO: 342732 - RNA, 14 nt, Human herpesvirus 7
uaaaccgaguguaa

SEQ ID NO: 342733 - RNA, 14 nt, Human herpesvirus 7
uaaacguccauuga

SEQ ID NO: 342734 - RNA, 14 nt, Human herpesvirus 7
uaaacuugugaaaa

SEQ ID NO: 342735 - RNA, 18 nt, Human herpesvirus 7
uaaacuugugaaaauaac

SEQ ID NO: 342736 - RNA, 15 nt, Human herpesvirus 7
uaaagaaccuaucaa

SEQ ID NO: 342737 - RNA, 22 nt, Human herpesvirus 7
uaaagaaccuaucaaaauucca

SEQ ID NO: 342738 - RNA, 23 nt, Human herpesvirus 7
uaaagaaccuaucaaaauuccau

SEQ ID NO: 342739 - RNA, 13 nt, Human herpesvirus 7
uaaagaaguaaua

SEQ ID NO: 342740 - RNA, 13 nt, Human herpesvirus 7
uaaagcaccaaaa

SEQ ID NO: 342741 - RNA, 16 nt, Human herpesvirus 7
uaaagcagaaaauucu

SEQ ID NO: 342742 - RNA, 14 nt, Human herpesvirus 7
uaaagcuacagcuu

SEQ ID NO: 342743 - RNA, 20 nt, Human herpesvirus 7
uaaagggauuucuucuucua

SEQ ID NO: 342744 - RNA, 19 nt, Human herpesvirus 7
uaaagggcugucugaaguc

SEQ ID NO: 342745 - RNA, 23 nt, Human herpesvirus 7
uaaagggcugucugaagucuugu

SEQ ID NO: 342746 - RNA, 19 nt, Human herpesvirus 7
uaaaggugguuacauaucc

SEQ ID NO: 342747 - RNA, 16 nt, Human herpesvirus 7
uaaagugcugucuugc

SEQ ID NO: 342748 - RNA, 19 nt, Human herpesvirus 7
uaaaguuuuguaacuauaa

SEQ ID NO: 342749 - RNA, 21 nt, Human herpesvirus 7
uaaauaaaaugguugugcaau

SEQ ID NO: 342750 - RNA, 19 nt, Human herpesvirus 7
uaaauaaaauuuaaaauca

SEQ ID NO: 342751 - RNA, 14 nt, Human herpesvirus 7
uaaauaauucacau

SEQ ID NO: 342752 - RNA, 22 nt, Human herpesvirus 7
uaaauacgcguggaaguguuaa

SEQ ID NO: 342753 - RNA, 16 nt, Human herpesvirus 7
uaaauacggaccaaga

SEQ ID NO: 342754 - RNA, 18 nt, Human herpesvirus 7
uaaauacuugcaaugcaa

SEQ ID NO: 342755 - RNA, 14 nt, Human herpesvirus 7
uaaauagugaauca

SEQ ID NO: 342756 - RNA, 16 nt, Human herpesvirus 7
uaaauagugaaucaua

SEQ ID NO: 342757 - RNA, 18 nt, Human herpesvirus 7
uaaauaugacuuguugaa

SEQ ID NO: 342758 - RNA, 21 nt, Human herpesvirus 7
uaaauaugaugaaacuuccaa

SEQ ID NO: 342759 - RNA, 14 nt, Human herpesvirus 7
uaaaucauaccaua

SEQ ID NO: 342760 - RNA, 16 nt, Human herpesvirus 7
uaaaucauaccauaaa

SEQ ID NO: 342761 - RNA, 14 nt, Human herpesvirus 7
uaaaucauguuuaa

SEQ ID NO: 342762 - RNA, 14 nt, Human herpesvirus 7
uaaaugaaguuugu

SEQ ID NO: 342763 - RNA, 15 nt, Human herpesvirus 7
uaaaugacugucagc

SEQ ID NO: 342764 - RNA, 20 nt, Human herpesvirus 7
uaaaugauuuuaaauuuacu

SEQ ID NO: 342765 - RNA, 19 nt, Human herpesvirus 7
uaaaugguuuuauuucaca

SEQ ID NO: 342766 - RNA, 14 nt, Human herpesvirus 7
uaaauuacgagaua

SEQ ID NO: 342767 - RNA, 17 nt, Human herpesvirus 7
uaaauuauuagauucca

SEQ ID NO: 342768 - RNA, 13 nt, Human herpesvirus 7
uaaauucaacauc

SEQ ID NO: 342769 - RNA, 16 nt, Human herpesvirus 7
uaaauugcaacuggca

SEQ ID NO: 342770 - RNA, 11 nt, Human herpesvirus 7
uaaauuuacuu

SEQ ID NO: 342771 - RNA, 21 nt, Human herpesvirus 7
uaacaaacaauaaauuuugaa

SEQ ID NO: 342772 - RNA, 16 nt, Human herpesvirus 7
uaacaaagugcauaaa

SEQ ID NO: 342773 - RNA, 18 nt, Human herpesvirus 7
uaacaaauucaaccacag

SEQ ID NO: 342774 - RNA, 19 nt, Human herpesvirus 7
uaacaaauucaaccacaga

SEQ ID NO: 342775 - RNA, 21 nt, Human herpesvirus 7
uaacaaauucaaccacagaca

SEQ ID NO: 342776 - RNA, 18 nt, Human herpesvirus 7
uaacaacagcagcugcua

SEQ ID NO: 342777 - RNA, 19 nt, Human herpesvirus 7
uaacaacagcagcugcuaa

SEQ ID NO: 342778 - RNA, 14 nt, Human herpesvirus 7
uaacaaguauguca

SEQ ID NO: 342779 - RNA, 17 nt, Human herpesvirus 7
gccagaacucaauuuuu

SEQ ID NO: 342780 - RNA, 22 nt, Human herpesvirus 7
gccagaucguucauugauuaua

SEQ ID NO: 342781 - RNA, 17 nt, Human herpesvirus 7
gccagcagugugaccga

SEQ ID NO: 342782 - RNA, 14 nt, Human herpesvirus 7
gccagguauucaaa

SEQ ID NO: 342783 - RNA, 18 nt, Human herpesvirus 7
gccagguuuuucaaagac

SEQ ID NO: 342784 - RNA, 14 nt, Human herpesvirus 7
gccaguucuaucuc

SEQ ID NO: 342785 - RNA, 16 nt, Human herpesvirus 7
gccaguucuaucucaa

SEQ ID NO: 342786 - RNA, 22 nt, Human herpesvirus 7
gccaguucuaucucaaaacaaa

SEQ ID NO: 342787 - RNA, 20 nt, Human herpesvirus 7
gccauaaaauguacaauucc

SEQ ID NO: 342788 - RNA, 16 nt, Human herpesvirus 7
gccauaaaugcuuaaa

SEQ ID NO: 342789 - RNA, 20 nt, Human herpesvirus 7
gccauaauuucagcacuggg

SEQ ID NO: 342790 - RNA, 15 nt, Human herpesvirus 7
gccaucuaauugcag

SEQ ID NO: 342791 - RNA, 18 nt, Human herpesvirus 7
gccauucuuuucaaugca

SEQ ID NO: 342792 - RNA, 13 nt, Human herpesvirus 7
gcccaagugggug

SEQ ID NO: 342793 - RNA, 20 nt, Human herpesvirus 7
gcccacucuggaaaugucaa

SEQ ID NO: 342794 - RNA, 13 nt, Human herpesvirus 7
gccguuuaugaac

SEQ ID NO: 342795 - RNA, 18 nt, Human herpesvirus 7
gccucccgggcacacuuu

SEQ ID NO: 342796 - RNA, 21 nt, Human herpesvirus 7
gccucguaguucuacuuggga

SEQ ID NO: 342797 - RNA, 16 nt, Human herpesvirus 7
gccucugccucuuggc

SEQ ID NO: 342798 - RNA, 19 nt, Human herpesvirus 7
gccuucuugccuacacuuu

SEQ ID NO: 342799 - RNA, 19 nt, Human herpesvirus 7
gccuugccaaaagcuugaa

SEQ ID NO: 342800 - RNA, 20 nt, Human herpesvirus 7
gccuugccaaaagcuugaaa

SEQ ID NO: 342801 - RNA, 17 nt, Human herpesvirus 7
gccuugcuagcaccgaa

SEQ ID NO: 342802 - RNA, 16 nt, Human herpesvirus 7
gccuuuaaaauuucau

SEQ ID NO: 342803 - RNA, 22 nt, Human herpesvirus 7
gccuuuuuucuuccuagcauua

SEQ ID NO: 342804 - RNA, 15 nt, Human herpesvirus 7
gcgaaagccacuguu

SEQ ID NO: 342805 - RNA, 17 nt, Human herpesvirus 7
gcgaaagccacuguuga

SEQ ID NO: 342806 - RNA, 18 nt, Human herpesvirus 7
gcgaaagccacuguugau

SEQ ID NO: 342807 - RNA, 19 nt, Human herpesvirus 7
gcgagaaaauacuacaguu

SEQ ID NO: 342808 - RNA, 20 nt, Human herpesvirus 7
gcgaguccaaaaguuguuaa

SEQ ID NO: 342809 - RNA, 14 nt, Human herpesvirus 7
gcgauguuggcacu

SEQ ID NO: 342810 - RNA, 20 nt, Human herpesvirus 7
gcgcgucuuacggcucuaac

SEQ ID NO: 342811 - RNA, 18 nt, Human herpesvirus 7
gcguggccuucuugccua

SEQ ID NO: 342812 - RNA, 19 nt, Human herpesvirus 7
gcguuaaugucucuguucc

SEQ ID NO: 342813 - RNA, 19 nt, Human herpesvirus 7
gcuaaagagcauucaugcc

SEQ ID NO: 342814 - RNA, 20 nt, Human herpesvirus 7
gcuaaagagcauucaugccu

SEQ ID NO: 342815 - RNA, 17 nt, Human herpesvirus 7
gcuaacaaguaugucag

SEQ ID NO: 342816 - RNA, 14 nt, Human herpesvirus 7
gcuaaggcgaaaaa

SEQ ID NO: 342817 - RNA, 22 nt, Human herpesvirus 7
gcuaauuugcauaaacuaucaa

SEQ ID NO: 342818 - RNA, 16 nt, Human herpesvirus 7
gcuagaaaccaaguuu

SEQ ID NO: 342819 - RNA, 12 nt, Human herpesvirus 7
gcuagaaugugu

SEQ ID NO: 342820 - RNA, 17 nt, Human herpesvirus 7
gcuagauugacuaugaa

SEQ ID NO: 342821 - RNA, 20 nt, Human herpesvirus 7
gcuagccuauaauucucaca

SEQ ID NO: 342822 - RNA, 15 nt, Human herpesvirus 7
gcuagccucauggcu

SEQ ID NO: 342823 - RNA, 14 nt, Human herpesvirus 7
gcuaugacuuugaa

SEQ ID NO: 342824 - RNA, 21 nt, Human herpesvirus 7
gcuaugcuugaaagaauauaa

SEQ ID NO: 342825 - RNA, 19 nt, Human herpesvirus 7
gcuauguauaaucaagucu

SEQ ID NO: 342826 - RNA, 21 nt, Human herpesvirus 7
gcuauucacgcuuccaucaca

SEQ ID NO: 342827 - RNA, 22 nt, Human herpesvirus 7
gcuauucacgcuuccaucacaa

SEQ ID NO: 342828 - RNA, 12 nt, Human herpesvirus 7
gcucaacuuaug

SEQ ID NO: 342829 - RNA, 17 nt, Human herpesvirus 7
gcucaacuuauguguca

SEQ ID NO: 342830 - RNA, 16 nt, Human herpesvirus 7
gcucaagcacaaucac

SEQ ID NO: 342831 - RNA, 17 nt, Human herpesvirus 7
gcucaaugguaagcaaa

SEQ ID NO: 342832 - RNA, 14 nt, Human herpesvirus 7
gcucacuucaaaaa

SEQ ID NO: 342833 - RNA, 19 nt, Human herpesvirus 7
gcucauuuuguuuugcaau

SEQ ID NO: 342834 - RNA, 16 nt, Human herpesvirus 7
gcucgauauacaugua

SEQ ID NO: 342835 - RNA, 14 nt, Human herpesvirus 7
gcucuaaacaaaca

SEQ ID NO: 342836 - RNA, 17 nt, Human herpesvirus 7
gcucuaaacaaacaaug

SEQ ID NO: 342837 - RNA, 18 nt, Human herpesvirus 7
gcucuagaaaaucuacca

SEQ ID NO: 342838 - RNA, 13 nt, Human herpesvirus 7
gcucucagauuag

SEQ ID NO: 342839 - RNA, 14 nt, Human herpesvirus 7
gcucucuggccaga

SEQ ID NO: 342840 - RNA, 17 nt, Human herpesvirus 7
gcucuuuacaaaauuca

SEQ ID NO: 342841 - RNA, 13 nt, Human herpesvirus 7
gcugaaacaucaa

SEQ ID NO: 342842 - RNA, 17 nt, Human herpesvirus 7
gcugaaauaaauucaag

SEQ ID NO: 342843 - RNA, 17 nt, Human herpesvirus 7
gcugaacgcagacacaa

SEQ ID NO: 342844 - RNA, 15 nt, Human herpesvirus 7
gcugaagaacauuaa

SEQ ID NO: 342845 - RNA, 22 nt, Human herpesvirus 7
gcugagacucacuccuugcaua

SEQ ID NO: 342846 - RNA, 22 nt, Human herpesvirus 7
gcugauccgccgacaagaaaca

SEQ ID NO: 342847 - RNA, 17 nt, Human herpesvirus 7
gcugauucaacacucga

SEQ ID NO: 342848 - RNA, 19 nt, Human herpesvirus 7
gcugcaacaaauuaaauac

SEQ ID NO: 342849 - RNA, 13 nt, Human herpesvirus 7
gcugcagcugaaa

SEQ ID NO: 342850 - RNA, 22 nt, Human herpesvirus 7
gcugcauguguacuaaagccaa

SEQ ID NO: 342851 - RNA, 17 nt, Human herpesvirus 7
gcugcggacgcggagaa

SEQ ID NO: 342852 - RNA, 17 nt, Human herpesvirus 7
gcuggcucaagcacaau

SEQ ID NO: 342853 - RNA, 18 nt, Human herpesvirus 7
gcugugagugaacauuug

SEQ ID NO: 342854 - RNA, 23 nt, Human herpesvirus 7
gcuguuugaacaaguagugcuaa

SEQ ID NO: 342855 - RNA, 14 nt, Human herpesvirus 7
gcuguuugucaucg

SEQ ID NO: 342856 - RNA, 21 nt, Human herpesvirus 7
gcuuaaaaaauacauugaaua

SEQ ID NO: 342857 - RNA, 15 nt, Human herpesvirus 7
gcuuaaaacuuugaa

SEQ ID NO: 342858 - RNA, 18 nt, Human herpesvirus 7
gcuuagacuuaucaccau

SEQ ID NO: 342859 - RNA, 20 nt, Human herpesvirus 7
gcuuagaugcugaaacauca

SEQ ID NO: 342860 - RNA, 23 nt, Human herpesvirus 7
gcuuauuuauauauggcaauaaa

SEQ ID NO: 342861 - RNA, 22 nt, Human herpesvirus 7
gcuucaaaaauguuuacaaaca

SEQ ID NO: 342862 - RNA, 21 nt, Human herpesvirus 7
gcuucaguacuugaauaugag

SEQ ID NO: 342863 - RNA, 14 nt, Human herpesvirus 7
gcuuccaucacaaa

SEQ ID NO: 342864 - RNA, 16 nt, Human herpesvirus 7
gcuucuauuauagaag

SEQ ID NO: 342865 - RNA, 20 nt, Human herpesvirus 7
gcuucuucuaauacaucuag

SEQ ID NO: 342866 - RNA, 13 nt, Human herpesvirus 7
gcuugaaagaaua

SEQ ID NO: 342867 - RNA, 20 nt, Human herpesvirus 7
gcuugcgaucaucauuggua

SEQ ID NO: 342868 - RNA, 16 nt, Human herpesvirus 7
gcuuguauauacggaa

SEQ ID NO: 342869 - RNA, 17 nt, Human herpesvirus 7
gcuuguauauacggaau

SEQ ID NO: 342870 - RNA, 17 nt, Human herpesvirus 7
gcuuuacgaaacaauuu

SEQ ID NO: 342871 - RNA, 19 nt, Human herpesvirus 7
gcuuucacuacuacaugaa

SEQ ID NO: 342872 - RNA, 23 nt, Human herpesvirus 7
gcuuuucaggcuaugacuuugaa

SEQ ID NO: 342873 - RNA, 16 nt, Human herpesvirus 7
ggaaaaaggauuugaa

SEQ ID NO: 342874 - RNA, 18 nt, Human herpesvirus 7
ggaaaauggagcauuauu

SEQ ID NO: 342875 - RNA, 21 nt, Human herpesvirus 7
ggaaacacaauuguauuucag

SEQ ID NO: 342876 - RNA, 23 nt, Human herpesvirus 7
ggaaacaucuuuauauguguucg

SEQ ID NO: 342877 - RNA, 13 nt, Human herpesvirus 7
ggaaagaugguga

SEQ ID NO: 342878 - RNA, 15 nt, Human herpesvirus 7
ggaacagauucucca

SEQ ID NO: 342879 - RNA, 15 nt, Human herpesvirus 7
ggaagagacugucau

SEQ ID NO: 342880 - RNA, 19 nt, Human herpesvirus 7
ggaagcuuuacagcagccu

SEQ ID NO: 342881 - RNA, 21 nt, Human herpesvirus 7
ggaagcuuucguaaucauuca

SEQ ID NO: 342882 - RNA, 22 nt, Human herpesvirus 7
ggaaucuauaguuuguauuuca

SEQ ID NO: 342883 - RNA, 14 nt, Human herpesvirus 7
ggaauggacaaaaa

SEQ ID NO: 342884 - RNA, 19 nt, Human herpesvirus 7
ggaauuugauuccaucuca

SEQ ID NO: 342885 - RNA, 21 nt, Human herpesvirus 7
ggacaaauauacgaaugccau

SEQ ID NO: 342886 - RNA, 23 nt, Human herpesvirus 7
ggagaagacaacgacuacaggaa

SEQ ID NO: 342887 - RNA, 13 nt, Human herpesvirus 7
ggagacaaucuau

SEQ ID NO: 342888 - RNA, 16 nt, Human herpesvirus 7
ggagagauagcauuug

SEQ ID NO: 342889 - RNA, 19 nt, Human herpesvirus 7
ggagagcccagucccaaga

SEQ ID NO: 342890 - RNA, 21 nt, Human herpesvirus 7
ggagagcccagucccaagaga

SEQ ID NO: 342891 - RNA, 20 nt, Human herpesvirus 7
ggagaucaauugaguuuacu

SEQ ID NO: 342892 - RNA, 20 nt, Human herpesvirus 7
ggagauugguagugugcaca

SEQ ID NO: 342893 - RNA, 22 nt, Human herpesvirus 7
ggagcauuauuggauaauauca

SEQ ID NO: 342894 - RNA, 23 nt, Human herpesvirus 7
ggagcugauucugccauuacuga

SEQ ID NO: 342895 - RNA, 13 nt, Human herpesvirus 7
gauuccaucucac

SEQ ID NO: 342896 - RNA, 13 nt, Human herpesvirus 7
gauuccauuuaaa

SEQ ID NO: 342897 - RNA, 21 nt, Human herpesvirus 7
gauuccgaagauacgcuagaa

SEQ ID NO: 342898 - RNA, 14 nt, Human herpesvirus 7
gauucggcugagua

SEQ ID NO: 342899 - RNA, 17 nt, Human herpesvirus 7
gauucuuauucuacaca

SEQ ID NO: 342900 - RNA, 23 nt, Human herpesvirus 7
gauugauacauucgcaaggaaua

SEQ ID NO: 342901 - RNA, 13 nt, Human herpesvirus 7
gauugcgaccaaa

SEQ ID NO: 342902 - RNA, 14 nt, Human herpesvirus 7
gauuggccagugug

SEQ ID NO: 342903 - RNA, 15 nt, Human herpesvirus 7
gauuuaaaaaaggaa

SEQ ID NO: 342904 - RNA, 15 nt, Human herpesvirus 7
gauuuaaaguaagaa

SEQ ID NO: 342905 - RNA, 14 nt, Human herpesvirus 7
gauuucagcauuug

SEQ ID NO: 342906 - RNA, 22 nt, Human herpesvirus 7
gauuucauguuuuaugacucag

SEQ ID NO: 342907 - RNA, 16 nt, Human herpesvirus 7
gauuuccguuguuaaa

SEQ ID NO: 342908 - RNA, 21 nt, Human herpesvirus 7
gauuucugaaaaucuccuuga

SEQ ID NO: 342909 - RNA, 19 nt, Human herpesvirus 7
gauuucuggcaacaguuca

SEQ ID NO: 342910 - RNA, 15 nt, Human herpesvirus 7
gauuucuucuucuaa

SEQ ID NO: 342911 - RNA, 19 nt, Human herpesvirus 7
gauuugaaaaaaagauuua

SEQ ID NO: 342912 - RNA, 19 nt, Human herpesvirus 7
gauuugcagccagaacuca

SEQ ID NO: 342913 - RNA, 15 nt, Human herpesvirus 7
gauuugguucauuac

SEQ ID NO: 342914 - RNA, 16 nt, Human herpesvirus 7
gauuuuaaauuuacuu

SEQ ID NO: 342915 - RNA, 18 nt, Human herpesvirus 7
gauuuucuagagcauaua

SEQ ID NO: 342916 - RNA, 22 nt, Human herpesvirus 7
gauuuuguagguuguugcaauu

SEQ ID NO: 342917 - RNA, 19 nt, Human herpesvirus 7
gauuuugugacccugucac

SEQ ID NO: 342918 - RNA, 16 nt, Human herpesvirus 7
gauuuuucccaaaaua

SEQ ID NO: 342919 - RNA, 19 nt, Human herpesvirus 7
gauuuuuuaguauucucau

SEQ ID NO: 342920 - RNA, 16 nt, Human herpesvirus 7
gauuuuuuauucccag

SEQ ID NO: 342921 - RNA, 13 nt, Human herpesvirus 7
gcaaaaaaccauu

SEQ ID NO: 342922 - RNA, 16 nt, Human herpesvirus 7
gcaaaaaggauuuucg

SEQ ID NO: 342923 - RNA, 14 nt, Human herpesvirus 7
gcaaaagccacuga

SEQ ID NO: 342924 - RNA, 15 nt, Human herpesvirus 7
gcaaaagccacugau

SEQ ID NO: 342925 - RNA, 21 nt, Human herpesvirus 7
gcaaaauaugcaaaacaaaau

SEQ ID NO: 342926 - RNA, 16 nt, Human herpesvirus 7
gcaaaccuuacaacaa

SEQ ID NO: 342927 - RNA, 17 nt, Human herpesvirus 7
gcaaaccuuacaacaaa

SEQ ID NO: 342928 - RNA, 22 nt, Human herpesvirus 7
gcaaacucacuaaugccgucau

SEQ ID NO: 342929 - RNA, 14 nt, Human herpesvirus 7
gcaaagacuugcaa

SEQ ID NO: 342930 - RNA, 21 nt, Human herpesvirus 7
gcaaagcuuuugcgagaaaau

SEQ ID NO: 342931 - RNA, 16 nt, Human herpesvirus 7
gcaaaguucuccuugu

SEQ ID NO: 342932 - RNA, 21 nt, Human herpesvirus 7
gcaaaucucauaaugucucac

SEQ ID NO: 342933 - RNA, 13 nt, Human herpesvirus 7
gcaacaaacaaau

SEQ ID NO: 342934 - RNA, 23 nt, Human herpesvirus 7
gcaacaaacaaauaauucaaaaa

SEQ ID NO: 342935 - RNA, 19 nt, Human herpesvirus 7
gcaacaaauuaaauacuug

SEQ ID NO: 342936 - RNA, 21 nt, Human herpesvirus 7
gcaacaaauuaaauacuugca

SEQ ID NO: 342937 - RNA, 14 nt, Human herpesvirus 7
gcaacaaauuccau

SEQ ID NO: 342938 - RNA, 18 nt, Human herpesvirus 7
gcaacagagaacaccaua

SEQ ID NO: 342939 - RNA, 13 nt, Human herpesvirus 7
gcaacauaaucca

SEQ ID NO: 342940 - RNA, 21 nt, Human herpesvirus 7
gcaacuagagaagccacuucu

SEQ ID NO: 342941 - RNA, 22 nt, Human herpesvirus 7
gcaacuagagaagccacuucua

SEQ ID NO: 342942 - RNA, 23 nt, Human herpesvirus 7
gcaacuagagaagccacuucuaa

SEQ ID NO: 342943 - RNA, 16 nt, Human herpesvirus 7
gcaacuggcauuccuu

SEQ ID NO: 342944 - RNA, 20 nt, Human herpesvirus 7
gcaagaaaguccaaagugau

SEQ ID NO: 342945 - RNA, 13 nt, Human herpesvirus 7
gcaagcaacacuu

SEQ ID NO: 342946 - RNA, 17 nt, Human herpesvirus 7
gcaagucacaauuacac

SEQ ID NO: 342947 - RNA, 23 nt, Human herpesvirus 7
gcaauacaaauuccugcuugcac

SEQ ID NO: 342948 - RNA, 16 nt, Human herpesvirus 7
gcaauacuaguauuuc

SEQ ID NO: 342949 - RNA, 19 nt, Human herpesvirus 7
gcaauaucccagaauaucg

SEQ ID NO: 342950 - RNA, 17 nt, Human herpesvirus 7
gcaauaugcuagaagac

SEQ ID NO: 342951 - RNA, 20 nt, Human herpesvirus 7
gcaaugauguuugcauugaa

SEQ ID NO: 342952 - RNA, 16 nt, Human herpesvirus 7
gcaaugcaugaugcac

SEQ ID NO: 342953 - RNA, 16 nt, Human herpesvirus 7
gcaauguauauaagca

SEQ ID NO: 342954 - RNA, 20 nt, Human herpesvirus 7
gcaauuguaaaaauaaagac

SEQ ID NO: 342955 - RNA, 14 nt, Human herpesvirus 7
gcacaaucacguga

SEQ ID NO: 342956 - RNA, 15 nt, Human herpesvirus 7
gcacaaucacgugau

SEQ ID NO: 342957 - RNA, 11 nt, Human herpesvirus 7
gcacacaacag

SEQ ID NO: 342958 - RNA, 19 nt, Human herpesvirus 7
gcacacacguuuucuguca

SEQ ID NO: 342959 - RNA, 14 nt, Human herpesvirus 7
gcacacguacaaua

SEQ ID NO: 342960 - RNA, 20 nt, Human herpesvirus 7
gcacaggcugcaucuuuuca

SEQ ID NO: 342961 - RNA, 21 nt, Human herpesvirus 7
gcacauaaguugacaauguca

SEQ ID NO: 342962 - RNA, 22 nt, Human herpesvirus 7
gcacauaaguugacaaugucaa

SEQ ID NO: 342963 - RNA, 17 nt, Human herpesvirus 7
gcacauuauaagaaucu

SEQ ID NO: 342964 - RNA, 19 nt, Human herpesvirus 7
gcaccaaaaaauaaaaaca

SEQ ID NO: 342965 - RNA, 15 nt, Human herpesvirus 7
gcaccgaaaauggua

SEQ ID NO: 342966 - RNA, 12 nt, Human herpesvirus 7
gcagaaaauucu

SEQ ID NO: 342967 - RNA, 20 nt, Human herpesvirus 7
gcagaaauauaugaauaucu

SEQ ID NO: 342968 - RNA, 18 nt, Human herpesvirus 7
gcagaaugcguaacuuug

SEQ ID NO: 342969 - RNA, 13 nt, Human herpesvirus 7
gcagacacuacuu

SEQ ID NO: 342970 - RNA, 15 nt, Human herpesvirus 7
gcagacuaauuacag

SEQ ID NO: 342971 - RNA, 21 nt, Human herpesvirus 7
gcagccauguugcgugcacuu

SEQ ID NO: 342972 - RNA, 17 nt, Human herpesvirus 7
gcagcugugauauuugg

SEQ ID NO: 342973 - RNA, 19 nt, Human herpesvirus 7
gcagcuucuaaaugugcua

SEQ ID NO: 342974 - RNA, 16 nt, Human herpesvirus 7
gcagucaaagauuuug

SEQ ID NO: 342975 - RNA, 23 nt, Human herpesvirus 7
gcagugugaccgaauucgcgcga

SEQ ID NO: 342976 - RNA, 18 nt, Human herpesvirus 7
gcaguguuuaaaauguua

SEQ ID NO: 342977 - RNA, 12 nt, Human herpesvirus 7
gcaguugaauuc

SEQ ID NO: 342978 - RNA, 17 nt, Human herpesvirus 7
gcauaaagcaccaaaaa

SEQ ID NO: 342979 - RNA, 14 nt, Human herpesvirus 7
gcauacaguuuauu

SEQ ID NO: 342980 - RNA, 15 nt, Human herpesvirus 7
gcauaugcuaagaaa

SEQ ID NO: 342981 - RNA, 12 nt, Human herpesvirus 7
gcauauggacuu

SEQ ID NO: 342982 - RNA, 16 nt, Human herpesvirus 7
gcaucaaaacauauca

SEQ ID NO: 342983 - RNA, 13 nt, Human herpesvirus 7
gcaucaagaaaca

SEQ ID NO: 342984 - RNA, 15 nt, Human herpesvirus 7
gcaucaagaaacaag

SEQ ID NO: 342985 - RNA, 22 nt, Human herpesvirus 7
gcaucauuccuauuaagcagcu

SEQ ID NO: 342986 - RNA, 13 nt, Human herpesvirus 7
gcaucgcauauag

SEQ ID NO: 342987 - RNA, 14 nt, Human herpesvirus 7
gcaucuccuguaac

SEQ ID NO: 342988 - RNA, 19 nt, Human herpesvirus 7
gcaucuuuucagugaagcu

SEQ ID NO: 342989 - RNA, 14 nt, Human herpesvirus 7
gcaugcuuacagug

SEQ ID NO: 342990 - RNA, 14 nt, Human herpesvirus 7
gcauggagcacaau

SEQ ID NO: 342991 - RNA, 13 nt, Human herpesvirus 7
gcauguugcuagu

SEQ ID NO: 342992 - RNA, 16 nt, Human herpesvirus 7
gcauuaauucuuucag

SEQ ID NO: 342993 - RNA, 12 nt, Human herpesvirus 7
gcauuagagcau

SEQ ID NO: 342994 - RNA, 22 nt, Human herpesvirus 7
gcauuaggcagcgcuugauaca

SEQ ID NO: 342995 - RNA, 18 nt, Human herpesvirus 7
gcauuauuggauaauauc

SEQ ID NO: 342996 - RNA, 13 nt, Human herpesvirus 7
gcauuauuguaua

SEQ ID NO: 342997 - RNA, 22 nt, Human herpesvirus 7
gcauucuucuauggguucacac

SEQ ID NO: 342998 - RNA, 17 nt, Human herpesvirus 7
gcauuuaccauuucgaa

SEQ ID NO: 342999 - RNA, 14 nt, Human herpesvirus 7
gcauuucacuuguu

SEQ ID NO: 343000 - RNA, 21 nt, Human herpesvirus 7
gcauuuccgagacagagucaa

SEQ ID NO: 343001 - RNA, 15 nt, Human herpesvirus 7
gcauuuguaugucua

SEQ ID NO: 343002 - RNA, 16 nt, Human herpesvirus 7
gccaaacuaugugcuu

SEQ ID NO: 343003 - RNA, 15 nt, Human herpesvirus 7
gccaaucugcacauu

SEQ ID NO: 343004 - RNA, 18 nt, Human herpesvirus 7
gccaaugaacaaguuuca

SEQ ID NO: 343005 - RNA, 21 nt, Human herpesvirus 7
gccaauugaagaagugcacau

SEQ ID NO: 343006 - RNA, 22 nt, Human herpesvirus 7
gccacagcccaagugggugguc

SEQ ID NO: 343007 - RNA, 14 nt, Human herpesvirus 7
gccaccuucuuaua

SEQ ID NO: 343008 - RNA, 21 nt, Human herpesvirus 7
gccaccuucuuauaaugaugu

SEQ ID NO: 343009 - RNA, 20 nt, Human herpesvirus 7
gccacguuuuuuucuucaau

SEQ ID NO: 343010 - RNA, 17 nt, Human herpesvirus 7
gccacuguugaugauuu

SEQ ID NO: 343011 - RNA, 13 nt, Human herpesvirus 7
gccagaaaucugg

SEQ ID NO: 343012 - RNA, 19 nt, Human herpesvirus 7
uugaaauaaaggaucucuc

SEQ ID NO: 343013 - RNA, 15 nt, Human herpesvirus 7
uugaaaucauucuga

SEQ ID NO: 343014 - RNA, 19 nt, Human herpesvirus 7
uugaaaucauucugaauaa

SEQ ID NO: 343015 - RNA, 16 nt, Human herpesvirus 7
uugaaauuccauacaa

SEQ ID NO: 343016 - RNA, 23 nt, Human herpesvirus 7
uugaaauucuguggagugagaaa

SEQ ID NO: 343017 - RNA, 14 nt, Human herpesvirus 7
uugaacaauggugu

SEQ ID NO: 343018 - RNA, 16 nt, Human herpesvirus 7
uugaacauaaauauuc

SEQ ID NO: 343019 - RNA, 13 nt, Human herpesvirus 7
uugaacuguugcc

SEQ ID NO: 343020 - RNA, 16 nt, Human herpesvirus 7
uugaagaacaacauga

SEQ ID NO: 343021 - RNA, 17 nt, Human herpesvirus 7
uugaagauaaguauaaa

SEQ ID NO: 343022 - RNA, 16 nt, Human herpesvirus 7
uugaaucaacagccau

SEQ ID NO: 343023 - RNA, 13 nt, Human herpesvirus 7
uugaaucaccugu

SEQ ID NO: 343024 - RNA, 14 nt, Human herpesvirus 7
uugaauguggaauu

SEQ ID NO: 343025 - RNA, 16 nt, Human herpesvirus 7
uugaauguuuacaugu

SEQ ID NO: 343026 - RNA, 22 nt, Human herpesvirus 7
uugaauuccgauuuaagugaac

SEQ ID NO: 343027 - RNA, 23 nt, Human herpesvirus 7
uugacuuuuucuguagacauuuc

SEQ ID NO: 343028 - RNA, 16 nt, Human herpesvirus 7
uugagcaauugauuca

SEQ ID NO: 343029 - RNA, 21 nt, Human herpesvirus 7
uugagcaauugauucacauug

SEQ ID NO: 343030 - RNA, 12 nt, Human herpesvirus 7
uugaggaaaugu

SEQ ID NO: 343031 - RNA, 14 nt, Human herpesvirus 7
uugagucgaaugca

SEQ ID NO: 343032 - RNA, 19 nt, Human herpesvirus 7
uugauaagacugaagacaa

SEQ ID NO: 343033 - RNA, 21 nt, Human herpesvirus 7
uugauaagacugaagacaaaa

SEQ ID NO: 343034 - RNA, 14 nt, Human herpesvirus 7
uugauaagauuucc

SEQ ID NO: 343035 - RNA, 14 nt, Human herpesvirus 7
uugauaauuuacaa

SEQ ID NO: 343036 - RNA, 19 nt, Human herpesvirus 7
uugauaauuuacaaaacaa

SEQ ID NO: 343037 - RNA, 18 nt, Human herpesvirus 7
uugaucaaaagcuuacuc

SEQ ID NO: 343038 - RNA, 13 nt, Human herpesvirus 7
uugaugaagacag

SEQ ID NO: 343039 - RNA, 20 nt, Human herpesvirus 7
uugauguuuugcaagcacau

SEQ ID NO: 343040 - RNA, 14 nt, Human herpesvirus 7
uugauugaauuugu

SEQ ID NO: 343041 - RNA, 21 nt, Human herpesvirus 7
uugauugaucguguguuacua

SEQ ID NO: 343042 - RNA, 18 nt, Human herpesvirus 7
uugcaaagucucauucau

SEQ ID NO: 343043 - RNA, 20 nt, Human herpesvirus 7
uugcaaaucaccgaugaauu

SEQ ID NO: 343044 - RNA, 15 nt, Human herpesvirus 7
uugcaaauguuccac

SEQ ID NO: 343045 - RNA, 22 nt, Human herpesvirus 7
uugcaacuggcauuccuuggaa

SEQ ID NO: 343046 - RNA, 13 nt, Human herpesvirus 7
uugcaagcacaug

SEQ ID NO: 343047 - RNA, 19 nt, Human herpesvirus 7
uugcaaugaaagguuacaa

SEQ ID NO: 343048 - RNA, 13 nt, Human herpesvirus 7
uugcagaaauugu

SEQ ID NO: 343049 - RNA, 21 nt, Human herpesvirus 7
uugcagacuaauuacagcuaa

SEQ ID NO: 343050 - RNA, 14 nt, Human herpesvirus 7
uugcagcugugaua

SEQ ID NO: 343051 - RNA, 22 nt, Human herpesvirus 7
uugcagcuucuaaaugugcuaa

SEQ ID NO: 343052 - RNA, 14 nt, Human herpesvirus 7
uugcauaauccucu

SEQ ID NO: 343053 - RNA, 18 nt, Human herpesvirus 7
uugcauguugcuaguaug

SEQ ID NO: 343054 - RNA, 17 nt, Human herpesvirus 7
uugccaaaagcuugaaa

SEQ ID NO: 343055 - RNA, 17 nt, Human herpesvirus 7
uugccccuaaacaauua

SEQ ID NO: 343056 - RNA, 18 nt, Human herpesvirus 7
uugccuguuaaaagugaa

SEQ ID NO: 343057 - RNA, 16 nt, Human herpesvirus 7
uugcgaaaaugauaaa

SEQ ID NO: 343058 - RNA, 16 nt, Human herpesvirus 7
uugcgagaaaauacua

SEQ ID NO: 343059 - RNA, 15 nt, Human herpesvirus 7
uugcuagcugugaua

SEQ ID NO: 343060 - RNA, 20 nt, Human herpesvirus 7
uugcuauuauuaaagcuuuc

SEQ ID NO: 343061 - RNA, 23 nt, Human herpesvirus 7
uugcucauuuuguuuugcaauau

SEQ ID NO: 343062 - RNA, 22 nt, Human herpesvirus 7
uugcugaaauaauagcggcuaa

SEQ ID NO: 343063 - RNA, 17 nt, Human herpesvirus 7
uugcugaacucugucau

SEQ ID NO: 343064 - RNA, 23 nt, Human herpesvirus 7
uugcugcaacaaauuaaauacuu

SEQ ID NO: 343065 - RNA, 23 nt, Human herpesvirus 7
uugcuggaucauagagaaaacau

SEQ ID NO: 343066 - RNA, 14 nt, Human herpesvirus 7
uugcuuuccaucau

SEQ ID NO: 343067 - RNA, 15 nt, Human herpesvirus 7
uugcuuuucaugcuu

SEQ ID NO: 343068 - RNA, 21 nt, Human herpesvirus 7
uuggaacuuuaugcaaacuca

SEQ ID NO: 343069 - RNA, 21 nt, Human herpesvirus 7
uuggaagguuuacguuuccua

SEQ ID NO: 343070 - RNA, 20 nt, Human herpesvirus 7
uuggauuccgguguggaaac

SEQ ID NO: 343071 - RNA, 18 nt, Human herpesvirus 7
uuggcaaacagucugaaa

SEQ ID NO: 343072 - RNA, 16 nt, Human herpesvirus 7
uuggcauugaaauucu

SEQ ID NO: 343073 - RNA, 14 nt, Human herpesvirus 7
uuggcgccaaaaaa

SEQ ID NO: 343074 - RNA, 23 nt, Human herpesvirus 7
uugggaaagacgugagcaauaca

SEQ ID NO: 343075 - RNA, 20 nt, Human herpesvirus 7
uuggguaauuuuaaaacuga

SEQ ID NO: 343076 - RNA, 15 nt, Human herpesvirus 7
uugguaauguuacua

SEQ ID NO: 343077 - RNA, 16 nt, Human herpesvirus 7
uugguagaaaugugcg

SEQ ID NO: 343078 - RNA, 17 nt, Human herpesvirus 7
uuggucgagaauacaca

SEQ ID NO: 343079 - RNA, 19 nt, Human herpesvirus 7
uugguuaugcacauccaaa

SEQ ID NO: 343080 - RNA, 21 nt, Human herpesvirus 7
uuguaaacaugaaaaauaucg

SEQ ID NO: 343081 - RNA, 17 nt, Human herpesvirus 7
uuguaacaacuagcaaa

SEQ ID NO: 343082 - RNA, 22 nt, Human herpesvirus 7
uuguaagaaacaucuaugugcu

SEQ ID NO: 343083 - RNA, 23 nt, Human herpesvirus 7
uuguaauuucucaaaucuuuaag

SEQ ID NO: 343084 - RNA, 16 nt, Human herpesvirus 7
uuguacauuuuaccaa

SEQ ID NO: 343085 - RNA, 18 nt, Human herpesvirus 7
uuguaggcagaaaugucu

SEQ ID NO: 343086 - RNA, 13 nt, Human herpesvirus 7
uuguauacaacuu

SEQ ID NO: 343087 - RNA, 20 nt, Human herpesvirus 7
uuguauauucuaguuuucuu

SEQ ID NO: 343088 - RNA, 19 nt, Human herpesvirus 7
uugucaaagaaugcaacau

SEQ ID NO: 343089 - RNA, 12 nt, Human herpesvirus 7
uugucauacaau

SEQ ID NO: 343090 - RNA, 19 nt, Human herpesvirus 7
uugucauugaaagucgcaa

SEQ ID NO: 343091 - RNA, 18 nt, Human herpesvirus 7
uuguccagacagcuguau

SEQ ID NO: 343092 - RNA, 17 nt, Human herpesvirus 7
uugucuguugugcaauu

SEQ ID NO: 343093 - RNA, 12 nt, Human herpesvirus 7
uugucuuaccua

SEQ ID NO: 343094 - RNA, 22 nt, Human herpesvirus 7
uugugaaaauaacaggaaacca

SEQ ID NO: 343095 - RNA, 17 nt, Human herpesvirus 7
uugugaagacuacauaa

SEQ ID NO: 343096 - RNA, 16 nt, Human herpesvirus 7
uugugaagucuuuaua

SEQ ID NO: 343097 - RNA, 18 nt, Human herpesvirus 7
uugugaguuucuacaugu

SEQ ID NO: 343098 - RNA, 12 nt, Human herpesvirus 7
uugugcaauuug

SEQ ID NO: 343099 - RNA, 13 nt, Human herpesvirus 7
uuguggcaaaaga

SEQ ID NO: 343100 - RNA, 14 nt, Human herpesvirus 7
uugugguacaacaa

SEQ ID NO: 343101 - RNA, 15 nt, Human herpesvirus 7
uuguuagaauaucug

SEQ ID NO: 343102 - RNA, 22 nt, Human herpesvirus 7
uuguucaaaauauuuaucugca

SEQ ID NO: 343103 - RNA, 18 nt, Human herpesvirus 7
uuuaaaaaaaaaaccaca

SEQ ID NO: 343104 - RNA, 20 nt, Human herpesvirus 7
uuuaaaaaaaaaaccacaaa

SEQ ID NO: 343105 - RNA, 17 nt, Human herpesvirus 7
uuuaaaacaagacagaa

SEQ ID NO: 343106 - RNA, 16 nt, Human herpesvirus 7
uuuaaaacugaagcau

SEQ ID NO: 343107 - RNA, 14 nt, Human herpesvirus 7
uuuaaaacuuugau

SEQ ID NO: 343108 - RNA, 16 nt, Human herpesvirus 7
uuuaaaagguugacau

SEQ ID NO: 343109 - RNA, 12 nt, Human herpesvirus 7
uuuaaaaucuac

SEQ ID NO: 343110 - RNA, 17 nt, Human herpesvirus 7
uuuaaacuaaguugaaa

SEQ ID NO: 343111 - RNA, 17 nt, Human herpesvirus 7
uuuaaaggugguuacau

SEQ ID NO: 343112 - RNA, 13 nt, Human herpesvirus 7
uuuaacaaucuaa

SEQ ID NO: 343113 - RNA, 22 nt, Human herpesvirus 7
uuuaaccgcaaaagccacugau

SEQ ID NO: 343114 - RNA, 11 nt, Human herpesvirus 7
uuuaacuauug

SEQ ID NO: 343115 - RNA, 12 nt, Human herpesvirus 7
uuuaacuggaau

SEQ ID NO: 343116 - RNA, 21 nt, Human herpesvirus 7
uuuaacuggaauuauacacug

SEQ ID NO: 343117 - RNA, 22 nt, Human herpesvirus 7
uuuaacuggaauuauacacugu

SEQ ID NO: 343118 - RNA, 19 nt, Human herpesvirus 7
uuuaacuuacuguuuacac

SEQ ID NO: 343119 - RNA, 15 nt, Human herpesvirus 7
uuuaaguauuuuaca

SEQ ID NO: 343120 - RNA, 13 nt, Human herpesvirus 7
uuuaagugaacug

SEQ ID NO: 343121 - RNA, 14 nt, Human herpesvirus 7
uuuaagugaacugu

SEQ ID NO: 343122 - RNA, 23 nt, Human herpesvirus 7
uuuaagugaacuguuacaguuaa

SEQ ID NO: 343123 - RNA, 20 nt, Human herpesvirus 7
uuuaauacaaaauaaagcca

SEQ ID NO: 343124 - RNA, 14 nt, Human herpesvirus 7
uuuaauacaacaua

SEQ ID NO: 343125 - RNA, 18 nt, Human herpesvirus 7
uuuacaaagaacauguag

SEQ ID NO: 343126 - RNA, 19 nt, Human herpesvirus 7
uuuacagaagaacauuuau

SEQ ID NO: 343127 - RNA, 14 nt, Human herpesvirus 7
uuuucuuuguaaaa

SEQ ID NO: 343128 - RNA, 14 nt, Human herpesvirus 7
uuuugaaauugaca

SEQ ID NO: 343129 - RNA, 16 nt, Human herpesvirus 7
uuuugaacuguugcca

SEQ ID NO: 343130 - RNA, 18 nt, Human herpesvirus 7
uuuugaacuguugccaga

SEQ ID NO: 343131 - RNA, 16 nt, Human herpesvirus 7
uuuugaauaacgucau

SEQ ID NO: 343132 - RNA, 18 nt, Human herpesvirus 7
uuuugaucaaaagcuuac

SEQ ID NO: 343133 - RNA, 20 nt, Human herpesvirus 7
uuuugcauauuuugcuagaa

SEQ ID NO: 343134 - RNA, 14 nt, Human herpesvirus 7
uuuugccgcuguuu

SEQ ID NO: 343135 - RNA, 18 nt, Human herpesvirus 7
uuuugcuagaaaccaagu

SEQ ID NO: 343136 - RNA, 20 nt, Human herpesvirus 7
uuuugcuauucacgcuucca

SEQ ID NO: 343137 - RNA, 16 nt, Human herpesvirus 7
uuuugguaaucugcuc

SEQ ID NO: 343138 - RNA, 15 nt, Human herpesvirus 7
uuuuguaaacaugaa

SEQ ID NO: 343139 - RNA, 18 nt, Human herpesvirus 7
uuuuguaagaaacaucua

SEQ ID NO: 343140 - RNA, 14 nt, Human herpesvirus 7
uuuuguacaggcaa

SEQ ID NO: 343141 - RNA, 23 nt, Human herpesvirus 7
uuuuuaauacaaaauaaagccag

SEQ ID NO: 343142 - RNA, 16 nt, Human herpesvirus 7
uuuuuauuguaaagga

SEQ ID NO: 343143 - RNA, 15 nt, Human herpesvirus 7
uuuuucaugccuugc

SEQ ID NO: 343144 - RNA, 14 nt, Human herpesvirus 7
uuuuucgcugaaga

SEQ ID NO: 343145 - RNA, 12 nt, Human herpesvirus 7
uuuuugucuuua

SEQ ID NO: 343146 - RNA, 17 nt, Human herpesvirus 7
uuuuuguuguuaucuac

SEQ ID NO: 343147 - RNA, 16 nt, Human herpesvirus 7
uggaaagggauuuauu

SEQ ID NO: 343148 - RNA, 14 nt, Human herpesvirus 7
uggaaaucuuuaau

SEQ ID NO: 343149 - RNA, 13 nt, Human herpesvirus 7
uggaaauuacugg

SEQ ID NO: 343150 - RNA, 15 nt, Human herpesvirus 7
uggaaauucugugua

SEQ ID NO: 343151 - RNA, 13 nt, Human herpesvirus 7
uggaaccuacuga

SEQ ID NO: 343152 - RNA, 19 nt, Human herpesvirus 7
uggaacugaaaacaaugca

SEQ ID NO: 343153 - RNA, 21 nt, Human herpesvirus 7
uggaacugaaaacaaugcaga

SEQ ID NO: 343154 - RNA, 14 nt, Human herpesvirus 7
uggaagaacaacaa

SEQ ID NO: 343155 - RNA, 16 nt, Human herpesvirus 7
uggaaucgaauacagu

SEQ ID NO: 343156 - RNA, 19 nt, Human herpesvirus 7
uggaauuauacacugugaa

SEQ ID NO: 343157 - RNA, 13 nt, Human herpesvirus 7
uggacacaaucag

SEQ ID NO: 343158 - RNA, 15 nt, Human herpesvirus 7
uggacaccaguauga

SEQ ID NO: 343159 - RNA, 11 nt, Human herpesvirus 7
uggacuuuuaa

SEQ ID NO: 343160 - RNA, 13 nt, Human herpesvirus 7
uggagagauagca

SEQ ID NO: 343161 - RNA, 23 nt, Human herpesvirus 7
uggaguuagcgaggcauuuacaa

SEQ ID NO: 343162 - RNA, 13 nt, Human herpesvirus 7
uggaguuugucuc

SEQ ID NO: 343163 - RNA, 14 nt, Human herpesvirus 7
uggauaacuaugaa

SEQ ID NO: 343164 - RNA, 13 nt, Human herpesvirus 7
uggauaauaucag

SEQ ID NO: 343165 - RNA, 19 nt, Human herpesvirus 7
uggauaguucguaaaaaga

SEQ ID NO: 343166 - RNA, 21 nt, Human herpesvirus 7
uggaucauagagaaaacauug

SEQ ID NO: 343167 - RNA, 20 nt, Human herpesvirus 7
uggaucguagcaacagagaa

SEQ ID NO: 343168 - RNA, 17 nt, Human herpesvirus 7
uggaugcuggaaaacau

SEQ ID NO: 343169 - RNA, 21 nt, Human herpesvirus 7
uggauuuucuguaaucauaua

SEQ ID NO: 343170 - RNA, 19 nt, Human herpesvirus 7
uggauuuuguuuuuagcuu

SEQ ID NO: 343171 - RNA, 15 nt, Human herpesvirus 7
uggcaaacagucuga

SEQ ID NO: 343172 - RNA, 16 nt, Human herpesvirus 7
uggcaacaaacaaaua

SEQ ID NO: 343173 - RNA, 22 nt, Human herpesvirus 7
uggcaacucuuccuuucuuuga

SEQ ID NO: 343174 - RNA, 14 nt, Human herpesvirus 7
uggcaauuguaaaa

SEQ ID NO: 343175 - RNA, 23 nt, Human herpesvirus 7
uggcaauuguaaaaauaaagaca

SEQ ID NO: 343176 - RNA, 21 nt, Human herpesvirus 7
uggcacauaaguugacaaugu

SEQ ID NO: 343177 - RNA, 13 nt, Human herpesvirus 7
uggcacuguguau

SEQ ID NO: 343178 - RNA, 17 nt, Human herpesvirus 7
uggcagaaauauaugaa

SEQ ID NO: 343179 - RNA, 14 nt, Human herpesvirus 7
uggcauuauagguu

SEQ ID NO: 343180 - RNA, 15 nt, Human herpesvirus 7
uggccagcaguguga

SEQ ID NO: 343181 - RNA, 16 nt, Human herpesvirus 7
uggcgaaacaauacau

SEQ ID NO: 343182 - RNA, 21 nt, Human herpesvirus 7
uggcgaauuuuaucauuucaa

SEQ ID NO: 343183 - RNA, 15 nt, Human herpesvirus 7
uggcgcugaaaacau

SEQ ID NO: 343184 - RNA, 18 nt, Human herpesvirus 7
uggcguaaauacagcuca

SEQ ID NO: 343185 - RNA, 22 nt, Human herpesvirus 7
uggcucaagcacaaucacguga

SEQ ID NO: 343186 - RNA, 18 nt, Human herpesvirus 7
uggcucuuaauaauuauu

SEQ ID NO: 343187 - RNA, 23 nt, Human herpesvirus 7
uggcuuaaguuuuuaaacuuauc

SEQ ID NO: 343188 - RNA, 16 nt, Human herpesvirus 7
uggcuuuucacaugaa

SEQ ID NO: 343189 - RNA, 21 nt, Human herpesvirus 7
ugggaaagacgugagcaauac

SEQ ID NO: 343190 - RNA, 15 nt, Human herpesvirus 7
ugggaaaguguacac

SEQ ID NO: 343191 - RNA, 20 nt, Human herpesvirus 7
ugggaagauuugacaaaaca

SEQ ID NO: 343192 - RNA, 11 nt, Human herpesvirus 7
ugggaauguua

SEQ ID NO: 343193 - RNA, 15 nt, Human herpesvirus 7
ugggagcaaugcaug

SEQ ID NO: 343194 - RNA, 12 nt, Human herpesvirus 7
ugggcacauuug

SEQ ID NO: 343195 - RNA, 14 nt, Human herpesvirus 7
ugggcguaacugug

SEQ ID NO: 343196 - RNA, 18 nt, Human herpesvirus 7
ugggcguaacugugacgu

SEQ ID NO: 343197 - RNA, 20 nt, Human herpesvirus 7
uggggauguucuauucucau

SEQ ID NO: 343198 - RNA, 21 nt, Human herpesvirus 7
ugguaaaaaauuacuugcuau

SEQ ID NO: 343199 - RNA, 12 nt, Human herpesvirus 7
ugguaaugucau

SEQ ID NO: 343200 - RNA, 18 nt, Human herpesvirus 7
ugguaauuaauaaacagc

SEQ ID NO: 343201 - RNA, 19 nt, Human herpesvirus 7
ugguacaacaaacauucca

SEQ ID NO: 343202 - RNA, 18 nt, Human herpesvirus 7
ugguagugugcacacaaa

SEQ ID NO: 343203 - RNA, 21 nt, Human herpesvirus 7
ugguauuuguuagaauaucug

SEQ ID NO: 343204 - RNA, 14 nt, Human herpesvirus 7
uggucacauaggaa

SEQ ID NO: 343205 - RNA, 18 nt, Human herpesvirus 7
uggucgagaauacacauu

SEQ ID NO: 343206 - RNA, 18 nt, Human herpesvirus 7
uggugcguacacuguaag

SEQ ID NO: 343207 - RNA, 14 nt, Human herpesvirus 7
ugguguacuacaua

SEQ ID NO: 343208 - RNA, 17 nt, Human herpesvirus 7
ugguuaugcacauccaa

SEQ ID NO: 343209 - RNA, 12 nt, Human herpesvirus 7
ugguucauuaca

SEQ ID NO: 343210 - RNA, 21 nt, Human herpesvirus 7
ugguucguacagucauuugca

SEQ ID NO: 343211 - RNA, 12 nt, Human herpesvirus 7
ugguugugcaau

SEQ ID NO: 343212 - RNA, 15 nt, Human herpesvirus 7
uguaaaauuaauuca

SEQ ID NO: 343213 - RNA, 19 nt, Human herpesvirus 7
uguaaauucuccaaucaua

SEQ ID NO: 343214 - RNA, 21 nt, Human herpesvirus 7
uguaacaaaggaucgaucucu

SEQ ID NO: 343215 - RNA, 21 nt, Human herpesvirus 7
uguaacagaccuccuauguca

SEQ ID NO: 343216 - RNA, 21 nt, Human herpesvirus 7
uguaaccuuggcuguucaaaa

SEQ ID NO: 343217 - RNA, 12 nt, Human herpesvirus 7
uguaacuuucau

SEQ ID NO: 343218 - RNA, 15 nt, Human herpesvirus 7
uguaagaaauuuucu

SEQ ID NO: 343219 - RNA, 16 nt, Human herpesvirus 7
uguaaggccaaaggua

SEQ ID NO: 343220 - RNA, 16 nt, Human herpesvirus 7
uguaaguaaauuuacu

SEQ ID NO: 343221 - RNA, 18 nt, Human herpesvirus 7
uguaaucaaaauuuugga

SEQ ID NO: 343222 - RNA, 17 nt, Human herpesvirus 7
uguaauuucucaaauca

SEQ ID NO: 343223 - RNA, 15 nt, Human herpesvirus 7
uguacaggcaaugca

SEQ ID NO: 343224 - RNA, 20 nt, Human herpesvirus 7
uguacauaacucuaucuccu

SEQ ID NO: 343225 - RNA, 17 nt, Human herpesvirus 7
uguacauuuuaccaaau

SEQ ID NO: 343226 - RNA, 15 nt, Human herpesvirus 7
uguacgugugcugcg

SEQ ID NO: 343227 - RNA, 13 nt, Human herpesvirus 7
uguacguucugaa

SEQ ID NO: 343228 - RNA, 14 nt, Human herpesvirus 7
uguacuacauauua

SEQ ID NO: 343229 - RNA, 17 nt, Human herpesvirus 7
uguacucagagaucaua

SEQ ID NO: 343230 - RNA, 23 nt, Human herpesvirus 7
uguacucagagaucauaauuaca

SEQ ID NO: 343231 - RNA, 16 nt, Human herpesvirus 7
uguacugaaaccaaag

SEQ ID NO: 343232 - RNA, 18 nt, Human herpesvirus 7
uguacuuguaccaaucaa

SEQ ID NO: 343233 - RNA, 16 nt, Human herpesvirus 7
uguacuuuugaucaaa

SEQ ID NO: 343234 - RNA, 17 nt, Human herpesvirus 7
uguagaugcaugcuaau

SEQ ID NO: 343235 - RNA, 16 nt, Human herpesvirus 7
uguagauggcaccaau

SEQ ID NO: 343236 - RNA, 13 nt, Human herpesvirus 7
uguaggugcugca

SEQ ID NO: 343237 - RNA, 14 nt, Human herpesvirus 7
uguauaaucaaguc

SEQ ID NO: 343238 - RNA, 15 nt, Human herpesvirus 7
uguauaucuauuaca

SEQ ID NO: 343239 - RNA, 19 nt, Human herpesvirus 7
uguauaugaugacaacaaa

SEQ ID NO: 343240 - RNA, 12 nt, Human herpesvirus 7
uguaugcaagaa

SEQ ID NO: 343241 - RNA, 19 nt, Human herpesvirus 7
uguaugcaagaaaguccaa

SEQ ID NO: 343242 - RNA, 17 nt, Human herpesvirus 7
gaagcuugcuagauucu

SEQ ID NO: 343243 - RNA, 18 nt, Human herpesvirus 7
gaagcuugcuagauucua

SEQ ID NO: 343244 - RNA, 17 nt, Human herpesvirus 7
gaagcuuuacagcagcc

SEQ ID NO: 343245 - RNA, 18 nt, Human herpesvirus 7
gaaggaugcguguguuca

SEQ ID NO: 343246 - RNA, 23 nt, Human herpesvirus 7
gaagguauuuugauaauuuacaa

SEQ ID NO: 343247 - RNA, 20 nt, Human herpesvirus 7
gaaguacuaaucacaaguua

SEQ ID NO: 343248 - RNA, 16 nt, Human herpesvirus 7
gaaguauguuucauca

SEQ ID NO: 343249 - RNA, 13 nt, Human herpesvirus 7
gaauaaaaucuau

SEQ ID NO: 343250 - RNA, 12 nt, Human herpesvirus 7
gaauaaacaaug

SEQ ID NO: 343251 - RNA, 23 nt, Human herpesvirus 7
gaauaauuucagcuggaauugua

SEQ ID NO: 343252 - RNA, 21 nt, Human herpesvirus 7
gaauacaguugaaucaccugu

SEQ ID NO: 343253 - RNA, 21 nt, Human herpesvirus 7
gaauacuacucagaagacaua

SEQ ID NO: 343254 - RNA, 16 nt, Human herpesvirus 7
gaauagacacauuuau

SEQ ID NO: 343255 - RNA, 19 nt, Human herpesvirus 7
gaauauaaaaaauuugaaa

SEQ ID NO: 343256 - RNA, 22 nt, Human herpesvirus 7
gaauaucgauuuuucacagaaa

SEQ ID NO: 343257 - RNA, 19 nt, Human herpesvirus 7
gaauauugcuagucucaau

SEQ ID NO: 343258 - RNA, 17 nt, Human herpesvirus 7
gaauauuuauguucaaa

SEQ ID NO: 343259 - RNA, 17 nt, Human herpesvirus 7
gaaucaaauuucaaacg

SEQ ID NO: 343260 - RNA, 20 nt, Human herpesvirus 7
gaaucaagacgcuguaugca

SEQ ID NO: 343261 - RNA, 22 nt, Human herpesvirus 7
gaaucauagcaggaagcacaaa

SEQ ID NO: 343262 - RNA, 20 nt, Human herpesvirus 7
gaaucaucuuaaaaguacaa

SEQ ID NO: 343263 - RNA, 21 nt, Human herpesvirus 7
gaaucaucuuaaaaguacaaa

SEQ ID NO: 343264 - RNA, 18 nt, Human herpesvirus 7
gaaucauuuguauauucu

SEQ ID NO: 343265 - RNA, 19 nt, Human herpesvirus 7
gaaucauuuguauauucua

SEQ ID NO: 343266 - RNA, 20 nt, Human herpesvirus 7
gaaucuuuuuugaacacuuu

SEQ ID NO: 343267 - RNA, 15 nt, Human herpesvirus 7
gaaugaacaaauaau

SEQ ID NO: 343268 - RNA, 20 nt, Human herpesvirus 7
gaaugcaagcaacacuuaaa

SEQ ID NO: 343269 - RNA, 22 nt, Human herpesvirus 7
gaaugccagaaauuaaauacaa

SEQ ID NO: 343270 - RNA, 20 nt, Human herpesvirus 7
gaauguucgcaaauguacaa

SEQ ID NO: 343271 - RNA, 13 nt, Human herpesvirus 7
gaauuaaauccac

SEQ ID NO: 343272 - RNA, 18 nt, Human herpesvirus 7
gaauuaauaaaacaaacu

SEQ ID NO: 343273 - RNA, 15 nt, Human herpesvirus 7
gaauuauacacugug

SEQ ID NO: 343274 - RNA, 17 nt, Human herpesvirus 7
gaauuauacacugugaa

SEQ ID NO: 343275 - RNA, 15 nt, Human herpesvirus 7
gaauuccgauuuaag

SEQ ID NO: 343276 - RNA, 19 nt, Human herpesvirus 7
gaauuccgauuuaagugaa

SEQ ID NO: 343277 - RNA, 23 nt, Human herpesvirus 7
gaauucgcgcgacgagggcugca

SEQ ID NO: 343278 - RNA, 16 nt, Human herpesvirus 7
gaauugaaauuucuaa

SEQ ID NO: 343279 - RNA, 14 nt, Human herpesvirus 7
gaauuggugcucaa

SEQ ID NO: 343280 - RNA, 19 nt, Human herpesvirus 7
gaauuuaacaaagugcaua

SEQ ID NO: 343281 - RNA, 13 nt, Human herpesvirus 7
gaauuuaaucaua

SEQ ID NO: 343282 - RNA, 13 nt, Human herpesvirus 7
gaauuuagauuaa

SEQ ID NO: 343283 - RNA, 19 nt, Human herpesvirus 7
gaauuugauuccaucucac

SEQ ID NO: 343284 - RNA, 23 nt, Human herpesvirus 7
gaauuugauuccaucucacuuau

SEQ ID NO: 343285 - RNA, 17 nt, Human herpesvirus 7
gaauuuucugcuuuaag

SEQ ID NO: 343286 - RNA, 22 nt, Human herpesvirus 7
gaauuuucugcuuuaagugaua

SEQ ID NO: 343287 - RNA, 19 nt, Human herpesvirus 7
gacaaaacaagaagcgaga

SEQ ID NO: 343288 - RNA, 13 nt, Human herpesvirus 7
gacaaaaccaaac

SEQ ID NO: 343289 - RNA, 18 nt, Human herpesvirus 7
gacaaauauacgaaugcc

SEQ ID NO: 343290 - RNA, 17 nt, Human herpesvirus 7
gacaacaaagcaugaaa

SEQ ID NO: 343291 - RNA, 17 nt, Human herpesvirus 7
gacaacgacuacaggaa

SEQ ID NO: 343292 - RNA, 18 nt, Human herpesvirus 7
gacaacgguauacauuaa

SEQ ID NO: 343293 - RNA, 21 nt, Human herpesvirus 7
gacaacucaauaaaaaugucu

SEQ ID NO: 343294 - RNA, 23 nt, Human herpesvirus 7
gacaacucaauaaaaaugucucu

SEQ ID NO: 343295 - RNA, 16 nt, Human herpesvirus 7
gacaagaggacaguca

SEQ ID NO: 343296 - RNA, 20 nt, Human herpesvirus 7
gacaauaacauuuuguauga

SEQ ID NO: 343297 - RNA, 18 nt, Human herpesvirus 7
gacacaaucagcauuuac

SEQ ID NO: 343298 - RNA, 19 nt, Human herpesvirus 7
gacacaccaaauacaacca

SEQ ID NO: 343299 - RNA, 18 nt, Human herpesvirus 7
gacacaccauuguucaac

SEQ ID NO: 343300 - RNA, 14 nt, Human herpesvirus 7
gacacauuuaucca

SEQ ID NO: 343301 - RNA, 16 nt, Human herpesvirus 7
gacaccaacaucuguc

SEQ ID NO: 343302 - RNA, 11 nt, Human herpesvirus 7
aaaacuugaua

SEQ ID NO: 343303 - RNA, 13 nt, Human herpesvirus 7
aaaacuugauaaa

SEQ ID NO: 343304 - RNA, 20 nt, Human herpesvirus 7
aaaacuuggugaagaucauc

SEQ ID NO: 343305 - RNA, 11 nt, Human herpesvirus 7
aaaacuuugaa

SEQ ID NO: 343306 - RNA, 18 nt, Human herpesvirus 7
aaaacuuugaaaucauuc

SEQ ID NO: 343307 - RNA, 14 nt, Human herpesvirus 7
aaaacuuuucuuuc

SEQ ID NO: 343308 - RNA, 17 nt, Human herpesvirus 7
aaaacuuuucuuucuua

SEQ ID NO: 343309 - RNA, 18 nt, Human herpesvirus 7
aaaacuuuuuggaaaaac

SEQ ID NO: 343310 - RNA, 11 nt, Human herpesvirus 7
aaaagaacuua

SEQ ID NO: 343311 - RNA, 12 nt, Human herpesvirus 7
aaaagaacuuac

SEQ ID NO: 343312 - RNA, 19 nt, Human herpesvirus 7
aaaagaacuuacauuucaa

SEQ ID NO: 343313 - RNA, 22 nt, Human herpesvirus 7
aaaagaauggcgguuguacugu

SEQ ID NO: 343314 - RNA, 11 nt, Human herpesvirus 7
aaaagauguac

SEQ ID NO: 343315 - RNA, 20 nt, Human herpesvirus 7
aaaagauuuaaaguaagaau

SEQ ID NO: 343316 - RNA, 18 nt, Human herpesvirus 7
aaaagauuuaacaugugu

SEQ ID NO: 343317 - RNA, 17 nt, Human herpesvirus 7
aaaagcaaaccuuacaa

SEQ ID NO: 343318 - RNA, 18 nt, Human herpesvirus 7
aaaagccauaaaauguac

SEQ ID NO: 343319 - RNA, 16 nt, Human herpesvirus 7
aaaagcccaaacuguu

SEQ ID NO: 343320 - RNA, 17 nt, Human herpesvirus 7
aaaagcugcauguguac

SEQ ID NO: 343321 - RNA, 21 nt, Human herpesvirus 7
aaaagcugcauguguacuaaa

SEQ ID NO: 343322 - RNA, 13 nt, Human herpesvirus 7
aaaagcuuugauc

SEQ ID NO: 343323 - RNA, 14 nt, Human herpesvirus 7
aaaagcuuugaucu

SEQ ID NO: 343324 - RNA, 18 nt, Human herpesvirus 7
aaaagcuuugaucuacau

SEQ ID NO: 343325 - RNA, 14 nt, Human herpesvirus 7
aaaagggagaucaa

SEQ ID NO: 343326 - RNA, 14 nt, Human herpesvirus 7
aaaaggucaucuga

SEQ ID NO: 343327 - RNA, 14 nt, Human herpesvirus 7
aaaaguacagugua

SEQ ID NO: 343328 - RNA, 14 nt, Human herpesvirus 7
aaaagucugugaca

SEQ ID NO: 343329 - RNA, 15 nt, Human herpesvirus 7
aaaagucugugacag

SEQ ID NO: 343330 - RNA, 17 nt, Human herpesvirus 7
aaaaguuaaaagaucuu

SEQ ID NO: 343331 - RNA, 17 nt, Human herpesvirus 7
aaaaguucauaaugaca

SEQ ID NO: 343332 - RNA, 19 nt, Human herpesvirus 7
aaaauaaaaacaagcuuaa

SEQ ID NO: 343333 - RNA, 15 nt, Human herpesvirus 7
aaaauaaaaguaaaa

SEQ ID NO: 343334 - RNA, 14 nt, Human herpesvirus 7
aaaauaaacauguu

SEQ ID NO: 343335 - RNA, 15 nt, Human herpesvirus 7
aaaauaaagacauga

SEQ ID NO: 343336 - RNA, 21 nt, Human herpesvirus 7
aaaauaaagccagguauucaa

SEQ ID NO: 343337 - RNA, 19 nt, Human herpesvirus 7
aaaauaacaggaaaccaca

SEQ ID NO: 343338 - RNA, 14 nt, Human herpesvirus 7
aaaauacauugaau

SEQ ID NO: 343339 - RNA, 17 nt, Human herpesvirus 7
aaaauaccggaccauuu

SEQ ID NO: 343340 - RNA, 15 nt, Human herpesvirus 7
aaaauacuacaguua

SEQ ID NO: 343341 - RNA, 13 nt, Human herpesvirus 7
aaaauagcacaca

SEQ ID NO: 343342 - RNA, 13 nt, Human herpesvirus 7
aaaauauauucca

SEQ ID NO: 343343 - RNA, 12 nt, Human herpesvirus 7
aaaauauguuca

SEQ ID NO: 343344 - RNA, 15 nt, Human herpesvirus 7
aaaauauguucagau

SEQ ID NO: 343345 - RNA, 13 nt, Human herpesvirus 7
aaaauauguugcu

SEQ ID NO: 343346 - RNA, 21 nt, Human herpesvirus 7
aaaauauuuaucugcauugau

SEQ ID NO: 343347 - RNA, 16 nt, Human herpesvirus 7
aaaaucaacuugcaga

SEQ ID NO: 343348 - RNA, 14 nt, Human herpesvirus 7
aaaaucguguuaag

SEQ ID NO: 343349 - RNA, 21 nt, Human herpesvirus 7
aaaaucuacuguaaucugacu

SEQ ID NO: 343350 - RNA, 19 nt, Human herpesvirus 7
aaaaucuaucaccaagaac

SEQ ID NO: 343351 - RNA, 13 nt, Human herpesvirus 7
aaaaucugaauag

SEQ ID NO: 343352 - RNA, 17 nt, Human herpesvirus 7
aaaaugaauaacuauuu

SEQ ID NO: 343353 - RNA, 19 nt, Human herpesvirus 7
aaaaugacaaaacugcaaa

SEQ ID NO: 343354 - RNA, 21 nt, Human herpesvirus 7
aaaaugauuagcgcgugaaca

SEQ ID NO: 343355 - RNA, 11 nt, Human herpesvirus 7
aaaaugcauug

SEQ ID NO: 343356 - RNA, 19 nt, Human herpesvirus 7
aaaaugcccucagaacugu

SEQ ID NO: 343357 - RNA, 22 nt, Human herpesvirus 7
aaaaugggaauguuaaccaaaa

SEQ ID NO: 343358 - RNA, 15 nt, Human herpesvirus 7
aaaauguaucuuaaa

SEQ ID NO: 343359 - RNA, 17 nt, Human herpesvirus 7
aaaaugucucuugaaga

SEQ ID NO: 343360 - RNA, 19 nt, Human herpesvirus 7
aaaauguuaaaggaucaaa

SEQ ID NO: 343361 - RNA, 20 nt, Human herpesvirus 7
aaaauguuuaaauuacagua

SEQ ID NO: 343362 - RNA, 18 nt, Human herpesvirus 7
aaaauuaaauaaccaaac

SEQ ID NO: 343363 - RNA, 16 nt, Human herpesvirus 7
aaaauuaauaauauua

SEQ ID NO: 343364 - RNA, 13 nt, Human herpesvirus 7
aaaauuaauucaa

SEQ ID NO: 343365 - RNA, 14 nt, Human herpesvirus 7
aaaauuaguucuaa

SEQ ID NO: 343366 - RNA, 15 nt, Human herpesvirus 7
aaaauuauaacuuua

SEQ ID NO: 343367 - RNA, 17 nt, Human herpesvirus 7
aaaauuauuuacccaca

SEQ ID NO: 343368 - RNA, 14 nt, Human herpesvirus 7
aaaauucaguauuu

SEQ ID NO: 343369 - RNA, 19 nt, Human herpesvirus 7
aaaauucugcuugucucug

SEQ ID NO: 343370 - RNA, 23 nt, Human herpesvirus 7
aaaauuggacaccaguaugaaau

SEQ ID NO: 343371 - RNA, 14 nt, Human herpesvirus 7
aaaauuuauauuaa

SEQ ID NO: 343372 - RNA, 13 nt, Human herpesvirus 7
aaaauuucauauc

SEQ ID NO: 343373 - RNA, 14 nt, Human herpesvirus 7
aaaauuucauaucu

SEQ ID NO: 343374 - RNA, 15 nt, Human herpesvirus 7
aaaauuucauaucua

SEQ ID NO: 343375 - RNA, 23 nt, Human herpesvirus 7
aaaauuucauaucuaugaugcau

SEQ ID NO: 343376 - RNA, 23 nt, Human herpesvirus 7
aaaauuuccuacaaaaguucugu

SEQ ID NO: 343377 - RNA, 13 nt, Human herpesvirus 7
aaaauuucuauca

SEQ ID NO: 343378 - RNA, 17 nt, Human herpesvirus 7
aaaauuuuauugucuaa

SEQ ID NO: 343379 - RNA, 17 nt, Human herpesvirus 7
aaaauuuuggauugugu

SEQ ID NO: 343380 - RNA, 20 nt, Human herpesvirus 7
aaaauuuuuagcucuaaaca

SEQ ID NO: 343381 - RNA, 18 nt, Human herpesvirus 7
aaacaaaaaaaguaccau

SEQ ID NO: 343382 - RNA, 11 nt, Human herpesvirus 7
aaacaaaauac

SEQ ID NO: 343383 - RNA, 18 nt, Human herpesvirus 7
aaacaaaauguauucaau

SEQ ID NO: 343384 - RNA, 14 nt, Human herpesvirus 7
aaacaaaauuccaa

SEQ ID NO: 343385 - RNA, 19 nt, Human herpesvirus 7
aaacaaaauuccaaaaugu

SEQ ID NO: 343386 - RNA, 13 nt, Human herpesvirus 7
aaacaaacaauga

SEQ ID NO: 343387 - RNA, 13 nt, Human herpesvirus 7
aaacaagcuuaaa

SEQ ID NO: 343388 - RNA, 13 nt, Human herpesvirus 7
aaacaagguuuaa

SEQ ID NO: 343389 - RNA, 14 nt, Human herpesvirus 7
aaacaagguuuaaa

SEQ ID NO: 343390 - RNA, 19 nt, Human herpesvirus 7
aaacaaucuggacauuuca

SEQ ID NO: 343391 - RNA, 20 nt, Human herpesvirus 7
aaacaaucuggacauuucaa

SEQ ID NO: 343392 - RNA, 23 nt, Human herpesvirus 7
aaacaauuauauaaacacuugcu

SEQ ID NO: 343393 - RNA, 13 nt, Human herpesvirus 7
aaacacaguauau

SEQ ID NO: 343394 - RNA, 19 nt, Human herpesvirus 7
aaacacuacaccaauaguu

SEQ ID NO: 343395 - RNA, 20 nt, Human herpesvirus 7
aaacacuugcuagcugugau

SEQ ID NO: 343396 - RNA, 17 nt, Human herpesvirus 7
aaacagaaaacaacaca

SEQ ID NO: 343397 - RNA, 17 nt, Human herpesvirus 7
aaacagaagcugacuuu

SEQ ID NO: 343398 - RNA, 19 nt, Human herpesvirus 7
aaacagaagcugacuuugu

SEQ ID NO: 343399 - RNA, 12 nt, Human herpesvirus 7
aaacagcauuuu

SEQ ID NO: 343400 - RNA, 17 nt, Human herpesvirus 7
aaacagcugggauagaa

SEQ ID NO: 343401 - RNA, 18 nt, Human herpesvirus 7
aaacagcugggauagaaa

SEQ ID NO: 343402 - RNA, 21 nt, Human herpesvirus 7
aaacagugggaaugcaucuga

SEQ ID NO: 343403 - RNA, 22 nt, Human herpesvirus 7
aaacaguuaaugugugugguaa

SEQ ID NO: 343404 - RNA, 22 nt, Human herpesvirus 7
aaacaucaauuuuaaugugcuu

SEQ ID NO: 343405 - RNA, 16 nt, Human herpesvirus 7
aaacauuagcauugaa

SEQ ID NO: 343406 - RNA, 22 nt, Human herpesvirus 7
aaacauuaucgcguuuucaugc

SEQ ID NO: 343407 - RNA, 14 nt, Human herpesvirus 7
aaacauuccaacag

SEQ ID NO: 343408 - RNA, 16 nt, Human herpesvirus 7
aaacauugaaaaagca

SEQ ID NO: 343409 - RNA, 12 nt, Human herpesvirus 7
aaacauuuacaa

SEQ ID NO: 343410 - RNA, 21 nt, Human herpesvirus 7
aaacauuuacaaaaaaaagcu

SEQ ID NO: 343411 - RNA, 11 nt, Human herpesvirus 7
aaacauuucag

SEQ ID NO: 343412 - RNA, 14 nt, Human herpesvirus 7
aaacauuuugacga

SEQ ID NO: 343413 - RNA, 18 nt, Human herpesvirus 7
aaaccaauuaauauuaau

SEQ ID NO: 343414 - RNA, 14 nt, Human herpesvirus 7
aaaccacaaaaauc

SEQ ID NO: 343415 - RNA, 20 nt, Human herpesvirus 7
aaaccaggaacagauucucc

SEQ ID NO: 343416 - RNA, 23 nt, Human herpesvirus 7
aaaccaugauguuaaagaacaag

SEQ ID NO: 343417 - RNA, 22 nt, Human herpesvirus 7
aaaccuauccacucuccugaaa

SEQ ID NO: 343418 - RNA, 16 nt, Human herpesvirus 7
aaaccuucgugugucu

SEQ ID NO: 343419 - RNA, 18 nt, Human herpesvirus 7
aaacgaaaggaaucuuaa

SEQ ID NO: 343420 - RNA, 16 nt, Human herpesvirus 7
aaaaaaauuaguucua

SEQ ID NO: 343421 - RNA, 11 nt, Human herpesvirus 7
aaaaaaccauu

SEQ ID NO: 343422 - RNA, 14 nt, Human herpesvirus 7
aaaaaaucuauuaa

SEQ ID NO: 343423 - RNA, 12 nt, Human herpesvirus 7
aaaaacaaugaa

SEQ ID NO: 343424 - RNA, 17 nt, Human herpesvirus 7
aaaaacacguccaagaa

SEQ ID NO: 343425 - RNA, 15 nt, Human herpesvirus 7
aaaaacaugagugaa

SEQ ID NO: 343426 - RNA, 21 nt, Human herpesvirus 7
aaaaaccaggaacagauucuc

SEQ ID NO: 343427 - RNA, 22 nt, Human herpesvirus 7
aaaaaccaggaacagauucucc

SEQ ID NO: 343428 - RNA, 18 nt, Human herpesvirus 7
aaaaacgcuaaccaucug

SEQ ID NO: 343429 - RNA, 20 nt, Human herpesvirus 7
aaaaacgcuaaccaucugcu

SEQ ID NO: 343430 - RNA, 15 nt, Human herpesvirus 7
aaaaacgguauguaa

SEQ ID NO: 343431 - RNA, 22 nt, Human herpesvirus 7
aaaaacuuuuuauaauaauacu

SEQ ID NO: 343432 - RNA, 13 nt, Human herpesvirus 7
aaaaagaauguau

SEQ ID NO: 343433 - RNA, 18 nt, Human herpesvirus 7
aaaaagauuuaacaugug

SEQ ID NO: 343434 - RNA, 16 nt, Human herpesvirus 7
aaaaaggccuuguaaa

SEQ ID NO: 343435 - RNA, 15 nt, Human herpesvirus 7
aaaaagguacuaucu

SEQ ID NO: 343436 - RNA, 23 nt, Human herpesvirus 7
aaaaauaagaaaccagcuuuuau

SEQ ID NO: 343437 - RNA, 14 nt, Human herpesvirus 7
aaaaauacaacuuc

SEQ ID NO: 343438 - RNA, 12 nt, Human herpesvirus 7
aaaaauccaaaa

SEQ ID NO: 343439 - RNA, 20 nt, Human herpesvirus 7
aaaaaucuaauuaaucugca

SEQ ID NO: 343440 - RNA, 18 nt, Human herpesvirus 7
aaaaaucucguuuguaaa

SEQ ID NO: 343441 - RNA, 12 nt, Human herpesvirus 7
aaaaaucuugca

SEQ ID NO: 343442 - RNA, 17 nt, Human herpesvirus 7
aaaaauguuaugugcuu

SEQ ID NO: 343443 - RNA, 21 nt, Human herpesvirus 7
aaaaauguuuacaaacauguu

SEQ ID NO: 343444 - RNA, 20 nt, Human herpesvirus 7
aaaaauguuuuuguuucuga

SEQ ID NO: 343445 - RNA, 15 nt, Human herpesvirus 7
aaaaauuaacagcuc

SEQ ID NO: 343446 - RNA, 16 nt, Human herpesvirus 7
aaaaauuaacagcucc

SEQ ID NO: 343447 - RNA, 17 nt, Human herpesvirus 7
aaaaauuacuugcuaug

SEQ ID NO: 343448 - RNA, 16 nt, Human herpesvirus 7
aaaaauuugacauuug

SEQ ID NO: 343449 - RNA, 16 nt, Human herpesvirus 7
aaaaauuuuuuacugu

SEQ ID NO: 343450 - RNA, 19 nt, Human herpesvirus 7
aaaaauuuuuuacugucuu

SEQ ID NO: 343451 - RNA, 20 nt, Human herpesvirus 7
aaaacaaaaaagugaucaaa

SEQ ID NO: 343452 - RNA, 15 nt, Human herpesvirus 7
aaaacaaacuauguc

SEQ ID NO: 343453 - RNA, 21 nt, Human herpesvirus 7
aaaacaagacagaaaugaauc

SEQ ID NO: 343454 - RNA, 14 nt, Human herpesvirus 7
aaaacaagcuuaaa

SEQ ID NO: 343455 - RNA, 22 nt, Human herpesvirus 7
aaaacaaucaauaagccucuaa

SEQ ID NO: 343456 - RNA, 11 nt, Human herpesvirus 7
aaaacaaugaa

SEQ ID NO: 343457 - RNA, 22 nt, Human herpesvirus 7
aaaacaugucuuuuaguuuuca

SEQ ID NO: 343458 - RNA, 21 nt, Human herpesvirus 7
aaaacauuaucgcguuuucau

SEQ ID NO: 343459 - RNA, 15 nt, Human herpesvirus 7
aaaacccuuuauuca

SEQ ID NO: 343460 - RNA, 22 nt, Human herpesvirus 7
aaaacccuuuauucauuugcuu

SEQ ID NO: 343461 - RNA, 19 nt, Human herpesvirus 7
aaaacgcuaaccaucugcu

SEQ ID NO: 343462 - RNA, 14 nt, Human herpesvirus 7
aaaacuaacuuauc

SEQ ID NO: 343463 - RNA, 20 nt, Human herpesvirus 7
aaaacucuucuuuauaagca

SEQ ID NO: 343464 - RNA, 21 nt, Human herpesvirus 7
aaaacugucacgcaagucaca

SEQ ID NO: 343465 - RNA, 22 nt, Human herpesvirus 7
aaaacugucacgcaagucacaa

SEQ ID NO: 343466 - RNA, 22 nt, Human herpesvirus 7
aauauuuauguucaaauaugca

SEQ ID NO: 343467 - RNA, 24 nt, Human herpesvirus 7
aauauuuauguucaaauaugcaug

SEQ ID NO: 343468 - RNA, 14 nt, Human herpesvirus 7
aauauuuuacauau

SEQ ID NO: 343469 - RNA, 22 nt, Human herpesvirus 7
aauauuuugaaaauauauucca

SEQ ID NO: 343470 - RNA, 20 nt, Human herpesvirus 7
aauauuuuugcccugccaau

SEQ ID NO: 343471 - RNA, 15 nt, Human herpesvirus 7
aaucaaaguaaaaga

SEQ ID NO: 343472 - RNA, 14 nt, Human herpesvirus 7
aaucaaaguuuuaa

SEQ ID NO: 343473 - RNA, 23 nt, Human herpesvirus 7
aaucaagccacgaugacuuccaa

SEQ ID NO: 343474 - RNA, 14 nt, Human herpesvirus 7
aaucacaacauaua

SEQ ID NO: 343475 - RNA, 14 nt, Human herpesvirus 7
aaucacagcauuau

SEQ ID NO: 343476 - RNA, 14 nt, Human herpesvirus 7
aaucacauacucua

SEQ ID NO: 343477 - RNA, 14 nt, Human herpesvirus 7
aaucaccaaagagu

SEQ ID NO: 343478 - RNA, 19 nt, Human herpesvirus 7
aaucacccuuaucugucau

SEQ ID NO: 343479 - RNA, 16 nt, Human herpesvirus 7
aaucaccgaugaauuu

SEQ ID NO: 343480 - RNA, 21 nt, Human herpesvirus 7
aaucacgugauuaagauuccu

SEQ ID NO: 343481 - RNA, 14 nt, Human herpesvirus 7
aaucagacuaaaua

SEQ ID NO: 343482 - RNA, 15 nt, Human herpesvirus 7
aaucagacuaaauau

SEQ ID NO: 343483 - RNA, 22 nt, Human herpesvirus 7
aaucagcauuuaccauuucgaa

SEQ ID NO: 343484 - RNA, 12 nt, Human herpesvirus 7
aaucaguucaac

SEQ ID NO: 343485 - RNA, 22 nt, Human herpesvirus 7
aaucauaauucaaucugcaaaa

SEQ ID NO: 343486 - RNA, 19 nt, Human herpesvirus 7
aaucauaccauaaauacca

SEQ ID NO: 343487 - RNA, 23 nt, Human herpesvirus 7
aaucauauaugcauuauauccaa

SEQ ID NO: 343488 - RNA, 20 nt, Human herpesvirus 7
aaucaucuuaaaaguacaaa

SEQ ID NO: 343489 - RNA, 21 nt, Human herpesvirus 7
aaucaucuuaaaaguacaaau

SEQ ID NO: 343490 - RNA, 23 nt, Human herpesvirus 7
aaucaucuuaaaaguacaaaugu

SEQ ID NO: 343491 - RNA, 17 nt, Human herpesvirus 7
aaucaugaaaacagugg

SEQ ID NO: 343492 - RNA, 22 nt, Human herpesvirus 7
aauccaaguuuuacagaaauug

SEQ ID NO: 343493 - RNA, 21 nt, Human herpesvirus 7
aauccuggauuucagcauuug

SEQ ID NO: 343494 - RNA, 18 nt, Human herpesvirus 7
aaucgagcgacagucacc

SEQ ID NO: 343495 - RNA, 20 nt, Human herpesvirus 7
aaucgauaaacuuugucaau

SEQ ID NO: 343496 - RNA, 17 nt, Human herpesvirus 7
aaucgcaguguucauua

SEQ ID NO: 343497 - RNA, 17 nt, Human herpesvirus 7
aaucgguaacaugucuu

SEQ ID NO: 343498 - RNA, 17 nt, Human herpesvirus 7
aaucguuggcauuguau

SEQ ID NO: 343499 - RNA, 15 nt, Human herpesvirus 7
aaucuaccaauaaaa

SEQ ID NO: 343500 - RNA, 18 nt, Human herpesvirus 7
aaucuacuguaaucugac

SEQ ID NO: 343501 - RNA, 20 nt, Human herpesvirus 7
aaucuauaguuuguauuuca

SEQ ID NO: 343502 - RNA, 18 nt, Human herpesvirus 7
aaucucauaaucauagua

SEQ ID NO: 343503 - RNA, 17 nt, Human herpesvirus 7
aaucucauaaugucuca

SEQ ID NO: 343504 - RNA, 17 nt, Human herpesvirus 7
aaucugcaaaaaaccau

SEQ ID NO: 343505 - RNA, 22 nt, Human herpesvirus 7
aaucugucugucggcaauacua

SEQ ID NO: 343506 - RNA, 17 nt, Human herpesvirus 7
aaucuucauuacgccuu

SEQ ID NO: 343507 - RNA, 19 nt, Human herpesvirus 7
aaucuugugaaguuugcug

SEQ ID NO: 343508 - RNA, 15 nt, Human herpesvirus 7
aaucuuugacuguau

SEQ ID NO: 343509 - RNA, 22 nt, Human herpesvirus 7
aaucuuugacuguaucuccaaa

SEQ ID NO: 343510 - RNA, 16 nt, Human herpesvirus 7
aaucuuuuugccuuuu

SEQ ID NO: 343511 - RNA, 14 nt, Human herpesvirus 7
aaugaaaaagccau

SEQ ID NO: 343512 - RNA, 18 nt, Human herpesvirus 7
aaugaaaaagccauaaaa

SEQ ID NO: 343513 - RNA, 18 nt, Human herpesvirus 7
aaugaaaagucugugaca

SEQ ID NO: 343514 - RNA, 22 nt, Human herpesvirus 7
aaugaacaccgcaaacauuuug

SEQ ID NO: 343515 - RNA, 23 nt, Human herpesvirus 7
aaugaacaccgcaaacauuuuga

SEQ ID NO: 343516 - RNA, 19 nt, Human herpesvirus 7
aaugaaguuuaucuuggac

SEQ ID NO: 343517 - RNA, 13 nt, Human herpesvirus 7
aaugaguguuuau

SEQ ID NO: 343518 - RNA, 16 nt, Human herpesvirus 7
aaugauaaauacucug

SEQ ID NO: 343519 - RNA, 20 nt, Human herpesvirus 7
aaugauaaauacucuggguc

SEQ ID NO: 343520 - RNA, 14 nt, Human herpesvirus 7
aaugauaauuucua

SEQ ID NO: 343521 - RNA, 14 nt, Human herpesvirus 7
aaugaugaugacaa

SEQ ID NO: 343522 - RNA, 14 nt, Human herpesvirus 7
aaugcagccuacuu

SEQ ID NO: 343523 - RNA, 12 nt, Human herpesvirus 7
aaugcauugcuu

SEQ ID NO: 343524 - RNA, 23 nt, Human herpesvirus 7
aaugcuccgcgcuguucagcucc

SEQ ID NO: 343525 - RNA, 17 nt, Human herpesvirus 7
aaugcugcaauguucau

SEQ ID NO: 343526 - RNA, 20 nt, Human herpesvirus 7
aaugcugcaauguucaucaa

SEQ ID NO: 343527 - RNA, 16 nt, Human herpesvirus 7
aaugcuuaaauuucca

SEQ ID NO: 343528 - RNA, 14 nt, Human herpesvirus 7
aaugcuuugcugca

SEQ ID NO: 343529 - RNA, 22 nt, Human herpesvirus 7
aauggaaaccuggagaagacaa

SEQ ID NO: 343530 - RNA, 13 nt, Human herpesvirus 7
aauggaagaacaa

SEQ ID NO: 343531 - RNA, 14 nt, Human herpesvirus 7
aauggaagaacaac

SEQ ID NO: 343532 - RNA, 13 nt, Human herpesvirus 7
aauggaucuggua

SEQ ID NO: 343533 - RNA, 19 nt, Human herpesvirus 7
aauggcaaauccuauaaaa

SEQ ID NO: 343534 - RNA, 12 nt, Human herpesvirus 7
aauggcaucuua

SEQ ID NO: 343535 - RNA, 18 nt, Human herpesvirus 7
aauggcgaguuacauuuc

SEQ ID NO: 343536 - RNA, 18 nt, Human herpesvirus 7
aauggcgguuguacugua

SEQ ID NO: 343537 - RNA, 21 nt, Human herpesvirus 7
aauggguggguccacauuuaa

SEQ ID NO: 343538 - RNA, 12 nt, Human herpesvirus 7
aauggucacuga

SEQ ID NO: 343539 - RNA, 21 nt, Human herpesvirus 7
aauguaaccuuggcuguucaa

SEQ ID NO: 343540 - RNA, 14 nt, Human herpesvirus 7
aauguaacuuucau

SEQ ID NO: 343541 - RNA, 15 nt, Human herpesvirus 7
aauguacauaacucu

SEQ ID NO: 343542 - RNA, 20 nt, Human herpesvirus 7
aauguacauaacucuaucuc

SEQ ID NO: 343543 - RNA, 19 nt, Human herpesvirus 7
aauguagaaguugaucguc

SEQ ID NO: 343544 - RNA, 13 nt, Human herpesvirus 7
aauguauguccac

SEQ ID NO: 343545 - RNA, 19 nt, Human herpesvirus 7
aaugucaaugaguguuuau

SEQ ID NO: 343546 - RNA, 16 nt, Human herpesvirus 7
aaugucagaguuuaaa

SEQ ID NO: 343547 - RNA, 17 nt, Human herpesvirus 7
aaugucauaaaacuuuu

SEQ ID NO: 343548 - RNA, 18 nt, Human herpesvirus 7
aaugucauaaaacuuuuu

SEQ ID NO: 343549 - RNA, 18 nt, Human herpesvirus 7
aaugucgaaucuacaucc

SEQ ID NO: 343550 - RNA, 16 nt, Human herpesvirus 7
aaugucucuguuccca

SEQ ID NO: 343551 - RNA, 21 nt, Human herpesvirus 7
aaugucugugucuaugaguau

SEQ ID NO: 343552 - RNA, 17 nt, Human herpesvirus 7
aaugucuuugucaugau

SEQ ID NO: 343553 - RNA, 14 nt, Human herpesvirus 7
aaugugucuuacaa

SEQ ID NO: 343554 - RNA, 13 nt, Human herpesvirus 7
aauguuaugugcu

SEQ ID NO: 343555 - RNA, 16 nt, Human herpesvirus 7
aauguuccacgaucau

SEQ ID NO: 343556 - RNA, 21 nt, Human herpesvirus 7
aauguuccacgaucauuccgu

SEQ ID NO: 343557 - RNA, 22 nt, Human herpesvirus 7
aauguugagcuaucugauuuau

SEQ ID NO: 343558 - RNA, 18 nt, Human herpesvirus 7
aauguugcaaauguucca

SEQ ID NO: 343559 - RNA, 21 nt, Human herpesvirus 7
aauguuuacaaacauguucca

SEQ ID NO: 343560 - RNA, 20 nt, Human herpesvirus 7
aauguuuccguguuuauguc

SEQ ID NO: 343561 - RNA, 17 nt, Human herpesvirus 7
aauguuuuugcuagaaa

SEQ ID NO: 343562 - RNA, 16 nt, Human herpesvirus 7
aauguuuuuuucauac

SEQ ID NO: 343563 - RNA, 22 nt, Human herpesvirus 7
aauguuuuuuucauacauagaa

SEQ ID NO: 343564 - RNA, 18 nt, Human herpesvirus 7
aauuaaaauguacauaac

SEQ ID NO: 343565 - RNA, 12 nt, Human herpesvirus 7
aauuaaacaauc

SEQ ID NO: 343566 - RNA, 14 nt, Human herpesvirus 7
aauuaaauaaccaa

SEQ ID NO: 343567 - RNA, 13 nt, Human herpesvirus 7
aauuaaauacuug

SEQ ID NO: 343568 - RNA, 20 nt, Human herpesvirus 7
aauuaaauccacggacaaua

SEQ ID NO: 343569 - RNA, 14 nt, Human herpesvirus 7
aauuaagguggaaa

SEQ ID NO: 343570 - RNA, 16 nt, Human herpesvirus 7
aauuaagguggaaauc

SEQ ID NO: 343571 - RNA, 21 nt, Human herpesvirus 7
aauuaagguggaaaucuuuaa

SEQ ID NO: 343572 - RNA, 12 nt, Human herpesvirus 7
aauuaaugcauu

SEQ ID NO: 343573 - RNA, 13 nt, Human herpesvirus 7
aauuacacaaauu

SEQ ID NO: 343574 - RNA, 23 nt, Human herpesvirus 7
aauuacacaaauugauccugcua

SEQ ID NO: 343575 - RNA, 22 nt, Human herpesvirus 7
aauuacagcuaacgauccagua

SEQ ID NO: 343576 - RNA, 13 nt, Human herpesvirus 7
aauuacauugcag

SEQ ID NO: 343577 - RNA, 14 nt, Human herpesvirus 7
aauuacauugcagu

SEQ ID NO: 343578 - RNA, 21 nt, Human herpesvirus 7
aauuagagaacgaagaauuaa

SEQ ID NO: 343579 - RNA, 15 nt, Human herpesvirus 7
aauuauacacuguga

SEQ ID NO: 343580 - RNA, 16 nt, Human herpesvirus 7
aauuauacacugugaa

SEQ ID NO: 343581 - RNA, 17 nt, Human herpesvirus 7
aauuauacuagcagauc

SEQ ID NO: 343582 - RNA, 19 nt, Human herpesvirus 7
aauuauacuagcagaucuc

SEQ ID NO: 343583 - RNA, 17 nt, Human herpesvirus 7
aagcagggaaaaagcau

SEQ ID NO: 343584 - RNA, 14 nt, Human herpesvirus 7
aagcauacuuuaaa

SEQ ID NO: 343585 - RNA, 23 nt, Human herpesvirus 7
aagcauacuuucgcaacaaucaa

SEQ ID NO: 343586 - RNA, 17 nt, Human herpesvirus 7
aagccacagauauucua

SEQ ID NO: 343587 - RNA, 13 nt, Human herpesvirus 7
aagccacuguuga

SEQ ID NO: 343588 - RNA, 23 nt, Human herpesvirus 7
aagccacuucuaaauaaacaaga

SEQ ID NO: 343589 - RNA, 15 nt, Human herpesvirus 7
aagccagguauucaa

SEQ ID NO: 343590 - RNA, 22 nt, Human herpesvirus 7
aagccauaaaauguacaauucc

SEQ ID NO: 343591 - RNA, 18 nt, Human herpesvirus 7
aagccuaggauaccaaac

SEQ ID NO: 343592 - RNA, 18 nt, Human herpesvirus 7
aagcguucguaacaaauu

SEQ ID NO: 343593 - RNA, 18 nt, Human herpesvirus 7
aagcuaaaaaacguggaa

SEQ ID NO: 343594 - RNA, 16 nt, Human herpesvirus 7
aagcuaaaauuuugaa

SEQ ID NO: 343595 - RNA, 14 nt, Human herpesvirus 7
aagcugcagcugaa

SEQ ID NO: 343596 - RNA, 22 nt, Human herpesvirus 7
aagcuguuuccaucuuaugaua

SEQ ID NO: 343597 - RNA, 21 nt, Human herpesvirus 7
aagcuugcuuaaaacuuugaa

SEQ ID NO: 343598 - RNA, 21 nt, Human herpesvirus 7
aagcuugugaagacuacauaa

SEQ ID NO: 343599 - RNA, 17 nt, Human herpesvirus 7
aagcuuuacagcagccu

SEQ ID NO: 343600 - RNA, 14 nt, Human herpesvirus 7
aagcuuuaucccac

SEQ ID NO: 343601 - RNA, 21 nt, Human herpesvirus 7
aagcuuuggcagcuagccuau

SEQ ID NO: 343602 - RNA, 11 nt, Human herpesvirus 7
aagcuuuucag

SEQ ID NO: 343603 - RNA, 18 nt, Human herpesvirus 7
aaggaaccguuugcagcc

SEQ ID NO: 343604 - RNA, 17 nt, Human herpesvirus 7
aaggaagguacaucuuu

SEQ ID NO: 343605 - RNA, 13 nt, Human herpesvirus 7
aaggagaauguuc

SEQ ID NO: 343606 - RNA, 18 nt, Human herpesvirus 7
aaggagagcccaguccca

SEQ ID NO: 343607 - RNA, 19 nt, Human herpesvirus 7
aaggagagcccagucccaa

SEQ ID NO: 343608 - RNA, 14 nt, Human herpesvirus 7
aaggcaacaaugac

SEQ ID NO: 343609 - RNA, 22 nt, Human herpesvirus 7
aaggcaucgcauauagcgcuuu

SEQ ID NO: 343610 - RNA, 14 nt, Human herpesvirus 7
aagggcaugucugc

SEQ ID NO: 343611 - RNA, 21 nt, Human herpesvirus 7
aagguauuuugauaauuuaca

SEQ ID NO: 343612 - RNA, 23 nt, Human herpesvirus 7
aaggucuuucaugcauugcauuc

SEQ ID NO: 343613 - RNA, 21 nt, Human herpesvirus 7
aaggugguuacauauccaaug

SEQ ID NO: 343614 - RNA, 13 nt, Human herpesvirus 7
aaggugucuucgg

SEQ ID NO: 343615 - RNA, 19 nt, Human herpesvirus 7
aagguuaagugaaugugcu

SEQ ID NO: 343616 - RNA, 19 nt, Human herpesvirus 7
aagguuuaaaacauuuaca

SEQ ID NO: 343617 - RNA, 14 nt, Human herpesvirus 7
aagguuuagcagaa

SEQ ID NO: 343618 - RNA, 13 nt, Human herpesvirus 7
aaguaaaagcuag

SEQ ID NO: 343619 - RNA, 16 nt, Human herpesvirus 7
aaguaaaagcuaguug

SEQ ID NO: 343620 - RNA, 14 nt, Human herpesvirus 7
aaguaaauaaucca

SEQ ID NO: 343621 - RNA, 20 nt, Human herpesvirus 7
aaguaaguccaagucacgug

SEQ ID NO: 343622 - RNA, 21 nt, Human herpesvirus 7
aaguaauacauggggcauuaa

SEQ ID NO: 343623 - RNA, 9 nt, Human herpesvirus 7
aaguacaag

SEQ ID NO: 343624 - RNA, 17 nt, Human herpesvirus 7
aaguaccauugcugauc

SEQ ID NO: 343625 - RNA, 21 nt, Human herpesvirus 7
aaguaccguggacuuucuuga

SEQ ID NO: 343626 - RNA, 21 nt, Human herpesvirus 7
aaguacgccgcguuggugugu

SEQ ID NO: 343627 - RNA, 17 nt, Human herpesvirus 7
aaguagaaaaugcuguu

SEQ ID NO: 343628 - RNA, 15 nt, Human herpesvirus 7
aaguagaacuugaaa

SEQ ID NO: 343629 - RNA, 14 nt, Human herpesvirus 7
aaguagugcuaaua

SEQ ID NO: 343630 - RNA, 18 nt, Human herpesvirus 7
aaguagugucugcccuuu

SEQ ID NO: 343631 - RNA, 19 nt, Human herpesvirus 7
aaguauggaaaaauguuau

SEQ ID NO: 343632 - RNA, 20 nt, Human herpesvirus 7
aaguauguuuacgcugcuuu

SEQ ID NO: 343633 - RNA, 19 nt, Human herpesvirus 7
aaguauuuuacaacaauaa

SEQ ID NO: 343634 - RNA, 13 nt, Human herpesvirus 7
aagucacaauuac

SEQ ID NO: 343635 - RNA, 15 nt, Human herpesvirus 7
aagucacaauuacac

SEQ ID NO: 343636 - RNA, 16 nt, Human herpesvirus 7
aagucacaauuacaca

SEQ ID NO: 343637 - RNA, 20 nt, Human herpesvirus 7
aagucucauucaugcacagu

SEQ ID NO: 343638 - RNA, 15 nt, Human herpesvirus 7
aagugaacuguuaca

SEQ ID NO: 343639 - RNA, 22 nt, Human herpesvirus 7
aagugcauguguuaauuguggu

SEQ ID NO: 343640 - RNA, 14 nt, Human herpesvirus 7
aaguggaaucucau

SEQ ID NO: 343641 - RNA, 22 nt, Human herpesvirus 7
aagugggauuaaaaaucuuuac

SEQ ID NO: 343642 - RNA, 15 nt, Human herpesvirus 7
aaguguaagcuuuuu

SEQ ID NO: 343643 - RNA, 14 nt, Human herpesvirus 7
aaguuaauuuugca

SEQ ID NO: 343644 - RNA, 23 nt, Human herpesvirus 7
aaguugaaauuaaguuuuucaug

SEQ ID NO: 343645 - RNA, 11 nt, Human herpesvirus 7
aaguugaacaa

SEQ ID NO: 343646 - RNA, 17 nt, Human herpesvirus 7
aaguuuuaacaaucuaa

SEQ ID NO: 343647 - RNA, 23 nt, Human herpesvirus 7
aauaaaagcuuucuuucucauca

SEQ ID NO: 343648 - RNA, 17 nt, Human herpesvirus 7
aauaaaaguaucauuaa

SEQ ID NO: 343649 - RNA, 18 nt, Human herpesvirus 7
aauaaaaugaugaugaca

SEQ ID NO: 343650 - RNA, 18 nt, Human herpesvirus 7
aauaaaaugguugugcaa

SEQ ID NO: 343651 - RNA, 12 nt, Human herpesvirus 7
aauaaacuuacu

SEQ ID NO: 343652 - RNA, 16 nt, Human herpesvirus 7
aauaaacuuacucuuc

SEQ ID NO: 343653 - RNA, 14 nt, Human herpesvirus 7
aauaaagauuacau

SEQ ID NO: 343654 - RNA, 19 nt, Human herpesvirus 7
aauaaagccagguauucaa

SEQ ID NO: 343655 - RNA, 19 nt, Human herpesvirus 7
aauaaaucaaccaacauuc

SEQ ID NO: 343656 - RNA, 13 nt, Human herpesvirus 7
aauaaauguucuu

SEQ ID NO: 343657 - RNA, 12 nt, Human herpesvirus 7
aauaauaacaau

SEQ ID NO: 343658 - RNA, 13 nt, Human herpesvirus 7
aauaaucaaugca

SEQ ID NO: 343659 - RNA, 18 nt, Human herpesvirus 7
aauaaugaguauaacuca

SEQ ID NO: 343660 - RNA, 16 nt, Human herpesvirus 7
aauaaugcaucauaga

SEQ ID NO: 343661 - RNA, 23 nt, Human herpesvirus 7
aauaauggcauuacuacagugga

SEQ ID NO: 343662 - RNA, 22 nt, Human herpesvirus 7
aauaauuuuuuuuugagugugc

SEQ ID NO: 343663 - RNA, 22 nt, Human herpesvirus 7
aauacaaauuccugcuugcaca

SEQ ID NO: 343664 - RNA, 13 nt, Human herpesvirus 7
aauacaacauaua

SEQ ID NO: 343665 - RNA, 19 nt, Human herpesvirus 7
aauacaaccacaaccaaaa

SEQ ID NO: 343666 - RNA, 22 nt, Human herpesvirus 7
aauacaauagugaacaugugcu

SEQ ID NO: 343667 - RNA, 23 nt, Human herpesvirus 7
aauacacccagucgucugcucaa

SEQ ID NO: 343668 - RNA, 22 nt, Human herpesvirus 7
aauaccgucguuugugucuuuu

SEQ ID NO: 343669 - RNA, 16 nt, Human herpesvirus 7
aauacguccaaaaauu

SEQ ID NO: 343670 - RNA, 15 nt, Human herpesvirus 7
aauacugagagaaua

SEQ ID NO: 343671 - RNA, 16 nt, Human herpesvirus 7
aauacuggcaugucuc

SEQ ID NO: 343672 - RNA, 17 nt, Human herpesvirus 7
aauacuggcaugucuca

SEQ ID NO: 343673 - RNA, 22 nt, Human herpesvirus 7
aauagaaaaauguacaauaauu

SEQ ID NO: 343674 - RNA, 19 nt, Human herpesvirus 7
aauagacaaauuaaacaau

SEQ ID NO: 343675 - RNA, 22 nt, Human herpesvirus 7
aauagacacauuuauccaucaa

SEQ ID NO: 343676 - RNA, 21 nt, Human herpesvirus 7
aauagcagagaauauguuauc

SEQ ID NO: 343677 - RNA, 19 nt, Human herpesvirus 7
aauagccuuucacuugaau

SEQ ID NO: 343678 - RNA, 23 nt, Human herpesvirus 7
aauagugucuguuguaacagauu

SEQ ID NO: 343679 - RNA, 17 nt, Human herpesvirus 7
aauauaaaaaauuugaa

SEQ ID NO: 343680 - RNA, 16 nt, Human herpesvirus 7
aauauacgaaugccau

SEQ ID NO: 343681 - RNA, 23 nt, Human herpesvirus 7
aauauagaugcagaaaaauccaa

SEQ ID NO: 343682 - RNA, 21 nt, Human herpesvirus 7
aauauaguuugguuauccaag

SEQ ID NO: 343683 - RNA, 12 nt, Human herpesvirus 7
aauauauuccaa

SEQ ID NO: 343684 - RNA, 15 nt, Human herpesvirus 7
aauauauuccaacuc

SEQ ID NO: 343685 - RNA, 16 nt, Human herpesvirus 7
aauaucaaccauucaa

SEQ ID NO: 343686 - RNA, 21 nt, Human herpesvirus 7
aauaucaaccauucaaaaacu

SEQ ID NO: 343687 - RNA, 14 nt, Human herpesvirus 7
aauaucaauuugaa

SEQ ID NO: 343688 - RNA, 13 nt, Human herpesvirus 7
aauaucaguacaa

SEQ ID NO: 343689 - RNA, 17 nt, Human herpesvirus 7
aauaucaguacaacgac

SEQ ID NO: 343690 - RNA, 19 nt, Human herpesvirus 7
aauaucuuuuucaaaugga

SEQ ID NO: 343691 - RNA, 17 nt, Human herpesvirus 7
aauaugcaugcaauuuu

SEQ ID NO: 343692 - RNA, 15 nt, Human herpesvirus 7
aauaugcuagaagac

SEQ ID NO: 343693 - RNA, 14 nt, Human herpesvirus 7
aauauggagcagcu

SEQ ID NO: 343694 - RNA, 23 nt, Human herpesvirus 7
aauauguggcacauaaguugaca

SEQ ID NO: 343695 - RNA, 21 nt, Human herpesvirus 7
aauauuauaucuaaaguggag

SEQ ID NO: 343696 - RNA, 17 nt, Human herpesvirus 7
aauauugcuagucucaa

SEQ ID NO: 343697 - RNA, 17 nt, Human herpesvirus 7
aauauuuaaaguagcug

SEQ ID NO: 343698 - RNA, 21 nt, Human herpesvirus 7
aauauuuagagucgucuugca

SEQ ID NO: 343699 - RNA, 18 nt, Human herpesvirus 7
aaacgcuaaccaucugcu

SEQ ID NO: 343700 - RNA, 14 nt, Human herpesvirus 7
aaacguaaugcaaa

SEQ ID NO: 343701 - RNA, 21 nt, Human herpesvirus 7
aaacgucuacauuuaaauuca

SEQ ID NO: 343702 - RNA, 14 nt, Human herpesvirus 7
aaacuauauugaau

SEQ ID NO: 343703 - RNA, 18 nt, Human herpesvirus 7
aaacuauguccaaaaauu

SEQ ID NO: 343704 - RNA, 19 nt, Human herpesvirus 7
aaacucacuucuaaaagcu

SEQ ID NO: 343705 - RNA, 17 nt, Human herpesvirus 7
aaacuguacccaaaaau

SEQ ID NO: 343706 - RNA, 23 nt, Human herpesvirus 7
aaacuguauuuguugaucuucaa

SEQ ID NO: 343707 - RNA, 20 nt, Human herpesvirus 7
aaacugucacgcaagucaca

SEQ ID NO: 343708 - RNA, 17 nt, Human herpesvirus 7
aaacuuauguacuauac

SEQ ID NO: 343709 - RNA, 19 nt, Human herpesvirus 7
aaacuugaaaaucaaucca

SEQ ID NO: 343710 - RNA, 18 nt, Human herpesvirus 7
aaacuugugaaaauaaca

SEQ ID NO: 343711 - RNA, 19 nt, Human herpesvirus 7
aaagaaaaaaaguacaaga

SEQ ID NO: 343712 - RNA, 12 nt, Human herpesvirus 7
aaagaaaaagca

SEQ ID NO: 343713 - RNA, 20 nt, Human herpesvirus 7
aaagaaaagcaaaccuuaca

SEQ ID NO: 343714 - RNA, 14 nt, Human herpesvirus 7
aaagaacaagagca

SEQ ID NO: 343715 - RNA, 19 nt, Human herpesvirus 7
aaagaacauguaguacaau

SEQ ID NO: 343716 - RNA, 21 nt, Human herpesvirus 7
aaagaaccuaucaaaauucca

SEQ ID NO: 343717 - RNA, 10 nt, Human herpesvirus 7
aaagaacuua

SEQ ID NO: 343718 - RNA, 16 nt, Human herpesvirus 7
aaagaacuuacauuuc

SEQ ID NO: 343719 - RNA, 17 nt, Human herpesvirus 7
aaagaacuuacauuuca

SEQ ID NO: 343720 - RNA, 15 nt, Human herpesvirus 7
aaagaagacauccga

SEQ ID NO: 343721 - RNA, 21 nt, Human herpesvirus 7
aaagaaugcuaaaguuaacau

SEQ ID NO: 343722 - RNA, 15 nt, Human herpesvirus 7
aaagacaaacuaugg

SEQ ID NO: 343723 - RNA, 15 nt, Human herpesvirus 7
aaagacauaacaaaa

SEQ ID NO: 343724 - RNA, 16 nt, Human herpesvirus 7
aaagacauaacaaaaa

SEQ ID NO: 343725 - RNA, 19 nt, Human herpesvirus 7
aaagaccucgacauucucc

SEQ ID NO: 343726 - RNA, 22 nt, Human herpesvirus 7
aaagaccuguacuguugcuaau

SEQ ID NO: 343727 - RNA, 23 nt, Human herpesvirus 7
aaagaccuguacuguugcuaauu

SEQ ID NO: 343728 - RNA, 21 nt, Human herpesvirus 7
aaagauaccuucuuagccaga

SEQ ID NO: 343729 - RNA, 17 nt, Human herpesvirus 7
aaagauccucugagaag

SEQ ID NO: 343730 - RNA, 23 nt, Human herpesvirus 7
aaagaugauuggauuuucuguaa

SEQ ID NO: 343731 - RNA, 17 nt, Human herpesvirus 7
aaagauggaugaaaaac

SEQ ID NO: 343732 - RNA, 15 nt, Human herpesvirus 7
aaagauugcuugcac

SEQ ID NO: 343733 - RNA, 17 nt, Human herpesvirus 7
aaagauugcuugcacug

SEQ ID NO: 343734 - RNA, 17 nt, Human herpesvirus 7
aaagauuuaacaugugu

SEQ ID NO: 343735 - RNA, 16 nt, Human herpesvirus 7
aaagcaaaagccacag

SEQ ID NO: 343736 - RNA, 17 nt, Human herpesvirus 7
aaagcaaaagccacaga

SEQ ID NO: 343737 - RNA, 18 nt, Human herpesvirus 7
aaagcaucgauguuuuau

SEQ ID NO: 343738 - RNA, 20 nt, Human herpesvirus 7
aaagccacuguugaugauuu

SEQ ID NO: 343739 - RNA, 19 nt, Human herpesvirus 7
aaagcccaugaacacugcu

SEQ ID NO: 343740 - RNA, 14 nt, Human herpesvirus 7
aaagccgcugccuu

SEQ ID NO: 343741 - RNA, 21 nt, Human herpesvirus 7
aaagccgcugccuucgcucug

SEQ ID NO: 343742 - RNA, 18 nt, Human herpesvirus 7
aaagcguuucacugggaa

SEQ ID NO: 343743 - RNA, 22 nt, Human herpesvirus 7
aaagcugauuauucaugcagaa

SEQ ID NO: 343744 - RNA, 15 nt, Human herpesvirus 7
aaagcugcagcugaa

SEQ ID NO: 343745 - RNA, 13 nt, Human herpesvirus 7
aaaggaaagacaa

SEQ ID NO: 343746 - RNA, 15 nt, Human herpesvirus 7
aaaggaagacacgga

SEQ ID NO: 343747 - RNA, 20 nt, Human herpesvirus 7
aaaggauuuucgauuccauu

SEQ ID NO: 343748 - RNA, 20 nt, Human herpesvirus 7
aaagggcagacacuacuuaa

SEQ ID NO: 343749 - RNA, 14 nt, Human herpesvirus 7
aaaguaaagggaaa

SEQ ID NO: 343750 - RNA, 15 nt, Human herpesvirus 7
aaaguagccuucauu

SEQ ID NO: 343751 - RNA, 19 nt, Human herpesvirus 7
aaaguauaacauugcuuca

SEQ ID NO: 343752 - RNA, 21 nt, Human herpesvirus 7
aaaguaucauuaaaaugauua

SEQ ID NO: 343753 - RNA, 12 nt, Human herpesvirus 7
aaagugugaucu

SEQ ID NO: 343754 - RNA, 20 nt, Human herpesvirus 7
aaaguuaaaagaucuuuuac

SEQ ID NO: 343755 - RNA, 15 nt, Human herpesvirus 7
aaaguuaacauaugu

SEQ ID NO: 343756 - RNA, 16 nt, Human herpesvirus 7
aaaguucauaaugaca

SEQ ID NO: 343757 - RNA, 22 nt, Human herpesvirus 7
aaaguucuguuuugaguguuaa

SEQ ID NO: 343758 - RNA, 14 nt, Human herpesvirus 7
aaaguugggaugac

SEQ ID NO: 343759 - RNA, 15 nt, Human herpesvirus 7
aaaguuguacucaga

SEQ ID NO: 343760 - RNA, 22 nt, Human herpesvirus 7
aaaguuuaauucucgcuucaaa

SEQ ID NO: 343761 - RNA, 23 nt, Human herpesvirus 7
aaaguuuaauucucgcuucaaag

SEQ ID NO: 343762 - RNA, 14 nt, Human herpesvirus 7
aaaguuuccauaaa

SEQ ID NO: 343763 - RNA, 14 nt, Human herpesvirus 7
aaauaaaaacaugg

SEQ ID NO: 343764 - RNA, 20 nt, Human herpesvirus 7
aaauaaaaugguugugcaau

SEQ ID NO: 343765 - RNA, 12 nt, Human herpesvirus 7
aaauaaacagga

SEQ ID NO: 343766 - RNA, 13 nt, Human herpesvirus 7
aaauaaacauuuc

SEQ ID NO: 343767 - RNA, 21 nt, Human herpesvirus 7
aaauaacaaaauuguaaguaa

SEQ ID NO: 343768 - RNA, 19 nt, Human herpesvirus 7
aaauaaccaaaccacagau

SEQ ID NO: 343769 - RNA, 21 nt, Human herpesvirus 7
aaauaauagcggcuaacagug

SEQ ID NO: 343770 - RNA, 22 nt, Human herpesvirus 7
aaauacaacuucuacuaauaca

SEQ ID NO: 343771 - RNA, 23 nt, Human herpesvirus 7
aaauacucaugaaggaugcgugu

SEQ ID NO: 343772 - RNA, 18 nt, Human herpesvirus 7
aaauagugucuguuguaa

SEQ ID NO: 343773 - RNA, 13 nt, Human herpesvirus 7
aaauauauuccaa

SEQ ID NO: 343774 - RNA, 23 nt, Human herpesvirus 7
aaauaucccuagaagaugacuca

SEQ ID NO: 343775 - RNA, 19 nt, Human herpesvirus 7
aaauaugaugaaacuucca

SEQ ID NO: 343776 - RNA, 12 nt, Human herpesvirus 7
aaauauggagac

SEQ ID NO: 343777 - RNA, 21 nt, Human herpesvirus 7
aaauauuggagagauagcauu

SEQ ID NO: 343778 - RNA, 17 nt, Human herpesvirus 7
aaauauuuaugccuuug

SEQ ID NO: 343779 - RNA, 23 nt, Human herpesvirus 7
aaaucaaaaauaccggaccauuu

SEQ ID NO: 343780 - RNA, 15 nt, Human herpesvirus 7
aaaucaaaaaugugc

SEQ ID NO: 343781 - RNA, 14 nt, Human herpesvirus 7
aaaucaacuugcag

SEQ ID NO: 343782 - RNA, 21 nt, Human herpesvirus 7
aaaucacagcauuauuguaua

SEQ ID NO: 343783 - RNA, 13 nt, Human herpesvirus 7
aaaucaccuuccu

SEQ ID NO: 343784 - RNA, 19 nt, Human herpesvirus 7
aaaucauaccauaaauacc

SEQ ID NO: 343785 - RNA, 21 nt, Human herpesvirus 7
aaaucauaccauaaauaccaa

SEQ ID NO: 343786 - RNA, 14 nt, Human herpesvirus 7
aaauccaaaaucag

SEQ ID NO: 343787 - RNA, 20 nt, Human herpesvirus 7
aaauccuaaauuuccuuuau

SEQ ID NO: 343788 - RNA, 21 nt, Human herpesvirus 7
aaauccuggauuucagcauuu

SEQ ID NO: 343789 - RNA, 17 nt, Human herpesvirus 7
aaaucgcuuauuuaaca

SEQ ID NO: 343790 - RNA, 19 nt, Human herpesvirus 7
aaaucuaauuuaugauacu

SEQ ID NO: 343791 - RNA, 16 nt, Human herpesvirus 7
aaaucuacuguaaucu

SEQ ID NO: 343792 - RNA, 17 nt, Human herpesvirus 7
aaaucugaauagacaca

SEQ ID NO: 343793 - RNA, 12 nt, Human herpesvirus 7
aaaucuguaaaa

SEQ ID NO: 343794 - RNA, 22 nt, Human herpesvirus 7
aaaucuuguaucagaaaaucuc

SEQ ID NO: 343795 - RNA, 23 nt, Human herpesvirus 7
aaaucuuucaucuucugaaucug

SEQ ID NO: 343796 - RNA, 23 nt, Human herpesvirus 7
aaaucuuuuauaaauaguuucau

SEQ ID NO: 343797 - RNA, 13 nt, Human herpesvirus 7
aaaugaaguuugu

SEQ ID NO: 343798 - RNA, 22 nt, Human herpesvirus 7
aaaugaaguuuguuuaccuuca

SEQ ID NO: 343799 - RNA, 20 nt, Human herpesvirus 7
aaaugagauuuuucccaaaa

SEQ ID NO: 343800 - RNA, 16 nt, Human herpesvirus 7
aaaugauuuuucuuac

SEQ ID NO: 343801 - RNA, 23 nt, Human herpesvirus 7
aaaugcuccgcgcuguucagcuc

SEQ ID NO: 343802 - RNA, 15 nt, Human herpesvirus 7
aaaugcugcaauguu

SEQ ID NO: 343803 - RNA, 17 nt, Human herpesvirus 7
aaaugggaauguuaacc

SEQ ID NO: 343804 - RNA, 18 nt, Human herpesvirus 7
aaaugggcguaacuguga

SEQ ID NO: 343805 - RNA, 17 nt, Human herpesvirus 7
aaauggguuugggaaac

SEQ ID NO: 343806 - RNA, 14 nt, Human herpesvirus 7
aaaugguugugcaa

SEQ ID NO: 343807 - RNA, 18 nt, Human herpesvirus 7
aaauguaacuuucaucug

SEQ ID NO: 343808 - RNA, 19 nt, Human herpesvirus 7
aaauguacaauuccugaaa

SEQ ID NO: 343809 - RNA, 18 nt, Human herpesvirus 7
aaauguacauaacucuau

SEQ ID NO: 343810 - RNA, 21 nt, Human herpesvirus 7
aaaugucagaguuuaaaguaa

SEQ ID NO: 343811 - RNA, 21 nt, Human herpesvirus 7
aaaugucuuugucaugaugaa

SEQ ID NO: 343812 - RNA, 22 nt, Human herpesvirus 7
aaaugucuuugucaugaugaau

SEQ ID NO: 343813 - RNA, 20 nt, Human herpesvirus 7
aaaugugcgccgaagaggga

SEQ ID NO: 343814 - RNA, 14 nt, Human herpesvirus 7
aaauguuccuuaua

SEQ ID NO: 343815 - RNA, 23 nt, Human herpesvirus 7
aaauguuuacaaacauguuccau

SEQ ID NO: 343816 - RNA, 17 nt, Human herpesvirus 7
aaauuaaauaaccaaac

SEQ ID NO: 343817 - RNA, 23 nt, Human herpesvirus 7
aaauuaaauacuugcaaugcaaa

SEQ ID NO: 343818 - RNA, 13 nt, Human herpesvirus 7
aaauuaaucaaac

SEQ ID NO: 343819 - RNA, 20 nt, Human herpesvirus 7
aaauuaauucaaucaccaaa

SEQ ID NO: 343820 - RNA, 22 nt, Human herpesvirus 7
aaauuaauucaaucaccaaaga

SEQ ID NO: 343821 - RNA, 12 nt, Human herpesvirus 7
aaauuacaguac

SEQ ID NO: 343822 - RNA, 13 nt, Human herpesvirus 7
aaauuacaguaca

SEQ ID NO: 343823 - RNA, 14 nt, Human herpesvirus 7
aaauuacuugcuau

SEQ ID NO: 343824 - RNA, 22 nt, Human herpesvirus 7
aaauuacuugcuaugcuugaaa

SEQ ID NO: 343825 - RNA, 22 nt, Human herpesvirus 7
aaauuagacgcuuugagucuca

SEQ ID NO: 343826 - RNA, 17 nt, Human herpesvirus 7
aaauuaguucuugugac

SEQ ID NO: 343827 - RNA, 18 nt, Human herpesvirus 7
aaauuauacuagcagauc

SEQ ID NO: 343828 - RNA, 22 nt, Human herpesvirus 7
aaauuaugcguuaaugucucug

SEQ ID NO: 343829 - RNA, 19 nt, Human herpesvirus 7
aaauuauuaauauuaguau

SEQ ID NO: 343830 - RNA, 17 nt, Human herpesvirus 7
aaauuauuagauuccau

SEQ ID NO: 343831 - RNA, 15 nt, Human herpesvirus 7
aaauucaaccacaga

SEQ ID NO: 343832 - RNA, 14 nt, Human herpesvirus 7
aaauucauccaaaa

SEQ ID NO: 343833 - RNA, 16 nt, Human herpesvirus 7
aaauuccauacaaaga

SEQ ID NO: 343834 - RNA, 16 nt, Human herpesvirus 7
aaauucuccaaucaua

SEQ ID NO: 343835 - RNA, 20 nt, Human herpesvirus 7
aaauucuuuuucaagauuaa

SEQ ID NO: 343836 - RNA, 14 nt, Human herpesvirus 7
aaauugaaccuuaa

SEQ ID NO: 343837 - RNA, 22 nt, Human herpesvirus 7
aaauugaaccuuaacauacuga

SEQ ID NO: 343838 - RNA, 15 nt, Human herpesvirus 7
aaauugacaccguuu

SEQ ID NO: 343839 - RNA, 16 nt, Human herpesvirus 7
aaauugacagcaccaa

SEQ ID NO: 343840 - RNA, 14 nt, Human herpesvirus 7
aaauuguuaccuaa

SEQ ID NO: 343841 - RNA, 21 nt, Human herpesvirus 7
aaauuguuccugugugcaaug

SEQ ID NO: 343842 - RNA, 23 nt, Human herpesvirus 7
aaauuguuccugugugcaaugau

SEQ ID NO: 343843 - RNA, 18 nt, Human herpesvirus 7
aaauuuaaaccgagugua

SEQ ID NO: 343844 - RNA, 14 nt, Human herpesvirus 7
aaauuuaagagaca

SEQ ID NO: 343845 - RNA, 16 nt, Human herpesvirus 7
aaauuuaauaacagca

SEQ ID NO: 343846 - RNA, 20 nt, Human herpesvirus 7
aaauuuagcaccaacugaau

SEQ ID NO: 343847 - RNA, 13 nt, Human herpesvirus 7
aaauuucauuuaa

SEQ ID NO: 343848 - RNA, 21 nt, Human herpesvirus 7
aaauuucuaaauaugaugaaa

SEQ ID NO: 343849 - RNA, 16 nt, Human herpesvirus 7
aaauuugacauuugca

SEQ ID NO: 343850 - RNA, 17 nt, Human herpesvirus 7
aaauuuuaauugugcau

SEQ ID NO: 343851 - RNA, 14 nt, Human herpesvirus 7
aaauuuuacaaaga

SEQ ID NO: 343852 - RNA, 19 nt, Human herpesvirus 7
aaauuuuacagccuguaca

SEQ ID NO: 343853 - RNA, 20 nt, Human herpesvirus 7
aaauuuuagacgcaccuuaa

SEQ ID NO: 343854 - RNA, 19 nt, Human herpesvirus 7
aaauuuucauagcacucau

SEQ ID NO: 343855 - RNA, 18 nt, Human herpesvirus 7
aacaaaauguauucaaug

SEQ ID NO: 343856 - RNA, 13 nt, Human herpesvirus 7
aacaaacauucca

SEQ ID NO: 343857 - RNA, 14 nt, Human herpesvirus 7
aacaaacauuccaa

SEQ ID NO: 343858 - RNA, 23 nt, Human herpesvirus 7
aacaaacucugcuucggaauuug

SEQ ID NO: 343859 - RNA, 22 nt, Human herpesvirus 7
aacaaaggaucgaucucuguca

SEQ ID NO: 343860 - RNA, 23 nt, Human herpesvirus 7
aacaaagugcauaaauaauaaca

SEQ ID NO: 343861 - RNA, 13 nt, Human herpesvirus 7
aacaaauaauuca

SEQ ID NO: 343862 - RNA, 17 nt, Human herpesvirus 7
aacaaauccacucuggc

SEQ ID NO: 343863 - RNA, 19 nt, Human herpesvirus 7
aacaaauguuuacgaauau

SEQ ID NO: 343864 - RNA, 18 nt, Human herpesvirus 7
aacaaauuaaauacuugc

SEQ ID NO: 343865 - RNA, 13 nt, Human herpesvirus 7
aacaaauugugga

SEQ ID NO: 343866 - RNA, 22 nt, Human herpesvirus 7
aacaaauuguggagagauucaa

SEQ ID NO: 343867 - RNA, 14 nt, Human herpesvirus 7
aacaacagccaaau

SEQ ID NO: 343868 - RNA, 14 nt, Human herpesvirus 7
aacaacuaaagaga

SEQ ID NO: 343869 - RNA, 15 nt, Human herpesvirus 7
aacaagaaagucaga

SEQ ID NO: 343870 - RNA, 20 nt, Human herpesvirus 7
aacaagacagaaaugaaucu

SEQ ID NO: 343871 - RNA, 21 nt, Human herpesvirus 7
aacaagcuuaaauguguaaca

SEQ ID NO: 343872 - RNA, 14 nt, Human herpesvirus 7
aacaagguucucau

SEQ ID NO: 343873 - RNA, 19 nt, Human herpesvirus 7
aacaaguagaaaaugcugu

SEQ ID NO: 343874 - RNA, 19 nt, Human herpesvirus 7
aacaaguaugucagccgcu

SEQ ID NO: 343875 - RNA, 21 nt, Human herpesvirus 7
aacaaguuucaaaaagugcau

SEQ ID NO: 343876 - RNA, 17 nt, Human herpesvirus 7
aacaauaaaagauuuaa

SEQ ID NO: 343877 - RNA, 11 nt, Human herpesvirus 7
aacaaucaaua

SEQ ID NO: 343878 - RNA, 15 nt, Human herpesvirus 7
aacaaucgauugcag

SEQ ID NO: 343879 - RNA, 18 nt, Human herpesvirus 7
aacaaucuggacauuuca

SEQ ID NO: 343880 - RNA, 12 nt, Human herpesvirus 7
aacaaucuuaca

SEQ ID NO: 343881 - RNA, 18 nt, Human herpesvirus 7
aacaaucuuacaaaaagu

SEQ ID NO: 343882 - RNA, 23 nt, Human herpesvirus 7
aacaaugaaaguugggaugacaa

SEQ ID NO: 343883 - RNA, 18 nt, Human herpesvirus 7
aacaaugagcaauucaug

SEQ ID NO: 343884 - RNA, 12 nt, Human herpesvirus 7
aacaauggugug

SEQ ID NO: 343885 - RNA, 20 nt, Human herpesvirus 7
aacaauuacuugucuuaccu

SEQ ID NO: 343886 - RNA, 20 nt, Human herpesvirus 7
aacaauuauauaaacacuug

SEQ ID NO: 343887 - RNA, 15 nt, Human herpesvirus 7
aacaauugaguucag

SEQ ID NO: 343888 - RNA, 19 nt, Human herpesvirus 7
aacaauuucacagacgcau

SEQ ID NO: 343889 - RNA, 14 nt, Human herpesvirus 7
aacaauuuccuuua

SEQ ID NO: 343890 - RNA, 19 nt, Human herpesvirus 7
aacaauuugaagaggagaa

SEQ ID NO: 343891 - RNA, 17 nt, Human herpesvirus 7
aacacaaagccaaugag

SEQ ID NO: 343892 - RNA, 22 nt, Human herpesvirus 7
aacacguagaaaaaaacaauga

SEQ ID NO: 343893 - RNA, 21 nt, Human herpesvirus 7
aacacugcuucucccauucaa

SEQ ID NO: 343894 - RNA, 15 nt, Human herpesvirus 7
aacagauugucuuau

SEQ ID NO: 343895 - RNA, 15 nt, Human herpesvirus 7
aacagcgugucaaaa

SEQ ID NO: 343896 - RNA, 16 nt, Human herpesvirus 7
aacagcguucaaucaa

SEQ ID NO: 343897 - RNA, 16 nt, Human herpesvirus 7
aacagugcuguacuuu

SEQ ID NO: 343898 - RNA, 13 nt, Human herpesvirus 7
aacaguuucugca

SEQ ID NO: 343899 - RNA, 16 nt, Human herpesvirus 7
aacaguuuuauuccca

SEQ ID NO: 343900 - RNA, 12 nt, Human herpesvirus 7
aacauaaccaau

SEQ ID NO: 343901 - RNA, 20 nt, Human herpesvirus 7
aacauacgugcuuagacuua

SEQ ID NO: 343902 - RNA, 15 nt, Human herpesvirus 7
aacauauguugauuc

SEQ ID NO: 343903 - RNA, 13 nt, Human herpesvirus 7
aacauauucuuag

SEQ ID NO: 343904 - RNA, 15 nt, Human herpesvirus 7
aacaucccuuuccaa

SEQ ID NO: 343905 - RNA, 20 nt, Human herpesvirus 7
aacaucgagauuccaaagag

SEQ ID NO: 343906 - RNA, 14 nt, Human herpesvirus 7
aacaucuaugugcu

SEQ ID NO: 343907 - RNA, 22 nt, Human herpesvirus 7
aacaucugucaggucacaaaag

SEQ ID NO: 343908 - RNA, 19 nt, Human herpesvirus 7
aacaugagauaaacuuuua

SEQ ID NO: 343909 - RNA, 13 nt, Human herpesvirus 7
aacaugagugaaa

SEQ ID NO: 343910 - RNA, 14 nt, Human herpesvirus 7
aacaugggucucuu

SEQ ID NO: 343911 - RNA, 19 nt, Human herpesvirus 7
aacaugucuucaacuucuc

SEQ ID NO: 343912 - RNA, 20 nt, Human herpesvirus 7
aacauguguauauuugcugu

SEQ ID NO: 343913 - RNA, 24 nt, Human herpesvirus 7
aacauuacgucaucccugcugaua

SEQ ID NO: 343914 - RNA, 24 nt, Human herpesvirus 7
aacauuaucgcguuuucaugcuca

SEQ ID NO: 343915 - RNA, 23 nt, Human herpesvirus 7
aacauugugaguuucuacauguu

SEQ ID NO: 343916 - RNA, 22 nt, Human herpesvirus 7
aacauuuuguaugaaaagccca

SEQ ID NO: 343917 - RNA, 18 nt, Human herpesvirus 7
aaccaaaaugugggaugu

SEQ ID NO: 343918 - RNA, 21 nt, Human herpesvirus 7
aaccaaagcaucgauguuuua

SEQ ID NO: 343919 - RNA, 14 nt, Human herpesvirus 7
aaccacaacuguga

SEQ ID NO: 343920 - RNA, 21 nt, Human herpesvirus 7
aaccacagaggcgucaccgcu

SEQ ID NO: 343921 - RNA, 13 nt, Human herpesvirus 7
aaccacuaaucca

SEQ ID NO: 343922 - RNA, 13 nt, Human herpesvirus 7
aaccacuguguca

SEQ ID NO: 343923 - RNA, 14 nt, Human herpesvirus 7
aaccacugugucau

SEQ ID NO: 343924 - RNA, 20 nt, Human herpesvirus 7
aaccaugauagaaauuauga

SEQ ID NO: 343925 - RNA, 20 nt, Human herpesvirus 7
aacccagaagaaacuugaaa

SEQ ID NO: 343926 - RNA, 19 nt, Human herpesvirus 7
aaccgagaauguucuauca

SEQ ID NO: 343927 - RNA, 16 nt, Human herpesvirus 7
aaccgauacagaucau

SEQ ID NO: 343928 - RNA, 17 nt, Human herpesvirus 7
aaccgauauaguuuguu

SEQ ID NO: 343929 - RNA, 15 nt, Human herpesvirus 7
aaccgcaaaagccac

SEQ ID NO: 343930 - RNA, 20 nt, Human herpesvirus 7
aaccggacccggacuuugau

SEQ ID NO: 343931 - RNA, 20 nt, Human herpesvirus 7
aaccgguaaagaaccuauca

SEQ ID NO: 343932 - RNA, 14 nt, Human herpesvirus 7
aaccguuugcagcc

SEQ ID NO: 343933 - RNA, 13 nt, Human herpesvirus 7
aaccuacugaaga

SEQ ID NO: 343934 - RNA, 19 nt, Human herpesvirus 7
aaccuuaacauacugaugu

SEQ ID NO: 343935 - RNA, 17 nt, Human herpesvirus 7
aaccuucgcaacaauua

SEQ ID NO: 343936 - RNA, 15 nt, Human herpesvirus 7
aaccuuuuaacaaca

SEQ ID NO: 343937 - RNA, 18 nt, Human herpesvirus 7
aaccuuuuaacaacagcc

SEQ ID NO: 343938 - RNA, 16 nt, Human herpesvirus 7
aaccuuuuucugaaaa

SEQ ID NO: 343939 - RNA, 14 nt, Human herpesvirus 7
aacgaauaaaaagu

SEQ ID NO: 343940 - RNA, 18 nt, Human herpesvirus 7
aacgacaaacuuugcaac

SEQ ID NO: 343941 - RNA, 19 nt, Human herpesvirus 7
aacgacguaacaacagcag

SEQ ID NO: 343942 - RNA, 14 nt, Human herpesvirus 7
aacgacuacaggaa

SEQ ID NO: 343943 - RNA, 16 nt, Human herpesvirus 7
aacgacuccaacugac

SEQ ID NO: 343944 - RNA, 22 nt, Human herpesvirus 7
aacgauaugguuugaaaaccau

SEQ ID NO: 343945 - RNA, 17 nt, Human herpesvirus 7
aacgcuaaagagcauuc

SEQ ID NO: 343946 - RNA, 23 nt, Human herpesvirus 7
aacgcuaaagagcauucaugccu

SEQ ID NO: 343947 - RNA, 15 nt, Human herpesvirus 7
aacgcugacagucau

SEQ ID NO: 343948 - RNA, 19 nt, Human herpesvirus 7
aacguuuuuaucugauaaa

SEQ ID NO: 343949 - RNA, 20 nt, Human herpesvirus 7
aacuaaaauugacagcacca

SEQ ID NO: 343950 - RNA, 19 nt, Human herpesvirus 7
aacuagaaaaacacuagcu

SEQ ID NO: 343951 - RNA, 21 nt, Human herpesvirus 7
aacuagaaaaacacuagcuuu

SEQ ID NO: 343952 - RNA, 19 nt, Human herpesvirus 7
aacuagaaaauaacuuuaa

SEQ ID NO: 343953 - RNA, 21 nt, Human herpesvirus 7
aacuagaacagcugaaacuca

SEQ ID NO: 343954 - RNA, 18 nt, Human herpesvirus 7
aacuauaauagccuuuca

SEQ ID NO: 343955 - RNA, 20 nt, Human herpesvirus 7
aacuauaucaucaucuuuuu

SEQ ID NO: 343956 - RNA, 16 nt, Human herpesvirus 7
aacuauguccaaaaau

SEQ ID NO: 343957 - RNA, 17 nt, Human herpesvirus 7
aacuauuguccuuucaa

SEQ ID NO: 343958 - RNA, 17 nt, Human herpesvirus 7
aacuccguuucauuuaa

SEQ ID NO: 343959 - RNA, 13 nt, Human herpesvirus 7
aacucgaaacugg

SEQ ID NO: 343960 - RNA, 14 nt, Human herpesvirus 7
aacucuaucuccua

SEQ ID NO: 343961 - RNA, 15 nt, Human herpesvirus 7
aacucuaucuccuau

SEQ ID NO: 343962 - RNA, 13 nt, Human herpesvirus 7
aacucugucauca

SEQ ID NO: 343963 - RNA, 12 nt, Human herpesvirus 7
aacucuuccuuu

SEQ ID NO: 343964 - RNA, 13 nt, Human herpesvirus 7
aacucuuccuuuc

SEQ ID NO: 343965 - RNA, 15 nt, Human herpesvirus 7
aacugaauuaaggug

SEQ ID NO: 343966 - RNA, 18 nt, Human herpesvirus 7
aacugauaauuucuuuuu

SEQ ID NO: 343967 - RNA, 14 nt, Human herpesvirus 7
aacugcaaauccaa

SEQ ID NO: 343968 - RNA, 22 nt, Human herpesvirus 7
aacugcaaauccaacagaauac

SEQ ID NO: 343969 - RNA, 22 nt, Human herpesvirus 7
aacuggaauuauacacugugaa

SEQ ID NO: 343970 - RNA, 12 nt, Human herpesvirus 7
aacuggcacauu

SEQ ID NO: 343971 - RNA, 22 nt, Human herpesvirus 7
aacugguaucaugaaccauguu

SEQ ID NO: 343972 - RNA, 22 nt, Human herpesvirus 7
aacuguauuuguugaucuucaa

SEQ ID NO: 343973 - RNA, 18 nt, Human herpesvirus 7
aacuguuuguaaggccaa

SEQ ID NO: 343974 - RNA, 12 nt, Human herpesvirus 7
aacuuacauuuc

SEQ ID NO: 343975 - RNA, 21 nt, Human herpesvirus 7
aacuuacauuucaaacaacau

SEQ ID NO: 343976 - RNA, 20 nt, Human herpesvirus 7
aacuuacucuucucgaagaa

SEQ ID NO: 343977 - RNA, 19 nt, Human herpesvirus 7
aacuuaucagauucugaca

SEQ ID NO: 343978 - RNA, 23 nt, Human herpesvirus 7
aacuuauguacuauacaggauca

SEQ ID NO: 343979 - RNA, 16 nt, Human herpesvirus 7
aacuucuacuaauaca

SEQ ID NO: 343980 - RNA, 21 nt, Human herpesvirus 7
aacuucuacuaauacagguaa

SEQ ID NO: 343981 - RNA, 19 nt, Human herpesvirus 7
aacuugaaaaucaauccaa

SEQ ID NO: 343982 - RNA, 17 nt, Human herpesvirus 7
aacuuggauaaccaaac

SEQ ID NO: 343983 - RNA, 17 nt, Human herpesvirus 7
aacuuggugaagaucau

SEQ ID NO: 343984 - RNA, 20 nt, Human herpesvirus 7
aacuugugaaaauaacagga

SEQ ID NO: 343985 - RNA, 19 nt, Human herpesvirus 7
aacuuuauccaguacgucu

SEQ ID NO: 343986 - RNA, 22 nt, Human herpesvirus 7
aacuuuauccaguacgucuugc

SEQ ID NO: 343987 - RNA, 18 nt, Human herpesvirus 7
aacuuuauggaacaugaa

SEQ ID NO: 343988 - RNA, 17 nt, Human herpesvirus 7
aacuuuuggaaugauau

SEQ ID NO: 343989 - RNA, 14 nt, Human herpesvirus 7
aagaaaaaucauuu

SEQ ID NO: 343990 - RNA, 21 nt, Human herpesvirus 7
aagaaaaauuaauugcagcuu

SEQ ID NO: 343991 - RNA, 22 nt, Human herpesvirus 7
aagaaaaguugcuuuucaugcu

SEQ ID NO: 343992 - RNA, 15 nt, Human herpesvirus 7
aagaaaccagcuuuu

SEQ ID NO: 343993 - RNA, 16 nt, Human herpesvirus 7
aagaaagucaucugag

SEQ ID NO: 343994 - RNA, 14 nt, Human herpesvirus 7
aagaaaguccaaag

SEQ ID NO: 343995 - RNA, 15 nt, Human herpesvirus 7
aagaaaguccaaagu

SEQ ID NO: 343996 - RNA, 15 nt, Human herpesvirus 7
aagaaaguuguacuc

SEQ ID NO: 343997 - RNA, 19 nt, Human herpesvirus 7
aagaaauaugcuuccuaaa

SEQ ID NO: 343998 - RNA, 21 nt, Human herpesvirus 7
aagaaauucgaaacacuuacu

SEQ ID NO: 343999 - RNA, 12 nt, Human herpesvirus 7
aagaacaacaac

SEQ ID NO: 344000 - RNA, 15 nt, Human herpesvirus 7
aagaacaacaugaaa

SEQ ID NO: 344001 - RNA, 17 nt, Human herpesvirus 7
aagaacauguaguacaa

SEQ ID NO: 344002 - RNA, 16 nt, Human herpesvirus 7
aagaacauuaauauca

SEQ ID NO: 344003 - RNA, 18 nt, Human herpesvirus 7
aagaacauuuuucuugcu

SEQ ID NO: 344004 - RNA, 20 nt, Human herpesvirus 7
aagaaccuaucaaaauucca

SEQ ID NO: 344005 - RNA, 13 nt, Human herpesvirus 7
aagaacuccauuc

SEQ ID NO: 344006 - RNA, 22 nt, Human herpesvirus 7
aagaacuccauucgguuuucaa

SEQ ID NO: 344007 - RNA, 16 nt, Human herpesvirus 7
aagaagcgagauuuau

SEQ ID NO: 344008 - RNA, 14 nt, Human herpesvirus 7
aagaaggaaaauuu

SEQ ID NO: 344009 - RNA, 13 nt, Human herpesvirus 7
aagaaucacauuu

SEQ ID NO: 344010 - RNA, 14 nt, Human herpesvirus 7
aagaaucauuugua

SEQ ID NO: 344011 - RNA, 14 nt, Human herpesvirus 7
aagaaugcaagccu

SEQ ID NO: 344012 - RNA, 21 nt, Human herpesvirus 7
aagaauggcgaguuacauuuc

SEQ ID NO: 344013 - RNA, 21 nt, Human herpesvirus 7
aagaauggcgguuguacugua

SEQ ID NO: 344014 - RNA, 17 nt, Human herpesvirus 7
aagaauggcugaugaua

SEQ ID NO: 344015 - RNA, 13 nt, Human herpesvirus 7
aagaauucaucuu

SEQ ID NO: 344016 - RNA, 22 nt, Human herpesvirus 7
aagaauugcgugcgccuuuaaa

SEQ ID NO: 344017 - RNA, 15 nt, Human herpesvirus 7
aagaauuuaaucaua

SEQ ID NO: 344018 - RNA, 15 nt, Human herpesvirus 7
aagacaccccaaaau

SEQ ID NO: 344019 - RNA, 16 nt, Human herpesvirus 7
aagacaccccaaaauc

SEQ ID NO: 344020 - RNA, 21 nt, Human herpesvirus 7
aagacaucgaagaaauucgaa

SEQ ID NO: 344021 - RNA, 21 nt, Human herpesvirus 7
aagacauuauuugcugaacuc

SEQ ID NO: 344022 - RNA, 13 nt, Human herpesvirus 7
aagaccaaugaua

SEQ ID NO: 344023 - RNA, 21 nt, Human herpesvirus 7
aagaccuguacuguugcuaau

SEQ ID NO: 344024 - RNA, 16 nt, Human herpesvirus 7
aagacgccaauaaauc

SEQ ID NO: 344025 - RNA, 14 nt, Human herpesvirus 7
aagacgugagcaau

SEQ ID NO: 344026 - RNA, 21 nt, Human herpesvirus 7
aagacucuuugugacucggaa

SEQ ID NO: 344027 - RNA, 15 nt, Human herpesvirus 7
aagacugaagacaaa

SEQ ID NO: 344028 - RNA, 19 nt, Human herpesvirus 7
aagagaaaauaaacauguu

SEQ ID NO: 344029 - RNA, 15 nt, Human herpesvirus 7
aagagacugucauaa

SEQ ID NO: 344030 - RNA, 20 nt, Human herpesvirus 7
aagagacugucauaaucuga

SEQ ID NO: 344031 - RNA, 15 nt, Human herpesvirus 7
aagagcauucaugcc

SEQ ID NO: 344032 - RNA, 19 nt, Human herpesvirus 7
aagagccggaaagcaaugu

SEQ ID NO: 344033 - RNA, 20 nt, Human herpesvirus 7
aagagccggaaagcaaugua

SEQ ID NO: 344034 - RNA, 20 nt, Human herpesvirus 7
aagagggacuuuuauaauac

SEQ ID NO: 344035 - RNA, 16 nt, Human herpesvirus 7
aagauaagcucaaaaa

SEQ ID NO: 344036 - RNA, 15 nt, Human herpesvirus 7
aagauaauguuacau

SEQ ID NO: 344037 - RNA, 17 nt, Human herpesvirus 7
aagauauacauaauuca

SEQ ID NO: 344038 - RNA, 18 nt, Human herpesvirus 7
aagaugacucaugagaca

SEQ ID NO: 344039 - RNA, 16 nt, Human herpesvirus 7
aagauuccugaugaua

SEQ ID NO: 344040 - RNA, 21 nt, Human herpesvirus 7
aagauucuuaauuuguucaau

SEQ ID NO: 344041 - RNA, 19 nt, Human herpesvirus 7
aagauugaucacuuugcau

SEQ ID NO: 344042 - RNA, 22 nt, Human herpesvirus 7
aagauugaucacuuugcaucaa

SEQ ID NO: 344043 - RNA, 23 nt, Human herpesvirus 7
aagauugaucacuuugcaucaaa

SEQ ID NO: 344044 - RNA, 15 nt, Human herpesvirus 7
aagauuuaacaugug

SEQ ID NO: 344045 - RNA, 17 nt, Human herpesvirus 7
aagcaaaagccacagau

SEQ ID NO: 344046 - RNA, 15 nt, Human herpesvirus 7
aagcaaaccuuacaa

SEQ ID NO: 344047 - RNA, 21 nt, Human herpesvirus 7
aagcacacacguuuucuguca

SEQ ID NO: 344048 - RNA, 12 nt, Human herpesvirus 7
aagcaccaaaaa

SEQ ID NO: 344049 - RNA, 21 nt, Human herpesvirus 7
aaaaaaaguacaagaguguua

SEQ ID NO: 344050 - RNA, 13 nt, Human herpesvirus 7
aaaaaaauucauu

SEQ ID NO: 344051 - RNA, 12 nt, Human herpesvirus 7
aaaaaaccacaa

SEQ ID NO: 344052 - RNA, 13 nt, Human herpesvirus 7
aaaaaaccacaaa

SEQ ID NO: 344053 - RNA, 13 nt, Human herpesvirus 7
aaaaaagaacuua

SEQ ID NO: 344054 - RNA, 13 nt, Human herpesvirus 7
aaaaaaucaacuu

SEQ ID NO: 344055 - RNA, 13 nt, Human herpesvirus 7
aaaaaaucugaau

SEQ ID NO: 344056 - RNA, 20 nt, Human herpesvirus 7
aaaaacaaaaucuacuuuuc

SEQ ID NO: 344057 - RNA, 17 nt, Human herpesvirus 7
aaaaacaaagacuauaa

SEQ ID NO: 344058 - RNA, 13 nt, Human herpesvirus 7
aaaaacaaugaaa

SEQ ID NO: 344059 - RNA, 17 nt, Human herpesvirus 7
aaaaacccuuuauucau

SEQ ID NO: 344060 - RNA, 19 nt, Human herpesvirus 7
aaaaacgguguuguaauaa

SEQ ID NO: 344061 - RNA, 20 nt, Human herpesvirus 7
aaaaagaacuuacauuucaa

SEQ ID NO: 344062 - RNA, 20 nt, Human herpesvirus 7
aaaaagaauuuggauuuugu

SEQ ID NO: 344063 - RNA, 16 nt, Human herpesvirus 7
aaaaaguaccauugcu

SEQ ID NO: 344064 - RNA, 23 nt, Human herpesvirus 7
aaaaaguucuuugaaauaguguc

SEQ ID NO: 344065 - RNA, 20 nt, Human herpesvirus 7
aaaaaguuuguaucaaugua

SEQ ID NO: 344066 - RNA, 12 nt, Human herpesvirus 7
aaaaauaaauac

SEQ ID NO: 344067 - RNA, 15 nt, Human herpesvirus 7
aaaaauaauaaaugu

SEQ ID NO: 344068 - RNA, 21 nt, Human herpesvirus 7
aaaaauaccucuggcuucaga

SEQ ID NO: 344069 - RNA, 22 nt, Human herpesvirus 7
aaaaaucaguguaacucugcca

SEQ ID NO: 344070 - RNA, 13 nt, Human herpesvirus 7
aaaaaucuuuaca

SEQ ID NO: 344071 - RNA, 14 nt, Human herpesvirus 7
aaaaauuauaauaa

SEQ ID NO: 344072 - RNA, 18 nt, Human herpesvirus 7
aaaaauuuuuuacugucu

SEQ ID NO: 344073 - RNA, 21 nt, Human herpesvirus 7
aaaacaaaaaaaguaccauug

SEQ ID NO: 344074 - RNA, 12 nt, Human herpesvirus 7
aaaacaaauaac

SEQ ID NO: 344075 - RNA, 13 nt, Human herpesvirus 7
aaaacaagcuuaa

SEQ ID NO: 344076 - RNA, 24 nt, Human herpesvirus 7
aaaacaaugguguuaacaaucuua

SEQ ID NO: 344077 - RNA, 18 nt, Human herpesvirus 7
aaaacaauuaagaaucau

SEQ ID NO: 344078 - RNA, 14 nt, Human herpesvirus 7
aaaacaauuuccuu

SEQ ID NO: 344079 - RNA, 23 nt, Human herpesvirus 7
aaaacacguccaagaaauaugcu

SEQ ID NO: 344080 - RNA, 10 nt, Human herpesvirus 7
aaaacacuuu

SEQ ID NO: 344081 - RNA, 15 nt, Human herpesvirus 7
aaaacaucagaccua

SEQ ID NO: 344082 - RNA, 17 nt, Human herpesvirus 7
aaaacaucccuuuccaa

SEQ ID NO: 344083 - RNA, 23 nt, Human herpesvirus 7
aaaacaugggucucuugaggaaa

SEQ ID NO: 344084 - RNA, 19 nt, Human herpesvirus 7
aaaacauugugaguuucua

SEQ ID NO: 344085 - RNA, 12 nt, Human herpesvirus 7
aaaacauuuaca

SEQ ID NO: 344086 - RNA, 21 nt, Human herpesvirus 7
aaaacauuuacaaaaaaaagc

SEQ ID NO: 344087 - RNA, 18 nt, Human herpesvirus 7
aaaaccauuugguuuuaa

SEQ ID NO: 344088 - RNA, 14 nt, Human herpesvirus 7
aaaaccuacuguua

SEQ ID NO: 344089 - RNA, 14 nt, Human herpesvirus 7
aaaacgguauguaa

SEQ ID NO: 344090 - RNA, 23 nt, Human herpesvirus 7
aaaacugaaccaguuuuacuuuu

SEQ ID NO: 344091 - RNA, 16 nt, Human herpesvirus 7
aaaacugcaaauccaa

SEQ ID NO: 344092 - RNA, 13 nt, Human herpesvirus 7
aaaacuuaauuuc

SEQ ID NO: 344093 - RNA, 18 nt, Human herpesvirus 7
aaaacuuauguacucuga

SEQ ID NO: 344094 - RNA, 22 nt, Human herpesvirus 7
aaaagaaaauuuauauuugcuu

SEQ ID NO: 344095 - RNA, 20 nt, Human herpesvirus 7
aaaagaauugauugaauuug

SEQ ID NO: 344096 - RNA, 14 nt, Human herpesvirus 7
aaaagacauaacaa

SEQ ID NO: 344097 - RNA, 18 nt, Human herpesvirus 7
aaaagauuaaaugggcua

SEQ ID NO: 344098 - RNA, 14 nt, Human herpesvirus 7
aaaagauuccugau

SEQ ID NO: 344099 - RNA, 18 nt, Human herpesvirus 7
aaaagauuccugaugaua

SEQ ID NO: 344100 - RNA, 19 nt, Human herpesvirus 7
aaaagauuuaacaugugua

SEQ ID NO: 344101 - RNA, 21 nt, Human herpesvirus 7
aaaagauuuaauaacaauuug

SEQ ID NO: 344102 - RNA, 19 nt, Human herpesvirus 7
aaaagcagccuucagacuu

SEQ ID NO: 344103 - RNA, 15 nt, Human herpesvirus 7
aaaagcuauguauaa

SEQ ID NO: 344104 - RNA, 12 nt, Human herpesvirus 7
aaaagcuuugau

SEQ ID NO: 344105 - RNA, 19 nt, Human herpesvirus 7
aaaagcuuugaucuacaua

SEQ ID NO: 344106 - RNA, 16 nt, Human herpesvirus 7
aaaaguucauaaugac

SEQ ID NO: 344107 - RNA, 12 nt, Human herpesvirus 7
aaaaguugcagc

SEQ ID NO: 344108 - RNA, 16 nt, Human herpesvirus 7
aaaaguuguuaagaau

SEQ ID NO: 344109 - RNA, 12 nt, Human herpesvirus 7
aaaauaacagga

SEQ ID NO: 344110 - RNA, 14 nt, Human herpesvirus 7
aaaauaacuuuaaa

SEQ ID NO: 344111 - RNA, 20 nt, Human herpesvirus 7
aaaauaaguccgugugcaaa

SEQ ID NO: 344112 - RNA, 14 nt, Human herpesvirus 7
aaaauacuaaucaa

SEQ ID NO: 344113 - RNA, 14 nt, Human herpesvirus 7
aaaauauauuccaa

SEQ ID NO: 344114 - RNA, 22 nt, Human herpesvirus 7
aaaauaucuuuuucaaauggau

SEQ ID NO: 344115 - RNA, 13 nt, Human herpesvirus 7
aaaauauguucag

SEQ ID NO: 344116 - RNA, 18 nt, Human herpesvirus 7
aaaaucaaaaaacacguc

SEQ ID NO: 344117 - RNA, 13 nt, Human herpesvirus 7
aaaaucaauccaa

SEQ ID NO: 344118 - RNA, 16 nt, Human herpesvirus 7
aaaaucacagcauuau

SEQ ID NO: 344119 - RNA, 20 nt, Human herpesvirus 7
aaaaucuaucaccaagaaca

SEQ ID NO: 344120 - RNA, 14 nt, Human herpesvirus 7
aaaaucucgaacag

SEQ ID NO: 344121 - RNA, 16 nt, Human herpesvirus 7
aaaaucucgaacaguc

SEQ ID NO: 344122 - RNA, 22 nt, Human herpesvirus 7
aaaaucugaauagacacauuua

SEQ ID NO: 344123 - RNA, 18 nt, Human herpesvirus 7
aaaaucuuugaaucugcu

SEQ ID NO: 344124 - RNA, 13 nt, Human herpesvirus 7
aaaaugaauucaa

SEQ ID NO: 344125 - RNA, 17 nt, Human herpesvirus 7
aaagcguugguugcuug

SEQ ID NO: 344126 - RNA, 20 nt, Human herpesvirus 7
aaagcuaaaaaacguggaaa

SEQ ID NO: 344127 - RNA, 13 nt, Human herpesvirus 7
aaagcuacagcuu

SEQ ID NO: 344128 - RNA, 19 nt, Human herpesvirus 7
aaagcugcauguguacuaa

SEQ ID NO: 344129 - RNA, 20 nt, Human herpesvirus 7
aaagcugcauguguacuaaa

SEQ ID NO: 344130 - RNA, 18 nt, Human herpesvirus 7
aaagcuguuuccaucuua

SEQ ID NO: 344131 - RNA, 18 nt, Human herpesvirus 7
aaagcuucaguacuugaa

SEQ ID NO: 344132 - RNA, 19 nt, Human herpesvirus 7
aaagcuucaguacuugaau

SEQ ID NO: 344133 - RNA, 19 nt, Human herpesvirus 7
aaagcuuugaucuacauau

SEQ ID NO: 344134 - RNA, 24 nt, Human herpesvirus 7
aaagcuuuggcagcuagccuauaa

SEQ ID NO: 344135 - RNA, 16 nt, Human herpesvirus 7
aaaggaaaaaugcugc

SEQ ID NO: 344136 - RNA, 17 nt, Human herpesvirus 7
aaaggaaaaaugcugcu

SEQ ID NO: 344137 - RNA, 17 nt, Human herpesvirus 7
aaaggaaauuaguucuu

SEQ ID NO: 344138 - RNA, 20 nt, Human herpesvirus 7
aaaggaaucuuaaucacgug

SEQ ID NO: 344139 - RNA, 22 nt, Human herpesvirus 7
aaaggaaucuuaaucacgugau

SEQ ID NO: 344140 - RNA, 13 nt, Human herpesvirus 7
aaaggaucaaaag

SEQ ID NO: 344141 - RNA, 21 nt, Human herpesvirus 7
aaaggaucaaaagcugcagcu

SEQ ID NO: 344142 - RNA, 23 nt, Human herpesvirus 7
aaaggcaucgcauauagcgcuuu

SEQ ID NO: 344143 - RNA, 13 nt, Human herpesvirus 7
aaagguaggauug

SEQ ID NO: 344144 - RNA, 21 nt, Human herpesvirus 7
aaaggugguuacauauccaau

SEQ ID NO: 344145 - RNA, 12 nt, Human herpesvirus 7
aaaguagguaaa

SEQ ID NO: 344146 - RNA, 16 nt, Human herpesvirus 7
aaagucagaacauugu

SEQ ID NO: 344147 - RNA, 17 nt, Human herpesvirus 7
aaagucagaacauuguc

SEQ ID NO: 344148 - RNA, 12 nt, Human herpesvirus 7
aaaguccaaagu

SEQ ID NO: 344149 - RNA, 21 nt, Human herpesvirus 7
aaagucuccgugucacuguca

SEQ ID NO: 344150 - RNA, 20 nt, Human herpesvirus 7
aaagugcauaaauaauaaca

SEQ ID NO: 344151 - RNA, 13 nt, Human herpesvirus 7
aaaguggagacaa

SEQ ID NO: 344152 - RNA, 21 nt, Human herpesvirus 7
aaaguuuaauucucgcuucaa

SEQ ID NO: 344153 - RNA, 11 nt, Human herpesvirus 7
aaaguuuauag

SEQ ID NO: 344154 - RNA, 23 nt, Human herpesvirus 7
aaaguuuauagaacaaguagaaa

SEQ ID NO: 344155 - RNA, 18 nt, Human herpesvirus 7
aaaguuuuguaacuauaa

SEQ ID NO: 344156 - RNA, 16 nt, Human herpesvirus 7
aaauaaaauguuuuag

SEQ ID NO: 344157 - RNA, 13 nt, Human herpesvirus 7
aaauaaacauguu

SEQ ID NO: 344158 - RNA, 15 nt, Human herpesvirus 7
aaauaaagagucuau

SEQ ID NO: 344159 - RNA, 15 nt, Human herpesvirus 7
aaauaaaggaucucu

SEQ ID NO: 344160 - RNA, 13 nt, Human herpesvirus 7
aaauaaauacuau

SEQ ID NO: 344161 - RNA, 11 nt, Human herpesvirus 7
aaauaaauuca

SEQ ID NO: 344162 - RNA, 12 nt, Human herpesvirus 7
aaauaaauucaa

SEQ ID NO: 344163 - RNA, 21 nt, Human herpesvirus 7
aaauaacugguaucaugaacc

SEQ ID NO: 344164 - RNA, 13 nt, Human herpesvirus 7
aaauaaugaagga

SEQ ID NO: 344165 - RNA, 20 nt, Human herpesvirus 7
aaauacaaauuuaagagaca

SEQ ID NO: 344166 - RNA, 11 nt, Human herpesvirus 7
aaauacaauag

SEQ ID NO: 344167 - RNA, 18 nt, Human herpesvirus 7
aaauaccggaccauuucc

SEQ ID NO: 344168 - RNA, 14 nt, Human herpesvirus 7
aaauacuacaguua

SEQ ID NO: 344169 - RNA, 21 nt, Human herpesvirus 7
aaauaggcgaauuggugcuca

SEQ ID NO: 344170 - RNA, 15 nt, Human herpesvirus 7
aaauauaugcuuuau

SEQ ID NO: 344171 - RNA, 14 nt, Human herpesvirus 7
aaauaucccuagaa

SEQ ID NO: 344172 - RNA, 16 nt, Human herpesvirus 7
aaauaucgauuuaaca

SEQ ID NO: 344173 - RNA, 20 nt, Human herpesvirus 7
aaauaugaugaaacuuccaa

SEQ ID NO: 344174 - RNA, 12 nt, Human herpesvirus 7
aaauauggacuu

SEQ ID NO: 344175 - RNA, 18 nt, Human herpesvirus 7
aaauauggagcagcuuaa

SEQ ID NO: 344176 - RNA, 15 nt, Human herpesvirus 7
aaauauguggcacau

SEQ ID NO: 344177 - RNA, 13 nt, Human herpesvirus 7
aaauauguucaga

SEQ ID NO: 344178 - RNA, 17 nt, Human herpesvirus 7
aaauauguucagauuga

SEQ ID NO: 344179 - RNA, 23 nt, Human herpesvirus 7
aaauauguucagauugaaauucc

SEQ ID NO: 344180 - RNA, 14 nt, Human herpesvirus 7
aaauauucgaucca

SEQ ID NO: 344181 - RNA, 22 nt, Human herpesvirus 7
aaauauucuacggcuaaucucu

SEQ ID NO: 344182 - RNA, 21 nt, Human herpesvirus 7
aaauauuuagagucgucuugc

SEQ ID NO: 344183 - RNA, 22 nt, Human herpesvirus 7
aaauauuuagagucgucuugca

SEQ ID NO: 344184 - RNA, 20 nt, Human herpesvirus 7
aaauauuuaucugcauugau

SEQ ID NO: 344185 - RNA, 12 nt, Human herpesvirus 7
aaaucaaaaaua

SEQ ID NO: 344186 - RNA, 23 nt, Human herpesvirus 7
aaaucaaaguuuuaaaguaugcu

SEQ ID NO: 344187 - RNA, 15 nt, Human herpesvirus 7
aaaucaaccagauuu

SEQ ID NO: 344188 - RNA, 18 nt, Human herpesvirus 7
aaaucuaauuuaugauac

SEQ ID NO: 344189 - RNA, 16 nt, Human herpesvirus 7
aaaucuaucaccaaga

SEQ ID NO: 344190 - RNA, 22 nt, Human herpesvirus 7
aaaucuaucaccaagaacaaua

SEQ ID NO: 344191 - RNA, 22 nt, Human herpesvirus 7
aaaucuauuuuauccguuaaug

SEQ ID NO: 344192 - RNA, 17 nt, Human herpesvirus 7
aaaucucagcucuguaa

SEQ ID NO: 344193 - RNA, 14 nt, Human herpesvirus 7
aaaucuccuugaua

SEQ ID NO: 344194 - RNA, 15 nt, Human herpesvirus 7
aaaucucgaacaguc

SEQ ID NO: 344195 - RNA, 16 nt, Human herpesvirus 7
aaaucugauaaauuac

SEQ ID NO: 344196 - RNA, 15 nt, Human herpesvirus 7
aaaucuugcaagcag

SEQ ID NO: 344197 - RNA, 18 nt, Human herpesvirus 7
aaaucuuuaucgccauuu

SEQ ID NO: 344198 - RNA, 13 nt, Human herpesvirus 7
aaaucuuugaauc

SEQ ID NO: 344199 - RNA, 20 nt, Human herpesvirus 7
aaaugaaaagucugugacag

SEQ ID NO: 344200 - RNA, 13 nt, Human herpesvirus 7
aaaugaaauauuc

SEQ ID NO: 344201 - RNA, 21 nt, Human herpesvirus 7
aaaugaauuuuaaguggaauc

SEQ ID NO: 344202 - RNA, 18 nt, Human herpesvirus 7
aaaugaccgcaugugaaa

SEQ ID NO: 344203 - RNA, 14 nt, Human herpesvirus 7
aaaugauaugacau

SEQ ID NO: 344204 - RNA, 23 nt, Human herpesvirus 7
aaaugaucagagaugaucuuacu

SEQ ID NO: 344205 - RNA, 20 nt, Human herpesvirus 7
aaaugaugaugacaaaaaau

SEQ ID NO: 344206 - RNA, 22 nt, Human herpesvirus 7
aaaugcguuuuugucucuuuag

SEQ ID NO: 344207 - RNA, 18 nt, Human herpesvirus 7
aaaugcuuaaauuuccau

SEQ ID NO: 344208 - RNA, 21 nt, Human herpesvirus 7
aaaugcuuaaauuuccaucua

SEQ ID NO: 344209 - RNA, 15 nt, Human herpesvirus 7
aaaugguuacacuga

SEQ ID NO: 344210 - RNA, 18 nt, Human herpesvirus 7
aaaugguugugcaauuug

SEQ ID NO: 344211 - RNA, 14 nt, Human herpesvirus 7
aaauguaaaccaaa

SEQ ID NO: 344212 - RNA, 15 nt, Human herpesvirus 7
aaauguaacuuucau

SEQ ID NO: 344213 - RNA, 13 nt, Human herpesvirus 7
aaauguacaauaa

SEQ ID NO: 344214 - RNA, 14 nt, Human herpesvirus 7
aaauguacaauucc

SEQ ID NO: 344215 - RNA, 20 nt, Human herpesvirus 7
aaaugucuuugucaugauga

SEQ ID NO: 344216 - RNA, 21 nt, Human herpesvirus 7
aaaugucuuuugauaagacug

SEQ ID NO: 344217 - RNA, 12 nt, Human herpesvirus 7
aaaugugccaau

SEQ ID NO: 344218 - RNA, 22 nt, Human herpesvirus 7
aaaugugcgaagguugucuguu

SEQ ID NO: 344219 - RNA, 11 nt, Human herpesvirus 7
aaaugugcuaa

SEQ ID NO: 344220 - RNA, 14 nt, Human herpesvirus 7
aaauguguaacaau

SEQ ID NO: 344221 - RNA, 19 nt, Human herpesvirus 7
aaauguguaacaauugagu

SEQ ID NO: 344222 - RNA, 21 nt, Human herpesvirus 7
aaaugugucuuacaacuagaa

SEQ ID NO: 344223 - RNA, 21 nt, Human herpesvirus 7
aaauguuaugugcuuauaucu

SEQ ID NO: 344224 - RNA, 17 nt, Human herpesvirus 7
aaauguuuugauuucac

SEQ ID NO: 344225 - RNA, 22 nt, Human herpesvirus 7
aaauguuuugauuucacccuuu

SEQ ID NO: 344226 - RNA, 20 nt, Human herpesvirus 7
aaauguuuuugcuagaaacc

SEQ ID NO: 344227 - RNA, 15 nt, Human herpesvirus 7
aaauuaaacaaucug

SEQ ID NO: 344228 - RNA, 14 nt, Human herpesvirus 7
aaauuaaauacaaa

SEQ ID NO: 344229 - RNA, 13 nt, Human herpesvirus 7
aaauuaaauacuu

SEQ ID NO: 344230 - RNA, 18 nt, Human herpesvirus 7
aaauuaaauacuugcaau

SEQ ID NO: 344231 - RNA, 22 nt, Human herpesvirus 7
aaauuaaucaaacaauugcccu

SEQ ID NO: 344232 - RNA, 23 nt, Human herpesvirus 7
aaauuaauguuuuuccuaugaua

SEQ ID NO: 344233 - RNA, 12 nt, Human herpesvirus 7
aaauuaauucaa

SEQ ID NO: 344234 - RNA, 21 nt, Human herpesvirus 7
aaauuaauucaaucaccaaag

SEQ ID NO: 344235 - RNA, 14 nt, Human herpesvirus 7
aaauuacaguacaa

SEQ ID NO: 344236 - RNA, 20 nt, Human herpesvirus 7
aaauuaguucuaauuuuggc

SEQ ID NO: 344237 - RNA, 17 nt, Human herpesvirus 7
aaauuauaccucagcuu

SEQ ID NO: 344238 - RNA, 20 nt, Human herpesvirus 7
aaauuauacuagcagaucuc

SEQ ID NO: 344239 - RNA, 16 nt, Human herpesvirus 7
aaauuauuauuaguau

SEQ ID NO: 344240 - RNA, 21 nt, Human herpesvirus 7
aacggccauucaccuguuuga

SEQ ID NO: 344241 - RNA, 16 nt, Human herpesvirus 7
aacgguagaauguguu

SEQ ID NO: 344242 - RNA, 21 nt, Human herpesvirus 7
aacggucugagacggacuuau

SEQ ID NO: 344243 - RNA, 16 nt, Human herpesvirus 7
aacgguuaaucuuuuu

SEQ ID NO: 344244 - RNA, 20 nt, Human herpesvirus 7
aacgucauaaucaucuuucu

SEQ ID NO: 344245 - RNA, 14 nt, Human herpesvirus 7
aacguucuugguca

SEQ ID NO: 344246 - RNA, 15 nt, Human herpesvirus 7
aacuaaaaaucucag

SEQ ID NO: 344247 - RNA, 18 nt, Human herpesvirus 7
aacuaaaacuacauuuaa

SEQ ID NO: 344248 - RNA, 12 nt, Human herpesvirus 7
aacuacauuuaa

SEQ ID NO: 344249 - RNA, 17 nt, Human herpesvirus 7
aacuagcaaacagugcu

SEQ ID NO: 344250 - RNA, 14 nt, Human herpesvirus 7
aacuauaaauggaa

SEQ ID NO: 344251 - RNA, 19 nt, Human herpesvirus 7
aacuauaaauggaauuuaa

SEQ ID NO: 344252 - RNA, 13 nt, Human herpesvirus 7
aacuauauugaau

SEQ ID NO: 344253 - RNA, 19 nt, Human herpesvirus 7
aacuaugaacuggcacauu

SEQ ID NO: 344254 - RNA, 16 nt, Human herpesvirus 7
aacucguagcauugcc

SEQ ID NO: 344255 - RNA, 21 nt, Human herpesvirus 7
aacucuuccuguuaauaucua

SEQ ID NO: 344256 - RNA, 17 nt, Human herpesvirus 7
aacugauauuaaaucau

SEQ ID NO: 344257 - RNA, 21 nt, Human herpesvirus 7
aacugauauuaaaucauacca

SEQ ID NO: 344258 - RNA, 15 nt, Human herpesvirus 7
aacugcaaauccaac

SEQ ID NO: 344259 - RNA, 14 nt, Human herpesvirus 7
aacugcgguuauag

SEQ ID NO: 344260 - RNA, 20 nt, Human herpesvirus 7
aacugucacgcaagucacaa

SEQ ID NO: 344261 - RNA, 22 nt, Human herpesvirus 7
aacugugcaugaaaucuugaau

SEQ ID NO: 344262 - RNA, 14 nt, Human herpesvirus 7
aacuguugccagaa

SEQ ID NO: 344263 - RNA, 13 nt, Human herpesvirus 7
aacuuacauuuca

SEQ ID NO: 344264 - RNA, 22 nt, Human herpesvirus 7
aacuuacauuucaaacaacaua

SEQ ID NO: 344265 - RNA, 13 nt, Human herpesvirus 7
aacuuagugauga

SEQ ID NO: 344266 - RNA, 15 nt, Human herpesvirus 7
aacuucaacauacag

SEQ ID NO: 344267 - RNA, 22 nt, Human herpesvirus 7
aacuucucuuggaguuugucuc

SEQ ID NO: 344268 - RNA, 17 nt, Human herpesvirus 7
aacuucugauaucuuaa

SEQ ID NO: 344269 - RNA, 14 nt, Human herpesvirus 7
aacuugaaugagcu

SEQ ID NO: 344270 - RNA, 18 nt, Human herpesvirus 7
aacuugucaccuauuuca

SEQ ID NO: 344271 - RNA, 22 nt, Human herpesvirus 7
aacuuguugaaauagcgacaua

SEQ ID NO: 344272 - RNA, 16 nt, Human herpesvirus 7
aacuuuaaauuauuau

SEQ ID NO: 344273 - RNA, 23 nt, Human herpesvirus 7
aacuuuauccaguacgucuugcu

SEQ ID NO: 344274 - RNA, 14 nt, Human herpesvirus 7
aacuuugaaaucau

SEQ ID NO: 344275 - RNA, 16 nt, Human herpesvirus 7
aacuuugccaaugcca

SEQ ID NO: 344276 - RNA, 17 nt, Human herpesvirus 7
aacuuugccaaugccaa

SEQ ID NO: 344277 - RNA, 21 nt, Human herpesvirus 7
aacuuuucuuaaacaugauuu

SEQ ID NO: 344278 - RNA, 12 nt, Human herpesvirus 7
aacuuuuugccg

SEQ ID NO: 344279 - RNA, 16 nt, Human herpesvirus 7
aagaaaaaaaguacaa

SEQ ID NO: 344280 - RNA, 11 nt, Human herpesvirus 7
aagaaaaagca

SEQ ID NO: 344281 - RNA, 21 nt, Human herpesvirus 7
aagaaaaguugcuuuucaugc

SEQ ID NO: 344282 - RNA, 12 nt, Human herpesvirus 7
aagaaacuugaa

SEQ ID NO: 344283 - RNA, 20 nt, Human herpesvirus 7
aagaaaguuguacucagaga

SEQ ID NO: 344284 - RNA, 17 nt, Human herpesvirus 7
aagaaauaugcuuccua

SEQ ID NO: 344285 - RNA, 12 nt, Human herpesvirus 7
aagaaauuguga

SEQ ID NO: 344286 - RNA, 16 nt, Human herpesvirus 7
aagaacaagagcagau

SEQ ID NO: 344287 - RNA, 14 nt, Human herpesvirus 7
aagaacuccauucg

SEQ ID NO: 344288 - RNA, 16 nt, Human herpesvirus 7
aagaacuuacauuuca

SEQ ID NO: 344289 - RNA, 20 nt, Human herpesvirus 7
aagaagacauccgauagcau

SEQ ID NO: 344290 - RNA, 16 nt, Human herpesvirus 7
aagaaugcaagccuag

SEQ ID NO: 344291 - RNA, 18 nt, Human herpesvirus 7
aagaaugggugucagcuu

SEQ ID NO: 344292 - RNA, 13 nt, Human herpesvirus 7
aagaauguaugaa

SEQ ID NO: 344293 - RNA, 21 nt, Human herpesvirus 7
aagaauuaauaaaaguaucau

SEQ ID NO: 344294 - RNA, 15 nt, Human herpesvirus 7
aagaauugauugaau

SEQ ID NO: 344295 - RNA, 19 nt, Human herpesvirus 7
aagaauuuaaucauaucuu

SEQ ID NO: 344296 - RNA, 23 nt, Human herpesvirus 7
aagaauuuuuuccuguugucauu

SEQ ID NO: 344297 - RNA, 19 nt, Human herpesvirus 7
aagacauccgauagcauua

SEQ ID NO: 344298 - RNA, 16 nt, Human herpesvirus 7
aagacauuauuugcug

SEQ ID NO: 344299 - RNA, 17 nt, Human herpesvirus 7
aagaccuguacuguugc

SEQ ID NO: 344300 - RNA, 22 nt, Human herpesvirus 7
aagacggaacuucuuucuucaa

SEQ ID NO: 344301 - RNA, 21 nt, Human herpesvirus 7
aagacugaagacaaaaccaaa

SEQ ID NO: 344302 - RNA, 14 nt, Human herpesvirus 7
aagagcauucaugc

SEQ ID NO: 344303 - RNA, 19 nt, Human herpesvirus 7
aagagccaaauauggagac

SEQ ID NO: 344304 - RNA, 23 nt, Human herpesvirus 7
aagaggaguauguugcauaucau

SEQ ID NO: 344305 - RNA, 15 nt, Human herpesvirus 7
aagagggacuuuuau

SEQ ID NO: 344306 - RNA, 19 nt, Human herpesvirus 7
aagagucuauugacauaau

SEQ ID NO: 344307 - RNA, 14 nt, Human herpesvirus 7
aagagucucuccag

SEQ ID NO: 344308 - RNA, 23 nt, Human herpesvirus 7
aagaguugcaacuagagaagcca

SEQ ID NO: 344309 - RNA, 14 nt, Human herpesvirus 7
aagauaaguauaaa

SEQ ID NO: 344310 - RNA, 23 nt, Human herpesvirus 7
aagauacauuuuugcaauaugcu

SEQ ID NO: 344311 - RNA, 21 nt, Human herpesvirus 7
aagaucguuguuaaauccaau

SEQ ID NO: 344312 - RNA, 17 nt, Human herpesvirus 7
aagaugcgaguccaaaa

SEQ ID NO: 344313 - RNA, 12 nt, Human herpesvirus 7
aagaugucuaaa

SEQ ID NO: 344314 - RNA, 18 nt, Human herpesvirus 7
aagaugucuaaaaguaca

SEQ ID NO: 344315 - RNA, 20 nt, Human herpesvirus 7
aagaugucuaaaaguacagu

SEQ ID NO: 344316 - RNA, 22 nt, Human herpesvirus 7
aagauuagcuauuauaauguaa

SEQ ID NO: 344317 - RNA, 20 nt, Human herpesvirus 7
aagauugaagcacacacguu

SEQ ID NO: 344318 - RNA, 16 nt, Human herpesvirus 7
aagauuuaacaugugu

SEQ ID NO: 344319 - RNA, 15 nt, Human herpesvirus 7
aagauuucuauugaa

SEQ ID NO: 344320 - RNA, 16 nt, Human herpesvirus 7
aagauuucuauugaau

SEQ ID NO: 344321 - RNA, 23 nt, Human herpesvirus 7
aagcaaaaaaagguacuaucuau

SEQ ID NO: 344322 - RNA, 16 nt, Human herpesvirus 7
aagcaaaagccacaga

SEQ ID NO: 344323 - RNA, 13 nt, Human herpesvirus 7
aagcaacaaaugu

SEQ ID NO: 344324 - RNA, 13 nt, Human herpesvirus 7
aagcaauguaugu

SEQ ID NO: 344325 - RNA, 17 nt, Human herpesvirus 7
aagcaauguaugucaaa

SEQ ID NO: 344326 - RNA, 12 nt, Human herpesvirus 7
aagcagcuugau

SEQ ID NO: 344327 - RNA, 18 nt, Human herpesvirus 7
aagcagcuugaugaauca

SEQ ID NO: 344328 - RNA, 14 nt, Human herpesvirus 7
aagcaguuauauga

SEQ ID NO: 344329 - RNA, 22 nt, Human herpesvirus 7
aagcauacuuuaaaacuuugau

SEQ ID NO: 344330 - RNA, 13 nt, Human herpesvirus 7
aagcauggauuuc

SEQ ID NO: 344331 - RNA, 21 nt, Human herpesvirus 7
aagccacagauauucuaacaa

SEQ ID NO: 344332 - RNA, 18 nt, Human herpesvirus 7
aagccacgaugacuucca

SEQ ID NO: 344333 - RNA, 18 nt, Human herpesvirus 7
aagccacuguugaugauu

SEQ ID NO: 344334 - RNA, 12 nt, Human herpesvirus 7
aagcccaugaac

SEQ ID NO: 344335 - RNA, 19 nt, Human herpesvirus 7
aagccuaggauaccaaaca

SEQ ID NO: 344336 - RNA, 22 nt, Human herpesvirus 7
aagccuaggauaccaaacaaaa

SEQ ID NO: 344337 - RNA, 18 nt, Human herpesvirus 7
aagcgcugagaucuucca

SEQ ID NO: 344338 - RNA, 17 nt, Human herpesvirus 7
aagcguuucacugggaa

SEQ ID NO: 344339 - RNA, 13 nt, Human herpesvirus 7
aagcucauuucau

SEQ ID NO: 344340 - RNA, 15 nt, Human herpesvirus 7
aagcugacuuuguca

SEQ ID NO: 344341 - RNA, 19 nt, Human herpesvirus 7
aagcugauucaacacucga

SEQ ID NO: 344342 - RNA, 21 nt, Human herpesvirus 7
aagcugauucaacacucgauu

SEQ ID NO: 344343 - RNA, 22 nt, Human herpesvirus 7
aagcuucuacaaacaauuuuuu

SEQ ID NO: 344344 - RNA, 20 nt, Human herpesvirus 7
aagcuuucguaaucauucaa

SEQ ID NO: 344345 - RNA, 16 nt, Human herpesvirus 7
aaggaaaaaugcugcu

SEQ ID NO: 344346 - RNA, 13 nt, Human herpesvirus 7
aaggaagcuuuac

SEQ ID NO: 344347 - RNA, 12 nt, Human herpesvirus 7
aaggaaucuuaa

SEQ ID NO: 344348 - RNA, 21 nt, Human herpesvirus 7
aaggaaucuuaaucacgugau

SEQ ID NO: 344349 - RNA, 15 nt, Human herpesvirus 7
aaggaccaugggaaa

SEQ ID NO: 344350 - RNA, 18 nt, Human herpesvirus 7
aaggaucgaucucuguca

SEQ ID NO: 344351 - RNA, 20 nt, Human herpesvirus 7
aaggaucgaucucugucaaa

SEQ ID NO: 344352 - RNA, 18 nt, Human herpesvirus 7
aaggaugcguguguucaa

SEQ ID NO: 344353 - RNA, 12 nt, Human herpesvirus 7
aagggauuuauu

SEQ ID NO: 344354 - RNA, 12 nt, Human herpesvirus 7
aagguacaucuu

SEQ ID NO: 344355 - RNA, 22 nt, Human herpesvirus 7
aaucugcucguuuuuauuuuuu

SEQ ID NO: 344356 - RNA, 16 nt, Human herpesvirus 7
aaucuggacauuucaa

SEQ ID NO: 344357 - RNA, 18 nt, Human herpesvirus 7
aaucuggacauuucaaga

SEQ ID NO: 344358 - RNA, 21 nt, Human herpesvirus 7
aaucuugugaaguuugcugaa

SEQ ID NO: 344359 - RNA, 16 nt, Human herpesvirus 7
aaucuuuacacuugga

SEQ ID NO: 344360 - RNA, 17 nt, Human herpesvirus 7
aaucuuuugcacaucua

SEQ ID NO: 344361 - RNA, 13 nt, Human herpesvirus 7
aaugaaaaagcca

SEQ ID NO: 344362 - RNA, 17 nt, Human herpesvirus 7
aaugaaaagucugugac

SEQ ID NO: 344363 - RNA, 14 nt, Human herpesvirus 7
aaugaaauauucua

SEQ ID NO: 344364 - RNA, 14 nt, Human herpesvirus 7
aaugaagacucuuu

SEQ ID NO: 344365 - RNA, 19 nt, Human herpesvirus 7
aaugaaucugcacuaucuc

SEQ ID NO: 344366 - RNA, 19 nt, Human herpesvirus 7
aaugaauuuuaaguggaau

SEQ ID NO: 344367 - RNA, 23 nt, Human herpesvirus 7
aaugaauuuuaaguggaaucuca

SEQ ID NO: 344368 - RNA, 13 nt, Human herpesvirus 7
aaugacugucagc

SEQ ID NO: 344369 - RNA, 21 nt, Human herpesvirus 7
aaugagacagcaacugugcau

SEQ ID NO: 344370 - RNA, 16 nt, Human herpesvirus 7
aaugaguauaacucaa

SEQ ID NO: 344371 - RNA, 17 nt, Human herpesvirus 7
aaugauauaaaguuuau

SEQ ID NO: 344372 - RNA, 19 nt, Human herpesvirus 7
aaugauauaaaguuuauau

SEQ ID NO: 344373 - RNA, 19 nt, Human herpesvirus 7
aaugaucagagaugaucuu

SEQ ID NO: 344374 - RNA, 19 nt, Human herpesvirus 7
aaugaugguugcaauacaa

SEQ ID NO: 344375 - RNA, 19 nt, Human herpesvirus 7
aaugauuugguauacacua

SEQ ID NO: 344376 - RNA, 14 nt, Human herpesvirus 7
aaugcaugaugcac

SEQ ID NO: 344377 - RNA, 16 nt, Human herpesvirus 7
aaugcguuuuugucuc

SEQ ID NO: 344378 - RNA, 21 nt, Human herpesvirus 7
aaugcuaaaguuaacauaugu

SEQ ID NO: 344379 - RNA, 22 nt, Human herpesvirus 7
aaugcugugauuuuccugaaaa

SEQ ID NO: 344380 - RNA, 17 nt, Human herpesvirus 7
aauggaacagcaaaaag

SEQ ID NO: 344381 - RNA, 20 nt, Human herpesvirus 7
aauggauucaaucuacugua

SEQ ID NO: 344382 - RNA, 14 nt, Human herpesvirus 7
aauggcaucuuauu

SEQ ID NO: 344383 - RNA, 19 nt, Human herpesvirus 7
aauggcgaguuacauuuca

SEQ ID NO: 344384 - RNA, 19 nt, Human herpesvirus 7
aauggcugaugauaaugaa

SEQ ID NO: 344385 - RNA, 13 nt, Human herpesvirus 7
aaugguaagcaaa

SEQ ID NO: 344386 - RNA, 21 nt, Human herpesvirus 7
aaugguaccuuagaaucacaa

SEQ ID NO: 344387 - RNA, 16 nt, Human herpesvirus 7
aaugguauaaagugcu

SEQ ID NO: 344388 - RNA, 14 nt, Human herpesvirus 7
aaugguuuuauuuc

SEQ ID NO: 344389 - RNA, 14 nt, Human herpesvirus 7
aauguaaaccaaau

SEQ ID NO: 344390 - RNA, 22 nt, Human herpesvirus 7
aauguaaccuuggcuguucaaa

SEQ ID NO: 344391 - RNA, 18 nt, Human herpesvirus 7
aauguacaauaauuucua

SEQ ID NO: 344392 - RNA, 17 nt, Human herpesvirus 7
aauguauucaaugcuag

SEQ ID NO: 344393 - RNA, 19 nt, Human herpesvirus 7
aauguauucaaugcuagug

SEQ ID NO: 344394 - RNA, 15 nt, Human herpesvirus 7
aaugucagaguuuaa

SEQ ID NO: 344395 - RNA, 20 nt, Human herpesvirus 7
aaugucuuugucaugaugaa

SEQ ID NO: 344396 - RNA, 15 nt, Human herpesvirus 7
aauguuaaaggauca

SEQ ID NO: 344397 - RNA, 20 nt, Human herpesvirus 7
aauguuagaaacaucuguuu

SEQ ID NO: 344398 - RNA, 20 nt, Human herpesvirus 7
aauguuauuuuucaugccuu

SEQ ID NO: 344399 - RNA, 20 nt, Human herpesvirus 7
aauguuccacgaucauuccg

SEQ ID NO: 344400 - RNA, 22 nt, Human herpesvirus 7
aauguucuaucaagauaagcaa

SEQ ID NO: 344401 - RNA, 13 nt, Human herpesvirus 7
aauguuuacaugu

SEQ ID NO: 344402 - RNA, 14 nt, Human herpesvirus 7
aauguuuacaugua

SEQ ID NO: 344403 - RNA, 23 nt, Human herpesvirus 7
aauguuuuuuucauacauagaac

SEQ ID NO: 344404 - RNA, 22 nt, Human herpesvirus 7
aauuaaaacuuggugaagauca

SEQ ID NO: 344405 - RNA, 17 nt, Human herpesvirus 7
aauuaaacaaucuggac

SEQ ID NO: 344406 - RNA, 13 nt, Human herpesvirus 7
aauuaaaguugca

SEQ ID NO: 344407 - RNA, 14 nt, Human herpesvirus 7
aauuaaaguugcau

SEQ ID NO: 344408 - RNA, 15 nt, Human herpesvirus 7
aauuaaauacuugca

SEQ ID NO: 344409 - RNA, 19 nt, Human herpesvirus 7
aauuaacacucaaaacaga

SEQ ID NO: 344410 - RNA, 19 nt, Human herpesvirus 7
aauuaauaauauuaguauu

SEQ ID NO: 344411 - RNA, 13 nt, Human herpesvirus 7
aauuaaugcauug

SEQ ID NO: 344412 - RNA, 14 nt, Human herpesvirus 7
aauuaaugcauugg

SEQ ID NO: 344413 - RNA, 16 nt, Human herpesvirus 7
aauuacauugcaguca

SEQ ID NO: 344414 - RNA, 21 nt, Human herpesvirus 7
aauuacauugcagucaaagau

SEQ ID NO: 344415 - RNA, 13 nt, Human herpesvirus 7
aauuacguuauau

SEQ ID NO: 344416 - RNA, 18 nt, Human herpesvirus 7
aauuacguuauauauuua

SEQ ID NO: 344417 - RNA, 13 nt, Human herpesvirus 7
aauuaguucuugu

SEQ ID NO: 344418 - RNA, 15 nt, Human herpesvirus 7
aauuaguucuuguga

SEQ ID NO: 344419 - RNA, 14 nt, Human herpesvirus 7
aauuauacacugug

SEQ ID NO: 344420 - RNA, 18 nt, Human herpesvirus 7
aauuauagaaacauuccu

SEQ ID NO: 344421 - RNA, 20 nt, Human herpesvirus 7
aauuauauaaacacuugcua

SEQ ID NO: 344422 - RNA, 15 nt, Human herpesvirus 7
aauuauuaaucuuuu

SEQ ID NO: 344423 - RNA, 16 nt, Human herpesvirus 7
aauuauuauuaguauu

SEQ ID NO: 344424 - RNA, 23 nt, Human herpesvirus 7
aauuauucggugucuucuugcau

SEQ ID NO: 344425 - RNA, 17 nt, Human herpesvirus 7
aauuauuggauucuaca

SEQ ID NO: 344426 - RNA, 18 nt, Human herpesvirus 7
aauuauuuuaaauucuaa

SEQ ID NO: 344427 - RNA, 16 nt, Human herpesvirus 7
aauucaaucaccaaag

SEQ ID NO: 344428 - RNA, 15 nt, Human herpesvirus 7
aauucagcgucaaua

SEQ ID NO: 344429 - RNA, 19 nt, Human herpesvirus 7
aauucaucaggacaaucaa

SEQ ID NO: 344430 - RNA, 21 nt, Human herpesvirus 7
aauucaucaggacaaucaaac

SEQ ID NO: 344431 - RNA, 14 nt, Human herpesvirus 7
aauucauccaaaaa

SEQ ID NO: 344432 - RNA, 22 nt, Human herpesvirus 7
aauuccaaaauguaaaccaaau

SEQ ID NO: 344433 - RNA, 23 nt, Human herpesvirus 7
aauuccaggguaaagauaauguu

SEQ ID NO: 344434 - RNA, 21 nt, Human herpesvirus 7
aauucuauuuuaaaaaccaug

SEQ ID NO: 344435 - RNA, 23 nt, Human herpesvirus 7
aauucuccaaucauaauuuucau

SEQ ID NO: 344436 - RNA, 17 nt, Human herpesvirus 7
aauucucgcuucaaaga

SEQ ID NO: 344437 - RNA, 23 nt, Human herpesvirus 7
aauucugaaauaaacauuucaaa

SEQ ID NO: 344438 - RNA, 16 nt, Human herpesvirus 7
aauucuuuguacuugu

SEQ ID NO: 344439 - RNA, 22 nt, Human herpesvirus 7
aauucuuuuacaaggugacaga

SEQ ID NO: 344440 - RNA, 21 nt, Human herpesvirus 7
aauugacagcaccaauccuuu

SEQ ID NO: 344441 - RNA, 22 nt, Human herpesvirus 7
aauugacagcaccaauccuuuu

SEQ ID NO: 344442 - RNA, 17 nt, Human herpesvirus 7
aauugaguuuacugcca

SEQ ID NO: 344443 - RNA, 13 nt, Human herpesvirus 7
aauugcagacuaa

SEQ ID NO: 344444 - RNA, 15 nt, Human herpesvirus 7
aauugcagacuaauu

SEQ ID NO: 344445 - RNA, 21 nt, Human herpesvirus 7
aauugccaccgggacagauuu

SEQ ID NO: 344446 - RNA, 16 nt, Human herpesvirus 7
aauugccauuguguua

SEQ ID NO: 344447 - RNA, 19 nt, Human herpesvirus 7
aauugcccuuguguuguca

SEQ ID NO: 344448 - RNA, 18 nt, Human herpesvirus 7
aauugcugucuauuucaa

SEQ ID NO: 344449 - RNA, 16 nt, Human herpesvirus 7
aauuggaaauuacugg

SEQ ID NO: 344450 - RNA, 23 nt, Human herpesvirus 7
aauugguucagcgugacagagaa

SEQ ID NO: 344451 - RNA, 17 nt, Human herpesvirus 7
aauugugaagucuuuau

SEQ ID NO: 344452 - RNA, 17 nt, Human herpesvirus 7
aauugugguacaacaaa

SEQ ID NO: 344453 - RNA, 23 nt, Human herpesvirus 7
aauuguuugaucaaaaucuguag

SEQ ID NO: 344454 - RNA, 21 nt, Human herpesvirus 7
aauuguuuuucuuucuugcau

SEQ ID NO: 344455 - RNA, 19 nt, Human herpesvirus 7
aauuguuuuuuauuuagcu

SEQ ID NO: 344456 - RNA, 18 nt, Human herpesvirus 7
aauuuaacgaauuuuucc

SEQ ID NO: 344457 - RNA, 17 nt, Human herpesvirus 7
aauuuacaaaacaaaga

SEQ ID NO: 344458 - RNA, 21 nt, Human herpesvirus 7
aauuuacuugauuuucuuaca

SEQ ID NO: 344459 - RNA, 19 nt, Human herpesvirus 7
aauuuauauuaaaugauuu

SEQ ID NO: 344460 - RNA, 21 nt, Human herpesvirus 7
aauuuauauuugcuugcugaa

SEQ ID NO: 344461 - RNA, 16 nt, Human herpesvirus 7
aauuuaucucauagcu

SEQ ID NO: 344462 - RNA, 19 nt, Human herpesvirus 7
aauuuaucucauagcuuaa

SEQ ID NO: 344463 - RNA, 22 nt, Human herpesvirus 7
aauuuaucucauagcuuaaaaa

SEQ ID NO: 344464 - RNA, 17 nt, Human herpesvirus 7
aauuuauuuucuaaaaa

SEQ ID NO: 344465 - RNA, 19 nt, Human herpesvirus 7
aauuucaaacguaaugcaa

SEQ ID NO: 344466 - RNA, 12 nt, Human herpesvirus 7
aauuucauaucu

SEQ ID NO: 344467 - RNA, 22 nt, Human herpesvirus 7
aauuucuauaaucacgaaauaa

SEQ ID NO: 344468 - RNA, 22 nt, Human herpesvirus 7
aauuucuauuagauaaugacaa

SEQ ID NO: 344469 - RNA, 18 nt, Human herpesvirus 7
acacguuucucuguagau

SEQ ID NO: 344470 - RNA, 15 nt, Human herpesvirus 7
acacguuuucuguca

SEQ ID NO: 344471 - RNA, 13 nt, Human herpesvirus 7
acacuagcuuucu

SEQ ID NO: 344472 - RNA, 14 nt, Human herpesvirus 7
acacugaaugucaa

SEQ ID NO: 344473 - RNA, 15 nt, Human herpesvirus 7
acacugaaugucaac

SEQ ID NO: 344474 - RNA, 17 nt, Human herpesvirus 7
acacugauuucuacaau

SEQ ID NO: 344475 - RNA, 20 nt, Human herpesvirus 7
acacugcuucucccauucaa

SEQ ID NO: 344476 - RNA, 18 nt, Human herpesvirus 7
acacuuacuuguguugug

SEQ ID NO: 344477 - RNA, 12 nt, Human herpesvirus 7
acacuuauucca

SEQ ID NO: 344478 - RNA, 22 nt, Human herpesvirus 7
acacuuauuccagauaugacaa

SEQ ID NO: 344479 - RNA, 19 nt, Human herpesvirus 7
acacuugcuagcugugaua

SEQ ID NO: 344480 - RNA, 15 nt, Human herpesvirus 7
acagaaaacaacaca

SEQ ID NO: 344481 - RNA, 17 nt, Human herpesvirus 7
acagaaaacaacacaaa

SEQ ID NO: 344482 - RNA, 14 nt, Human herpesvirus 7
acagaaacauguau

SEQ ID NO: 344483 - RNA, 14 nt, Human herpesvirus 7
acagaaaucccaaa

SEQ ID NO: 344484 - RNA, 15 nt, Human herpesvirus 7
acagaaauugaugaa

SEQ ID NO: 344485 - RNA, 19 nt, Human herpesvirus 7
acagaagcugacuuuguca

SEQ ID NO: 344486 - RNA, 19 nt, Human herpesvirus 7
acagaaugccagaaauuaa

SEQ ID NO: 344487 - RNA, 17 nt, Human herpesvirus 7
acagaauuuucaagauc

SEQ ID NO: 344488 - RNA, 21 nt, Human herpesvirus 7
acagacacaccauuguucaac

SEQ ID NO: 344489 - RNA, 22 nt, Human herpesvirus 7
acagaccuauguguuuacauua

SEQ ID NO: 344490 - RNA, 15 nt, Human herpesvirus 7
acagagaacaccaua

SEQ ID NO: 344491 - RNA, 15 nt, Human herpesvirus 7
acagagcgcuuugcu

SEQ ID NO: 344492 - RNA, 15 nt, Human herpesvirus 7
acagauuuuauuuca

SEQ ID NO: 344493 - RNA, 14 nt, Human herpesvirus 7
acagcaacugugca

SEQ ID NO: 344494 - RNA, 12 nt, Human herpesvirus 7
acagcacuuuga

SEQ ID NO: 344495 - RNA, 13 nt, Human herpesvirus 7
acagcacuuugag

SEQ ID NO: 344496 - RNA, 22 nt, Human herpesvirus 7
acagcauuuucucuuauuuugu

SEQ ID NO: 344497 - RNA, 13 nt, Human herpesvirus 7
acagcccaagugg

SEQ ID NO: 344498 - RNA, 21 nt, Human herpesvirus 7
acagcuagauugacuaugaau

SEQ ID NO: 344499 - RNA, 18 nt, Human herpesvirus 7
acagcugaaacucaucau

SEQ ID NO: 344500 - RNA, 14 nt, Human herpesvirus 7
acaggaaaccacag

SEQ ID NO: 344501 - RNA, 21 nt, Human herpesvirus 7
acaggcuuacacuauucucua

SEQ ID NO: 344502 - RNA, 17 nt, Human herpesvirus 7
acagggaagaaacagcu

SEQ ID NO: 344503 - RNA, 14 nt, Human herpesvirus 7
acagucaacaaauc

SEQ ID NO: 344504 - RNA, 22 nt, Human herpesvirus 7
acagucugaaagccgcugccuu

SEQ ID NO: 344505 - RNA, 16 nt, Human herpesvirus 7
acaguggaugcuggaa

SEQ ID NO: 344506 - RNA, 22 nt, Human herpesvirus 7
acaguuaaagacggaauuugua

SEQ ID NO: 344507 - RNA, 18 nt, Human herpesvirus 7
acaguugcuugugaagga

SEQ ID NO: 344508 - RNA, 19 nt, Human herpesvirus 7
acaguugcuugugaaggag

SEQ ID NO: 344509 - RNA, 16 nt, Human herpesvirus 7
acaguuuuauucccau

SEQ ID NO: 344510 - RNA, 18 nt, Human herpesvirus 7
acaguuuuuuaauacaaa

SEQ ID NO: 344511 - RNA, 13 nt, Human herpesvirus 7
acauaaaaauuuc

SEQ ID NO: 344512 - RNA, 13 nt, Human herpesvirus 7
acauaaagguaaa

SEQ ID NO: 344513 - RNA, 17 nt, Human herpesvirus 7
acauaaccaaugcugau

SEQ ID NO: 344514 - RNA, 19 nt, Human herpesvirus 7
acauaacucuaucuccuau

SEQ ID NO: 344515 - RNA, 20 nt, Human herpesvirus 7
acauaaguugacaaugucaa

SEQ ID NO: 344516 - RNA, 19 nt, Human herpesvirus 7
acauaauguguaucaauau

SEQ ID NO: 344517 - RNA, 19 nt, Human herpesvirus 7
acauacgugcuuagacuua

SEQ ID NO: 344518 - RNA, 15 nt, Human herpesvirus 7
acauacuaaauuucu

SEQ ID NO: 344519 - RNA, 12 nt, Human herpesvirus 7
acauacugaugu

SEQ ID NO: 344520 - RNA, 22 nt, Human herpesvirus 7
acauaggaaucgcaguguucau

SEQ ID NO: 344521 - RNA, 14 nt, Human herpesvirus 7
acauauagauuuau

SEQ ID NO: 344522 - RNA, 18 nt, Human herpesvirus 7
acauauaggaacaaaucu

SEQ ID NO: 344523 - RNA, 16 nt, Human herpesvirus 7
acauaucagauuuuau

SEQ ID NO: 344524 - RNA, 23 nt, Human herpesvirus 7
acauauuagauuauacaaaucca

SEQ ID NO: 344525 - RNA, 16 nt, Human herpesvirus 7
acaucagauacagaga

SEQ ID NO: 344526 - RNA, 17 nt, Human herpesvirus 7
acaucagauacagagag

SEQ ID NO: 344527 - RNA, 15 nt, Human herpesvirus 7
acauccgauagcauu

SEQ ID NO: 344528 - RNA, 18 nt, Human herpesvirus 7
acauccgauagcauuaga

SEQ ID NO: 344529 - RNA, 22 nt, Human herpesvirus 7
acauccuuaaauuuuacaaaga

SEQ ID NO: 344530 - RNA, 16 nt, Human herpesvirus 7
acaucgagauuccaaa

SEQ ID NO: 344531 - RNA, 19 nt, Human herpesvirus 7
acaucgagauuccaaagag

SEQ ID NO: 344532 - RNA, 20 nt, Human herpesvirus 7
acaucuaugugcucugaaua

SEQ ID NO: 344533 - RNA, 18 nt, Human herpesvirus 7
acaucugucaggucacaa

SEQ ID NO: 344534 - RNA, 19 nt, Human herpesvirus 7
acaucugucaggucacaaa

SEQ ID NO: 344535 - RNA, 18 nt, Human herpesvirus 7
acaucuucaauguucgau

SEQ ID NO: 344536 - RNA, 19 nt, Human herpesvirus 7
acaucuuucguauugccuu

SEQ ID NO: 344537 - RNA, 21 nt, Human herpesvirus 7
acaugaaacguuucaaaucaa

SEQ ID NO: 344538 - RNA, 13 nt, Human herpesvirus 7
acaugaguacugu

SEQ ID NO: 344539 - RNA, 13 nt, Human herpesvirus 7
acaugagugaaaa

SEQ ID NO: 344540 - RNA, 17 nt, Human herpesvirus 7
acaugcaacauaaucca

SEQ ID NO: 344541 - RNA, 22 nt, Human herpesvirus 7
acauggggcauuaauucuuuca

SEQ ID NO: 344542 - RNA, 20 nt, Human herpesvirus 7
acauguaguacaaugcuguc

SEQ ID NO: 344543 - RNA, 13 nt, Human herpesvirus 7
acauguuccauuc

SEQ ID NO: 344544 - RNA, 15 nt, Human herpesvirus 7
acauguuccauucaa

SEQ ID NO: 344545 - RNA, 19 nt, Human herpesvirus 7
acauuaaccacaacuguga

SEQ ID NO: 344546 - RNA, 14 nt, Human herpesvirus 7
acauuaauaucaau

SEQ ID NO: 344547 - RNA, 15 nt, Human herpesvirus 7
acauuagcauugaaa

SEQ ID NO: 344548 - RNA, 19 nt, Human herpesvirus 7
acauuauaagaaucugucu

SEQ ID NO: 344549 - RNA, 21 nt, Human herpesvirus 7
acauuaucgcguuuucaugcu

SEQ ID NO: 344550 - RNA, 21 nt, Human herpesvirus 7
acauuauuugcugaacucugu

SEQ ID NO: 344551 - RNA, 11 nt, Human herpesvirus 7
acauuccucau

SEQ ID NO: 344552 - RNA, 22 nt, Human herpesvirus 7
acauuccucaucucccacuucc

SEQ ID NO: 344553 - RNA, 19 nt, Human herpesvirus 7
acauucgcaaggaauauga

SEQ ID NO: 344554 - RNA, 21 nt, Human herpesvirus 7
acauucuagagauuacauccu

SEQ ID NO: 344555 - RNA, 21 nt, Human herpesvirus 7
acauucucaaaaaugauauga

SEQ ID NO: 344556 - RNA, 16 nt, Human herpesvirus 7
acauugaaaaugcauu

SEQ ID NO: 344557 - RNA, 15 nt, Human herpesvirus 7
acauugcuucagaaa

SEQ ID NO: 344558 - RNA, 14 nt, Human herpesvirus 7
acauuguacaauua

SEQ ID NO: 344559 - RNA, 13 nt, Human herpesvirus 7
acauugucaaaga

SEQ ID NO: 344560 - RNA, 19 nt, Human herpesvirus 7
acauuuaaaaaaaaaacca

SEQ ID NO: 344561 - RNA, 20 nt, Human herpesvirus 7
acauuucagaugacaacuca

SEQ ID NO: 344562 - RNA, 22 nt, Human herpesvirus 7
acauuucagaugacaacucaau

SEQ ID NO: 344563 - RNA, 15 nt, Human herpesvirus 7
acauuucauuccaaa

SEQ ID NO: 344564 - RNA, 21 nt, Human herpesvirus 7
acauuuuguaugaaaagccca

SEQ ID NO: 344565 - RNA, 18 nt, Human herpesvirus 7
acauuuuugcaauaugcu

SEQ ID NO: 344566 - RNA, 19 nt, Human herpesvirus 7
accaaagaucguuguuaaa

SEQ ID NO: 344567 - RNA, 14 nt, Human herpesvirus 7
accaaauacaacca

SEQ ID NO: 344568 - RNA, 21 nt, Human herpesvirus 7
accaagagccggaaagcaaug

SEQ ID NO: 344569 - RNA, 14 nt, Human herpesvirus 7
accaauuaauauua

SEQ ID NO: 344570 - RNA, 14 nt, Human herpesvirus 7
accacguuuuugca

SEQ ID NO: 344571 - RNA, 16 nt, Human herpesvirus 7
accagauauuaguuuc

SEQ ID NO: 344572 - RNA, 18 nt, Human herpesvirus 7
accaggaacagauucucc

SEQ ID NO: 344573 - RNA, 13 nt, Human herpesvirus 7
accauaaauacca

SEQ ID NO: 344574 - RNA, 13 nt, Human herpesvirus 7
accauaugccaau

SEQ ID NO: 344575 - RNA, 11 nt, Human herpesvirus 7
accaucugcug

SEQ ID NO: 344576 - RNA, 13 nt, Human herpesvirus 7
accauuguucaac

SEQ ID NO: 344577 - RNA, 20 nt, Human herpesvirus 7
accauuuauuuacagauuuu

SEQ ID NO: 344578 - RNA, 14 nt, Human herpesvirus 7
acccacuaacauuu

SEQ ID NO: 344579 - RNA, 18 nt, Human herpesvirus 7
acccaugggcacauuugu

SEQ ID NO: 344580 - RNA, 19 nt, Human herpesvirus 7
accccaaaaucaaaaaaca

SEQ ID NO: 344581 - RNA, 23 nt, Human herpesvirus 7
accccgauccucagaauguacac

SEQ ID NO: 344582 - RNA, 15 nt, Human herpesvirus 7
acccugucacacuua

SEQ ID NO: 344583 - RNA, 18 nt, Human herpesvirus 7
accgauuccagcacuuuu

SEQ ID NO: 344584 - RNA, 16 nt, Human herpesvirus 7
acuuaaagaacuccau

SEQ ID NO: 344585 - RNA, 18 nt, Human herpesvirus 7
acuuaaagaacuccauuc

SEQ ID NO: 344586 - RNA, 13 nt, Human herpesvirus 7
acuuaugugucac

SEQ ID NO: 344587 - RNA, 23 nt, Human herpesvirus 7
acuuauuccagauaugacaaauu

SEQ ID NO: 344588 - RNA, 20 nt, Human herpesvirus 7
acuuauuugauuauuuugau

SEQ ID NO: 344589 - RNA, 14 nt, Human herpesvirus 7
acuucaacauacag

SEQ ID NO: 344590 - RNA, 19 nt, Human herpesvirus 7
acuucaccacgaucccuau

SEQ ID NO: 344591 - RNA, 12 nt, Human herpesvirus 7
acuucagauuuu

SEQ ID NO: 344592 - RNA, 14 nt, Human herpesvirus 7
acuuccuguccaaa

SEQ ID NO: 344593 - RNA, 23 nt, Human herpesvirus 7
acuugaaaaauuuuuuacugucu

SEQ ID NO: 344594 - RNA, 23 nt, Human herpesvirus 7
acuugauguuuugcaagcacaug

SEQ ID NO: 344595 - RNA, 14 nt, Human herpesvirus 7
acuugccccuaaac

SEQ ID NO: 344596 - RNA, 15 nt, Human herpesvirus 7
acuugcuagcuguga

SEQ ID NO: 344597 - RNA, 16 nt, Human herpesvirus 7
acuugcuagcugugau

SEQ ID NO: 344598 - RNA, 13 nt, Human herpesvirus 7
acuugugaaaaua

SEQ ID NO: 344599 - RNA, 20 nt, Human herpesvirus 7
acuuguuuuuuuucucugau

SEQ ID NO: 344600 - RNA, 16 nt, Human herpesvirus 7
acuuuaaaacuuugau

SEQ ID NO: 344601 - RNA, 23 nt, Human herpesvirus 7
acuuuacguauaucgaucuaaga

SEQ ID NO: 344602 - RNA, 13 nt, Human herpesvirus 7
acuuuaucauuac

SEQ ID NO: 344603 - RNA, 15 nt, Human herpesvirus 7
acuuucauagcuuaa

SEQ ID NO: 344604 - RNA, 21 nt, Human herpesvirus 7
acuuugaaucaacagccaucu

SEQ ID NO: 344605 - RNA, 16 nt, Human herpesvirus 7
acuuugccaaugccaa

SEQ ID NO: 344606 - RNA, 17 nt, Human herpesvirus 7
acuuugcggaaguggga

SEQ ID NO: 344607 - RNA, 22 nt, Human herpesvirus 7
acuuugucaugacuggacacaa

SEQ ID NO: 344608 - RNA, 21 nt, Human herpesvirus 7
acuuuuaaagguaggauugaa

SEQ ID NO: 344609 - RNA, 19 nt, Human herpesvirus 7
acuuuuaaauaaaccuuaa

SEQ ID NO: 344610 - RNA, 18 nt, Human herpesvirus 7
acuuuuauaauacuggca

SEQ ID NO: 344611 - RNA, 20 nt, Human herpesvirus 7
acuuuuauucagacaaguaa

SEQ ID NO: 344612 - RNA, 17 nt, Human herpesvirus 7
acuuuuuauuguuucgu

SEQ ID NO: 344613 - RNA, 19 nt, Human herpesvirus 7
acuuuuucuguagacauuu

SEQ ID NO: 344614 - RNA, 16 nt, Human herpesvirus 7
agaaaaaaaguacaag

SEQ ID NO: 344615 - RNA, 22 nt, Human herpesvirus 7
agaaaaacacuagcuuucuguu

SEQ ID NO: 344616 - RNA, 12 nt, Human herpesvirus 7
agaaaaacuccg

SEQ ID NO: 344617 - RNA, 22 nt, Human herpesvirus 7
agaaaaacuccguuucauuuaa

SEQ ID NO: 344618 - RNA, 19 nt, Human herpesvirus 7
agaaaacguuuuuaucuga

SEQ ID NO: 344619 - RNA, 21 nt, Human herpesvirus 7
agaaaacguuuuuaucugaua

SEQ ID NO: 344620 - RNA, 22 nt, Human herpesvirus 7
agaaaacguuuuuaucugauaa

SEQ ID NO: 344621 - RNA, 21 nt, Human herpesvirus 7
agaaaaucaaaaaauaauucc

SEQ ID NO: 344622 - RNA, 21 nt, Human herpesvirus 7
agaaaaucuuugaaucugcua

SEQ ID NO: 344623 - RNA, 21 nt, Human herpesvirus 7
agaaaauguuuaaauuacagu

SEQ ID NO: 344624 - RNA, 18 nt, Human herpesvirus 7
agaaaauuuagcaccaac

SEQ ID NO: 344625 - RNA, 12 nt, Human herpesvirus 7
agaaacauguau

SEQ ID NO: 344626 - RNA, 14 nt, Human herpesvirus 7
agaaacauguaucc

SEQ ID NO: 344627 - RNA, 18 nt, Human herpesvirus 7
agaaacgucccugugaca

SEQ ID NO: 344628 - RNA, 18 nt, Human herpesvirus 7
agaaacuugaaaaucaau

SEQ ID NO: 344629 - RNA, 22 nt, Human herpesvirus 7
agaaagauuaauuaucuacccc

SEQ ID NO: 344630 - RNA, 19 nt, Human herpesvirus 7
agaaagggcaugucugccu

SEQ ID NO: 344631 - RNA, 17 nt, Human herpesvirus 7
agaaagucagaacauug

SEQ ID NO: 344632 - RNA, 14 nt, Human herpesvirus 7
agaaagucaucuga

SEQ ID NO: 344633 - RNA, 16 nt, Human herpesvirus 7
agaaaguccaaaguga

SEQ ID NO: 344634 - RNA, 15 nt, Human herpesvirus 7
agaaaguuguacuca

SEQ ID NO: 344635 - RNA, 16 nt, Human herpesvirus 7
agaaauaugcuuccua

SEQ ID NO: 344636 - RNA, 20 nt, Human herpesvirus 7
agaaaucuuuauugguaauu

SEQ ID NO: 344637 - RNA, 21 nt, Human herpesvirus 7
agaaauguaaauuauguggug

SEQ ID NO: 344638 - RNA, 16 nt, Human herpesvirus 7
agaaauuauacuagca

SEQ ID NO: 344639 - RNA, 21 nt, Human herpesvirus 7
agaaauuuuacagccuguaca

SEQ ID NO: 344640 - RNA, 23 nt, Human herpesvirus 7
agaacaaacuguacccaaaaaua

SEQ ID NO: 344641 - RNA, 15 nt, Human herpesvirus 7
agaacaaguagaaaa

SEQ ID NO: 344642 - RNA, 18 nt, Human herpesvirus 7
agaacaauaaauucaacu

SEQ ID NO: 344643 - RNA, 17 nt, Human herpesvirus 7
agaacauguaguacaau

SEQ ID NO: 344644 - RNA, 18 nt, Human herpesvirus 7
agaacauuuuucuugcuu

SEQ ID NO: 344645 - RNA, 19 nt, Human herpesvirus 7
agaacggcgcgacugugcc

SEQ ID NO: 344646 - RNA, 21 nt, Human herpesvirus 7
agaacuguuaaaaucuguucc

SEQ ID NO: 344647 - RNA, 22 nt, Human herpesvirus 7
agaacuugaaaaaaucuugcaa

SEQ ID NO: 344648 - RNA, 22 nt, Human herpesvirus 7
agaacuuuuaaaaaagaacuua

SEQ ID NO: 344649 - RNA, 15 nt, Human herpesvirus 7
agaagaaacuugaaa

SEQ ID NO: 344650 - RNA, 13 nt, Human herpesvirus 7
agaagaacauuua

SEQ ID NO: 344651 - RNA, 13 nt, Human herpesvirus 7
agaagaaugcaag

SEQ ID NO: 344652 - RNA, 14 nt, Human herpesvirus 7
agaagagcguuucu

SEQ ID NO: 344653 - RNA, 18 nt, Human herpesvirus 7
agaagagguaaguguaag

SEQ ID NO: 344654 - RNA, 19 nt, Human herpesvirus 7
agaagaugacucaugagac

SEQ ID NO: 344655 - RNA, 14 nt, Human herpesvirus 7
agaagcugacuuug

SEQ ID NO: 344656 - RNA, 16 nt, Human herpesvirus 7
agaagcugacuuuguc

SEQ ID NO: 344657 - RNA, 23 nt, Human herpesvirus 7
agaaggaaaauuauaaguuuccc

SEQ ID NO: 344658 - RNA, 16 nt, Human herpesvirus 7
agaauacacauuuagu

SEQ ID NO: 344659 - RNA, 17 nt, Human herpesvirus 7
agaauacuacucagaag

SEQ ID NO: 344660 - RNA, 20 nt, Human herpesvirus 7
agaauacuacucagaagaca

SEQ ID NO: 344661 - RNA, 23 nt, Human herpesvirus 7
agaauacuacucagaagacauau

SEQ ID NO: 344662 - RNA, 15 nt, Human herpesvirus 7
agaauaucuguggcu

SEQ ID NO: 344663 - RNA, 20 nt, Human herpesvirus 7
agaauauguuaucauuuauc

SEQ ID NO: 344664 - RNA, 23 nt, Human herpesvirus 7
agaaucauagcaggaagcacaaa

SEQ ID NO: 344665 - RNA, 15 nt, Human herpesvirus 7
agaaugaacaccgca

SEQ ID NO: 344666 - RNA, 23 nt, Human herpesvirus 7
agaaugcaacaucuuaaauguca

SEQ ID NO: 344667 - RNA, 19 nt, Human herpesvirus 7
agaauguugagcuaucuga

SEQ ID NO: 344668 - RNA, 16 nt, Human herpesvirus 7
agaauuuaaucauauc

SEQ ID NO: 344669 - RNA, 22 nt, Human herpesvirus 7
agacaaauuaaacaaucuggac

SEQ ID NO: 344670 - RNA, 13 nt, Human herpesvirus 7
agacaaggggcau

SEQ ID NO: 344671 - RNA, 23 nt, Human herpesvirus 7
agacaauauauugaaggugucua

SEQ ID NO: 344672 - RNA, 19 nt, Human herpesvirus 7
agacaauuucacacaaugc

SEQ ID NO: 344673 - RNA, 23 nt, Human herpesvirus 7
agacacggaguuuuuacucugug

SEQ ID NO: 344674 - RNA, 17 nt, Human herpesvirus 7
agacagcaacugugcau

SEQ ID NO: 344675 - RNA, 14 nt, Human herpesvirus 7
agacagcuguauau

SEQ ID NO: 344676 - RNA, 19 nt, Human herpesvirus 7
agacauugaaaaugcauug

SEQ ID NO: 344677 - RNA, 18 nt, Human herpesvirus 7
agacauuucguuauucca

SEQ ID NO: 344678 - RNA, 17 nt, Human herpesvirus 7
agaccuauguguuuaca

SEQ ID NO: 344679 - RNA, 17 nt, Human herpesvirus 7
agaccuccuaugucaug

SEQ ID NO: 344680 - RNA, 16 nt, Human herpesvirus 7
agaccuguacuguugc

SEQ ID NO: 344681 - RNA, 18 nt, Human herpesvirus 7
agaccuguacuguugcua

SEQ ID NO: 344682 - RNA, 14 nt, Human herpesvirus 7
agacgacgaaguuc

SEQ ID NO: 344683 - RNA, 20 nt, Human herpesvirus 7
agacgccaauaaaucuucau

SEQ ID NO: 344684 - RNA, 19 nt, Human herpesvirus 7
agacgcuguaugcaagaaa

SEQ ID NO: 344685 - RNA, 13 nt, Human herpesvirus 7
agacguugcucau

SEQ ID NO: 344686 - RNA, 19 nt, Human herpesvirus 7
agacuaaucacgagaaaaa

SEQ ID NO: 344687 - RNA, 15 nt, Human herpesvirus 7
agacugaagacaaaa

SEQ ID NO: 344688 - RNA, 22 nt, Human herpesvirus 7
agacuuaucaccauaugccaau

SEQ ID NO: 344689 - RNA, 21 nt, Human herpesvirus 7
agagaaaaucuuugaaucugc

SEQ ID NO: 344690 - RNA, 21 nt, Human herpesvirus 7
agagaaaucgcuuauuuaaca

SEQ ID NO: 344691 - RNA, 17 nt, Human herpesvirus 7
agagaacaccauaguca

SEQ ID NO: 344692 - RNA, 20 nt, Human herpesvirus 7
agagaacuagaacagcugaa

SEQ ID NO: 344693 - RNA, 16 nt, Human herpesvirus 7
agagaauauguuauca

SEQ ID NO: 344694 - RNA, 21 nt, Human herpesvirus 7
agagaauguacgaacuaagaa

SEQ ID NO: 344695 - RNA, 15 nt, Human herpesvirus 7
agagacuccaaucga

SEQ ID NO: 344696 - RNA, 19 nt, Human herpesvirus 7
agagauagcauuuguuaca

SEQ ID NO: 344697 - RNA, 22 nt, Human herpesvirus 7
agagaucauaauuacauugcag

SEQ ID NO: 344698 - RNA, 23 nt, Human herpesvirus 7
agcucuaucgucaucaucccaaa

SEQ ID NO: 344699 - RNA, 22 nt, Human herpesvirus 7
agcugauucugccauuacugau

SEQ ID NO: 344700 - RNA, 14 nt, Human herpesvirus 7
agcugcagcugaaa

SEQ ID NO: 344701 - RNA, 23 nt, Human herpesvirus 7
agcugcauguguacuaaagccaa

SEQ ID NO: 344702 - RNA, 15 nt, Human herpesvirus 7
agcugcuaaaaccau

SEQ ID NO: 344703 - RNA, 17 nt, Human herpesvirus 7
agcuuaaauguguaaca

SEQ ID NO: 344704 - RNA, 22 nt, Human herpesvirus 7
agcuuaaauguguaacaauuga

SEQ ID NO: 344705 - RNA, 18 nt, Human herpesvirus 7
agcuuaagacaccccaaa

SEQ ID NO: 344706 - RNA, 16 nt, Human herpesvirus 7
agcuucaguacuugaa

SEQ ID NO: 344707 - RNA, 17 nt, Human herpesvirus 7
agcuucuaaaugugcua

SEQ ID NO: 344708 - RNA, 17 nt, Human herpesvirus 7
agcuuguauauacggaa

SEQ ID NO: 344709 - RNA, 17 nt, Human herpesvirus 7
agcuuucuuucucauca

SEQ ID NO: 344710 - RNA, 18 nt, Human herpesvirus 7
agcuuugaucuacauaua

SEQ ID NO: 344711 - RNA, 17 nt, Human herpesvirus 7
aggaaaaacgguguugu

SEQ ID NO: 344712 - RNA, 17 nt, Human herpesvirus 7
aggaaaaaugcugcuca

SEQ ID NO: 344713 - RNA, 17 nt, Human herpesvirus 7
aggaaaaucguguuaag

SEQ ID NO: 344714 - RNA, 20 nt, Human herpesvirus 7
aggaaauuaguucuugugac

SEQ ID NO: 344715 - RNA, 19 nt, Human herpesvirus 7
aggaagcuuuacagcagcc

SEQ ID NO: 344716 - RNA, 18 nt, Human herpesvirus 7
aggaaucgcaguguucau

SEQ ID NO: 344717 - RNA, 20 nt, Human herpesvirus 7
aggaaucuuaaucacgugau

SEQ ID NO: 344718 - RNA, 17 nt, Human herpesvirus 7
aggaauugcugucuauu

SEQ ID NO: 344719 - RNA, 18 nt, Human herpesvirus 7
aggacaaucaaacaugua

SEQ ID NO: 344720 - RNA, 17 nt, Human herpesvirus 7
aggacagggcuaagcau

SEQ ID NO: 344721 - RNA, 14 nt, Human herpesvirus 7
aggaccaauucuuu

SEQ ID NO: 344722 - RNA, 20 nt, Human herpesvirus 7
aggacgaaucuacauuaaac

SEQ ID NO: 344723 - RNA, 23 nt, Human herpesvirus 7
aggacuaucagcgacagguguug

SEQ ID NO: 344724 - RNA, 19 nt, Human herpesvirus 7
aggaguauguugcauauca

SEQ ID NO: 344725 - RNA, 20 nt, Human herpesvirus 7
aggaguauguugcauaucau

SEQ ID NO: 344726 - RNA, 15 nt, Human herpesvirus 7
aggauaccaaacaaa

SEQ ID NO: 344727 - RNA, 15 nt, Human herpesvirus 7
aggaugaaagugcau

SEQ ID NO: 344728 - RNA, 13 nt, Human herpesvirus 7
aggcaaaucucau

SEQ ID NO: 344729 - RNA, 15 nt, Human herpesvirus 7
aggcaucgcauauag

SEQ ID NO: 344730 - RNA, 18 nt, Human herpesvirus 7
aggcauuuaagaauuuaa

SEQ ID NO: 344731 - RNA, 20 nt, Human herpesvirus 7
aggccguacuuguaugcuau

SEQ ID NO: 344732 - RNA, 15 nt, Human herpesvirus 7
aggccguuuaugaac

SEQ ID NO: 344733 - RNA, 23 nt, Human herpesvirus 7
aggccuguuucuugauguaacaa

SEQ ID NO: 344734 - RNA, 15 nt, Human herpesvirus 7
aggcuaugacuuuga

SEQ ID NO: 344735 - RNA, 16 nt, Human herpesvirus 7
aggcuaugacuuugaa

SEQ ID NO: 344736 - RNA, 14 nt, Human herpesvirus 7
aggcugcuuuuuca

SEQ ID NO: 344737 - RNA, 15 nt, Human herpesvirus 7
aggcuucauuggcau

SEQ ID NO: 344738 - RNA, 22 nt, Human herpesvirus 7
aggcuuuuagaaaucuuucauc

SEQ ID NO: 344739 - RNA, 19 nt, Human herpesvirus 7
agggaagaaacagcugaaa

SEQ ID NO: 344740 - RNA, 13 nt, Human herpesvirus 7
agggacuuuuaua

SEQ ID NO: 344741 - RNA, 18 nt, Human herpesvirus 7
agggcaauuguuugauua

SEQ ID NO: 344742 - RNA, 15 nt, Human herpesvirus 7
agggcaugucugccu

SEQ ID NO: 344743 - RNA, 18 nt, Human herpesvirus 7
agggcauuuguaugucua

SEQ ID NO: 344744 - RNA, 20 nt, Human herpesvirus 7
agggggacaauuauuuaaac

SEQ ID NO: 344745 - RNA, 21 nt, Human herpesvirus 7
aggguguguccagauaauaua

SEQ ID NO: 344746 - RNA, 20 nt, Human herpesvirus 7
agguaaaaauuugacauuug

SEQ ID NO: 344747 - RNA, 23 nt, Human herpesvirus 7
agguaaaaauuugacauuugcaa

SEQ ID NO: 344748 - RNA, 12 nt, Human herpesvirus 7
agguacuaucua

SEQ ID NO: 344749 - RNA, 22 nt, Human herpesvirus 7
agguaucuuuacuuucauagcu

SEQ ID NO: 344750 - RNA, 14 nt, Human herpesvirus 7
aggucuuccacugu

SEQ ID NO: 344751 - RNA, 20 nt, Human herpesvirus 7
aggucuuucaugcauugcau

SEQ ID NO: 344752 - RNA, 22 nt, Human herpesvirus 7
agguuaagccuaggauaccaaa

SEQ ID NO: 344753 - RNA, 20 nt, Human herpesvirus 7
agguuaagugaaugugcuuu

SEQ ID NO: 344754 - RNA, 20 nt, Human herpesvirus 7
agguucauauacuucuugcc

SEQ ID NO: 344755 - RNA, 21 nt, Human herpesvirus 7
agguucauauacuucuugccc

SEQ ID NO: 344756 - RNA, 15 nt, Human herpesvirus 7
agguuguugcaauuu

SEQ ID NO: 344757 - RNA, 15 nt, Human herpesvirus 7
aguaaaagagaaaaa

SEQ ID NO: 344758 - RNA, 23 nt, Human herpesvirus 7
aguaaauaaaaugguugugcaau

SEQ ID NO: 344759 - RNA, 22 nt, Human herpesvirus 7
aguaaauucagcgucaauagua

SEQ ID NO: 344760 - RNA, 18 nt, Human herpesvirus 7
aguaaauugcaacuggca

SEQ ID NO: 344761 - RNA, 20 nt, Human herpesvirus 7
aguaaauugcaacuggcauu

SEQ ID NO: 344762 - RNA, 21 nt, Human herpesvirus 7
aguaauguuauuuuucaugcc

SEQ ID NO: 344763 - RNA, 22 nt, Human herpesvirus 7
aguaauguuauuuuucaugccu

SEQ ID NO: 344764 - RNA, 19 nt, Human herpesvirus 7
aguaauucgauuagcuguu

SEQ ID NO: 344765 - RNA, 22 nt, Human herpesvirus 7
aguaauuuaugcuuuaacugga

SEQ ID NO: 344766 - RNA, 16 nt, Human herpesvirus 7
aguacaagaguguuau

SEQ ID NO: 344767 - RNA, 15 nt, Human herpesvirus 7
aguaccauugcugau

SEQ ID NO: 344768 - RNA, 16 nt, Human herpesvirus 7
aguacgcccacucugg

SEQ ID NO: 344769 - RNA, 14 nt, Human herpesvirus 7
aguacuacuaauca

SEQ ID NO: 344770 - RNA, 19 nt, Human herpesvirus 7
aguacuuuuucuggaaugu

SEQ ID NO: 344771 - RNA, 21 nt, Human herpesvirus 7
aguagaacuugaaaaaaucuu

SEQ ID NO: 344772 - RNA, 17 nt, Human herpesvirus 7
aguagaaggaaaccaau

SEQ ID NO: 344773 - RNA, 22 nt, Human herpesvirus 7
aguauacaaaagacauaacaaa

SEQ ID NO: 344774 - RNA, 14 nt, Human herpesvirus 7
aguaugaaaucaaa

SEQ ID NO: 344775 - RNA, 16 nt, Human herpesvirus 7
aguauggaaaaauguu

SEQ ID NO: 344776 - RNA, 17 nt, Human herpesvirus 7
aguauguuuacgcugcu

SEQ ID NO: 344777 - RNA, 15 nt, Human herpesvirus 7
aguauucucauacaa

SEQ ID NO: 344778 - RNA, 18 nt, Human herpesvirus 7
aguauucucauacaacuc

SEQ ID NO: 344779 - RNA, 15 nt, Human herpesvirus 7
aguauucuuaugcca

SEQ ID NO: 344780 - RNA, 22 nt, Human herpesvirus 7
aguauuggguagguuaagccua

SEQ ID NO: 344781 - RNA, 22 nt, Human herpesvirus 7
aguauuuaagaacagaaugaua

SEQ ID NO: 344782 - RNA, 21 nt, Human herpesvirus 7
agucacguaaaaguguucaaa

SEQ ID NO: 344783 - RNA, 13 nt, Human herpesvirus 7
agucaguuaucaa

SEQ ID NO: 344784 - RNA, 17 nt, Human herpesvirus 7
aguccaaaaguuguuaa

SEQ ID NO: 344785 - RNA, 16 nt, Human herpesvirus 7
aguccaaagugaugaa

SEQ ID NO: 344786 - RNA, 19 nt, Human herpesvirus 7
aguccaauaguaauguuau

SEQ ID NO: 344787 - RNA, 14 nt, Human herpesvirus 7
aguccgugugcaaa

SEQ ID NO: 344788 - RNA, 19 nt, Human herpesvirus 7
agucuacaucaucaacaua

SEQ ID NO: 344789 - RNA, 19 nt, Human herpesvirus 7
agucuauugacauaaucau

SEQ ID NO: 344790 - RNA, 16 nt, Human herpesvirus 7
agucucagagaacuag

SEQ ID NO: 344791 - RNA, 16 nt, Human herpesvirus 7
agucuccgugucacug

SEQ ID NO: 344792 - RNA, 19 nt, Human herpesvirus 7
agucucugggaagauuuga

SEQ ID NO: 344793 - RNA, 21 nt, Human herpesvirus 7
agucugaacggauccgcugaa

SEQ ID NO: 344794 - RNA, 19 nt, Human herpesvirus 7
agucuguagaugcaugcua

SEQ ID NO: 344795 - RNA, 18 nt, Human herpesvirus 7
agucugugacagauuuaa

SEQ ID NO: 344796 - RNA, 12 nt, Human herpesvirus 7
agucuucauccg

SEQ ID NO: 344797 - RNA, 22 nt, Human herpesvirus 7
agucuuguuuuuuggauuuccg

SEQ ID NO: 344798 - RNA, 14 nt, Human herpesvirus 7
agugaacuguuaca

SEQ ID NO: 344799 - RNA, 14 nt, Human herpesvirus 7
agugaaugugcuuu

SEQ ID NO: 344800 - RNA, 23 nt, Human herpesvirus 7
agugagguggacgcuaauuugca

SEQ ID NO: 344801 - RNA, 20 nt, Human herpesvirus 7
agugauugguagaaaugugc

SEQ ID NO: 344802 - RNA, 15 nt, Human herpesvirus 7
agugauuucaucacc

SEQ ID NO: 344803 - RNA, 20 nt, Human herpesvirus 7
agugauuuuucauuuaucuu

SEQ ID NO: 344804 - RNA, 22 nt, Human herpesvirus 7
agugcucuuugucuuugcucuc

SEQ ID NO: 344805 - RNA, 13 nt, Human herpesvirus 7
aguggaaucucau

SEQ ID NO: 344806 - RNA, 22 nt, Human herpesvirus 7
aguggaugcuggaaaacauuuc

SEQ ID NO: 344807 - RNA, 21 nt, Human herpesvirus 7
aguggcaacgaggaaggugau

SEQ ID NO: 344808 - RNA, 19 nt, Human herpesvirus 7
aguguaaucuagaacuguu

SEQ ID NO: 344809 - RNA, 15 nt, Human herpesvirus 7
aguguaggcaagaag

SEQ ID NO: 344810 - RNA, 13 nt, Human herpesvirus 7
agugugcacacaa

SEQ ID NO: 344811 - RNA, 14 nt, Human herpesvirus 7
agugugcacacaaa

SEQ ID NO: 344812 - RNA, 17 nt, Human herpesvirus 7
auacuggcaugucucau

SEQ ID NO: 344813 - RNA, 20 nt, Human herpesvirus 7
auacuggcaugucucauaau

SEQ ID NO: 344814 - RNA, 23 nt, Human herpesvirus 7
auacuucuugcccccagaacuug

SEQ ID NO: 344815 - RNA, 15 nt, Human herpesvirus 7
auacuugcaaugcaa

SEQ ID NO: 344816 - RNA, 12 nt, Human herpesvirus 7
auacuuguucaa

SEQ ID NO: 344817 - RNA, 14 nt, Human herpesvirus 7
auacuuguugagcu

SEQ ID NO: 344818 - RNA, 13 nt, Human herpesvirus 7
auagaaaacauua

SEQ ID NO: 344819 - RNA, 15 nt, Human herpesvirus 7
auagaaauuaugaaa

SEQ ID NO: 344820 - RNA, 19 nt, Human herpesvirus 7
auagacaaauuaaacaauc

SEQ ID NO: 344821 - RNA, 13 nt, Human herpesvirus 7
auagacacauuua

SEQ ID NO: 344822 - RNA, 17 nt, Human herpesvirus 7
auagacacauuuaucca

SEQ ID NO: 344823 - RNA, 21 nt, Human herpesvirus 7
auagacauuucguuauuccau

SEQ ID NO: 344824 - RNA, 19 nt, Human herpesvirus 7
auagauaaugaaguuuauc

SEQ ID NO: 344825 - RNA, 21 nt, Human herpesvirus 7
auagauacguuaguugcagcu

SEQ ID NO: 344826 - RNA, 19 nt, Human herpesvirus 7
auagauuacgcacaaauuu

SEQ ID NO: 344827 - RNA, 17 nt, Human herpesvirus 7
auagauuucagaauuuc

SEQ ID NO: 344828 - RNA, 19 nt, Human herpesvirus 7
auagcauuuguuacagcuu

SEQ ID NO: 344829 - RNA, 23 nt, Human herpesvirus 7
auagcuuaaaaaauacauugaau

SEQ ID NO: 344830 - RNA, 20 nt, Human herpesvirus 7
auagcuugacaccaacaucu

SEQ ID NO: 344831 - RNA, 21 nt, Human herpesvirus 7
auagcuugacaccaacaucug

SEQ ID NO: 344832 - RNA, 13 nt, Human herpesvirus 7
auagguugcuauc

SEQ ID NO: 344833 - RNA, 21 nt, Human herpesvirus 7
auagucuacuaaggugucuuc

SEQ ID NO: 344834 - RNA, 15 nt, Human herpesvirus 7
auaguucguaaaaag

SEQ ID NO: 344835 - RNA, 20 nt, Human herpesvirus 7
auaguugagcgcauggagca

SEQ ID NO: 344836 - RNA, 18 nt, Human herpesvirus 7
auaguuugguuauccaag

SEQ ID NO: 344837 - RNA, 21 nt, Human herpesvirus 7
auaguuuguuucaauaugcau

SEQ ID NO: 344838 - RNA, 23 nt, Human herpesvirus 7
auaguuuuacaaagaacauguag

SEQ ID NO: 344839 - RNA, 20 nt, Human herpesvirus 7
auauaaaaaauuugaaaaag

SEQ ID NO: 344840 - RNA, 17 nt, Human herpesvirus 7
auauacauaauucaaua

SEQ ID NO: 344841 - RNA, 16 nt, Human herpesvirus 7
auauaguuuguuucaa

SEQ ID NO: 344842 - RNA, 20 nt, Human herpesvirus 7
auauaugucauagugggaac

SEQ ID NO: 344843 - RNA, 13 nt, Human herpesvirus 7
auauauuaaucuu

SEQ ID NO: 344844 - RNA, 20 nt, Human herpesvirus 7
auauauuccaacucaaugaa

SEQ ID NO: 344845 - RNA, 14 nt, Human herpesvirus 7
auaucgauuuaaca

SEQ ID NO: 344846 - RNA, 18 nt, Human herpesvirus 7
auaucgcgauguuggcac

SEQ ID NO: 344847 - RNA, 22 nt, Human herpesvirus 7
auaucugacugguacaaggugu

SEQ ID NO: 344848 - RNA, 17 nt, Human herpesvirus 7
auaucuuaaaaacaaug

SEQ ID NO: 344849 - RNA, 19 nt, Human herpesvirus 7
auaucuuaauaaaguuuaa

SEQ ID NO: 344850 - RNA, 18 nt, Human herpesvirus 7
auaucuuuuucaaaugga

SEQ ID NO: 344851 - RNA, 21 nt, Human herpesvirus 7
auaugacauggccaucgcuuu

SEQ ID NO: 344852 - RNA, 15 nt, Human herpesvirus 7
auaugaugacaacaa

SEQ ID NO: 344853 - RNA, 13 nt, Human herpesvirus 7
auaugcaucaaaa

SEQ ID NO: 344854 - RNA, 20 nt, Human herpesvirus 7
auaugcaucaaaacauauca

SEQ ID NO: 344855 - RNA, 15 nt, Human herpesvirus 7
auaugcaugcaauuu

SEQ ID NO: 344856 - RNA, 21 nt, Human herpesvirus 7
auaugccaaugaacaaguuuc

SEQ ID NO: 344857 - RNA, 22 nt, Human herpesvirus 7
auaugcucuagaaaaucuacca

SEQ ID NO: 344858 - RNA, 16 nt, Human herpesvirus 7
auauggaagacgccaa

SEQ ID NO: 344859 - RNA, 19 nt, Human herpesvirus 7
auauggcaauaaaucugua

SEQ ID NO: 344860 - RNA, 13 nt, Human herpesvirus 7
auauguggcacau

SEQ ID NO: 344861 - RNA, 12 nt, Human herpesvirus 7
auauguugcuca

SEQ ID NO: 344862 - RNA, 15 nt, Human herpesvirus 7
auauuaaaaaccaca

SEQ ID NO: 344863 - RNA, 17 nt, Human herpesvirus 7
auauuaaaucauaccau

SEQ ID NO: 344864 - RNA, 19 nt, Human herpesvirus 7
auauuaaaucauaccauaa

SEQ ID NO: 344865 - RNA, 20 nt, Human herpesvirus 7
auauuaccucguauacauac

SEQ ID NO: 344866 - RNA, 18 nt, Human herpesvirus 7
auauuaguuuaacuuacu

SEQ ID NO: 344867 - RNA, 12 nt, Human herpesvirus 7
auauuaguuuca

SEQ ID NO: 344868 - RNA, 13 nt, Human herpesvirus 7
auauuaguuucaa

SEQ ID NO: 344869 - RNA, 16 nt, Human herpesvirus 7
auauuaguuucaacca

SEQ ID NO: 344870 - RNA, 15 nt, Human herpesvirus 7
auauuccaacucaau

SEQ ID NO: 344871 - RNA, 22 nt, Human herpesvirus 7
auauuccaacucaaugaaugca

SEQ ID NO: 344872 - RNA, 18 nt, Human herpesvirus 7
auauuccauuaagccaga

SEQ ID NO: 344873 - RNA, 23 nt, Human herpesvirus 7
auauuccauuaagccagauuuca

SEQ ID NO: 344874 - RNA, 14 nt, Human herpesvirus 7
auauuuaaguuccu

SEQ ID NO: 344875 - RNA, 20 nt, Human herpesvirus 7
auauuuagagucgucuugca

SEQ ID NO: 344876 - RNA, 14 nt, Human herpesvirus 7
auauuuaucugcau

SEQ ID NO: 344877 - RNA, 13 nt, Human herpesvirus 7
auauuuaugccuu

SEQ ID NO: 344878 - RNA, 19 nt, Human herpesvirus 7
auauuuccaacgcauucaa

SEQ ID NO: 344879 - RNA, 17 nt, Human herpesvirus 7
auauuugguacuguaga

SEQ ID NO: 344880 - RNA, 19 nt, Human herpesvirus 7
auauuuucuacaacuaaaa

SEQ ID NO: 344881 - RNA, 14 nt, Human herpesvirus 7
auauuuugcuagaa

SEQ ID NO: 344882 - RNA, 18 nt, Human herpesvirus 7
aucaaaaaacacguccaa

SEQ ID NO: 344883 - RNA, 17 nt, Human herpesvirus 7
aucaaaaacugaaccag

SEQ ID NO: 344884 - RNA, 13 nt, Human herpesvirus 7
aucaaaacauauc

SEQ ID NO: 344885 - RNA, 15 nt, Human herpesvirus 7
aucaaaacauaucag

SEQ ID NO: 344886 - RNA, 16 nt, Human herpesvirus 7
aucaaaaugagauuuu

SEQ ID NO: 344887 - RNA, 22 nt, Human herpesvirus 7
aucaacagccaucuaauugcag

SEQ ID NO: 344888 - RNA, 22 nt, Human herpesvirus 7
aucaagccacgaugacuuccaa

SEQ ID NO: 344889 - RNA, 23 nt, Human herpesvirus 7
aucaagccacgaugacuuccaag

SEQ ID NO: 344890 - RNA, 19 nt, Human herpesvirus 7
aucaauuuauccuaagcuu

SEQ ID NO: 344891 - RNA, 13 nt, Human herpesvirus 7
aucacaacauaua

SEQ ID NO: 344892 - RNA, 19 nt, Human herpesvirus 7
aucacaaguuaauuuugca

SEQ ID NO: 344893 - RNA, 22 nt, Human herpesvirus 7
aucacagcuagauugacuauga

SEQ ID NO: 344894 - RNA, 14 nt, Human herpesvirus 7
aucacgucaugcug

SEQ ID NO: 344895 - RNA, 16 nt, Human herpesvirus 7
aucacuuugcaucaaa

SEQ ID NO: 344896 - RNA, 23 nt, Human herpesvirus 7
aucagagaugaucuuacuuccua

SEQ ID NO: 344897 - RNA, 20 nt, Human herpesvirus 7
aucagauuugguucauuaca

SEQ ID NO: 344898 - RNA, 17 nt, Human herpesvirus 7
aucaggaaaaucuauca

SEQ ID NO: 344899 - RNA, 18 nt, Human herpesvirus 7
aucaggaaaaucuaucac

SEQ ID NO: 344900 - RNA, 18 nt, Human herpesvirus 7
aucaguguaacucugcca

SEQ ID NO: 344901 - RNA, 23 nt, Human herpesvirus 7
aucauagcaggaagcacaaauca

SEQ ID NO: 344902 - RNA, 15 nt, Human herpesvirus 7
aucauauuuuaguau

SEQ ID NO: 344903 - RNA, 13 nt, Human herpesvirus 7
aucaucaacauac

SEQ ID NO: 344904 - RNA, 20 nt, Human herpesvirus 7
aucaucuuaaaaguacaaau

SEQ ID NO: 344905 - RNA, 14 nt, Human herpesvirus 7
aucaugaaccaugu

SEQ ID NO: 344906 - RNA, 21 nt, Human herpesvirus 7
aucauuccguuuuuuugcauc

SEQ ID NO: 344907 - RNA, 13 nt, Human herpesvirus 7
aucauuuauuuga

SEQ ID NO: 344908 - RNA, 21 nt, Human herpesvirus 7
auccaaaaucagacaauuuca

SEQ ID NO: 344909 - RNA, 22 nt, Human herpesvirus 7
auccaacagaauacuacucaga

SEQ ID NO: 344910 - RNA, 20 nt, Human herpesvirus 7
auccaaguuuuaacaaucua

SEQ ID NO: 344911 - RNA, 15 nt, Human herpesvirus 7
auccaauaaugcauc

SEQ ID NO: 344912 - RNA, 16 nt, Human herpesvirus 7
auccagcaaagacuug

SEQ ID NO: 344913 - RNA, 15 nt, Human herpesvirus 7
auccaguacuugcau

SEQ ID NO: 344914 - RNA, 14 nt, Human herpesvirus 7
auccaucuguaaca

SEQ ID NO: 344915 - RNA, 15 nt, Human herpesvirus 7
auccauuugugaugu

SEQ ID NO: 344916 - RNA, 14 nt, Human herpesvirus 7
aucccagaaauuuc

SEQ ID NO: 344917 - RNA, 19 nt, Human herpesvirus 7
aucccuagaagaugacuca

SEQ ID NO: 344918 - RNA, 15 nt, Human herpesvirus 7
aucccugcugauaca

SEQ ID NO: 344919 - RNA, 23 nt, Human herpesvirus 7
auccgucuguguuauacuuauua

SEQ ID NO: 344920 - RNA, 12 nt, Human herpesvirus 7
auccguggaauc

SEQ ID NO: 344921 - RNA, 15 nt, Human herpesvirus 7
auccguuaauggaua

SEQ ID NO: 344922 - RNA, 19 nt, Human herpesvirus 7
auccuagaauggcaccccu

SEQ ID NO: 344923 - RNA, 17 nt, Human herpesvirus 7
auccugcuaaggcgaaa

SEQ ID NO: 344924 - RNA, 23 nt, Human herpesvirus 7
auccugcuaaggcgaaaaacacu

SEQ ID NO: 344925 - RNA, 13 nt, Human herpesvirus 7
auccugcuauuca

SEQ ID NO: 344926 - RNA, 15 nt, Human herpesvirus 7
augcuuccuaaaaaa

SEQ ID NO: 344927 - RNA, 15 nt, Human herpesvirus 7
augcuuuaacuggaa

SEQ ID NO: 344928 - RNA, 22 nt, Human herpesvirus 7
augcuuucacuacuacaugaau

SEQ ID NO: 344929 - RNA, 17 nt, Human herpesvirus 7
augcuuugucuuacguc

SEQ ID NO: 344930 - RNA, 15 nt, Human herpesvirus 7
augcuuuguugucau

SEQ ID NO: 344931 - RNA, 17 nt, Human herpesvirus 7
augcuuuguugucauca

SEQ ID NO: 344932 - RNA, 23 nt, Human herpesvirus 7
auggaaaauggagcauuauugga

SEQ ID NO: 344933 - RNA, 21 nt, Human herpesvirus 7
auggaaaccuggagaagacaa

SEQ ID NO: 344934 - RNA, 20 nt, Human herpesvirus 7
auggaaagcaaaagccacag

SEQ ID NO: 344935 - RNA, 13 nt, Human herpesvirus 7
auggauacaagga

SEQ ID NO: 344936 - RNA, 16 nt, Human herpesvirus 7
auggauuuuaauacaa

SEQ ID NO: 344937 - RNA, 22 nt, Human herpesvirus 7
auggauuuuaauacaacauaua

SEQ ID NO: 344938 - RNA, 22 nt, Human herpesvirus 7
auggcacaauuguaaauggcaa

SEQ ID NO: 344939 - RNA, 17 nt, Human herpesvirus 7
auggccagugaaugauu

SEQ ID NO: 344940 - RNA, 19 nt, Human herpesvirus 7
auggcgaguuacauuucac

SEQ ID NO: 344941 - RNA, 18 nt, Human herpesvirus 7
auggguucacacccuguc

SEQ ID NO: 344942 - RNA, 20 nt, Human herpesvirus 7
augguaccuuagaaucacaa

SEQ ID NO: 344943 - RNA, 22 nt, Human herpesvirus 7
augguauuuguuagaauaucug

SEQ ID NO: 344944 - RNA, 19 nt, Human herpesvirus 7
augguucuuauaacaaagu

SEQ ID NO: 344945 - RNA, 12 nt, Human herpesvirus 7
augguugugcaa

SEQ ID NO: 344946 - RNA, 12 nt, Human herpesvirus 7
auguaaaccaaa

SEQ ID NO: 344947 - RNA, 11 nt, Human herpesvirus 7
auguaauuccg

SEQ ID NO: 344948 - RNA, 18 nt, Human herpesvirus 7
auguacaauuugcauaau

SEQ ID NO: 344949 - RNA, 19 nt, Human herpesvirus 7
auguacacagcuggaguua

SEQ ID NO: 344950 - RNA, 15 nt, Human herpesvirus 7
auguacauaacucua

SEQ ID NO: 344951 - RNA, 17 nt, Human herpesvirus 7
auguacauaacucuauc

SEQ ID NO: 344952 - RNA, 23 nt, Human herpesvirus 7
auguacauaacucuaucuccuau

SEQ ID NO: 344953 - RNA, 19 nt, Human herpesvirus 7
auguacucugauugacucg

SEQ ID NO: 344954 - RNA, 13 nt, Human herpesvirus 7
auguaggugcugc

SEQ ID NO: 344955 - RNA, 14 nt, Human herpesvirus 7
auguaggugcugca

SEQ ID NO: 344956 - RNA, 12 nt, Human herpesvirus 7
auguauaaucaa

SEQ ID NO: 344957 - RNA, 18 nt, Human herpesvirus 7
auguauaaucaagucuua

SEQ ID NO: 344958 - RNA, 15 nt, Human herpesvirus 7
auguauuuuacugga

SEQ ID NO: 344959 - RNA, 16 nt, Human herpesvirus 7
auguauuuuacuggau

SEQ ID NO: 344960 - RNA, 18 nt, Human herpesvirus 7
augucaaauguuccuuau

SEQ ID NO: 344961 - RNA, 14 nt, Human herpesvirus 7
augucaauaaucaa

SEQ ID NO: 344962 - RNA, 18 nt, Human herpesvirus 7
augucaaugaguguuuau

SEQ ID NO: 344963 - RNA, 14 nt, Human herpesvirus 7
auguccaaucaaaa

SEQ ID NO: 344964 - RNA, 16 nt, Human herpesvirus 7
auguccagauccaucu

SEQ ID NO: 344965 - RNA, 15 nt, Human herpesvirus 7
auguccauaaaacau

SEQ ID NO: 344966 - RNA, 14 nt, Human herpesvirus 7
auguccgcuuacaa

SEQ ID NO: 344967 - RNA, 21 nt, Human herpesvirus 7
augucucacgagaaagggcau

SEQ ID NO: 344968 - RNA, 15 nt, Human herpesvirus 7
augucugauucuuau

SEQ ID NO: 344969 - RNA, 21 nt, Human herpesvirus 7
augucuuaauugccgauuccu

SEQ ID NO: 344970 - RNA, 13 nt, Human herpesvirus 7
augucuuuugaua

SEQ ID NO: 344971 - RNA, 21 nt, Human herpesvirus 7
augucuuuugauaagacugaa

SEQ ID NO: 344972 - RNA, 23 nt, Human herpesvirus 7
augugaaaagaaugaacaccgca

SEQ ID NO: 344973 - RNA, 14 nt, Human herpesvirus 7
augugcaacauaac

SEQ ID NO: 344974 - RNA, 15 nt, Human herpesvirus 7
augugcgaccuauua

SEQ ID NO: 344975 - RNA, 22 nt, Human herpesvirus 7
augugcugaaugugcgaccuau

SEQ ID NO: 344976 - RNA, 22 nt, Human herpesvirus 7
augugcuuauuuauauauggca

SEQ ID NO: 344977 - RNA, 18 nt, Human herpesvirus 7
augugcuuuuuucuggua

SEQ ID NO: 344978 - RNA, 19 nt, Human herpesvirus 7
auguggccgaaauucgcaa

SEQ ID NO: 344979 - RNA, 20 nt, Human herpesvirus 7
auguggugcguacacuguaa

SEQ ID NO: 344980 - RNA, 18 nt, Human herpesvirus 7
auguggugcuuacgugau

SEQ ID NO: 344981 - RNA, 16 nt, Human herpesvirus 7
auguguacuaaagcca

SEQ ID NO: 344982 - RNA, 17 nt, Human herpesvirus 7
auguguacuaaagccaa

SEQ ID NO: 344983 - RNA, 18 nt, Human herpesvirus 7
auguguagauuuggauga

SEQ ID NO: 344984 - RNA, 13 nt, Human herpesvirus 7
augugugugguaa

SEQ ID NO: 344985 - RNA, 16 nt, Human herpesvirus 7
auguuaaagaacaaga

SEQ ID NO: 344986 - RNA, 17 nt, Human herpesvirus 7
auguuaaaggaucaaaa

SEQ ID NO: 344987 - RNA, 21 nt, Human herpesvirus 7
auguuaaccaaaaugugggau

SEQ ID NO: 344988 - RNA, 17 nt, Human herpesvirus 7
auguuauuuuucaugcc

SEQ ID NO: 344989 - RNA, 23 nt, Human herpesvirus 7
auguuccuuauauuaaaaaccac

SEQ ID NO: 344990 - RNA, 17 nt, Human herpesvirus 7
auguucgcaaauguaca

SEQ ID NO: 344991 - RNA, 20 nt, Human herpesvirus 7
auguucuaucaagauaagca

SEQ ID NO: 344992 - RNA, 21 nt, Human herpesvirus 7
auguucuaucaagauaagcaa

SEQ ID NO: 344993 - RNA, 23 nt, Human herpesvirus 7
auguucuauucucauagauuuca

SEQ ID NO: 344994 - RNA, 17 nt, Human herpesvirus 7
auguugacgggaaaaag

SEQ ID NO: 344995 - RNA, 23 nt, Human herpesvirus 7
auguugauucucucucuauuaca

SEQ ID NO: 344996 - RNA, 17 nt, Human herpesvirus 7
auguugcucauguugac

SEQ ID NO: 344997 - RNA, 21 nt, Human herpesvirus 7
auguuucuggaucugccucug

SEQ ID NO: 344998 - RNA, 21 nt, Human herpesvirus 7
auguuuggcaacaaacaaaua

SEQ ID NO: 344999 - RNA, 20 nt, Human herpesvirus 7
auguuuggcaacucuuccuu

SEQ ID NO: 345000 - RNA, 19 nt, Human herpesvirus 7
auguuuuaauugagauuau

SEQ ID NO: 345001 - RNA, 17 nt, Human herpesvirus 7
auguuuuaugacucaga

SEQ ID NO: 345002 - RNA, 16 nt, Human herpesvirus 7
auguuuugcaagcaca

SEQ ID NO: 345003 - RNA, 22 nt, Human herpesvirus 7
auguuuuugcuagaaaccaagu

SEQ ID NO: 345004 - RNA, 17 nt, Human herpesvirus 7
auguuuuuuucauacau

SEQ ID NO: 345005 - RNA, 23 nt, Human herpesvirus 7
auuaaaaaaaccaggaacagauu

SEQ ID NO: 345006 - RNA, 12 nt, Human herpesvirus 7
auuaaaaaccac

SEQ ID NO: 345007 - RNA, 14 nt, Human herpesvirus 7
auuaaaacaucucu

SEQ ID NO: 345008 - RNA, 23 nt, Human herpesvirus 7
auuaaacaaucuggacauuucaa

SEQ ID NO: 345009 - RNA, 17 nt, Human herpesvirus 7
auuaaauacuugcaaug

SEQ ID NO: 345010 - RNA, 22 nt, Human herpesvirus 7
auuaaauacuugcaaugcaaac

SEQ ID NO: 345011 - RNA, 18 nt, Human herpesvirus 7
auuaaguguuugcucuga

SEQ ID NO: 345012 - RNA, 15 nt, Human herpesvirus 7
auuaaucaaacaauu

SEQ ID NO: 345013 - RNA, 12 nt, Human herpesvirus 7
auuaaugcauug

SEQ ID NO: 345014 - RNA, 22 nt, Human herpesvirus 7
auuaauucuuucaguucccaua

SEQ ID NO: 345015 - RNA, 22 nt, Human herpesvirus 7
auuacacaggaauugcugucua

SEQ ID NO: 345016 - RNA, 23 nt, Human herpesvirus 7
auuacacaggaauugcugucuau

SEQ ID NO: 345017 - RNA, 12 nt, Human herpesvirus 7
auuacauugcag

SEQ ID NO: 345018 - RNA, 21 nt, Human herpesvirus 7
auuacauuugcuuuaccccaa

SEQ ID NO: 345019 - RNA, 13 nt, Human herpesvirus 7
auuacgaacugau

SEQ ID NO: 345020 - RNA, 13 nt, Human herpesvirus 7
auuacgagauauu

SEQ ID NO: 345021 - RNA, 17 nt, Human herpesvirus 7
auuacuugucuuaccua

SEQ ID NO: 345022 - RNA, 14 nt, Human herpesvirus 7
auuagaaacaacac

SEQ ID NO: 345023 - RNA, 11 nt, Human herpesvirus 7
auuagaaucag

SEQ ID NO: 345024 - RNA, 11 nt, Human herpesvirus 7
auuagauucca

SEQ ID NO: 345025 - RNA, 17 nt, Human herpesvirus 7
auuagcgcgugaacaaa

SEQ ID NO: 345026 - RNA, 19 nt, Human herpesvirus 7
auuagcgcgugaacaaaua

SEQ ID NO: 345027 - RNA, 21 nt, Human herpesvirus 7
auuaguuuaacuuacuguuua

SEQ ID NO: 345028 - RNA, 15 nt, Human herpesvirus 7
auuauacuagcagau

SEQ ID NO: 345029 - RNA, 20 nt, Human herpesvirus 7
auuauacuagcagaucucga

SEQ ID NO: 345030 - RNA, 21 nt, Human herpesvirus 7
auuauauccaauaaugcauca

SEQ ID NO: 345031 - RNA, 18 nt, Human herpesvirus 7
auuauauucccaucguga

SEQ ID NO: 345032 - RNA, 21 nt, Human herpesvirus 7
auuauauucccaucgugaaua

SEQ ID NO: 345033 - RNA, 21 nt, Human herpesvirus 7
auuaucaucaggaaucuuuuu

SEQ ID NO: 345034 - RNA, 20 nt, Human herpesvirus 7
auuaucgcguuuucaugcuc

SEQ ID NO: 345035 - RNA, 22 nt, Human herpesvirus 7
auuaugauguuuccgcauaaaa

SEQ ID NO: 345036 - RNA, 19 nt, Human herpesvirus 7
auuaugguucuuauaacaa

SEQ ID NO: 345037 - RNA, 13 nt, Human herpesvirus 7
auuauuuguucaa

SEQ ID NO: 345038 - RNA, 18 nt, Human herpesvirus 7
auucaaaaacuauccaga

SEQ ID NO: 345039 - RNA, 15 nt, Human herpesvirus 7
auucaaaagcuaaaa

SEQ ID NO: 345040 - RNA, 23 nt, Human herpesvirus 7
auuucuauuagauaaugacaaac

SEQ ID NO: 345041 - RNA, 18 nt, Human herpesvirus 7
auuucuauucaguuucuu

SEQ ID NO: 345042 - RNA, 21 nt, Human herpesvirus 7
auuucuauugaauguggaauu

SEQ ID NO: 345043 - RNA, 15 nt, Human herpesvirus 7
auuucuggcaacagu

SEQ ID NO: 345044 - RNA, 16 nt, Human herpesvirus 7
auuucugucaucuuau

SEQ ID NO: 345045 - RNA, 20 nt, Human herpesvirus 7
auuucuuauuggagauguca

SEQ ID NO: 345046 - RNA, 22 nt, Human herpesvirus 7
auuucuuuaaaugaaguuuguu

SEQ ID NO: 345047 - RNA, 14 nt, Human herpesvirus 7
auuugaacggaaua

SEQ ID NO: 345048 - RNA, 14 nt, Human herpesvirus 7
auuugacaaaacaa

SEQ ID NO: 345049 - RNA, 13 nt, Human herpesvirus 7
auuugauuccauc

SEQ ID NO: 345050 - RNA, 11 nt, Human herpesvirus 7
auuugcauaaa

SEQ ID NO: 345051 - RNA, 23 nt, Human herpesvirus 7
auuuggcgccaaaaaaacacagu

SEQ ID NO: 345052 - RNA, 18 nt, Human herpesvirus 7
auuuggugaagauucuua

SEQ ID NO: 345053 - RNA, 17 nt, Human herpesvirus 7
auuuguguguaugugca

SEQ ID NO: 345054 - RNA, 18 nt, Human herpesvirus 7
auuuuaaaagguugacau

SEQ ID NO: 345055 - RNA, 19 nt, Human herpesvirus 7
auuuuaaaagguugacauc

SEQ ID NO: 345056 - RNA, 17 nt, Human herpesvirus 7
auuuuaauaugugaaaa

SEQ ID NO: 345057 - RNA, 18 nt, Human herpesvirus 7
auuuuaauaugugaaaau

SEQ ID NO: 345058 - RNA, 19 nt, Human herpesvirus 7
auuuuaauaugugaaaaua

SEQ ID NO: 345059 - RNA, 14 nt, Human herpesvirus 7
auuuuaaugugcuu

SEQ ID NO: 345060 - RNA, 19 nt, Human herpesvirus 7
auuuuacaacaauaaaaga

SEQ ID NO: 345061 - RNA, 13 nt, Human herpesvirus 7
auuuuacaaugca

SEQ ID NO: 345062 - RNA, 13 nt, Human herpesvirus 7
auuuuacauauua

SEQ ID NO: 345063 - RNA, 23 nt, Human herpesvirus 7
auuuuaccaaauauguggcacau

SEQ ID NO: 345064 - RNA, 15 nt, Human herpesvirus 7
auuuuagacgcaccu

SEQ ID NO: 345065 - RNA, 22 nt, Human herpesvirus 7
auuuuauccguuaauggauaac

SEQ ID NO: 345066 - RNA, 15 nt, Human herpesvirus 7
auuuuaucgaugaga

SEQ ID NO: 345067 - RNA, 19 nt, Human herpesvirus 7
auuuuauucaaagcuucua

SEQ ID NO: 345068 - RNA, 15 nt, Human herpesvirus 7
auuuucaaacaugau

SEQ ID NO: 345069 - RNA, 15 nt, Human herpesvirus 7
auuuucaaguuucuu

SEQ ID NO: 345070 - RNA, 19 nt, Human herpesvirus 7
auuuucaggaaaaucacag

SEQ ID NO: 345071 - RNA, 21 nt, Human herpesvirus 7
auuuucgacagaaacauguau

SEQ ID NO: 345072 - RNA, 14 nt, Human herpesvirus 7
auuuucuacaacua

SEQ ID NO: 345073 - RNA, 15 nt, Human herpesvirus 7
auuuucuuagcuuuc

SEQ ID NO: 345074 - RNA, 16 nt, Human herpesvirus 7
auuuucuuagcuuuca

SEQ ID NO: 345075 - RNA, 18 nt, Human herpesvirus 7
auuuucuuagcuuucaug

SEQ ID NO: 345076 - RNA, 19 nt, Human herpesvirus 7
auuuugaauguuuacaugu

SEQ ID NO: 345077 - RNA, 15 nt, Human herpesvirus 7
auuuugaucuuguca

SEQ ID NO: 345078 - RNA, 20 nt, Human herpesvirus 7
auuuugauuggaaaucaaaa

SEQ ID NO: 345079 - RNA, 23 nt, Human herpesvirus 7
auuuuggcgaaacaauacaugaa

SEQ ID NO: 345080 - RNA, 22 nt, Human herpesvirus 7
auuuuggcgcucucuggccaga

SEQ ID NO: 345081 - RNA, 19 nt, Human herpesvirus 7
auuuugugacccugucaca

SEQ ID NO: 345082 - RNA, 23 nt, Human herpesvirus 7
auuuuguuuugcauauuuugcua

SEQ ID NO: 345083 - RNA, 15 nt, Human herpesvirus 7
auuuuuaaaacaaga

SEQ ID NO: 345084 - RNA, 19 nt, Human herpesvirus 7
auuuuuaaaacaagacaga

SEQ ID NO: 345085 - RNA, 13 nt, Human herpesvirus 7
auuuuuaaacuug

SEQ ID NO: 345086 - RNA, 18 nt, Human herpesvirus 7
auuuuuaaguuguucuca

SEQ ID NO: 345087 - RNA, 22 nt, Human herpesvirus 7
auuuuuaaguuguucucaauag

SEQ ID NO: 345088 - RNA, 20 nt, Human herpesvirus 7
auuuuuacucaauauaaaga

SEQ ID NO: 345089 - RNA, 22 nt, Human herpesvirus 7
auuuuucccaaaauagcacaca

SEQ ID NO: 345090 - RNA, 15 nt, Human herpesvirus 7
auuuuucgcugaaga

SEQ ID NO: 345091 - RNA, 13 nt, Human herpesvirus 7
auuuuugacaggu

SEQ ID NO: 345092 - RNA, 19 nt, Human herpesvirus 7
auuuuugcuacuauacucu

SEQ ID NO: 345093 - RNA, 19 nt, Human herpesvirus 7
auuuuuggcuaacugagaa

SEQ ID NO: 345094 - RNA, 18 nt, Human herpesvirus 7
auuuuuuaguauucucau

SEQ ID NO: 345095 - RNA, 14 nt, Human herpesvirus 7
auuuuuuauuccca

SEQ ID NO: 345096 - RNA, 18 nt, Human herpesvirus 7
auuuuuuccaugucacau

SEQ ID NO: 345097 - RNA, 15 nt, Human herpesvirus 7
auuuuuuguacaggc

SEQ ID NO: 345098 - RNA, 21 nt, Human herpesvirus 7
auuuuuuuaaacuaaguugaa

SEQ ID NO: 345099 - RNA, 12 nt, Human herpesvirus 7
caaaaaaaagcu

SEQ ID NO: 345100 - RNA, 16 nt, Human herpesvirus 7
caaaaaacacguccaa

SEQ ID NO: 345101 - RNA, 22 nt, Human herpesvirus 7
caaaaaccgggcuuuuuuauaa

SEQ ID NO: 345102 - RNA, 13 nt, Human herpesvirus 7
caaaaaccugaaa

SEQ ID NO: 345103 - RNA, 22 nt, Human herpesvirus 7
caaaaaggauuuucgauuccau

SEQ ID NO: 345104 - RNA, 23 nt, Human herpesvirus 7
caaaaaggauuuucgauuccauu

SEQ ID NO: 345105 - RNA, 22 nt, Human herpesvirus 7
caaaaauaaguccgugugcaaa

SEQ ID NO: 345106 - RNA, 14 nt, Human herpesvirus 7
caaaacagaacuuu

SEQ ID NO: 345107 - RNA, 12 nt, Human herpesvirus 7
caaaacauauca

SEQ ID NO: 345108 - RNA, 16 nt, Human herpesvirus 7
caaaacauaucagauu

SEQ ID NO: 345109 - RNA, 12 nt, Human herpesvirus 7
caaaagccacag

SEQ ID NO: 345110 - RNA, 13 nt, Human herpesvirus 7
caaaagccacaga

SEQ ID NO: 345111 - RNA, 14 nt, Human herpesvirus 7
caaaagccacugau

SEQ ID NO: 345112 - RNA, 14 nt, Human herpesvirus 7
caaaauaaagccag

SEQ ID NO: 345113 - RNA, 21 nt, Human herpesvirus 7
caaaauacaauagugaacaug

SEQ ID NO: 345114 - RNA, 17 nt, Human herpesvirus 7
caaaaucuauauuugau

SEQ ID NO: 345115 - RNA, 14 nt, Human herpesvirus 7
caaaauguauacaa

SEQ ID NO: 345116 - RNA, 17 nt, Human herpesvirus 7
caaaauguauucaaugc

SEQ ID NO: 345117 - RNA, 16 nt, Human herpesvirus 7
caaaauuccaaaaugu

SEQ ID NO: 345118 - RNA, 13 nt, Human herpesvirus 7
caaaauuccauuc

SEQ ID NO: 345119 - RNA, 13 nt, Human herpesvirus 7
caaaauucugcuu

SEQ ID NO: 345120 - RNA, 18 nt, Human herpesvirus 7
caaaauucugcuugucuc

SEQ ID NO: 345121 - RNA, 21 nt, Human herpesvirus 7
caaacaaauaauucaaaaacu

SEQ ID NO: 345122 - RNA, 20 nt, Human herpesvirus 7
caaacaauuuuuuguucaaa

SEQ ID NO: 345123 - RNA, 22 nt, Human herpesvirus 7
caaacagaagcugacuuuguca

SEQ ID NO: 345124 - RNA, 13 nt, Human herpesvirus 7
caaacagucugaa

SEQ ID NO: 345125 - RNA, 15 nt, Human herpesvirus 7
caaacauguaaucaa

SEQ ID NO: 345126 - RNA, 22 nt, Human herpesvirus 7
caaacgcugacagucauuuaca

SEQ ID NO: 345127 - RNA, 21 nt, Human herpesvirus 7
caaacuauauugaauuaugua

SEQ ID NO: 345128 - RNA, 11 nt, Human herpesvirus 7
caaacuauggu

SEQ ID NO: 345129 - RNA, 17 nt, Human herpesvirus 7
caaacucgaggcuuaaa

SEQ ID NO: 345130 - RNA, 21 nt, Human herpesvirus 7
caaacuuugcaacaaaaucua

SEQ ID NO: 345131 - RNA, 18 nt, Human herpesvirus 7
caaagaaaaaacuaacuu

SEQ ID NO: 345132 - RNA, 19 nt, Human herpesvirus 7
caaagaaaaaaggaugaaa

SEQ ID NO: 345133 - RNA, 13 nt, Human herpesvirus 7
caaagacuauaaa

SEQ ID NO: 345134 - RNA, 15 nt, Human herpesvirus 7
caaagauugaagcac

SEQ ID NO: 345135 - RNA, 16 nt, Human herpesvirus 7
caaagauuuuguucua

SEQ ID NO: 345136 - RNA, 21 nt, Human herpesvirus 7
caaagcauacuuuaaaacuuu

SEQ ID NO: 345137 - RNA, 17 nt, Human herpesvirus 7
caaaggaucgaucucug

SEQ ID NO: 345138 - RNA, 13 nt, Human herpesvirus 7
caaagugaugaaa

SEQ ID NO: 345139 - RNA, 19 nt, Human herpesvirus 7
caaauacaaccacaaccaa

SEQ ID NO: 345140 - RNA, 19 nt, Human herpesvirus 7
caaauacuguccaacacaa

SEQ ID NO: 345141 - RNA, 18 nt, Human herpesvirus 7
caaauauacgaaugccau

SEQ ID NO: 345142 - RNA, 16 nt, Human herpesvirus 7
caaaucaaaguuuuaa

SEQ ID NO: 345143 - RNA, 19 nt, Human herpesvirus 7
caaaucugauaaauuacac

SEQ ID NO: 345144 - RNA, 23 nt, Human herpesvirus 7
caaauggauuuuaauacaacaua

SEQ ID NO: 345145 - RNA, 17 nt, Human herpesvirus 7
caaauguacaauuugca

SEQ ID NO: 345146 - RNA, 20 nt, Human herpesvirus 7
caaaugugguaaauuugcuu

SEQ ID NO: 345147 - RNA, 14 nt, Human herpesvirus 7
caaauuaaauacuu

SEQ ID NO: 345148 - RNA, 17 nt, Human herpesvirus 7
caaauuaaauacuugca

SEQ ID NO: 345149 - RNA, 20 nt, Human herpesvirus 7
caaauuaaauacuugcaaug

SEQ ID NO: 345150 - RNA, 22 nt, Human herpesvirus 7
caaauuaugcguuaaugucucu

SEQ ID NO: 345151 - RNA, 23 nt, Human herpesvirus 7
caaauuaugcguuaaugucucug

SEQ ID NO: 345152 - RNA, 15 nt, Human herpesvirus 7
caaauucaaccacag

SEQ ID NO: 345153 - RNA, 22 nt, Human herpesvirus 7
caaauuccugcuugcacaaaga

SEQ ID NO: 345154 - RNA, 18 nt, Human herpesvirus 7
cacacuuauuccagauau

SEQ ID NO: 345155 - RNA, 22 nt, Human herpesvirus 7
cacacuuugaaaacgaaaggaa

SEQ ID NO: 345156 - RNA, 18 nt, Human herpesvirus 7
cacagaaacgucaggaaa

SEQ ID NO: 345157 - RNA, 13 nt, Human herpesvirus 7
cacagacacacca

SEQ ID NO: 345158 - RNA, 22 nt, Human herpesvirus 7
cacagacacaccauuguucaac

SEQ ID NO: 345159 - RNA, 16 nt, Human herpesvirus 7
cacagauauucuaaca

SEQ ID NO: 345160 - RNA, 23 nt, Human herpesvirus 7
cacagauauucuaacaaauacca

SEQ ID NO: 345161 - RNA, 21 nt, Human herpesvirus 7
cacagcaauuuuaacgauucc

SEQ ID NO: 345162 - RNA, 20 nt, Human herpesvirus 7
cacagcuagauugacuauga

SEQ ID NO: 345163 - RNA, 18 nt, Human herpesvirus 7
cacagcuuauuauauaug

SEQ ID NO: 345164 - RNA, 19 nt, Human herpesvirus 7
cacagggacguuucuagca

SEQ ID NO: 345165 - RNA, 21 nt, Human herpesvirus 7
cacagggacguuucuagcaaa

SEQ ID NO: 345166 - RNA, 21 nt, Human herpesvirus 7
cacauaaguugacaaugucaa

SEQ ID NO: 345167 - RNA, 17 nt, Human herpesvirus 7
cacauacucuagaacaa

SEQ ID NO: 345168 - RNA, 20 nt, Human herpesvirus 7
cacauuuaaaaaaaaaacca

SEQ ID NO: 345169 - RNA, 15 nt, Human herpesvirus 7
cacauuuaguacuuu

SEQ ID NO: 345170 - RNA, 17 nt, Human herpesvirus 7
cacauuuauccaucaaa

SEQ ID NO: 345171 - RNA, 13 nt, Human herpesvirus 7
cacauuuuugcua

SEQ ID NO: 345172 - RNA, 24 nt, Human herpesvirus 7
caccaaaaaauaaaaacaagcuua

SEQ ID NO: 345173 - RNA, 21 nt, Human herpesvirus 7
caccaagggcguagaggcaga

SEQ ID NO: 345174 - RNA, 17 nt, Human herpesvirus 7
caccagucucugaauua

SEQ ID NO: 345175 - RNA, 20 nt, Human herpesvirus 7
cacccagucgucugcucaau

SEQ ID NO: 345176 - RNA, 14 nt, Human herpesvirus 7
cacccuaauugcca

SEQ ID NO: 345177 - RNA, 20 nt, Human herpesvirus 7
cacccuuuguuugagacaau

SEQ ID NO: 345178 - RNA, 13 nt, Human herpesvirus 7
caccgagaucauc

SEQ ID NO: 345179 - RNA, 19 nt, Human herpesvirus 7
caccgcuacacgagacaaa

SEQ ID NO: 345180 - RNA, 14 nt, Human herpesvirus 7
caccgucauuuaau

SEQ ID NO: 345181 - RNA, 19 nt, Human herpesvirus 7
caccguuuugaaaagucau

SEQ ID NO: 345182 - RNA, 22 nt, Human herpesvirus 7
caccguuuugaaaagucauuau

SEQ ID NO: 345183 - RNA, 14 nt, Human herpesvirus 7
caccuuacuuuuaa

SEQ ID NO: 345184 - RNA, 17 nt, Human herpesvirus 7
cacgacacugaauguca

SEQ ID NO: 345185 - RNA, 18 nt, Human herpesvirus 7
cacgcauauguacgugug

SEQ ID NO: 345186 - RNA, 18 nt, Human herpesvirus 7
cacggaguuuuuacucug

SEQ ID NO: 345187 - RNA, 14 nt, Human herpesvirus 7
cacguacaauauua

SEQ ID NO: 345188 - RNA, 12 nt, Human herpesvirus 7
cacguagacuga

SEQ ID NO: 345189 - RNA, 15 nt, Human herpesvirus 7
cacguccaagaaaua

SEQ ID NO: 345190 - RNA, 17 nt, Human herpesvirus 7
cacgugucgcagccaug

SEQ ID NO: 345191 - RNA, 13 nt, Human herpesvirus 7
cacgugugacugu

SEQ ID NO: 345192 - RNA, 21 nt, Human herpesvirus 7
cacuaacauuuuaauauguga

SEQ ID NO: 345193 - RNA, 19 nt, Human herpesvirus 7
cacuaaugccgucauccca

SEQ ID NO: 345194 - RNA, 12 nt, Human herpesvirus 7
cacuagcuuucu

SEQ ID NO: 345195 - RNA, 16 nt, Human herpesvirus 7
cacuaugccacaaaaa

SEQ ID NO: 345196 - RNA, 21 nt, Human herpesvirus 7
cacuaugccacaaaaaacuuu

SEQ ID NO: 345197 - RNA, 17 nt, Human herpesvirus 7
cacuauuuuauugcgaa

SEQ ID NO: 345198 - RNA, 20 nt, Human herpesvirus 7
cacucauuagaaacaauccc

SEQ ID NO: 345199 - RNA, 15 nt, Human herpesvirus 7
cacucuccugaaaua

SEQ ID NO: 345200 - RNA, 20 nt, Human herpesvirus 7
cacugauuucuacaauauga

SEQ ID NO: 345201 - RNA, 22 nt, Human herpesvirus 7
cacugauuuuuaaacuugugaa

SEQ ID NO: 345202 - RNA, 17 nt, Human herpesvirus 7
cacugugucaucacaga

SEQ ID NO: 345203 - RNA, 12 nt, Human herpesvirus 7
cacuuauuccag

SEQ ID NO: 345204 - RNA, 20 nt, Human herpesvirus 7
cacuuauuccagauaugaca

SEQ ID NO: 345205 - RNA, 16 nt, Human herpesvirus 7
cacuugcuagcuguga

SEQ ID NO: 345206 - RNA, 22 nt, Human herpesvirus 7
cacuuuuugaaaauuucuauca

SEQ ID NO: 345207 - RNA, 16 nt, Human herpesvirus 7
cagaaaaauccaaaau

SEQ ID NO: 345208 - RNA, 21 nt, Human herpesvirus 7
cagaaaacaacacaaagccaa

SEQ ID NO: 345209 - RNA, 22 nt, Human herpesvirus 7
cagaaaaucucgaacaguccca

SEQ ID NO: 345210 - RNA, 20 nt, Human herpesvirus 7
cagaaauuauacuagcagau

SEQ ID NO: 345211 - RNA, 20 nt, Human herpesvirus 7
cagaaauuguuccugugugc

SEQ ID NO: 345212 - RNA, 18 nt, Human herpesvirus 7
cagaaauuuuuaaagaga

SEQ ID NO: 345213 - RNA, 23 nt, Human herpesvirus 7
cagaacauuuauuuucuuaacaa

SEQ ID NO: 345214 - RNA, 23 nt, Human herpesvirus 7
cagaacuuuuaaaaaagaacuua

SEQ ID NO: 345215 - RNA, 15 nt, Human herpesvirus 7
cagaagaaacuugaa

SEQ ID NO: 345216 - RNA, 23 nt, Human herpesvirus 7
cagaagauuuguuccaaacucga

SEQ ID NO: 345217 - RNA, 18 nt, Human herpesvirus 7
cagaaguaacgcagacua

SEQ ID NO: 345218 - RNA, 17 nt, Human herpesvirus 7
cagaaguuucaauuggu

SEQ ID NO: 345219 - RNA, 19 nt, Human herpesvirus 7
cagaauacuacucagaaga

SEQ ID NO: 345220 - RNA, 17 nt, Human herpesvirus 7
cagaaugauaauuucua

SEQ ID NO: 345221 - RNA, 18 nt, Human herpesvirus 7
cagaaugccagaaauuaa

SEQ ID NO: 345222 - RNA, 19 nt, Human herpesvirus 7
cagaauguacacagcugga

SEQ ID NO: 345223 - RNA, 15 nt, Human herpesvirus 7
cagaauuuccagaag

SEQ ID NO: 345224 - RNA, 20 nt, Human herpesvirus 7
cagaauuuucaagaucgauu

SEQ ID NO: 345225 - RNA, 14 nt, Human herpesvirus 7
cagacacaauggaa

SEQ ID NO: 345226 - RNA, 23 nt, Human herpesvirus 7
cagacaccgucauuucgcaguua

SEQ ID NO: 345227 - RNA, 14 nt, Human herpesvirus 7
cagacagcuguaua

SEQ ID NO: 345228 - RNA, 18 nt, Human herpesvirus 7
cagacagcuguauaucua

SEQ ID NO: 345229 - RNA, 15 nt, Human herpesvirus 7
cagaccuccuauguc

SEQ ID NO: 345230 - RNA, 15 nt, Human herpesvirus 7
cagacuaaauaugga

SEQ ID NO: 345231 - RNA, 23 nt, Human herpesvirus 7
cagagaauauguuaucauuuauc

SEQ ID NO: 345232 - RNA, 22 nt, Human herpesvirus 7
cagagaauuucuuuguuugcua

SEQ ID NO: 345233 - RNA, 22 nt, Human herpesvirus 7
cagagaucauaauuacauugca

SEQ ID NO: 345234 - RNA, 23 nt, Human herpesvirus 7
cagagaugaaggaagcuuuacag

SEQ ID NO: 345235 - RNA, 13 nt, Human herpesvirus 7
cagagucucuaaa

SEQ ID NO: 345236 - RNA, 13 nt, Human herpesvirus 7
cagauacagcaua

SEQ ID NO: 345237 - RNA, 20 nt, Human herpesvirus 7
cagauacagcauauaucuuu

SEQ ID NO: 345238 - RNA, 15 nt, Human herpesvirus 7
cagauauuaguuuca

SEQ ID NO: 345239 - RNA, 21 nt, Human herpesvirus 7
cagauauucuaacaaauacca

SEQ ID NO: 345240 - RNA, 18 nt, Human herpesvirus 7
cagauauuuuaauucuaa

SEQ ID NO: 345241 - RNA, 17 nt, Human herpesvirus 7
cagauccaucuguaaca

SEQ ID NO: 345242 - RNA, 18 nt, Human herpesvirus 7
cagauucuccagaaauua

SEQ ID NO: 345243 - RNA, 15 nt, Human herpesvirus 7
cagauugaaauucca

SEQ ID NO: 345244 - RNA, 16 nt, Human herpesvirus 7
cagauugaaauuccau

SEQ ID NO: 345245 - RNA, 15 nt, Human herpesvirus 7
cagauugcuuguuac

SEQ ID NO: 345246 - RNA, 21 nt, Human herpesvirus 7
cagauuuuaguuccacgucaa

SEQ ID NO: 345247 - RNA, 16 nt, Human herpesvirus 7
cagcagccuacuuuac

SEQ ID NO: 345248 - RNA, 14 nt, Human herpesvirus 7
cagcagcugcuaaa

SEQ ID NO: 345249 - RNA, 18 nt, Human herpesvirus 7
cagcaucccuauugcauc

SEQ ID NO: 345250 - RNA, 21 nt, Human herpesvirus 7
cagcaucccuauugcaucaac

SEQ ID NO: 345251 - RNA, 14 nt, Human herpesvirus 7
cagccuacuuuacg

SEQ ID NO: 345252 - RNA, 21 nt, Human herpesvirus 7
cagcuagauugacuaugaauu

SEQ ID NO: 345253 - RNA, 20 nt, Human herpesvirus 7
cagcuaucucuacaaacaga

SEQ ID NO: 345254 - RNA, 13 nt, Human herpesvirus 7
cagcuccagccaa

SEQ ID NO: 345255 - RNA, 15 nt, Human herpesvirus 7
cagcuccaugucucu

SEQ ID NO: 345256 - RNA, 13 nt, Human herpesvirus 7
cagcucuguaaua

SEQ ID NO: 345257 - RNA, 13 nt, Human herpesvirus 7
cagcugcuaaaac

SEQ ID NO: 345258 - RNA, 17 nt, Human herpesvirus 7
cagcuguauaucuauua

SEQ ID NO: 345259 - RNA, 13 nt, Human herpesvirus 7
cagcuuaagacac

SEQ ID NO: 345260 - RNA, 15 nt, Human herpesvirus 7
caggaaaaucuauca

SEQ ID NO: 345261 - RNA, 17 nt, Human herpesvirus 7
caggaaaaucuaucacc

SEQ ID NO: 345262 - RNA, 18 nt, Human herpesvirus 7
caggaacagauucuccag

SEQ ID NO: 345263 - RNA, 15 nt, Human herpesvirus 7
caggaacugcgguua

SEQ ID NO: 345264 - RNA, 18 nt, Human herpesvirus 7
caggaagcacaaaucaaa

SEQ ID NO: 345265 - RNA, 21 nt, Human herpesvirus 7
caggaauaucaagaauuugag

SEQ ID NO: 345266 - RNA, 13 nt, Human herpesvirus 7
caggacaaucaaa

SEQ ID NO: 345267 - RNA, 22 nt, Human herpesvirus 7
caggcaaaucucauaaugucuc

SEQ ID NO: 345268 - RNA, 17 nt, Human herpesvirus 7
cauuagagcauauucca

SEQ ID NO: 345269 - RNA, 17 nt, Human herpesvirus 7
cauuauaagaauuugga

SEQ ID NO: 345270 - RNA, 15 nt, Human herpesvirus 7
cauuauauccaauaa

SEQ ID NO: 345271 - RNA, 23 nt, Human herpesvirus 7
cauuaucgcguuuucaugcucau

SEQ ID NO: 345272 - RNA, 23 nt, Human herpesvirus 7
cauuaugagauuugccugccaga

SEQ ID NO: 345273 - RNA, 18 nt, Human herpesvirus 7
cauuauuggauaauauca

SEQ ID NO: 345274 - RNA, 22 nt, Human herpesvirus 7
cauuauuugcugaacucuguca

SEQ ID NO: 345275 - RNA, 23 nt, Human herpesvirus 7
cauucaauaauggcauuacuaca

SEQ ID NO: 345276 - RNA, 13 nt, Human herpesvirus 7
cauucaauggcau

SEQ ID NO: 345277 - RNA, 10 nt, Human herpesvirus 7
cauucauuga

SEQ ID NO: 345278 - RNA, 14 nt, Human herpesvirus 7
cauucauuuccucc

SEQ ID NO: 345279 - RNA, 15 nt, Human herpesvirus 7
cauuccucauggcca

SEQ ID NO: 345280 - RNA, 16 nt, Human herpesvirus 7
cauucuaaaccaaaua

SEQ ID NO: 345281 - RNA, 13 nt, Human herpesvirus 7
cauucucaaaaau

SEQ ID NO: 345282 - RNA, 20 nt, Human herpesvirus 7
cauucuucuauggguucaca

SEQ ID NO: 345283 - RNA, 16 nt, Human herpesvirus 7
cauugcuucagaaaua

SEQ ID NO: 345284 - RNA, 21 nt, Human herpesvirus 7
cauuggaaaaaugcugcaaug

SEQ ID NO: 345285 - RNA, 23 nt, Human herpesvirus 7
cauuggaacuuuaugcaaacuca

SEQ ID NO: 345286 - RNA, 18 nt, Human herpesvirus 7
cauuuaaaaaaaaaacca

SEQ ID NO: 345287 - RNA, 22 nt, Human herpesvirus 7
cauuuaaaaaaaaaaccacaaa

SEQ ID NO: 345288 - RNA, 22 nt, Human herpesvirus 7
cauuuaaauucaacaucuuuca

SEQ ID NO: 345289 - RNA, 22 nt, Human herpesvirus 7
cauuuaguacuuuuucuggaau

SEQ ID NO: 345290 - RNA, 16 nt, Human herpesvirus 7
cauuucaaacaacaua

SEQ ID NO: 345291 - RNA, 13 nt, Human herpesvirus 7
cauuucaagaagg

SEQ ID NO: 345292 - RNA, 22 nt, Human herpesvirus 7
cauuucaagaaggaaaauuuca

SEQ ID NO: 345293 - RNA, 22 nt, Human herpesvirus 7
cauuucacucauuagaaacaau

SEQ ID NO: 345294 - RNA, 19 nt, Human herpesvirus 7
cauuucagaugacaacuca

SEQ ID NO: 345295 - RNA, 20 nt, Human herpesvirus 7
cauuucagaugacaacucaa

SEQ ID NO: 345296 - RNA, 17 nt, Human herpesvirus 7
cauuugcaguuauuucu

SEQ ID NO: 345297 - RNA, 17 nt, Human herpesvirus 7
cauuuguaugucuacaa

SEQ ID NO: 345298 - RNA, 20 nt, Human herpesvirus 7
cauuuguaugucuacaaugg

SEQ ID NO: 345299 - RNA, 21 nt, Human herpesvirus 7
cauuugugaaauugacaccgu

SEQ ID NO: 345300 - RNA, 16 nt, Human herpesvirus 7
cauuugugauguacug

SEQ ID NO: 345301 - RNA, 18 nt, Human herpesvirus 7
cauuuguuuaagacauua

SEQ ID NO: 345302 - RNA, 13 nt, Human herpesvirus 7
cauuuucagaaaa

SEQ ID NO: 345303 - RNA, 19 nt, Human herpesvirus 7
cauuuucagaaaaguugaa

SEQ ID NO: 345304 - RNA, 22 nt, Human herpesvirus 7
cauuuuguaugaaaagcccaaa

SEQ ID NO: 345305 - RNA, 18 nt, Human herpesvirus 7
cauuuuguuuugcaauau

SEQ ID NO: 345306 - RNA, 20 nt, Human herpesvirus 7
cauuuuuugucacugacgaa

SEQ ID NO: 345307 - RNA, 18 nt, Human herpesvirus 7
ccaaaaagaaacuuucua

SEQ ID NO: 345308 - RNA, 19 nt, Human herpesvirus 7
ccaaaaucagacaauuuca

SEQ ID NO: 345309 - RNA, 19 nt, Human herpesvirus 7
ccaaaaucuauauuugauu

SEQ ID NO: 345310 - RNA, 20 nt, Human herpesvirus 7
ccaaaccuauccacucuccu

SEQ ID NO: 345311 - RNA, 20 nt, Human herpesvirus 7
ccaaagaaaaaaggaugaaa

SEQ ID NO: 345312 - RNA, 22 nt, Human herpesvirus 7
ccaaagaucguuguuaaaucca

SEQ ID NO: 345313 - RNA, 23 nt, Human herpesvirus 7
ccaaagcaucgauguuuuaucua

SEQ ID NO: 345314 - RNA, 20 nt, Human herpesvirus 7
ccaaagguaaacucacuucu

SEQ ID NO: 345315 - RNA, 21 nt, Human herpesvirus 7
ccaaauaaacguccauugauu

SEQ ID NO: 345316 - RNA, 22 nt, Human herpesvirus 7
ccaaauauaugcuuuauuuaau

SEQ ID NO: 345317 - RNA, 17 nt, Human herpesvirus 7
ccaaauauguggcacau

SEQ ID NO: 345318 - RNA, 18 nt, Human herpesvirus 7
ccaacaaggacgaaucua

SEQ ID NO: 345319 - RNA, 21 nt, Human herpesvirus 7
ccaacagaauacuacucagaa

SEQ ID NO: 345320 - RNA, 22 nt, Human herpesvirus 7
ccaacgcauucaauggcaucuu

SEQ ID NO: 345321 - RNA, 16 nt, Human herpesvirus 7
ccaacucaaugaaugc

SEQ ID NO: 345322 - RNA, 21 nt, Human herpesvirus 7
ccaagacgccggggacauucc

SEQ ID NO: 345323 - RNA, 14 nt, Human herpesvirus 7
ccaagugggugguc

SEQ ID NO: 345324 - RNA, 20 nt, Human herpesvirus 7
ccaaguuuuaacaaucuaag

SEQ ID NO: 345325 - RNA, 18 nt, Human herpesvirus 7
ccaauagaaaacauuaua

SEQ ID NO: 345326 - RNA, 22 nt, Human herpesvirus 7
ccaauagaaaacauuauauucc

SEQ ID NO: 345327 - RNA, 21 nt, Human herpesvirus 7
ccaaucauaauuuucaugaac

SEQ ID NO: 345328 - RNA, 19 nt, Human herpesvirus 7
ccaaugaacaaguuucaaa

SEQ ID NO: 345329 - RNA, 18 nt, Human herpesvirus 7
ccaaugccaauugaagaa

SEQ ID NO: 345330 - RNA, 21 nt, Human herpesvirus 7
ccaaugcucgauauacaugua

SEQ ID NO: 345331 - RNA, 22 nt, Human herpesvirus 7
ccacacagggaagaaacagcug

SEQ ID NO: 345332 - RNA, 19 nt, Human herpesvirus 7
ccacauacucuagaacaaa

SEQ ID NO: 345333 - RNA, 17 nt, Human herpesvirus 7
ccacauuuuuugcacga

SEQ ID NO: 345334 - RNA, 15 nt, Human herpesvirus 7
ccaccauuucugaaa

SEQ ID NO: 345335 - RNA, 17 nt, Human herpesvirus 7
ccaccgguccuuccuca

SEQ ID NO: 345336 - RNA, 24 nt, Human herpesvirus 7
ccacgaauaucguuguguggcaac

SEQ ID NO: 345337 - RNA, 20 nt, Human herpesvirus 7
ccacgaugacuuccaaguuu

SEQ ID NO: 345338 - RNA, 14 nt, Human herpesvirus 7
ccacuaacauuuua

SEQ ID NO: 345339 - RNA, 18 nt, Human herpesvirus 7
ccacucuggaaaugucaa

SEQ ID NO: 345340 - RNA, 23 nt, Human herpesvirus 7
ccacugauuuuuaaacuugugaa

SEQ ID NO: 345341 - RNA, 22 nt, Human herpesvirus 7
ccagaaauuaaauacaaauuua

SEQ ID NO: 345342 - RNA, 14 nt, Human herpesvirus 7
ccagaaauuucaaa

SEQ ID NO: 345343 - RNA, 15 nt, Human herpesvirus 7
ccagaacauuuauuu

SEQ ID NO: 345344 - RNA, 22 nt, Human herpesvirus 7
ccagaagaauggcgaguuacau

SEQ ID NO: 345345 - RNA, 23 nt, Human herpesvirus 7
ccagaagaauggcgaguuacauu

SEQ ID NO: 345346 - RNA, 22 nt, Human herpesvirus 7
ccagagaaccacgugacuugga

SEQ ID NO: 345347 - RNA, 23 nt, Human herpesvirus 7
ccagaguaugaauugaaauuucu

SEQ ID NO: 345348 - RNA, 18 nt, Human herpesvirus 7
ccagaucguucauugauu

SEQ ID NO: 345349 - RNA, 21 nt, Human herpesvirus 7
ccagaucguucauugauuaua

SEQ ID NO: 345350 - RNA, 12 nt, Human herpesvirus 7
ccagccaagacg

SEQ ID NO: 345351 - RNA, 15 nt, Human herpesvirus 7
ccaguacgucuugcu

SEQ ID NO: 345352 - RNA, 14 nt, Human herpesvirus 7
ccaguacuugcauc

SEQ ID NO: 345353 - RNA, 16 nt, Human herpesvirus 7
ccagucucuaaacuuc

SEQ ID NO: 345354 - RNA, 10 nt, Human herpesvirus 7
ccaguugaau

SEQ ID NO: 345355 - RNA, 19 nt, Human herpesvirus 7
ccauaaaauguacaauucc

SEQ ID NO: 345356 - RNA, 20 nt, Human herpesvirus 7
ccauaaacggaauacaugcc

SEQ ID NO: 345357 - RNA, 12 nt, Human herpesvirus 7
ccauaaauacca

SEQ ID NO: 345358 - RNA, 13 nt, Human herpesvirus 7
ccauaaauaccaa

SEQ ID NO: 345359 - RNA, 15 nt, Human herpesvirus 7
ccauaaaugcuuaaa

SEQ ID NO: 345360 - RNA, 13 nt, Human herpesvirus 7
ccauagaagaaug

SEQ ID NO: 345361 - RNA, 14 nt, Human herpesvirus 7
ccaucacaaaacuc

SEQ ID NO: 345362 - RNA, 20 nt, Human herpesvirus 7
ccaugauagaaauuaugaaa

SEQ ID NO: 345363 - RNA, 21 nt, Human herpesvirus 7
ccaugauguuaaagaacaaga

SEQ ID NO: 345364 - RNA, 15 nt, Human herpesvirus 7
ccaugcauauuugaa

SEQ ID NO: 345365 - RNA, 19 nt, Human herpesvirus 7
ccauggccgccuaacugga

SEQ ID NO: 345366 - RNA, 20 nt, Human herpesvirus 7
ccauucaauaauggcauuac

SEQ ID NO: 345367 - RNA, 13 nt, Human herpesvirus 7
ccauucgaucuaa

SEQ ID NO: 345368 - RNA, 23 nt, Human herpesvirus 7
ccauuuaaagggggaaagaacaa

SEQ ID NO: 345369 - RNA, 22 nt, Human herpesvirus 7
ccauuucaaaagaaaaaaucuu

SEQ ID NO: 345370 - RNA, 22 nt, Human herpesvirus 7
ccauuugugauguacugcucau

SEQ ID NO: 345371 - RNA, 22 nt, Human herpesvirus 7
ccauuuuauucaaagcuucuac

SEQ ID NO: 345372 - RNA, 23 nt, Human herpesvirus 7
cccaaacaggcauuuaagaauuu

SEQ ID NO: 345373 - RNA, 12 nt, Human herpesvirus 7
cccaaacuguau

SEQ ID NO: 345374 - RNA, 21 nt, Human herpesvirus 7
cccacuuccccuccacucgaa

SEQ ID NO: 345375 - RNA, 22 nt, Human herpesvirus 7
cccagaccgcauaacccacuaa

SEQ ID NO: 345376 - RNA, 16 nt, Human herpesvirus 7
cccaugaacacugcuu

SEQ ID NO: 345377 - RNA, 16 nt, Human herpesvirus 7
cccaugccuauucaaa

SEQ ID NO: 345378 - RNA, 19 nt, Human herpesvirus 7
ccccaaacuguauuuguug

SEQ ID NO: 345379 - RNA, 14 nt, Human herpesvirus 7
ccccuaaacaauua

SEQ ID NO: 345380 - RNA, 15 nt, Human herpesvirus 7
cccucagaacuguuu

SEQ ID NO: 345381 - RNA, 15 nt, Human herpesvirus 7
cguaacaacagcagc

SEQ ID NO: 345382 - RNA, 23 nt, Human herpesvirus 7
cguaacaacagcagcugcuaaaa

SEQ ID NO: 345383 - RNA, 12 nt, Human herpesvirus 7
cguaacugugac

SEQ ID NO: 345384 - RNA, 14 nt, Human herpesvirus 7
cguauacauacuaa

SEQ ID NO: 345385 - RNA, 15 nt, Human herpesvirus 7
cguauacauacuaaa

SEQ ID NO: 345386 - RNA, 20 nt, Human herpesvirus 7
cgucaucccugcugauacaa

SEQ ID NO: 345387 - RNA, 20 nt, Human herpesvirus 7
cgucgcaccgucauuuaauu

SEQ ID NO: 345388 - RNA, 18 nt, Human herpesvirus 7
cgucuacauuuaaauuca

SEQ ID NO: 345389 - RNA, 21 nt, Human herpesvirus 7
cgucuguguuauacuuauuau

SEQ ID NO: 345390 - RNA, 21 nt, Human herpesvirus 7
cgucuucuucugaguguguua

SEQ ID NO: 345391 - RNA, 18 nt, Human herpesvirus 7
cgucuuuugauuuugccg

SEQ ID NO: 345392 - RNA, 21 nt, Human herpesvirus 7
cgugacagagaaagauuaauu

SEQ ID NO: 345393 - RNA, 18 nt, Human herpesvirus 7
cgugagggggacaauuau

SEQ ID NO: 345394 - RNA, 15 nt, Human herpesvirus 7
cguggccuucuugcc

SEQ ID NO: 345395 - RNA, 22 nt, Human herpesvirus 7
cgugucaaaaaaaaaacaaucc

SEQ ID NO: 345396 - RNA, 19 nt, Human herpesvirus 7
cgugucgcagccauguugc

SEQ ID NO: 345397 - RNA, 20 nt, Human herpesvirus 7
cgugucgcagccauguugcg

SEQ ID NO: 345398 - RNA, 13 nt, Human herpesvirus 7
cgugugaaaacaa

SEQ ID NO: 345399 - RNA, 19 nt, Human herpesvirus 7
cguguucaggcaacauuaa

SEQ ID NO: 345400 - RNA, 16 nt, Human herpesvirus 7
cguuaauguaguugua

SEQ ID NO: 345401 - RNA, 17 nt, Human herpesvirus 7
cguuacuucugucacca

SEQ ID NO: 345402 - RNA, 21 nt, Human herpesvirus 7
cguuggucgagaauacacauu

SEQ ID NO: 345403 - RNA, 13 nt, Human herpesvirus 7
cguuguaugauga

SEQ ID NO: 345404 - RNA, 19 nt, Human herpesvirus 7
cguuguugguguguuacau

SEQ ID NO: 345405 - RNA, 19 nt, Human herpesvirus 7
cguuuaaugaaaaagccau

SEQ ID NO: 345406 - RNA, 17 nt, Human herpesvirus 7
cguuuagaaaacgaaag

SEQ ID NO: 345407 - RNA, 13 nt, Human herpesvirus 7
cguuucacuggga

SEQ ID NO: 345408 - RNA, 16 nt, Human herpesvirus 7
cguuuuuuugcaucag

SEQ ID NO: 345409 - RNA, 19 nt, Human herpesvirus 7
cuaaaaaaauucauuuagu

SEQ ID NO: 345410 - RNA, 22 nt, Human herpesvirus 7
cuaaaaagagaaaucgcuuauu

SEQ ID NO: 345411 - RNA, 19 nt, Human herpesvirus 7
cuaaaaauccuaaauuucc

SEQ ID NO: 345412 - RNA, 13 nt, Human herpesvirus 7
cuaaaaaucucag

SEQ ID NO: 345413 - RNA, 16 nt, Human herpesvirus 7
cuaaaacuacauuuaa

SEQ ID NO: 345414 - RNA, 17 nt, Human herpesvirus 7
cuaaaacugucacgcaa

SEQ ID NO: 345415 - RNA, 23 nt, Human herpesvirus 7
cuaaaacugucacgcaagucaca

SEQ ID NO: 345416 - RNA, 22 nt, Human herpesvirus 7
cuaaaauuuucuuagcuuucau

SEQ ID NO: 345417 - RNA, 19 nt, Human herpesvirus 7
cuaaagacacuuauuugau

SEQ ID NO: 345418 - RNA, 20 nt, Human herpesvirus 7
cuaaagacacuuauuugauu

SEQ ID NO: 345419 - RNA, 15 nt, Human herpesvirus 7
cuaaagagcauucau

SEQ ID NO: 345420 - RNA, 18 nt, Human herpesvirus 7
cuaaagagcauucaugcc

SEQ ID NO: 345421 - RNA, 15 nt, Human herpesvirus 7
cuaaaguggagacaa

SEQ ID NO: 345422 - RNA, 23 nt, Human herpesvirus 7
cuaaauaauucacauuuaugaaa

SEQ ID NO: 345423 - RNA, 14 nt, Human herpesvirus 7
cuaaauauucugug

SEQ ID NO: 345424 - RNA, 15 nt, Human herpesvirus 7
cuaaauauucugugu

SEQ ID NO: 345425 - RNA, 19 nt, Human herpesvirus 7
cuaaaucacuaguccuaaa

SEQ ID NO: 345426 - RNA, 13 nt, Human herpesvirus 7
cuaacaaauacca

SEQ ID NO: 345427 - RNA, 19 nt, Human herpesvirus 7
cuaacaauaaaguuuccau

SEQ ID NO: 345428 - RNA, 13 nt, Human herpesvirus 7
cuaaccacugugu

SEQ ID NO: 345429 - RNA, 19 nt, Human herpesvirus 7
cuaaccacugugucaucac

SEQ ID NO: 345430 - RNA, 22 nt, Human herpesvirus 7
cuaaccuuuuaacaacagccaa

SEQ ID NO: 345431 - RNA, 21 nt, Human herpesvirus 7
cuaacgauccaguacuugcau

SEQ ID NO: 345432 - RNA, 18 nt, Human herpesvirus 7
cuaacgcuaaagagcauu

SEQ ID NO: 345433 - RNA, 14 nt, Human herpesvirus 7
cuaacguuuaucac

SEQ ID NO: 345434 - RNA, 11 nt, Human herpesvirus 7
cuaacugagaa

SEQ ID NO: 345435 - RNA, 23 nt, Human herpesvirus 7
cuaacugggagcugauucugcca

SEQ ID NO: 345436 - RNA, 22 nt, Human herpesvirus 7
cuaagagauuguggcaauguaa

SEQ ID NO: 345437 - RNA, 18 nt, Human herpesvirus 7
cuaagcuuuucaggcuau

SEQ ID NO: 345438 - RNA, 18 nt, Human herpesvirus 7
cuaagguuuuuacauaaa

SEQ ID NO: 345439 - RNA, 14 nt, Human herpesvirus 7
cuaagucuacauca

SEQ ID NO: 345440 - RNA, 19 nt, Human herpesvirus 7
cuaaguuuuguuacgucaa

SEQ ID NO: 345441 - RNA, 22 nt, Human herpesvirus 7
cuaauuugcauaaacuaucaaa

SEQ ID NO: 345442 - RNA, 21 nt, Human herpesvirus 7
cuacaauaugacgacuuugaa

SEQ ID NO: 345443 - RNA, 22 nt, Human herpesvirus 7
cuacaaugguuuuuuugacaaa

SEQ ID NO: 345444 - RNA, 15 nt, Human herpesvirus 7
cuacaauuucuggca

SEQ ID NO: 345445 - RNA, 21 nt, Human herpesvirus 7
cuacacgagacaaaaauaaua

SEQ ID NO: 345446 - RNA, 22 nt, Human herpesvirus 7
cuacaguuacuuuuacuccuca

SEQ ID NO: 345447 - RNA, 17 nt, Human herpesvirus 7
cuacauagaaaucuuua

SEQ ID NO: 345448 - RNA, 22 nt, Human herpesvirus 7
cuacauuuaaaaaaucugaaua

SEQ ID NO: 345449 - RNA, 14 nt, Human herpesvirus 7
cuacguguuuauac

SEQ ID NO: 345450 - RNA, 17 nt, Human herpesvirus 7
cuacuaaggugucuucg

SEQ ID NO: 345451 - RNA, 15 nt, Human herpesvirus 7
cuacugaagagccaa

SEQ ID NO: 345452 - RNA, 16 nt, Human herpesvirus 7
cuacuguaaucugacu

SEQ ID NO: 345453 - RNA, 13 nt, Human herpesvirus 7
cuagagcauauac

SEQ ID NO: 345454 - RNA, 21 nt, Human herpesvirus 7
cuagagggcacguuuagaaaa

SEQ ID NO: 345455 - RNA, 21 nt, Human herpesvirus 7
cuagauaaaguagguaaaaaa

SEQ ID NO: 345456 - RNA, 15 nt, Human herpesvirus 7
cuagauugacuauga

SEQ ID NO: 345457 - RNA, 14 nt, Human herpesvirus 7
cuagcaaacagugc

SEQ ID NO: 345458 - RNA, 13 nt, Human herpesvirus 7
cuagcagaucucg

SEQ ID NO: 345459 - RNA, 21 nt, Human herpesvirus 7
cuagcagcuuuuauuccuucc

SEQ ID NO: 345460 - RNA, 17 nt, Human herpesvirus 7
cuaggucuuccacuguu

SEQ ID NO: 345461 - RNA, 22 nt, Human herpesvirus 7
cuaguugcaacucuucuucaga

SEQ ID NO: 345462 - RNA, 21 nt, Human herpesvirus 7
cuauaaaggaaaauauauuaa

SEQ ID NO: 345463 - RNA, 17 nt, Human herpesvirus 7
cuauaauucucacagcu

SEQ ID NO: 345464 - RNA, 15 nt, Human herpesvirus 7
cuauagaucuugacu

SEQ ID NO: 345465 - RNA, 17 nt, Human herpesvirus 7
cuauagaucuugacuca

SEQ ID NO: 345466 - RNA, 16 nt, Human herpesvirus 7
cuaucaaauuuaucuc

SEQ ID NO: 345467 - RNA, 17 nt, Human herpesvirus 7
cuaucaaauuuaucuca

SEQ ID NO: 345468 - RNA, 18 nt, Human herpesvirus 7
cuaucaaggucuuucaug

SEQ ID NO: 345469 - RNA, 13 nt, Human herpesvirus 7
cuaucgacaaaca

SEQ ID NO: 345470 - RNA, 15 nt, Human herpesvirus 7
cuaucgcaacaacua

SEQ ID NO: 345471 - RNA, 18 nt, Human herpesvirus 7
cuaucgucaucaucccaa

SEQ ID NO: 345472 - RNA, 17 nt, Human herpesvirus 7
cuaucuccuauguugca

SEQ ID NO: 345473 - RNA, 17 nt, Human herpesvirus 7
cuaucucuacaaacaga

SEQ ID NO: 345474 - RNA, 21 nt, Human herpesvirus 7
cuaucugauuuauauagcaau

SEQ ID NO: 345475 - RNA, 16 nt, Human herpesvirus 7
cuaugaacuggcacau

SEQ ID NO: 345476 - RNA, 23 nt, Human herpesvirus 7
cuaugaauuugacaguccauucc

SEQ ID NO: 345477 - RNA, 20 nt, Human herpesvirus 7
cuaugacugagaaaaacaga

SEQ ID NO: 345478 - RNA, 19 nt, Human herpesvirus 7
cuaugacuuugaaucaaca

SEQ ID NO: 345479 - RNA, 13 nt, Human herpesvirus 7
cuaugaguauacc

SEQ ID NO: 345480 - RNA, 21 nt, Human herpesvirus 7
cuaugccggccgggugcugcg

SEQ ID NO: 345481 - RNA, 14 nt, Human herpesvirus 7
cuaugugcucugaa

SEQ ID NO: 345482 - RNA, 22 nt, Human herpesvirus 7
cuauguguuuacauuacuggau

SEQ ID NO: 345483 - RNA, 21 nt, Human herpesvirus 7
cuauuaagcguucguaacaaa

SEQ ID NO: 345484 - RNA, 19 nt, Human herpesvirus 7
cuauuacacaggaauugcu

SEQ ID NO: 345485 - RNA, 18 nt, Human herpesvirus 7
cuauuagauaaugacaaa

SEQ ID NO: 345486 - RNA, 23 nt, Human herpesvirus 7
cuauuaguaugagugcuaugaaa

SEQ ID NO: 345487 - RNA, 18 nt, Human herpesvirus 7
cuauuauuaaagcuuuca

SEQ ID NO: 345488 - RNA, 21 nt, Human herpesvirus 7
cuauuauuaaagcuuucaauu

SEQ ID NO: 345489 - RNA, 17 nt, Human herpesvirus 7
cuauuauuucuacacaa

SEQ ID NO: 345490 - RNA, 18 nt, Human herpesvirus 7
cuauuauuucuacacaaa

SEQ ID NO: 345491 - RNA, 16 nt, Human herpesvirus 7
cuauucacgcuuccau

SEQ ID NO: 345492 - RNA, 20 nt, Human herpesvirus 7
cuauucacgcuuccaucaca

SEQ ID NO: 345493 - RNA, 17 nt, Human herpesvirus 7
cuauucggguaaugucu

SEQ ID NO: 345494 - RNA, 15 nt, Human herpesvirus 7
cuauugacauaauca

SEQ ID NO: 345495 - RNA, 17 nt, Human herpesvirus 7
cuguuuguaaggccaaa

SEQ ID NO: 345496 - RNA, 23 nt, Human herpesvirus 7
cuguuuuaauguauuuuucucca

SEQ ID NO: 345497 - RNA, 14 nt, Human herpesvirus 7
cuuaaaacuuugaa

SEQ ID NO: 345498 - RNA, 14 nt, Human herpesvirus 7
cuuaaaaguacaaa

SEQ ID NO: 345499 - RNA, 13 nt, Human herpesvirus 7
cuuaaaauauguu

SEQ ID NO: 345500 - RNA, 13 nt, Human herpesvirus 7
cuuaaaauucagu

SEQ ID NO: 345501 - RNA, 14 nt, Human herpesvirus 7
cuuaaagaacucca

SEQ ID NO: 345502 - RNA, 15 nt, Human herpesvirus 7
cuuaaagaacuccau

SEQ ID NO: 345503 - RNA, 16 nt, Human herpesvirus 7
cuuaaauuuccaucua

SEQ ID NO: 345504 - RNA, 17 nt, Human herpesvirus 7
cuuaaauuuuacaaaga

SEQ ID NO: 345505 - RNA, 14 nt, Human herpesvirus 7
cuuaacauacugau

SEQ ID NO: 345506 - RNA, 15 nt, Human herpesvirus 7
cuuaacgacgaugcu

SEQ ID NO: 345507 - RNA, 19 nt, Human herpesvirus 7
cuuaagacaccccaaaauc

SEQ ID NO: 345508 - RNA, 22 nt, Human herpesvirus 7
cuuaagcuuuuguaaacaugaa

SEQ ID NO: 345509 - RNA, 19 nt, Human herpesvirus 7
cuuaaggcggacaaauaua

SEQ ID NO: 345510 - RNA, 13 nt, Human herpesvirus 7
cuuaauaaaguuu

SEQ ID NO: 345511 - RNA, 13 nt, Human herpesvirus 7
cuuacacuaugag

SEQ ID NO: 345512 - RNA, 14 nt, Human herpesvirus 7
cuuacagcacuuug

SEQ ID NO: 345513 - RNA, 20 nt, Human herpesvirus 7
cuuacagugaaguaauuuau

SEQ ID NO: 345514 - RNA, 24 nt, Human herpesvirus 7
cuuacgugaguguuguaacaacua

SEQ ID NO: 345515 - RNA, 22 nt, Human herpesvirus 7
cuuacgugaugccauaauuuca

SEQ ID NO: 345516 - RNA, 16 nt, Human herpesvirus 7
cuuacucuuucugaca

SEQ ID NO: 345517 - RNA, 15 nt, Human herpesvirus 7
cuuacuguuuacaca

SEQ ID NO: 345518 - RNA, 16 nt, Human herpesvirus 7
cuuagaaucacaacau

SEQ ID NO: 345519 - RNA, 15 nt, Human herpesvirus 7
cuuagaucgaacugu

SEQ ID NO: 345520 - RNA, 17 nt, Human herpesvirus 7
cuuagaucgaacuguua

SEQ ID NO: 345521 - RNA, 18 nt, Human herpesvirus 7
cuuagaugcauccaaaga

SEQ ID NO: 345522 - RNA, 19 nt, Human herpesvirus 7
cuuagaugcauccaaagaa

SEQ ID NO: 345523 - RNA, 14 nt, Human herpesvirus 7
cuuagaugcugaaa

SEQ ID NO: 345524 - RNA, 16 nt, Human herpesvirus 7
cuuagaugcugaaaca

SEQ ID NO: 345525 - RNA, 18 nt, Human herpesvirus 7
cuuagcuaauugagaaau

SEQ ID NO: 345526 - RNA, 15 nt, Human herpesvirus 7
cuuagcuuucaugau

SEQ ID NO: 345527 - RNA, 19 nt, Human herpesvirus 7
cuuagcuuucaugauuuca

SEQ ID NO: 345528 - RNA, 23 nt, Human herpesvirus 7
cuuaggugcaauuuucauaaaga

SEQ ID NO: 345529 - RNA, 12 nt, Human herpesvirus 7
cuuauaucuuau

SEQ ID NO: 345530 - RNA, 17 nt, Human herpesvirus 7
cuuauauuaaaaaccac

SEQ ID NO: 345531 - RNA, 21 nt, Human herpesvirus 7
cuuauauuaaaaaccacagag

SEQ ID NO: 345532 - RNA, 17 nt, Human herpesvirus 7
cuuaucaccauaugcca

SEQ ID NO: 345533 - RNA, 18 nt, Human herpesvirus 7
cuuaucaccauaugccaa

SEQ ID NO: 345534 - RNA, 13 nt, Human herpesvirus 7
cuuauccuguugu

SEQ ID NO: 345535 - RNA, 23 nt, Human herpesvirus 7
cuuaugauaaagaaaacgcuguu

SEQ ID NO: 345536 - RNA, 15 nt, Human herpesvirus 7
cuuaugauuggagua

SEQ ID NO: 345537 - RNA, 22 nt, Human herpesvirus 7
cuuaugccagguuuuucaaaga

SEQ ID NO: 345538 - RNA, 20 nt, Human herpesvirus 7
cuuauuccagauaugacaaa

SEQ ID NO: 345539 - RNA, 19 nt, Human herpesvirus 7
cuuauuugauuauuuugau

SEQ ID NO: 345540 - RNA, 17 nt, Human herpesvirus 7
cuuauuuugucugguca

SEQ ID NO: 345541 - RNA, 21 nt, Human herpesvirus 7
cuucaaaaauguuuacaaaca

SEQ ID NO: 345542 - RNA, 17 nt, Human herpesvirus 7
cuucaaagauaccuucu

SEQ ID NO: 345543 - RNA, 17 nt, Human herpesvirus 7
cuucaaucguuggcauu

SEQ ID NO: 345544 - RNA, 22 nt, Human herpesvirus 7
cuucaaucguuggcauuguauc

SEQ ID NO: 345545 - RNA, 19 nt, Human herpesvirus 7
cuucagacguggauaacga

SEQ ID NO: 345546 - RNA, 13 nt, Human herpesvirus 7
cuucagaugcuau

SEQ ID NO: 345547 - RNA, 19 nt, Human herpesvirus 7
cuucagauucaguaucacu

SEQ ID NO: 345548 - RNA, 15 nt, Human herpesvirus 7
cuucaggaauaucaa

SEQ ID NO: 345549 - RNA, 16 nt, Human herpesvirus 7
cuucagguuguuguca

SEQ ID NO: 345550 - RNA, 11 nt, Human herpesvirus 7
cuucauggcac

SEQ ID NO: 345551 - RNA, 22 nt, Human herpesvirus 7
cuucgagaaaauuuagcaccaa

SEQ ID NO: 345552 - RNA, 20 nt, Human herpesvirus 7
cuucguaaauauaaucaaaa

SEQ ID NO: 345553 - RNA, 15 nt, Human herpesvirus 7
cuucuaaaaauacaa

SEQ ID NO: 345554 - RNA, 18 nt, Human herpesvirus 7
cuucuaaauauucugugu

SEQ ID NO: 345555 - RNA, 16 nt, Human herpesvirus 7
cuucuaaaugugcuaa

SEQ ID NO: 345556 - RNA, 17 nt, Human herpesvirus 7
cuucuaaaugugcuaaa

SEQ ID NO: 345557 - RNA, 15 nt, Human herpesvirus 7
cuucuaauugcgcag

SEQ ID NO: 345558 - RNA, 18 nt, Human herpesvirus 7
cuucucccauucaauaau

SEQ ID NO: 345559 - RNA, 17 nt, Human herpesvirus 7
cuucucuuggaguuugu

SEQ ID NO: 345560 - RNA, 16 nt, Human herpesvirus 7
cuucugaaucugcaaa

SEQ ID NO: 345561 - RNA, 18 nt, Human herpesvirus 7
cuucugucaccacacuca

SEQ ID NO: 345562 - RNA, 21 nt, Human herpesvirus 7
cuucuuccacgaguacuccuu

SEQ ID NO: 345563 - RNA, 16 nt, Human herpesvirus 7
cuucuugcccccagaa

SEQ ID NO: 345564 - RNA, 17 nt, Human herpesvirus 7
cuucuugccuacacuuu

SEQ ID NO: 345565 - RNA, 18 nt, Human herpesvirus 7
cuucuuucuucaacacaa

SEQ ID NO: 345566 - RNA, 20 nt, Human herpesvirus 7
cuugauguuuugcaagcaca

SEQ ID NO: 345567 - RNA, 17 nt, Human herpesvirus 7
cuugcacaaagauccuc

SEQ ID NO: 345568 - RNA, 14 nt, Human herpesvirus 7
cuugcacuguaaua

SEQ ID NO: 345569 - RNA, 16 nt, Human herpesvirus 7
cuugcagaaacugggg

SEQ ID NO: 345570 - RNA, 15 nt, Human herpesvirus 7
cuugcauacaguuua

SEQ ID NO: 345571 - RNA, 12 nt, Human herpesvirus 7
cuugcauuuccg

SEQ ID NO: 345572 - RNA, 17 nt, Human herpesvirus 7
cuugccugcaauucuau

SEQ ID NO: 345573 - RNA, 18 nt, Human herpesvirus 7
cuugcuuaaaacuuugaa

SEQ ID NO: 345574 - RNA, 17 nt, Human herpesvirus 7
cuugcuuguaggcagaa

SEQ ID NO: 345575 - RNA, 17 nt, Human herpesvirus 7
cuuggaaaacaaucaau

SEQ ID NO: 345576 - RNA, 22 nt, Human herpesvirus 7
cuuggagacgaugagcaugaaa

SEQ ID NO: 345577 - RNA, 20 nt, Human herpesvirus 7
cuuggauaaccaaacuauau

SEQ ID NO: 345578 - RNA, 16 nt, Human herpesvirus 7
cuuggcugacauacga

SEQ ID NO: 345579 - RNA, 18 nt, Human herpesvirus 7
cuuggcugacauacgaau

SEQ ID NO: 345580 - RNA, 19 nt, Human herpesvirus 7
cuuggguuugaucgaggaa

SEQ ID NO: 345581 - RNA, 22 nt, Human herpesvirus 7
cuugguggauccguaacugcau

SEQ ID NO: 345582 - RNA, 18 nt, Human herpesvirus 7
cuuguaaaguaaaacgua

SEQ ID NO: 345583 - RNA, 20 nt, Human herpesvirus 7
cuugugaaaauaacaggaaa

SEQ ID NO: 345584 - RNA, 19 nt, Human herpesvirus 7
cuugugaaguuugcugaaa

SEQ ID NO: 345585 - RNA, 16 nt, Human herpesvirus 7
cuuguguugucauaca

SEQ ID NO: 345586 - RNA, 14 nt, Human herpesvirus 7
cuuguuacaguguu

SEQ ID NO: 345587 - RNA, 19 nt, Human herpesvirus 7
cuuuaaauuauuauuagua

SEQ ID NO: 345588 - RNA, 22 nt, Human herpesvirus 7
cuuuaaauuauuauuaguauug

SEQ ID NO: 345589 - RNA, 23 nt, Human herpesvirus 7
cuuuaaccgcaaaagccacugau

SEQ ID NO: 345590 - RNA, 19 nt, Human herpesvirus 7
cuuuaacuggaauuauaca

SEQ ID NO: 345591 - RNA, 23 nt, Human herpesvirus 7
cuuuaacuggaauuauacacugu

SEQ ID NO: 345592 - RNA, 19 nt, Human herpesvirus 7
cuuuaauggaagaacaaca

SEQ ID NO: 345593 - RNA, 19 nt, Human herpesvirus 7
cuuuacacggucuuaucua

SEQ ID NO: 345594 - RNA, 22 nt, Human herpesvirus 7
cuuuagcgcugaaauuucauga

SEQ ID NO: 345595 - RNA, 23 nt, Human herpesvirus 7
cuuuauaaaggaccaugggaaaa

SEQ ID NO: 345596 - RNA, 22 nt, Human herpesvirus 7
cuuuauagaucgcucaacuuau

SEQ ID NO: 345597 - RNA, 13 nt, Human herpesvirus 7
cuuuauaugucaa

SEQ ID NO: 345598 - RNA, 18 nt, Human herpesvirus 7
cuuuaucuuugucacuua

SEQ ID NO: 345599 - RNA, 22 nt, Human herpesvirus 7
cuuuaugugggauuugaaugaa

SEQ ID NO: 345600 - RNA, 22 nt, Human herpesvirus 7
cuuuauucaacuguguuuuaga

SEQ ID NO: 345601 - RNA, 17 nt, Human herpesvirus 7
cuuuauuuaagcuucaa

SEQ ID NO: 345602 - RNA, 14 nt, Human herpesvirus 7
cuuuauuuaauaac

SEQ ID NO: 345603 - RNA, 18 nt, Human herpesvirus 7
cuuucacuacuacaugaa

SEQ ID NO: 345604 - RNA, 14 nt, Human herpesvirus 7
cuuucacuugaaua

SEQ ID NO: 345605 - RNA, 21 nt, Human herpesvirus 7
cuuucauuauuuguucaaaau

SEQ ID NO: 345606 - RNA, 15 nt, Human herpesvirus 7
cuuuccaucaucacg

SEQ ID NO: 345607 - RNA, 18 nt, Human herpesvirus 7
cuuuccaucaucacguca

SEQ ID NO: 345608 - RNA, 13 nt, Human herpesvirus 7
cuuucucaucacu

SEQ ID NO: 345609 - RNA, 20 nt, Human herpesvirus 7
gaacggaauaaacaaugugu

SEQ ID NO: 345610 - RNA, 16 nt, Human herpesvirus 7
gaacggauccgcugaa

SEQ ID NO: 345611 - RNA, 18 nt, Human herpesvirus 7
gaacucaauuuuucuccc

SEQ ID NO: 345612 - RNA, 18 nt, Human herpesvirus 7
gaacucguagcauugcca

SEQ ID NO: 345613 - RNA, 15 nt, Human herpesvirus 7
gaacugaaaacaaug

SEQ ID NO: 345614 - RNA, 12 nt, Human herpesvirus 7
gaacuggcacau

SEQ ID NO: 345615 - RNA, 14 nt, Human herpesvirus 7
gaacuuuaugcaaa

SEQ ID NO: 345616 - RNA, 23 nt, Human herpesvirus 7
gaacuuuuguaggaaauuuucau

SEQ ID NO: 345617 - RNA, 21 nt, Human herpesvirus 7
gaagaaaagaaaaagcaacaa

SEQ ID NO: 345618 - RNA, 13 nt, Human herpesvirus 7
gaagaaacuugaa

SEQ ID NO: 345619 - RNA, 14 nt, Human herpesvirus 7
gaagaaacuugaaa

SEQ ID NO: 345620 - RNA, 18 nt, Human herpesvirus 7
gaagaaacuugaaaauca

SEQ ID NO: 345621 - RNA, 22 nt, Human herpesvirus 7
gaagaacaacaacuaaaacuac

SEQ ID NO: 345622 - RNA, 16 nt, Human herpesvirus 7
gaagacaaaaccaaac

SEQ ID NO: 345623 - RNA, 19 nt, Human herpesvirus 7
gaagacagcucaaaaguau

SEQ ID NO: 345624 - RNA, 14 nt, Human herpesvirus 7
gaagacuacauaaa

SEQ ID NO: 345625 - RNA, 17 nt, Human herpesvirus 7
gaagaggagaauucugu

SEQ ID NO: 345626 - RNA, 19 nt, Human herpesvirus 7
gaagagguaaguguaagcu

SEQ ID NO: 345627 - RNA, 20 nt, Human herpesvirus 7
gaagaguucuuguuuggaaa

SEQ ID NO: 345628 - RNA, 20 nt, Human herpesvirus 7
gaagauuugacaaaacaaga

SEQ ID NO: 345629 - RNA, 22 nt, Human herpesvirus 7
gaagcuugcuuaaaacuuugaa

SEQ ID NO: 345630 - RNA, 20 nt, Human herpesvirus 7
gaagcuuucguaaucauuca

SEQ ID NO: 345631 - RNA, 21 nt, Human herpesvirus 7
gaagcuuucguaaucauucaa

SEQ ID NO: 345632 - RNA, 22 nt, Human herpesvirus 7
gaagcuuucguaaucauucaag

SEQ ID NO: 345633 - RNA, 23 nt, Human herpesvirus 7
gaaggagagcccagucccaagag

SEQ ID NO: 345634 - RNA, 16 nt, Human herpesvirus 7
gaaggaugcguguguu

SEQ ID NO: 345635 - RNA, 19 nt, Human herpesvirus 7
gaaggaugcguguguucaa

SEQ ID NO: 345636 - RNA, 14 nt, Human herpesvirus 7
gaaggcugcuuuuu

SEQ ID NO: 345637 - RNA, 14 nt, Human herpesvirus 7
gaagguugucuguu

SEQ ID NO: 345638 - RNA, 17 nt, Human herpesvirus 7
gaagguugucuguucuc

SEQ ID NO: 345639 - RNA, 15 nt, Human herpesvirus 7
gaaguggcuucucua

SEQ ID NO: 345640 - RNA, 14 nt, Human herpesvirus 7
gaauaaaucaacca

SEQ ID NO: 345641 - RNA, 15 nt, Human herpesvirus 7
gaauaaguucaucau

SEQ ID NO: 345642 - RNA, 18 nt, Human herpesvirus 7
gaauaaucucaauuaaaa

SEQ ID NO: 345643 - RNA, 14 nt, Human herpesvirus 7
gaauacaguugaau

SEQ ID NO: 345644 - RNA, 18 nt, Human herpesvirus 7
gaauauaaaaaauuugaa

SEQ ID NO: 345645 - RNA, 15 nt, Human herpesvirus 7
gaauauauacgcuua

SEQ ID NO: 345646 - RNA, 22 nt, Human herpesvirus 7
gaauaucguuguguggcaacau

SEQ ID NO: 345647 - RNA, 19 nt, Human herpesvirus 7
gaauaugaggggcaaaaaa

SEQ ID NO: 345648 - RNA, 20 nt, Human herpesvirus 7
gaauaugaggggcaaaaaac

SEQ ID NO: 345649 - RNA, 23 nt, Human herpesvirus 7
gaauauguuaucauuuaucaggu

SEQ ID NO: 345650 - RNA, 14 nt, Human herpesvirus 7
gaaucaaauuucaa

SEQ ID NO: 345651 - RNA, 18 nt, Human herpesvirus 7
gaaucaacagccaucuaa

SEQ ID NO: 345652 - RNA, 17 nt, Human herpesvirus 7
gaaucacauuuuugcua

SEQ ID NO: 345653 - RNA, 15 nt, Human herpesvirus 7
gaaucagaccagcac

SEQ ID NO: 345654 - RNA, 17 nt, Human herpesvirus 7
gaaucagaccagcacaa

SEQ ID NO: 345655 - RNA, 20 nt, Human herpesvirus 7
gaaucauagcaggaagcaca

SEQ ID NO: 345656 - RNA, 18 nt, Human herpesvirus 7
gaaucuauuuaaaauauu

SEQ ID NO: 345657 - RNA, 16 nt, Human herpesvirus 7
gaaucucauaaucaua

SEQ ID NO: 345658 - RNA, 14 nt, Human herpesvirus 7
gaaucugaagaaga

SEQ ID NO: 345659 - RNA, 20 nt, Human herpesvirus 7
gaaucuuuauuauuuacuga

SEQ ID NO: 345660 - RNA, 23 nt, Human herpesvirus 7
gaaucuuuauuauuuacugauuc

SEQ ID NO: 345661 - RNA, 21 nt, Human herpesvirus 7
gaaucuuugacuguaucucca

SEQ ID NO: 345662 - RNA, 22 nt, Human herpesvirus 7
gaaucuuugacuguaucuccaa

SEQ ID NO: 345663 - RNA, 13 nt, Human herpesvirus 7
gaaugcaagcaac

SEQ ID NO: 345664 - RNA, 20 nt, Human herpesvirus 7
gaauggcgguuguacuguaa

SEQ ID NO: 345665 - RNA, 15 nt, Human herpesvirus 7
gaauggcugaugaua

SEQ ID NO: 345666 - RNA, 22 nt, Human herpesvirus 7
gaaugggugucagcuucuggga

SEQ ID NO: 345667 - RNA, 14 nt, Human herpesvirus 7
gaauguacacagcu

SEQ ID NO: 345668 - RNA, 20 nt, Human herpesvirus 7
gaaugucgaaucuacauccu

SEQ ID NO: 345669 - RNA, 13 nt, Human herpesvirus 7
gaauguggcuuaa

SEQ ID NO: 345670 - RNA, 15 nt, Human herpesvirus 7
gaauguuuacaugua

SEQ ID NO: 345671 - RNA, 17 nt, Human herpesvirus 7
gaauuaauaaaaguauc

SEQ ID NO: 345672 - RNA, 16 nt, Human herpesvirus 7
gaauuaucgcaauuaa

SEQ ID NO: 345673 - RNA, 15 nt, Human herpesvirus 7
gaauucaacaccagu

SEQ ID NO: 345674 - RNA, 16 nt, Human herpesvirus 7
gaauucauuugugaaa

SEQ ID NO: 345675 - RNA, 15 nt, Human herpesvirus 7
gaauuuagauuaaua

SEQ ID NO: 345676 - RNA, 19 nt, Human herpesvirus 7
gaauuuagauuaauagaua

SEQ ID NO: 345677 - RNA, 18 nt, Human herpesvirus 7
gaauuugauuccaucuca

SEQ ID NO: 345678 - RNA, 19 nt, Human herpesvirus 7
gaauuuguaucuaugacag

SEQ ID NO: 345679 - RNA, 13 nt, Human herpesvirus 7
gaauuuguucaau

SEQ ID NO: 345680 - RNA, 15 nt, Human herpesvirus 7
gaauuuuaacacugu

SEQ ID NO: 345681 - RNA, 15 nt, Human herpesvirus 7
gaauuuuacaaugca

SEQ ID NO: 345682 - RNA, 19 nt, Human herpesvirus 7
gacaacgguauacauuaau

SEQ ID NO: 345683 - RNA, 15 nt, Human herpesvirus 7
gacaauaacauuuug

SEQ ID NO: 345684 - RNA, 21 nt, Human herpesvirus 7
gacaauaacauuuuguaugaa

SEQ ID NO: 345685 - RNA, 20 nt, Human herpesvirus 7
gacaaucuauauaaaauauc

SEQ ID NO: 345686 - RNA, 12 nt, Human herpesvirus 7
gacaaugucaau

SEQ ID NO: 345687 - RNA, 22 nt, Human herpesvirus 7
gacaauuucacacaaugccuuu

SEQ ID NO: 345688 - RNA, 20 nt, Human herpesvirus 7
gacaauuucguuuucuuugg

SEQ ID NO: 345689 - RNA, 19 nt, Human herpesvirus 7
gacacaaucagcauuuacc

SEQ ID NO: 345690 - RNA, 16 nt, Human herpesvirus 7
gacaccaguaugaaau

SEQ ID NO: 345691 - RNA, 19 nt, Human herpesvirus 7
gacaccccaaaaucaaaaa

SEQ ID NO: 345692 - RNA, 21 nt, Human herpesvirus 7
gacacggaguuuuuacucugu

SEQ ID NO: 345693 - RNA, 17 nt, Human herpesvirus 7
gacacguuucucuguag

SEQ ID NO: 345694 - RNA, 20 nt, Human herpesvirus 7
gacacguuucucuguagaua

SEQ ID NO: 345695 - RNA, 22 nt, Human herpesvirus 7
gacagaaugccagaaauuaaau

SEQ ID NO: 345696 - RNA, 22 nt, Human herpesvirus 7
gacagagaaagauuaauuaucu

SEQ ID NO: 345697 - RNA, 18 nt, Human herpesvirus 7
gacagcaacugugcauga

SEQ ID NO: 345698 - RNA, 19 nt, Human herpesvirus 7
gacagcaacugugcaugaa

SEQ ID NO: 345699 - RNA, 17 nt, Human herpesvirus 7
gacagcaccaauccuuu

SEQ ID NO: 345700 - RNA, 21 nt, Human herpesvirus 7
gacaguccauuccguuuuaaa

SEQ ID NO: 345701 - RNA, 21 nt, Human herpesvirus 7
gacauggccaucgcuuucuca

SEQ ID NO: 345702 - RNA, 12 nt, Human herpesvirus 7
gacauuccucau

SEQ ID NO: 345703 - RNA, 23 nt, Human herpesvirus 7
gacauuucaagaaggaaaauuuc

SEQ ID NO: 345704 - RNA, 11 nt, Human herpesvirus 7
gacauuugcaa

SEQ ID NO: 345705 - RNA, 17 nt, Human herpesvirus 7
gaccaauucuuuuacaa

SEQ ID NO: 345706 - RNA, 19 nt, Human herpesvirus 7
gaccagcacaaaugucuua

SEQ ID NO: 345707 - RNA, 17 nt, Human herpesvirus 7
gacccugucacacuuau

SEQ ID NO: 345708 - RNA, 21 nt, Human herpesvirus 7
gaccuaucaaauuuaucucau

SEQ ID NO: 345709 - RNA, 20 nt, Human herpesvirus 7
gaccuauguguuuacauuac

SEQ ID NO: 345710 - RNA, 21 nt, Human herpesvirus 7
gaccuauguguuuacauuacu

SEQ ID NO: 345711 - RNA, 20 nt, Human herpesvirus 7
gaccucgacauucuccagug

SEQ ID NO: 345712 - RNA, 14 nt, Human herpesvirus 7
gacgaguaugucca

SEQ ID NO: 345713 - RNA, 23 nt, Human herpesvirus 7
gacgcagcaucccuauugcauca

SEQ ID NO: 345714 - RNA, 16 nt, Human herpesvirus 7
gacgcuaauuugcaua

SEQ ID NO: 345715 - RNA, 16 nt, Human herpesvirus 7
gacgcuguaugcaaga

SEQ ID NO: 345716 - RNA, 13 nt, Human herpesvirus 7
gacggcauuuaac

SEQ ID NO: 345717 - RNA, 19 nt, Human herpesvirus 7
gacgugagcaauacaccca

SEQ ID NO: 345718 - RNA, 20 nt, Human herpesvirus 7
gacuaaauauggagcagcuu

SEQ ID NO: 345719 - RNA, 22 nt, Human herpesvirus 7
gacuaaucacgagaaaaauauu

SEQ ID NO: 345720 - RNA, 19 nt, Human herpesvirus 7
gacuaucagcgacaggugu

SEQ ID NO: 345721 - RNA, 18 nt, Human herpesvirus 7
gacuaucgcaacaacuaa

SEQ ID NO: 345722 - RNA, 15 nt, Human herpesvirus 7
gacucacuccuugca

SEQ ID NO: 345723 - RNA, 21 nt, Human herpesvirus 7
gauucacauugucacugcaaa

SEQ ID NO: 345724 - RNA, 13 nt, Human herpesvirus 7
gauuccagcacuu

SEQ ID NO: 345725 - RNA, 17 nt, Human herpesvirus 7
gauucgacuucuaaaaa

SEQ ID NO: 345726 - RNA, 18 nt, Human herpesvirus 7
gauucuccagaaauuaua

SEQ ID NO: 345727 - RNA, 14 nt, Human herpesvirus 7
gauugaaaguaaaa

SEQ ID NO: 345728 - RNA, 15 nt, Human herpesvirus 7
gauugacuaugaauu

SEQ ID NO: 345729 - RNA, 16 nt, Human herpesvirus 7
gauugaucguguguua

SEQ ID NO: 345730 - RNA, 15 nt, Human herpesvirus 7
gauugguagugugca

SEQ ID NO: 345731 - RNA, 13 nt, Human herpesvirus 7
gauuuaacugaua

SEQ ID NO: 345732 - RNA, 13 nt, Human herpesvirus 7
gauuuacauuuca

SEQ ID NO: 345733 - RNA, 12 nt, Human herpesvirus 7
gauuuagauuua

SEQ ID NO: 345734 - RNA, 13 nt, Human herpesvirus 7
gauuucuauugaa

SEQ ID NO: 345735 - RNA, 21 nt, Human herpesvirus 7
gauuucuauugaauguggaau

SEQ ID NO: 345736 - RNA, 16 nt, Human herpesvirus 7
gauuugaagguugcca

SEQ ID NO: 345737 - RNA, 14 nt, Human herpesvirus 7
gauuugcagccaga

SEQ ID NO: 345738 - RNA, 19 nt, Human herpesvirus 7
gauuuuaaaagguugacau

SEQ ID NO: 345739 - RNA, 19 nt, Human herpesvirus 7
gauuuuauuucagcuccau

SEQ ID NO: 345740 - RNA, 13 nt, Human herpesvirus 7
gauuuucuuacac

SEQ ID NO: 345741 - RNA, 13 nt, Human herpesvirus 7
gauuuuucccaaa

SEQ ID NO: 345742 - RNA, 14 nt, Human herpesvirus 7
gcaaaacugggaaa

SEQ ID NO: 345743 - RNA, 14 nt, Human herpesvirus 7
gcaaaagauuuaaa

SEQ ID NO: 345744 - RNA, 16 nt, Human herpesvirus 7
gcaaaauaugcaaaac

SEQ ID NO: 345745 - RNA, 13 nt, Human herpesvirus 7
gcaaagacuugca

SEQ ID NO: 345746 - RNA, 21 nt, Human herpesvirus 7
gcaaagacuugcaaagacaga

SEQ ID NO: 345747 - RNA, 15 nt, Human herpesvirus 7
gcaaagucucauuca

SEQ ID NO: 345748 - RNA, 16 nt, Human herpesvirus 7
gcaaauccaacagaau

SEQ ID NO: 345749 - RNA, 14 nt, Human herpesvirus 7
gcaacaaacaaaua

SEQ ID NO: 345750 - RNA, 17 nt, Human herpesvirus 7
gcaacaaauuaaauacu

SEQ ID NO: 345751 - RNA, 17 nt, Human herpesvirus 7
gcaacacuuaaaauugg

SEQ ID NO: 345752 - RNA, 20 nt, Human herpesvirus 7
gcaacauaaccaaugcugau

SEQ ID NO: 345753 - RNA, 17 nt, Human herpesvirus 7
gcaacaucuuaaauguc

SEQ ID NO: 345754 - RNA, 23 nt, Human herpesvirus 7
gcaacucuucuucagauucagua

SEQ ID NO: 345755 - RNA, 22 nt, Human herpesvirus 7
gcaacuuugugccugaaauauu

SEQ ID NO: 345756 - RNA, 21 nt, Human herpesvirus 7
gcaagaaggccacgcuguaaa

SEQ ID NO: 345757 - RNA, 22 nt, Human herpesvirus 7
gcaauagauuacgcacaaauuu

SEQ ID NO: 345758 - RNA, 18 nt, Human herpesvirus 7
gcaauaucccagaauauc

SEQ ID NO: 345759 - RNA, 22 nt, Human herpesvirus 7
gcaauuguuugauuaauuucca

SEQ ID NO: 345760 - RNA, 15 nt, Human herpesvirus 7
gcaauuuucuuaacg

SEQ ID NO: 345761 - RNA, 14 nt, Human herpesvirus 7
gcacacauuuuugc

SEQ ID NO: 345762 - RNA, 17 nt, Human herpesvirus 7
gcacacguacaauauua

SEQ ID NO: 345763 - RNA, 21 nt, Human herpesvirus 7
gcaccaaaaaauaaaaacaag

SEQ ID NO: 345764 - RNA, 15 nt, Human herpesvirus 7
gcaccgucauuuaau

SEQ ID NO: 345765 - RNA, 21 nt, Human herpesvirus 7
gcacuaucuccuaaaugaauu

SEQ ID NO: 345766 - RNA, 16 nt, Human herpesvirus 7
gcacuuagcuaauuga

SEQ ID NO: 345767 - RNA, 13 nt, Human herpesvirus 7
gcagaaaaaucca

SEQ ID NO: 345768 - RNA, 19 nt, Human herpesvirus 7
gcagaaugcguaacuuugg

SEQ ID NO: 345769 - RNA, 18 nt, Human herpesvirus 7
gcagacuaaucacgagaa

SEQ ID NO: 345770 - RNA, 19 nt, Human herpesvirus 7
gcagacuuucgugucacag

SEQ ID NO: 345771 - RNA, 22 nt, Human herpesvirus 7
gcagagauuaccugcauacuuu

SEQ ID NO: 345772 - RNA, 20 nt, Human herpesvirus 7
gcagauuuggggucugacuu

SEQ ID NO: 345773 - RNA, 14 nt, Human herpesvirus 7
gcagcuugaugaau

SEQ ID NO: 345774 - RNA, 20 nt, Human herpesvirus 7
gcagcuugaugaaucaaaau

SEQ ID NO: 345775 - RNA, 22 nt, Human herpesvirus 7
gcagcuuuuauuccuucccaac

SEQ ID NO: 345776 - RNA, 17 nt, Human herpesvirus 7
gcaggaagcacaaauca

SEQ ID NO: 345777 - RNA, 19 nt, Human herpesvirus 7
gcaguuauaugaaauuuca

SEQ ID NO: 345778 - RNA, 14 nt, Human herpesvirus 7
gcauaaaaaaucua

SEQ ID NO: 345779 - RNA, 22 nt, Human herpesvirus 7
gcauaaaaaaucuaauuaaucu

SEQ ID NO: 345780 - RNA, 13 nt, Human herpesvirus 7
gcauaaagcacca

SEQ ID NO: 345781 - RNA, 15 nt, Human herpesvirus 7
gcauaaagcaccaaa

SEQ ID NO: 345782 - RNA, 14 nt, Human herpesvirus 7
gcauaacccacuaa

SEQ ID NO: 345783 - RNA, 18 nt, Human herpesvirus 7
gcauacaguuuauuugaa

SEQ ID NO: 345784 - RNA, 19 nt, Human herpesvirus 7
gcauagauuaaauagcaaa

SEQ ID NO: 345785 - RNA, 17 nt, Human herpesvirus 7
gcauauggacuuaucaa

SEQ ID NO: 345786 - RNA, 17 nt, Human herpesvirus 7
gcauauuuugcuagaaa

SEQ ID NO: 345787 - RNA, 18 nt, Human herpesvirus 7
gcaucuccuguaaccauu

SEQ ID NO: 345788 - RNA, 17 nt, Human herpesvirus 7
gcaugaaaucuugaauu

SEQ ID NO: 345789 - RNA, 16 nt, Human herpesvirus 7
gcaugaucuccguuga

SEQ ID NO: 345790 - RNA, 18 nt, Human herpesvirus 7
gcaugcuaauauuuccaa

SEQ ID NO: 345791 - RNA, 16 nt, Human herpesvirus 7
gcaugcuuacagugaa

SEQ ID NO: 345792 - RNA, 17 nt, Human herpesvirus 7
gcaugcuuacagugaag

SEQ ID NO: 345793 - RNA, 19 nt, Human herpesvirus 7
gcauggaucguagcaacag

SEQ ID NO: 345794 - RNA, 19 nt, Human herpesvirus 7
gcauguguacuaaagccaa

SEQ ID NO: 345795 - RNA, 17 nt, Human herpesvirus 7
gcauuaggcagcgcuug

SEQ ID NO: 345796 - RNA, 20 nt, Human herpesvirus 7
gcauuauauccaauaaugca

SEQ ID NO: 345797 - RNA, 14 nt, Human herpesvirus 7
gcauugaaaucauu

SEQ ID NO: 345798 - RNA, 13 nt, Human herpesvirus 7
gcauugaaauucu

SEQ ID NO: 345799 - RNA, 14 nt, Human herpesvirus 7
gcauugcauaucau

SEQ ID NO: 345800 - RNA, 16 nt, Human herpesvirus 7
gcauugcauaucauga

SEQ ID NO: 345801 - RNA, 13 nt, Human herpesvirus 7
gcauuucacuugu

SEQ ID NO: 345802 - RNA, 19 nt, Human herpesvirus 7
gcauuuuuaaaacaagaca

SEQ ID NO: 345803 - RNA, 22 nt, Human herpesvirus 7
gcauuuuuaaaacaagacagaa

SEQ ID NO: 345804 - RNA, 18 nt, Human herpesvirus 7
gccaaaaaaacacaguau

SEQ ID NO: 345805 - RNA, 18 nt, Human herpesvirus 7
gccaaaaucuauauuuga

SEQ ID NO: 345806 - RNA, 13 nt, Human herpesvirus 7
gccaauaaaaauc

SEQ ID NO: 345807 - RNA, 16 nt, Human herpesvirus 7
gccaauaaaucuucau

SEQ ID NO: 345808 - RNA, 17 nt, Human herpesvirus 7
gccagagaaccacguga

SEQ ID NO: 345809 - RNA, 18 nt, Human herpesvirus 7
gccagggacggagcaaug

SEQ ID NO: 345810 - RNA, 18 nt, Human herpesvirus 7
gccauaaacggaauacau

SEQ ID NO: 345811 - RNA, 12 nt, Human herpesvirus 7
gccauaauuuca

SEQ ID NO: 345812 - RNA, 19 nt, Human herpesvirus 7
gccauaauuucagcacugg

SEQ ID NO: 345813 - RNA, 18 nt, Human herpesvirus 7
gccauaauuugaauuaau

SEQ ID NO: 345814 - RNA, 13 nt, Human herpesvirus 7
gccauucuuuuca

SEQ ID NO: 345815 - RNA, 14 nt, Human herpesvirus 7
gccauuuucuugag

SEQ ID NO: 345816 - RNA, 19 nt, Human herpesvirus 7
gccauuuucuugagccuug

SEQ ID NO: 345817 - RNA, 17 nt, Human herpesvirus 7
gcccugaauuuuacacc

SEQ ID NO: 345818 - RNA, 15 nt, Human herpesvirus 7
gcccugccaauuuuu

SEQ ID NO: 345819 - RNA, 17 nt, Human herpesvirus 7
gcccuuguguugucaua

SEQ ID NO: 345820 - RNA, 20 nt, Human herpesvirus 7
gcccuuucucgugagacauu

SEQ ID NO: 345821 - RNA, 23 nt, Human herpesvirus 7
gcccuuuuauugguagauuuucu

SEQ ID NO: 345822 - RNA, 18 nt, Human herpesvirus 7
gccggggacauuccucau

SEQ ID NO: 345823 - RNA, 13 nt, Human herpesvirus 7
gccgggugcugcg

SEQ ID NO: 345824 - RNA, 22 nt, Human herpesvirus 7
gccguacuuguaugcuauuaaa

SEQ ID NO: 345825 - RNA, 15 nt, Human herpesvirus 7
gccuaggauaccaaa

SEQ ID NO: 345826 - RNA, 16 nt, Human herpesvirus 7
gccugcguuugaaugu

SEQ ID NO: 345827 - RNA, 18 nt, Human herpesvirus 7
gccuggccagcaguguga

SEQ ID NO: 345828 - RNA, 19 nt, Human herpesvirus 7
gccuguuaaaagugaaccu

SEQ ID NO: 345829 - RNA, 13 nt, Human herpesvirus 7
gccuucauuuaca

SEQ ID NO: 345830 - RNA, 19 nt, Human herpesvirus 7
gccuucuaaaacaguuaau

SEQ ID NO: 345831 - RNA, 12 nt, Human herpesvirus 7
gccuuguuugcu

SEQ ID NO: 345832 - RNA, 15 nt, Human herpesvirus 7
gccuuuaaaauuuca

SEQ ID NO: 345833 - RNA, 16 nt, Human herpesvirus 7
gcgaaacaauacauga

SEQ ID NO: 345834 - RNA, 18 nt, Human herpesvirus 7
gcgaaacagcgugucaaa

SEQ ID NO: 345835 - RNA, 15 nt, Human herpesvirus 7
gcgaauuugugcugu

SEQ ID NO: 345836 - RNA, 19 nt, Human herpesvirus 7
gcgaauuuuaucauuucaa

SEQ ID NO: 345837 - RNA, 19 nt, Human herpesvirus 7
gcgacauuauaaaagaugg

SEQ ID NO: 345838 - RNA, 15 nt, Human herpesvirus 7
ggcuaaucucuuuuc

SEQ ID NO: 345839 - RNA, 12 nt, Human herpesvirus 7
ggcucauuucaa

SEQ ID NO: 345840 - RNA, 13 nt, Human herpesvirus 7
ggcugcagcgaga

SEQ ID NO: 345841 - RNA, 22 nt, Human herpesvirus 7
ggcuuaaaauuuuacgaugaca

SEQ ID NO: 345842 - RNA, 17 nt, Human herpesvirus 7
ggcuuaagcagcagaca

SEQ ID NO: 345843 - RNA, 23 nt, Human herpesvirus 7
ggcuuagaauauuuauguucaaa

SEQ ID NO: 345844 - RNA, 17 nt, Human herpesvirus 7
gggaaaaaggauuugaa

SEQ ID NO: 345845 - RNA, 19 nt, Human herpesvirus 7
gggaagaaacagcugaaaa

SEQ ID NO: 345846 - RNA, 18 nt, Human herpesvirus 7
gggauguucuauucucau

SEQ ID NO: 345847 - RNA, 14 nt, Human herpesvirus 7
gggauucuuugaau

SEQ ID NO: 345848 - RNA, 15 nt, Human herpesvirus 7
ggggaagaaucaaga

SEQ ID NO: 345849 - RNA, 22 nt, Human herpesvirus 7
ggggauguucuauucucauaga

SEQ ID NO: 345850 - RNA, 17 nt, Human herpesvirus 7
gguaaagaaccuaucaa

SEQ ID NO: 345851 - RNA, 19 nt, Human herpesvirus 7
gguaaauccuucguaacau

SEQ ID NO: 345852 - RNA, 20 nt, Human herpesvirus 7
gguaagaaaaaucauuuuua

SEQ ID NO: 345853 - RNA, 22 nt, Human herpesvirus 7
gguaauuagugaaaacuugaua

SEQ ID NO: 345854 - RNA, 19 nt, Human herpesvirus 7
gguacaacaaacauuccaa

SEQ ID NO: 345855 - RNA, 17 nt, Human herpesvirus 7
gguaucuuuacuuucau

SEQ ID NO: 345856 - RNA, 14 nt, Human herpesvirus 7
ggucacaaaagcuu

SEQ ID NO: 345857 - RNA, 22 nt, Human herpesvirus 7
ggucacauaggaaucgcagugu

SEQ ID NO: 345858 - RNA, 18 nt, Human herpesvirus 7
ggucacggauuagcuuuc

SEQ ID NO: 345859 - RNA, 16 nt, Human herpesvirus 7
gguccaauagaaaaca

SEQ ID NO: 345860 - RNA, 14 nt, Human herpesvirus 7
ggucuuccacuguu

SEQ ID NO: 345861 - RNA, 23 nt, Human herpesvirus 7
ggugcucaaacguucuuggucau

SEQ ID NO: 345862 - RNA, 20 nt, Human herpesvirus 7
ggugucuucggccuugcuga

SEQ ID NO: 345863 - RNA, 17 nt, Human herpesvirus 7
gguguguccagauaaua

SEQ ID NO: 345864 - RNA, 19 nt, Human herpesvirus 7
gguguuguuuccgaucuaa

SEQ ID NO: 345865 - RNA, 14 nt, Human herpesvirus 7
gguuagacaauaaa

SEQ ID NO: 345866 - RNA, 22 nt, Human herpesvirus 7
gguucggcaacggccauucacc

SEQ ID NO: 345867 - RNA, 20 nt, Human herpesvirus 7
gguucugugugguuacauaa

SEQ ID NO: 345868 - RNA, 13 nt, Human herpesvirus 7
gguugucuguucu

SEQ ID NO: 345869 - RNA, 21 nt, Human herpesvirus 7
gguuucuaggcuucauuggca

SEQ ID NO: 345870 - RNA, 15 nt, Human herpesvirus 7
guaaaaaaaauggag

SEQ ID NO: 345871 - RNA, 20 nt, Human herpesvirus 7
guaaacauuuguugcuuuuu

SEQ ID NO: 345872 - RNA, 20 nt, Human herpesvirus 7
guaaaccuucgugugucucu

SEQ ID NO: 345873 - RNA, 15 nt, Human herpesvirus 7
guaaacucacuucua

SEQ ID NO: 345874 - RNA, 15 nt, Human herpesvirus 7
guaaagaaccuauca

SEQ ID NO: 345875 - RNA, 20 nt, Human herpesvirus 7
guaaagauaauguuacauua

SEQ ID NO: 345876 - RNA, 23 nt, Human herpesvirus 7
guaaaggaaauuaguucuuguga

SEQ ID NO: 345877 - RNA, 22 nt, Human herpesvirus 7
guaaauaaaaugguugugcaau

SEQ ID NO: 345878 - RNA, 20 nt, Human herpesvirus 7
guaaauauuuuuaaaaucua

SEQ ID NO: 345879 - RNA, 15 nt, Human herpesvirus 7
guaacagaccuccua

SEQ ID NO: 345880 - RNA, 15 nt, Human herpesvirus 7
guaacaugucuucaa

SEQ ID NO: 345881 - RNA, 20 nt, Human herpesvirus 7
guaacggauuuacauuucau

SEQ ID NO: 345882 - RNA, 19 nt, Human herpesvirus 7
guaacuguuuuucaaaaac

SEQ ID NO: 345883 - RNA, 19 nt, Human herpesvirus 7
guaacuuucaucuguguua

SEQ ID NO: 345884 - RNA, 20 nt, Human herpesvirus 7
guaacuuucaucuguguuau

SEQ ID NO: 345885 - RNA, 14 nt, Human herpesvirus 7
guaacuuuuugccg

SEQ ID NO: 345886 - RNA, 22 nt, Human herpesvirus 7
guaagaugcagacugcgcuugg

SEQ ID NO: 345887 - RNA, 13 nt, Human herpesvirus 7
guaaucacauuau

SEQ ID NO: 345888 - RNA, 13 nt, Human herpesvirus 7
guaaucauucaag

SEQ ID NO: 345889 - RNA, 19 nt, Human herpesvirus 7
guaaucuagaacuguuaaa

SEQ ID NO: 345890 - RNA, 14 nt, Human herpesvirus 7
guaauggauuuaau

SEQ ID NO: 345891 - RNA, 14 nt, Human herpesvirus 7
guaauguuacuaua

SEQ ID NO: 345892 - RNA, 15 nt, Human herpesvirus 7
guaauuagugaaaac

SEQ ID NO: 345893 - RNA, 18 nt, Human herpesvirus 7
guaauuagugaaaacuug

SEQ ID NO: 345894 - RNA, 16 nt, Human herpesvirus 7
guaauuggaguaauca

SEQ ID NO: 345895 - RNA, 22 nt, Human herpesvirus 7
guaauuuaugcuuuaacuggaa

SEQ ID NO: 345896 - RNA, 23 nt, Human herpesvirus 7
guaauuuaugcuuuaacuggaau

SEQ ID NO: 345897 - RNA, 20 nt, Human herpesvirus 7
guaauuuggcuucuauuaua

SEQ ID NO: 345898 - RNA, 10 nt, Human herpesvirus 7
guacaacaaa

SEQ ID NO: 345899 - RNA, 17 nt, Human herpesvirus 7
guacaacaaacauucca

SEQ ID NO: 345900 - RNA, 16 nt, Human herpesvirus 7
guacaacgacauugaa

SEQ ID NO: 345901 - RNA, 15 nt, Human herpesvirus 7
guacaauauuaaacu

SEQ ID NO: 345902 - RNA, 16 nt, Human herpesvirus 7
guacagucauuugcag

SEQ ID NO: 345903 - RNA, 14 nt, Human herpesvirus 7
guacaucuuucuag

SEQ ID NO: 345904 - RNA, 18 nt, Human herpesvirus 7
guaccaaucaagccacga

SEQ ID NO: 345905 - RNA, 23 nt, Human herpesvirus 7
guaccuuagaaucacaacauaua

SEQ ID NO: 345906 - RNA, 14 nt, Human herpesvirus 7
guacuaaagccaau

SEQ ID NO: 345907 - RNA, 22 nt, Human herpesvirus 7
guacuccuucuaccucuuacau

SEQ ID NO: 345908 - RNA, 18 nt, Human herpesvirus 7
guacuuguaccaaucaag

SEQ ID NO: 345909 - RNA, 16 nt, Human herpesvirus 7
guagaaaaugcuguuu

SEQ ID NO: 345910 - RNA, 12 nt, Human herpesvirus 7
guagaauguguu

SEQ ID NO: 345911 - RNA, 15 nt, Human herpesvirus 7
guagauauuuugaca

SEQ ID NO: 345912 - RNA, 17 nt, Human herpesvirus 7
guagaugcaugcuaaua

SEQ ID NO: 345913 - RNA, 19 nt, Human herpesvirus 7
guaguuauuuguuccaguu

SEQ ID NO: 345914 - RNA, 14 nt, Human herpesvirus 7
guauaacucaaaag

SEQ ID NO: 345915 - RNA, 21 nt, Human herpesvirus 7
guauauucuaguuuucuuugu

SEQ ID NO: 345916 - RNA, 15 nt, Human herpesvirus 7
guauauuugcuguuu

SEQ ID NO: 345917 - RNA, 17 nt, Human herpesvirus 7
guaucuagagaauguac

SEQ ID NO: 345918 - RNA, 13 nt, Human herpesvirus 7
guaucuccaaagu

SEQ ID NO: 345919 - RNA, 14 nt, Human herpesvirus 7
guaucugugacuua

SEQ ID NO: 345920 - RNA, 11 nt, Human herpesvirus 7
guaugaugacg

SEQ ID NO: 345921 - RNA, 15 nt, Human herpesvirus 7
guauucaaacauuau

SEQ ID NO: 345922 - RNA, 17 nt, Human herpesvirus 7
guauuuguugaucuuca

SEQ ID NO: 345923 - RNA, 18 nt, Human herpesvirus 7
guauuuguugaucuucaa

SEQ ID NO: 345924 - RNA, 18 nt, Human herpesvirus 7
guauuuuguuuugcauau

SEQ ID NO: 345925 - RNA, 16 nt, Human herpesvirus 7
gucaacuaaaauauau

SEQ ID NO: 345926 - RNA, 14 nt, Human herpesvirus 7
gucaauauuuuugc

SEQ ID NO: 345927 - RNA, 13 nt, Human herpesvirus 7
gucacguucuaaa

SEQ ID NO: 345928 - RNA, 13 nt, Human herpesvirus 7
gucacugagccau

SEQ ID NO: 345929 - RNA, 17 nt, Human herpesvirus 7
gucaucgguagugucug

SEQ ID NO: 345930 - RNA, 12 nt, Human herpesvirus 7
gucaugaugaau

SEQ ID NO: 345931 - RNA, 20 nt, Human herpesvirus 7
gucaugaugaauauaacaaa

SEQ ID NO: 345932 - RNA, 12 nt, Human herpesvirus 7
gucaugcuguau

SEQ ID NO: 345933 - RNA, 19 nt, Human herpesvirus 7
gucauggacggcauuuaac

SEQ ID NO: 345934 - RNA, 17 nt, Human herpesvirus 7
guccaaaaguuguuaag

SEQ ID NO: 345935 - RNA, 23 nt, Human herpesvirus 7
guccaauagaaaacaaaucugau

SEQ ID NO: 345936 - RNA, 23 nt, Human herpesvirus 7
guccacuacagauauugaugacg

SEQ ID NO: 345937 - RNA, 19 nt, Human herpesvirus 7
gucccaaacaggcauuuaa

SEQ ID NO: 345938 - RNA, 22 nt, Human herpesvirus 7
guccuucaauagcagagaauau

SEQ ID NO: 345939 - RNA, 23 nt, Human herpesvirus 7
gucgaaaugaaaagucugugaca

SEQ ID NO: 345940 - RNA, 15 nt, Human herpesvirus 7
gucgcaauguuagaa

SEQ ID NO: 345941 - RNA, 16 nt, Human herpesvirus 7
gucgcuuggguuugau

SEQ ID NO: 345942 - RNA, 12 nt, Human herpesvirus 7
gucucauaauau

SEQ ID NO: 345943 - RNA, 19 nt, Human herpesvirus 7
gucucuaaacuucuagccu

SEQ ID NO: 345944 - RNA, 22 nt, Human herpesvirus 7
gucucuccaggcuaaaacuguc

SEQ ID NO: 345945 - RNA, 19 nt, Human herpesvirus 7
gucucucgcaacuucugau

SEQ ID NO: 345946 - RNA, 14 nt, Human herpesvirus 7
gucugauucuuauu

SEQ ID NO: 345947 - RNA, 23 nt, Human herpesvirus 7
gucuguagaugcaugcuaauauu

SEQ ID NO: 345948 - RNA, 12 nt, Human herpesvirus 7
gucugugacaga

SEQ ID NO: 345949 - RNA, 13 nt, Human herpesvirus 7
gucuguguuauac

SEQ ID NO: 345950 - RNA, 23 nt, Human herpesvirus 7
gucuuauuacucgaugcuucaau

SEQ ID NO: 345951 - RNA, 21 nt, Human herpesvirus 7
gucuucauccguggaaucuau

SEQ ID NO: 345952 - RNA, 14 nt, Human herpesvirus 7
gucuuguguucaag

SEQ ID NO: 345953 - RNA, 13 nt, Human herpesvirus 7
guuuugcauauuu

SEQ ID NO: 345954 - RNA, 14 nt, Human herpesvirus 7
guuuugcuauucac

SEQ ID NO: 345955 - RNA, 22 nt, Human herpesvirus 7
guuuuugaugugcaacauaacc

SEQ ID NO: 345956 - RNA, 15 nt, Human herpesvirus 7
guuuuuuaauacaaa

SEQ ID NO: 345957 - RNA, 22 nt, Human herpesvirus 7
guuuuuuggcauuauagguuac

SEQ ID NO: 345958 - RNA, 18 nt, Human herpesvirus 7
uaaaaaaaaaaccacaaa

SEQ ID NO: 345959 - RNA, 17 nt, Human herpesvirus 7
uaaaaaaaucaguguaa

SEQ ID NO: 345960 - RNA, 13 nt, Human herpesvirus 7
uaaaaaauuugaa

SEQ ID NO: 345961 - RNA, 16 nt, Human herpesvirus 7
uaaaaacaaagacuau

SEQ ID NO: 345962 - RNA, 19 nt, Human herpesvirus 7
uaaaaacgaacacuuucua

SEQ ID NO: 345963 - RNA, 20 nt, Human herpesvirus 7
uaaaaacuuuucuuucuuaa

SEQ ID NO: 345964 - RNA, 16 nt, Human herpesvirus 7
uaaaaagaaugcuaaa

SEQ ID NO: 345965 - RNA, 14 nt, Human herpesvirus 7
uaaaaagcccauga

SEQ ID NO: 345966 - RNA, 15 nt, Human herpesvirus 7
uaaaaagcccaugaa

SEQ ID NO: 345967 - RNA, 14 nt, Human herpesvirus 7
uaaaaaucucagcu

SEQ ID NO: 345968 - RNA, 16 nt, Human herpesvirus 7
uaaaacaaacuauguc

SEQ ID NO: 345969 - RNA, 22 nt, Human herpesvirus 7
uaaaacaaacuauguccaaaaa

SEQ ID NO: 345970 - RNA, 22 nt, Human herpesvirus 7
uaaaacaagacagaaaugaauc

SEQ ID NO: 345971 - RNA, 13 nt, Human herpesvirus 7
uaaaacaguagaa

SEQ ID NO: 345972 - RNA, 21 nt, Human herpesvirus 7
uaaaacaugcaacauaaucca

SEQ ID NO: 345973 - RNA, 15 nt, Human herpesvirus 7
uaaaacuacauuuaa

SEQ ID NO: 345974 - RNA, 20 nt, Human herpesvirus 7
uaaaagauggaaaguuuaua

SEQ ID NO: 345975 - RNA, 12 nt, Human herpesvirus 7
uaaaagcauaug

SEQ ID NO: 345976 - RNA, 21 nt, Human herpesvirus 7
uaaaagcuuucuuucucauca

SEQ ID NO: 345977 - RNA, 18 nt, Human herpesvirus 7
uaaaaggccguuuaugaa

SEQ ID NO: 345978 - RNA, 14 nt, Human herpesvirus 7
uaaaaguacagugu

SEQ ID NO: 345979 - RNA, 15 nt, Human herpesvirus 7
uaaaaguaucauuaa

SEQ ID NO: 345980 - RNA, 22 nt, Human herpesvirus 7
uaaaaguuugguuaaaguguga

SEQ ID NO: 345981 - RNA, 22 nt, Human herpesvirus 7
uaaaauaucuuuuucaaaugga

SEQ ID NO: 345982 - RNA, 23 nt, Human herpesvirus 7
uaaaauaucuuuuucaaauggau

SEQ ID NO: 345983 - RNA, 19 nt, Human herpesvirus 7
uaaaaucaauuuauccuaa

SEQ ID NO: 345984 - RNA, 13 nt, Human herpesvirus 7
uaaaaucuacugu

SEQ ID NO: 345985 - RNA, 14 nt, Human herpesvirus 7
uaaaaucuacugua

SEQ ID NO: 345986 - RNA, 19 nt, Human herpesvirus 7
uaaaaucuacuguaaucug

SEQ ID NO: 345987 - RNA, 17 nt, Human herpesvirus 7
uaaaaugaugaugacaa

SEQ ID NO: 345988 - RNA, 16 nt, Human herpesvirus 7
uaaaaugguugugcaa

SEQ ID NO: 345989 - RNA, 19 nt, Human herpesvirus 7
uaaaaugguugugcaauuu

SEQ ID NO: 345990 - RNA, 16 nt, Human herpesvirus 7
uaaaauguacaauucc

SEQ ID NO: 345991 - RNA, 19 nt, Human herpesvirus 7
uaaaauguacauaacucua

SEQ ID NO: 345992 - RNA, 21 nt, Human herpesvirus 7
uaaaauguacauaacucuauc

SEQ ID NO: 345993 - RNA, 21 nt, Human herpesvirus 7
uaaaauguuuuagaccuauca

SEQ ID NO: 345994 - RNA, 23 nt, Human herpesvirus 7
uaaaauguuuuagaccuaucaaa

SEQ ID NO: 345995 - RNA, 23 nt, Human herpesvirus 7
uaaaauuaauaauauuaguauua

SEQ ID NO: 345996 - RNA, 17 nt, Human herpesvirus 7
uaaaauuaauucaauca

SEQ ID NO: 345997 - RNA, 23 nt, Human herpesvirus 7
uaaaauuaauucaaucaccaaag

SEQ ID NO: 345998 - RNA, 19 nt, Human herpesvirus 7
uaaaauuucauaucuauga

SEQ ID NO: 345999 - RNA, 17 nt, Human herpesvirus 7
uaaaauuuucuuagcuu

SEQ ID NO: 346000 - RNA, 17 nt, Human herpesvirus 7
uaaacaaaacaguuugu

SEQ ID NO: 346001 - RNA, 14 nt, Human herpesvirus 7
uaaacaaacaauga

SEQ ID NO: 346002 - RNA, 18 nt, Human herpesvirus 7
uaaacaaacaaugagcaa

SEQ ID NO: 346003 - RNA, 21 nt, Human herpesvirus 7
uaaacaaacaaugagcaauuc

SEQ ID NO: 346004 - RNA, 21 nt, Human herpesvirus 7
uaaacaaucuggacauuucaa

SEQ ID NO: 346005 - RNA, 18 nt, Human herpesvirus 7
uaaacacuugcuagcugu

SEQ ID NO: 346006 - RNA, 20 nt, Human herpesvirus 7
uaaacacuugcuagcuguga

SEQ ID NO: 346007 - RNA, 22 nt, Human herpesvirus 7
uaaacacuugcuagcugugaua

SEQ ID NO: 346008 - RNA, 12 nt, Human herpesvirus 7
uaaacagcauuu

SEQ ID NO: 346009 - RNA, 17 nt, Human herpesvirus 7
uaaacauguugaaagaa

SEQ ID NO: 346010 - RNA, 17 nt, Human herpesvirus 7
uaaacauuuguugcuuu

SEQ ID NO: 346011 - RNA, 19 nt, Human herpesvirus 7
uaaacauuuguugcuuuuu

SEQ ID NO: 346012 - RNA, 18 nt, Human herpesvirus 7
uaaacauuuuugaagcuu

SEQ ID NO: 346013 - RNA, 19 nt, Human herpesvirus 7
uaaaccugcuaacaaguau

SEQ ID NO: 346014 - RNA, 16 nt, Human herpesvirus 7
uaaacgaagaaucauu

SEQ ID NO: 346015 - RNA, 14 nt, Human herpesvirus 7
uaaacuucuagccu

SEQ ID NO: 346016 - RNA, 21 nt, Human herpesvirus 7
uaaagaaaagcaaaccuuaca

SEQ ID NO: 346017 - RNA, 22 nt, Human herpesvirus 7
uaaagaacaagagcagauggga

SEQ ID NO: 346018 - RNA, 14 nt, Human herpesvirus 7
uaaagaaccuauca

SEQ ID NO: 346019 - RNA, 16 nt, Human herpesvirus 7
uaaagaacuccauucg

SEQ ID NO: 346020 - RNA, 20 nt, Human herpesvirus 7
uaaagaagagguaaguguaa

SEQ ID NO: 346021 - RNA, 18 nt, Human herpesvirus 7
uaaagacacuuauuugau

SEQ ID NO: 346022 - RNA, 21 nt, Human herpesvirus 7
uaaagagaaaauaaacauguu

SEQ ID NO: 346023 - RNA, 18 nt, Human herpesvirus 7
uaaagagcauucaugccu

SEQ ID NO: 346024 - RNA, 23 nt, Human herpesvirus 7
uaaagagucuauugacauaauca

SEQ ID NO: 346025 - RNA, 15 nt, Human herpesvirus 7
uaaagaguguuuuca

SEQ ID NO: 346026 - RNA, 20 nt, Human herpesvirus 7
uaaagaugauuggauuuucu

SEQ ID NO: 346027 - RNA, 21 nt, Human herpesvirus 7
uaaagaugauuggauuuucug

SEQ ID NO: 346028 - RNA, 17 nt, Human herpesvirus 7
uaaagauuacauuugcu

SEQ ID NO: 346029 - RNA, 18 nt, Human herpesvirus 7
uaaagauuacauuugcuu

SEQ ID NO: 346030 - RNA, 23 nt, Human herpesvirus 7
uaaagauugaucacuuugcauca

SEQ ID NO: 346031 - RNA, 21 nt, Human herpesvirus 7
uaaagauugcuugcacuguaa

SEQ ID NO: 346032 - RNA, 10 nt, Human herpesvirus 7
uaaagcacca

SEQ ID NO: 346033 - RNA, 23 nt, Human herpesvirus 7
uaaaggaaaauauauuaaucuug

SEQ ID NO: 346034 - RNA, 19 nt, Human herpesvirus 7
uaaaggaucaaaagcugca

SEQ ID NO: 346035 - RNA, 13 nt, Human herpesvirus 7
uaaaggaucucuc

SEQ ID NO: 346036 - RNA, 18 nt, Human herpesvirus 7
uaaaguggagacaaucua

SEQ ID NO: 346037 - RNA, 20 nt, Human herpesvirus 7
uaaaguuaacauauguugau

SEQ ID NO: 346038 - RNA, 15 nt, Human herpesvirus 7
uaaaguugcauugaa

SEQ ID NO: 346039 - RNA, 16 nt, Human herpesvirus 7
uaaaguuuccauaaau

SEQ ID NO: 346040 - RNA, 15 nt, Human herpesvirus 7
uaaauaaaaacaugg

SEQ ID NO: 346041 - RNA, 20 nt, Human herpesvirus 7
uaaauaaacgguagaaugug

SEQ ID NO: 346042 - RNA, 20 nt, Human herpesvirus 7
uaaauaauccauuccugugu

SEQ ID NO: 346043 - RNA, 13 nt, Human herpesvirus 7
uaaauaauucaca

SEQ ID NO: 346044 - RNA, 14 nt, Human herpesvirus 7
uaaauaccaaaaac

SEQ ID NO: 346045 - RNA, 19 nt, Human herpesvirus 7
uaaauacuauuacgaguga

SEQ ID NO: 346046 - RNA, 17 nt, Human herpesvirus 7
uaaauacucaugaagga

SEQ ID NO: 346047 - RNA, 17 nt, Human herpesvirus 7
uaaauacuugcaaugca

SEQ ID NO: 346048 - RNA, 20 nt, Human herpesvirus 7
uaaauaugaugaaacuucca

SEQ ID NO: 346049 - RNA, 12 nt, Human herpesvirus 7
uaaauauucuaa

SEQ ID NO: 346050 - RNA, 13 nt, Human herpesvirus 7
uaaauauuuuaca

SEQ ID NO: 346051 - RNA, 18 nt, Human herpesvirus 7
uaaaucaaccaacauucu

SEQ ID NO: 346052 - RNA, 23 nt, Human herpesvirus 7
uaaaugaagagaauuuagauuaa

SEQ ID NO: 346053 - RNA, 19 nt, Human herpesvirus 7
uaaaugaaguuuguuuacc

SEQ ID NO: 346054 - RNA, 22 nt, Human herpesvirus 7
uaaauguaauuuaaauaauuua

SEQ ID NO: 346055 - RNA, 18 nt, Human herpesvirus 7
uaaauguguaacaauuga

SEQ ID NO: 346056 - RNA, 23 nt, Human herpesvirus 7
uaaaugugucuuacaacuagaaa

SEQ ID NO: 346057 - RNA, 16 nt, Human herpesvirus 7
uaaaugugucuuccau

SEQ ID NO: 346058 - RNA, 18 nt, Human herpesvirus 7
uaaaugugucuuccauau

SEQ ID NO: 346059 - RNA, 15 nt, Human herpesvirus 7
uaaauuacacucugu

SEQ ID NO: 346060 - RNA, 18 nt, Human herpesvirus 7
uaaauucaacaucuuuca

SEQ ID NO: 346061 - RNA, 22 nt, Human herpesvirus 7
uaaauucaaggaauucugacuc

SEQ ID NO: 346062 - RNA, 14 nt, Human herpesvirus 7
uaaauucugaaaua

SEQ ID NO: 346063 - RNA, 17 nt, Human herpesvirus 7
uaaauuuaaagauugcu

SEQ ID NO: 346064 - RNA, 13 nt, Human herpesvirus 7
uaaauuuacuuga

SEQ ID NO: 346065 - RNA, 22 nt, Human herpesvirus 7
uaaauuucuuaaagaugucuua

SEQ ID NO: 346066 - RNA, 15 nt, Human herpesvirus 7
uaaauuugcuugcuu

SEQ ID NO: 346067 - RNA, 24 nt, Human herpesvirus 7
uacaaacagaagcugacuuuguca

SEQ ID NO: 346068 - RNA, 14 nt, Human herpesvirus 7
uacaaagaccucga

SEQ ID NO: 346069 - RNA, 22 nt, Human herpesvirus 7
uacaaauuuaagagacauugaa

SEQ ID NO: 346070 - RNA, 21 nt, Human herpesvirus 7
uacaaauuuuaauagucuaaa

SEQ ID NO: 346071 - RNA, 16 nt, Human herpesvirus 7
uacaacaaacauucca

SEQ ID NO: 346072 - RNA, 21 nt, Human herpesvirus 7
uacaacaaagaaaaaacuaac

SEQ ID NO: 346073 - RNA, 13 nt, Human herpesvirus 7
uacaaccacaacc

SEQ ID NO: 346074 - RNA, 15 nt, Human herpesvirus 7
uacaacgacauugaa

SEQ ID NO: 346075 - RNA, 16 nt, Human herpesvirus 7
uacaacgacauugaaa

SEQ ID NO: 346076 - RNA, 13 nt, Human herpesvirus 7
uacaacuuugcca

SEQ ID NO: 346077 - RNA, 16 nt, Human herpesvirus 7
uacaaguccuuugaua

SEQ ID NO: 346078 - RNA, 22 nt, Human herpesvirus 7
uacaauagugaacaugugcuga

SEQ ID NO: 346079 - RNA, 20 nt, Human herpesvirus 7
uacacaaauugauccugcua

SEQ ID NO: 346080 - RNA, 18 nt, Human herpesvirus 7
uacacugauuucuacaau

SEQ ID NO: 346081 - RNA, 13 nt, Human herpesvirus 7
uacagacagaaug

SEQ ID NO: 346082 - RNA, 19 nt, Human herpesvirus 7
uacagcguggccuucuugc

SEQ ID NO: 346083 - RNA, 15 nt, Human herpesvirus 7
uacagcuuucauuau

SEQ ID NO: 346084 - RNA, 16 nt, Human herpesvirus 7
uacaguaaauugcaac

SEQ ID NO: 346085 - RNA, 18 nt, Human herpesvirus 7
uacauauuagaauuggga

SEQ ID NO: 346086 - RNA, 19 nt, Human herpesvirus 7
uacauccuuaaauuuuaca

SEQ ID NO: 346087 - RNA, 22 nt, Human herpesvirus 7
uacaucuaggucuuccacuguu

SEQ ID NO: 346088 - RNA, 16 nt, Human herpesvirus 7
uacaugaucuuguaau

SEQ ID NO: 346089 - RNA, 16 nt, Human herpesvirus 7
uacauggggcauuaau

SEQ ID NO: 346090 - RNA, 19 nt, Human herpesvirus 7
uacauggggcauuaauucu

SEQ ID NO: 346091 - RNA, 21 nt, Human herpesvirus 7
uacauguaacuguuuuucaaa

SEQ ID NO: 346092 - RNA, 21 nt, Human herpesvirus 7
uacauguaauucgcuuaccuu

SEQ ID NO: 346093 - RNA, 14 nt, Human herpesvirus 7
uacauuacuggaug

SEQ ID NO: 346094 - RNA, 12 nt, Human herpesvirus 7
uacauucucaaa

SEQ ID NO: 346095 - RNA, 10 nt, Human herpesvirus 7
uacauuucaa

SEQ ID NO: 346096 - RNA, 20 nt, Human herpesvirus 7
uacauuucaaacaacauauc

SEQ ID NO: 346097 - RNA, 21 nt, Human herpesvirus 7
uacauuucaaacaacauaucg

SEQ ID NO: 346098 - RNA, 12 nt, Human herpesvirus 7
uaccaaacaaaa

SEQ ID NO: 346099 - RNA, 16 nt, Human herpesvirus 7
uaccauaaauaccaaa

SEQ ID NO: 346100 - RNA, 18 nt, Human herpesvirus 7
uaccauaaauaccaaaaa

SEQ ID NO: 346101 - RNA, 12 nt, Human herpesvirus 7
uaccgaaagugu

SEQ ID NO: 346102 - RNA, 18 nt, Human herpesvirus 7
uaccgauggaacugaaaa

SEQ ID NO: 346103 - RNA, 15 nt, Human herpesvirus 7
uaccgguacauuuau

SEQ ID NO: 346104 - RNA, 22 nt, Human herpesvirus 7
uaccguuuaaugaaaaagccau

SEQ ID NO: 346105 - RNA, 14 nt, Human herpesvirus 7
uaccuuagaaucac

SEQ ID NO: 346106 - RNA, 22 nt, Human herpesvirus 7
uacgaacugauauuaaaucaua

SEQ ID NO: 346107 - RNA, 14 nt, Human herpesvirus 7
uacgaugacagucu

SEQ ID NO: 346108 - RNA, 14 nt, Human herpesvirus 7
uacgauuuugugac

SEQ ID NO: 346109 - RNA, 15 nt, Human herpesvirus 7
uacgcacaaauuucu

SEQ ID NO: 346110 - RNA, 16 nt, Human herpesvirus 7
uacgccaaaucuaauu

SEQ ID NO: 346111 - RNA, 19 nt, Human herpesvirus 7
uacgccaaaucuaauuuau

SEQ ID NO: 346112 - RNA, 20 nt, Human herpesvirus 7
uacgugagcacggcacacaa

SEQ ID NO: 346113 - RNA, 13 nt, Human herpesvirus 7
uacgugaugccau

SEQ ID NO: 346114 - RNA, 21 nt, Human herpesvirus 7
uacgugaugccauaauuucag

SEQ ID NO: 346115 - RNA, 14 nt, Human herpesvirus 7
uacguguucauuua

SEQ ID NO: 346116 - RNA, 23 nt, Human herpesvirus 7
uacguuaguugcagcugugauau

SEQ ID NO: 346117 - RNA, 12 nt, Human herpesvirus 7
uacuaaagccaa

SEQ ID NO: 346118 - RNA, 22 nt, Human herpesvirus 7
uacuacucagaagacauauuag

SEQ ID NO: 346119 - RNA, 15 nt, Human herpesvirus 7
uacuagcagaucucg

SEQ ID NO: 346120 - RNA, 18 nt, Human herpesvirus 7
uacucccucuaguggcaa

SEQ ID NO: 346121 - RNA, 22 nt, Human herpesvirus 7
uacucgaugcuucaauucacca

SEQ ID NO: 346122 - RNA, 14 nt, Human herpesvirus 7
uacucguguugcaa

SEQ ID NO: 346123 - RNA, 17 nt, Human herpesvirus 7
uacucuuucugacauug

SEQ ID NO: 346124 - RNA, 14 nt, Human herpesvirus 7
uacugaaaccaaag

SEQ ID NO: 346125 - RNA, 18 nt, Human herpesvirus 7
uacugaaucugaagaaga

SEQ ID NO: 346126 - RNA, 22 nt, Human herpesvirus 7
uacugauguaaaauuaauucaa

SEQ ID NO: 346127 - RNA, 15 nt, Human herpesvirus 7
uacuggcaugucuca

SEQ ID NO: 346128 - RNA, 20 nt, Human herpesvirus 7
uacuguuaagaauuccagau

SEQ ID NO: 346129 - RNA, 22 nt, Human herpesvirus 7
uacuguugauacaacuaaaaau

SEQ ID NO: 346130 - RNA, 22 nt, Human herpesvirus 7
uacuuaaauauuuuacauauua

SEQ ID NO: 346131 - RNA, 19 nt, Human herpesvirus 7
uacuuauguguuacaugau

SEQ ID NO: 346132 - RNA, 15 nt, Human herpesvirus 7
uacuuccuaaucuaa

SEQ ID NO: 346133 - RNA, 17 nt, Human herpesvirus 7
uacuuccuaaucuaaca

SEQ ID NO: 346134 - RNA, 15 nt, Human herpesvirus 7
uacuugcaaugcaaa

SEQ ID NO: 346135 - RNA, 14 nt, Human herpesvirus 7
uacuuguaugcuau

SEQ ID NO: 346136 - RNA, 21 nt, Human herpesvirus 7
uagaaaaaaacaaugaaaguu

SEQ ID NO: 346137 - RNA, 17 nt, Human herpesvirus 7
uagaaaaacgcuaacca

SEQ ID NO: 346138 - RNA, 19 nt, Human herpesvirus 7
uagaaaacaaaucugauaa

SEQ ID NO: 346139 - RNA, 20 nt, Human herpesvirus 7
uagaaaacaucccuuuccaa

SEQ ID NO: 346140 - RNA, 14 nt, Human herpesvirus 7
uagaaaaucuacca

SEQ ID NO: 346141 - RNA, 21 nt, Human herpesvirus 7
uagaaacaaucccagaaauuu

SEQ ID NO: 346142 - RNA, 13 nt, Human herpesvirus 7
uagaaauuaugaa

SEQ ID NO: 346143 - RNA, 18 nt, Human herpesvirus 7
uagaaauuauuguacauu

SEQ ID NO: 346144 - RNA, 18 nt, Human herpesvirus 7
uagaaauuguuaccuaaa

SEQ ID NO: 346145 - RNA, 22 nt, Human herpesvirus 7
uagaaauuguuaccuaaaccua

SEQ ID NO: 346146 - RNA, 22 nt, Human herpesvirus 7
uagaacaaguagaaaaugcugu

SEQ ID NO: 346147 - RNA, 14 nt, Human herpesvirus 7
uagaagaaagucau

SEQ ID NO: 346148 - RNA, 14 nt, Human herpesvirus 7
uagaagaugacuca

SEQ ID NO: 346149 - RNA, 14 nt, Human herpesvirus 7
uagaaggaaaccaa

SEQ ID NO: 346150 - RNA, 17 nt, Human herpesvirus 7
uagaaucacaacauaua

SEQ ID NO: 346151 - RNA, 20 nt, Human herpesvirus 7
uagaauggcaccccugccag

SEQ ID NO: 346152 - RNA, 21 nt, Human herpesvirus 7
uagaauggcaccccugccagu

SEQ ID NO: 346153 - RNA, 20 nt, Human herpesvirus 7
uagacaaauuaaacaaucug

SEQ ID NO: 346154 - RNA, 21 nt, Human herpesvirus 7
uagacaaauuaaacaaucugg

SEQ ID NO: 346155 - RNA, 13 nt, Human herpesvirus 7
uagacacauuuau

SEQ ID NO: 346156 - RNA, 21 nt, Human herpesvirus 7
uagacauuucguuauuccauc

SEQ ID NO: 346157 - RNA, 23 nt, Human herpesvirus 7
uagacgaggccaaucugcacauu

SEQ ID NO: 346158 - RNA, 17 nt, Human herpesvirus 7
uagacguagugucauca

SEQ ID NO: 346159 - RNA, 24 nt, Human herpesvirus 7
uagacguagugucaucacuuauga

SEQ ID NO: 346160 - RNA, 20 nt, Human herpesvirus 7
uagacugagacgagcaucua

SEQ ID NO: 346161 - RNA, 19 nt, Human herpesvirus 7
uagagauuacauccugcua

SEQ ID NO: 346162 - RNA, 19 nt, Human herpesvirus 7
uagaggccgaaaaucuagc

SEQ ID NO: 346163 - RNA, 14 nt, Human herpesvirus 7
uagaguacaugugu

SEQ ID NO: 346164 - RNA, 18 nt, Human herpesvirus 7
uagauaaugaaguuuauc

SEQ ID NO: 346165 - RNA, 13 nt, Human herpesvirus 7
uagauaaugacaa

SEQ ID NO: 346166 - RNA, 18 nt, Human herpesvirus 7
uagauaaugacaaacaaa

SEQ ID NO: 346167 - RNA, 13 nt, Human herpesvirus 7
uagauacauuaua

SEQ ID NO: 346168 - RNA, 22 nt, Human herpesvirus 7
uagauauguggugcuuacguga

SEQ ID NO: 346169 - RNA, 16 nt, Human herpesvirus 7
uagauauuuugacaau

SEQ ID NO: 346170 - RNA, 15 nt, Human herpesvirus 7
uagaucuugacucag

SEQ ID NO: 346171 - RNA, 17 nt, Human herpesvirus 7
uagaucuugacucagau

SEQ ID NO: 346172 - RNA, 21 nt, Human herpesvirus 7
uagaucuugacucagauucga

SEQ ID NO: 346173 - RNA, 19 nt, Human herpesvirus 7
uagaugcagaaaaauccaa

SEQ ID NO: 346174 - RNA, 18 nt, Human herpesvirus 7
uagaugcauccaaagaaa

SEQ ID NO: 346175 - RNA, 16 nt, Human herpesvirus 7
uagaugcgaaagccac

SEQ ID NO: 346176 - RNA, 16 nt, Human herpesvirus 7
uagaugucugcauaga

SEQ ID NO: 346177 - RNA, 14 nt, Human herpesvirus 7
uagauuaaauagca

SEQ ID NO: 346178 - RNA, 15 nt, Human herpesvirus 7
uagauuaaauagcaa

SEQ ID NO: 346179 - RNA, 23 nt, Human herpesvirus 7
uagcagaucucgaacuucuuucu

SEQ ID NO: 346180 - RNA, 20 nt, Human herpesvirus 7
uagcauaugcuggaucuucu

SEQ ID NO: 346181 - RNA, 20 nt, Human herpesvirus 7
uaugccagguuuuucaaaga

SEQ ID NO: 346182 - RNA, 22 nt, Human herpesvirus 7
uaugccagguuuuucaaagacg

SEQ ID NO: 346183 - RNA, 20 nt, Human herpesvirus 7
uaugcgguaagaaaaaucau

SEQ ID NO: 346184 - RNA, 17 nt, Human herpesvirus 7
uaugcucuagaaaaucu

SEQ ID NO: 346185 - RNA, 22 nt, Human herpesvirus 7
uaugcuuuaacuggaauuauac

SEQ ID NO: 346186 - RNA, 15 nt, Human herpesvirus 7
uauggauacaaggaa

SEQ ID NO: 346187 - RNA, 23 nt, Human herpesvirus 7
uaugguuuaaacauuacgaacug

SEQ ID NO: 346188 - RNA, 18 nt, Human herpesvirus 7
uauguacucugauugacu

SEQ ID NO: 346189 - RNA, 21 nt, Human herpesvirus 7
uauguauaucuuuuuauugaa

SEQ ID NO: 346190 - RNA, 13 nt, Human herpesvirus 7
uauguccaaaaau

SEQ ID NO: 346191 - RNA, 19 nt, Human herpesvirus 7
uauguccaaucaaaaacug

SEQ ID NO: 346192 - RNA, 12 nt, Human herpesvirus 7
uauguccaguga

SEQ ID NO: 346193 - RNA, 10 nt, Human herpesvirus 7
uaugugaaaa

SEQ ID NO: 346194 - RNA, 18 nt, Human herpesvirus 7
uaugugcuuauaucuuau

SEQ ID NO: 346195 - RNA, 12 nt, Human herpesvirus 7
uauguggcacau

SEQ ID NO: 346196 - RNA, 20 nt, Human herpesvirus 7
uauguggugcuuacgugaug

SEQ ID NO: 346197 - RNA, 15 nt, Human herpesvirus 7
uauguguuuacauua

SEQ ID NO: 346198 - RNA, 18 nt, Human herpesvirus 7
uauguuagaugugcuuug

SEQ ID NO: 346199 - RNA, 21 nt, Human herpesvirus 7
uauguugcaaugaaagguuac

SEQ ID NO: 346200 - RNA, 14 nt, Human herpesvirus 7
uauguugcauauca

SEQ ID NO: 346201 - RNA, 17 nt, Human herpesvirus 7
uauuaaaaaccacagag

SEQ ID NO: 346202 - RNA, 14 nt, Human herpesvirus 7
uauuaaagcuuuca

SEQ ID NO: 346203 - RNA, 21 nt, Human herpesvirus 7
uauuaaagcuuucaauucauc

SEQ ID NO: 346204 - RNA, 17 nt, Human herpesvirus 7
uauuaaaucauaccaua

SEQ ID NO: 346205 - RNA, 21 nt, Human herpesvirus 7
uauuaaguguuugcucugaaa

SEQ ID NO: 346206 - RNA, 23 nt, Human herpesvirus 7
uauuacacaggaauugcugucua

SEQ ID NO: 346207 - RNA, 15 nt, Human herpesvirus 7
uauuagauaaugaca

SEQ ID NO: 346208 - RNA, 19 nt, Human herpesvirus 7
uauuagauuauacaaaucc

SEQ ID NO: 346209 - RNA, 17 nt, Human herpesvirus 7
uauucaaaagcuaaaaa

SEQ ID NO: 346210 - RNA, 20 nt, Human herpesvirus 7
uauucacgcuuccaucacaa

SEQ ID NO: 346211 - RNA, 14 nt, Human herpesvirus 7
uauuccagauauga

SEQ ID NO: 346212 - RNA, 24 nt, Human herpesvirus 7
uauuccauuaagccagauuucaug

SEQ ID NO: 346213 - RNA, 15 nt, Human herpesvirus 7
uauucguaaacauuu

SEQ ID NO: 346214 - RNA, 23 nt, Human herpesvirus 7
uauucuacacaucuucaauguuc

SEQ ID NO: 346215 - RNA, 21 nt, Human herpesvirus 7
uauucuaggcuugcauucuuc

SEQ ID NO: 346216 - RNA, 15 nt, Human herpesvirus 7
uauugaaggugucua

SEQ ID NO: 346217 - RNA, 20 nt, Human herpesvirus 7
uauugacauaaucauggaaa

SEQ ID NO: 346218 - RNA, 22 nt, Human herpesvirus 7
uauugcaucaacuaguucuuua

SEQ ID NO: 346219 - RNA, 15 nt, Human herpesvirus 7
uauugccuuucccag

SEQ ID NO: 346220 - RNA, 15 nt, Human herpesvirus 7
uauuggauaauauca

SEQ ID NO: 346221 - RNA, 21 nt, Human herpesvirus 7
uauuguauaugaugacaacaa

SEQ ID NO: 346222 - RNA, 23 nt, Human herpesvirus 7
uauuguccuuucaacgaucucaa

SEQ ID NO: 346223 - RNA, 22 nt, Human herpesvirus 7
uauugucuuacagcacuuugag

SEQ ID NO: 346224 - RNA, 16 nt, Human herpesvirus 7
uauuuagagucgucuu

SEQ ID NO: 346225 - RNA, 15 nt, Human herpesvirus 7
uauuuagcuaauuca

SEQ ID NO: 346226 - RNA, 14 nt, Human herpesvirus 7
uauuuaucugcauu

SEQ ID NO: 346227 - RNA, 14 nt, Human herpesvirus 7
uauuucgucuuucc

SEQ ID NO: 346228 - RNA, 21 nt, Human herpesvirus 7
uauuucgucuuuccucacaga

SEQ ID NO: 346229 - RNA, 14 nt, Human herpesvirus 7
uauuucuacacaaa

SEQ ID NO: 346230 - RNA, 14 nt, Human herpesvirus 7
uauuucugucaucu

SEQ ID NO: 346231 - RNA, 16 nt, Human herpesvirus 7
uauuucuuaucuccau

SEQ ID NO: 346232 - RNA, 16 nt, Human herpesvirus 7
uauuucuuauuggaga

SEQ ID NO: 346233 - RNA, 14 nt, Human herpesvirus 7
uauuugacugggua

SEQ ID NO: 346234 - RNA, 22 nt, Human herpesvirus 7
uauuugucucugugcauuucac

SEQ ID NO: 346235 - RNA, 19 nt, Human herpesvirus 7
uauuuguuaaaaguucaua

SEQ ID NO: 346236 - RNA, 17 nt, Human herpesvirus 7
uauuuguugaucuucaa

SEQ ID NO: 346237 - RNA, 17 nt, Human herpesvirus 7
uauuuguuuguucuguu

SEQ ID NO: 346238 - RNA, 20 nt, Human herpesvirus 7
uauuuuaaaaaagaauuugg

SEQ ID NO: 346239 - RNA, 14 nt, Human herpesvirus 7
uauuuuacauauua

SEQ ID NO: 346240 - RNA, 14 nt, Human herpesvirus 7
uauuuucuuaacaa

SEQ ID NO: 346241 - RNA, 21 nt, Human herpesvirus 7
uauuuucuucgucuaagucaa

SEQ ID NO: 346242 - RNA, 12 nt, Human herpesvirus 7
uauuuugcuaga

SEQ ID NO: 346243 - RNA, 23 nt, Human herpesvirus 7
uauuuuguuuugcauauuuugcu

SEQ ID NO: 346244 - RNA, 18 nt, Human herpesvirus 7
ucaaaaaaaaaacaaucc

SEQ ID NO: 346245 - RNA, 19 nt, Human herpesvirus 7
ucaaaaaaaaaacaaucca

SEQ ID NO: 346246 - RNA, 13 nt, Human herpesvirus 7
ucaaaaauaccgg

SEQ ID NO: 346247 - RNA, 17 nt, Human herpesvirus 7
ucaaaagacgcuugcua

SEQ ID NO: 346248 - RNA, 18 nt, Human herpesvirus 7
ucaaaagacgcuugcuau

SEQ ID NO: 346249 - RNA, 12 nt, Human herpesvirus 7
ucaaaagcuaaa

SEQ ID NO: 346250 - RNA, 19 nt, Human herpesvirus 7
ucaaaaguagaggccgaaa

SEQ ID NO: 346251 - RNA, 21 nt, Human herpesvirus 7
ucaaaguagccuucauuagga

SEQ ID NO: 346252 - RNA, 14 nt, Human herpesvirus 7
ucaaaucaauguga

SEQ ID NO: 346253 - RNA, 14 nt, Human herpesvirus 7
ucaaauccgaguca

SEQ ID NO: 346254 - RNA, 22 nt, Human herpesvirus 7
ucaaauggauuuuaauacaaca

SEQ ID NO: 346255 - RNA, 17 nt, Human herpesvirus 7
ucaacaaauccacucug

SEQ ID NO: 346256 - RNA, 18 nt, Human herpesvirus 7
ucaacacauaauguguau

SEQ ID NO: 346257 - RNA, 22 nt, Human herpesvirus 7
ucaacagccaucuaauugcaga

SEQ ID NO: 346258 - RNA, 15 nt, Human herpesvirus 7
ucaaccacuaaucca

SEQ ID NO: 346259 - RNA, 17 nt, Human herpesvirus 7
ucaaccacuaauccaug

SEQ ID NO: 346260 - RNA, 14 nt, Human herpesvirus 7
ucaacgaucucaaa

SEQ ID NO: 346261 - RNA, 16 nt, Human herpesvirus 7
ucaacuucaacauaca

SEQ ID NO: 346262 - RNA, 11 nt, Human herpesvirus 7
ucaacuuugcg

SEQ ID NO: 346263 - RNA, 17 nt, Human herpesvirus 7
ucaagaaaucagauuaa

SEQ ID NO: 346264 - RNA, 20 nt, Human herpesvirus 7
ucaagaauggcugaugauaa

SEQ ID NO: 346265 - RNA, 21 nt, Human herpesvirus 7
ucaagauaagcaauacauucu

SEQ ID NO: 346266 - RNA, 13 nt, Human herpesvirus 7
ucaagcacaauca

SEQ ID NO: 346267 - RNA, 18 nt, Human herpesvirus 7
ucaagcacaaucacguga

SEQ ID NO: 346268 - RNA, 21 nt, Human herpesvirus 7
ucaagccacgaugacuuccaa

SEQ ID NO: 346269 - RNA, 13 nt, Human herpesvirus 7
ucaaggacaugau

SEQ ID NO: 346270 - RNA, 14 nt, Human herpesvirus 7
ucaaggucuuucau

SEQ ID NO: 346271 - RNA, 23 nt, Human herpesvirus 7
ucaaggucuuucaugcauugcau

SEQ ID NO: 346272 - RNA, 22 nt, Human herpesvirus 7
ucaagguuaagugaaugugcuu

SEQ ID NO: 346273 - RNA, 19 nt, Human herpesvirus 7
ucaauaaaaagauauacau

SEQ ID NO: 346274 - RNA, 15 nt, Human herpesvirus 7
ucaauaaucaaugca

SEQ ID NO: 346275 - RNA, 22 nt, Human herpesvirus 7
ucaauaauggcauuacuacagu

SEQ ID NO: 346276 - RNA, 16 nt, Human herpesvirus 7
ucaauagcauaugcug

SEQ ID NO: 346277 - RNA, 19 nt, Human herpesvirus 7
ucaauaguuuuacaaagaa

SEQ ID NO: 346278 - RNA, 13 nt, Human herpesvirus 7
ucaaucaccaaag

SEQ ID NO: 346279 - RNA, 18 nt, Human herpesvirus 7
ucaauucaccaauuucua

SEQ ID NO: 346280 - RNA, 19 nt, Human herpesvirus 7
ucaauugaguuuacugcca

SEQ ID NO: 346281 - RNA, 20 nt, Human herpesvirus 7
ucaauuuauccuaagcuuuu

SEQ ID NO: 346282 - RNA, 19 nt, Human herpesvirus 7
ucaauuuuucucccgcaga

SEQ ID NO: 346283 - RNA, 17 nt, Human herpesvirus 7
ucacaaaagcuuugauc

SEQ ID NO: 346284 - RNA, 22 nt, Human herpesvirus 7
ucacaaaagcuuugaucuacau

SEQ ID NO: 346285 - RNA, 18 nt, Human herpesvirus 7
ucacaaguuaauuuugca

SEQ ID NO: 346286 - RNA, 19 nt, Human herpesvirus 7
ucacaaguuaauuuugcag

SEQ ID NO: 346287 - RNA, 17 nt, Human herpesvirus 7
ucacaauuacacaaauu

SEQ ID NO: 346288 - RNA, 18 nt, Human herpesvirus 7
ucacagcauuauuguaua

SEQ ID NO: 346289 - RNA, 20 nt, Human herpesvirus 7
ucacagggacguuucuagca

SEQ ID NO: 346290 - RNA, 22 nt, Human herpesvirus 7
ucacagggacguuucuagcaaa

SEQ ID NO: 346291 - RNA, 13 nt, Human herpesvirus 7
ucacauacucuau

SEQ ID NO: 346292 - RNA, 14 nt, Human herpesvirus 7
ucacauuaucuuga

SEQ ID NO: 346293 - RNA, 14 nt, Human herpesvirus 7
ucaccacacucaua

SEQ ID NO: 346294 - RNA, 23 nt, Human herpesvirus 7
ucaccacgugucgcagccauguu

SEQ ID NO: 346295 - RNA, 14 nt, Human herpesvirus 7
ucgauaaacuuugu

SEQ ID NO: 346296 - RNA, 18 nt, Human herpesvirus 7
ucgaucacguuuugcaaa

SEQ ID NO: 346297 - RNA, 14 nt, Human herpesvirus 7
ucgaucucugucaa

SEQ ID NO: 346298 - RNA, 15 nt, Human herpesvirus 7
ucgcaaauguacaau

SEQ ID NO: 346299 - RNA, 15 nt, Human herpesvirus 7
ucgcguuuucaugcu

SEQ ID NO: 346300 - RNA, 13 nt, Human herpesvirus 7
ucgcucaacuuau

SEQ ID NO: 346301 - RNA, 20 nt, Human herpesvirus 7
ucgcucaacuuaugugucac

SEQ ID NO: 346302 - RNA, 17 nt, Human herpesvirus 7
ucgcugaagaacauuaa

SEQ ID NO: 346303 - RNA, 13 nt, Human herpesvirus 7
ucgcugucuuuaa

SEQ ID NO: 346304 - RNA, 13 nt, Human herpesvirus 7
ucgcuuucucaag

SEQ ID NO: 346305 - RNA, 20 nt, Human herpesvirus 7
ucggaauuugauuccaucuc

SEQ ID NO: 346306 - RNA, 19 nt, Human herpesvirus 7
ucggcacccuaauugccau

SEQ ID NO: 346307 - RNA, 16 nt, Human herpesvirus 7
ucgguaacaugucuuc

SEQ ID NO: 346308 - RNA, 22 nt, Human herpesvirus 7
ucguaacaaauucaaccacaga

SEQ ID NO: 346309 - RNA, 16 nt, Human herpesvirus 7
ucguaacagagaugaa

SEQ ID NO: 346310 - RNA, 19 nt, Human herpesvirus 7
ucguauagucaggaucucc

SEQ ID NO: 346311 - RNA, 14 nt, Human herpesvirus 7
ucguaucugugacu

SEQ ID NO: 346312 - RNA, 15 nt, Human herpesvirus 7
ucgucuaagucaauu

SEQ ID NO: 346313 - RNA, 18 nt, Human herpesvirus 7
ucgugcuuuagaguauga

SEQ ID NO: 346314 - RNA, 17 nt, Human herpesvirus 7
ucguucauugauuauau

SEQ ID NO: 346315 - RNA, 21 nt, Human herpesvirus 7
ucguuguugguguguuacauc

SEQ ID NO: 346316 - RNA, 12 nt, Human herpesvirus 7
ucuaaacaaaca

SEQ ID NO: 346317 - RNA, 20 nt, Human herpesvirus 7
ucuaaaucacuaguccuaaa

SEQ ID NO: 346318 - RNA, 19 nt, Human herpesvirus 7
ucuaacaaauaccaugaaa

SEQ ID NO: 346319 - RNA, 18 nt, Human herpesvirus 7
ucuaagagcuuuugcaaa

SEQ ID NO: 346320 - RNA, 19 nt, Human herpesvirus 7
ucuaagguuuuuacauaaa

SEQ ID NO: 346321 - RNA, 14 nt, Human herpesvirus 7
ucuaagucaauuaa

SEQ ID NO: 346322 - RNA, 23 nt, Human herpesvirus 7
ucuaagucuacaucaucaacaua

SEQ ID NO: 346323 - RNA, 13 nt, Human herpesvirus 7
ucuaauacaucua

SEQ ID NO: 346324 - RNA, 22 nt, Human herpesvirus 7
ucuaauagacaaauuaaacaau

SEQ ID NO: 346325 - RNA, 15 nt, Human herpesvirus 7
ucuaauuaaucugca

SEQ ID NO: 346326 - RNA, 23 nt, Human herpesvirus 7
ucuaauuuaugauacuuguucaa

SEQ ID NO: 346327 - RNA, 23 nt, Human herpesvirus 7
ucuaauuuuggcgaaacaauaca

SEQ ID NO: 346328 - RNA, 16 nt, Human herpesvirus 7
ucuacaucaucaacau

SEQ ID NO: 346329 - RNA, 19 nt, Human herpesvirus 7
ucuacaucaucaacauacg

SEQ ID NO: 346330 - RNA, 17 nt, Human herpesvirus 7
ucuacuguacuuuugau

SEQ ID NO: 346331 - RNA, 13 nt, Human herpesvirus 7
ucuacuucuagua

SEQ ID NO: 346332 - RNA, 22 nt, Human herpesvirus 7
ucuagagauuacauccugcuaa

SEQ ID NO: 346333 - RNA, 17 nt, Human herpesvirus 7
ucuagagcauauacaau

SEQ ID NO: 346334 - RNA, 14 nt, Human herpesvirus 7
ucuagcuuguuaaa

SEQ ID NO: 346335 - RNA, 18 nt, Human herpesvirus 7
ucuagcuuuauaugucaa

SEQ ID NO: 346336 - RNA, 14 nt, Human herpesvirus 7
ucuaucacaaccug

SEQ ID NO: 346337 - RNA, 14 nt, Human herpesvirus 7
ucuaucgucaucau

SEQ ID NO: 346338 - RNA, 14 nt, Human herpesvirus 7
ucuauucucauaga

SEQ ID NO: 346339 - RNA, 19 nt, Human herpesvirus 7
ucuauucucauagauuuca

SEQ ID NO: 346340 - RNA, 16 nt, Human herpesvirus 7
ucuauuucuauucagu

SEQ ID NO: 346341 - RNA, 19 nt, Human herpesvirus 7
ucucaaaauuauaacuuua

SEQ ID NO: 346342 - RNA, 20 nt, Human herpesvirus 7
ucucaaaauuauaacuuuau

SEQ ID NO: 346343 - RNA, 23 nt, Human herpesvirus 7
ucucaaguagccgaaaaagaauu

SEQ ID NO: 346344 - RNA, 22 nt, Human herpesvirus 7
ucucacuuauuuuagaaaguga

SEQ ID NO: 346345 - RNA, 17 nt, Human herpesvirus 7
ucucauugacauguuuc

SEQ ID NO: 346346 - RNA, 22 nt, Human herpesvirus 7
ucuccaaaucaaaaugagauuu

SEQ ID NO: 346347 - RNA, 18 nt, Human herpesvirus 7
ucuccaagccucagauga

SEQ ID NO: 346348 - RNA, 18 nt, Human herpesvirus 7
ucuccaaucauaauuuuc

SEQ ID NO: 346349 - RNA, 15 nt, Human herpesvirus 7
ucuccaugcauauuu

SEQ ID NO: 346350 - RNA, 18 nt, Human herpesvirus 7
ucuccauucuaaaccaaa

SEQ ID NO: 346351 - RNA, 18 nt, Human herpesvirus 7
ucuccgugucacugucac

SEQ ID NO: 346352 - RNA, 18 nt, Human herpesvirus 7
ucuccuuguuguguuuua

SEQ ID NO: 346353 - RNA, 14 nt, Human herpesvirus 7
ucucuaaaauuuuc

SEQ ID NO: 346354 - RNA, 17 nt, Human herpesvirus 7
ucucuaugauccagcaa

SEQ ID NO: 346355 - RNA, 19 nt, Human herpesvirus 7
ucucuauuacacaggaauu

SEQ ID NO: 346356 - RNA, 19 nt, Human herpesvirus 7
ucucucuauuacacaggaa

SEQ ID NO: 346357 - RNA, 17 nt, Human herpesvirus 7
ucucugaucauuugcau

SEQ ID NO: 346358 - RNA, 19 nt, Human herpesvirus 7
ucucugaucauuugcaugu

SEQ ID NO: 346359 - RNA, 21 nt, Human herpesvirus 7
ucucuguagauauuuugacaa

SEQ ID NO: 346360 - RNA, 15 nt, Human herpesvirus 7
ucucugucaaaagac

SEQ ID NO: 346361 - RNA, 15 nt, Human herpesvirus 7
ucucuguccagccaa

SEQ ID NO: 346362 - RNA, 13 nt, Human herpesvirus 7
ucucugugcauuu

SEQ ID NO: 346363 - RNA, 14 nt, Human herpesvirus 7
ucucuguggcuguc

SEQ ID NO: 346364 - RNA, 16 nt, Human herpesvirus 7
ucucuugaggaaaugu

SEQ ID NO: 346365 - RNA, 18 nt, Human herpesvirus 7
ucugaaauaaacauuuca

SEQ ID NO: 346366 - RNA, 16 nt, Human herpesvirus 7
ucugaauagacacauu

SEQ ID NO: 346367 - RNA, 18 nt, Human herpesvirus 7
ucugaauccgcauuugag

SEQ ID NO: 346368 - RNA, 15 nt, Human herpesvirus 7
ucugaaucugcaaag

SEQ ID NO: 346369 - RNA, 16 nt, Human herpesvirus 7
ucugaaucugcaaaga

SEQ ID NO: 346370 - RNA, 17 nt, Human herpesvirus 7
ucugaaucugcaaagaa

SEQ ID NO: 346371 - RNA, 12 nt, Human herpesvirus 7
ucugacauugga

SEQ ID NO: 346372 - RNA, 20 nt, Human herpesvirus 7
ucugacuaaagcuacagcuu

SEQ ID NO: 346373 - RNA, 14 nt, Human herpesvirus 7
ucugacugguacaa

SEQ ID NO: 346374 - RNA, 21 nt, Human herpesvirus 7
ucugacuugccccuaaacaau

SEQ ID NO: 346375 - RNA, 20 nt, Human herpesvirus 7
ucugauucuuauucuacaca

SEQ ID NO: 346376 - RNA, 18 nt, Human herpesvirus 7
ucugauuuauauagcaau

SEQ ID NO: 346377 - RNA, 12 nt, Human herpesvirus 7
ucugcauauaau

SEQ ID NO: 346378 - RNA, 14 nt, Human herpesvirus 7
ucugccauuacuga

SEQ ID NO: 346379 - RNA, 18 nt, Human herpesvirus 7
ucugcuuuaagugauacu

SEQ ID NO: 346380 - RNA, 13 nt, Human herpesvirus 7
ucuggacauuuca

SEQ ID NO: 346381 - RNA, 15 nt, Human herpesvirus 7
ucuggaguucaguaa

SEQ ID NO: 346382 - RNA, 18 nt, Human herpesvirus 7
ucuggauucaagaaauca

SEQ ID NO: 346383 - RNA, 13 nt, Human herpesvirus 7
ucugguaaaaaga

SEQ ID NO: 346384 - RNA, 14 nt, Human herpesvirus 7
ucugguaaugucau

SEQ ID NO: 346385 - RNA, 22 nt, Human herpesvirus 7
ucugguauugucuacaauuucu

SEQ ID NO: 346386 - RNA, 19 nt, Human herpesvirus 7
ucugguuucuguugacuaa

SEQ ID NO: 346387 - RNA, 23 nt, Human herpesvirus 7
ucuguaaaauuuaaauacugaga

SEQ ID NO: 346388 - RNA, 22 nt, Human herpesvirus 7
ucuguaauauggaagacgccaa

SEQ ID NO: 346389 - RNA, 12 nt, Human herpesvirus 7
ucuguaaucaua

SEQ ID NO: 346390 - RNA, 14 nt, Human herpesvirus 7
ucuguagaugcaug

SEQ ID NO: 346391 - RNA, 20 nt, Human herpesvirus 7
ucuguagaugcaugcuaaua

SEQ ID NO: 346392 - RNA, 17 nt, Human herpesvirus 7
ucugucaccacacucau

SEQ ID NO: 346393 - RNA, 22 nt, Human herpesvirus 7
ucugugacuuagaaaaacgcua

SEQ ID NO: 346394 - RNA, 15 nt, Human herpesvirus 7
ucugugguugaauuu

SEQ ID NO: 346395 - RNA, 22 nt, Human herpesvirus 7
ucuguguuauuguaucuaugaa

SEQ ID NO: 346396 - RNA, 13 nt, Human herpesvirus 7
ucuguucucaugc

SEQ ID NO: 346397 - RNA, 16 nt, Human herpesvirus 7
ucuguuguaacagauu

SEQ ID NO: 346398 - RNA, 21 nt, Human herpesvirus 7
ucuuaacgaaggcaucaagaa

SEQ ID NO: 346399 - RNA, 22 nt, Human herpesvirus 7
ucuuaagcuuuuguaaacauga

SEQ ID NO: 346400 - RNA, 17 nt, Human herpesvirus 7
ucuuacacuaugagaua

SEQ ID NO: 346401 - RNA, 14 nt, Human herpesvirus 7
ucuuacagcacuuu

SEQ ID NO: 346402 - RNA, 17 nt, Human herpesvirus 7
ucuuacagcacuuugag

SEQ ID NO: 346403 - RNA, 14 nt, Human herpesvirus 7
ucuuacauuugauu

SEQ ID NO: 346404 - RNA, 20 nt, Human herpesvirus 7
ucuuaccgcauaaaucaugu

SEQ ID NO: 346405 - RNA, 22 nt, Human herpesvirus 7
ucuuacgucuuuucuaccaaca

SEQ ID NO: 346406 - RNA, 17 nt, Human herpesvirus 7
ucuuacuuccuaaucua

SEQ ID NO: 346407 - RNA, 14 nt, Human herpesvirus 7
ucuuagaaacuuau

SEQ ID NO: 346408 - RNA, 22 nt, Human herpesvirus 7
ucuuagcguucgacagcaaauu

SEQ ID NO: 346409 - RNA, 16 nt, Human herpesvirus 7
ucuuauaacaaaguuc

SEQ ID NO: 346410 - RNA, 23 nt, Human herpesvirus 7
ugacuuuuucuguagacauuucu

SEQ ID NO: 346411 - RNA, 14 nt, Human herpesvirus 7
ugagaaaaaugaca

SEQ ID NO: 346412 - RNA, 17 nt, Human herpesvirus 7
ugagaaauuacaguaca

SEQ ID NO: 346413 - RNA, 18 nt, Human herpesvirus 7
ugagaaauuacaguacaa

SEQ ID NO: 346414 - RNA, 21 nt, Human herpesvirus 7
ugagaaauuuuacagccugua

SEQ ID NO: 346415 - RNA, 20 nt, Human herpesvirus 7
ugagaaauuuugaucuuguc

SEQ ID NO: 346416 - RNA, 18 nt, Human herpesvirus 7
ugagacagcaacugugca

SEQ ID NO: 346417 - RNA, 20 nt, Human herpesvirus 7
ugagacagcaacugugcaug

SEQ ID NO: 346418 - RNA, 22 nt, Human herpesvirus 7
ugagacauuaugagauuugccu

SEQ ID NO: 346419 - RNA, 19 nt, Human herpesvirus 7
ugagacggacuuaugucca

SEQ ID NO: 346420 - RNA, 15 nt, Human herpesvirus 7
ugagacucacuccuu

SEQ ID NO: 346421 - RNA, 18 nt, Human herpesvirus 7
ugagcaauugauucacau

SEQ ID NO: 346422 - RNA, 20 nt, Human herpesvirus 7
ugagcaauugauucacauug

SEQ ID NO: 346423 - RNA, 13 nt, Human herpesvirus 7
ugagcagugauuu

SEQ ID NO: 346424 - RNA, 14 nt, Human herpesvirus 7
ugaggaaaugucuu

SEQ ID NO: 346425 - RNA, 22 nt, Human herpesvirus 7
ugaggaaaugucuuugucauga

SEQ ID NO: 346426 - RNA, 22 nt, Human herpesvirus 7
ugaguaaagauuuaacugauaa

SEQ ID NO: 346427 - RNA, 14 nt, Human herpesvirus 7
ugagugaacauuug

SEQ ID NO: 346428 - RNA, 15 nt, Human herpesvirus 7
ugagugaacauuuga

SEQ ID NO: 346429 - RNA, 20 nt, Human herpesvirus 7
ugaguguuguaacaacuagc

SEQ ID NO: 346430 - RNA, 15 nt, Human herpesvirus 7
ugaguuuccauugcu

SEQ ID NO: 346431 - RNA, 17 nt, Human herpesvirus 7
ugaguuuccauugcugu

SEQ ID NO: 346432 - RNA, 16 nt, Human herpesvirus 7
ugauacaaucgauaaa

SEQ ID NO: 346433 - RNA, 18 nt, Human herpesvirus 7
ugauacauucgcaaggaa

SEQ ID NO: 346434 - RNA, 21 nt, Human herpesvirus 7
ugauacauucgcaaggaauau

SEQ ID NO: 346435 - RNA, 14 nt, Human herpesvirus 7
ugauagaugcgaaa

SEQ ID NO: 346436 - RNA, 15 nt, Human herpesvirus 7
ugauauuugguacug

SEQ ID NO: 346437 - RNA, 20 nt, Human herpesvirus 7
ugaucacagcuagauugacu

SEQ ID NO: 346438 - RNA, 17 nt, Human herpesvirus 7
ugaucacuuugcaucaa

SEQ ID NO: 346439 - RNA, 19 nt, Human herpesvirus 7
ugaucauuugcauguugcu

SEQ ID NO: 346440 - RNA, 21 nt, Human herpesvirus 7
ugauccauuugugauguacug

SEQ ID NO: 346441 - RNA, 21 nt, Human herpesvirus 7
ugauccugcuauucauuucac

SEQ ID NO: 346442 - RNA, 21 nt, Human herpesvirus 7
ugaucguuguugguguguuac

SEQ ID NO: 346443 - RNA, 15 nt, Human herpesvirus 7
ugaucuaaaguaugg

SEQ ID NO: 346444 - RNA, 14 nt, Human herpesvirus 7
ugaucuuacuuccu

SEQ ID NO: 346445 - RNA, 21 nt, Human herpesvirus 7
ugaugacaacaaagcaugaaa

SEQ ID NO: 346446 - RNA, 17 nt, Human herpesvirus 7
ugaugauggaaagcaaa

SEQ ID NO: 346447 - RNA, 20 nt, Human herpesvirus 7
ugaugcauuuuuauugcagu

SEQ ID NO: 346448 - RNA, 17 nt, Human herpesvirus 7
ugauggauaacuaugaa

SEQ ID NO: 346449 - RNA, 14 nt, Human herpesvirus 7
ugaugguugcaaua

SEQ ID NO: 346450 - RNA, 17 nt, Human herpesvirus 7
ugauguuaaagaacaag

SEQ ID NO: 346451 - RNA, 19 nt, Human herpesvirus 7
ugauuagcgcgugaacaaa

SEQ ID NO: 346452 - RNA, 21 nt, Human herpesvirus 7
ugauuauuauaacuuguaauu

SEQ ID NO: 346453 - RNA, 15 nt, Human herpesvirus 7
ugauucacauuguca

SEQ ID NO: 346454 - RNA, 18 nt, Human herpesvirus 7
ugauuccaucucacuuau

SEQ ID NO: 346455 - RNA, 21 nt, Human herpesvirus 7
ugauucgcuaacuuugcuauu

SEQ ID NO: 346456 - RNA, 20 nt, Human herpesvirus 7
ugauucucucucuauuacac

SEQ ID NO: 346457 - RNA, 16 nt, Human herpesvirus 7
ugauucuuauucuaca

SEQ ID NO: 346458 - RNA, 14 nt, Human herpesvirus 7
ugauugcgaccaaa

SEQ ID NO: 346459 - RNA, 16 nt, Human herpesvirus 7
ugauugcgaccaaaga

SEQ ID NO: 346460 - RNA, 21 nt, Human herpesvirus 7
ugauuguagauggcaccaaua

SEQ ID NO: 346461 - RNA, 14 nt, Human herpesvirus 7
ugauuuuucugcuu

SEQ ID NO: 346462 - RNA, 17 nt, Human herpesvirus 7
ugauuuuuuauucccag

SEQ ID NO: 346463 - RNA, 23 nt, Human herpesvirus 7
ugcaaacgucucguguuuaguga

SEQ ID NO: 346464 - RNA, 22 nt, Human herpesvirus 7
ugcaaacucacuaaugccguca

SEQ ID NO: 346465 - RNA, 22 nt, Human herpesvirus 7
ugcaaagcuuuugcgagaaaau

SEQ ID NO: 346466 - RNA, 21 nt, Human herpesvirus 7
ugcaaauuguaaauucuccaa

SEQ ID NO: 346467 - RNA, 17 nt, Human herpesvirus 7
ugcaacucuucuucaga

SEQ ID NO: 346468 - RNA, 16 nt, Human herpesvirus 7
ugcaagaaaguccaaa

SEQ ID NO: 346469 - RNA, 11 nt, Human herpesvirus 7
ugcaagcacau

SEQ ID NO: 346470 - RNA, 19 nt, Human herpesvirus 7
ugcaaugauguuugcauug

SEQ ID NO: 346471 - RNA, 15 nt, Human herpesvirus 7
ugcacacaaaggcca

SEQ ID NO: 346472 - RNA, 22 nt, Human herpesvirus 7
ugcacauuuuggcgcucucugg

SEQ ID NO: 346473 - RNA, 17 nt, Human herpesvirus 7
ugcacuaucuccuaaau

SEQ ID NO: 346474 - RNA, 15 nt, Human herpesvirus 7
ugcacuguaauauaa

SEQ ID NO: 346475 - RNA, 15 nt, Human herpesvirus 7
ugcagaaauuuuuaa

SEQ ID NO: 346476 - RNA, 15 nt, Human herpesvirus 7
ugcagacuaauuaca

SEQ ID NO: 346477 - RNA, 23 nt, Human herpesvirus 7
ugcagacugcgcuuggcaaacag

SEQ ID NO: 346478 - RNA, 20 nt, Human herpesvirus 7
ugcagcccaauguugccuuc

SEQ ID NO: 346479 - RNA, 15 nt, Human herpesvirus 7
ugcagccuacuuuua

SEQ ID NO: 346480 - RNA, 20 nt, Human herpesvirus 7
ugcagcuucuaaaugugcua

SEQ ID NO: 346481 - RNA, 15 nt, Human herpesvirus 7
ugcauaaacuaucaa

SEQ ID NO: 346482 - RNA, 19 nt, Human herpesvirus 7
ugcauaaauaauaacaauu

SEQ ID NO: 346483 - RNA, 15 nt, Human herpesvirus 7
ugcauacaguuuauu

SEQ ID NO: 346484 - RNA, 13 nt, Human herpesvirus 7
ugcauagauuaaa

SEQ ID NO: 346485 - RNA, 23 nt, Human herpesvirus 7
ugcauauaauaaaggaaagacaa

SEQ ID NO: 346486 - RNA, 17 nt, Human herpesvirus 7
ugcauauggacuuauca

SEQ ID NO: 346487 - RNA, 19 nt, Human herpesvirus 7
ugcauauggacuuaucaau

SEQ ID NO: 346488 - RNA, 17 nt, Human herpesvirus 7
ugcaucaaaacauauca

SEQ ID NO: 346489 - RNA, 21 nt, Human herpesvirus 7
ugcaucaggaaaaucuaucac

SEQ ID NO: 346490 - RNA, 22 nt, Human herpesvirus 7
ugcaucgaauuuuacaaugcag

SEQ ID NO: 346491 - RNA, 20 nt, Human herpesvirus 7
ugcaucuccuguaaccauuu

SEQ ID NO: 346492 - RNA, 22 nt, Human herpesvirus 7
ugcauguguacuaaagccaaug

SEQ ID NO: 346493 - RNA, 20 nt, Human herpesvirus 7
ugcauguugcuaguauguca

SEQ ID NO: 346494 - RNA, 14 nt, Human herpesvirus 7
ugcauuauauccaa

SEQ ID NO: 346495 - RNA, 18 nt, Human herpesvirus 7
ugcauuauauccaauaau

SEQ ID NO: 346496 - RNA, 12 nt, Human herpesvirus 7
ugcauugcauau

SEQ ID NO: 346497 - RNA, 19 nt, Human herpesvirus 7
ugccaauuuuuaacauuac

SEQ ID NO: 346498 - RNA, 15 nt, Human herpesvirus 7
ugccaccauuucuga

SEQ ID NO: 346499 - RNA, 21 nt, Human herpesvirus 7
ugccacguuuuuuucuucaau

SEQ ID NO: 346500 - RNA, 19 nt, Human herpesvirus 7
ugccaucuauaaacauucu

SEQ ID NO: 346501 - RNA, 20 nt, Human herpesvirus 7
ugccaucuauaaacauucua

SEQ ID NO: 346502 - RNA, 17 nt, Human herpesvirus 7
ugcccccagaacuuguu

SEQ ID NO: 346503 - RNA, 20 nt, Human herpesvirus 7
ugccgaagaaugggugucag

SEQ ID NO: 346504 - RNA, 22 nt, Human herpesvirus 7
ugccgccauguauugucuuaca

SEQ ID NO: 346505 - RNA, 19 nt, Human herpesvirus 7
ugccucccgggcacacuuu

SEQ ID NO: 346506 - RNA, 22 nt, Human herpesvirus 7
ugccugccagagaaccacguga

SEQ ID NO: 346507 - RNA, 14 nt, Human herpesvirus 7
ugccuucagucuua

SEQ ID NO: 346508 - RNA, 21 nt, Human herpesvirus 7
ugccuugccaaaagcuugaaa

SEQ ID NO: 346509 - RNA, 22 nt, Human herpesvirus 7
ugcgaagguugucuguucucau

SEQ ID NO: 346510 - RNA, 20 nt, Human herpesvirus 7
ugcgauaucugacugguaca

SEQ ID NO: 346511 - RNA, 21 nt, Human herpesvirus 7
ugcgcuuggcaaacagucuga

SEQ ID NO: 346512 - RNA, 21 nt, Human herpesvirus 7
ugcgucucuuugccuguuaaa

SEQ ID NO: 346513 - RNA, 14 nt, Human herpesvirus 7
ugcguguguucaaa

SEQ ID NO: 346514 - RNA, 12 nt, Human herpesvirus 7
ugcguugcuuaa

SEQ ID NO: 346515 - RNA, 20 nt, Human herpesvirus 7
ugcguugcuuaaaaacagua

SEQ ID NO: 346516 - RNA, 20 nt, Human herpesvirus 7
ugcuaaaaacgacguaacaa

SEQ ID NO: 346517 - RNA, 18 nt, Human herpesvirus 7
ugcuaacaaguaugucag

SEQ ID NO: 346518 - RNA, 22 nt, Human herpesvirus 7
ugcuaauuaccgauggaacuga

SEQ ID NO: 346519 - RNA, 22 nt, Human herpesvirus 7
ugcuaucuccuauguugcaaug

SEQ ID NO: 346520 - RNA, 20 nt, Human herpesvirus 7
ugcuaugcuugaaagaauau

SEQ ID NO: 346521 - RNA, 18 nt, Human herpesvirus 7
ugcuauuaaaugauuuca

SEQ ID NO: 346522 - RNA, 19 nt, Human herpesvirus 7
ugcuauuauuaaagcuuuc

SEQ ID NO: 346523 - RNA, 17 nt, Human herpesvirus 7
uguauaaaucagaauau

SEQ ID NO: 346524 - RNA, 13 nt, Human herpesvirus 7
uguauacaacuuu

SEQ ID NO: 346525 - RNA, 22 nt, Human herpesvirus 7
uguaugcaagaaaguccaaagu

SEQ ID NO: 346526 - RNA, 17 nt, Human herpesvirus 7
uguaugucuacaauggu

SEQ ID NO: 346527 - RNA, 15 nt, Human herpesvirus 7
uguaugugcaucaca

SEQ ID NO: 346528 - RNA, 21 nt, Human herpesvirus 7
uguauuuuucuccaugcauau

SEQ ID NO: 346529 - RNA, 21 nt, Human herpesvirus 7
ugucaaaaaaaaaacaaucca

SEQ ID NO: 346530 - RNA, 13 nt, Human herpesvirus 7
ugucaacuuugcg

SEQ ID NO: 346531 - RNA, 13 nt, Human herpesvirus 7
ugucacacuuauu

SEQ ID NO: 346532 - RNA, 23 nt, Human herpesvirus 7
ugucacgcaagucacaauuacac

SEQ ID NO: 346533 - RNA, 14 nt, Human herpesvirus 7
ugucacuguccaaa

SEQ ID NO: 346534 - RNA, 22 nt, Human herpesvirus 7
ugucaggucacaaaagcuuuga

SEQ ID NO: 346535 - RNA, 14 nt, Human herpesvirus 7
ugucauacaaugaa

SEQ ID NO: 346536 - RNA, 20 nt, Human herpesvirus 7
ugucauagugggaacauaaa

SEQ ID NO: 346537 - RNA, 16 nt, Human herpesvirus 7
ugucaucacuuaugau

SEQ ID NO: 346538 - RNA, 17 nt, Human herpesvirus 7
ugucaucuuauauuccu

SEQ ID NO: 346539 - RNA, 20 nt, Human herpesvirus 7
ugucaugacuggacacaauc

SEQ ID NO: 346540 - RNA, 20 nt, Human herpesvirus 7
ugucaugaugaauauaacaa

SEQ ID NO: 346541 - RNA, 16 nt, Human herpesvirus 7
uguccaaucaaaaacu

SEQ ID NO: 346542 - RNA, 13 nt, Human herpesvirus 7
uguccacuacaga

SEQ ID NO: 346543 - RNA, 14 nt, Human herpesvirus 7
uguccacuacagau

SEQ ID NO: 346544 - RNA, 18 nt, Human herpesvirus 7
uguccagacagcuguaua

SEQ ID NO: 346545 - RNA, 20 nt, Human herpesvirus 7
uguccccuucgcugcuguga

SEQ ID NO: 346546 - RNA, 19 nt, Human herpesvirus 7
ugucggcaauacuaguauu

SEQ ID NO: 346547 - RNA, 19 nt, Human herpesvirus 7
ugucuagcuuuauauguca

SEQ ID NO: 346548 - RNA, 14 nt, Human herpesvirus 7
ugucucauaauauc

SEQ ID NO: 346549 - RNA, 13 nt, Human herpesvirus 7
ugucucugugcau

SEQ ID NO: 346550 - RNA, 20 nt, Human herpesvirus 7
ugucucuugaagaacaacau

SEQ ID NO: 346551 - RNA, 23 nt, Human herpesvirus 7
ugucucuuuacagaggacuugaa

SEQ ID NO: 346552 - RNA, 13 nt, Human herpesvirus 7
ugucuggucacau

SEQ ID NO: 346553 - RNA, 12 nt, Human herpesvirus 7
ugucuguucuca

SEQ ID NO: 346554 - RNA, 18 nt, Human herpesvirus 7
ugucuguugugcaauuuu

SEQ ID NO: 346555 - RNA, 16 nt, Human herpesvirus 7
ugucuuacaacuagaa

SEQ ID NO: 346556 - RNA, 23 nt, Human herpesvirus 7
ugucuuacaacuagaaaauaacu

SEQ ID NO: 346557 - RNA, 16 nt, Human herpesvirus 7
ugucuuacagcacuuu

SEQ ID NO: 346558 - RNA, 19 nt, Human herpesvirus 7
ugucuucggccuugcugaa

SEQ ID NO: 346559 - RNA, 18 nt, Human herpesvirus 7
ugucuuggaagagucucu

SEQ ID NO: 346560 - RNA, 14 nt, Human herpesvirus 7
ugucuuuagaacuu

SEQ ID NO: 346561 - RNA, 22 nt, Human herpesvirus 7
ugugaaaagauuucuauugaau

SEQ ID NO: 346562 - RNA, 19 nt, Human herpesvirus 7
ugugaaaauaacaggaaac

SEQ ID NO: 346563 - RNA, 17 nt, Human herpesvirus 7
ugugacagggugugaac

SEQ ID NO: 346564 - RNA, 15 nt, Human herpesvirus 7
ugugacccugucaca

SEQ ID NO: 346565 - RNA, 18 nt, Human herpesvirus 7
ugugacucggaaccgaga

SEQ ID NO: 346566 - RNA, 13 nt, Human herpesvirus 7
ugugaguuucuac

SEQ ID NO: 346567 - RNA, 18 nt, Human herpesvirus 7
ugugcaugaaaucuugaa

SEQ ID NO: 346568 - RNA, 21 nt, Human herpesvirus 7
ugugcuuugcuaaccacugug

SEQ ID NO: 346569 - RNA, 13 nt, Human herpesvirus 7
uguggcacauaag

SEQ ID NO: 346570 - RNA, 13 nt, Human herpesvirus 7
ugugguacaacaa

SEQ ID NO: 346571 - RNA, 20 nt, Human herpesvirus 7
ugugguacaacaaacauucc

SEQ ID NO: 346572 - RNA, 20 nt, Human herpesvirus 7
uguggugcguacacuguaag

SEQ ID NO: 346573 - RNA, 23 nt, Human herpesvirus 7
uguguaaauauuuuuaaaaucua

SEQ ID NO: 346574 - RNA, 18 nt, Human herpesvirus 7
uguguacuaaagccaaug

SEQ ID NO: 346575 - RNA, 19 nt, Human herpesvirus 7
uguguuacaugaucuugua

SEQ ID NO: 346576 - RNA, 23 nt, Human herpesvirus 7
uguuaaaacuuggauaaccaaac

SEQ ID NO: 346577 - RNA, 18 nt, Human herpesvirus 7
uguuaacaugaguacugu

SEQ ID NO: 346578 - RNA, 15 nt, Human herpesvirus 7
uguuaagaauuccag

SEQ ID NO: 346579 - RNA, 12 nt, Human herpesvirus 7
uguuaauaucua

SEQ ID NO: 346580 - RNA, 18 nt, Human herpesvirus 7
uguuaauuaaaguugcau

SEQ ID NO: 346581 - RNA, 21 nt, Human herpesvirus 7
uguuacuauuugacuggguag

SEQ ID NO: 346582 - RNA, 17 nt, Human herpesvirus 7
uguuauuguaucuauga

SEQ ID NO: 346583 - RNA, 18 nt, Human herpesvirus 7
uguuauuuuucaugccuu

SEQ ID NO: 346584 - RNA, 19 nt, Human herpesvirus 7
uguucaacuucaacauaca

SEQ ID NO: 346585 - RNA, 18 nt, Human herpesvirus 7
uguucaggcaacauuaau

SEQ ID NO: 346586 - RNA, 13 nt, Human herpesvirus 7
uguucauuaucac

SEQ ID NO: 346587 - RNA, 19 nt, Human herpesvirus 7
uguucauuaucaccacaau

SEQ ID NO: 346588 - RNA, 14 nt, Human herpesvirus 7
uguuccaguugaau

SEQ ID NO: 346589 - RNA, 15 nt, Human herpesvirus 7
uguucccacugggac

SEQ ID NO: 346590 - RNA, 15 nt, Human herpesvirus 7
uguucgcaaauguac

SEQ ID NO: 346591 - RNA, 19 nt, Human herpesvirus 7
uguugagcuuuucuuuccg

SEQ ID NO: 346592 - RNA, 14 nt, Human herpesvirus 7
uguugaucuucaau

SEQ ID NO: 346593 - RNA, 22 nt, Human herpesvirus 7
uguugucaucauauacaauaau

SEQ ID NO: 346594 - RNA, 22 nt, Human herpesvirus 7
uguuguccagacagcuguauau

SEQ ID NO: 346595 - RNA, 19 nt, Human herpesvirus 7
uguuguuuucauagguugc

SEQ ID NO: 346596 - RNA, 14 nt, Human herpesvirus 7
uguuuaaaauguua

SEQ ID NO: 346597 - RNA, 19 nt, Human herpesvirus 7
uguuuaaaggugguuacau

SEQ ID NO: 346598 - RNA, 13 nt, Human herpesvirus 7
uguuuaagacauu

SEQ ID NO: 346599 - RNA, 16 nt, Human herpesvirus 7
uguuuaagacauuauu

SEQ ID NO: 346600 - RNA, 22 nt, Human herpesvirus 7
uguuuaagacauuauuugcuga

SEQ ID NO: 346601 - RNA, 20 nt, Human herpesvirus 7
uguuuacaaacauguuccau

SEQ ID NO: 346602 - RNA, 18 nt, Human herpesvirus 7
uguuucaagaauggcuga

SEQ ID NO: 346603 - RNA, 22 nt, Human herpesvirus 7
uguuucaagaauggcugaugau

SEQ ID NO: 346604 - RNA, 23 nt, Human herpesvirus 7
uguuucaagaauggcugaugaua

SEQ ID NO: 346605 - RNA, 17 nt, Human herpesvirus 7
uguuuccgaucuaaaga

SEQ ID NO: 346606 - RNA, 22 nt, Human herpesvirus 7
uguuucugaauccgcauuugag

SEQ ID NO: 346607 - RNA, 13 nt, Human herpesvirus 7
uguuugaucaaaa

SEQ ID NO: 346608 - RNA, 17 nt, Human herpesvirus 7
uguuuggcaacaaacaa

SEQ ID NO: 346609 - RNA, 15 nt, Human herpesvirus 7
uguuugucaucguaa

SEQ ID NO: 346610 - RNA, 16 nt, Human herpesvirus 7
uguuuuagaccuauca

SEQ ID NO: 346611 - RNA, 17 nt, Human herpesvirus 7
uguuuuagaccuaucaa

SEQ ID NO: 346612 - RNA, 15 nt, Human herpesvirus 7
uguuuucagcgccaa

SEQ ID NO: 346613 - RNA, 18 nt, Human herpesvirus 7
uguuuugacuuauggugu

SEQ ID NO: 346614 - RNA, 15 nt, Human herpesvirus 7
uguuuuuuucauaca

SEQ ID NO: 346615 - RNA, 18 nt, Human herpesvirus 7
uuaaaaaagaauuuggau

SEQ ID NO: 346616 - RNA, 13 nt, Human herpesvirus 7
uuaaaaaucuuua

SEQ ID NO: 346617 - RNA, 13 nt, Human herpesvirus 7
uuaaaaauuaaca

SEQ ID NO: 346618 - RNA, 15 nt, Human herpesvirus 7
uuaaaacuuggugaa

SEQ ID NO: 346619 - RNA, 17 nt, Human herpesvirus 7
uuaaaacuuggugaaga

SEQ ID NO: 346620 - RNA, 20 nt, Human herpesvirus 7
uuaaaaugggaauguuaacc

SEQ ID NO: 346621 - RNA, 13 nt, Human herpesvirus 7
uuaaaauuggacu

SEQ ID NO: 346622 - RNA, 22 nt, Human herpesvirus 7
uuaaaauuggacuuggcucuua

SEQ ID NO: 346623 - RNA, 16 nt, Human herpesvirus 7
uuaaaauuucauaucu

SEQ ID NO: 346624 - RNA, 14 nt, Human herpesvirus 7
uuaaacaaucugga

SEQ ID NO: 346625 - RNA, 14 nt, Human herpesvirus 7
uuaaacauuacgaa

SEQ ID NO: 346626 - RNA, 17 nt, Human herpesvirus 7
uuaaagaaaagcaaacc

SEQ ID NO: 346627 - RNA, 13 nt, Human herpesvirus 7
uuaaagaacucca

SEQ ID NO: 346628 - RNA, 20 nt, Human herpesvirus 7
uuaaagaugucuuaauugcc

SEQ ID NO: 346629 - RNA, 20 nt, Human herpesvirus 7
uuaaagauugcuugcacugu

SEQ ID NO: 346630 - RNA, 17 nt, Human herpesvirus 7
uuaaagcgagcuuucuu

SEQ ID NO: 346631 - RNA, 12 nt, Human herpesvirus 7
uuaaagcuauuu

SEQ ID NO: 346632 - RNA, 16 nt, Human herpesvirus 7
uuaaaggaucaaaagc

SEQ ID NO: 346633 - RNA, 18 nt, Human herpesvirus 7
uuaaaggugguuacauau

SEQ ID NO: 346634 - RNA, 19 nt, Human herpesvirus 7
uuaaaguugcauugaaaag

SEQ ID NO: 346635 - RNA, 18 nt, Human herpesvirus 7
uuaaauaaccaaaccaca

SEQ ID NO: 346636 - RNA, 13 nt, Human herpesvirus 7
uuaaauaauuuau

SEQ ID NO: 346637 - RNA, 19 nt, Human herpesvirus 7
uuaaauacuugcaaugcaa

SEQ ID NO: 346638 - RNA, 19 nt, Human herpesvirus 7
uucaacuucaacauacagc

SEQ ID NO: 346639 - RNA, 16 nt, Human herpesvirus 7
uucaaggaauucugac

SEQ ID NO: 346640 - RNA, 18 nt, Human herpesvirus 7
uucaaguuucuucugggu

SEQ ID NO: 346641 - RNA, 13 nt, Human herpesvirus 7
uucaaucacauac

SEQ ID NO: 346642 - RNA, 18 nt, Human herpesvirus 7
uucaaucuacuguacuuu

SEQ ID NO: 346643 - RNA, 13 nt, Human herpesvirus 7
uucaaucugcaaa

SEQ ID NO: 346644 - RNA, 14 nt, Human herpesvirus 7
uucaaucugcaaaa

SEQ ID NO: 346645 - RNA, 17 nt, Human herpesvirus 7
uucaaugcaacuuuaau

SEQ ID NO: 346646 - RNA, 16 nt, Human herpesvirus 7
uucaauuaaugcauug

SEQ ID NO: 346647 - RNA, 19 nt, Human herpesvirus 7
uucaauuaaugcauuggaa

SEQ ID NO: 346648 - RNA, 13 nt, Human herpesvirus 7
uucacacaaugcc

SEQ ID NO: 346649 - RNA, 19 nt, Human herpesvirus 7
uucacagaaaucccaaaaa

SEQ ID NO: 346650 - RNA, 21 nt, Human herpesvirus 7
uucacaugaaaacuuggaaaa

SEQ ID NO: 346651 - RNA, 18 nt, Human herpesvirus 7
uucacauugucacugcaa

SEQ ID NO: 346652 - RNA, 12 nt, Human herpesvirus 7
uucacgcuucca

SEQ ID NO: 346653 - RNA, 16 nt, Human herpesvirus 7
uucacgcuuccaucac

SEQ ID NO: 346654 - RNA, 18 nt, Human herpesvirus 7
uucacgcuuccaucacaa

SEQ ID NO: 346655 - RNA, 23 nt, Human herpesvirus 7
uucacugggaaguauguuucauc

SEQ ID NO: 346656 - RNA, 14 nt, Human herpesvirus 7
uucagauucaguau

SEQ ID NO: 346657 - RNA, 22 nt, Human herpesvirus 7
uucagauugaaauuccauacaa

SEQ ID NO: 346658 - RNA, 23 nt, Human herpesvirus 7
uucagcacugggagcaaugcaug

SEQ ID NO: 346659 - RNA, 17 nt, Human herpesvirus 7
uucagcuccaugucucu

SEQ ID NO: 346660 - RNA, 17 nt, Human herpesvirus 7
uucaggaauaucaagaa

SEQ ID NO: 346661 - RNA, 14 nt, Human herpesvirus 7
uucaggcuaugacu

SEQ ID NO: 346662 - RNA, 19 nt, Human herpesvirus 7
uucaguacauucuagagau

SEQ ID NO: 346663 - RNA, 18 nt, Human herpesvirus 7
uucaguguacuguugaua

SEQ ID NO: 346664 - RNA, 16 nt, Human herpesvirus 7
uucaguucccauaaau

SEQ ID NO: 346665 - RNA, 16 nt, Human herpesvirus 7
uucaguuuacugugga

SEQ ID NO: 346666 - RNA, 14 nt, Human herpesvirus 7
uucauagguugcua

SEQ ID NO: 346667 - RNA, 13 nt, Human herpesvirus 7
uucauaucuauga

SEQ ID NO: 346668 - RNA, 17 nt, Human herpesvirus 7
uucaugccuagagggca

SEQ ID NO: 346669 - RNA, 18 nt, Human herpesvirus 7
uucauguaucgaugugcu

SEQ ID NO: 346670 - RNA, 16 nt, Human herpesvirus 7
uucauguuuuaugacu

SEQ ID NO: 346671 - RNA, 15 nt, Human herpesvirus 7
uucauuaacuuuuau

SEQ ID NO: 346672 - RNA, 16 nt, Human herpesvirus 7
uucauuaggauagcuu

SEQ ID NO: 346673 - RNA, 15 nt, Human herpesvirus 7
uucauuaucaccaca

SEQ ID NO: 346674 - RNA, 13 nt, Human herpesvirus 7
uucauuccaaaau

SEQ ID NO: 346675 - RNA, 23 nt, Human herpesvirus 7
uucauuugugaaauugacaccgu

SEQ ID NO: 346676 - RNA, 22 nt, Human herpesvirus 7
uucauuuuaaaaaagacaccuu

SEQ ID NO: 346677 - RNA, 21 nt, Human herpesvirus 7
uuccaaaauguaaaccaaauu

SEQ ID NO: 346678 - RNA, 19 nt, Human herpesvirus 7
uuccaaacucgaggcuuaa

SEQ ID NO: 346679 - RNA, 19 nt, Human herpesvirus 7
uuccaacucaaugaaugca

SEQ ID NO: 346680 - RNA, 15 nt, Human herpesvirus 7
uuccaauauagacau

SEQ ID NO: 346681 - RNA, 18 nt, Human herpesvirus 7
uuccacacagggaagaaa

SEQ ID NO: 346682 - RNA, 20 nt, Human herpesvirus 7
uuccacuguuguagguaauu

SEQ ID NO: 346683 - RNA, 12 nt, Human herpesvirus 7
uuccagauauga

SEQ ID NO: 346684 - RNA, 14 nt, Human herpesvirus 7
uuccaucacaaaac

SEQ ID NO: 346685 - RNA, 18 nt, Human herpesvirus 7
uucccagagaccuaugaa

SEQ ID NO: 346686 - RNA, 20 nt, Human herpesvirus 7
uuccccuggaacguccucug

SEQ ID NO: 346687 - RNA, 18 nt, Human herpesvirus 7
uuccguuuuuuugcauca

SEQ ID NO: 346688 - RNA, 15 nt, Human herpesvirus 7
uuccuagcauuaauu

SEQ ID NO: 346689 - RNA, 23 nt, Human herpesvirus 7
uuccucaauuuuucgcugaagaa

SEQ ID NO: 346690 - RNA, 19 nt, Human herpesvirus 7
uuccucacagauuuuccaa

SEQ ID NO: 346691 - RNA, 14 nt, Human herpesvirus 7
uuccucccaaaaau

SEQ ID NO: 346692 - RNA, 20 nt, Human herpesvirus 7
uuccucuggaaaagggagau

SEQ ID NO: 346693 - RNA, 21 nt, Human herpesvirus 7
uuccuuucguuuucaaagugu

SEQ ID NO: 346694 - RNA, 17 nt, Human herpesvirus 7
uuccuuucuuugagcua

SEQ ID NO: 346695 - RNA, 22 nt, Human herpesvirus 7
uucgacuucuaaaaauacaacu

SEQ ID NO: 346696 - RNA, 16 nt, Human herpesvirus 7
uucgagucaguuauca

SEQ ID NO: 346697 - RNA, 22 nt, Human herpesvirus 7
uucgcaacaauuacuugucuua

SEQ ID NO: 346698 - RNA, 20 nt, Human herpesvirus 7
uucgcaaggaauaugaagag

SEQ ID NO: 346699 - RNA, 20 nt, Human herpesvirus 7
uucgcaguuagucugcugga

SEQ ID NO: 346700 - RNA, 15 nt, Human herpesvirus 7
uucgcugaagaacau

SEQ ID NO: 346701 - RNA, 22 nt, Human herpesvirus 7
uucggaauuugauuccaucuca

SEQ ID NO: 346702 - RNA, 18 nt, Human herpesvirus 7
uucggagacguugcucau

SEQ ID NO: 346703 - RNA, 23 nt, Human herpesvirus 7
uucguaacaaauucaaccacaga

SEQ ID NO: 346704 - RNA, 14 nt, Human herpesvirus 7
uucguauugccuuu

SEQ ID NO: 346705 - RNA, 17 nt, Human herpesvirus 7
uucgugugucucuagaa

SEQ ID NO: 346706 - RNA, 18 nt, Human herpesvirus 7
uucgugugucucuagaaa

SEQ ID NO: 346707 - RNA, 21 nt, Human herpesvirus 7
uucuaaguacuucuggcuuaa

SEQ ID NO: 346708 - RNA, 18 nt, Human herpesvirus 7
uucuaauugcgcaguguu

SEQ ID NO: 346709 - RNA, 20 nt, Human herpesvirus 7
uucuaauuuuggcgaaacaa

SEQ ID NO: 346710 - RNA, 13 nt, Human herpesvirus 7
uucuacaacuaaa

SEQ ID NO: 346711 - RNA, 20 nt, Human herpesvirus 7
uucuacaacuaaaauugaca

SEQ ID NO: 346712 - RNA, 22 nt, Human herpesvirus 7
uucuacaauaugacgacuuuga

SEQ ID NO: 346713 - RNA, 17 nt, Human herpesvirus 7
uucuagaaacuaaagaa

SEQ ID NO: 346714 - RNA, 17 nt, Human herpesvirus 7
uucuauagaucuugacu

SEQ ID NO: 346715 - RNA, 22 nt, Human herpesvirus 7
uucuauagaucuugacucagau

SEQ ID NO: 346716 - RNA, 16 nt, Human herpesvirus 7
uucuaucucaaaacaa

SEQ ID NO: 346717 - RNA, 12 nt, Human herpesvirus 7
uucuauuguaug

SEQ ID NO: 346718 - RNA, 14 nt, Human herpesvirus 7
uucucaauagcaua

SEQ ID NO: 346719 - RNA, 15 nt, Human herpesvirus 7
uucucauagauuuca

SEQ ID NO: 346720 - RNA, 20 nt, Human herpesvirus 7
uucucaugcgauaucugacu

SEQ ID NO: 346721 - RNA, 19 nt, Human herpesvirus 7
uucuccaguggcaguacua

SEQ ID NO: 346722 - RNA, 22 nt, Human herpesvirus 7
uucuccaugcauauuugaacau

SEQ ID NO: 346723 - RNA, 15 nt, Human herpesvirus 7
uucuccgcacuaaaa

SEQ ID NO: 346724 - RNA, 13 nt, Human herpesvirus 7
uucugaaaccuuc

SEQ ID NO: 346725 - RNA, 23 nt, Human herpesvirus 7
uucugaaaccuucgcaacaauua

SEQ ID NO: 346726 - RNA, 22 nt, Human herpesvirus 7
uucugaaagugacggaaguacu

SEQ ID NO: 346727 - RNA, 23 nt, Human herpesvirus 7
uucuggaucugccucugccucuu

SEQ ID NO: 346728 - RNA, 15 nt, Human herpesvirus 7
uucugggaacuagaa

SEQ ID NO: 346729 - RNA, 16 nt, Human herpesvirus 7
uucuguaaucauauau

SEQ ID NO: 346730 - RNA, 15 nt, Human herpesvirus 7
uucugucagaacuuu

SEQ ID NO: 346731 - RNA, 17 nt, Human herpesvirus 7
uucugucagaacuuuua

SEQ ID NO: 346732 - RNA, 13 nt, Human herpesvirus 7
uucugucaucuua

SEQ ID NO: 346733 - RNA, 17 nt, Human herpesvirus 7
uucuguggagugagaaa

SEQ ID NO: 346734 - RNA, 18 nt, Human herpesvirus 7
uucuguuuugaguguuaa

SEQ ID NO: 346735 - RNA, 16 nt, Human herpesvirus 7
uucuuacacuaugaga

SEQ ID NO: 346736 - RNA, 16 nt, Human herpesvirus 7
uucuuaccgcauaaau

SEQ ID NO: 346737 - RNA, 14 nt, Human herpesvirus 7
uucuuagcuuucau

SEQ ID NO: 346738 - RNA, 21 nt, Human herpesvirus 7
uucuuagcuuucaugauuuca

SEQ ID NO: 346739 - RNA, 16 nt, Human herpesvirus 7
uucuuauaacaaaguu

SEQ ID NO: 346740 - RNA, 23 nt, Human herpesvirus 7
uucuucuaauacaucuaggucuu

SEQ ID NO: 346741 - RNA, 13 nt, Human herpesvirus 7
uucuugcauuucc

SEQ ID NO: 346742 - RNA, 22 nt, Human herpesvirus 7
uucuuguuuggaaaacaacaua

SEQ ID NO: 346743 - RNA, 17 nt, Human herpesvirus 7
uucuuucuugcauacag

SEQ ID NO: 346744 - RNA, 16 nt, Human herpesvirus 7
uugaaaaaacaguuca

SEQ ID NO: 346745 - RNA, 18 nt, Human herpesvirus 7
uugaaaaaacaguucaag

SEQ ID NO: 346746 - RNA, 18 nt, Human herpesvirus 7
uugaaaauauauuccaac

SEQ ID NO: 346747 - RNA, 14 nt, Human herpesvirus 7
uugaaaaugcauug

SEQ ID NO: 346748 - RNA, 20 nt, Human herpesvirus 7
uugaaaaugcauugcuuuua

SEQ ID NO: 346749 - RNA, 24 nt, Human herpesvirus 7
uugaaauagugucuguuguaacag

SEQ ID NO: 346750 - RNA, 19 nt, Human herpesvirus 7
uugaaauauuuaugccuuu

SEQ ID NO: 346751 - RNA, 18 nt, Human herpesvirus 7
uugaacaaguagugcuaa

SEQ ID NO: 346752 - RNA, 14 nt, Human herpesvirus 7
uuuacaaaacaaag

SEQ ID NO: 346753 - RNA, 17 nt, Human herpesvirus 7
uuuacaaacauguucca

SEQ ID NO: 346754 - RNA, 23 nt, Human herpesvirus 7
uuuacaaagaacauguaguacaa

SEQ ID NO: 346755 - RNA, 12 nt, Human herpesvirus 7
uuuacauuacug

SEQ ID NO: 346756 - RNA, 15 nt, Human herpesvirus 7
uuuacauuacuggau

SEQ ID NO: 346757 - RNA, 20 nt, Human herpesvirus 7
uuuaccaaauauguggcaca

SEQ ID NO: 346758 - RNA, 21 nt, Human herpesvirus 7
uuuacuuauguguuacaugau

SEQ ID NO: 346759 - RNA, 17 nt, Human herpesvirus 7
uuuacuuucauagcuua

SEQ ID NO: 346760 - RNA, 15 nt, Human herpesvirus 7
uuuagaccuaucaaa

SEQ ID NO: 346761 - RNA, 21 nt, Human herpesvirus 7
uuuagcgcugaaauuucauga

SEQ ID NO: 346762 - RNA, 11 nt, Human herpesvirus 7
uuuagcucuaa

SEQ ID NO: 346763 - RNA, 16 nt, Human herpesvirus 7
uuuagugaguucacga

SEQ ID NO: 346764 - RNA, 22 nt, Human herpesvirus 7
uuuauaaaauauggacuuuuaa

SEQ ID NO: 346765 - RNA, 12 nt, Human herpesvirus 7
uuuauaugucaa

SEQ ID NO: 346766 - RNA, 19 nt, Human herpesvirus 7
uuuauauuugcuugcugaa

SEQ ID NO: 346767 - RNA, 16 nt, Human herpesvirus 7
uuuauccaucaaaagu

SEQ ID NO: 346768 - RNA, 16 nt, Human herpesvirus 7
uuuaucucauagcuua

SEQ ID NO: 346769 - RNA, 14 nt, Human herpesvirus 7
uuuaucugcauuga

SEQ ID NO: 346770 - RNA, 14 nt, Human herpesvirus 7
uuuaucuuggacug

SEQ ID NO: 346771 - RNA, 24 nt, Human herpesvirus 7
uuuaugaaaaacaaaauguauuca

SEQ ID NO: 346772 - RNA, 19 nt, Human herpesvirus 7
uuuauguauuuuacuggau

SEQ ID NO: 346773 - RNA, 16 nt, Human herpesvirus 7
uuuauugccuuguuug

SEQ ID NO: 346774 - RNA, 17 nt, Human herpesvirus 7
uuucaaacaacauaucg

SEQ ID NO: 346775 - RNA, 17 nt, Human herpesvirus 7
uuucaauuaaugcauug

SEQ ID NO: 346776 - RNA, 22 nt, Human herpesvirus 7
uuucagcuccaugucucucgca

SEQ ID NO: 346777 - RNA, 17 nt, Human herpesvirus 7
uuucagugaagcuaaaa

SEQ ID NO: 346778 - RNA, 17 nt, Human herpesvirus 7
uuucaguguacuguuga

SEQ ID NO: 346779 - RNA, 12 nt, Human herpesvirus 7
uuucauagcuua

SEQ ID NO: 346780 - RNA, 21 nt, Human herpesvirus 7
uuucaucuucugaaucugcaa

SEQ ID NO: 346781 - RNA, 18 nt, Human herpesvirus 7
uuucccagagaccuauga

SEQ ID NO: 346782 - RNA, 20 nt, Human herpesvirus 7
uuuccgcauaaaaaaucuaa

SEQ ID NO: 346783 - RNA, 22 nt, Human herpesvirus 7
uuuccuuuaauuauuaaucuuu

SEQ ID NO: 346784 - RNA, 23 nt, Human herpesvirus 7
uuucgaacuugucaccuauuuca

SEQ ID NO: 346785 - RNA, 12 nt, Human herpesvirus 7
uuucgauuccau

SEQ ID NO: 346786 - RNA, 15 nt, Human herpesvirus 7
uuucguaucugugac

SEQ ID NO: 346787 - RNA, 15 nt, Human herpesvirus 7
uuucuaauagacaaa

SEQ ID NO: 346788 - RNA, 22 nt, Human herpesvirus 7
uuucuagcaaaauaugcaaaac

SEQ ID NO: 346789 - RNA, 21 nt, Human herpesvirus 7
uuucucacaccuuacuuuuaa

SEQ ID NO: 346790 - RNA, 22 nt, Human herpesvirus 7
uuucucgcguuucuucaaaguc

SEQ ID NO: 346791 - RNA, 21 nt, Human herpesvirus 7
uuucucgcucgcgugauuuuu

SEQ ID NO: 346792 - RNA, 14 nt, Human herpesvirus 7
uuucucguuuuucu

SEQ ID NO: 346793 - RNA, 13 nt, Human herpesvirus 7
uuucugagugcua

SEQ ID NO: 346794 - RNA, 14 nt, Human herpesvirus 7
uuucuggaauguug

SEQ ID NO: 346795 - RNA, 19 nt, Human herpesvirus 7
uuucuggcaacaguucaaa

SEQ ID NO: 346796 - RNA, 13 nt, Human herpesvirus 7
uuucuggcaauaa

SEQ ID NO: 346797 - RNA, 23 nt, Human herpesvirus 7
uuucuguaaucauauaugcauua

SEQ ID NO: 346798 - RNA, 13 nt, Human herpesvirus 7
uuucugucuuugc

SEQ ID NO: 346799 - RNA, 20 nt, Human herpesvirus 7
uuucuuagaugcauccaaag

SEQ ID NO: 346800 - RNA, 22 nt, Human herpesvirus 7
uuucuuagcuuucaugauuuca

SEQ ID NO: 346801 - RNA, 19 nt, Human herpesvirus 7
uuucuuauuggagauguca

SEQ ID NO: 346802 - RNA, 19 nt, Human herpesvirus 7
uuucuucaaagucuaaggu

SEQ ID NO: 346803 - RNA, 13 nt, Human herpesvirus 7
uuucuucuuccac

SEQ ID NO: 346804 - RNA, 12 nt, Human herpesvirus 7
uuucuugaugua

SEQ ID NO: 346805 - RNA, 12 nt, Human herpesvirus 7
uuugaaaaccau

SEQ ID NO: 346806 - RNA, 13 nt, Human herpesvirus 7
uuugaaaaccauu

SEQ ID NO: 346807 - RNA, 22 nt, Human herpesvirus 7
uuugaaaacgaaaggaaucuua

SEQ ID NO: 346808 - RNA, 22 nt, Human herpesvirus 7
uuugaaaaggcaucgcauauag

SEQ ID NO: 346809 - RNA, 23 nt, Human herpesvirus 7
uuugaaaauauauuccaacucaa

SEQ ID NO: 346810 - RNA, 19 nt, Human herpesvirus 7
uuugaaauaaaggaucucu

SEQ ID NO: 346811 - RNA, 22 nt, Human herpesvirus 7
uuugaacggaauaaacaaugug

SEQ ID NO: 346812 - RNA, 23 nt, Human herpesvirus 7
uuugaaguguuuuuauuaauuuc

SEQ ID NO: 346813 - RNA, 13 nt, Human herpesvirus 7
uuugaauaaucuc

SEQ ID NO: 346814 - RNA, 22 nt, Human herpesvirus 7
uuugaaucgugggacuugauaa

SEQ ID NO: 346815 - RNA, 20 nt, Human herpesvirus 7
uuugaauguauguccacuaa

SEQ ID NO: 346816 - RNA, 20 nt, Human herpesvirus 7
uuugacaaucuuggcauuga

SEQ ID NO: 346817 - RNA, 12 nt, Human herpesvirus 7
uuugacaggugc

SEQ ID NO: 346818 - RNA, 22 nt, Human herpesvirus 7
uuugacuuuuucuguagacauu

SEQ ID NO: 346819 - RNA, 12 nt, Human herpesvirus 7
uuugagucucag

SEQ ID NO: 346820 - RNA, 23 nt, Human herpesvirus 7
uuugauacagauauuuuaauucu

SEQ ID NO: 346821 - RNA, 20 nt, Human herpesvirus 7
uuugauagggauucuuugaa

SEQ ID NO: 346822 - RNA, 15 nt, Human herpesvirus 7
uuugaucuugucaaa

SEQ ID NO: 346823 - RNA, 14 nt, Human herpesvirus 7
uuugaugugcaaca

SEQ ID NO: 346824 - RNA, 22 nt, Human herpesvirus 7
uuugcaaagucucauucaugca

SEQ ID NO: 346825 - RNA, 17 nt, Human herpesvirus 7
uuugcaacaaauuccau

SEQ ID NO: 346826 - RNA, 22 nt, Human herpesvirus 7
uuugcaagcacauguacagaca

SEQ ID NO: 346827 - RNA, 16 nt, Human herpesvirus 7
uuugcaauaugcucac

SEQ ID NO: 346828 - RNA, 17 nt, Human herpesvirus 7
uuugcagccagaacuca

SEQ ID NO: 346829 - RNA, 22 nt, Human herpesvirus 7
uuugcauagauuaaauagcaaa

SEQ ID NO: 346830 - RNA, 20 nt, Human herpesvirus 7
uuugcauauggacuuaucaa

SEQ ID NO: 346831 - RNA, 15 nt, Human herpesvirus 7
uuugcauauuuugcu

SEQ ID NO: 346832 - RNA, 22 nt, Human herpesvirus 7
uuugcaucaggaaaaucuauca

SEQ ID NO: 346833 - RNA, 16 nt, Human herpesvirus 7
uuuggaaauuguuuga

SEQ ID NO: 346834 - RNA, 21 nt, Human herpesvirus 7
uuuggagcuugguuuuacaaa

SEQ ID NO: 346835 - RNA, 21 nt, Human herpesvirus 7
uuuggauaguucguaaaaaga

SEQ ID NO: 346836 - RNA, 18 nt, Human herpesvirus 7
uuuggcgaaacaauacau

SEQ ID NO: 346837 - RNA, 20 nt, Human herpesvirus 7
uuuggcgccaaaaaaacaca

SEQ ID NO: 346838 - RNA, 13 nt, Human herpesvirus 7
uuuguaacuauaa

SEQ ID NO: 346839 - RNA, 16 nt, Human herpesvirus 7
uuuguaagaaacaucu

SEQ ID NO: 346840 - RNA, 13 nt, Human herpesvirus 7
uuuguaaggccaa

SEQ ID NO: 346841 - RNA, 15 nt, Human herpesvirus 7
uuuguacaugccaga

SEQ ID NO: 346842 - RNA, 17 nt, Human herpesvirus 7
uuuguacuuguaccaau

SEQ ID NO: 346843 - RNA, 13 nt, Human herpesvirus 7
uuuguauacaacu

SEQ ID NO: 346844 - RNA, 14 nt, Human herpesvirus 7
uuuguaucuaugac

SEQ ID NO: 346845 - RNA, 19 nt, Human herpesvirus 7
uuuguaugaaaagcccaaa

SEQ ID NO: 346846 - RNA, 20 nt, Human herpesvirus 7
uuugucucugugcauuucac

SEQ ID NO: 346847 - RNA, 15 nt, Human herpesvirus 7
uuugucucuuuacag

SEQ ID NO: 346848 - RNA, 14 nt, Human herpesvirus 7
uuugucuggucaca

SEQ ID NO: 346849 - RNA, 16 nt, Human herpesvirus 7
uuugucuggucacaua

SEQ ID NO: 346850 - RNA, 16 nt, Human herpesvirus 7
uuugugagaaauggaa

SEQ ID NO: 346851 - RNA, 23 nt, Human herpesvirus 7
uuugugauguacugcucaucaaa

SEQ ID NO: 346852 - RNA, 14 nt, Human herpesvirus 7
uuuguuaggccagu

SEQ ID NO: 346853 - RNA, 22 nt, Human herpesvirus 7
uuuguuaggccaguucuaucuc

SEQ ID NO: 346854 - RNA, 19 nt, Human herpesvirus 7
uuuguuuaccuucauggca

SEQ ID NO: 346855 - RNA, 21 nt, Human herpesvirus 7
uuuguuucaauaugcaugcaa

SEQ ID NO: 346856 - RNA, 20 nt, Human herpesvirus 7
uuuguuuugcaauaugcuca

SEQ ID NO: 346857 - RNA, 23 nt, Human herpesvirus 7
uuuuaaaacuuauguacucugau

SEQ ID NO: 346858 - RNA, 19 nt, Human herpesvirus 7
uuuuaaaagguugacauca

SEQ ID NO: 346859 - RNA, 17 nt, Human herpesvirus 7
uuuuaaauaaaccuuaa

SEQ ID NO: 346860 - RNA, 19 nt, Human herpesvirus 7
uuuuaaauaaacgguagaa

SEQ ID NO: 346861 - RNA, 18 nt, Human herpesvirus 7
uuuuaaaugugucuuaca

SEQ ID NO: 346862 - RNA, 23 nt, Human herpesvirus 7
uuuuaacaacagccaaauguggu

SEQ ID NO: 346863 - RNA, 22 nt, Human herpesvirus 7
uuuuaauaaaaugaugaugaca

SEQ ID NO: 346864 - RNA, 17 nt, Human herpesvirus 7
uuuuaauucuugauccc

SEQ ID NO: 346865 - RNA, 13 nt, Human herpesvirus 7
uuuuaauugugca

SEQ ID NO: 346866 - RNA, 15 nt, Human herpesvirus 7
aauuaucgcaauuaa

SEQ ID NO: 346867 - RNA, 13 nt, Human herpesvirus 7
aauuaucuacccc

SEQ ID NO: 346868 - RNA, 22 nt, Human herpesvirus 7
aauuaugcguuaaugucucugu

SEQ ID NO: 346869 - RNA, 23 nt, Human herpesvirus 7
aauuauguggugcguacacugua

SEQ ID NO: 346870 - RNA, 24 nt, Human herpesvirus 7
aauuauguggugcguacacuguaa

SEQ ID NO: 346871 - RNA, 19 nt, Human herpesvirus 7
aauuauuaauauuaguauu

SEQ ID NO: 346872 - RNA, 17 nt, Human herpesvirus 7
aauuauucggugucuuc

SEQ ID NO: 346873 - RNA, 18 nt, Human herpesvirus 7
aauuauucggugucuucu

SEQ ID NO: 346874 - RNA, 20 nt, Human herpesvirus 7
aauuauuuccagaguaugaa

SEQ ID NO: 346875 - RNA, 14 nt, Human herpesvirus 7
aauucaaccacaga

SEQ ID NO: 346876 - RNA, 21 nt, Human herpesvirus 7
aauucaaccacagacacacca

SEQ ID NO: 346877 - RNA, 17 nt, Human herpesvirus 7
aauucaaucaccaaaga

SEQ ID NO: 346878 - RNA, 17 nt, Human herpesvirus 7
aauucaaucugcaaaaa

SEQ ID NO: 346879 - RNA, 21 nt, Human herpesvirus 7
aauucauuugugaaauugaca

SEQ ID NO: 346880 - RNA, 12 nt, Human herpesvirus 7
aauuccauacaa

SEQ ID NO: 346881 - RNA, 16 nt, Human herpesvirus 7
aauuccauacaaagaa

SEQ ID NO: 346882 - RNA, 18 nt, Human herpesvirus 7
aauuccgauuuaagugaa

SEQ ID NO: 346883 - RNA, 17 nt, Human herpesvirus 7
aauuccugcuugcacaa

SEQ ID NO: 346884 - RNA, 20 nt, Human herpesvirus 7
aauuccugcuugcacaaaga

SEQ ID NO: 346885 - RNA, 17 nt, Human herpesvirus 7
aauucgcuuaccuuuuu

SEQ ID NO: 346886 - RNA, 16 nt, Human herpesvirus 7
aauucguuaagcaccg

SEQ ID NO: 346887 - RNA, 13 nt, Human herpesvirus 7
aauucguuuauac

SEQ ID NO: 346888 - RNA, 16 nt, Human herpesvirus 7
aauucucacagcuuau

SEQ ID NO: 346889 - RNA, 18 nt, Human herpesvirus 7
aauucugcuugucucugu

SEQ ID NO: 346890 - RNA, 15 nt, Human herpesvirus 7
aauucuggcucuuua

SEQ ID NO: 346891 - RNA, 10 nt, Human herpesvirus 7
aauucuugau

SEQ ID NO: 346892 - RNA, 15 nt, Human herpesvirus 7
aauucuuugcaauca

SEQ ID NO: 346893 - RNA, 21 nt, Human herpesvirus 7
aauucuuuguacuuguaccaa

SEQ ID NO: 346894 - RNA, 15 nt, Human herpesvirus 7
aauucuuuuucaaga

SEQ ID NO: 346895 - RNA, 17 nt, Human herpesvirus 7
aauugaaagaccaaauu

SEQ ID NO: 346896 - RNA, 20 nt, Human herpesvirus 7
aauugaaagaccaaauucau

SEQ ID NO: 346897 - RNA, 15 nt, Human herpesvirus 7
aauugauccugcuau

SEQ ID NO: 346898 - RNA, 18 nt, Human herpesvirus 7
aauugcagacuaauuaca

SEQ ID NO: 346899 - RNA, 17 nt, Human herpesvirus 7
aauugccauuguguuaa

SEQ ID NO: 346900 - RNA, 21 nt, Human herpesvirus 7
aauugcccuuguguugucaua

SEQ ID NO: 346901 - RNA, 22 nt, Human herpesvirus 7
aauugcccuuguguugucauac

SEQ ID NO: 346902 - RNA, 17 nt, Human herpesvirus 7
aauugcugucuauuuca

SEQ ID NO: 346903 - RNA, 21 nt, Human herpesvirus 7
aauugguaauguuacuauaug

SEQ ID NO: 346904 - RNA, 21 nt, Human herpesvirus 7
aauugugcaucuccuguaacc

SEQ ID NO: 346905 - RNA, 23 nt, Human herpesvirus 7
aauuguguuuuuuuuuguuuuau

SEQ ID NO: 346906 - RNA, 20 nt, Human herpesvirus 7
aauuguuccugugugcaaug

SEQ ID NO: 346907 - RNA, 16 nt, Human herpesvirus 7
aauuuaaauacugaga

SEQ ID NO: 346908 - RNA, 16 nt, Human herpesvirus 7
aauuuaaguagugucu

SEQ ID NO: 346909 - RNA, 23 nt, Human herpesvirus 7
aauuuaaucauaucuugcuuaga

SEQ ID NO: 346910 - RNA, 20 nt, Human herpesvirus 7
aauuuaaugcuuugucuuac

SEQ ID NO: 346911 - RNA, 13 nt, Human herpesvirus 7
aauuuagcaccaa

SEQ ID NO: 346912 - RNA, 13 nt, Human herpesvirus 7
aauuuaggacuuu

SEQ ID NO: 346913 - RNA, 18 nt, Human herpesvirus 7
aauuuauauuugcuugcu

SEQ ID NO: 346914 - RNA, 20 nt, Human herpesvirus 7
aauuuauccuaagcuuuuca

SEQ ID NO: 346915 - RNA, 17 nt, Human herpesvirus 7
aauuuaucucauagcuu

SEQ ID NO: 346916 - RNA, 18 nt, Human herpesvirus 7
aauuuaucucauagcuua

SEQ ID NO: 346917 - RNA, 12 nt, Human herpesvirus 7
aauuuaugauuu

SEQ ID NO: 346918 - RNA, 14 nt, Human herpesvirus 7
aauuuaugcuuuaa

SEQ ID NO: 346919 - RNA, 19 nt, Human herpesvirus 7
aauuuaugcuuuaacugga

SEQ ID NO: 346920 - RNA, 17 nt, Human herpesvirus 7
aauuucaaaaauucucc

SEQ ID NO: 346921 - RNA, 13 nt, Human herpesvirus 7
aauuucacacaau

SEQ ID NO: 346922 - RNA, 14 nt, Human herpesvirus 7
aauuucacacaaug

SEQ ID NO: 346923 - RNA, 19 nt, Human herpesvirus 7
aauuucacagacgcaucau

SEQ ID NO: 346924 - RNA, 13 nt, Human herpesvirus 7
aauuucauaucua

SEQ ID NO: 346925 - RNA, 14 nt, Human herpesvirus 7
aauuucauaucuau

SEQ ID NO: 346926 - RNA, 16 nt, Human herpesvirus 7
aauuuccuacaaaagu

SEQ ID NO: 346927 - RNA, 19 nt, Human herpesvirus 7
aauuucuaaauaugaugaa

SEQ ID NO: 346928 - RNA, 18 nt, Human herpesvirus 7
aauuugaggauuuugaca

SEQ ID NO: 346929 - RNA, 18 nt, Human herpesvirus 7
aauuugauuccaucucac

SEQ ID NO: 346930 - RNA, 16 nt, Human herpesvirus 7
aauuugcauaaacuau

SEQ ID NO: 346931 - RNA, 20 nt, Human herpesvirus 7
aauuugcauaaacuaucaaa

SEQ ID NO: 346932 - RNA, 20 nt, Human herpesvirus 7
aauuuggauagauacauuau

SEQ ID NO: 346933 - RNA, 21 nt, Human herpesvirus 7
aauuuggauagauacauuaua

SEQ ID NO: 346934 - RNA, 17 nt, Human herpesvirus 7
aauuuggcgccaaaaaa

SEQ ID NO: 346935 - RNA, 21 nt, Human herpesvirus 7
aauuuggcgccaaaaaaacac

SEQ ID NO: 346936 - RNA, 17 nt, Human herpesvirus 7
aauuuguaucuaugaca

SEQ ID NO: 346937 - RNA, 21 nt, Human herpesvirus 7
aauuugugauaugacugacau

SEQ ID NO: 346938 - RNA, 13 nt, Human herpesvirus 7
aauuugugcugug

SEQ ID NO: 346939 - RNA, 17 nt, Human herpesvirus 7
aauuugugcugugucaa

SEQ ID NO: 346940 - RNA, 17 nt, Human herpesvirus 7
aauuuguuuaacuauug

SEQ ID NO: 346941 - RNA, 16 nt, Human herpesvirus 7
aauuuuaaaacugaag

SEQ ID NO: 346942 - RNA, 18 nt, Human herpesvirus 7
aauuuuaaaacugaagca

SEQ ID NO: 346943 - RNA, 15 nt, Human herpesvirus 7
aauuuuaacgcugaa

SEQ ID NO: 346944 - RNA, 19 nt, Human herpesvirus 7
aauuuuaauagucuaaaaa

SEQ ID NO: 346945 - RNA, 15 nt, Human herpesvirus 7
aauuuuaaugugcuu

SEQ ID NO: 346946 - RNA, 19 nt, Human herpesvirus 7
aauuuuacaccgauuccag

SEQ ID NO: 346947 - RNA, 13 nt, Human herpesvirus 7
aauuuuauugucu

SEQ ID NO: 346948 - RNA, 23 nt, Human herpesvirus 7
aauuuucaccgccgaugauugau

SEQ ID NO: 346949 - RNA, 15 nt, Human herpesvirus 7
aauuuugaucuuguc

SEQ ID NO: 346950 - RNA, 20 nt, Human herpesvirus 7
aauuuugaucuugucaaaaa

SEQ ID NO: 346951 - RNA, 19 nt, Human herpesvirus 7
aauuuuggcgaaacaauac

SEQ ID NO: 346952 - RNA, 21 nt, Human herpesvirus 7
aauuuuggcgaaacaauacau

SEQ ID NO: 346953 - RNA, 17 nt, Human herpesvirus 7
aauuuuucgcugaagaa

SEQ ID NO: 346954 - RNA, 20 nt, Human herpesvirus 7
aauuuuuggcuaacugagaa

SEQ ID NO: 346955 - RNA, 14 nt, Human herpesvirus 7
aauuuuuuguucaa

SEQ ID NO: 346956 - RNA, 19 nt, Human herpesvirus 7
aauuuuuuuuugagugugc

SEQ ID NO: 346957 - RNA, 23 nt, Human herpesvirus 7
acaaaaaaaguaccauugcugau

SEQ ID NO: 346958 - RNA, 20 nt, Human herpesvirus 7
acaaaaaagguguugauaga

SEQ ID NO: 346959 - RNA, 22 nt, Human herpesvirus 7
acaaaaaagugaucaaaauuaa

SEQ ID NO: 346960 - RNA, 21 nt, Human herpesvirus 7
acaaaauucuggcguaaauac

SEQ ID NO: 346961 - RNA, 18 nt, Human herpesvirus 7
acaaacauguuccauuca

SEQ ID NO: 346962 - RNA, 15 nt, Human herpesvirus 7
acaaacauuccaaca

SEQ ID NO: 346963 - RNA, 15 nt, Human herpesvirus 7
acaaagaacauguag

SEQ ID NO: 346964 - RNA, 13 nt, Human herpesvirus 7
acaaagaagaauu

SEQ ID NO: 346965 - RNA, 18 nt, Human herpesvirus 7
acaaaggaucgaucucug

SEQ ID NO: 346966 - RNA, 12 nt, Human herpesvirus 7
acaaaggccagg

SEQ ID NO: 346967 - RNA, 21 nt, Human herpesvirus 7
acaaauaaugaguauaacuca

SEQ ID NO: 346968 - RNA, 21 nt, Human herpesvirus 7
acaaauaauucaaaaacuauc

SEQ ID NO: 346969 - RNA, 22 nt, Human herpesvirus 7
acaaauaccaugaaaaauauga

SEQ ID NO: 346970 - RNA, 17 nt, Human herpesvirus 7
acaaauauacgaaugcc

SEQ ID NO: 346971 - RNA, 16 nt, Human herpesvirus 7
acaaauccacucuggc

SEQ ID NO: 346972 - RNA, 17 nt, Human herpesvirus 7
acaaauccacucuggca

SEQ ID NO: 346973 - RNA, 15 nt, Human herpesvirus 7
acaaaugucuuaucc

SEQ ID NO: 346974 - RNA, 15 nt, Human herpesvirus 7
acaaauuaaacaauc

SEQ ID NO: 346975 - RNA, 21 nt, Human herpesvirus 7
acaaauuaaacaaucuggaca

SEQ ID NO: 346976 - RNA, 20 nt, Human herpesvirus 7
acaaauuaugcguuaauguc

SEQ ID NO: 346977 - RNA, 15 nt, Human herpesvirus 7
acaaauucaaccaca

SEQ ID NO: 346978 - RNA, 19 nt, Human herpesvirus 7
acaaauucaaccacagaca

SEQ ID NO: 346979 - RNA, 21 nt, Human herpesvirus 7
acaaauucaaccacagacaca

SEQ ID NO: 346980 - RNA, 20 nt, Human herpesvirus 7
acaaauuccugcuugcacaa

SEQ ID NO: 346981 - RNA, 17 nt, Human herpesvirus 7
acaaauugauccugcua

SEQ ID NO: 346982 - RNA, 15 nt, Human herpesvirus 7
agaaaggagacuuaa

SEQ ID NO: 346983 - RNA, 16 nt, Human herpesvirus 7
agaaagggcaugucug

SEQ ID NO: 346984 - RNA, 21 nt, Human herpesvirus 7
agaaauaaugaaggauggcgu

SEQ ID NO: 346985 - RNA, 18 nt, Human herpesvirus 7
agaaauaugcuuccuaaa

SEQ ID NO: 346986 - RNA, 21 nt, Human herpesvirus 7
agaaaugaaucugcacuaucu

SEQ ID NO: 346987 - RNA, 23 nt, Human herpesvirus 7
agaaaugaaucugcacuaucucc

SEQ ID NO: 346988 - RNA, 13 nt, Human herpesvirus 7
agaaauuacagua

SEQ ID NO: 346989 - RNA, 17 nt, Human herpesvirus 7
agaaauuguuaccuaaa

SEQ ID NO: 346990 - RNA, 19 nt, Human herpesvirus 7
agaaauuuugaucuuguca

SEQ ID NO: 346991 - RNA, 22 nt, Human herpesvirus 7
agaacaaguagaaaaugcuguu

SEQ ID NO: 346992 - RNA, 13 nt, Human herpesvirus 7
agaacaccauagu

SEQ ID NO: 346993 - RNA, 14 nt, Human herpesvirus 7
agaacagaaugaua

SEQ ID NO: 346994 - RNA, 15 nt, Human herpesvirus 7
agaacagaaugauaa

SEQ ID NO: 346995 - RNA, 23 nt, Human herpesvirus 7
agaacaucugucaggucacaaaa

SEQ ID NO: 346996 - RNA, 14 nt, Human herpesvirus 7
agaacauuaauauc

SEQ ID NO: 346997 - RNA, 17 nt, Human herpesvirus 7
agaacauugucaaagaa

SEQ ID NO: 346998 - RNA, 17 nt, Human herpesvirus 7
agaacauuuuucuugcu

SEQ ID NO: 346999 - RNA, 22 nt, Human herpesvirus 7
agaaccugaaagaaaauaauuu

SEQ ID NO: 347000 - RNA, 21 nt, Human herpesvirus 7
agaacuccauucgguuuucaa

SEQ ID NO: 347001 - RNA, 17 nt, Human herpesvirus 7
agaacuugcgaauacuu

SEQ ID NO: 347002 - RNA, 17 nt, Human herpesvirus 7
agaagcugacuuuguca

SEQ ID NO: 347003 - RNA, 16 nt, Human herpesvirus 7
agaaggccacgcugua

SEQ ID NO: 347004 - RNA, 22 nt, Human herpesvirus 7
agaauaaaucaaccaacauucu

SEQ ID NO: 347005 - RNA, 19 nt, Human herpesvirus 7
agaauaaguucaucauguu

SEQ ID NO: 347006 - RNA, 16 nt, Human herpesvirus 7
agaauaucgauuuuuc

SEQ ID NO: 347007 - RNA, 18 nt, Human herpesvirus 7
agaauauuuauguucaaa

SEQ ID NO: 347008 - RNA, 21 nt, Human herpesvirus 7
agaauauuuauguucaaauau

SEQ ID NO: 347009 - RNA, 19 nt, Human herpesvirus 7
agaauauuuccagcaucac

SEQ ID NO: 347010 - RNA, 22 nt, Human herpesvirus 7
agaaucugucugucggcaauac

SEQ ID NO: 347011 - RNA, 13 nt, Human herpesvirus 7
agaaugcaagccu

SEQ ID NO: 347012 - RNA, 16 nt, Human herpesvirus 7
agaaugcguaacuuug

SEQ ID NO: 347013 - RNA, 18 nt, Human herpesvirus 7
agaauggcgguuguacug

SEQ ID NO: 347014 - RNA, 18 nt, Human herpesvirus 7
agaauguacacagcugga

SEQ ID NO: 347015 - RNA, 14 nt, Human herpesvirus 7
agaauguucuauca

SEQ ID NO: 347016 - RNA, 21 nt, Human herpesvirus 7
agaauuucuuuguuugcuauu

SEQ ID NO: 347017 - RNA, 16 nt, Human herpesvirus 7
agaauuuucugcuuua

SEQ ID NO: 347018 - RNA, 17 nt, Human herpesvirus 7
agacaaacuauggugau

SEQ ID NO: 347019 - RNA, 20 nt, Human herpesvirus 7
agacaauuucacacaaugcc

SEQ ID NO: 347020 - RNA, 19 nt, Human herpesvirus 7
agacacaauggaacagcaa

SEQ ID NO: 347021 - RNA, 15 nt, Human herpesvirus 7
agacaccgucauuuc

SEQ ID NO: 347022 - RNA, 18 nt, Human herpesvirus 7
agacaccgucauuucgca

SEQ ID NO: 347023 - RNA, 22 nt, Human herpesvirus 7
agacaugaaucaaugauuuggu

SEQ ID NO: 347024 - RNA, 19 nt, Human herpesvirus 7
agacauuucguuauuccau

SEQ ID NO: 347025 - RNA, 20 nt, Human herpesvirus 7
agacauuucguuauuccauc

SEQ ID NO: 347026 - RNA, 15 nt, Human herpesvirus 7
agaccuaaacccaga

SEQ ID NO: 347027 - RNA, 20 nt, Human herpesvirus 7
agaccuaucaaauuuaucuc

SEQ ID NO: 347028 - RNA, 16 nt, Human herpesvirus 7
agaccuccuaugucau

SEQ ID NO: 347029 - RNA, 19 nt, Human herpesvirus 7
agaccuguacuguugcuaa

SEQ ID NO: 347030 - RNA, 17 nt, Human herpesvirus 7
agacgaugagcaugaaa

SEQ ID NO: 347031 - RNA, 22 nt, Human herpesvirus 7
agacgccggggacauuccucau

SEQ ID NO: 347032 - RNA, 20 nt, Human herpesvirus 7
agacgcuguaugcaagaaag

SEQ ID NO: 347033 - RNA, 23 nt, Human herpesvirus 7
agacggaauuuguaucuaugaca

SEQ ID NO: 347034 - RNA, 16 nt, Human herpesvirus 7
agacguagugucauca

SEQ ID NO: 347035 - RNA, 24 nt, Human herpesvirus 7
agacguagugucaucacuuaugau

SEQ ID NO: 347036 - RNA, 21 nt, Human herpesvirus 7
agacgucaacuugaaugagcu

SEQ ID NO: 347037 - RNA, 19 nt, Human herpesvirus 7
agacugaagacaaaaccaa

SEQ ID NO: 347038 - RNA, 22 nt, Human herpesvirus 7
agacugagaccgaauauacuuu

SEQ ID NO: 347039 - RNA, 19 nt, Human herpesvirus 7
agacugagacgagcaucua

SEQ ID NO: 347040 - RNA, 18 nt, Human herpesvirus 7
agacuuaagaccaaugau

SEQ ID NO: 347041 - RNA, 14 nt, Human herpesvirus 7
agagaaccacguga

SEQ ID NO: 347042 - RNA, 17 nt, Human herpesvirus 7
agagacuccaaucgagc

SEQ ID NO: 347043 - RNA, 15 nt, Human herpesvirus 7
agagauagcauuugu

SEQ ID NO: 347044 - RNA, 21 nt, Human herpesvirus 7
agagaucauaauuacauugca

SEQ ID NO: 347045 - RNA, 14 nt, Human herpesvirus 7
agagauuacauccu

SEQ ID NO: 347046 - RNA, 11 nt, Human herpesvirus 7
agagcauauac

SEQ ID NO: 347047 - RNA, 15 nt, Human herpesvirus 7
agagcgcuuugcuua

SEQ ID NO: 347048 - RNA, 16 nt, Human herpesvirus 7
agagcguuucuaugcu

SEQ ID NO: 347049 - RNA, 22 nt, Human herpesvirus 7
agaggaguauguugcauaucau

SEQ ID NO: 347050 - RNA, 13 nt, Human herpesvirus 7
agaguacaugugu

SEQ ID NO: 347051 - RNA, 22 nt, Human herpesvirus 7
agaguagaacuaggaaacacaa

SEQ ID NO: 347052 - RNA, 11 nt, Human herpesvirus 7
agaguauuuaa

SEQ ID NO: 347053 - RNA, 21 nt, Human herpesvirus 7
agagucuauugacauaaucau

SEQ ID NO: 347054 - RNA, 19 nt, Human herpesvirus 7
agagugcuuacgauuuugu

SEQ ID NO: 347055 - RNA, 22 nt, Human herpesvirus 7
agagugcuuacgauuuugugac

SEQ ID NO: 347056 - RNA, 19 nt, Human herpesvirus 7
agaguguuuucaaauaucu

SEQ ID NO: 347057 - RNA, 18 nt, Human herpesvirus 7
agauaaaguagguaaaaa

SEQ ID NO: 347058 - RNA, 16 nt, Human herpesvirus 7
agauaaugaaguuuau

SEQ ID NO: 347059 - RNA, 13 nt, Human herpesvirus 7
agauaauguuaca

SEQ ID NO: 347060 - RNA, 19 nt, Human herpesvirus 7
agauacguuaguugcagcu

SEQ ID NO: 347061 - RNA, 16 nt, Human herpesvirus 7
agauagcauuuguuac

SEQ ID NO: 347062 - RNA, 17 nt, Human herpesvirus 7
agauagcauuuguuaca

SEQ ID NO: 347063 - RNA, 19 nt, Human herpesvirus 7
agauauaagaugauagcca

SEQ ID NO: 347064 - RNA, 19 nt, Human herpesvirus 7
agauauuaguuucaaccac

SEQ ID NO: 347065 - RNA, 15 nt, Human herpesvirus 7
agauauucuaacaaa

SEQ ID NO: 347066 - RNA, 22 nt, Human herpesvirus 7
agaucaauugaguuuacugcca

SEQ ID NO: 347067 - RNA, 22 nt, Human herpesvirus 7
agaucauaauuacauugcaguc

SEQ ID NO: 347068 - RNA, 16 nt, Human herpesvirus 7
agaugaaggaagcuuu

SEQ ID NO: 347069 - RNA, 20 nt, Human herpesvirus 7
agaugacauuuuuaccucca

SEQ ID NO: 347070 - RNA, 21 nt, Human herpesvirus 7
agaugauguuuccuugccaga

SEQ ID NO: 347071 - RNA, 23 nt, Human herpesvirus 7
agaugcagaaaaauccaaaauca

SEQ ID NO: 347072 - RNA, 23 nt, Human herpesvirus 7
agaugcagacugcgcuuggcaaa

SEQ ID NO: 347073 - RNA, 14 nt, Human herpesvirus 7
agaugcauccaaag

SEQ ID NO: 347074 - RNA, 21 nt, Human herpesvirus 7
agaugcauccaaagaaaaaag

SEQ ID NO: 347075 - RNA, 15 nt, Human herpesvirus 7
agaugcgaaagccac

SEQ ID NO: 347076 - RNA, 20 nt, Human herpesvirus 7
agaugcuaugguggcauaua

SEQ ID NO: 347077 - RNA, 17 nt, Human herpesvirus 7
agauggcaccaauagaa

SEQ ID NO: 347078 - RNA, 23 nt, Human herpesvirus 7
agauuacauuugcuuuaccccaa

SEQ ID NO: 347079 - RNA, 13 nt, Human herpesvirus 7
agauuaccugcau

SEQ ID NO: 347080 - RNA, 18 nt, Human herpesvirus 7
agauuaccugcauacuuu

SEQ ID NO: 347081 - RNA, 17 nt, Human herpesvirus 7
agauucaguaucacuua

SEQ ID NO: 347082 - RNA, 13 nt, Human herpesvirus 7
agauucuccagaa

SEQ ID NO: 347083 - RNA, 19 nt, Human herpesvirus 7
agauucuuaauuuguucaa

SEQ ID NO: 347084 - RNA, 20 nt, Human herpesvirus 7
agauucuuaauuuguucaau

SEQ ID NO: 347085 - RNA, 13 nt, Human herpesvirus 7
agauugacuauga

SEQ ID NO: 347086 - RNA, 14 nt, Human herpesvirus 7
agauugaucacuuu

SEQ ID NO: 347087 - RNA, 19 nt, Human herpesvirus 7
agauugaucacuuugcauc

SEQ ID NO: 347088 - RNA, 14 nt, Human herpesvirus 7
agauuuaacaugug

SEQ ID NO: 347089 - RNA, 20 nt, Human herpesvirus 7
agauuucagaauuuccagaa

SEQ ID NO: 347090 - RNA, 17 nt, Human herpesvirus 7
agauuucugaaaaucuc

SEQ ID NO: 347091 - RNA, 16 nt, Human herpesvirus 7
agauuugccugccaga

SEQ ID NO: 347092 - RNA, 18 nt, Human herpesvirus 7
agauuuuaucgaugagaa

SEQ ID NO: 347093 - RNA, 16 nt, Human herpesvirus 7
agcaaaagccacagau

SEQ ID NO: 347094 - RNA, 15 nt, Human herpesvirus 7
agcaaacagugcugu

SEQ ID NO: 347095 - RNA, 14 nt, Human herpesvirus 7
agcaaagacuugca

SEQ ID NO: 347096 - RNA, 13 nt, Human herpesvirus 7
agcaacacuuaaa

SEQ ID NO: 347097 - RNA, 15 nt, Human herpesvirus 7
agcaacugugcauga

SEQ ID NO: 347098 - RNA, 21 nt, Human herpesvirus 7
aguaaucacauuaucuugaca

SEQ ID NO: 347099 - RNA, 17 nt, Human herpesvirus 7
aguaauucgauuagcug

SEQ ID NO: 347100 - RNA, 12 nt, Human herpesvirus 7
aguacaaauguu

SEQ ID NO: 347101 - RNA, 20 nt, Human herpesvirus 7
aguacaucuuucuaguuccc

SEQ ID NO: 347102 - RNA, 22 nt, Human herpesvirus 7
aguaccgaaaguguaggcaaga

SEQ ID NO: 347103 - RNA, 13 nt, Human herpesvirus 7
aguacgucuugcu

SEQ ID NO: 347104 - RNA, 23 nt, Human herpesvirus 7
aguacuccuucuaccucuuacau

SEQ ID NO: 347105 - RNA, 17 nt, Human herpesvirus 7
aguagaaaaugcuguuu

SEQ ID NO: 347106 - RNA, 17 nt, Human herpesvirus 7
aguaugucagauucucc

SEQ ID NO: 347107 - RNA, 16 nt, Human herpesvirus 7
aguauguccaaucaaa

SEQ ID NO: 347108 - RNA, 18 nt, Human herpesvirus 7
aguauuucgucuuuccuc

SEQ ID NO: 347109 - RNA, 19 nt, Human herpesvirus 7
aguauuuuacaacaauaaa

SEQ ID NO: 347110 - RNA, 17 nt, Human herpesvirus 7
agucagaacauugucaa

SEQ ID NO: 347111 - RNA, 20 nt, Human herpesvirus 7
agucauuuacagcguggccu

SEQ ID NO: 347112 - RNA, 17 nt, Human herpesvirus 7
agucauuugcaguuauu

SEQ ID NO: 347113 - RNA, 16 nt, Human herpesvirus 7
aguccaauaguaaugu

SEQ ID NO: 347114 - RNA, 23 nt, Human herpesvirus 7
aguccuuucauagacgaggccaa

SEQ ID NO: 347115 - RNA, 17 nt, Human herpesvirus 7
agucguucuauguauga

SEQ ID NO: 347116 - RNA, 22 nt, Human herpesvirus 7
agucuaaaaguaaagggaaaaa

SEQ ID NO: 347117 - RNA, 15 nt, Human herpesvirus 7
agucuacuaugggcu

SEQ ID NO: 347118 - RNA, 15 nt, Human herpesvirus 7
agucuaguaaaccuu

SEQ ID NO: 347119 - RNA, 19 nt, Human herpesvirus 7
agucugaacggauccgcug

SEQ ID NO: 347120 - RNA, 21 nt, Human herpesvirus 7
agucuuauuacucgaugcuuc

SEQ ID NO: 347121 - RNA, 14 nt, Human herpesvirus 7
agugaaaacuugau

SEQ ID NO: 347122 - RNA, 20 nt, Human herpesvirus 7
agugaaacacauucugucuu

SEQ ID NO: 347123 - RNA, 20 nt, Human herpesvirus 7
agugaacaugugcugaaugu

SEQ ID NO: 347124 - RNA, 12 nt, Human herpesvirus 7
agugauacugaa

SEQ ID NO: 347125 - RNA, 19 nt, Human herpesvirus 7
agugauuuuucauuuaucu

SEQ ID NO: 347126 - RNA, 21 nt, Human herpesvirus 7
agugcucugucuccaaaucaa

SEQ ID NO: 347127 - RNA, 13 nt, Human herpesvirus 7
agugcuuacgauu

SEQ ID NO: 347128 - RNA, 12 nt, Human herpesvirus 7
aguggaaucuca

SEQ ID NO: 347129 - RNA, 16 nt, Human herpesvirus 7
agugggaaugcaucug

SEQ ID NO: 347130 - RNA, 20 nt, Human herpesvirus 7
agugugcacacaaaggccag

SEQ ID NO: 347131 - RNA, 23 nt, Human herpesvirus 7
aguguucaaaaaagauuccugau

SEQ ID NO: 347132 - RNA, 15 nt, Human herpesvirus 7
aguguucauuaucac

SEQ ID NO: 347133 - RNA, 22 nt, Human herpesvirus 7
aguguuuuuuucugguaaaaag

SEQ ID NO: 347134 - RNA, 17 nt, Human herpesvirus 7
aguuaauguguguggua

SEQ ID NO: 347135 - RNA, 12 nt, Human herpesvirus 7
aguuaauugugu

SEQ ID NO: 347136 - RNA, 17 nt, Human herpesvirus 7
aguuauuuguuccaguu

SEQ ID NO: 347137 - RNA, 15 nt, Human herpesvirus 7
aguucauaaugacac

SEQ ID NO: 347138 - RNA, 15 nt, Human herpesvirus 7
aguucgcaaugguau

SEQ ID NO: 347139 - RNA, 17 nt, Human herpesvirus 7
aguucuccgcacuaaaa

SEQ ID NO: 347140 - RNA, 16 nt, Human herpesvirus 7
aguugaggcuuuuaga

SEQ ID NO: 347141 - RNA, 19 nt, Human herpesvirus 7
aguugcaacucuucuucag

SEQ ID NO: 347142 - RNA, 16 nt, Human herpesvirus 7
aguugcacuccuagaa

SEQ ID NO: 347143 - RNA, 15 nt, Human herpesvirus 7
aguugcagcugugau

SEQ ID NO: 347144 - RNA, 18 nt, Human herpesvirus 7
aguugcugcugucuucau

SEQ ID NO: 347145 - RNA, 15 nt, Human herpesvirus 7
aguugcuugugaagg

SEQ ID NO: 347146 - RNA, 17 nt, Human herpesvirus 7
aguugcuuuucaugcuu

SEQ ID NO: 347147 - RNA, 18 nt, Human herpesvirus 7
aguugcuuuucaugcuuu

SEQ ID NO: 347148 - RNA, 14 nt, Human herpesvirus 7
aguugggcaaacag

SEQ ID NO: 347149 - RNA, 19 nt, Human herpesvirus 7
aguugugauugcgaccaaa

SEQ ID NO: 347150 - RNA, 17 nt, Human herpesvirus 7
aguuguugggcucaaaa

SEQ ID NO: 347151 - RNA, 20 nt, Human herpesvirus 7
aguuuagagacuggcagagu

SEQ ID NO: 347152 - RNA, 11 nt, Human herpesvirus 7
aguuuccauug

SEQ ID NO: 347153 - RNA, 13 nt, Human herpesvirus 7
aguuucuacaugu

SEQ ID NO: 347154 - RNA, 19 nt, Human herpesvirus 7
aguuucuacauguuuaaca

SEQ ID NO: 347155 - RNA, 13 nt, Human herpesvirus 7
aguuucugcauac

SEQ ID NO: 347156 - RNA, 17 nt, Human herpesvirus 7
aguuucugcauacucuu

SEQ ID NO: 347157 - RNA, 15 nt, Human herpesvirus 7
aguuucuucuuccac

SEQ ID NO: 347158 - RNA, 22 nt, Human herpesvirus 7
aguuucuuuuucauuaacuuuu

SEQ ID NO: 347159 - RNA, 18 nt, Human herpesvirus 7
aguuugaguuucuucuuc

SEQ ID NO: 347160 - RNA, 13 nt, Human herpesvirus 7
aguuuuaacaauc

SEQ ID NO: 347161 - RNA, 15 nt, Human herpesvirus 7
aguuuuaacaaucua

SEQ ID NO: 347162 - RNA, 21 nt, Human herpesvirus 7
aguuuuacagaaauugaugaa

SEQ ID NO: 347163 - RNA, 18 nt, Human herpesvirus 7
aguuuuauucccaugccu

SEQ ID NO: 347164 - RNA, 19 nt, Human herpesvirus 7
aguuuuauucccaugccua

SEQ ID NO: 347165 - RNA, 11 nt, Human herpesvirus 7
aguuuucccag

SEQ ID NO: 347166 - RNA, 20 nt, Human herpesvirus 7
aguuuuggguuuaugaugca

SEQ ID NO: 347167 - RNA, 14 nt, Human herpesvirus 7
auaaaaaaucuaau

SEQ ID NO: 347168 - RNA, 15 nt, Human herpesvirus 7
auaaaaacaagcuua

SEQ ID NO: 347169 - RNA, 17 nt, Human herpesvirus 7
auaaaaagcccaugaac

SEQ ID NO: 347170 - RNA, 22 nt, Human herpesvirus 7
auaaaaagcccaugaacacugc

SEQ ID NO: 347171 - RNA, 14 nt, Human herpesvirus 7
auaaaaauuuccuu

SEQ ID NO: 347172 - RNA, 17 nt, Human herpesvirus 7
auaaaacaaacuauguc

SEQ ID NO: 347173 - RNA, 17 nt, Human herpesvirus 7
auaaaagcauaugugag

SEQ ID NO: 347174 - RNA, 19 nt, Human herpesvirus 7
auaaaaguaaaaacacguc

SEQ ID NO: 347175 - RNA, 21 nt, Human herpesvirus 7
auaaaaugguugugcaauuug

SEQ ID NO: 347176 - RNA, 14 nt, Human herpesvirus 7
auaaacaagauucu

SEQ ID NO: 347177 - RNA, 16 nt, Human herpesvirus 7
auaaacaauguguuaa

SEQ ID NO: 347178 - RNA, 20 nt, Human herpesvirus 7
auaaaccugcuaacaaguau

SEQ ID NO: 347179 - RNA, 21 nt, Human herpesvirus 7
auaaaccugcuaacaaguaug

SEQ ID NO: 347180 - RNA, 19 nt, Human herpesvirus 7
auaaagagucuauugacau

SEQ ID NO: 347181 - RNA, 14 nt, Human herpesvirus 7
auaaaggaucucuc

SEQ ID NO: 347182 - RNA, 13 nt, Human herpesvirus 7
auaaaguuuccau

SEQ ID NO: 347183 - RNA, 14 nt, Human herpesvirus 7
auaaauaguuucau

SEQ ID NO: 347184 - RNA, 20 nt, Human herpesvirus 7
auaaauauugauaaccuaca

SEQ ID NO: 347185 - RNA, 23 nt, Human herpesvirus 7
auaaaugcuuaaauuuccaucua

SEQ ID NO: 347186 - RNA, 16 nt, Human herpesvirus 7
auaaauucaaggaauu

SEQ ID NO: 347187 - RNA, 22 nt, Human herpesvirus 7
auaaauucugaaauaaacauuu

SEQ ID NO: 347188 - RNA, 15 nt, Human herpesvirus 7
auaaauuuugaaugu

SEQ ID NO: 347189 - RNA, 21 nt, Human herpesvirus 7
auaacaaagugcgaaacgugu

SEQ ID NO: 347190 - RNA, 15 nt, Human herpesvirus 7
auaacaggaaaccac

SEQ ID NO: 347191 - RNA, 16 nt, Human herpesvirus 7
auaacaggaaaccaca

SEQ ID NO: 347192 - RNA, 22 nt, Human herpesvirus 7
auaacauugcuucagaaauaac

SEQ ID NO: 347193 - RNA, 17 nt, Human herpesvirus 7
auaaccaaugcugauuc

SEQ ID NO: 347194 - RNA, 23 nt, Human herpesvirus 7
auaaccgguaaagaaccuaucaa

SEQ ID NO: 347195 - RNA, 21 nt, Human herpesvirus 7
auaacuucguaguguagagua

SEQ ID NO: 347196 - RNA, 17 nt, Human herpesvirus 7
auaacuuuaucauuacu

SEQ ID NO: 347197 - RNA, 18 nt, Human herpesvirus 7
auaacuuuaucauuacuc

SEQ ID NO: 347198 - RNA, 16 nt, Human herpesvirus 7
auaagaaaccagcuuu

SEQ ID NO: 347199 - RNA, 23 nt, Human herpesvirus 7
auaagaaaguuguacucagagau

SEQ ID NO: 347200 - RNA, 19 nt, Human herpesvirus 7
auaagcaauacauucucaa

SEQ ID NO: 347201 - RNA, 23 nt, Human herpesvirus 7
auaaguccgugugcaaaacuggg

SEQ ID NO: 347202 - RNA, 19 nt, Human herpesvirus 7
auaauacucagauguggag

SEQ ID NO: 347203 - RNA, 19 nt, Human herpesvirus 7
auaauacuggcaugucuca

SEQ ID NO: 347204 - RNA, 14 nt, Human herpesvirus 7
auaauauagaugca

SEQ ID NO: 347205 - RNA, 16 nt, Human herpesvirus 7
auaauauagaugcaga

SEQ ID NO: 347206 - RNA, 14 nt, Human herpesvirus 7
auaaucaagucuua

SEQ ID NO: 347207 - RNA, 17 nt, Human herpesvirus 7
auaaucaagucuuauua

SEQ ID NO: 347208 - RNA, 15 nt, Human herpesvirus 7
auaaucauaguacau

SEQ ID NO: 347209 - RNA, 20 nt, Human herpesvirus 7
auaaucucaauuaaaacauc

SEQ ID NO: 347210 - RNA, 22 nt, Human herpesvirus 7
auaaucucaauuaaaacaucuc

SEQ ID NO: 347211 - RNA, 14 nt, Human herpesvirus 7
auaaugaaguuuau

SEQ ID NO: 347212 - RNA, 16 nt, Human herpesvirus 7
auaaugacacgacacu

SEQ ID NO: 347213 - RNA, 15 nt, Human herpesvirus 7
auaauguuacauuau

SEQ ID NO: 347214 - RNA, 18 nt, Human herpesvirus 7
auaauguuguuuggucua

SEQ ID NO: 347215 - RNA, 18 nt, Human herpesvirus 7
agcaagcaugcguaaaaa

SEQ ID NO: 347216 - RNA, 12 nt, Human herpesvirus 7
agcaaugcauga

SEQ ID NO: 347217 - RNA, 16 nt, Human herpesvirus 7
agcaaugcaugaugca

SEQ ID NO: 347218 - RNA, 20 nt, Human herpesvirus 7
agcaauguuuucagcgccaa

SEQ ID NO: 347219 - RNA, 16 nt, Human herpesvirus 7
agcacaaaugucuuau

SEQ ID NO: 347220 - RNA, 15 nt, Human herpesvirus 7
agcacaaucacguga

SEQ ID NO: 347221 - RNA, 17 nt, Human herpesvirus 7
agcaccgugagaaauuu

SEQ ID NO: 347222 - RNA, 18 nt, Human herpesvirus 7
agcacuagauuuuuugaa

SEQ ID NO: 347223 - RNA, 21 nt, Human herpesvirus 7
agcacugggagcaaugcauga

SEQ ID NO: 347224 - RNA, 20 nt, Human herpesvirus 7
agcagaacuguaucuucaag

SEQ ID NO: 347225 - RNA, 15 nt, Human herpesvirus 7
agcagcuugaugaau

SEQ ID NO: 347226 - RNA, 16 nt, Human herpesvirus 7
agcagcuuuuauuccu

SEQ ID NO: 347227 - RNA, 17 nt, Human herpesvirus 7
agcagggaaaaagcaua

SEQ ID NO: 347228 - RNA, 16 nt, Human herpesvirus 7
agcauauaucuuugau

SEQ ID NO: 347229 - RNA, 20 nt, Human herpesvirus 7
agcaucccuauugcaucaac

SEQ ID NO: 347230 - RNA, 23 nt, Human herpesvirus 7
agcaucgauguuuuaucuaacac

SEQ ID NO: 347231 - RNA, 9 nt, Human herpesvirus 7
agcauuaau

SEQ ID NO: 347232 - RNA, 20 nt, Human herpesvirus 7
agcauuauuggauaauauca

SEQ ID NO: 347233 - RNA, 16 nt, Human herpesvirus 7
agcauuuaccauuucg

SEQ ID NO: 347234 - RNA, 22 nt, Human herpesvirus 7
agccaaaugugguaaauuugcu

SEQ ID NO: 347235 - RNA, 23 nt, Human herpesvirus 7
agccaagacgccggggacauucc

SEQ ID NO: 347236 - RNA, 22 nt, Human herpesvirus 7
agccacagauauucuaacaaau

SEQ ID NO: 347237 - RNA, 23 nt, Human herpesvirus 7
agccacagauauucuaacaaaua

SEQ ID NO: 347238 - RNA, 18 nt, Human herpesvirus 7
agccacgaugacuuccaa

SEQ ID NO: 347239 - RNA, 15 nt, Human herpesvirus 7
agccagguauucaaa

SEQ ID NO: 347240 - RNA, 15 nt, Human herpesvirus 7
agcccaauguugccu

SEQ ID NO: 347241 - RNA, 13 nt, Human herpesvirus 7
agcccaugaacac

SEQ ID NO: 347242 - RNA, 17 nt, Human herpesvirus 7
agcccugaauuuuacac

SEQ ID NO: 347243 - RNA, 21 nt, Human herpesvirus 7
agccuacuuuuaaaauagccg

SEQ ID NO: 347244 - RNA, 16 nt, Human herpesvirus 7
agccuaggauaccaaa

SEQ ID NO: 347245 - RNA, 19 nt, Human herpesvirus 7
agccuaggauaccaaacaa

SEQ ID NO: 347246 - RNA, 21 nt, Human herpesvirus 7
agccuauucacauaccuguau

SEQ ID NO: 347247 - RNA, 20 nt, Human herpesvirus 7
agccucuaagagcuuuugca

SEQ ID NO: 347248 - RNA, 18 nt, Human herpesvirus 7
agccuggaacuucaccac

SEQ ID NO: 347249 - RNA, 15 nt, Human herpesvirus 7
agcgaauuugugcug

SEQ ID NO: 347250 - RNA, 12 nt, Human herpesvirus 7
agcgagauuuau

SEQ ID NO: 347251 - RNA, 15 nt, Human herpesvirus 7
agcgauuuaaugucu

SEQ ID NO: 347252 - RNA, 15 nt, Human herpesvirus 7
agcguucguaacaaa

SEQ ID NO: 347253 - RNA, 16 nt, Human herpesvirus 7
agcuaaaacauggagc

SEQ ID NO: 347254 - RNA, 16 nt, Human herpesvirus 7
agcuaaccuuuuaaca

SEQ ID NO: 347255 - RNA, 20 nt, Human herpesvirus 7
agcuaaccuuuuaacaacag

SEQ ID NO: 347256 - RNA, 22 nt, Human herpesvirus 7
agcuaaccuuuuaacaacagcc

SEQ ID NO: 347257 - RNA, 20 nt, Human herpesvirus 7
agcuaucucuacaaacagaa

SEQ ID NO: 347258 - RNA, 22 nt, Human herpesvirus 7
agcuaucucuacaaacagaagc

SEQ ID NO: 347259 - RNA, 12 nt, Human herpesvirus 7
agcuaucugauu

SEQ ID NO: 347260 - RNA, 15 nt, Human herpesvirus 7
agcuauuauaaugua

SEQ ID NO: 347261 - RNA, 14 nt, Human herpesvirus 7
agcuccaugucucu

SEQ ID NO: 347262 - RNA, 15 nt, Human herpesvirus 7
agcugaaaaccauga

SEQ ID NO: 347263 - RNA, 12 nt, Human herpesvirus 7
agcugaauugua

SEQ ID NO: 347264 - RNA, 17 nt, Human herpesvirus 7
agcugauuauucaugca

SEQ ID NO: 347265 - RNA, 18 nt, Human herpesvirus 7
agcugcauguguacuaaa

SEQ ID NO: 347266 - RNA, 19 nt, Human herpesvirus 7
agcugggauagaaauguaa

SEQ ID NO: 347267 - RNA, 17 nt, Human herpesvirus 7
agcuguuuccaucuuau

SEQ ID NO: 347268 - RNA, 20 nt, Human herpesvirus 7
agcuuaaaaaauacauugaa

SEQ ID NO: 347269 - RNA, 20 nt, Human herpesvirus 7
agcuuaagacaccccaaaau

SEQ ID NO: 347270 - RNA, 21 nt, Human herpesvirus 7
agcuucagaugcuaugguggc

SEQ ID NO: 347271 - RNA, 21 nt, Human herpesvirus 7
agcuucauuuuaaaaaagaca

SEQ ID NO: 347272 - RNA, 16 nt, Human herpesvirus 7
agcuucgaaagauuua

SEQ ID NO: 347273 - RNA, 20 nt, Human herpesvirus 7
agcuugcuuaaaacuuugaa

SEQ ID NO: 347274 - RNA, 15 nt, Human herpesvirus 7
agcuuggccauaaac

SEQ ID NO: 347275 - RNA, 20 nt, Human herpesvirus 7
agcuuggccauaaacggaau

SEQ ID NO: 347276 - RNA, 15 nt, Human herpesvirus 7
agcuugguuuuacaa

SEQ ID NO: 347277 - RNA, 14 nt, Human herpesvirus 7
agcuuuacagcagc

SEQ ID NO: 347278 - RNA, 15 nt, Human herpesvirus 7
agcuuuauaugucaa

SEQ ID NO: 347279 - RNA, 17 nt, Human herpesvirus 7
agcuuucaugauuucaa

SEQ ID NO: 347280 - RNA, 20 nt, Human herpesvirus 7
agcuuuggcagcuagccuau

SEQ ID NO: 347281 - RNA, 18 nt, Human herpesvirus 7
agcuuuucgaacuuguca

SEQ ID NO: 347282 - RNA, 19 nt, Human herpesvirus 7
agcuuuugaauaaucucaa

SEQ ID NO: 347283 - RNA, 16 nt, Human herpesvirus 7
aggaaaaucacagcau

SEQ ID NO: 347284 - RNA, 13 nt, Human herpesvirus 7
aggaaaauuucau

SEQ ID NO: 347285 - RNA, 14 nt, Human herpesvirus 7
aggaaaccacagaa

SEQ ID NO: 347286 - RNA, 17 nt, Human herpesvirus 7
aggaaaugucuuuguca

SEQ ID NO: 347287 - RNA, 15 nt, Human herpesvirus 7
aggaacagauucucc

SEQ ID NO: 347288 - RNA, 22 nt, Human herpesvirus 7
aggaaucuuuuuugaacacuuu

SEQ ID NO: 347289 - RNA, 17 nt, Human herpesvirus 7
aggacagucaacaaauc

SEQ ID NO: 347290 - RNA, 14 nt, Human herpesvirus 7
aggacugcaguauu

SEQ ID NO: 347291 - RNA, 21 nt, Human herpesvirus 7
aggauaccaaacaaaauucca

SEQ ID NO: 347292 - RNA, 19 nt, Human herpesvirus 7
aggaugcguguguucaaaa

SEQ ID NO: 347293 - RNA, 21 nt, Human herpesvirus 7
aggaugcguguguucaaaaac

SEQ ID NO: 347294 - RNA, 23 nt, Human herpesvirus 7
aggauggcguguccauucaacac

SEQ ID NO: 347295 - RNA, 16 nt, Human herpesvirus 7
aggauugaaaguaaaa

SEQ ID NO: 347296 - RNA, 17 nt, Human herpesvirus 7
aggauuuugacaagcgc

SEQ ID NO: 347297 - RNA, 15 nt, Human herpesvirus 7
aggcaaaucucauaa

SEQ ID NO: 347298 - RNA, 14 nt, Human herpesvirus 7
aggcagacaugccc

SEQ ID NO: 347299 - RNA, 18 nt, Human herpesvirus 7
aggcagaccuaaacccag

SEQ ID NO: 347300 - RNA, 19 nt, Human herpesvirus 7
aggcagaccuaaacccaga

SEQ ID NO: 347301 - RNA, 18 nt, Human herpesvirus 7
aggccaaucugcacauuu

SEQ ID NO: 347302 - RNA, 18 nt, Human herpesvirus 7
aggccaguucuaucucaa

SEQ ID NO: 347303 - RNA, 14 nt, Human herpesvirus 7
aggcgucaccgcua

SEQ ID NO: 347304 - RNA, 22 nt, Human herpesvirus 7
aggcucauuucaauuucugucu

SEQ ID NO: 347305 - RNA, 15 nt, Human herpesvirus 7
aggcugcaucuuuuc

SEQ ID NO: 347306 - RNA, 15 nt, Human herpesvirus 7
agggaagaaacagcu

SEQ ID NO: 347307 - RNA, 14 nt, Human herpesvirus 7
agggguuugaacuu

SEQ ID NO: 347308 - RNA, 22 nt, Human herpesvirus 7
agggugccuuugguuuuuccag

SEQ ID NO: 347309 - RNA, 15 nt, Human herpesvirus 7
agguaauagcuuuaa

SEQ ID NO: 347310 - RNA, 18 nt, Human herpesvirus 7
agguaucuuuacuuucau

SEQ ID NO: 347311 - RNA, 19 nt, Human herpesvirus 7
agguaucuuuacuuucaua

SEQ ID NO: 347312 - RNA, 14 nt, Human herpesvirus 7
aggucacaaaagcu

SEQ ID NO: 347313 - RNA, 18 nt, Human herpesvirus 7
aggucaucugaacagguu

SEQ ID NO: 347314 - RNA, 16 nt, Human herpesvirus 7
aggucuuccacuguug

SEQ ID NO: 347315 - RNA, 18 nt, Human herpesvirus 7
aggucuuccacuguugua

SEQ ID NO: 347316 - RNA, 15 nt, Human herpesvirus 7
aggugguuacauauc

SEQ ID NO: 347317 - RNA, 16 nt, Human herpesvirus 7
aggugguuacauaucc

SEQ ID NO: 347318 - RNA, 19 nt, Human herpesvirus 7
agguguuccuuagcuaugu

SEQ ID NO: 347319 - RNA, 16 nt, Human herpesvirus 7
agguguuguuuccgau

SEQ ID NO: 347320 - RNA, 23 nt, Human herpesvirus 7
agguugcuaucuccuauguugca

SEQ ID NO: 347321 - RNA, 21 nt, Human herpesvirus 7
agguugcuucuucgagucagu

SEQ ID NO: 347322 - RNA, 16 nt, Human herpesvirus 7
agguuguugcaauuuu

SEQ ID NO: 347323 - RNA, 16 nt, Human herpesvirus 7
agguuuaaaacauuua

SEQ ID NO: 347324 - RNA, 23 nt, Human herpesvirus 7
agguuuaggaaauugcuuucuaa

SEQ ID NO: 347325 - RNA, 23 nt, Human herpesvirus 7
agguuuuucaaagacgcagucua

SEQ ID NO: 347326 - RNA, 14 nt, Human herpesvirus 7
aguaaacaaaacag

SEQ ID NO: 347327 - RNA, 14 nt, Human herpesvirus 7
aguaaauuucucac

SEQ ID NO: 347328 - RNA, 17 nt, Human herpesvirus 7
aguaaauuucucacacc

SEQ ID NO: 347329 - RNA, 18 nt, Human herpesvirus 7
aguaacgcagacuaauca

SEQ ID NO: 347330 - RNA, 21 nt, Human herpesvirus 7
aguaacuacaggcuuacacua

SEQ ID NO: 347331 - RNA, 13 nt, Human herpesvirus 7
aguaaucaauaaa

SEQ ID NO: 347332 - RNA, 13 nt, Human herpesvirus 7
acgcugacaguca

SEQ ID NO: 347333 - RNA, 16 nt, Human herpesvirus 7
acggguggcacugcgc

SEQ ID NO: 347334 - RNA, 16 nt, Human herpesvirus 7
acguaaguuguuauag

SEQ ID NO: 347335 - RNA, 15 nt, Human herpesvirus 7
acguagaaaaaaaca

SEQ ID NO: 347336 - RNA, 16 nt, Human herpesvirus 7
acgucaugcuguaugu

SEQ ID NO: 347337 - RNA, 22 nt, Human herpesvirus 7
acguccauugauuaaaaacccu

SEQ ID NO: 347338 - RNA, 15 nt, Human herpesvirus 7
acgucuagacauuug

SEQ ID NO: 347339 - RNA, 14 nt, Human herpesvirus 7
acgucuugcuguuu

SEQ ID NO: 347340 - RNA, 19 nt, Human herpesvirus 7
acgugagcacggcacacaa

SEQ ID NO: 347341 - RNA, 23 nt, Human herpesvirus 7
acguuggggauguucuauucuca

SEQ ID NO: 347342 - RNA, 14 nt, Human herpesvirus 7
acguuuacaguuuu

SEQ ID NO: 347343 - RNA, 18 nt, Human herpesvirus 7
acguuucuagcaaaauau

SEQ ID NO: 347344 - RNA, 15 nt, Human herpesvirus 7
acguuucucuguaga

SEQ ID NO: 347345 - RNA, 16 nt, Human herpesvirus 7
acuaaaacuacauuua

SEQ ID NO: 347346 - RNA, 22 nt, Human herpesvirus 7
acuaaauuucuuaaagaugucu

SEQ ID NO: 347347 - RNA, 12 nt, Human herpesvirus 7
acuaaguugaaa

SEQ ID NO: 347348 - RNA, 13 nt, Human herpesvirus 7
acuacaccaauag

SEQ ID NO: 347349 - RNA, 13 nt, Human herpesvirus 7
acuacgguuuuca

SEQ ID NO: 347350 - RNA, 14 nt, Human herpesvirus 7
acuacgguuuucag

SEQ ID NO: 347351 - RNA, 14 nt, Human herpesvirus 7
acuagcagaucucg

SEQ ID NO: 347352 - RNA, 16 nt, Human herpesvirus 7
acuaggaaacacaauu

SEQ ID NO: 347353 - RNA, 19 nt, Human herpesvirus 7
acuaguauuucgucuuucc

SEQ ID NO: 347354 - RNA, 14 nt, Human herpesvirus 7
acuauaaauggaau

SEQ ID NO: 347355 - RNA, 18 nt, Human herpesvirus 7
acuauaaauggaauuuaa

SEQ ID NO: 347356 - RNA, 17 nt, Human herpesvirus 7
acuauaugaaaacagcu

SEQ ID NO: 347357 - RNA, 14 nt, Human herpesvirus 7
acuauauugaauua

SEQ ID NO: 347358 - RNA, 17 nt, Human herpesvirus 7
acuaugaacuggcacau

SEQ ID NO: 347359 - RNA, 18 nt, Human herpesvirus 7
acuaugaacuggcacauu

SEQ ID NO: 347360 - RNA, 12 nt, Human herpesvirus 7
acuaugugcuua

SEQ ID NO: 347361 - RNA, 16 nt, Human herpesvirus 7
acuauuugacugggua

SEQ ID NO: 347362 - RNA, 15 nt, Human herpesvirus 7
acuauuuuauugcga

SEQ ID NO: 347363 - RNA, 22 nt, Human herpesvirus 7
acucacaauguuuucucuauga

SEQ ID NO: 347364 - RNA, 14 nt, Human herpesvirus 7
acucagaagacaua

SEQ ID NO: 347365 - RNA, 20 nt, Human herpesvirus 7
acucagagaucauaauuaca

SEQ ID NO: 347366 - RNA, 19 nt, Human herpesvirus 7
acucauauuuuucauggua

SEQ ID NO: 347367 - RNA, 21 nt, Human herpesvirus 7
acucauauuuuucaugguauu

SEQ ID NO: 347368 - RNA, 15 nt, Human herpesvirus 7
acucaucauugaaga

SEQ ID NO: 347369 - RNA, 19 nt, Human herpesvirus 7
acucaucauugaagaaaag

SEQ ID NO: 347370 - RNA, 22 nt, Human herpesvirus 7
acuccuguauuaaguguuugcu

SEQ ID NO: 347371 - RNA, 15 nt, Human herpesvirus 7
acucggucuuuuuau

SEQ ID NO: 347372 - RNA, 13 nt, Human herpesvirus 7
acucugucaucaa

SEQ ID NO: 347373 - RNA, 18 nt, Human herpesvirus 7
acucuucuucagauucag

SEQ ID NO: 347374 - RNA, 22 nt, Human herpesvirus 7
acucuucuuuauaagcaguuau

SEQ ID NO: 347375 - RNA, 23 nt, Human herpesvirus 7
acucuucuuugugagaaauggaa

SEQ ID NO: 347376 - RNA, 22 nt, Human herpesvirus 7
acucuugcacaggauuugggaa

SEQ ID NO: 347377 - RNA, 15 nt, Human herpesvirus 7
acucuuguugacuau

SEQ ID NO: 347378 - RNA, 21 nt, Human herpesvirus 7
acucuuuauuuaagcuucaaa

SEQ ID NO: 347379 - RNA, 19 nt, Human herpesvirus 7
acucuuucugacauuggaa

SEQ ID NO: 347380 - RNA, 12 nt, Human herpesvirus 7
acugaagagcca

SEQ ID NO: 347381 - RNA, 16 nt, Human herpesvirus 7
acugacauucuuccag

SEQ ID NO: 347382 - RNA, 17 nt, Human herpesvirus 7
acugauauuaaaucaua

SEQ ID NO: 347383 - RNA, 13 nt, Human herpesvirus 7
acugcaaauccaa

SEQ ID NO: 347384 - RNA, 19 nt, Human herpesvirus 7
acugcaaccugauaaauac

SEQ ID NO: 347385 - RNA, 21 nt, Human herpesvirus 7
acugcaacuuugugccugaaa

SEQ ID NO: 347386 - RNA, 15 nt, Human herpesvirus 7
acugccaccauuucu

SEQ ID NO: 347387 - RNA, 19 nt, Human herpesvirus 7
acugcgcuuggcaaacagu

SEQ ID NO: 347388 - RNA, 15 nt, Human herpesvirus 7
acuggacacaaucag

SEQ ID NO: 347389 - RNA, 16 nt, Human herpesvirus 7
acuggcaauaucccag

SEQ ID NO: 347390 - RNA, 18 nt, Human herpesvirus 7
acugggaaaaaaaaauca

SEQ ID NO: 347391 - RNA, 20 nt, Human herpesvirus 7
acugggagcugauucugcca

SEQ ID NO: 347392 - RNA, 13 nt, Human herpesvirus 7
acugguacaaggu

SEQ ID NO: 347393 - RNA, 18 nt, Human herpesvirus 7
acuguauuuguugaucuu

SEQ ID NO: 347394 - RNA, 22 nt, Human herpesvirus 7
acuguauuuguugaucuucaau

SEQ ID NO: 347395 - RNA, 17 nt, Human herpesvirus 7
acugucacuguccaaaa

SEQ ID NO: 347396 - RNA, 18 nt, Human herpesvirus 7
acugucaggcucauuuca

SEQ ID NO: 347397 - RNA, 14 nt, Human herpesvirus 7
acugugucaucaca

SEQ ID NO: 347398 - RNA, 16 nt, Human herpesvirus 7
acuguuaagaauucca

SEQ ID NO: 347399 - RNA, 18 nt, Human herpesvirus 7
acuguuaagaauuccaga

SEQ ID NO: 347400 - RNA, 18 nt, Human herpesvirus 7
acuguuuguaaggccaaa

SEQ ID NO: 347401 - RNA, 17 nt, Human herpesvirus 7
acuuaaauauuuuacau

SEQ ID NO: 347402 - RNA, 13 nt, Human herpesvirus 7
acuuacauuucaa

SEQ ID NO: 347403 - RNA, 20 nt, Human herpesvirus 7
acuuaccgucgggugaauuu

SEQ ID NO: 347404 - RNA, 20 nt, Human herpesvirus 7
acuuaucuuuaucuuuguca

SEQ ID NO: 347405 - RNA, 22 nt, Human herpesvirus 7
acuuauuauguuagaugugcuu

SEQ ID NO: 347406 - RNA, 22 nt, Human herpesvirus 7
acuucgagaaaauuuagcacca

SEQ ID NO: 347407 - RNA, 14 nt, Human herpesvirus 7
acuucuacuaauac

SEQ ID NO: 347408 - RNA, 15 nt, Human herpesvirus 7
acuucuacuaauaca

SEQ ID NO: 347409 - RNA, 20 nt, Human herpesvirus 7
acuucugucaccacacucau

SEQ ID NO: 347410 - RNA, 16 nt, Human herpesvirus 7
acuugcgaauacuugu

SEQ ID NO: 347411 - RNA, 17 nt, Human herpesvirus 7
acuugcuaugcuugaaa

SEQ ID NO: 347412 - RNA, 19 nt, Human herpesvirus 7
acuuggaaacaaauugugg

SEQ ID NO: 347413 - RNA, 22 nt, Human herpesvirus 7
acuuggaguuguguucuuuaac

SEQ ID NO: 347414 - RNA, 22 nt, Human herpesvirus 7
acuugggaguguuuucuagugu

SEQ ID NO: 347415 - RNA, 16 nt, Human herpesvirus 7
acuuggugaagaucau

SEQ ID NO: 347416 - RNA, 15 nt, Human herpesvirus 7
acuuguaccaaucaa

SEQ ID NO: 347417 - RNA, 14 nt, Human herpesvirus 7
acuugucuuaccua

SEQ ID NO: 347418 - RNA, 12 nt, Human herpesvirus 7
acuugugaaaau

SEQ ID NO: 347419 - RNA, 15 nt, Human herpesvirus 7
acuugugaaaauaac

SEQ ID NO: 347420 - RNA, 22 nt, Human herpesvirus 7
acuuguuuuuuuucucugauca

SEQ ID NO: 347421 - RNA, 21 nt, Human herpesvirus 7
acuuuaaccgcaaaagccacu

SEQ ID NO: 347422 - RNA, 20 nt, Human herpesvirus 7
acuuuacacggucuuaucua

SEQ ID NO: 347423 - RNA, 14 nt, Human herpesvirus 7
acuuuaucauuacu

SEQ ID NO: 347424 - RNA, 14 nt, Human herpesvirus 7
acuuucauagcuua

SEQ ID NO: 347425 - RNA, 17 nt, Human herpesvirus 7
acuuucgcaacaaucaa

SEQ ID NO: 347426 - RNA, 18 nt, Human herpesvirus 7
acuuugaagagcuuuuua

SEQ ID NO: 347427 - RNA, 14 nt, Human herpesvirus 7
acuuugugccugaa

SEQ ID NO: 347428 - RNA, 22 nt, Human herpesvirus 7
acuuuugaucaaaagcuuacuc

SEQ ID NO: 347429 - RNA, 17 nt, Human herpesvirus 7
acuuuuuuuacuuaaau

SEQ ID NO: 347430 - RNA, 22 nt, Human herpesvirus 7
agaaaaaaacaaaaucuacuuu

SEQ ID NO: 347431 - RNA, 17 nt, Human herpesvirus 7
agaaaaaaacaaugaaa

SEQ ID NO: 347432 - RNA, 19 nt, Human herpesvirus 7
agaaaaaacuaacuuaucu

SEQ ID NO: 347433 - RNA, 22 nt, Human herpesvirus 7
agaaaaacagacuuauuauguu

SEQ ID NO: 347434 - RNA, 14 nt, Human herpesvirus 7
agaaaaauguacaa

SEQ ID NO: 347435 - RNA, 18 nt, Human herpesvirus 7
agaaaacaaaucugauaa

SEQ ID NO: 347436 - RNA, 15 nt, Human herpesvirus 7
agaaaacaucccuuu

SEQ ID NO: 347437 - RNA, 21 nt, Human herpesvirus 7
agaaaacgaaaguaaguccaa

SEQ ID NO: 347438 - RNA, 23 nt, Human herpesvirus 7
agaaaaucaaaaaauaauuccuu

SEQ ID NO: 347439 - RNA, 18 nt, Human herpesvirus 7
agaaaaucuaccaauaaa

SEQ ID NO: 347440 - RNA, 21 nt, Human herpesvirus 7
agaaaauuuauauuugcuugc

SEQ ID NO: 347441 - RNA, 14 nt, Human herpesvirus 7
agaaacaacacucu

SEQ ID NO: 347442 - RNA, 16 nt, Human herpesvirus 7
agaaacaagguuuaaa

SEQ ID NO: 347443 - RNA, 17 nt, Human herpesvirus 7
agaaacaucuaugugcu

SEQ ID NO: 347444 - RNA, 18 nt, Human herpesvirus 7
agaaacaucuaugugcuc

SEQ ID NO: 347445 - RNA, 13 nt, Human herpesvirus 7
agaaacauguauc

SEQ ID NO: 347446 - RNA, 20 nt, Human herpesvirus 7
agaaacauuccucauggcca

SEQ ID NO: 347447 - RNA, 22 nt, Human herpesvirus 7
agaaacuugaaaaucaauccaa

SEQ ID NO: 347448 - RNA, 20 nt, Human herpesvirus 7
agaaagcuguuuccaucuua

SEQ ID NO: 347449 - RNA, 21 nt, Human herpesvirus 7
acaaauuuaagagacauugaa

SEQ ID NO: 347450 - RNA, 19 nt, Human herpesvirus 7
acaaauuuaggacuuuaca

SEQ ID NO: 347451 - RNA, 20 nt, Human herpesvirus 7
acaacaaagaaaaaacuaac

SEQ ID NO: 347452 - RNA, 13 nt, Human herpesvirus 7
acaacaacuaaaa

SEQ ID NO: 347453 - RNA, 19 nt, Human herpesvirus 7
acaacaauaaaagauuuaa

SEQ ID NO: 347454 - RNA, 13 nt, Human herpesvirus 7
acaacagccaaau

SEQ ID NO: 347455 - RNA, 14 nt, Human herpesvirus 7
acaacauacauauu

SEQ ID NO: 347456 - RNA, 18 nt, Human herpesvirus 7
acaacaugaaacguuuca

SEQ ID NO: 347457 - RNA, 14 nt, Human herpesvirus 7
acaacgacauugaa

SEQ ID NO: 347458 - RNA, 17 nt, Human herpesvirus 7
acaacuaaaaaucucag

SEQ ID NO: 347459 - RNA, 13 nt, Human herpesvirus 7
acaacugugacaa

SEQ ID NO: 347460 - RNA, 23 nt, Human herpesvirus 7
acaacuucuacuaauacagguaa

SEQ ID NO: 347461 - RNA, 20 nt, Human herpesvirus 7
acaacuuuauggaacaugaa

SEQ ID NO: 347462 - RNA, 20 nt, Human herpesvirus 7
acaagaggacagucaacaaa

SEQ ID NO: 347463 - RNA, 20 nt, Human herpesvirus 7
acaaggaaccguuugcagcc

SEQ ID NO: 347464 - RNA, 22 nt, Human herpesvirus 7
acaaggauuugcguaauggauu

SEQ ID NO: 347465 - RNA, 18 nt, Human herpesvirus 7
acaaggcaacaaugacuu

SEQ ID NO: 347466 - RNA, 19 nt, Human herpesvirus 7
acaagggcaauuguuugau

SEQ ID NO: 347467 - RNA, 22 nt, Human herpesvirus 7
acaaggugacagagggcauuug

SEQ ID NO: 347468 - RNA, 13 nt, Human herpesvirus 7
acaagguucucau

SEQ ID NO: 347469 - RNA, 23 nt, Human herpesvirus 7
acaagguucucauuuucgacaga

SEQ ID NO: 347470 - RNA, 18 nt, Human herpesvirus 7
acaaguagaaaaugcugu

SEQ ID NO: 347471 - RNA, 14 nt, Human herpesvirus 7
acaaguagugcuaa

SEQ ID NO: 347472 - RNA, 18 nt, Human herpesvirus 7
acaaguagugcuaauauu

SEQ ID NO: 347473 - RNA, 20 nt, Human herpesvirus 7
acaaguuucaaaaagugcau

SEQ ID NO: 347474 - RNA, 18 nt, Human herpesvirus 7
acaauagugaacaugugc

SEQ ID NO: 347475 - RNA, 14 nt, Human herpesvirus 7
acaaucagcauuua

SEQ ID NO: 347476 - RNA, 19 nt, Human herpesvirus 7
acaaucgauaaacuuuguc

SEQ ID NO: 347477 - RNA, 18 nt, Human herpesvirus 7
acaaucgguaacaugucu

SEQ ID NO: 347478 - RNA, 19 nt, Human herpesvirus 7
acaaucuauauaaaauauc

SEQ ID NO: 347479 - RNA, 17 nt, Human herpesvirus 7
acaaucuuggcauugaa

SEQ ID NO: 347480 - RNA, 20 nt, Human herpesvirus 7
acaaugaaaguugggaugac

SEQ ID NO: 347481 - RNA, 15 nt, Human herpesvirus 7
acaaugagcaauuca

SEQ ID NO: 347482 - RNA, 19 nt, Human herpesvirus 7
acaaugcagccuacuuuua

SEQ ID NO: 347483 - RNA, 18 nt, Human herpesvirus 7
acaaugccuuucuuaggu

SEQ ID NO: 347484 - RNA, 13 nt, Human herpesvirus 7
acaaugcugucuc

SEQ ID NO: 347485 - RNA, 16 nt, Human herpesvirus 7
acaauggaacagcaaa

SEQ ID NO: 347486 - RNA, 19 nt, Human herpesvirus 7
acaauggugugucuguggu

SEQ ID NO: 347487 - RNA, 21 nt, Human herpesvirus 7
acaaugguguuaacaaucuua

SEQ ID NO: 347488 - RNA, 17 nt, Human herpesvirus 7
acaaugucaauaaucaa

SEQ ID NO: 347489 - RNA, 17 nt, Human herpesvirus 7
acaauuaagaaucauuu

SEQ ID NO: 347490 - RNA, 21 nt, Human herpesvirus 7
acaauuacacaaauugauccu

SEQ ID NO: 347491 - RNA, 15 nt, Human herpesvirus 7
acaauuauagaaaca

SEQ ID NO: 347492 - RNA, 18 nt, Human herpesvirus 7
acaauuauagaaacauuc

SEQ ID NO: 347493 - RNA, 20 nt, Human herpesvirus 7
acaauuauagaaacauuccu

SEQ ID NO: 347494 - RNA, 17 nt, Human herpesvirus 7
acaauugaguucagguc

SEQ ID NO: 347495 - RNA, 21 nt, Human herpesvirus 7
acaauugaguucaggucucuu

SEQ ID NO: 347496 - RNA, 20 nt, Human herpesvirus 7
acaauuucacacaaugccuu

SEQ ID NO: 347497 - RNA, 13 nt, Human herpesvirus 7
acaauuucacaga

SEQ ID NO: 347498 - RNA, 13 nt, Human herpesvirus 7
acaauuucuggca

SEQ ID NO: 347499 - RNA, 17 nt, Human herpesvirus 7
acacaaacgaguuucaa

SEQ ID NO: 347500 - RNA, 12 nt, Human herpesvirus 7
acacaaauuuag

SEQ ID NO: 347501 - RNA, 18 nt, Human herpesvirus 7
acacaagccgucaauccu

SEQ ID NO: 347502 - RNA, 15 nt, Human herpesvirus 7
acacaaucagcauuu

SEQ ID NO: 347503 - RNA, 17 nt, Human herpesvirus 7
acacaauggaacagcaa

SEQ ID NO: 347504 - RNA, 17 nt, Human herpesvirus 7
acacaauuguauuucag

SEQ ID NO: 347505 - RNA, 16 nt, Human herpesvirus 7
acacaggaauugcugu

SEQ ID NO: 347506 - RNA, 15 nt, Human herpesvirus 7
acacauaauguguau

SEQ ID NO: 347507 - RNA, 12 nt, Human herpesvirus 7
acacaucuucaa

SEQ ID NO: 347508 - RNA, 16 nt, Human herpesvirus 7
acacauuuauccauca

SEQ ID NO: 347509 - RNA, 21 nt, Human herpesvirus 7
acacauuuauccaucaaaagu

SEQ ID NO: 347510 - RNA, 17 nt, Human herpesvirus 7
acaccccaaaaucaaaa

SEQ ID NO: 347511 - RNA, 21 nt, Human herpesvirus 7
acaccgccaccuucuuauaau

SEQ ID NO: 347512 - RNA, 16 nt, Human herpesvirus 7
acaccgucauuucgca

SEQ ID NO: 347513 - RNA, 18 nt, Human herpesvirus 7
acacgcauauguacgugu

SEQ ID NO: 347514 - RNA, 13 nt, Human herpesvirus 7
acacguagacuga

SEQ ID NO: 347515 - RNA, 17 nt, Human herpesvirus 7
acacguuucucuguaga

SEQ ID NO: 347516 - RNA, 13 nt, Human herpesvirus 7
acacuaugagaua

SEQ ID NO: 347517 - RNA, 19 nt, Human herpesvirus 7
acacuauucucuacuuaau

SEQ ID NO: 347518 - RNA, 19 nt, Human herpesvirus 7
acacucaaaacagaacuuu

SEQ ID NO: 347519 - RNA, 18 nt, Human herpesvirus 7
acacucugcauuccacua

SEQ ID NO: 347520 - RNA, 22 nt, Human herpesvirus 7
acacugcuucucccauucaaua

SEQ ID NO: 347521 - RNA, 21 nt, Human herpesvirus 7
acacuuauuccagauaugaca

SEQ ID NO: 347522 - RNA, 23 nt, Human herpesvirus 7
acacuuauuccagauaugacaaa

SEQ ID NO: 347523 - RNA, 15 nt, Human herpesvirus 7
acacuuuaaccgcaa

SEQ ID NO: 347524 - RNA, 19 nt, Human herpesvirus 7
acagaaacauguauccacg

SEQ ID NO: 347525 - RNA, 18 nt, Human herpesvirus 7
acagaauacuacucagaa

SEQ ID NO: 347526 - RNA, 22 nt, Human herpesvirus 7
acagaaugauaauuucuauaau

SEQ ID NO: 347527 - RNA, 21 nt, Human herpesvirus 7
acagagaaagauuaauuaucu

SEQ ID NO: 347528 - RNA, 15 nt, Human herpesvirus 7
acagaggacuugaaa

SEQ ID NO: 347529 - RNA, 20 nt, Human herpesvirus 7
acagauauucuaacaaauac

SEQ ID NO: 347530 - RNA, 14 nt, Human herpesvirus 7
acagauauugauga

SEQ ID NO: 347531 - RNA, 18 nt, Human herpesvirus 7
acagauugcuuguuacag

SEQ ID NO: 347532 - RNA, 16 nt, Human herpesvirus 7
acagauugucuuauua

SEQ ID NO: 347533 - RNA, 17 nt, Human herpesvirus 7
acagauuuaagugcaca

SEQ ID NO: 347534 - RNA, 22 nt, Human herpesvirus 7
acagauuuagugcguuuugaca

SEQ ID NO: 347535 - RNA, 23 nt, Human herpesvirus 7
acagauuuagugcguuuugacag

SEQ ID NO: 347536 - RNA, 21 nt, Human herpesvirus 7
acagcaaauucacgcucucaa

SEQ ID NO: 347537 - RNA, 15 nt, Human herpesvirus 7
acagcagccuacuuu

SEQ ID NO: 347538 - RNA, 13 nt, Human herpesvirus 7
acagcauauaucu

SEQ ID NO: 347539 - RNA, 17 nt, Human herpesvirus 7
acagcauuuucucuuau

SEQ ID NO: 347540 - RNA, 16 nt, Human herpesvirus 7
acagcguucaaucaaa

SEQ ID NO: 347541 - RNA, 19 nt, Human herpesvirus 7
acagcguucaaucaaauua

SEQ ID NO: 347542 - RNA, 23 nt, Human herpesvirus 7
acagcuagauugacuaugaauuu

SEQ ID NO: 347543 - RNA, 23 nt, Human herpesvirus 7
acaggaauugcugucuauuucaa

SEQ ID NO: 347544 - RNA, 19 nt, Human herpesvirus 7
acagggugugaacccauag

SEQ ID NO: 347545 - RNA, 19 nt, Human herpesvirus 7
acagguaaggaaaaccuac

SEQ ID NO: 347546 - RNA, 14 nt, Human herpesvirus 7
acaggugcaggcua

SEQ ID NO: 347547 - RNA, 21 nt, Human herpesvirus 7
acaguaaauugcaacuggcau

SEQ ID NO: 347548 - RNA, 15 nt, Human herpesvirus 7
acaguagaacgagaa

SEQ ID NO: 347549 - RNA, 21 nt, Human herpesvirus 7
acagucacguaaaaguguuca

SEQ ID NO: 347550 - RNA, 23 nt, Human herpesvirus 7
acagugaaguaauuuaugcuuua

SEQ ID NO: 347551 - RNA, 13 nt, Human herpesvirus 7
acaguuaaugugu

SEQ ID NO: 347552 - RNA, 21 nt, Human herpesvirus 7
acaguuacuuuuacuccucaa

SEQ ID NO: 347553 - RNA, 18 nt, Human herpesvirus 7
acaguuucugcauacucu

SEQ ID NO: 347554 - RNA, 15 nt, Human herpesvirus 7
acauaaagguaaaaa

SEQ ID NO: 347555 - RNA, 19 nt, Human herpesvirus 7
acauaacaaaaaagguguu

SEQ ID NO: 347556 - RNA, 23 nt, Human herpesvirus 7
acauaacaaaaaagguguugaua

SEQ ID NO: 347557 - RNA, 19 nt, Human herpesvirus 7
acauaaguugacaauguca

SEQ ID NO: 347558 - RNA, 19 nt, Human herpesvirus 7
acauaaucauggaaaaugg

SEQ ID NO: 347559 - RNA, 21 nt, Human herpesvirus 7
acauaauguguaucaauauuc

SEQ ID NO: 347560 - RNA, 22 nt, Human herpesvirus 7
acauacgugcuuagacuuauca

SEQ ID NO: 347561 - RNA, 16 nt, Human herpesvirus 7
acauauagauaaugaa

SEQ ID NO: 347562 - RNA, 15 nt, Human herpesvirus 7
acauauguugauucu

SEQ ID NO: 347563 - RNA, 17 nt, Human herpesvirus 7
acauauguugauucucu

SEQ ID NO: 347564 - RNA, 17 nt, Human herpesvirus 7
acauauucuuagaaacu

SEQ ID NO: 347565 - RNA, 19 nt, Human herpesvirus 7
acaucaauuuuaaugugcu

SEQ ID NO: 347566 - RNA, 20 nt, Human herpesvirus 7
acaucaauuuuaaugugcuu

SEQ ID NO: 347567 - RNA, 21 nt, Human herpesvirus 7
acaucuaggucuuccacuguu

SEQ ID NO: 347568 - RNA, 14 nt, Human herpesvirus 7
acaucuaugugcuc

SEQ ID NO: 347569 - RNA, 19 nt, Human herpesvirus 7
acaucuaugugcucugaau

SEQ ID NO: 347570 - RNA, 23 nt, Human herpesvirus 7
acaucugucaggucacaaaagcu

SEQ ID NO: 347571 - RNA, 16 nt, Human herpesvirus 7
acaucuuaaaugucaa

SEQ ID NO: 347572 - RNA, 20 nt, Human herpesvirus 7
acaucuugagaaauaugaau

SEQ ID NO: 347573 - RNA, 17 nt, Human herpesvirus 7
acaucuuuauauguguu

SEQ ID NO: 347574 - RNA, 15 nt, Human herpesvirus 7
acaugaaaaauaucg

SEQ ID NO: 347575 - RNA, 14 nt, Human herpesvirus 7
acaugaguacuguu

SEQ ID NO: 347576 - RNA, 13 nt, Human herpesvirus 7
acaugaucuugua

SEQ ID NO: 347577 - RNA, 18 nt, Human herpesvirus 7
acaugauuggccagugug

SEQ ID NO: 347578 - RNA, 14 nt, Human herpesvirus 7
acaugcaacauaau

SEQ ID NO: 347579 - RNA, 15 nt, Human herpesvirus 7
acaugccagacuuaa

SEQ ID NO: 347580 - RNA, 20 nt, Human herpesvirus 7
acauggccaucgcuuucuca

SEQ ID NO: 347581 - RNA, 18 nt, Human herpesvirus 7
acauguauccacgcgggg

SEQ ID NO: 347582 - RNA, 19 nt, Human herpesvirus 7
acauguuccauucaauaaa

SEQ ID NO: 347583 - RNA, 14 nt, Human herpesvirus 7
acauuaaaacuacc

SEQ ID NO: 347584 - RNA, 12 nt, Human herpesvirus 7
acauuacgucau

SEQ ID NO: 347585 - RNA, 22 nt, Human herpesvirus 7
acauuauaaauguaacuuucau

SEQ ID NO: 347586 - RNA, 23 nt, Human herpesvirus 7
acauuauaaauguaacuuucauc

SEQ ID NO: 347587 - RNA, 18 nt, Human herpesvirus 7
acauuaucgcguuuucau

SEQ ID NO: 347588 - RNA, 18 nt, Human herpesvirus 7
acauuaucuugacaggug

SEQ ID NO: 347589 - RNA, 20 nt, Human herpesvirus 7
acauuaucuugacaggugau

SEQ ID NO: 347590 - RNA, 21 nt, Human herpesvirus 7
acauuauuauuugacgaguau

SEQ ID NO: 347591 - RNA, 15 nt, Human herpesvirus 7
acauuauuugcugaa

SEQ ID NO: 347592 - RNA, 19 nt, Human herpesvirus 7
acauuccaacagcuucaga

SEQ ID NO: 347593 - RNA, 18 nt, Human herpesvirus 7
acauuccucaucucccac

SEQ ID NO: 347594 - RNA, 15 nt, Human herpesvirus 7
acauugaaaaagcag

SEQ ID NO: 347595 - RNA, 17 nt, Human herpesvirus 7
acauugaaaaugcauug

SEQ ID NO: 347596 - RNA, 18 nt, Human herpesvirus 7
acauugaaaaugcauugc

SEQ ID NO: 347597 - RNA, 20 nt, Human herpesvirus 7
acauugaaacucgaaacugg

SEQ ID NO: 347598 - RNA, 18 nt, Human herpesvirus 7
acauugcuucagaaauaa

SEQ ID NO: 347599 - RNA, 17 nt, Human herpesvirus 7
acauuguacaauuacaa

SEQ ID NO: 347600 - RNA, 16 nt, Human herpesvirus 7
acauugucacugcaaa

SEQ ID NO: 347601 - RNA, 14 nt, Human herpesvirus 7
acauuuaaaaaauc

SEQ ID NO: 347602 - RNA, 23 nt, Human herpesvirus 7
acauuuaaauucaacaucuuuca

SEQ ID NO: 347603 - RNA, 22 nt, Human herpesvirus 7
acauuuacaaaaaaaagcuuug

SEQ ID NO: 347604 - RNA, 16 nt, Human herpesvirus 7
acauuuauccaucaaa

SEQ ID NO: 347605 - RNA, 15 nt, Human herpesvirus 7
acauuucaaacaaca

SEQ ID NO: 347606 - RNA, 14 nt, Human herpesvirus 7
acauuucauuccaa

SEQ ID NO: 347607 - RNA, 21 nt, Human herpesvirus 7
acauuuuuaccuccauaugaa

SEQ ID NO: 347608 - RNA, 20 nt, Human herpesvirus 7
acauuuuucuauuaguauga

SEQ ID NO: 347609 - RNA, 14 nt, Human herpesvirus 7
acauuuuugaagcu

SEQ ID NO: 347610 - RNA, 17 nt, Human herpesvirus 7
accaaaaaccugaaaaa

SEQ ID NO: 347611 - RNA, 22 nt, Human herpesvirus 7
accaaaaugugggauguaucca

SEQ ID NO: 347612 - RNA, 14 nt, Human herpesvirus 7
accaaacaaaauuc

SEQ ID NO: 347613 - RNA, 21 nt, Human herpesvirus 7
accaaagaguauacaaaagac

SEQ ID NO: 347614 - RNA, 17 nt, Human herpesvirus 7
accaaauacaaccacaa

SEQ ID NO: 347615 - RNA, 18 nt, Human herpesvirus 7
accaaauauguggcacau

SEQ ID NO: 347616 - RNA, 19 nt, Human herpesvirus 7
accaaauauguggcacaua

SEQ ID NO: 347617 - RNA, 17 nt, Human herpesvirus 7
accaauagaaaacauua

SEQ ID NO: 347618 - RNA, 19 nt, Human herpesvirus 7
accaauagaaaacauuaua

SEQ ID NO: 347619 - RNA, 23 nt, Human herpesvirus 7
accaauuaauauuaauacgucca

SEQ ID NO: 347620 - RNA, 22 nt, Human herpesvirus 7
accaauuucuauuagauaauga

SEQ ID NO: 347621 - RNA, 17 nt, Human herpesvirus 7
accacaaaaaucaaagu

SEQ ID NO: 347622 - RNA, 13 nt, Human herpesvirus 7
accacaacaggau

SEQ ID NO: 347623 - RNA, 17 nt, Human herpesvirus 7
accacugugucaucaca

SEQ ID NO: 347624 - RNA, 18 nt, Human herpesvirus 7
accaugaaaaauaaauac

SEQ ID NO: 347625 - RNA, 19 nt, Human herpesvirus 7
accaugaaaaauaaauacu

SEQ ID NO: 347626 - RNA, 18 nt, Human herpesvirus 7
accauuguucaacuucaa

SEQ ID NO: 347627 - RNA, 18 nt, Human herpesvirus 7
accauuuauuuacagauu

SEQ ID NO: 347628 - RNA, 17 nt, Human herpesvirus 7
acccacuaacauuuuaa

SEQ ID NO: 347629 - RNA, 18 nt, Human herpesvirus 7
acccagaagaaacuugaa

SEQ ID NO: 347630 - RNA, 19 nt, Human herpesvirus 7
acccagaagaaacuugaaa

SEQ ID NO: 347631 - RNA, 17 nt, Human herpesvirus 7
acccaugggcacauuug

SEQ ID NO: 347632 - RNA, 15 nt, Human herpesvirus 7
accccaaaaucaaaa

SEQ ID NO: 347633 - RNA, 17 nt, Human herpesvirus 7
accccaaaaucaaaaaa

SEQ ID NO: 347634 - RNA, 14 nt, Human herpesvirus 7
accccugccaguaa

SEQ ID NO: 347635 - RNA, 15 nt, Human herpesvirus 7
accccugccaguaac

SEQ ID NO: 347636 - RNA, 16 nt, Human herpesvirus 7
acccuaauugccauug

SEQ ID NO: 347637 - RNA, 16 nt, Human herpesvirus 7
acccugucacacuuau

SEQ ID NO: 347638 - RNA, 17 nt, Human herpesvirus 7
acccuuuguuugagaca

SEQ ID NO: 347639 - RNA, 16 nt, Human herpesvirus 7
accgauuccagcacuu

SEQ ID NO: 347640 - RNA, 17 nt, Human herpesvirus 7
accgauucuaaauuaaa

SEQ ID NO: 347641 - RNA, 17 nt, Human herpesvirus 7
accgcaaaagccacuga

SEQ ID NO: 347642 - RNA, 17 nt, Human herpesvirus 7
accgccauucuuuucaa

SEQ ID NO: 347643 - RNA, 15 nt, Human herpesvirus 7
accggaaguuuuuaa

SEQ ID NO: 347644 - RNA, 18 nt, Human herpesvirus 7
accgguaaagaaccuauc

SEQ ID NO: 347645 - RNA, 16 nt, Human herpesvirus 7
accgguccuuccucaa

SEQ ID NO: 347646 - RNA, 13 nt, Human herpesvirus 7
accguuugcagcc

SEQ ID NO: 347647 - RNA, 17 nt, Human herpesvirus 7
accuaacaaaaaaauac

SEQ ID NO: 347648 - RNA, 15 nt, Human herpesvirus 7
accuacauuuugaua

SEQ ID NO: 347649 - RNA, 20 nt, Human herpesvirus 7
accuacuguuaagaauucca

SEQ ID NO: 347650 - RNA, 19 nt, Human herpesvirus 7
accuaucaaaauuccauuc

SEQ ID NO: 347651 - RNA, 20 nt, Human herpesvirus 7
accuccuaugucaugaaucu

SEQ ID NO: 347652 - RNA, 16 nt, Human herpesvirus 7
accucgacauucucca

SEQ ID NO: 347653 - RNA, 22 nt, Human herpesvirus 7
accucgacauucuccaguggca

SEQ ID NO: 347654 - RNA, 20 nt, Human herpesvirus 7
accugaaaaacaugagugaa

SEQ ID NO: 347655 - RNA, 15 nt, Human herpesvirus 7
accugagaugauaaa

SEQ ID NO: 347656 - RNA, 18 nt, Human herpesvirus 7
accuggauguaaugaaua

SEQ ID NO: 347657 - RNA, 14 nt, Human herpesvirus 7
accuguacuguugc

SEQ ID NO: 347658 - RNA, 18 nt, Human herpesvirus 7
accuuaaguuuuuuauac

SEQ ID NO: 347659 - RNA, 16 nt, Human herpesvirus 7
accuuaauucgugucu

SEQ ID NO: 347660 - RNA, 15 nt, Human herpesvirus 7
accuuagaaucacaa

SEQ ID NO: 347661 - RNA, 19 nt, Human herpesvirus 7
accuuagaaucacaacaua

SEQ ID NO: 347662 - RNA, 16 nt, Human herpesvirus 7
accuucgugugucucu

SEQ ID NO: 347663 - RNA, 20 nt, Human herpesvirus 7
accuucgugugucucuagaa

SEQ ID NO: 347664 - RNA, 17 nt, Human herpesvirus 7
accuuucuuaagcuuuu

SEQ ID NO: 347665 - RNA, 17 nt, Human herpesvirus 7
accuuuuaacaacagcc

SEQ ID NO: 347666 - RNA, 13 nt, Human herpesvirus 7
acgaaaacugcaa

SEQ ID NO: 347667 - RNA, 16 nt, Human herpesvirus 7
acgacacugaauguca

SEQ ID NO: 347668 - RNA, 18 nt, Human herpesvirus 7
acgacacugaaugucaac

SEQ ID NO: 347669 - RNA, 20 nt, Human herpesvirus 7
acgagauggauugagugcau

SEQ ID NO: 347670 - RNA, 21 nt, Human herpesvirus 7
acgaguacuccuucuaccucu

SEQ ID NO: 347671 - RNA, 15 nt, Human herpesvirus 7
acgaguauguccaau

SEQ ID NO: 347672 - RNA, 17 nt, Human herpesvirus 7
acgaguauguccaauca

SEQ ID NO: 347673 - RNA, 14 nt, Human herpesvirus 7
acgauccaguacuu

SEQ ID NO: 347674 - RNA, 14 nt, Human herpesvirus 7
acgaugagcaugaa

SEQ ID NO: 347675 - RNA, 15 nt, Human herpesvirus 7
acgaugagcaugaaa

SEQ ID NO: 347676 - RNA, 15 nt, Human herpesvirus 7
acgaugauauuguca

SEQ ID NO: 347677 - RNA, 17 nt, Human herpesvirus 7
acgcagacacaauggaa

SEQ ID NO: 347678 - RNA, 18 nt, Human herpesvirus 7
acgcagcaauguauauaa

SEQ ID NO: 347679 - RNA, 13 nt, Human herpesvirus 7
acgcauaugcuaa

SEQ ID NO: 347680 - RNA, 14 nt, Human herpesvirus 7
acgcaugcuugcuu

SEQ ID NO: 347681 - RNA, 15 nt, Human herpesvirus 7
acgcugaauucauuu

SEQ ID NO: 347682 - RNA, 18 nt, Human herpesvirus 7
gaaagcguuucacuggga

SEQ ID NO: 347683 - RNA, 19 nt, Human herpesvirus 7
gaaagcuucaguacuugaa

SEQ ID NO: 347684 - RNA, 16 nt, Human herpesvirus 7
gaaaguaaaaacuuuu

SEQ ID NO: 347685 - RNA, 15 nt, Human herpesvirus 7
gaaagugaaaauauu

SEQ ID NO: 347686 - RNA, 21 nt, Human herpesvirus 7
gaaauaauuagaaagcucacu

SEQ ID NO: 347687 - RNA, 19 nt, Human herpesvirus 7
gaaauaugcuuccuaaaaa

SEQ ID NO: 347688 - RNA, 21 nt, Human herpesvirus 7
gaaaucauuuugcuguuuaaa

SEQ ID NO: 347689 - RNA, 18 nt, Human herpesvirus 7
gaaaucgcuuauuuaaca

SEQ ID NO: 347690 - RNA, 14 nt, Human herpesvirus 7
gaaaugagauuucu

SEQ ID NO: 347691 - RNA, 21 nt, Human herpesvirus 7
gaaaugagccugacagucacg

SEQ ID NO: 347692 - RNA, 16 nt, Human herpesvirus 7
gaaauguaaauuaugu

SEQ ID NO: 347693 - RNA, 19 nt, Human herpesvirus 7
gaaaugucuuugucaugau

SEQ ID NO: 347694 - RNA, 21 nt, Human herpesvirus 7
gaaaugugcgaagguugucug

SEQ ID NO: 347695 - RNA, 17 nt, Human herpesvirus 7
gaaauucgcaaaauuuc

SEQ ID NO: 347696 - RNA, 19 nt, Human herpesvirus 7
gaaauucgcaaaauuucau

SEQ ID NO: 347697 - RNA, 21 nt, Human herpesvirus 7
gaaauucuguggagugagaaa

SEQ ID NO: 347698 - RNA, 16 nt, Human herpesvirus 7
gaaauuucaaaaauuc

SEQ ID NO: 347699 - RNA, 20 nt, Human herpesvirus 7
gaaauuuuacagccuguaca

SEQ ID NO: 347700 - RNA, 18 nt, Human herpesvirus 7
gaaauuuugaucuuguca

SEQ ID NO: 347701 - RNA, 16 nt, Human herpesvirus 7
gaacaaauaaugagua

SEQ ID NO: 347702 - RNA, 15 nt, Human herpesvirus 7
gaacaacaacuaaaa

SEQ ID NO: 347703 - RNA, 13 nt, Human herpesvirus 7
gaacaacaugaaa

SEQ ID NO: 347704 - RNA, 16 nt, Human herpesvirus 7
gaacaaguuucaaaaa

SEQ ID NO: 347705 - RNA, 17 nt, Human herpesvirus 7
gaacaaguuucaaaaag

SEQ ID NO: 347706 - RNA, 14 nt, Human herpesvirus 7
gaacaauaaauuca

SEQ ID NO: 347707 - RNA, 17 nt, Human herpesvirus 7
gaacacugcuucuccca

SEQ ID NO: 347708 - RNA, 16 nt, Human herpesvirus 7
gaacagucccagauaa

SEQ ID NO: 347709 - RNA, 15 nt, Human herpesvirus 7
gaacaucuugagaaa

SEQ ID NO: 347710 - RNA, 20 nt, Human herpesvirus 7
gaacaucuugagaaauauga

SEQ ID NO: 347711 - RNA, 13 nt, Human herpesvirus 7
gaacaugagauaa

SEQ ID NO: 347712 - RNA, 14 nt, Human herpesvirus 7
gaacauuaauauca

SEQ ID NO: 347713 - RNA, 15 nt, Human herpesvirus 7
gaacauuaauaucaa

SEQ ID NO: 347714 - RNA, 15 nt, Human herpesvirus 7
gaacguccucuggau

SEQ ID NO: 347715 - RNA, 19 nt, Human herpesvirus 7
gaacuagaaaaacacuagc

SEQ ID NO: 347716 - RNA, 16 nt, Human herpesvirus 7
gaacuguuacaacuuu

SEQ ID NO: 347717 - RNA, 16 nt, Human herpesvirus 7
gaacuguuacaguuaa

SEQ ID NO: 347718 - RNA, 15 nt, Human herpesvirus 7
gaacuuacauuucaa

SEQ ID NO: 347719 - RNA, 19 nt, Human herpesvirus 7
gaacuuacauuucaaacaa

SEQ ID NO: 347720 - RNA, 11 nt, Human herpesvirus 7
gaacuugucac

SEQ ID NO: 347721 - RNA, 16 nt, Human herpesvirus 7
gaacuuguuuugacuu

SEQ ID NO: 347722 - RNA, 15 nt, Human herpesvirus 7
gaagaaacagcugaa

SEQ ID NO: 347723 - RNA, 16 nt, Human herpesvirus 7
gaagaacaacaugaaa

SEQ ID NO: 347724 - RNA, 13 nt, Human herpesvirus 7
gaagaacaagcaa

SEQ ID NO: 347725 - RNA, 14 nt, Human herpesvirus 7
gaagaacaagcaaa

SEQ ID NO: 347726 - RNA, 19 nt, Human herpesvirus 7
gaagaaugggugucagcuu

SEQ ID NO: 347727 - RNA, 18 nt, Human herpesvirus 7
gaagacaacgacuacagg

SEQ ID NO: 347728 - RNA, 20 nt, Human herpesvirus 7
gaagacauccgauagcauua

SEQ ID NO: 347729 - RNA, 13 nt, Human herpesvirus 7
gaagagacgauua

SEQ ID NO: 347730 - RNA, 23 nt, Human herpesvirus 7
gaagagacgauuaugucuaagga

SEQ ID NO: 347731 - RNA, 23 nt, Human herpesvirus 7
gaagagacugucauaaucugauu

SEQ ID NO: 347732 - RNA, 17 nt, Human herpesvirus 7
gaagagccaaauaugga

SEQ ID NO: 347733 - RNA, 23 nt, Human herpesvirus 7
gaagaggaguauguugcauauca

SEQ ID NO: 347734 - RNA, 18 nt, Human herpesvirus 7
gaagauuuguuccaaacu

SEQ ID NO: 347735 - RNA, 19 nt, Human herpesvirus 7
gaagcgcugagaucuucca

SEQ ID NO: 347736 - RNA, 20 nt, Human herpesvirus 7
gaagcgcugagaucuuccaa

SEQ ID NO: 347737 - RNA, 15 nt, Human herpesvirus 7
gaagcuugcuagauu

SEQ ID NO: 347738 - RNA, 12 nt, Human herpesvirus 7
gagggugcguua

SEQ ID NO: 347739 - RNA, 13 nt, Human herpesvirus 7
gaguacgucuuuu

SEQ ID NO: 347740 - RNA, 19 nt, Human herpesvirus 7
gaguauaacucaaaagaca

SEQ ID NO: 347741 - RNA, 17 nt, Human herpesvirus 7
gaguauacaaaagacau

SEQ ID NO: 347742 - RNA, 19 nt, Human herpesvirus 7
gagucguucuauguaugaa

SEQ ID NO: 347743 - RNA, 16 nt, Human herpesvirus 7
gaguguuuaucugugu

SEQ ID NO: 347744 - RNA, 19 nt, Human herpesvirus 7
gaguuagcgaggcauuuac

SEQ ID NO: 347745 - RNA, 12 nt, Human herpesvirus 7
gaguuguggcaa

SEQ ID NO: 347746 - RNA, 16 nt, Human herpesvirus 7
gaguuucuucuuccac

SEQ ID NO: 347747 - RNA, 19 nt, Human herpesvirus 7
gaguuugucucauugacau

SEQ ID NO: 347748 - RNA, 20 nt, Human herpesvirus 7
gauaaaaaaagaaaagagaa

SEQ ID NO: 347749 - RNA, 22 nt, Human herpesvirus 7
gauaaauuacacucuguuacuu

SEQ ID NO: 347750 - RNA, 18 nt, Human herpesvirus 7
gauaagaaaguuguacuc

SEQ ID NO: 347751 - RNA, 13 nt, Human herpesvirus 7
gauaaugacaaac

SEQ ID NO: 347752 - RNA, 17 nt, Human herpesvirus 7
gauaauuuacaaaacaa

SEQ ID NO: 347753 - RNA, 20 nt, Human herpesvirus 7
gauacaaucgauaaacuuug

SEQ ID NO: 347754 - RNA, 19 nt, Human herpesvirus 7
gauacauuuuugcaauaug

SEQ ID NO: 347755 - RNA, 15 nt, Human herpesvirus 7
gauacugaaucugaa

SEQ ID NO: 347756 - RNA, 21 nt, Human herpesvirus 7
gauagaaauuaugaaaagcuu

SEQ ID NO: 347757 - RNA, 20 nt, Human herpesvirus 7
gauagcauuuguuacagcuu

SEQ ID NO: 347758 - RNA, 20 nt, Human herpesvirus 7
gauagccauaaaugcuuaaa

SEQ ID NO: 347759 - RNA, 17 nt, Human herpesvirus 7
gauagcggucaucucac

SEQ ID NO: 347760 - RNA, 24 nt, Human herpesvirus 7
gauagcuugacaccaacaucuguc

SEQ ID NO: 347761 - RNA, 13 nt, Human herpesvirus 7
gauauaaauacgc

SEQ ID NO: 347762 - RNA, 20 nt, Human herpesvirus 7
gauaugacaaauuucaggaa

SEQ ID NO: 347763 - RNA, 13 nt, Human herpesvirus 7
gaucaaugcacac

SEQ ID NO: 347764 - RNA, 21 nt, Human herpesvirus 7
gaucacgcuagccucauggcu

SEQ ID NO: 347765 - RNA, 15 nt, Human herpesvirus 7
gaucacguuuugcaa

SEQ ID NO: 347766 - RNA, 18 nt, Human herpesvirus 7
gaucauaauuacauugca

SEQ ID NO: 347767 - RNA, 17 nt, Human herpesvirus 7
gauccgccgacaagaaa

SEQ ID NO: 347768 - RNA, 19 nt, Human herpesvirus 7
gaucgucuguugaaacaua

SEQ ID NO: 347769 - RNA, 15 nt, Human herpesvirus 7
gaucguguguuacua

SEQ ID NO: 347770 - RNA, 20 nt, Human herpesvirus 7
gaucguuguugguguguuac

SEQ ID NO: 347771 - RNA, 21 nt, Human herpesvirus 7
gaucguuguugguguguuaca

SEQ ID NO: 347772 - RNA, 13 nt, Human herpesvirus 7
gaucucugucaaa

SEQ ID NO: 347773 - RNA, 19 nt, Human herpesvirus 7
gaucuuccaauucuuugua

SEQ ID NO: 347774 - RNA, 13 nt, Human herpesvirus 7
gaugaaacuucca

SEQ ID NO: 347775 - RNA, 19 nt, Human herpesvirus 7
gaugaauuaauucuuucca

SEQ ID NO: 347776 - RNA, 20 nt, Human herpesvirus 7
gaugaauuaauucuuuccac

SEQ ID NO: 347777 - RNA, 15 nt, Human herpesvirus 7
gaugacaacucaaua

SEQ ID NO: 347778 - RNA, 24 nt, Human herpesvirus 7
gaugacuuccaaguuuugcgcaaa

SEQ ID NO: 347779 - RNA, 18 nt, Human herpesvirus 7
gaugcagaaaaauccaaa

SEQ ID NO: 347780 - RNA, 15 nt, Human herpesvirus 7
gaugcauccaaagaa

SEQ ID NO: 347781 - RNA, 21 nt, Human herpesvirus 7
gaugcaugcuaauauuuccaa

SEQ ID NO: 347782 - RNA, 21 nt, Human herpesvirus 7
gaugcauuuuuauugcaguuu

SEQ ID NO: 347783 - RNA, 17 nt, Human herpesvirus 7
gaugccagccuauucac

SEQ ID NO: 347784 - RNA, 20 nt, Human herpesvirus 7
gaugccagccuauucacaua

SEQ ID NO: 347785 - RNA, 18 nt, Human herpesvirus 7
gaugcgaaagccacuguu

SEQ ID NO: 347786 - RNA, 14 nt, Human herpesvirus 7
gaugcguguguuca

SEQ ID NO: 347787 - RNA, 16 nt, Human herpesvirus 7
gaugcguguguucaaa

SEQ ID NO: 347788 - RNA, 14 nt, Human herpesvirus 7
gaugcuucaauuca

SEQ ID NO: 347789 - RNA, 22 nt, Human herpesvirus 7
gauggaugccagccuauucaca

SEQ ID NO: 347790 - RNA, 17 nt, Human herpesvirus 7
gauguaauguugcaaau

SEQ ID NO: 347791 - RNA, 15 nt, Human herpesvirus 7
gauguaggugcugca

SEQ ID NO: 347792 - RNA, 18 nt, Human herpesvirus 7
gaugucagcaaaucugaa

SEQ ID NO: 347793 - RNA, 18 nt, Human herpesvirus 7
gauguuuugcaagcacau

SEQ ID NO: 347794 - RNA, 18 nt, Human herpesvirus 7
gauuaacauuaaccacaa

SEQ ID NO: 347795 - RNA, 22 nt, Human herpesvirus 7
gauuaaccacgcauaugcuaag

SEQ ID NO: 347796 - RNA, 18 nt, Human herpesvirus 7
gauuaauagauacguuag

SEQ ID NO: 347797 - RNA, 17 nt, Human herpesvirus 7
gauuagaaucagacuaa

SEQ ID NO: 347798 - RNA, 18 nt, Human herpesvirus 7
gauuagcgcgugaacaaa

SEQ ID NO: 347799 - RNA, 16 nt, Human herpesvirus 7
gauuauacaaauccaa

SEQ ID NO: 347800 - RNA, 17 nt, Human herpesvirus 7
gauucaagaaaucagau

SEQ ID NO: 347801 - RNA, 22 nt, Human herpesvirus 7
cuugagccuugcuagcaccgaa

SEQ ID NO: 347802 - RNA, 14 nt, Human herpesvirus 7
cuugcaaagacaga

SEQ ID NO: 347803 - RNA, 21 nt, Human herpesvirus 7
cuugcaaagacagaaauugaa

SEQ ID NO: 347804 - RNA, 12 nt, Human herpesvirus 7
cuugcauacagu

SEQ ID NO: 347805 - RNA, 11 nt, Human herpesvirus 7
cuugcauuucc

SEQ ID NO: 347806 - RNA, 15 nt, Human herpesvirus 7
cuugccuacacuuuc

SEQ ID NO: 347807 - RNA, 16 nt, Human herpesvirus 7
cuugcgaauacuuguu

SEQ ID NO: 347808 - RNA, 16 nt, Human herpesvirus 7
cuugcuagcugugaua

SEQ ID NO: 347809 - RNA, 17 nt, Human herpesvirus 7
cuugcuggcucaagcac

SEQ ID NO: 347810 - RNA, 20 nt, Human herpesvirus 7
cuugcuggcucaagcacaau

SEQ ID NO: 347811 - RNA, 19 nt, Human herpesvirus 7
cuugcuguuugucaucgua

SEQ ID NO: 347812 - RNA, 16 nt, Human herpesvirus 7
cuuggaaaacaaucaa

SEQ ID NO: 347813 - RNA, 17 nt, Human herpesvirus 7
cuugguuuuacaaauua

SEQ ID NO: 347814 - RNA, 13 nt, Human herpesvirus 7
cuuguaauuuggc

SEQ ID NO: 347815 - RNA, 21 nt, Human herpesvirus 7
cuuguaccaaucaagccacga

SEQ ID NO: 347816 - RNA, 16 nt, Human herpesvirus 7
cuugucaccuauuuca

SEQ ID NO: 347817 - RNA, 18 nt, Human herpesvirus 7
cuugugaaguuugcugaa

SEQ ID NO: 347818 - RNA, 15 nt, Human herpesvirus 7
cuuguguugugaaaa

SEQ ID NO: 347819 - RNA, 24 nt, Human herpesvirus 7
cuuguugaauuuuuguagugucua

SEQ ID NO: 347820 - RNA, 23 nt, Human herpesvirus 7
cuuguuuggaaaacaacauacau

SEQ ID NO: 347821 - RNA, 15 nt, Human herpesvirus 7
cuuuaaaacuuugau

SEQ ID NO: 347822 - RNA, 22 nt, Human herpesvirus 7
cuuuaagugauacugaaucuga

SEQ ID NO: 347823 - RNA, 18 nt, Human herpesvirus 7
cuuuaauccguaucuaga

SEQ ID NO: 347824 - RNA, 23 nt, Human herpesvirus 7
cuuuaauuaacacucaaaacaga

SEQ ID NO: 347825 - RNA, 22 nt, Human herpesvirus 7
cuuuaccgauucuaaauuaaaa

SEQ ID NO: 347826 - RNA, 12 nt, Human herpesvirus 7
cuuuacuuucau

SEQ ID NO: 347827 - RNA, 13 nt, Human herpesvirus 7
cuuuacuuucaua

SEQ ID NO: 347828 - RNA, 19 nt, Human herpesvirus 7
cuuuacuuucauagcuuaa

SEQ ID NO: 347829 - RNA, 20 nt, Human herpesvirus 7
cuuuaucgccauuuucuuga

SEQ ID NO: 347830 - RNA, 21 nt, Human herpesvirus 7
cuuuauuuaagcuucaaaaau

SEQ ID NO: 347831 - RNA, 17 nt, Human herpesvirus 7
cuuucaacgaucucaaa

SEQ ID NO: 347832 - RNA, 19 nt, Human herpesvirus 7
cuuucaauucaucaggaca

SEQ ID NO: 347833 - RNA, 14 nt, Human herpesvirus 7
cuuucauagcuuaa

SEQ ID NO: 347834 - RNA, 17 nt, Human herpesvirus 7
cuuucaugauuucaaua

SEQ ID NO: 347835 - RNA, 16 nt, Human herpesvirus 7
cuuucaugcauugcau

SEQ ID NO: 347836 - RNA, 18 nt, Human herpesvirus 7
cuuucaugcauugcauuc

SEQ ID NO: 347837 - RNA, 20 nt, Human herpesvirus 7
cuuucaugcauugcauucga

SEQ ID NO: 347838 - RNA, 19 nt, Human herpesvirus 7
cuuuccaucaucacgucau

SEQ ID NO: 347839 - RNA, 13 nt, Human herpesvirus 7
cuuuccucacaga

SEQ ID NO: 347840 - RNA, 20 nt, Human herpesvirus 7
cuuucguaaucauucaagaa

SEQ ID NO: 347841 - RNA, 16 nt, Human herpesvirus 7
cuuucuaaguacuucu

SEQ ID NO: 347842 - RNA, 14 nt, Human herpesvirus 7
cuuucuaguuccca

SEQ ID NO: 347843 - RNA, 17 nt, Human herpesvirus 7
cuuucuuauaucugaga

SEQ ID NO: 347844 - RNA, 22 nt, Human herpesvirus 7
cuuucuucuagaaacuaaagaa

SEQ ID NO: 347845 - RNA, 20 nt, Human herpesvirus 7
cuuugacaaaaauguuaaag

SEQ ID NO: 347846 - RNA, 12 nt, Human herpesvirus 7
cuuugcaaucau

SEQ ID NO: 347847 - RNA, 14 nt, Human herpesvirus 7
cuuugcaaucauug

SEQ ID NO: 347848 - RNA, 15 nt, Human herpesvirus 7
cuuugccuguuaaaa

SEQ ID NO: 347849 - RNA, 17 nt, Human herpesvirus 7
cuuugcgcuguugguua

SEQ ID NO: 347850 - RNA, 18 nt, Human herpesvirus 7
cuuugcuaaccacugugu

SEQ ID NO: 347851 - RNA, 20 nt, Human herpesvirus 7
cuuugcuauuuaaucuaugc

SEQ ID NO: 347852 - RNA, 13 nt, Human herpesvirus 7
cuuugcugcaaca

SEQ ID NO: 347853 - RNA, 20 nt, Human herpesvirus 7
cuuuggugggucacguucua

SEQ ID NO: 347854 - RNA, 23 nt, Human herpesvirus 7
cuuuggugggucacguucuaaaa

SEQ ID NO: 347855 - RNA, 16 nt, Human herpesvirus 7
cuuugugagaaaugga

SEQ ID NO: 347856 - RNA, 17 nt, Human herpesvirus 7
cuuugugagaaauggaa

SEQ ID NO: 347857 - RNA, 19 nt, Human herpesvirus 7
cuuuguuuuuucuugggua

SEQ ID NO: 347858 - RNA, 18 nt, Human herpesvirus 7
cuuuuaacaacagccaaa

SEQ ID NO: 347859 - RNA, 20 nt, Human herpesvirus 7
ccauuguguuaaaaauauca

SEQ ID NO: 347860 - RNA, 18 nt, Human herpesvirus 7
ccauuuauuuacagauuu

SEQ ID NO: 347861 - RNA, 20 nt, Human herpesvirus 7
ccauuuauuuacagauuuua

SEQ ID NO: 347862 - RNA, 15 nt, Human herpesvirus 7
ccauuuccucuggaa

SEQ ID NO: 347863 - RNA, 14 nt, Human herpesvirus 7
ccauuugugaugua

SEQ ID NO: 347864 - RNA, 19 nt, Human herpesvirus 7
ccauuuucagaaaaguuga

SEQ ID NO: 347865 - RNA, 19 nt, Human herpesvirus 7
ccauuuuuauaacaauauu

SEQ ID NO: 347866 - RNA, 24 nt, Human herpesvirus 7
cccaaaaauaaguccgugugcaaa

SEQ ID NO: 347867 - RNA, 13 nt, Human herpesvirus 7
cccagaaauuuca

SEQ ID NO: 347868 - RNA, 12 nt, Human herpesvirus 7
cccagaagaaug

SEQ ID NO: 347869 - RNA, 19 nt, Human herpesvirus 7
cccagagcuaaaacaugga

SEQ ID NO: 347870 - RNA, 15 nt, Human herpesvirus 7
cccagucccaagaga

SEQ ID NO: 347871 - RNA, 21 nt, Human herpesvirus 7
cccagucccaagagacuccaa

SEQ ID NO: 347872 - RNA, 15 nt, Human herpesvirus 7
cccaugaacacugcu

SEQ ID NO: 347873 - RNA, 12 nt, Human herpesvirus 7
cccuauugcauc

SEQ ID NO: 347874 - RNA, 14 nt, Human herpesvirus 7
cccucuaguggcaa

SEQ ID NO: 347875 - RNA, 15 nt, Human herpesvirus 7
cccugucacacuuau

SEQ ID NO: 347876 - RNA, 21 nt, Human herpesvirus 7
ccgauaagaaaguuguacuca

SEQ ID NO: 347877 - RNA, 16 nt, Human herpesvirus 7
ccgaucuaaagacacu

SEQ ID NO: 347878 - RNA, 23 nt, Human herpesvirus 7
ccgcagacuuucgugucacagau

SEQ ID NO: 347879 - RNA, 13 nt, Human herpesvirus 7
ccgcauaaaucau

SEQ ID NO: 347880 - RNA, 19 nt, Human herpesvirus 7
ccgccuggccagcagugug

SEQ ID NO: 347881 - RNA, 13 nt, Human herpesvirus 7
ccggaccauuucc

SEQ ID NO: 347882 - RNA, 18 nt, Human herpesvirus 7
ccggauguaggugcugca

SEQ ID NO: 347883 - RNA, 21 nt, Human herpesvirus 7
ccggauguaggugcugcagca

SEQ ID NO: 347884 - RNA, 17 nt, Human herpesvirus 7
ccggggacauuccucau

SEQ ID NO: 347885 - RNA, 18 nt, Human herpesvirus 7
ccggggacauuccucauc

SEQ ID NO: 347886 - RNA, 19 nt, Human herpesvirus 7
ccggguaacgcaucuccac

SEQ ID NO: 347887 - RNA, 12 nt, Human herpesvirus 7
ccgggugcugcg

SEQ ID NO: 347888 - RNA, 14 nt, Human herpesvirus 7
ccgggugcugcgua

SEQ ID NO: 347889 - RNA, 19 nt, Human herpesvirus 7
ccgguauuuuguuuugcau

SEQ ID NO: 347890 - RNA, 23 nt, Human herpesvirus 7
ccgucagcaucucagaaguuuca

SEQ ID NO: 347891 - RNA, 18 nt, Human herpesvirus 7
ccgucuuuugauuuugcc

SEQ ID NO: 347892 - RNA, 22 nt, Human herpesvirus 7
ccgugacaaagcauacuuuaaa

SEQ ID NO: 347893 - RNA, 17 nt, Human herpesvirus 7
ccgugugcaaaacuggg

SEQ ID NO: 347894 - RNA, 18 nt, Human herpesvirus 7
ccguugaguugcugcugu

SEQ ID NO: 347895 - RNA, 12 nt, Human herpesvirus 7
ccguuguuaaaa

SEQ ID NO: 347896 - RNA, 15 nt, Human herpesvirus 7
ccguuuaugaacaag

SEQ ID NO: 347897 - RNA, 14 nt, Human herpesvirus 7
ccguuucauuuaaa

SEQ ID NO: 347898 - RNA, 19 nt, Human herpesvirus 7
ccuaacaauaaaguuucca

SEQ ID NO: 347899 - RNA, 19 nt, Human herpesvirus 7
ccuaagcuuuucaggcuau

SEQ ID NO: 347900 - RNA, 16 nt, Human herpesvirus 7
ccuaaucuaacaguuu

SEQ ID NO: 347901 - RNA, 15 nt, Human herpesvirus 7
ccuaucaaaauucca

SEQ ID NO: 347902 - RNA, 17 nt, Human herpesvirus 7
ccuaucaaauuuaucuc

SEQ ID NO: 347903 - RNA, 16 nt, Human herpesvirus 7
ccuaucgagacgccag

SEQ ID NO: 347904 - RNA, 22 nt, Human herpesvirus 7
ccuaugacugagaaaaacagac

SEQ ID NO: 347905 - RNA, 16 nt, Human herpesvirus 7
ccuaugauacaaucga

SEQ ID NO: 347906 - RNA, 22 nt, Human herpesvirus 7
ccuauuaagcagcuugaugaau

SEQ ID NO: 347907 - RNA, 14 nt, Human herpesvirus 7
ccuauuacgccaaa

SEQ ID NO: 347908 - RNA, 18 nt, Human herpesvirus 7
ccuauucaaacgcuugaa

SEQ ID NO: 347909 - RNA, 16 nt, Human herpesvirus 7
ccucauggccagugaa

SEQ ID NO: 347910 - RNA, 17 nt, Human herpesvirus 7
ccucccgggcacacuuu

SEQ ID NO: 347911 - RNA, 22 nt, Human herpesvirus 7
ccugaaucaaaauccuggauuu

SEQ ID NO: 347912 - RNA, 19 nt, Human herpesvirus 7
ccugauaaauacucaugaa

SEQ ID NO: 347913 - RNA, 15 nt, Human herpesvirus 7
ccugccagagaacca

SEQ ID NO: 347914 - RNA, 18 nt, Human herpesvirus 7
ccugcuauucauuucacg

SEQ ID NO: 347915 - RNA, 22 nt, Human herpesvirus 7
ccugcuauucauuucacggaaa

SEQ ID NO: 347916 - RNA, 16 nt, Human herpesvirus 7
ccugcuugcacaaaga

SEQ ID NO: 347917 - RNA, 16 nt, Human herpesvirus 7
ccuggaaagcucauuu

SEQ ID NO: 347918 - RNA, 18 nt, Human herpesvirus 7
ccuggaacguccucugga

SEQ ID NO: 347919 - RNA, 14 nt, Human herpesvirus 7
ccuggagaagacaa

SEQ ID NO: 347920 - RNA, 21 nt, Human herpesvirus 7
ccuggaguuagcgaggcauuu

SEQ ID NO: 347921 - RNA, 19 nt, Human herpesvirus 7
ccuguacuguugcuaauua

SEQ ID NO: 347922 - RNA, 15 nt, Human herpesvirus 7
ccuguuaaaagugaa

SEQ ID NO: 347923 - RNA, 22 nt, Human herpesvirus 7
ccuguuugacguaauuacccag

SEQ ID NO: 347924 - RNA, 14 nt, Human herpesvirus 7
ccuuaacauacuga

SEQ ID NO: 347925 - RNA, 14 nt, Human herpesvirus 7
ccuuacaacaaaga

SEQ ID NO: 347926 - RNA, 14 nt, Human herpesvirus 7
cuaucaaaauucca

SEQ ID NO: 347927 - RNA, 15 nt, Human herpesvirus 7
cuaucaaaauuccau

SEQ ID NO: 347928 - RNA, 23 nt, Human herpesvirus 7
cuaucaagauaagcaauacauuc

SEQ ID NO: 347929 - RNA, 17 nt, Human herpesvirus 7
cuaucaaggucuuucau

SEQ ID NO: 347930 - RNA, 18 nt, Human herpesvirus 7
cuaucagcgacagguguu

SEQ ID NO: 347931 - RNA, 19 nt, Human herpesvirus 7
cuaucgucaucaucccaaa

SEQ ID NO: 347932 - RNA, 20 nt, Human herpesvirus 7
cuaucuccuauguugcaaug

SEQ ID NO: 347933 - RNA, 13 nt, Human herpesvirus 7
cuaugacuuugaa

SEQ ID NO: 347934 - RNA, 15 nt, Human herpesvirus 7
cuaugacuuugaauc

SEQ ID NO: 347935 - RNA, 17 nt, Human herpesvirus 7
cuaugcaaagcaagcau

SEQ ID NO: 347936 - RNA, 20 nt, Human herpesvirus 7
cuaugccggccgggugcugc

SEQ ID NO: 347937 - RNA, 23 nt, Human herpesvirus 7
cuaugguggcauauaugaaucaa

SEQ ID NO: 347938 - RNA, 18 nt, Human herpesvirus 7
cuauguauaaucaagucu

SEQ ID NO: 347939 - RNA, 13 nt, Human herpesvirus 7
cuauguguuuaca

SEQ ID NO: 347940 - RNA, 17 nt, Human herpesvirus 7
cuauguuuggcaacucu

SEQ ID NO: 347941 - RNA, 16 nt, Human herpesvirus 7
cuauuaaauauuuaga

SEQ ID NO: 347942 - RNA, 11 nt, Human herpesvirus 7
cuauuacacag

SEQ ID NO: 347943 - RNA, 17 nt, Human herpesvirus 7
cuauuauuaaagcuuuc

SEQ ID NO: 347944 - RNA, 19 nt, Human herpesvirus 7
cuauuauuaaagcuuucaa

SEQ ID NO: 347945 - RNA, 22 nt, Human herpesvirus 7
cuauucacgcuuccaucacaaa

SEQ ID NO: 347946 - RNA, 18 nt, Human herpesvirus 7
cuauucucauagauuuca

SEQ ID NO: 347947 - RNA, 14 nt, Human herpesvirus 7
cuauugaaugugga

SEQ ID NO: 347948 - RNA, 22 nt, Human herpesvirus 7
cuauuggaguugcacuccuaga

SEQ ID NO: 347949 - RNA, 18 nt, Human herpesvirus 7
cuauuuaaucuaugcaaa

SEQ ID NO: 347950 - RNA, 17 nt, Human herpesvirus 7
cuauuucugucaucuua

SEQ ID NO: 347951 - RNA, 20 nt, Human herpesvirus 7
cucaaaaaugauaugacaug

SEQ ID NO: 347952 - RNA, 19 nt, Human herpesvirus 7
cucaaaauuauaacuuuau

SEQ ID NO: 347953 - RNA, 17 nt, Human herpesvirus 7
cucaaccggcaaucaua

SEQ ID NO: 347954 - RNA, 22 nt, Human herpesvirus 7
cucaaccggcaaucauaauuca

SEQ ID NO: 347955 - RNA, 12 nt, Human herpesvirus 7
cucaagcacaau

SEQ ID NO: 347956 - RNA, 16 nt, Human herpesvirus 7
cucaagcacaaucacg

SEQ ID NO: 347957 - RNA, 21 nt, Human herpesvirus 7
cucaagcacaaucacgugauu

SEQ ID NO: 347958 - RNA, 18 nt, Human herpesvirus 7
cucaauaaaaaugucucu

SEQ ID NO: 347959 - RNA, 17 nt, Human herpesvirus 7
cucaauaaagauugauc

SEQ ID NO: 347960 - RNA, 18 nt, Human herpesvirus 7
cucaauaaagauugauca

SEQ ID NO: 347961 - RNA, 20 nt, Human herpesvirus 7
cucaauaaagauugaucacu

SEQ ID NO: 347962 - RNA, 22 nt, Human herpesvirus 7
cucaauaguuuuacaaagaaca

SEQ ID NO: 347963 - RNA, 23 nt, Human herpesvirus 7
cucaauaguuuuacaaagaacau

SEQ ID NO: 347964 - RNA, 18 nt, Human herpesvirus 7
cucaaugaaugcaagcaa

SEQ ID NO: 347965 - RNA, 22 nt, Human herpesvirus 7
cucaauuuuucgcugaagaaca

SEQ ID NO: 347966 - RNA, 23 nt, Human herpesvirus 7
cucaauuuuucgcugaagaacau

SEQ ID NO: 347967 - RNA, 19 nt, Human herpesvirus 7
cucacaauguuuucucuau

SEQ ID NO: 347968 - RNA, 23 nt, Human herpesvirus 7
cucacuucuaaaagcugcaugug

SEQ ID NO: 347969 - RNA, 16 nt, Human herpesvirus 7
cucaugcgauaucuga

SEQ ID NO: 347970 - RNA, 22 nt, Human herpesvirus 7
cucauguaauuaggaaucagac

SEQ ID NO: 347971 - RNA, 13 nt, Human herpesvirus 7
cucauuagaaaca

SEQ ID NO: 347972 - RNA, 22 nt, Human herpesvirus 7
cucauuagaaacaaucccagaa

SEQ ID NO: 347973 - RNA, 18 nt, Human herpesvirus 7
cuccaaaguagaacuuga

SEQ ID NO: 347974 - RNA, 15 nt, Human herpesvirus 7
cuccaaaucaaaaug

SEQ ID NO: 347975 - RNA, 24 nt, Human herpesvirus 7
cuccaaucgagcgacagucaccaa

SEQ ID NO: 347976 - RNA, 16 nt, Human herpesvirus 7
cuccauucuaaaccaa

SEQ ID NO: 347977 - RNA, 21 nt, Human herpesvirus 7
cucccgcagagauuaccugca

SEQ ID NO: 347978 - RNA, 14 nt, Human herpesvirus 7
cuccuaacuauaau

SEQ ID NO: 347979 - RNA, 20 nt, Human herpesvirus 7
cuccucaaccggcaaucaua

SEQ ID NO: 347980 - RNA, 16 nt, Human herpesvirus 7
cuccuugccugcaauu

SEQ ID NO: 347981 - RNA, 12 nt, Human herpesvirus 7
cucgaaacuggc

SEQ ID NO: 347982 - RNA, 18 nt, Human herpesvirus 7
cucgaagaauucaucuua

SEQ ID NO: 347983 - RNA, 23 nt, Human herpesvirus 7
cucgaaggagagcccagucccaa

SEQ ID NO: 347984 - RNA, 17 nt, Human herpesvirus 7
cucgaugcuucaauuca

SEQ ID NO: 347985 - RNA, 16 nt, Human herpesvirus 7
cucgauuaucaucagg

SEQ ID NO: 347986 - RNA, 16 nt, Human herpesvirus 7
cucgcaacuucugaua

SEQ ID NO: 347987 - RNA, 18 nt, Human herpesvirus 7
cucuaaacaaacaaugag

SEQ ID NO: 347988 - RNA, 23 nt, Human herpesvirus 7
cucuacaaacagaagcugacuuu

SEQ ID NO: 347989 - RNA, 17 nt, Human herpesvirus 7
cucuagaaaaucuacca

SEQ ID NO: 347990 - RNA, 18 nt, Human herpesvirus 7
cucuagaaaaucuaccaa

SEQ ID NO: 347991 - RNA, 17 nt, Human herpesvirus 7
cucuagaacaaacugua

SEQ ID NO: 347992 - RNA, 16 nt, Human herpesvirus 7
cucuauaccgcuucuu

SEQ ID NO: 347993 - RNA, 20 nt, Human herpesvirus 7
cucuaucgucaucaucccaa

SEQ ID NO: 347994 - RNA, 12 nt, Human herpesvirus 7
cucuauuacaca

SEQ ID NO: 347995 - RNA, 13 nt, Human herpesvirus 7
cucucaaucaaaa

SEQ ID NO: 347996 - RNA, 17 nt, Human herpesvirus 7
cucucgcaacuucugau

SEQ ID NO: 347997 - RNA, 14 nt, Human herpesvirus 7
cucucuauuacaca

SEQ ID NO: 347998 - RNA, 18 nt, Human herpesvirus 7
cucucuauuacacaggaa

SEQ ID NO: 347999 - RNA, 20 nt, Human herpesvirus 7
cucugaucuaaaguauggaa

SEQ ID NO: 348000 - RNA, 18 nt, Human herpesvirus 7
cucuguucccacugggac

SEQ ID NO: 348001 - RNA, 20 nt, Human herpesvirus 7
cucuguucccacugggacaa

SEQ ID NO: 348002 - RNA, 20 nt, Human herpesvirus 7
cucuuccuuucuuugagcua

SEQ ID NO: 348003 - RNA, 19 nt, Human herpesvirus 7
cucuugaagaacaacauga

SEQ ID NO: 348004 - RNA, 20 nt, Human herpesvirus 7
cucuugaagaacaacaugaa

SEQ ID NO: 348005 - RNA, 17 nt, Human herpesvirus 7
cucuugaggaaaugucu

SEQ ID NO: 348006 - RNA, 18 nt, Human herpesvirus 7
cugaaaaucuccuugaua

SEQ ID NO: 348007 - RNA, 13 nt, Human herpesvirus 7
cugaaaccaaagc

SEQ ID NO: 348008 - RNA, 17 nt, Human herpesvirus 7
cugaaagccgcugccuu

SEQ ID NO: 348009 - RNA, 11 nt, Human herpesvirus 7
cugaaagugac

SEQ ID NO: 348010 - RNA, 16 nt, Human herpesvirus 7
cugaaggcugcuuuuu

SEQ ID NO: 348011 - RNA, 18 nt, Human herpesvirus 7
cugaauaauaugcuuuca

SEQ ID NO: 348012 - RNA, 16 nt, Human herpesvirus 7
cugaauccgcauuuga

SEQ ID NO: 348013 - RNA, 11 nt, Human herpesvirus 7
cugaaugucaa

SEQ ID NO: 348014 - RNA, 18 nt, Human herpesvirus 7
cugaauuaagguggaaau

SEQ ID NO: 348015 - RNA, 18 nt, Human herpesvirus 7
cugaauuaucgcaauuaa

SEQ ID NO: 348016 - RNA, 14 nt, Human herpesvirus 7
cugaauuuuacacc

SEQ ID NO: 348017 - RNA, 23 nt, Human herpesvirus 7
cugacauuggaacuuuaugcaaa

SEQ ID NO: 348018 - RNA, 21 nt, Human herpesvirus 7
cugacuccuuuuuuucugcuc

SEQ ID NO: 348019 - RNA, 17 nt, Human herpesvirus 7
cugagaucuuccaauuc

SEQ ID NO: 348020 - RNA, 23 nt, Human herpesvirus 7
cugauaaaaaaagaaaagagaaa

SEQ ID NO: 348021 - RNA, 13 nt, Human herpesvirus 7
cugauaucuuaaa

SEQ ID NO: 348022 - RNA, 15 nt, Human herpesvirus 7
cugauucugccauua

SEQ ID NO: 348023 - RNA, 15 nt, Human herpesvirus 7
cugauucuuauucua

SEQ ID NO: 348024 - RNA, 18 nt, Human herpesvirus 7
cugauucuuauucuacac

SEQ ID NO: 348025 - RNA, 19 nt, Human herpesvirus 7
cugauucuuauucuacaca

SEQ ID NO: 348026 - RNA, 19 nt, Human herpesvirus 7
cugauuuuuaaacuuguga

SEQ ID NO: 348027 - RNA, 15 nt, Human herpesvirus 7
cugcaaaaaaccauu

SEQ ID NO: 348028 - RNA, 17 nt, Human herpesvirus 7
cugcaacaaauuaaaua

SEQ ID NO: 348029 - RNA, 24 nt, Human herpesvirus 7
cugcaaccugauaaauacucauga

SEQ ID NO: 348030 - RNA, 21 nt, Human herpesvirus 7
cugcauguguacuaaagccaa

SEQ ID NO: 348031 - RNA, 14 nt, Human herpesvirus 7
cugccaccauuucu

SEQ ID NO: 348032 - RNA, 15 nt, Human herpesvirus 7
cugccagagaaccac

SEQ ID NO: 348033 - RNA, 14 nt, Human herpesvirus 7
cugccauuacugau

SEQ ID NO: 348034 - RNA, 21 nt, Human herpesvirus 7
cugccucccgggcacacuuug

SEQ ID NO: 348035 - RNA, 22 nt, Human herpesvirus 7
cugccucccgggcacacuuuga

SEQ ID NO: 348036 - RNA, 13 nt, Human herpesvirus 7
cugcuaaaaccau

SEQ ID NO: 348037 - RNA, 16 nt, Human herpesvirus 7
cugcuauucauuucac

SEQ ID NO: 348038 - RNA, 13 nt, Human herpesvirus 7
cugcucaaaucaa

SEQ ID NO: 348039 - RNA, 19 nt, Human herpesvirus 7
cugcugugagugaacauuu

SEQ ID NO: 348040 - RNA, 22 nt, Human herpesvirus 7
cugcugugagugaacauuugaa

SEQ ID NO: 348041 - RNA, 14 nt, Human herpesvirus 7
cugcuuaaauguaa

SEQ ID NO: 348042 - RNA, 12 nt, Human herpesvirus 7
cugcuugcacaa

SEQ ID NO: 348043 - RNA, 15 nt, Human herpesvirus 7
cugcuugcacaaaga

SEQ ID NO: 348044 - RNA, 16 nt, Human herpesvirus 7
cuggaaaacauuucag

SEQ ID NO: 348045 - RNA, 20 nt, Human herpesvirus 7
cuggaaaagggagaucaauu

SEQ ID NO: 348046 - RNA, 23 nt, Human herpesvirus 7
cuggaaagcuugugaagacuaca

SEQ ID NO: 348047 - RNA, 19 nt, Human herpesvirus 7
cuggaaaugucaagaacuu

SEQ ID NO: 348048 - RNA, 23 nt, Human herpesvirus 7
cuggaaaugucaagaacuucaga

SEQ ID NO: 348049 - RNA, 17 nt, Human herpesvirus 7
cuggaauauuugcugag

SEQ ID NO: 348050 - RNA, 17 nt, Human herpesvirus 7
cuggaaucgaauacagu

SEQ ID NO: 348051 - RNA, 15 nt, Human herpesvirus 7
cuggacacaaucagc

SEQ ID NO: 348052 - RNA, 23 nt, Human herpesvirus 7
cuggagaagacaacgacuacagg

SEQ ID NO: 348053 - RNA, 16 nt, Human herpesvirus 7
cuggaucuucugcuaa

SEQ ID NO: 348054 - RNA, 20 nt, Human herpesvirus 7
cuggaugauguuauacauaa

SEQ ID NO: 348055 - RNA, 14 nt, Human herpesvirus 7
cuggauguauaaau

SEQ ID NO: 348056 - RNA, 21 nt, Human herpesvirus 7
cuggauuaacauuaaccacaa

SEQ ID NO: 348057 - RNA, 16 nt, Human herpesvirus 7
cuggcaacaguucaaa

SEQ ID NO: 348058 - RNA, 22 nt, Human herpesvirus 7
cuggcacauuauaagaaucugu

SEQ ID NO: 348059 - RNA, 18 nt, Human herpesvirus 7
cuggcucaagcacaauca

SEQ ID NO: 348060 - RNA, 18 nt, Human herpesvirus 7
cugggagcaaugcaugau

SEQ ID NO: 348061 - RNA, 22 nt, Human herpesvirus 7
cugggagcaaugcaugaugcac

SEQ ID NO: 348062 - RNA, 16 nt, Human herpesvirus 7
cugguaaaaagacaau

SEQ ID NO: 348063 - RNA, 21 nt, Human herpesvirus 7
cugguguuuuguauacaacuu

SEQ ID NO: 348064 - RNA, 17 nt, Human herpesvirus 7
cuguaaaagaaaaucuc

SEQ ID NO: 348065 - RNA, 13 nt, Human herpesvirus 7
cuguaacagaccu

SEQ ID NO: 348066 - RNA, 13 nt, Human herpesvirus 7
cuguaaucauaua

SEQ ID NO: 348067 - RNA, 22 nt, Human herpesvirus 7
cuguacaaauuucuccacaguc

SEQ ID NO: 348068 - RNA, 18 nt, Human herpesvirus 7
cuguacugaaaccaaagc

SEQ ID NO: 348069 - RNA, 15 nt, Human herpesvirus 7
cuguacuguugcuaa

SEQ ID NO: 348070 - RNA, 17 nt, Human herpesvirus 7
cuguacuguugcuaauu

SEQ ID NO: 348071 - RNA, 15 nt, Human herpesvirus 7
cuguacuuuugauca

SEQ ID NO: 348072 - RNA, 18 nt, Human herpesvirus 7
cuguagaaaauguuuuga

SEQ ID NO: 348073 - RNA, 12 nt, Human herpesvirus 7
cuguagacauuu

SEQ ID NO: 348074 - RNA, 19 nt, Human herpesvirus 7
cuguagaugcaugcuaaua

SEQ ID NO: 348075 - RNA, 15 nt, Human herpesvirus 7
cuguauaucuauuac

SEQ ID NO: 348076 - RNA, 19 nt, Human herpesvirus 7
cuguaugcaagaaagucca

SEQ ID NO: 348077 - RNA, 22 nt, Human herpesvirus 7
cuguauuuguugaucuucaaua

SEQ ID NO: 348078 - RNA, 23 nt, Human herpesvirus 7
cugucaaaagacgcuugcuauuu

SEQ ID NO: 348079 - RNA, 17 nt, Human herpesvirus 7
cugucacgcaagucaca

SEQ ID NO: 348080 - RNA, 14 nt, Human herpesvirus 7
cugucacuguccaa

SEQ ID NO: 348081 - RNA, 15 nt, Human herpesvirus 7
cugucauaaucugau

SEQ ID NO: 348082 - RNA, 20 nt, Human herpesvirus 7
cugucauggacggcauuuaa

SEQ ID NO: 348083 - RNA, 17 nt, Human herpesvirus 7
cugucggcaauacuagu

SEQ ID NO: 348084 - RNA, 22 nt, Human herpesvirus 7
cugucguguaagaugucuaaaa

SEQ ID NO: 348085 - RNA, 15 nt, Human herpesvirus 7
cugugauauuuggua

SEQ ID NO: 348086 - RNA, 18 nt, Human herpesvirus 7
cugugcaugaaaucuuga

SEQ ID NO: 348087 - RNA, 14 nt, Human herpesvirus 7
cugugucaucacag

SEQ ID NO: 348088 - RNA, 16 nt, Human herpesvirus 7
cuguguccucaauuag

SEQ ID NO: 348089 - RNA, 14 nt, Human herpesvirus 7
cugugugcaaugau

SEQ ID NO: 348090 - RNA, 21 nt, Human herpesvirus 7
cugugugcaaugauguuugca

SEQ ID NO: 348091 - RNA, 19 nt, Human herpesvirus 7
cuguuacaacuuugccaau

SEQ ID NO: 348092 - RNA, 19 nt, Human herpesvirus 7
cuguugauacaacuaaaaa

SEQ ID NO: 348093 - RNA, 14 nt, Human herpesvirus 7
cuguuuacacauua

SEQ ID NO: 348094 - RNA, 14 nt, Human herpesvirus 7
cuguuucagaguau

SEQ ID NO: 348095 - RNA, 22 nt, Human herpesvirus 7
cuguuuguaaggccaaagguaa

SEQ ID NO: 348096 - RNA, 18 nt, Human herpesvirus 7
cuguuuucgcuguugaua

SEQ ID NO: 348097 - RNA, 20 nt, Human herpesvirus 7
cuuaaaaaaaggccuuguaa

SEQ ID NO: 348098 - RNA, 16 nt, Human herpesvirus 7
cuuaaaaacaguaauu

SEQ ID NO: 348099 - RNA, 20 nt, Human herpesvirus 7
cuuaaaaacaguaauuuagu

SEQ ID NO: 348100 - RNA, 17 nt, Human herpesvirus 7
cuuaaaauacuaaucaa

SEQ ID NO: 348101 - RNA, 16 nt, Human herpesvirus 7
caugagaacggcgcga

SEQ ID NO: 348102 - RNA, 22 nt, Human herpesvirus 7
caugagaacggcgcgacugugc

SEQ ID NO: 348103 - RNA, 15 nt, Human herpesvirus 7
caugaucuccguuga

SEQ ID NO: 348104 - RNA, 16 nt, Human herpesvirus 7
caugauugguaaaaaa

SEQ ID NO: 348105 - RNA, 18 nt, Human herpesvirus 7
caugauuucaauaaucaa

SEQ ID NO: 348106 - RNA, 15 nt, Human herpesvirus 7
caugcaauuuucacc

SEQ ID NO: 348107 - RNA, 17 nt, Human herpesvirus 7
caugcauauuugaacau

SEQ ID NO: 348108 - RNA, 19 nt, Human herpesvirus 7
caugccggacaguuugcaa

SEQ ID NO: 348109 - RNA, 18 nt, Human herpesvirus 7
caugccuauucaaacgcu

SEQ ID NO: 348110 - RNA, 18 nt, Human herpesvirus 7
caugccuugccaaaagcu

SEQ ID NO: 348111 - RNA, 15 nt, Human herpesvirus 7
caugcuuacagugaa

SEQ ID NO: 348112 - RNA, 16 nt, Human herpesvirus 7
cauggacggcauuuaa

SEQ ID NO: 348113 - RNA, 13 nt, Human herpesvirus 7
cauggagcacaau

SEQ ID NO: 348114 - RNA, 13 nt, Human herpesvirus 7
cauggauuucuua

SEQ ID NO: 348115 - RNA, 16 nt, Human herpesvirus 7
cauggcuaacgcuaaa

SEQ ID NO: 348116 - RNA, 15 nt, Human herpesvirus 7
caugguucguacagu

SEQ ID NO: 348117 - RNA, 22 nt, Human herpesvirus 7
cauguagaaacucacaauguuu

SEQ ID NO: 348118 - RNA, 21 nt, Human herpesvirus 7
cauguauugucuuacagcacu

SEQ ID NO: 348119 - RNA, 19 nt, Human herpesvirus 7
caugucuuuuaguuuucau

SEQ ID NO: 348120 - RNA, 23 nt, Human herpesvirus 7
cauguuucaagaauggcugauga

SEQ ID NO: 348121 - RNA, 14 nt, Human herpesvirus 7
cauuaaaaugauua

SEQ ID NO: 348122 - RNA, 23 nt, Human herpesvirus 7
cauuaacuuuuauaaaauaugga

SEQ ID NO: 348123 - RNA, 22 nt, Human herpesvirus 7
cauuaauaaaaagcccaugaac

SEQ ID NO: 348124 - RNA, 14 nt, Human herpesvirus 7
cauuacugaucccu

SEQ ID NO: 348125 - RNA, 15 nt, Human herpesvirus 7
cauuacugaucccua

SEQ ID NO: 348126 - RNA, 17 nt, Human herpesvirus 7
cauuacuggauguauaa

SEQ ID NO: 348127 - RNA, 22 nt, Human herpesvirus 7
cauuauaaauguaacuuucauc

SEQ ID NO: 348128 - RNA, 14 nt, Human herpesvirus 7
cauuauauccaaua

SEQ ID NO: 348129 - RNA, 14 nt, Human herpesvirus 7
cauuauuuguucaa

SEQ ID NO: 348130 - RNA, 16 nt, Human herpesvirus 7
cauucaauaauggcau

SEQ ID NO: 348131 - RNA, 21 nt, Human herpesvirus 7
cauuccuuggaaaaaugaugc

SEQ ID NO: 348132 - RNA, 22 nt, Human herpesvirus 7
cauuccuuggaaaaaugaugcu

SEQ ID NO: 348133 - RNA, 12 nt, Human herpesvirus 7
cauucgaucuaa

SEQ ID NO: 348134 - RNA, 13 nt, Human herpesvirus 7
cauucgaugucag

SEQ ID NO: 348135 - RNA, 19 nt, Human herpesvirus 7
cauucgcaaggaauaugaa

SEQ ID NO: 348136 - RNA, 21 nt, Human herpesvirus 7
cauucuccaguggcaguacua

SEQ ID NO: 348137 - RNA, 20 nt, Human herpesvirus 7
cauucuuuucaaugcaacuu

SEQ ID NO: 348138 - RNA, 13 nt, Human herpesvirus 7
cauugaaaaagca

SEQ ID NO: 348139 - RNA, 15 nt, Human herpesvirus 7
cauugaaaaugcauu

SEQ ID NO: 348140 - RNA, 16 nt, Human herpesvirus 7
cauugaaaaugcauug

SEQ ID NO: 348141 - RNA, 13 nt, Human herpesvirus 7
cauugaaacucga

SEQ ID NO: 348142 - RNA, 15 nt, Human herpesvirus 7
cauugaaauucugug

SEQ ID NO: 348143 - RNA, 15 nt, Human herpesvirus 7
cauugacauguuucu

SEQ ID NO: 348144 - RNA, 21 nt, Human herpesvirus 7
cauugauccuccuugccugca

SEQ ID NO: 348145 - RNA, 20 nt, Human herpesvirus 7
cauugauuauaugcaucaaa

SEQ ID NO: 348146 - RNA, 18 nt, Human herpesvirus 7
cauuggaacuuuaugcaa

SEQ ID NO: 348147 - RNA, 13 nt, Human herpesvirus 7
cauugucaaagaa

SEQ ID NO: 348148 - RNA, 15 nt, Human herpesvirus 7
cauugucacugcaaa

SEQ ID NO: 348149 - RNA, 22 nt, Human herpesvirus 7
cauuguucaacuucaacauaca

SEQ ID NO: 348150 - RNA, 21 nt, Human herpesvirus 7
cauuuauguauuuuacuggau

SEQ ID NO: 348151 - RNA, 19 nt, Human herpesvirus 7
cauuucaaacaacauaucg

SEQ ID NO: 348152 - RNA, 22 nt, Human herpesvirus 7
cauuucagaugacaacucaaua

SEQ ID NO: 348153 - RNA, 20 nt, Human herpesvirus 7
cauuuccucuggaaaaggga

SEQ ID NO: 348154 - RNA, 19 nt, Human herpesvirus 7
cauuucgaauuuguucaau

SEQ ID NO: 348155 - RNA, 20 nt, Human herpesvirus 7
cauuucugaaaccuucgcaa

SEQ ID NO: 348156 - RNA, 14 nt, Human herpesvirus 7
cauuugaagauaag

SEQ ID NO: 348157 - RNA, 20 nt, Human herpesvirus 7
cauuugcauguugcuaguau

SEQ ID NO: 348158 - RNA, 14 nt, Human herpesvirus 7
cauuuguaugucua

SEQ ID NO: 348159 - RNA, 20 nt, Human herpesvirus 7
cauuuuaaaaaagacaccuu

SEQ ID NO: 348160 - RNA, 15 nt, Human herpesvirus 7
cauuuuaauauguga

SEQ ID NO: 348161 - RNA, 16 nt, Human herpesvirus 7
cauuuuuaaaacaaga

SEQ ID NO: 348162 - RNA, 13 nt, Human herpesvirus 7
cauuuuucuugcu

SEQ ID NO: 348163 - RNA, 21 nt, Human herpesvirus 7
ccaaaaaaacacaguauauaa

SEQ ID NO: 348164 - RNA, 15 nt, Human herpesvirus 7
ccaaaaagaaacuuu

SEQ ID NO: 348165 - RNA, 20 nt, Human herpesvirus 7
ccaaaaucagacaauuucac

SEQ ID NO: 348166 - RNA, 22 nt, Human herpesvirus 7
ccaaaaucagacaauuucacac

SEQ ID NO: 348167 - RNA, 18 nt, Human herpesvirus 7
ccaaaaucuauauuugau

SEQ ID NO: 348168 - RNA, 19 nt, Human herpesvirus 7
ccaaacaaaauuccaaaau

SEQ ID NO: 348169 - RNA, 21 nt, Human herpesvirus 7
ccaaacaggcauuuaagaauu

SEQ ID NO: 348170 - RNA, 18 nt, Human herpesvirus 7
ccaaacgcugacagucau

SEQ ID NO: 348171 - RNA, 22 nt, Human herpesvirus 7
caaggucuuucaugcauugcau

SEQ ID NO: 348172 - RNA, 23 nt, Human herpesvirus 7
caagguuaagugaaugugcuuua

SEQ ID NO: 348173 - RNA, 17 nt, Human herpesvirus 7
caaguagccgaaaaaga

SEQ ID NO: 348174 - RNA, 15 nt, Human herpesvirus 7
caagucacaauuaca

SEQ ID NO: 348175 - RNA, 16 nt, Human herpesvirus 7
caaguuucuucugggu

SEQ ID NO: 348176 - RNA, 15 nt, Human herpesvirus 7
caauaaaagauuuaa

SEQ ID NO: 348177 - RNA, 18 nt, Human herpesvirus 7
caauaaagaacaucuuga

SEQ ID NO: 348178 - RNA, 21 nt, Human herpesvirus 7
caauaaaguuuuguaacuaua

SEQ ID NO: 348179 - RNA, 16 nt, Human herpesvirus 7
caauaaaucuguaaaa

SEQ ID NO: 348180 - RNA, 14 nt, Human herpesvirus 7
caauaaaucuucau

SEQ ID NO: 348181 - RNA, 20 nt, Human herpesvirus 7
caauaacauuuuguaugaaa

SEQ ID NO: 348182 - RNA, 15 nt, Human herpesvirus 7
caauaauuucuauua

SEQ ID NO: 348183 - RNA, 21 nt, Human herpesvirus 7
caauacaaauuccugcuugca

SEQ ID NO: 348184 - RNA, 18 nt, Human herpesvirus 7
caauacaugaauuaucua

SEQ ID NO: 348185 - RNA, 14 nt, Human herpesvirus 7
caauacauucucaa

SEQ ID NO: 348186 - RNA, 14 nt, Human herpesvirus 7
caauagcauaugcu

SEQ ID NO: 348187 - RNA, 21 nt, Human herpesvirus 7
caauagguuccacacagggaa

SEQ ID NO: 348188 - RNA, 22 nt, Human herpesvirus 7
caauaguaauuggaguaaucaa

SEQ ID NO: 348189 - RNA, 20 nt, Human herpesvirus 7
caauauaaaagaaacuuuac

SEQ ID NO: 348190 - RNA, 14 nt, Human herpesvirus 7
caauauagacauuu

SEQ ID NO: 348191 - RNA, 14 nt, Human herpesvirus 7
caauaucccagaau

SEQ ID NO: 348192 - RNA, 12 nt, Human herpesvirus 7
caauaugcucac

SEQ ID NO: 348193 - RNA, 15 nt, Human herpesvirus 7
caaucacauacucua

SEQ ID NO: 348194 - RNA, 14 nt, Human herpesvirus 7
caaucaccaaagag

SEQ ID NO: 348195 - RNA, 14 nt, Human herpesvirus 7
caaucagcauuuac

SEQ ID NO: 348196 - RNA, 15 nt, Human herpesvirus 7
caaucagcauuuacc

SEQ ID NO: 348197 - RNA, 22 nt, Human herpesvirus 7
caaucauaauucaaucugcaaa

SEQ ID NO: 348198 - RNA, 16 nt, Human herpesvirus 7
caaucauaauuuucau

SEQ ID NO: 348199 - RNA, 17 nt, Human herpesvirus 7
caaucauaauuuucaug

SEQ ID NO: 348200 - RNA, 15 nt, Human herpesvirus 7
caaucccagaaauuu

SEQ ID NO: 348201 - RNA, 21 nt, Human herpesvirus 7
caaucccagaaauuucaaagg

SEQ ID NO: 348202 - RNA, 20 nt, Human herpesvirus 7
caaucgguaacaugucuuca

SEQ ID NO: 348203 - RNA, 22 nt, Human herpesvirus 7
caaucgguaacaugucuucaac

SEQ ID NO: 348204 - RNA, 20 nt, Human herpesvirus 7
caaucuacuguacuuuugau

SEQ ID NO: 348205 - RNA, 16 nt, Human herpesvirus 7
caaucuggacauuuca

SEQ ID NO: 348206 - RNA, 17 nt, Human herpesvirus 7
caaucuggacauuucaa

SEQ ID NO: 348207 - RNA, 16 nt, Human herpesvirus 7
caaucuuacaaaaagu

SEQ ID NO: 348208 - RNA, 22 nt, Human herpesvirus 7
caaugaacaaguuucaaaaagu

SEQ ID NO: 348209 - RNA, 22 nt, Human herpesvirus 7
caaugagacagcaacugugcau

SEQ ID NO: 348210 - RNA, 17 nt, Human herpesvirus 7
caaugauuuuucugcuu

SEQ ID NO: 348211 - RNA, 13 nt, Human herpesvirus 7
cagaaaaauccaa

SEQ ID NO: 348212 - RNA, 15 nt, Human herpesvirus 7
cagaaaaauccaaaa

SEQ ID NO: 348213 - RNA, 13 nt, Human herpesvirus 7
cagaaaauucuuu

SEQ ID NO: 348214 - RNA, 13 nt, Human herpesvirus 7
cagaaacauguau

SEQ ID NO: 348215 - RNA, 23 nt, Human herpesvirus 7
cagaaaugaaucugcacuaucuc

SEQ ID NO: 348216 - RNA, 21 nt, Human herpesvirus 7
cagaaauugaaaugagccuga

SEQ ID NO: 348217 - RNA, 20 nt, Human herpesvirus 7
cagaaauugaugaagacagc

SEQ ID NO: 348218 - RNA, 22 nt, Human herpesvirus 7
cagaaauugaugaagacagcuc

SEQ ID NO: 348219 - RNA, 22 nt, Human herpesvirus 7
cagaaauuguuccugugugcaa

SEQ ID NO: 348220 - RNA, 22 nt, Human herpesvirus 7
cagaaauuucaaaggaagacau

SEQ ID NO: 348221 - RNA, 16 nt, Human herpesvirus 7
cagaagaaacuugaaa

SEQ ID NO: 348222 - RNA, 21 nt, Human herpesvirus 7
cagaaguaacgcagacuaauc

SEQ ID NO: 348223 - RNA, 22 nt, Human herpesvirus 7
cagaaguaacgcagacuaauca

SEQ ID NO: 348224 - RNA, 15 nt, Human herpesvirus 7
cagaaguuucaauug

SEQ ID NO: 348225 - RNA, 13 nt, Human herpesvirus 7
cagaauacuacuc

SEQ ID NO: 348226 - RNA, 19 nt, Human herpesvirus 7
cagaaugauaauuucuaua

SEQ ID NO: 348227 - RNA, 14 nt, Human herpesvirus 7
cagaauguuuauau

SEQ ID NO: 348228 - RNA, 20 nt, Human herpesvirus 7
cagacaccgucauuucgcag

SEQ ID NO: 348229 - RNA, 23 nt, Human herpesvirus 7
cagacagcuguauaucuauuaca

SEQ ID NO: 348230 - RNA, 13 nt, Human herpesvirus 7
cagaccagcacaa

SEQ ID NO: 348231 - RNA, 16 nt, Human herpesvirus 7
cagaccuaaacccaga

SEQ ID NO: 348232 - RNA, 18 nt, Human herpesvirus 7
cagacgaauuucuuugcg

SEQ ID NO: 348233 - RNA, 18 nt, Human herpesvirus 7
cagacuaaauauggagca

SEQ ID NO: 348234 - RNA, 15 nt, Human herpesvirus 7
cagagaaccacguga

SEQ ID NO: 348235 - RNA, 21 nt, Human herpesvirus 7
cagagaauuucuuuguuugcu

SEQ ID NO: 348236 - RNA, 19 nt, Human herpesvirus 7
cagagaugaaggaagcuuu

SEQ ID NO: 348237 - RNA, 13 nt, Human herpesvirus 7
cagagaugaucuu

SEQ ID NO: 348238 - RNA, 15 nt, Human herpesvirus 7
cagagauuaccugca

SEQ ID NO: 348239 - RNA, 16 nt, Human herpesvirus 7
cagagcgcuuugcuua

SEQ ID NO: 348240 - RNA, 22 nt, Human herpesvirus 7
cagaggaccaauucuuuuacaa

SEQ ID NO: 348241 - RNA, 18 nt, Human herpesvirus 7
cagagucaaaaagauuaa

SEQ ID NO: 348242 - RNA, 16 nt, Human herpesvirus 7
cagauauucuaacaaa

SEQ ID NO: 348243 - RNA, 19 nt, Human herpesvirus 7
cagauauucuaacaaauac

SEQ ID NO: 348244 - RNA, 23 nt, Human herpesvirus 7
cagauauucuaacaaauaccaug

SEQ ID NO: 348245 - RNA, 23 nt, Human herpesvirus 7
cagaugacuuucuucuagaaacu

SEQ ID NO: 348246 - RNA, 15 nt, Human herpesvirus 7
cagauucaguaucac

SEQ ID NO: 348247 - RNA, 21 nt, Human herpesvirus 7
cagauugaaauuccauacaaa

SEQ ID NO: 348248 - RNA, 23 nt, Human herpesvirus 7
cagauugaaauuccauacaaaga

SEQ ID NO: 348249 - RNA, 16 nt, Human herpesvirus 7
cagauuuaagugcaca

SEQ ID NO: 348250 - RNA, 23 nt, Human herpesvirus 7
cagauuucauguuuuaugacuca

SEQ ID NO: 348251 - RNA, 21 nt, Human herpesvirus 7
cagauuuuauuucagcuccau

SEQ ID NO: 348252 - RNA, 20 nt, Human herpesvirus 7
cagcaaaucugaaaauugcg

SEQ ID NO: 348253 - RNA, 19 nt, Human herpesvirus 7
cagcaaauucacgcucuca

SEQ ID NO: 348254 - RNA, 15 nt, Human herpesvirus 7
cagcagcugcuaaaa

SEQ ID NO: 348255 - RNA, 20 nt, Human herpesvirus 7
cagcaucccuauugcaucaa

SEQ ID NO: 348256 - RNA, 23 nt, Human herpesvirus 7
cagcauuauuguauaugaugaca

SEQ ID NO: 348257 - RNA, 16 nt, Human herpesvirus 7
cagcccaauguugccu

SEQ ID NO: 348258 - RNA, 21 nt, Human herpesvirus 7
cagccgcuuuacgaaacaauu

SEQ ID NO: 348259 - RNA, 24 nt, Human herpesvirus 7
cagccuacuuuuaaaauagccgau

SEQ ID NO: 348260 - RNA, 12 nt, Human herpesvirus 7
cagccuauucac

SEQ ID NO: 348261 - RNA, 13 nt, Human herpesvirus 7
cagccuauucaca

SEQ ID NO: 348262 - RNA, 12 nt, Human herpesvirus 7
cagccuguacaa

SEQ ID NO: 348263 - RNA, 15 nt, Human herpesvirus 7
cagcguucgugcuuu

SEQ ID NO: 348264 - RNA, 23 nt, Human herpesvirus 7
cagcuaacgauccaguacuugca

SEQ ID NO: 348265 - RNA, 12 nt, Human herpesvirus 7
cagcugcuaaaa

SEQ ID NO: 348266 - RNA, 12 nt, Human herpesvirus 7
cagcugugauau

SEQ ID NO: 348267 - RNA, 16 nt, Human herpesvirus 7
cagcuuauuauauaug

SEQ ID NO: 348268 - RNA, 18 nt, Human herpesvirus 7
cagcuucuaaaugugcua

SEQ ID NO: 348269 - RNA, 17 nt, Human herpesvirus 7
cagcuugaugaaucaaa

SEQ ID NO: 348270 - RNA, 21 nt, Human herpesvirus 7
cagcuuuuauuccuucccaac

SEQ ID NO: 348271 - RNA, 14 nt, Human herpesvirus 7
cagcuuuuggaauu

SEQ ID NO: 348272 - RNA, 21 nt, Human herpesvirus 7
caggaucuccuggaaagcuca

SEQ ID NO: 348273 - RNA, 18 nt, Human herpesvirus 7
caggcagccgauguccac

SEQ ID NO: 348274 - RNA, 23 nt, Human herpesvirus 7
caggccuguuucuugauguaaca

SEQ ID NO: 348275 - RNA, 14 nt, Human herpesvirus 7
caggcuuacacuau

SEQ ID NO: 348276 - RNA, 15 nt, Human herpesvirus 7
caggcuucuucugca

SEQ ID NO: 348277 - RNA, 22 nt, Human herpesvirus 7
cagggaaaaagcauaaagcacc

SEQ ID NO: 348278 - RNA, 18 nt, Human herpesvirus 7
cagggacguuucuagcaa

SEQ ID NO: 348279 - RNA, 19 nt, Human herpesvirus 7
cagggacguuucuagcaaa

SEQ ID NO: 348280 - RNA, 19 nt, Human herpesvirus 7
caggugacgucuagacauu

SEQ ID NO: 348281 - RNA, 20 nt, Human herpesvirus 7
caggugcucuaaauaucccu

SEQ ID NO: 348282 - RNA, 16 nt, Human herpesvirus 7
caguacuugcaucgaa

SEQ ID NO: 348283 - RNA, 16 nt, Human herpesvirus 7
caguaugaaaucaaaa

SEQ ID NO: 348284 - RNA, 17 nt, Human herpesvirus 7
caguaugaaaucaaaaa

SEQ ID NO: 348285 - RNA, 12 nt, Human herpesvirus 7
cagugauuggua

SEQ ID NO: 348286 - RNA, 21 nt, Human herpesvirus 7
cagugcucuuugucuuugcuc

SEQ ID NO: 348287 - RNA, 17 nt, Human herpesvirus 7
cagugggaaaguguaca

SEQ ID NO: 348288 - RNA, 16 nt, Human herpesvirus 7
caguguacuguugaua

SEQ ID NO: 348289 - RNA, 23 nt, Human herpesvirus 7
caguguuuuuuucugguaaaaag

SEQ ID NO: 348290 - RNA, 14 nt, Human herpesvirus 7
caguuagucugcug

SEQ ID NO: 348291 - RNA, 22 nt, Human herpesvirus 7
caguuauaugaaauuucaaaaa

SEQ ID NO: 348292 - RNA, 14 nt, Human herpesvirus 7
caguuaugaugauu

SEQ ID NO: 348293 - RNA, 16 nt, Human herpesvirus 7
caguucuaucucaaaa

SEQ ID NO: 348294 - RNA, 18 nt, Human herpesvirus 7
cauaaaaaaucuaauuaa

SEQ ID NO: 348295 - RNA, 19 nt, Human herpesvirus 7
cauaaaauguacaauuccu

SEQ ID NO: 348296 - RNA, 21 nt, Human herpesvirus 7
cauaaaccugcuaacaaguau

SEQ ID NO: 348297 - RNA, 12 nt, Human herpesvirus 7
cauaaacuauca

SEQ ID NO: 348298 - RNA, 15 nt, Human herpesvirus 7
cauaaagcaccaaaa

SEQ ID NO: 348299 - RNA, 19 nt, Human herpesvirus 7
cauaaagguaaaaauuuga

SEQ ID NO: 348300 - RNA, 20 nt, Human herpesvirus 7
cauaaagguaaaaauuugac

SEQ ID NO: 348301 - RNA, 12 nt, Human herpesvirus 7
cauaaaucaugu

SEQ ID NO: 348302 - RNA, 21 nt, Human herpesvirus 7
cauaaaugcuuaaauuuccau

SEQ ID NO: 348303 - RNA, 22 nt, Human herpesvirus 7
cauaaaugcuuaaauuuccauc

SEQ ID NO: 348304 - RNA, 18 nt, Human herpesvirus 7
cauaacaaaaaagguguu

SEQ ID NO: 348305 - RNA, 22 nt, Human herpesvirus 7
cauaacaaaaaagguguugaua

SEQ ID NO: 348306 - RNA, 15 nt, Human herpesvirus 7
cauaacccacuaaca

SEQ ID NO: 348307 - RNA, 16 nt, Human herpesvirus 7
cauaaguugacaaugu

SEQ ID NO: 348308 - RNA, 18 nt, Human herpesvirus 7
cauaaguugacaauguca

SEQ ID NO: 348309 - RNA, 23 nt, Human herpesvirus 7
cauaauccaaaccggccaaugau

SEQ ID NO: 348310 - RNA, 21 nt, Human herpesvirus 7
cauaauccucugacauuugaa

SEQ ID NO: 348311 - RNA, 23 nt, Human herpesvirus 7
cauaaugacacgacacugaaugu

SEQ ID NO: 348312 - RNA, 15 nt, Human herpesvirus 7
cauaauuacauugca

SEQ ID NO: 348313 - RNA, 16 nt, Human herpesvirus 7
cauaauuacauugcag

SEQ ID NO: 348314 - RNA, 12 nt, Human herpesvirus 7
cauaauucaaua

SEQ ID NO: 348315 - RNA, 15 nt, Human herpesvirus 7
cauaauucaauauag

SEQ ID NO: 348316 - RNA, 18 nt, Human herpesvirus 7
cauaauucaaucugcaaa

SEQ ID NO: 348317 - RNA, 20 nt, Human herpesvirus 7
cauaccauaaauaccaaaaa

SEQ ID NO: 348318 - RNA, 21 nt, Human herpesvirus 7
cauacgugcuuagacuuauca

SEQ ID NO: 348319 - RNA, 16 nt, Human herpesvirus 7
cauacucuuguugacu

SEQ ID NO: 348320 - RNA, 16 nt, Human herpesvirus 7
cauacuuucgcacgaa

SEQ ID NO: 348321 - RNA, 21 nt, Human herpesvirus 7
cauagcaggaagcacaaauca

SEQ ID NO: 348322 - RNA, 21 nt, Human herpesvirus 7
cauauaauaaaggaaagacaa

SEQ ID NO: 348323 - RNA, 15 nt, Human herpesvirus 7
cauauacaauaaugc

SEQ ID NO: 348324 - RNA, 18 nt, Human herpesvirus 7
cauauagauaaugaaguu

SEQ ID NO: 348325 - RNA, 18 nt, Human herpesvirus 7
caaaaacgguauguaaau

SEQ ID NO: 348326 - RNA, 23 nt, Human herpesvirus 7
caaaaaguagaaggaaaccaauu

SEQ ID NO: 348327 - RNA, 12 nt, Human herpesvirus 7
caaaaagugcau

SEQ ID NO: 348328 - RNA, 22 nt, Human herpesvirus 7
caaaaaucuuuuauaaauaguu

SEQ ID NO: 348329 - RNA, 20 nt, Human herpesvirus 7
caaaaaugauaugacauggc

SEQ ID NO: 348330 - RNA, 23 nt, Human herpesvirus 7
caaaaaugugcgccgaagaggga

SEQ ID NO: 348331 - RNA, 23 nt, Human herpesvirus 7
caaaaauuggacaccaguaugaa

SEQ ID NO: 348332 - RNA, 13 nt, Human herpesvirus 7
caaaacaaacucu

SEQ ID NO: 348333 - RNA, 17 nt, Human herpesvirus 7
caaaacaaacucugcuu

SEQ ID NO: 348334 - RNA, 12 nt, Human herpesvirus 7
caaaacaagaag

SEQ ID NO: 348335 - RNA, 22 nt, Human herpesvirus 7
caaaacaagaagcgagauuuau

SEQ ID NO: 348336 - RNA, 13 nt, Human herpesvirus 7
caaaacaaucggu

SEQ ID NO: 348337 - RNA, 21 nt, Human herpesvirus 7
caaaacaaucgguaacauguc

SEQ ID NO: 348338 - RNA, 22 nt, Human herpesvirus 7
caaaacaaucgguaacaugucu

SEQ ID NO: 348339 - RNA, 16 nt, Human herpesvirus 7
caaaacugcaaaucca

SEQ ID NO: 348340 - RNA, 15 nt, Human herpesvirus 7
caaaagaaaaaaucu

SEQ ID NO: 348341 - RNA, 14 nt, Human herpesvirus 7
caaaagccacagau

SEQ ID NO: 348342 - RNA, 12 nt, Human herpesvirus 7
caaaagcuugaa

SEQ ID NO: 348343 - RNA, 22 nt, Human herpesvirus 7
caaaagcuugaaaacuuaguga

SEQ ID NO: 348344 - RNA, 17 nt, Human herpesvirus 7
caaaagcuuugaucuac

SEQ ID NO: 348345 - RNA, 23 nt, Human herpesvirus 7
caaaauauaucugauguagauuu

SEQ ID NO: 348346 - RNA, 13 nt, Human herpesvirus 7
caaaauaugcaaa

SEQ ID NO: 348347 - RNA, 18 nt, Human herpesvirus 7
caaaauauuuaucugcau

SEQ ID NO: 348348 - RNA, 17 nt, Human herpesvirus 7
caaaauccuggauuuca

SEQ ID NO: 348349 - RNA, 14 nt, Human herpesvirus 7
caaaauuccauucg

SEQ ID NO: 348350 - RNA, 19 nt, Human herpesvirus 7
caaaauucugcuugucucu

SEQ ID NO: 348351 - RNA, 20 nt, Human herpesvirus 7
caaaauucugcuugucucug

SEQ ID NO: 348352 - RNA, 21 nt, Human herpesvirus 7
caaaauucugcuugucucugu

SEQ ID NO: 348353 - RNA, 13 nt, Human herpesvirus 7
caaaauuucauua

SEQ ID NO: 348354 - RNA, 20 nt, Human herpesvirus 7
caaaauuuuggauuguguaa

SEQ ID NO: 348355 - RNA, 22 nt, Human herpesvirus 7
caaaauuuuggauuguguaauu

SEQ ID NO: 348356 - RNA, 19 nt, Human herpesvirus 7
caaacaaaaauauuuugaa

SEQ ID NO: 348357 - RNA, 17 nt, Human herpesvirus 7
caaacaaauaauucaaa

SEQ ID NO: 348358 - RNA, 18 nt, Human herpesvirus 7
caaacaauaaauuuugaa

SEQ ID NO: 348359 - RNA, 22 nt, Human herpesvirus 7
caaacaaugagcaauucaugca

SEQ ID NO: 348360 - RNA, 14 nt, Human herpesvirus 7
caaacagaagcuga

SEQ ID NO: 348361 - RNA, 15 nt, Human herpesvirus 7
caaacaggcauuuaa

SEQ ID NO: 348362 - RNA, 19 nt, Human herpesvirus 7
caaacaguuuuauucccau

SEQ ID NO: 348363 - RNA, 18 nt, Human herpesvirus 7
auuagcuguucauaucaa

SEQ ID NO: 348364 - RNA, 14 nt, Human herpesvirus 7
auuaguucuggccg

SEQ ID NO: 348365 - RNA, 23 nt, Human herpesvirus 7
auuauaaaagauggaaaguuuau

SEQ ID NO: 348366 - RNA, 15 nt, Human herpesvirus 7
auuauacaaauccaa

SEQ ID NO: 348367 - RNA, 16 nt, Human herpesvirus 7
auuauacaaauccaag

SEQ ID NO: 348368 - RNA, 15 nt, Human herpesvirus 7
auuauacacugugaa

SEQ ID NO: 348369 - RNA, 19 nt, Human herpesvirus 7
auuauauaaacacuugcua

SEQ ID NO: 348370 - RNA, 19 nt, Human herpesvirus 7
auuauauaaguccuucaau

SEQ ID NO: 348371 - RNA, 22 nt, Human herpesvirus 7
auuauaucuaaaguggagacaa

SEQ ID NO: 348372 - RNA, 22 nt, Human herpesvirus 7
auuauaugcaucaaaacauauc

SEQ ID NO: 348373 - RNA, 24 nt, Human herpesvirus 7
auuauaugcaucaaaacauaucag

SEQ ID NO: 348374 - RNA, 22 nt, Human herpesvirus 7
auuaucgcguuuucaugcucau

SEQ ID NO: 348375 - RNA, 18 nt, Human herpesvirus 7
auuaugcguuaaugucuc

SEQ ID NO: 348376 - RNA, 13 nt, Human herpesvirus 7
auuauguccauaa

SEQ ID NO: 348377 - RNA, 15 nt, Human herpesvirus 7
auuauuagauuccau

SEQ ID NO: 348378 - RNA, 18 nt, Human herpesvirus 7
auuauuuaaacagcguuc

SEQ ID NO: 348379 - RNA, 16 nt, Human herpesvirus 7
auucaaaguacacgua

SEQ ID NO: 348380 - RNA, 15 nt, Human herpesvirus 7
auucaacaucuuuca

SEQ ID NO: 348381 - RNA, 18 nt, Human herpesvirus 7
auucaacuguguuuuaga

SEQ ID NO: 348382 - RNA, 17 nt, Human herpesvirus 7
auucaauaauggcauua

SEQ ID NO: 348383 - RNA, 22 nt, Human herpesvirus 7
auucaauaauggcauuacuaca

SEQ ID NO: 348384 - RNA, 16 nt, Human herpesvirus 7
auucaaucaccaaaga

SEQ ID NO: 348385 - RNA, 15 nt, Human herpesvirus 7
auucaaucuacugua

SEQ ID NO: 348386 - RNA, 19 nt, Human herpesvirus 7
auucacauugucacugcaa

SEQ ID NO: 348387 - RNA, 20 nt, Human herpesvirus 7
auucacgcucucaaucaaaa

SEQ ID NO: 348388 - RNA, 14 nt, Human herpesvirus 7
auucacgcuuccau

SEQ ID NO: 348389 - RNA, 15 nt, Human herpesvirus 7
auucacgcuuccauc

SEQ ID NO: 348390 - RNA, 13 nt, Human herpesvirus 7
auucaguuuacug

SEQ ID NO: 348391 - RNA, 22 nt, Human herpesvirus 7
auucaucaggacaaucaaacau

SEQ ID NO: 348392 - RNA, 23 nt, Human herpesvirus 7
auucauccaaaaagaaacuuucu

SEQ ID NO: 348393 - RNA, 12 nt, Human herpesvirus 7
auucaugcagaa

SEQ ID NO: 348394 - RNA, 16 nt, Human herpesvirus 7
auucauuuccucccaa

SEQ ID NO: 348395 - RNA, 14 nt, Human herpesvirus 7
auuccacuaaaaga

SEQ ID NO: 348396 - RNA, 15 nt, Human herpesvirus 7
auuccagauaugaca

SEQ ID NO: 348397 - RNA, 17 nt, Human herpesvirus 7
auuccagauaugacaaa

SEQ ID NO: 348398 - RNA, 15 nt, Human herpesvirus 7
auuccaggguaaaga

SEQ ID NO: 348399 - RNA, 12 nt, Human herpesvirus 7
auuccaucucac

SEQ ID NO: 348400 - RNA, 19 nt, Human herpesvirus 7
auuccaucugguaauguca

SEQ ID NO: 348401 - RNA, 20 nt, Human herpesvirus 7
auuccaucugguaaugucau

SEQ ID NO: 348402 - RNA, 17 nt, Human herpesvirus 7
auuccauuaagccagau

SEQ ID NO: 348403 - RNA, 21 nt, Human herpesvirus 7
auuccauuaagccagauuuca

SEQ ID NO: 348404 - RNA, 23 nt, Human herpesvirus 7
auuccauuaagccagauuucaug

SEQ ID NO: 348405 - RNA, 21 nt, Human herpesvirus 7
auuccauuuuuugucacugac

SEQ ID NO: 348406 - RNA, 22 nt, Human herpesvirus 7
auucccaucgugaauaauuuca

SEQ ID NO: 348407 - RNA, 18 nt, Human herpesvirus 7
auuccgauuuaagugaac

SEQ ID NO: 348408 - RNA, 16 nt, Human herpesvirus 7
auuccgguguggaaac

SEQ ID NO: 348409 - RNA, 20 nt, Human herpesvirus 7
auuccguuuuaaauagugaa

SEQ ID NO: 348410 - RNA, 20 nt, Human herpesvirus 7
auuccucauggccagugaau

SEQ ID NO: 348411 - RNA, 14 nt, Human herpesvirus 7
auuccuucuaguga

SEQ ID NO: 348412 - RNA, 22 nt, Human herpesvirus 7
auuccuucuagugaaacacauu

SEQ ID NO: 348413 - RNA, 15 nt, Human herpesvirus 7
auucgaaacacuuac

SEQ ID NO: 348414 - RNA, 15 nt, Human herpesvirus 7
auucgaaaugaaaua

SEQ ID NO: 348415 - RNA, 12 nt, Human herpesvirus 7
auucgaugucag

SEQ ID NO: 348416 - RNA, 17 nt, Human herpesvirus 7
auucgcuaacuuugcua

SEQ ID NO: 348417 - RNA, 15 nt, Human herpesvirus 7
auucguuaagcaccg

SEQ ID NO: 348418 - RNA, 16 nt, Human herpesvirus 7
auucuaacaaauacca

SEQ ID NO: 348419 - RNA, 23 nt, Human herpesvirus 7
auucuaacaaauaccaugaaaaa

SEQ ID NO: 348420 - RNA, 14 nt, Human herpesvirus 7
auucuaguuuucuu

SEQ ID NO: 348421 - RNA, 12 nt, Human herpesvirus 7
auucuauagaaa

SEQ ID NO: 348422 - RNA, 15 nt, Human herpesvirus 7
auucucacagcuuau

SEQ ID NO: 348423 - RNA, 16 nt, Human herpesvirus 7
auucucauacaacucu

SEQ ID NO: 348424 - RNA, 16 nt, Human herpesvirus 7
auucucauagauuuca

SEQ ID NO: 348425 - RNA, 17 nt, Human herpesvirus 7
auucucauagauuucag

SEQ ID NO: 348426 - RNA, 21 nt, Human herpesvirus 7
auucuccaaucauaauuuuca

SEQ ID NO: 348427 - RNA, 20 nt, Human herpesvirus 7
auucucgcuucaaagauacc

SEQ ID NO: 348428 - RNA, 13 nt, Human herpesvirus 7
auucucuacuuaa

SEQ ID NO: 348429 - RNA, 16 nt, Human herpesvirus 7
auucucuacuuaaugg

SEQ ID NO: 348430 - RNA, 19 nt, Human herpesvirus 7
auucucucucuauuacaca

SEQ ID NO: 348431 - RNA, 19 nt, Human herpesvirus 7
auucugaaauaaacauuuc

SEQ ID NO: 348432 - RNA, 20 nt, Human herpesvirus 7
auucuuaaugcgaaagcucu

SEQ ID NO: 348433 - RNA, 19 nt, Human herpesvirus 7
auucuuauucuacacaucu

SEQ ID NO: 348434 - RNA, 22 nt, Human herpesvirus 7
auucuuauucuacacaucuuca

SEQ ID NO: 348435 - RNA, 23 nt, Human herpesvirus 7
auucuuuucaaugcaacuuuaau

SEQ ID NO: 348436 - RNA, 14 nt, Human herpesvirus 7
auugaaaaugcauu

SEQ ID NO: 348437 - RNA, 15 nt, Human herpesvirus 7
auugaaaaugcauug

SEQ ID NO: 348438 - RNA, 18 nt, Human herpesvirus 7
auugaaaaugcauugcuu

SEQ ID NO: 348439 - RNA, 18 nt, Human herpesvirus 7
auugaaagaccaaauuca

SEQ ID NO: 348440 - RNA, 15 nt, Human herpesvirus 7
auugaaauuccauac

SEQ ID NO: 348441 - RNA, 19 nt, Human herpesvirus 7
auugaauauaaguuuucuu

SEQ ID NO: 348442 - RNA, 14 nt, Human herpesvirus 7
auugaauguggaau

SEQ ID NO: 348443 - RNA, 13 nt, Human herpesvirus 7
aucuuucauaaca

SEQ ID NO: 348444 - RNA, 22 nt, Human herpesvirus 7
aucuuucggagacguugcucau

SEQ ID NO: 348445 - RNA, 18 nt, Human herpesvirus 7
aucuuugaaucugcuaag

SEQ ID NO: 348446 - RNA, 20 nt, Human herpesvirus 7
aucuuuuauaaauaguuuca

SEQ ID NO: 348447 - RNA, 21 nt, Human herpesvirus 7
augaaaaagccauaaaaugua

SEQ ID NO: 348448 - RNA, 16 nt, Human herpesvirus 7
augaaaaauaaauacu

SEQ ID NO: 348449 - RNA, 16 nt, Human herpesvirus 7
augaaacuuccaauaa

SEQ ID NO: 348450 - RNA, 19 nt, Human herpesvirus 7
augaaaguugggaugacaa

SEQ ID NO: 348451 - RNA, 16 nt, Human herpesvirus 7
augaacaagguucuca

SEQ ID NO: 348452 - RNA, 15 nt, Human herpesvirus 7
augaacaaguuucaa

SEQ ID NO: 348453 - RNA, 21 nt, Human herpesvirus 7
augaagcgcugagaucuucca

SEQ ID NO: 348454 - RNA, 23 nt, Human herpesvirus 7
augaagcgcugagaucuuccaau

SEQ ID NO: 348455 - RNA, 16 nt, Human herpesvirus 7
augaaggaagcuuuac

SEQ ID NO: 348456 - RNA, 14 nt, Human herpesvirus 7
augaauaaaaucua

SEQ ID NO: 348457 - RNA, 19 nt, Human herpesvirus 7
augaaugcaagcaacacuu

SEQ ID NO: 348458 - RNA, 20 nt, Human herpesvirus 7
augaaugcaagcaacacuua

SEQ ID NO: 348459 - RNA, 11 nt, Human herpesvirus 7
augaauggauc

SEQ ID NO: 348460 - RNA, 14 nt, Human herpesvirus 7
augaauugaaauuu

SEQ ID NO: 348461 - RNA, 18 nt, Human herpesvirus 7
augaauuuuaaguggaau

SEQ ID NO: 348462 - RNA, 22 nt, Human herpesvirus 7
augaauuuuaaguggaaucuca

SEQ ID NO: 348463 - RNA, 24 nt, Human herpesvirus 7
augacaaaacugcaaauccaacag

SEQ ID NO: 348464 - RNA, 13 nt, Human herpesvirus 7
augacaaauuuca

SEQ ID NO: 348465 - RNA, 17 nt, Human herpesvirus 7
augacaacaaagcauga

SEQ ID NO: 348466 - RNA, 18 nt, Human herpesvirus 7
augacaacaaagcaugaa

SEQ ID NO: 348467 - RNA, 23 nt, Human herpesvirus 7
augacauuuuuaccuccauauga

SEQ ID NO: 348468 - RNA, 19 nt, Human herpesvirus 7
augacgcuaaguuuuguua

SEQ ID NO: 348469 - RNA, 12 nt, Human herpesvirus 7
augacucagacg

SEQ ID NO: 348470 - RNA, 22 nt, Human herpesvirus 7
augacuuucuucuagaaacuaa

SEQ ID NO: 348471 - RNA, 16 nt, Human herpesvirus 7
augagcaauucaugca

SEQ ID NO: 348472 - RNA, 14 nt, Human herpesvirus 7
augauaaugaaacu

SEQ ID NO: 348473 - RNA, 16 nt, Human herpesvirus 7
augaucuuacuuccua

SEQ ID NO: 348474 - RNA, 23 nt, Human herpesvirus 7
augaucuuacuuccuaaucuaac

SEQ ID NO: 348475 - RNA, 16 nt, Human herpesvirus 7
augaugaaacuuccaa

SEQ ID NO: 348476 - RNA, 16 nt, Human herpesvirus 7
augaugaauauaacaa

SEQ ID NO: 348477 - RNA, 21 nt, Human herpesvirus 7
augaugcauccgaaucuuuau

SEQ ID NO: 348478 - RNA, 17 nt, Human herpesvirus 7
augauguuaaagaacaa

SEQ ID NO: 348479 - RNA, 19 nt, Human herpesvirus 7
augauguuuuuugucuuuu

SEQ ID NO: 348480 - RNA, 22 nt, Human herpesvirus 7
augauuagcgcgugaacaaaua

SEQ ID NO: 348481 - RNA, 20 nt, Human herpesvirus 7
augauuugguauacacuauu

SEQ ID NO: 348482 - RNA, 18 nt, Human herpesvirus 7
augcaagaaaguccaaag

SEQ ID NO: 348483 - RNA, 12 nt, Human herpesvirus 7
augcacauccaa

SEQ ID NO: 348484 - RNA, 20 nt, Human herpesvirus 7
augcagaaaaauccaaaauc

SEQ ID NO: 348485 - RNA, 15 nt, Human herpesvirus 7
augcagaccguaaaa

SEQ ID NO: 348486 - RNA, 16 nt, Human herpesvirus 7
augcauauuugaacau

SEQ ID NO: 348487 - RNA, 18 nt, Human herpesvirus 7
augcaucaaaacauauca

SEQ ID NO: 348488 - RNA, 19 nt, Human herpesvirus 7
augcaucugaauuuuucac

SEQ ID NO: 348489 - RNA, 14 nt, Human herpesvirus 7
augcaugcaauuuu

SEQ ID NO: 348490 - RNA, 14 nt, Human herpesvirus 7
augcaugcuaauau

SEQ ID NO: 348491 - RNA, 19 nt, Human herpesvirus 7
augcauuauauccaauaau

SEQ ID NO: 348492 - RNA, 13 nt, Human herpesvirus 7
augcauugcauuc

SEQ ID NO: 348493 - RNA, 14 nt, Human herpesvirus 7
augccaaugaacaa

SEQ ID NO: 348494 - RNA, 20 nt, Human herpesvirus 7
augccagguuuuucaaagac

SEQ ID NO: 348495 - RNA, 19 nt, Human herpesvirus 7
augccaucuauaaacauuc

SEQ ID NO: 348496 - RNA, 14 nt, Human herpesvirus 7
augccuguauuaaa

SEQ ID NO: 348497 - RNA, 15 nt, Human herpesvirus 7
augcuauuaaaugau

SEQ ID NO: 348498 - RNA, 12 nt, Human herpesvirus 7
augcugcaaugu

SEQ ID NO: 348499 - RNA, 17 nt, Human herpesvirus 7
augcugcucagcuagaa

SEQ ID NO: 348500 - RNA, 19 nt, Human herpesvirus 7
augcuggaucuucugcuaa

SEQ ID NO: 348501 - RNA, 14 nt, Human herpesvirus 7
augcuuacagugaa

SEQ ID NO: 348502 - RNA, 19 nt, Human herpesvirus 7
augcuuagaaucuuuugca

SEQ ID NO: 348503 - RNA, 22 nt, Human herpesvirus 7
augcuuccuaaaaaaaaaggaa

SEQ ID NO: 348504 - RNA, 17 nt, Human herpesvirus 7
augcuugcuuugcauag

SEQ ID NO: 348505 - RNA, 18 nt, Human herpesvirus 7
augcuuugucuuacgucu

SEQ ID NO: 348506 - RNA, 23 nt, Human herpesvirus 7
auggaacauguuuguaaacauuu

SEQ ID NO: 348507 - RNA, 15 nt, Human herpesvirus 7
auggaagaacaacaa

SEQ ID NO: 348508 - RNA, 14 nt, Human herpesvirus 7
auggaauuuaacaa

SEQ ID NO: 348509 - RNA, 15 nt, Human herpesvirus 7
auggacggcauuuaa

SEQ ID NO: 348510 - RNA, 13 nt, Human herpesvirus 7
auggacguuuauu

SEQ ID NO: 348511 - RNA, 22 nt, Human herpesvirus 7
auggagauaguucgcaauggua

SEQ ID NO: 348512 - RNA, 22 nt, Human herpesvirus 7
auggaggauucggaaguaaaca

SEQ ID NO: 348513 - RNA, 20 nt, Human herpesvirus 7
auggauuucuuagcgaauuu

SEQ ID NO: 348514 - RNA, 18 nt, Human herpesvirus 7
auggcaaugcauuggaaa

SEQ ID NO: 348515 - RNA, 12 nt, Human herpesvirus 7
auggcaucuuau

SEQ ID NO: 348516 - RNA, 14 nt, Human herpesvirus 7
auggccagugaaug

SEQ ID NO: 348517 - RNA, 14 nt, Human herpesvirus 7
auggcgaguuacau

SEQ ID NO: 348518 - RNA, 17 nt, Human herpesvirus 7
auggcgaguuacauuuc

SEQ ID NO: 348519 - RNA, 20 nt, Human herpesvirus 7
auggcuuugcugucuuggag

SEQ ID NO: 348520 - RNA, 18 nt, Human herpesvirus 7
augguaccuuagaaucac

SEQ ID NO: 348521 - RNA, 17 nt, Human herpesvirus 7
augguguuaacaaucuu

SEQ ID NO: 348522 - RNA, 15 nt, Human herpesvirus 7
augguugugcaauuu

SEQ ID NO: 348523 - RNA, 16 nt, Human herpesvirus 7
augguuugaaaaccau

SEQ ID NO: 348524 - RNA, 16 nt, Human herpesvirus 7
auguaaaauuaauuca

SEQ ID NO: 348525 - RNA, 14 nt, Human herpesvirus 7
auguaaaccaaauu

SEQ ID NO: 348526 - RNA, 20 nt, Human herpesvirus 7
auguaaauuauuagauucca

SEQ ID NO: 348527 - RNA, 11 nt, Human herpesvirus 7
auguaacuuuc

SEQ ID NO: 348528 - RNA, 13 nt, Human herpesvirus 7
auguaacuuucau

SEQ ID NO: 348529 - RNA, 14 nt, Human herpesvirus 7
auguaacuuucauc

SEQ ID NO: 348530 - RNA, 16 nt, Human herpesvirus 7
auguacuauacaggau

SEQ ID NO: 348531 - RNA, 14 nt, Human herpesvirus 7
auguacugcucauc

SEQ ID NO: 348532 - RNA, 18 nt, Human herpesvirus 7
auguagauuuagauuuaa

SEQ ID NO: 348533 - RNA, 13 nt, Human herpesvirus 7
auguaguacaaug

SEQ ID NO: 348534 - RNA, 21 nt, Human herpesvirus 7
auguauacaaauugguucagc

SEQ ID NO: 348535 - RNA, 13 nt, Human herpesvirus 7
auguauggcaaug

SEQ ID NO: 348536 - RNA, 15 nt, Human herpesvirus 7
auguauggcaaugca

SEQ ID NO: 348537 - RNA, 12 nt, Human herpesvirus 7
auguauucaaug

SEQ ID NO: 348538 - RNA, 20 nt, Human herpesvirus 7
augucagcaaaucugaaaau

SEQ ID NO: 348539 - RNA, 12 nt, Human herpesvirus 7
auguccagugac

SEQ ID NO: 348540 - RNA, 19 nt, Human herpesvirus 7
auguccauaaaacaugcaa

SEQ ID NO: 348541 - RNA, 19 nt, Human herpesvirus 7
auguccgcuuacaagaugc

SEQ ID NO: 348542 - RNA, 22 nt, Human herpesvirus 7
augucucauaauaucgguuauc

SEQ ID NO: 348543 - RNA, 13 nt, Human herpesvirus 7
augucucuguucc

SEQ ID NO: 348544 - RNA, 15 nt, Human herpesvirus 7
augucucuguuccca

SEQ ID NO: 348545 - RNA, 17 nt, Human herpesvirus 7
augucuucaacuucucu

SEQ ID NO: 348546 - RNA, 22 nt, Human herpesvirus 7
augugcgaagguugucuguucu

SEQ ID NO: 348547 - RNA, 16 nt, Human herpesvirus 7
augugcuuauaucuua

SEQ ID NO: 348548 - RNA, 13 nt, Human herpesvirus 7
augugucuuacaa

SEQ ID NO: 348549 - RNA, 14 nt, Human herpesvirus 7
auguguuacaugau

SEQ ID NO: 348550 - RNA, 20 nt, Human herpesvirus 7
auguguuacaugaucuugua

SEQ ID NO: 348551 - RNA, 19 nt, Human herpesvirus 7
auguguuuacauuacugga

SEQ ID NO: 348552 - RNA, 14 nt, Human herpesvirus 7
auguuaugugcuua

SEQ ID NO: 348553 - RNA, 15 nt, Human herpesvirus 7
auguuaugugcuuau

SEQ ID NO: 348554 - RNA, 14 nt, Human herpesvirus 7
auguuauuuggaau

SEQ ID NO: 348555 - RNA, 14 nt, Human herpesvirus 7
auguuccauucaau

SEQ ID NO: 348556 - RNA, 14 nt, Human herpesvirus 7
auguugaaguugaa

SEQ ID NO: 348557 - RNA, 18 nt, Human herpesvirus 7
auguugaaguugaacaau

SEQ ID NO: 348558 - RNA, 14 nt, Human herpesvirus 7
auaauuacauugca

SEQ ID NO: 348559 - RNA, 17 nt, Human herpesvirus 7
auaauuacauugcaguc

SEQ ID NO: 348560 - RNA, 18 nt, Human herpesvirus 7
auaauuacauugcaguca

SEQ ID NO: 348561 - RNA, 16 nt, Human herpesvirus 7
auaauucaaucugcaa

SEQ ID NO: 348562 - RNA, 20 nt, Human herpesvirus 7
auaauucaaucugcaaaaaa

SEQ ID NO: 348563 - RNA, 24 nt, Human herpesvirus 7
auaauucauuuguuuaagacauua

SEQ ID NO: 348564 - RNA, 12 nt, Human herpesvirus 7
auaauucucaca

SEQ ID NO: 348565 - RNA, 23 nt, Human herpesvirus 7
auaauuucuauaaucacgaaaua

SEQ ID NO: 348566 - RNA, 16 nt, Human herpesvirus 7
auacaaaagacauaac

SEQ ID NO: 348567 - RNA, 18 nt, Human herpesvirus 7
auacaaagaagaauucca

SEQ ID NO: 348568 - RNA, 22 nt, Human herpesvirus 7
auacaaauuccugcuugcacaa

SEQ ID NO: 348569 - RNA, 17 nt, Human herpesvirus 7
auacaaccacaaccaaa

SEQ ID NO: 348570 - RNA, 19 nt, Human herpesvirus 7
auacaacuaaaaaucucag

SEQ ID NO: 348571 - RNA, 22 nt, Human herpesvirus 7
auacaacuuuauggaacaugaa

SEQ ID NO: 348572 - RNA, 19 nt, Human herpesvirus 7
auacaauagugaacaugug

SEQ ID NO: 348573 - RNA, 12 nt, Human herpesvirus 7
auacacugugaa

SEQ ID NO: 348574 - RNA, 23 nt, Human herpesvirus 7
auacaggccuguuucuugaugua

SEQ ID NO: 348575 - RNA, 22 nt, Human herpesvirus 7
auacaugccggacaguuugcaa

SEQ ID NO: 348576 - RNA, 23 nt, Human herpesvirus 7
auacauuauaaauguaacuuuca

SEQ ID NO: 348577 - RNA, 17 nt, Human herpesvirus 7
auacauuuuugcaauau

SEQ ID NO: 348578 - RNA, 19 nt, Human herpesvirus 7
auaccaaaaaccugaaaaa

SEQ ID NO: 348579 - RNA, 22 nt, Human herpesvirus 7
auaccaaacaaaauuccaaaau

SEQ ID NO: 348580 - RNA, 18 nt, Human herpesvirus 7
auaccauaaauaccaaaa

SEQ ID NO: 348581 - RNA, 20 nt, Human herpesvirus 7
auaccauaaauaccaaaaac

SEQ ID NO: 348582 - RNA, 16 nt, Human herpesvirus 7
auacgaaucaguucaa

SEQ ID NO: 348583 - RNA, 14 nt, Human herpesvirus 7
auacguccaaaaau

SEQ ID NO: 348584 - RNA, 23 nt, Human herpesvirus 7
auacguuaguugcagcugugaua

SEQ ID NO: 348585 - RNA, 13 nt, Human herpesvirus 7
auacugaaucuga

SEQ ID NO: 348586 - RNA, 13 nt, Human herpesvirus 7
auacuucuugccc

SEQ ID NO: 348587 - RNA, 15 nt, Human herpesvirus 7
auacuuuaaaacuuu

SEQ ID NO: 348588 - RNA, 16 nt, Human herpesvirus 7
auacuuuuuuuacuua

SEQ ID NO: 348589 - RNA, 13 nt, Human herpesvirus 7
auagaaacauucc

SEQ ID NO: 348590 - RNA, 14 nt, Human herpesvirus 7
auagaaaucuuuau

SEQ ID NO: 348591 - RNA, 18 nt, Human herpesvirus 7
auagaaauuauuguacau

SEQ ID NO: 348592 - RNA, 14 nt, Human herpesvirus 7
auagacacauuuau

SEQ ID NO: 348593 - RNA, 20 nt, Human herpesvirus 7
auagacacauuuauccauca

SEQ ID NO: 348594 - RNA, 15 nt, Human herpesvirus 7
auagagaaaacauug

SEQ ID NO: 348595 - RNA, 15 nt, Human herpesvirus 7
auagaguacaugugu

SEQ ID NO: 348596 - RNA, 18 nt, Human herpesvirus 7
auagauaaugaaguuuau

SEQ ID NO: 348597 - RNA, 20 nt, Human herpesvirus 7
auagaugcagaaaaauccaa

SEQ ID NO: 348598 - RNA, 16 nt, Human herpesvirus 7
auagaugcgaaagcca

SEQ ID NO: 348599 - RNA, 21 nt, Human herpesvirus 7
auagaugcgaaagccacuguu

SEQ ID NO: 348600 - RNA, 16 nt, Human herpesvirus 7
auagauuacgcacaaa

SEQ ID NO: 348601 - RNA, 20 nt, Human herpesvirus 7
auagcagagaauauguuauc

SEQ ID NO: 348602 - RNA, 15 nt, Human herpesvirus 7
auagcaggaagcaca

SEQ ID NO: 348603 - RNA, 13 nt, Human herpesvirus 7
auagguaucuuua

SEQ ID NO: 348604 - RNA, 19 nt, Human herpesvirus 7
auagguaucuuuacuuuca

SEQ ID NO: 348605 - RNA, 20 nt, Human herpesvirus 7
auagguaucuuuacuuucau

SEQ ID NO: 348606 - RNA, 11 nt, Human herpesvirus 7
auagguugcua

SEQ ID NO: 348607 - RNA, 24 nt, Human herpesvirus 7
auaguacaucuuucuaguucccau

SEQ ID NO: 348608 - RNA, 18 nt, Human herpesvirus 7
auaguuuuacaaagaaca

SEQ ID NO: 348609 - RNA, 13 nt, Human herpesvirus 7
auauaaacacuug

SEQ ID NO: 348610 - RNA, 18 nt, Human herpesvirus 7
auauaagaugauagccau

SEQ ID NO: 348611 - RNA, 16 nt, Human herpesvirus 7
auauagcaauauuuau

SEQ ID NO: 348612 - RNA, 23 nt, Human herpesvirus 7
auauaguuuguuucaauaugcau

SEQ ID NO: 348613 - RNA, 22 nt, Human herpesvirus 7
auauaucuuugauuacucguga

SEQ ID NO: 348614 - RNA, 22 nt, Human herpesvirus 7
auauaugucauagugggaacau

SEQ ID NO: 348615 - RNA, 17 nt, Human herpesvirus 7
auauauuccaacucaau

SEQ ID NO: 348616 - RNA, 14 nt, Human herpesvirus 7
auauauuggcaugc

SEQ ID NO: 348617 - RNA, 20 nt, Human herpesvirus 7
auauauuggcaugcuuacag

SEQ ID NO: 348618 - RNA, 15 nt, Human herpesvirus 7
auauccaauaaugca

SEQ ID NO: 348619 - RNA, 23 nt, Human herpesvirus 7
auaucguuguguggcaacaucuu

SEQ ID NO: 348620 - RNA, 14 nt, Human herpesvirus 7
auaucuaaagugga

SEQ ID NO: 348621 - RNA, 15 nt, Human herpesvirus 7
auaucuaaaguggag

SEQ ID NO: 348622 - RNA, 19 nt, Human herpesvirus 7
auaucuuuuucaaauggau

SEQ ID NO: 348623 - RNA, 13 nt, Human herpesvirus 7
auaugaaucaaau

SEQ ID NO: 348624 - RNA, 15 nt, Human herpesvirus 7
auaugaaucaaauuu

SEQ ID NO: 348625 - RNA, 15 nt, Human herpesvirus 7
auaugacauggccau

SEQ ID NO: 348626 - RNA, 17 nt, Human herpesvirus 7
auaugaugaaacuucca

SEQ ID NO: 348627 - RNA, 19 nt, Human herpesvirus 7
auaugaugacaacaaagca

SEQ ID NO: 348628 - RNA, 22 nt, Human herpesvirus 7
auaugcaucaaaacauaucaga

SEQ ID NO: 348629 - RNA, 16 nt, Human herpesvirus 7
auaugcaugcaauuuu

SEQ ID NO: 348630 - RNA, 16 nt, Human herpesvirus 7
auaugcuuccuaaaaa

SEQ ID NO: 348631 - RNA, 20 nt, Human herpesvirus 7
auauggcaauaaaucuguaa

SEQ ID NO: 348632 - RNA, 18 nt, Human herpesvirus 7
auaugguuugaaaaccau

SEQ ID NO: 348633 - RNA, 20 nt, Human herpesvirus 7
auaugucauagugggaacau

SEQ ID NO: 348634 - RNA, 20 nt, Human herpesvirus 7
auaugugaaaauaaacagga

SEQ ID NO: 348635 - RNA, 16 nt, Human herpesvirus 7
auauguugauucucuc

SEQ ID NO: 348636 - RNA, 14 nt, Human herpesvirus 7
auauuaaaaaccac

SEQ ID NO: 348637 - RNA, 18 nt, Human herpesvirus 7
auauuaaaucauaccaua

SEQ ID NO: 348638 - RNA, 21 nt, Human herpesvirus 7
auauuaauuuggugaagauuc

SEQ ID NO: 348639 - RNA, 14 nt, Human herpesvirus 7
auauuagaacgaga

SEQ ID NO: 348640 - RNA, 23 nt, Human herpesvirus 7
auauuagauuauacaaauccaag

SEQ ID NO: 348641 - RNA, 21 nt, Human herpesvirus 7
auauuggcaugcuuacaguga

SEQ ID NO: 348642 - RNA, 20 nt, Human herpesvirus 7
auauuuauguccgcuuacaa

SEQ ID NO: 348643 - RNA, 15 nt, Human herpesvirus 7
auauuuauguucaaa

SEQ ID NO: 348644 - RNA, 15 nt, Human herpesvirus 7
auauuuccagcauca

SEQ ID NO: 348645 - RNA, 16 nt, Human herpesvirus 7
auauuugcuugcugaa

SEQ ID NO: 348646 - RNA, 12 nt, Human herpesvirus 7
auauuuugacaa

SEQ ID NO: 348647 - RNA, 16 nt, Human herpesvirus 7
auauuuuuaaaaucua

SEQ ID NO: 348648 - RNA, 21 nt, Human herpesvirus 7
auauuuuuaaauuugucuguu

SEQ ID NO: 348649 - RNA, 21 nt, Human herpesvirus 7
aucaaaaaacacguccaagaa

SEQ ID NO: 348650 - RNA, 21 nt, Human herpesvirus 7
aucaaaaaauaauuccuucua

SEQ ID NO: 348651 - RNA, 14 nt, Human herpesvirus 7
aucaaaacauauca

SEQ ID NO: 348652 - RNA, 21 nt, Human herpesvirus 7
aucaaaagcugcagcugaaag

SEQ ID NO: 348653 - RNA, 18 nt, Human herpesvirus 7
aucaaaauccuggauuuc

SEQ ID NO: 348654 - RNA, 18 nt, Human herpesvirus 7
aucaaaaucuguagaaaa

SEQ ID NO: 348655 - RNA, 13 nt, Human herpesvirus 7
aucaaaauuccau

SEQ ID NO: 348656 - RNA, 21 nt, Human herpesvirus 7
aucaaaguuuuaaaguaugcu

SEQ ID NO: 348657 - RNA, 20 nt, Human herpesvirus 7
aucaaauuuaucucauagcu

SEQ ID NO: 348658 - RNA, 19 nt, Human herpesvirus 7
aucaacauacgugcuuaga

SEQ ID NO: 348659 - RNA, 20 nt, Human herpesvirus 7
aucaaccaacauucuuguca

SEQ ID NO: 348660 - RNA, 21 nt, Human herpesvirus 7
aucaaccaacauucuugucaa

SEQ ID NO: 348661 - RNA, 16 nt, Human herpesvirus 7
aucaaccagauuucug

SEQ ID NO: 348662 - RNA, 19 nt, Human herpesvirus 7
aucaagacgcuguaugcaa

SEQ ID NO: 348663 - RNA, 21 nt, Human herpesvirus 7
aucaagccacgaugacuucca

SEQ ID NO: 348664 - RNA, 19 nt, Human herpesvirus 7
aucaaguagaauaccagag

SEQ ID NO: 348665 - RNA, 20 nt, Human herpesvirus 7
aucaagucuuauuacucgau

SEQ ID NO: 348666 - RNA, 23 nt, Human herpesvirus 7
aucaauagguuccacacagggaa

SEQ ID NO: 348667 - RNA, 20 nt, Human herpesvirus 7
aucaauugaguuuacugcca

SEQ ID NO: 348668 - RNA, 15 nt, Human herpesvirus 7
aucaauuugaauauu

SEQ ID NO: 348669 - RNA, 18 nt, Human herpesvirus 7
aucaauuuuaaugugcuu

SEQ ID NO: 348670 - RNA, 15 nt, Human herpesvirus 7
aucaauuuuugacag

SEQ ID NO: 348671 - RNA, 19 nt, Human herpesvirus 7
aucacagcuagauugacua

SEQ ID NO: 348672 - RNA, 23 nt, Human herpesvirus 7
aucacagcuagauugacuaugaa

SEQ ID NO: 348673 - RNA, 18 nt, Human herpesvirus 7
aucacaguugcuugugaa

SEQ ID NO: 348674 - RNA, 14 nt, Human herpesvirus 7
uucuucuacuucua

SEQ ID NO: 348675 - RNA, 12 nt, Human herpesvirus 7
uucuucuuccac

SEQ ID NO: 348676 - RNA, 22 nt, Human herpesvirus 7
uucuugugacgcuuuaauguaa

SEQ ID NO: 348677 - RNA, 22 nt, Human herpesvirus 7
uucuuuaauccguaucuagaga

SEQ ID NO: 348678 - RNA, 15 nt, Human herpesvirus 7
uucuuucucaucacu

SEQ ID NO: 348679 - RNA, 21 nt, Human herpesvirus 7
uucuuuguaaaaaugaauuca

SEQ ID NO: 348680 - RNA, 22 nt, Human herpesvirus 7
uugaaaaaaagauuuaacaugu

SEQ ID NO: 348681 - RNA, 23 nt, Human herpesvirus 7
uugaaaacgaaaggaaucuuaau

SEQ ID NO: 348682 - RNA, 14 nt, Human herpesvirus 7
uugaaaagucauua

SEQ ID NO: 348683 - RNA, 16 nt, Human herpesvirus 7
uugaaaagucauuauu

SEQ ID NO: 348684 - RNA, 12 nt, Human herpesvirus 7
uugaaaguaaaa

SEQ ID NO: 348685 - RNA, 16 nt, Human herpesvirus 7
uuuacagagaauuuua

SEQ ID NO: 348686 - RNA, 21 nt, Human herpesvirus 7
uuuacagcguggccuucuugc

SEQ ID NO: 348687 - RNA, 17 nt, Human herpesvirus 7
uuuacauuucauuccaa

SEQ ID NO: 348688 - RNA, 21 nt, Human herpesvirus 7
uuuaccgucuuuugauuuugc

SEQ ID NO: 348689 - RNA, 13 nt, Human herpesvirus 7
uuuaccuccauau

SEQ ID NO: 348690 - RNA, 15 nt, Human herpesvirus 7
uuuaccuccauauga

SEQ ID NO: 348691 - RNA, 20 nt, Human herpesvirus 7
uuuacuuaaauauuuuacau

SEQ ID NO: 348692 - RNA, 23 nt, Human herpesvirus 7
uuuacuucgagaaaauuuagcac

SEQ ID NO: 348693 - RNA, 17 nt, Human herpesvirus 7
uuuagagucgucuugca

SEQ ID NO: 348694 - RNA, 20 nt, Human herpesvirus 7
uuuagcggagguuugcuauu

SEQ ID NO: 348695 - RNA, 13 nt, Human herpesvirus 7
uuuagcuaauuca

SEQ ID NO: 348696 - RNA, 21 nt, Human herpesvirus 7
uuuagcuuuugaauaaucuca

SEQ ID NO: 348697 - RNA, 23 nt, Human herpesvirus 7
uuuagucggcacacguacaauau

SEQ ID NO: 348698 - RNA, 17 nt, Human herpesvirus 7
uuuauauauggcaauaa

SEQ ID NO: 348699 - RNA, 12 nt, Human herpesvirus 7
uuuauauuugcu

SEQ ID NO: 348700 - RNA, 18 nt, Human herpesvirus 7
uuuauauuugcuugcuga

SEQ ID NO: 348701 - RNA, 22 nt, Human herpesvirus 7
uuuaucaggugcucuaaauauc

SEQ ID NO: 348702 - RNA, 20 nt, Human herpesvirus 7
uuuauccaguacgucuugcu

SEQ ID NO: 348703 - RNA, 16 nt, Human herpesvirus 7
uuuaugcuuuaacugg

SEQ ID NO: 348704 - RNA, 20 nt, Human herpesvirus 7
uuuauugagcaauugauuca

SEQ ID NO: 348705 - RNA, 11 nt, Human herpesvirus 7
uuucaaaagaa

SEQ ID NO: 348706 - RNA, 11 nt, Human herpesvirus 7
uuucaaacaac

SEQ ID NO: 348707 - RNA, 22 nt, Human herpesvirus 7
uuucaaauggauuuuaauacaa

SEQ ID NO: 348708 - RNA, 14 nt, Human herpesvirus 7
uuucaacgaucuca

SEQ ID NO: 348709 - RNA, 20 nt, Human herpesvirus 7
uuucaauugguuguucaaaa

SEQ ID NO: 348710 - RNA, 17 nt, Human herpesvirus 7
uuucacacaaugccuuu

SEQ ID NO: 348711 - RNA, 17 nt, Human herpesvirus 7
uuucacuacuacaugaa

SEQ ID NO: 348712 - RNA, 19 nt, Human herpesvirus 7
uuucagaugacaacucaau

SEQ ID NO: 348713 - RNA, 22 nt, Human herpesvirus 7
uuucagaugacaacucaauaaa

SEQ ID NO: 348714 - RNA, 14 nt, Human herpesvirus 7
uuucauacauagaa

SEQ ID NO: 348715 - RNA, 15 nt, Human herpesvirus 7
uuucauagguugcua

SEQ ID NO: 348716 - RNA, 15 nt, Human herpesvirus 7
uuuccaacgcauuca

SEQ ID NO: 348717 - RNA, 13 nt, Human herpesvirus 7
uuuccaucuaccg

SEQ ID NO: 348718 - RNA, 20 nt, Human herpesvirus 7
uuuccaucuaccgcgaugaa

SEQ ID NO: 348719 - RNA, 13 nt, Human herpesvirus 7
uuucccagaagaa

SEQ ID NO: 348720 - RNA, 15 nt, Human herpesvirus 7
uuucccagauacagc

SEQ ID NO: 348721 - RNA, 19 nt, Human herpesvirus 7
uuuccguuguaugaugacg

SEQ ID NO: 348722 - RNA, 14 nt, Human herpesvirus 7
uuuccuaugauaca

SEQ ID NO: 348723 - RNA, 13 nt, Human herpesvirus 7
uuuccuugccaga

SEQ ID NO: 348724 - RNA, 20 nt, Human herpesvirus 7
uuuccuuuaugugauauacu

SEQ ID NO: 348725 - RNA, 19 nt, Human herpesvirus 7
uuucggagacguugcucau

SEQ ID NO: 348726 - RNA, 15 nt, Human herpesvirus 7
uuucuaaauaugaug

SEQ ID NO: 348727 - RNA, 17 nt, Human herpesvirus 7
uuucuaaaucacuaguc

SEQ ID NO: 348728 - RNA, 24 nt, Human herpesvirus 7
uuucuaaaucacuaguccuaaaua

SEQ ID NO: 348729 - RNA, 22 nt, Human herpesvirus 7
uuucuacauguuuaacaaacaa

SEQ ID NO: 348730 - RNA, 18 nt, Human herpesvirus 7
uuucuauaaucacgaaau

SEQ ID NO: 348731 - RNA, 19 nt, Human herpesvirus 7
uuucuauuagauaaugaca

SEQ ID NO: 348732 - RNA, 12 nt, Human herpesvirus 7
uuucuccaugca

SEQ ID NO: 348733 - RNA, 22 nt, Human herpesvirus 7
uuucucuguagauauuuugaca

SEQ ID NO: 348734 - RNA, 17 nt, Human herpesvirus 7
uuucugagugcuaaaaa

SEQ ID NO: 348735 - RNA, 21 nt, Human herpesvirus 7
uuucugagugcuaaaaacgac

SEQ ID NO: 348736 - RNA, 16 nt, Human herpesvirus 7
uuucuggaucugccuc

SEQ ID NO: 348737 - RNA, 16 nt, Human herpesvirus 7
uuucuggcaauaaagu

SEQ ID NO: 348738 - RNA, 22 nt, Human herpesvirus 7
uuucuguaaucauauaugcauu

SEQ ID NO: 348739 - RNA, 19 nt, Human herpesvirus 7
uuucuuaccgcauaaauca

SEQ ID NO: 348740 - RNA, 12 nt, Human herpesvirus 7
uuucuuggguaa

SEQ ID NO: 348741 - RNA, 19 nt, Human herpesvirus 7
uuugaaaauuucuaucaca

SEQ ID NO: 348742 - RNA, 23 nt, Human herpesvirus 7
uuugaaaauuuuuugugauuuua

SEQ ID NO: 348743 - RNA, 19 nt, Human herpesvirus 7
uuugaacgagauggauuga

SEQ ID NO: 348744 - RNA, 19 nt, Human herpesvirus 7
uuugaacuguugccagaaa

SEQ ID NO: 348745 - RNA, 16 nt, Human herpesvirus 7
uuugaacuuguuuuga

SEQ ID NO: 348746 - RNA, 19 nt, Human herpesvirus 7
uuugaagagcguguuuuga

SEQ ID NO: 348747 - RNA, 22 nt, Human herpesvirus 7
uuugaauauugcuagucucaau

SEQ ID NO: 348748 - RNA, 19 nt, Human herpesvirus 7
uuugagaauuuuauggaua

SEQ ID NO: 348749 - RNA, 12 nt, Human herpesvirus 7
uuugagcaguga

SEQ ID NO: 348750 - RNA, 13 nt, Human herpesvirus 7
uuugauuaauuuc

SEQ ID NO: 348751 - RNA, 16 nt, Human herpesvirus 7
uuugauuccaucucac

SEQ ID NO: 348752 - RNA, 14 nt, Human herpesvirus 7
uuugauuugagaaa

SEQ ID NO: 348753 - RNA, 19 nt, Human herpesvirus 7
uuugcaaagucucauucau

SEQ ID NO: 348754 - RNA, 14 nt, Human herpesvirus 7
uuugcaauaugcua

SEQ ID NO: 348755 - RNA, 19 nt, Human herpesvirus 7
uuugcagccagaacucaau

SEQ ID NO: 348756 - RNA, 17 nt, Human herpesvirus 7
uuugcauaaacuaucaa

SEQ ID NO: 348757 - RNA, 14 nt, Human herpesvirus 7
uuugccugccagag

SEQ ID NO: 348758 - RNA, 15 nt, Human herpesvirus 7
uuugccuguuaaaag

SEQ ID NO: 348759 - RNA, 15 nt, Human herpesvirus 7
uuuggaaaaacagaa

SEQ ID NO: 348760 - RNA, 19 nt, Human herpesvirus 7
uuuggaaaacaacauacau

SEQ ID NO: 348761 - RNA, 19 nt, Human herpesvirus 7
uuuggaaauuguuugauca

SEQ ID NO: 348762 - RNA, 17 nt, Human herpesvirus 7
uuuggcuaacugagaaa

SEQ ID NO: 348763 - RNA, 23 nt, Human herpesvirus 7
uuuguaacuauaaauggaauuua

SEQ ID NO: 348764 - RNA, 14 nt, Human herpesvirus 7
uuuguaagaaacau

SEQ ID NO: 348765 - RNA, 12 nt, Human herpesvirus 7
uuuguacgugac

SEQ ID NO: 348766 - RNA, 12 nt, Human herpesvirus 7
uuugucaugaug

SEQ ID NO: 348767 - RNA, 16 nt, Human herpesvirus 7
uuugucuguugugcaa

SEQ ID NO: 348768 - RNA, 21 nt, Human herpesvirus 7
uuugugacucggaaccgagaa

SEQ ID NO: 348769 - RNA, 21 nt, Human herpesvirus 7
uuuguugucaucauauacaau

SEQ ID NO: 348770 - RNA, 13 nt, Human herpesvirus 7
uuuguuguuaucu

SEQ ID NO: 348771 - RNA, 21 nt, Human herpesvirus 7
uuuguuuaccuucauggcaca

SEQ ID NO: 348772 - RNA, 23 nt, Human herpesvirus 7
uuuuaaaaucuacuguaaucuga

SEQ ID NO: 348773 - RNA, 22 nt, Human herpesvirus 7
uuuuaaaauuggauuuugcaua

SEQ ID NO: 348774 - RNA, 12 nt, Human herpesvirus 7
uuuuaacaaucu

SEQ ID NO: 348775 - RNA, 14 nt, Human herpesvirus 7
uuuuaacaaucuaa

SEQ ID NO: 348776 - RNA, 22 nt, Human herpesvirus 7
uuuuaacuuuuuuuuucuuuag

SEQ ID NO: 348777 - RNA, 14 nt, Human herpesvirus 7
uuuuaauaugugaa

SEQ ID NO: 348778 - RNA, 12 nt, Human herpesvirus 7
uuuuaaugugcu

SEQ ID NO: 348779 - RNA, 17 nt, Human herpesvirus 7
uuuuacagccuguacaa

SEQ ID NO: 348780 - RNA, 16 nt, Human herpesvirus 7
uuuuacgcaugcuugc

SEQ ID NO: 348781 - RNA, 18 nt, Human herpesvirus 7
uuuuacgcaugcuugcuu

SEQ ID NO: 348782 - RNA, 17 nt, Human herpesvirus 7
uuuuacgugacugucag

SEQ ID NO: 348783 - RNA, 16 nt, Human herpesvirus 7
uuuuauggccauuuaa

SEQ ID NO: 348784 - RNA, 21 nt, Human herpesvirus 7
uuuuauugcgaaaaugauaaa

SEQ ID NO: 348785 - RNA, 12 nt, Human herpesvirus 7
uuuuauuuucag

SEQ ID NO: 348786 - RNA, 18 nt, Human herpesvirus 7
uuuuauuuuuuucugaaa

SEQ ID NO: 348787 - RNA, 19 nt, Human herpesvirus 7
uuuucaaagugugcccggg

SEQ ID NO: 348788 - RNA, 18 nt, Human herpesvirus 7
uuuucaaugcaacuuuaa

SEQ ID NO: 348789 - RNA, 12 nt, Human herpesvirus 7
uuuucacaucua

SEQ ID NO: 348790 - RNA, 16 nt, Human herpesvirus 7
uuuucaggcuaugacu

SEQ ID NO: 348791 - RNA, 20 nt, Human herpesvirus 7
uuuucaguuaugaugauuau

SEQ ID NO: 348792 - RNA, 13 nt, Human herpesvirus 7
uuuucgauuccau

SEQ ID NO: 348793 - RNA, 20 nt, Human herpesvirus 7
uuuucgcugaagaacauuaa

SEQ ID NO: 348794 - RNA, 15 nt, Human herpesvirus 7
uuuucguaucuguga

SEQ ID NO: 348795 - RNA, 18 nt, Human herpesvirus 7
uuuucuaaaucacuaguc

SEQ ID NO: 348796 - RNA, 19 nt, Human herpesvirus 7
uuuucucugaucauuugca

SEQ ID NO: 348797 - RNA, 17 nt, Human herpesvirus 7
uuuucugaaauccgcuu

SEQ ID NO: 348798 - RNA, 16 nt, Human herpesvirus 7
uuuucuuacacuauga

SEQ ID NO: 348799 - RNA, 22 nt, Human herpesvirus 7
uuuucuuagaugcauccaaaga

SEQ ID NO: 348800 - RNA, 21 nt, Human herpesvirus 7
uucaaaguacacguagacuga

SEQ ID NO: 348801 - RNA, 18 nt, Human herpesvirus 7
uucaaauguagacguagu

SEQ ID NO: 348802 - RNA, 14 nt, Human herpesvirus 7
uucaaauuauuucc

SEQ ID NO: 348803 - RNA, 15 nt, Human herpesvirus 7
uucaaauuauuucca

SEQ ID NO: 348804 - RNA, 16 nt, Human herpesvirus 7
uucaaauuauuuccag

SEQ ID NO: 348805 - RNA, 22 nt, Human herpesvirus 7
uucaacaccagucucugaauua

SEQ ID NO: 348806 - RNA, 14 nt, Human herpesvirus 7
uucaacauacagca

SEQ ID NO: 348807 - RNA, 20 nt, Human herpesvirus 7
uucaacaucuuucauaacaa

SEQ ID NO: 348808 - RNA, 13 nt, Human herpesvirus 7
uucaaccacagac

SEQ ID NO: 348809 - RNA, 15 nt, Human herpesvirus 7
uucaaccacagacac

SEQ ID NO: 348810 - RNA, 19 nt, Human herpesvirus 7
uucaaccacagacacacca

SEQ ID NO: 348811 - RNA, 14 nt, Human herpesvirus 7
uucaacgaucucaa

SEQ ID NO: 348812 - RNA, 21 nt, Human herpesvirus 7
uucaagauuaauauauuuucc

SEQ ID NO: 348813 - RNA, 17 nt, Human herpesvirus 7
uucaaggaauucugacu

SEQ ID NO: 348814 - RNA, 18 nt, Human herpesvirus 7
uucaauaauggcauuacu

SEQ ID NO: 348815 - RNA, 17 nt, Human herpesvirus 7
uucaauaugcaugcaau

SEQ ID NO: 348816 - RNA, 14 nt, Human herpesvirus 7
uucaaucaccaaag

SEQ ID NO: 348817 - RNA, 15 nt, Human herpesvirus 7
uucaaucaccaaaga

SEQ ID NO: 348818 - RNA, 20 nt, Human herpesvirus 7
uucaaucguuggcauuguau

SEQ ID NO: 348819 - RNA, 15 nt, Human herpesvirus 7
uucaaucuacuguac

SEQ ID NO: 348820 - RNA, 14 nt, Human herpesvirus 7
uucaauuaaugcau

SEQ ID NO: 348821 - RNA, 21 nt, Human herpesvirus 7
uucaauucaucaggacaauca

SEQ ID NO: 348822 - RNA, 12 nt, Human herpesvirus 7
uucaauugccac

SEQ ID NO: 348823 - RNA, 13 nt, Human herpesvirus 7
uucaauugccacc

SEQ ID NO: 348824 - RNA, 19 nt, Human herpesvirus 7
uucaauugguuguucaaaa

SEQ ID NO: 348825 - RNA, 15 nt, Human herpesvirus 7
uucacacaaugccuu

SEQ ID NO: 348826 - RNA, 12 nt, Human herpesvirus 7
uucacauuguca

SEQ ID NO: 348827 - RNA, 16 nt, Human herpesvirus 7
uucaguaucacuuaaa

SEQ ID NO: 348828 - RNA, 17 nt, Human herpesvirus 7
uucaguuaugaugauua

SEQ ID NO: 348829 - RNA, 18 nt, Human herpesvirus 7
uucaguucccauaaauau

SEQ ID NO: 348830 - RNA, 22 nt, Human herpesvirus 7
uucaguucccauaaauauugau

SEQ ID NO: 348831 - RNA, 17 nt, Human herpesvirus 7
uucauaaugacacgaca

SEQ ID NO: 348832 - RNA, 21 nt, Human herpesvirus 7
uucauaaugacacgacacuga

SEQ ID NO: 348833 - RNA, 19 nt, Human herpesvirus 7
uucauagcacucauacuaa

SEQ ID NO: 348834 - RNA, 13 nt, Human herpesvirus 7
uucaugcauugca

SEQ ID NO: 348835 - RNA, 14 nt, Human herpesvirus 7
uucaugcauugcau

SEQ ID NO: 348836 - RNA, 16 nt, Human herpesvirus 7
uucaugccuugccaaa

SEQ ID NO: 348837 - RNA, 15 nt, Human herpesvirus 7
uucauggcacauaua

SEQ ID NO: 348838 - RNA, 15 nt, Human herpesvirus 7
uucauguuuuaugac

SEQ ID NO: 348839 - RNA, 17 nt, Human herpesvirus 7
uucauuaucaccacaau

SEQ ID NO: 348840 - RNA, 16 nt, Human herpesvirus 7
uucauugagucuucau

SEQ ID NO: 348841 - RNA, 20 nt, Human herpesvirus 7
uuccaaaauguaaaccaaau

SEQ ID NO: 348842 - RNA, 15 nt, Human herpesvirus 7
uuccaacgcauucaa

SEQ ID NO: 348843 - RNA, 20 nt, Human herpesvirus 7
uuccaacgcauucaauggca

SEQ ID NO: 348844 - RNA, 17 nt, Human herpesvirus 7
uuccaauauagacauuu

SEQ ID NO: 348845 - RNA, 19 nt, Human herpesvirus 7
uuccaauucuuuguacuug

SEQ ID NO: 348846 - RNA, 17 nt, Human herpesvirus 7
uuccacguuuuuuagcu

SEQ ID NO: 348847 - RNA, 17 nt, Human herpesvirus 7
uuccagauaugacaaau

SEQ ID NO: 348848 - RNA, 21 nt, Human herpesvirus 7
uuccagauaugacaaauuuca

SEQ ID NO: 348849 - RNA, 17 nt, Human herpesvirus 7
uuccauaaauaaaaaca

SEQ ID NO: 348850 - RNA, 15 nt, Human herpesvirus 7
uuccauauauaagag

SEQ ID NO: 348851 - RNA, 19 nt, Human herpesvirus 7
uuccaucugguaaugucau

SEQ ID NO: 348852 - RNA, 11 nt, Human herpesvirus 7
uuccaucuuau

SEQ ID NO: 348853 - RNA, 20 nt, Human herpesvirus 7
uuccauuaagccagauuuca

SEQ ID NO: 348854 - RNA, 18 nt, Human herpesvirus 7
uuccauuuuuugucacug

SEQ ID NO: 348855 - RNA, 14 nt, Human herpesvirus 7
uucccacugggaca

SEQ ID NO: 348856 - RNA, 15 nt, Human herpesvirus 7
uuccgauuuaaguga

SEQ ID NO: 348857 - RNA, 19 nt, Human herpesvirus 7
uuccgauuuaagugaacug

SEQ ID NO: 348858 - RNA, 18 nt, Human herpesvirus 7
uuccgcauaaaaaaucua

SEQ ID NO: 348859 - RNA, 21 nt, Human herpesvirus 7
uuccgcauaaaaaaucuaauu

SEQ ID NO: 348860 - RNA, 19 nt, Human herpesvirus 7
uuccggaggucuacuggac

SEQ ID NO: 348861 - RNA, 15 nt, Human herpesvirus 7
uuccuaugauacaau

SEQ ID NO: 348862 - RNA, 12 nt, Human herpesvirus 7
uuccucauggcc

SEQ ID NO: 348863 - RNA, 12 nt, Human herpesvirus 7
uuccuuugaaaa

SEQ ID NO: 348864 - RNA, 21 nt, Human herpesvirus 7
uucgaucuaagucuacaucau

SEQ ID NO: 348865 - RNA, 13 nt, Human herpesvirus 7
uucgcaacaauca

SEQ ID NO: 348866 - RNA, 13 nt, Human herpesvirus 7
uucgcaacaauua

SEQ ID NO: 348867 - RNA, 18 nt, Human herpesvirus 7
uucgcaacaauuacuugu

SEQ ID NO: 348868 - RNA, 14 nt, Human herpesvirus 7
uucgcuguugauaa

SEQ ID NO: 348869 - RNA, 21 nt, Human herpesvirus 7
uucgggguauguauggcaaug

SEQ ID NO: 348870 - RNA, 21 nt, Human herpesvirus 7
uucguaacaaauucaaccaca

SEQ ID NO: 348871 - RNA, 18 nt, Human herpesvirus 7
uucguguucgauaguaau

SEQ ID NO: 348872 - RNA, 17 nt, Human herpesvirus 7
uucuaaaaauccuaaau

SEQ ID NO: 348873 - RNA, 20 nt, Human herpesvirus 7
uucuaaaacaguuaaugugu

SEQ ID NO: 348874 - RNA, 15 nt, Human herpesvirus 7
uucuaaauaugauga

SEQ ID NO: 348875 - RNA, 23 nt, Human herpesvirus 7
uucuaaauaugaugaaacuucca

SEQ ID NO: 348876 - RNA, 17 nt, Human herpesvirus 7
uucuaaauauucugugu

SEQ ID NO: 348877 - RNA, 13 nt, Human herpesvirus 7
uucuaauagacaa

SEQ ID NO: 348878 - RNA, 22 nt, Human herpesvirus 7
uucuaauuuuggcgaaacaaua

SEQ ID NO: 348879 - RNA, 18 nt, Human herpesvirus 7
uucuacauguuuaacaaa

SEQ ID NO: 348880 - RNA, 19 nt, Human herpesvirus 7
uucuacgaggguagacucu

SEQ ID NO: 348881 - RNA, 20 nt, Human herpesvirus 7
uucuagcaaaauaugcaaaa

SEQ ID NO: 348882 - RNA, 15 nt, Human herpesvirus 7
uucuaggcuugcauu

SEQ ID NO: 348883 - RNA, 21 nt, Human herpesvirus 7
uucuaucaaggucuuucaugc

SEQ ID NO: 348884 - RNA, 13 nt, Human herpesvirus 7
uucuauguaugaa

SEQ ID NO: 348885 - RNA, 20 nt, Human herpesvirus 7
uucuauuagauaaugacaaa

SEQ ID NO: 348886 - RNA, 21 nt, Human herpesvirus 7
uucuauuuuaaaaaccaugaa

SEQ ID NO: 348887 - RNA, 18 nt, Human herpesvirus 7
uucucaaaaaugauauga

SEQ ID NO: 348888 - RNA, 20 nt, Human herpesvirus 7
uucucaaaaaugauaugaca

SEQ ID NO: 348889 - RNA, 21 nt, Human herpesvirus 7
uucucaaaaaugauaugacau

SEQ ID NO: 348890 - RNA, 19 nt, Human herpesvirus 7
uucucacaccuuacuuuua

SEQ ID NO: 348891 - RNA, 23 nt, Human herpesvirus 7
uucuccacaguccucuagaucaa

SEQ ID NO: 348892 - RNA, 11 nt, Human herpesvirus 7
uucuccagaaa

SEQ ID NO: 348893 - RNA, 12 nt, Human herpesvirus 7
uucuccaugcau

SEQ ID NO: 348894 - RNA, 14 nt, Human herpesvirus 7
uucucccauucaau

SEQ ID NO: 348895 - RNA, 20 nt, Human herpesvirus 7
uucucguuauuuucaaacau

SEQ ID NO: 348896 - RNA, 23 nt, Human herpesvirus 7
uucucguuauuuucaaacaugau

SEQ ID NO: 348897 - RNA, 22 nt, Human herpesvirus 7
uucucucucuauuacacaggaa

SEQ ID NO: 348898 - RNA, 12 nt, Human herpesvirus 7
uucucuguagau

SEQ ID NO: 348899 - RNA, 20 nt, Human herpesvirus 7
uucucuuggaguuugucuca

SEQ ID NO: 348900 - RNA, 12 nt, Human herpesvirus 7
uucugaaaguga

SEQ ID NO: 348901 - RNA, 19 nt, Human herpesvirus 7
uucugacauuggaacuuua

SEQ ID NO: 348902 - RNA, 23 nt, Human herpesvirus 7
uucugacauuguacaauuacaaa

SEQ ID NO: 348903 - RNA, 19 nt, Human herpesvirus 7
uucuggcaacaguucaaaa

SEQ ID NO: 348904 - RNA, 20 nt, Human herpesvirus 7
uucuggcuuaagcagcagac

SEQ ID NO: 348905 - RNA, 16 nt, Human herpesvirus 7
uucuguagacauuucu

SEQ ID NO: 348906 - RNA, 13 nt, Human herpesvirus 7
uucugucaccaca

SEQ ID NO: 348907 - RNA, 18 nt, Human herpesvirus 7
uucugucaccacacucau

SEQ ID NO: 348908 - RNA, 17 nt, Human herpesvirus 7
uucuuaauuuguucaau

SEQ ID NO: 348909 - RNA, 19 nt, Human herpesvirus 7
uucuuagaucgaacuguua

SEQ ID NO: 348910 - RNA, 14 nt, Human herpesvirus 7
uucuuagaugcauc

SEQ ID NO: 348911 - RNA, 17 nt, Human herpesvirus 7
uucuuagcuuucaugau

SEQ ID NO: 348912 - RNA, 19 nt, Human herpesvirus 7
uucuuaggugcaauuuuca

SEQ ID NO: 348913 - RNA, 13 nt, Human herpesvirus 7
uucuuaucuccau

SEQ ID NO: 348914 - RNA, 19 nt, Human herpesvirus 7
uucuucagauucaguauca

SEQ ID NO: 348915 - RNA, 17 nt, Human herpesvirus 7
uucuucuaauacaucua

SEQ ID NO: 348916 - RNA, 16 nt, Human herpesvirus 7
uucuucuaauugcgca

SEQ ID NO: 348917 - RNA, 17 nt, Human herpesvirus 7
ugcuggcucaagcacaa

SEQ ID NO: 348918 - RNA, 22 nt, Human herpesvirus 7
ugcuguacugaaaccaaagcau

SEQ ID NO: 348919 - RNA, 15 nt, Human herpesvirus 7
ugcuuaaaaacagua

SEQ ID NO: 348920 - RNA, 22 nt, Human herpesvirus 7
ugcuuaacuuuuggaaugauau

SEQ ID NO: 348921 - RNA, 19 nt, Human herpesvirus 7
ugcuuacagugaaguaauu

SEQ ID NO: 348922 - RNA, 15 nt, Human herpesvirus 7
ugcuuagacuuauca

SEQ ID NO: 348923 - RNA, 19 nt, Human herpesvirus 7
ugcuuaucucucacacuca

SEQ ID NO: 348924 - RNA, 21 nt, Human herpesvirus 7
ugcuuauuuauauauggcaau

SEQ ID NO: 348925 - RNA, 20 nt, Human herpesvirus 7
ugcuucggaauuugauucca

SEQ ID NO: 348926 - RNA, 21 nt, Human herpesvirus 7
ugcuucggaauuugauuccau

SEQ ID NO: 348927 - RNA, 16 nt, Human herpesvirus 7
ugcuucucccauucaa

SEQ ID NO: 348928 - RNA, 20 nt, Human herpesvirus 7
ugcuucuucuaauacaucua

SEQ ID NO: 348929 - RNA, 11 nt, Human herpesvirus 7
ugcuugcugaa

SEQ ID NO: 348930 - RNA, 23 nt, Human herpesvirus 7
ugcuugcuuugcauagauuaaau

SEQ ID NO: 348931 - RNA, 13 nt, Human herpesvirus 7
ugcuuuucaugcu

SEQ ID NO: 348932 - RNA, 15 nt, Human herpesvirus 7
uggaaaaacagaaug

SEQ ID NO: 348933 - RNA, 17 nt, Human herpesvirus 7
uggaaaaauaaacaaua

SEQ ID NO: 348934 - RNA, 16 nt, Human herpesvirus 7
uggaaaacaacauaca

SEQ ID NO: 348935 - RNA, 15 nt, Human herpesvirus 7
uggaaaacauuucag

SEQ ID NO: 348936 - RNA, 16 nt, Human herpesvirus 7
uggaaacaaauugugg

SEQ ID NO: 348937 - RNA, 18 nt, Human herpesvirus 7
uggaaagcaaaagccaca

SEQ ID NO: 348938 - RNA, 21 nt, Human herpesvirus 7
uggaaagcaaaagccacagau

SEQ ID NO: 348939 - RNA, 17 nt, Human herpesvirus 7
uggaaagcucauuucau

SEQ ID NO: 348940 - RNA, 19 nt, Human herpesvirus 7
ucaaaaaacacguccaaga

SEQ ID NO: 348941 - RNA, 20 nt, Human herpesvirus 7
ucaaaaaauaauuccuucua

SEQ ID NO: 348942 - RNA, 17 nt, Human herpesvirus 7
ucaaaacauaucagauu

SEQ ID NO: 348943 - RNA, 14 nt, Human herpesvirus 7
ucaaaagcugcagc

SEQ ID NO: 348944 - RNA, 19 nt, Human herpesvirus 7
ucaaaauauuuaucugcau

SEQ ID NO: 348945 - RNA, 15 nt, Human herpesvirus 7
ucaaaauuccauucg

SEQ ID NO: 348946 - RNA, 19 nt, Human herpesvirus 7
ucaaaauuuuauugucuaa

SEQ ID NO: 348947 - RNA, 15 nt, Human herpesvirus 7
ucaaacaacauaucg

SEQ ID NO: 348948 - RNA, 21 nt, Human herpesvirus 7
ucaaacaauacccaauacaua

SEQ ID NO: 348949 - RNA, 12 nt, Human herpesvirus 7
ucaaacauguaa

SEQ ID NO: 348950 - RNA, 16 nt, Human herpesvirus 7
ucaaacguaaugcaaa

SEQ ID NO: 348951 - RNA, 20 nt, Human herpesvirus 7
ucaaauaagggauaucuuaa

SEQ ID NO: 348952 - RNA, 14 nt, Human herpesvirus 7
ucaaauaucucugu

SEQ ID NO: 348953 - RNA, 17 nt, Human herpesvirus 7
ucaaaucaaaguuuuaa

SEQ ID NO: 348954 - RNA, 20 nt, Human herpesvirus 7
ucaaauuauaccucagcuuu

SEQ ID NO: 348955 - RNA, 23 nt, Human herpesvirus 7
ucaaauuguuuuucuuucuugca

SEQ ID NO: 348956 - RNA, 21 nt, Human herpesvirus 7
ucaaauuuaucucauagcuua

SEQ ID NO: 348957 - RNA, 15 nt, Human herpesvirus 7
ucaaauuuugauucc

SEQ ID NO: 348958 - RNA, 17 nt, Human herpesvirus 7
ucaacacaauuuucaca

SEQ ID NO: 348959 - RNA, 22 nt, Human herpesvirus 7
ucaacaccagucucugaauuau

SEQ ID NO: 348960 - RNA, 20 nt, Human herpesvirus 7
ucaacagagcgcuuugcuua

SEQ ID NO: 348961 - RNA, 16 nt, Human herpesvirus 7
ucaacaucuuucauaa

SEQ ID NO: 348962 - RNA, 20 nt, Human herpesvirus 7
ucaaccaacauucuugucaa

SEQ ID NO: 348963 - RNA, 22 nt, Human herpesvirus 7
ucaacuugaaugagcugacaga

SEQ ID NO: 348964 - RNA, 14 nt, Human herpesvirus 7
ucaagaauggcuga

SEQ ID NO: 348965 - RNA, 24 nt, Human herpesvirus 7
ucaagacacguuucucuguagaua

SEQ ID NO: 348966 - RNA, 21 nt, Human herpesvirus 7
ucaagacgcuguaugcaagaa

SEQ ID NO: 348967 - RNA, 22 nt, Human herpesvirus 7
ucaagacgcuguaugcaagaaa

SEQ ID NO: 348968 - RNA, 14 nt, Human herpesvirus 7
ucaagauaagcaau

SEQ ID NO: 348969 - RNA, 15 nt, Human herpesvirus 7
ucaaggaauucugac

SEQ ID NO: 348970 - RNA, 16 nt, Human herpesvirus 7
ucaauagcagagaaua

SEQ ID NO: 348971 - RNA, 19 nt, Human herpesvirus 7
ucaauagcauaugcuggau

SEQ ID NO: 348972 - RNA, 17 nt, Human herpesvirus 7
ucaauaguuaauugugu

SEQ ID NO: 348973 - RNA, 22 nt, Human herpesvirus 7
ucaauaguuuuacaaagaacau

SEQ ID NO: 348974 - RNA, 15 nt, Human herpesvirus 7
ucaauaugcaugcaa

SEQ ID NO: 348975 - RNA, 18 nt, Human herpesvirus 7
ucaauaugcaugcaauuu

SEQ ID NO: 348976 - RNA, 14 nt, Human herpesvirus 7
ucaaucacauacuc

SEQ ID NO: 348977 - RNA, 16 nt, Human herpesvirus 7
ucaaucacauacucua

SEQ ID NO: 348978 - RNA, 14 nt, Human herpesvirus 7
ucaaucaccaaaga

SEQ ID NO: 348979 - RNA, 16 nt, Human herpesvirus 7
ucaaucaccaaagagu

SEQ ID NO: 348980 - RNA, 18 nt, Human herpesvirus 7
ucaaucuacuguacuuuu

SEQ ID NO: 348981 - RNA, 13 nt, Human herpesvirus 7
ucaaucugcaaaa

SEQ ID NO: 348982 - RNA, 15 nt, Human herpesvirus 7
ucaauggcaucuuau

SEQ ID NO: 348983 - RNA, 13 nt, Human herpesvirus 7
ucaauguucgaua

SEQ ID NO: 348984 - RNA, 15 nt, Human herpesvirus 7
ucaauuaaugcauug

SEQ ID NO: 348985 - RNA, 17 nt, Human herpesvirus 7
ucaauuaaugcauugga

SEQ ID NO: 348986 - RNA, 18 nt, Human herpesvirus 7
ucaauuaaugcauuggaa

SEQ ID NO: 348987 - RNA, 17 nt, Human herpesvirus 7
ucaauuuuaaugugcuu

SEQ ID NO: 348988 - RNA, 20 nt, Human herpesvirus 7
ucacaaaacucuucuuuaua

SEQ ID NO: 348989 - RNA, 16 nt, Human herpesvirus 7
ucacaaaagcuuugau

SEQ ID NO: 348990 - RNA, 19 nt, Human herpesvirus 7
ucacaaaagcuuugaucua

SEQ ID NO: 348991 - RNA, 23 nt, Human herpesvirus 7
ucacaacauauagauaaugaagu

SEQ ID NO: 348992 - RNA, 13 nt, Human herpesvirus 7
ucacacaaugccu

SEQ ID NO: 348993 - RNA, 17 nt, Human herpesvirus 7
ucacagaaaucccaaaa

SEQ ID NO: 348994 - RNA, 22 nt, Human herpesvirus 7
ucacagcuagauugacuaugaa

SEQ ID NO: 348995 - RNA, 21 nt, Human herpesvirus 7
ucacaucuagaguaucuuuuc

SEQ ID NO: 348996 - RNA, 13 nt, Human herpesvirus 7
ucaccgaugaauu

SEQ ID NO: 348997 - RNA, 22 nt, Human herpesvirus 7
ucacgauauauuggcaugcuua

SEQ ID NO: 348998 - RNA, 22 nt, Human herpesvirus 7
ucacgcaagucacaauuacaca

SEQ ID NO: 348999 - RNA, 18 nt, Human herpesvirus 7
ucacggauuagcuuucag

SEQ ID NO: 349000 - RNA, 16 nt, Human herpesvirus 7
ucacuacuacaugaau

SEQ ID NO: 349001 - RNA, 16 nt, Human herpesvirus 7
ucacucgcgacuuuuu

SEQ ID NO: 349002 - RNA, 18 nt, Human herpesvirus 7
ucacucgcgacuuuuugg

SEQ ID NO: 349003 - RNA, 16 nt, Human herpesvirus 7
ucacugcucaaaucaa

SEQ ID NO: 349004 - RNA, 14 nt, Human herpesvirus 7
ucacugucacuguc

SEQ ID NO: 349005 - RNA, 17 nt, Human herpesvirus 7
ucacuuaaagaacucca

SEQ ID NO: 349006 - RNA, 23 nt, Human herpesvirus 7
ucacuuauuuuagaaagugaaaa

SEQ ID NO: 349007 - RNA, 14 nt, Human herpesvirus 7
ucacuuugcaucaa

SEQ ID NO: 349008 - RNA, 18 nt, Human herpesvirus 7
ucagaaaauaaaaguaaa

SEQ ID NO: 349009 - RNA, 19 nt, Human herpesvirus 7
ucagaaaauaaaaguaaaa

SEQ ID NO: 349010 - RNA, 19 nt, Human herpesvirus 7
ucagaacauugucaaagaa

SEQ ID NO: 349011 - RNA, 19 nt, Human herpesvirus 7
ucagaacuuuuaaaaaaga

SEQ ID NO: 349012 - RNA, 13 nt, Human herpesvirus 7
ucagagaugaucu

SEQ ID NO: 349013 - RNA, 12 nt, Human herpesvirus 7
ucagauguggag

SEQ ID NO: 349014 - RNA, 17 nt, Human herpesvirus 7
ucagcaaaucugaaaau

SEQ ID NO: 349015 - RNA, 19 nt, Human herpesvirus 7
ucagcauuuaccauuucga

SEQ ID NO: 349016 - RNA, 23 nt, Human herpesvirus 7
ucagcauuugguaaaaaaaaugg

SEQ ID NO: 349017 - RNA, 19 nt, Human herpesvirus 7
ucaggaaaaucacagcauu

SEQ ID NO: 349018 - RNA, 18 nt, Human herpesvirus 7
ucaggcuaugacuuugaa

SEQ ID NO: 349019 - RNA, 19 nt, Human herpesvirus 7
ucaggcuaugacuuugaau

SEQ ID NO: 349020 - RNA, 22 nt, Human herpesvirus 7
ucaguuaucaaguagaauacca

SEQ ID NO: 349021 - RNA, 15 nt, Human herpesvirus 7
ucaguuuacugugga

SEQ ID NO: 349022 - RNA, 24 nt, Human herpesvirus 7
uguaugcuauuaaaugauuucaga

SEQ ID NO: 349023 - RNA, 17 nt, Human herpesvirus 7
ugucaauaaucaauaaa

SEQ ID NO: 349024 - RNA, 15 nt, Human herpesvirus 7
ugucacacuuauucc

SEQ ID NO: 349025 - RNA, 19 nt, Human herpesvirus 7
ugucacugucacuguccaa

SEQ ID NO: 349026 - RNA, 15 nt, Human herpesvirus 7
ugucacuguccaaaa

SEQ ID NO: 349027 - RNA, 22 nt, Human herpesvirus 7
ugucacuuaaagaacuccauuc

SEQ ID NO: 349028 - RNA, 18 nt, Human herpesvirus 7
ugucagccgcuuuacgaa

SEQ ID NO: 349029 - RNA, 14 nt, Human herpesvirus 7
ugucaucauauaca

SEQ ID NO: 349030 - RNA, 13 nt, Human herpesvirus 7
ugucaugaugaau

SEQ ID NO: 349031 - RNA, 23 nt, Human herpesvirus 7
uguccacuaagacggaacuucuu

SEQ ID NO: 349032 - RNA, 22 nt, Human herpesvirus 7
uguccagacagcuguauaucua

SEQ ID NO: 349033 - RNA, 16 nt, Human herpesvirus 7
ugucuaaaaguacagu

SEQ ID NO: 349034 - RNA, 20 nt, Human herpesvirus 7
ugucuacaauuucuggcaau

SEQ ID NO: 349035 - RNA, 22 nt, Human herpesvirus 7
ugucuacaauuucuggcaauaa

SEQ ID NO: 349036 - RNA, 13 nt, Human herpesvirus 7
ugucuaucauuuc

SEQ ID NO: 349037 - RNA, 18 nt, Human herpesvirus 7
ugucucacgagaaagggc

SEQ ID NO: 349038 - RNA, 21 nt, Human herpesvirus 7
ugucucucgcaacuucugaua

SEQ ID NO: 349039 - RNA, 14 nt, Human herpesvirus 7
ugucucuguuccca

SEQ ID NO: 349040 - RNA, 18 nt, Human herpesvirus 7
ugucuguuguaacagauu

SEQ ID NO: 349041 - RNA, 17 nt, Human herpesvirus 7
ugucuguugugcaauuu

SEQ ID NO: 349042 - RNA, 16 nt, Human herpesvirus 7
ugucuuaauugccgau

SEQ ID NO: 349043 - RNA, 15 nt, Human herpesvirus 7
ugucuuacagcacuu

SEQ ID NO: 349044 - RNA, 17 nt, Human herpesvirus 7
ugucuucuugcauuucc

SEQ ID NO: 349045 - RNA, 19 nt, Human herpesvirus 7
ugugaaaauaaacaggaac

SEQ ID NO: 349046 - RNA, 17 nt, Human herpesvirus 7
ugugaagacuacauaaa

SEQ ID NO: 349047 - RNA, 19 nt, Human herpesvirus 7
ugugacccugucacacuua

SEQ ID NO: 349048 - RNA, 20 nt, Human herpesvirus 7
ugugacccugucacacuuau

SEQ ID NO: 349049 - RNA, 14 nt, Human herpesvirus 7
ugugagaaauggaa

SEQ ID NO: 349050 - RNA, 13 nt, Human herpesvirus 7
ugugauguacugc

SEQ ID NO: 349051 - RNA, 16 nt, Human herpesvirus 7
ugugcaauuuggcucu

SEQ ID NO: 349052 - RNA, 17 nt, Human herpesvirus 7
ugugcacacaaaggcca

SEQ ID NO: 349053 - RNA, 16 nt, Human herpesvirus 7
ugugcauuucacuugu

SEQ ID NO: 349054 - RNA, 23 nt, Human herpesvirus 7
ugugcucugaauaauaugcuuuc

SEQ ID NO: 349055 - RNA, 14 nt, Human herpesvirus 7
uguggagagauuca

SEQ ID NO: 349056 - RNA, 15 nt, Human herpesvirus 7
uguggagggauauga

SEQ ID NO: 349057 - RNA, 21 nt, Human herpesvirus 7
uguggcuuuugcuuuccauca

SEQ ID NO: 349058 - RNA, 22 nt, Human herpesvirus 7
ugugguauuguauaugcucuag

SEQ ID NO: 349059 - RNA, 16 nt, Human herpesvirus 7
uguguaacaauugagu

SEQ ID NO: 349060 - RNA, 19 nt, Human herpesvirus 7
ugugucacguguucaggca

SEQ ID NO: 349061 - RNA, 12 nt, Human herpesvirus 7
ugugucaucaca

SEQ ID NO: 349062 - RNA, 14 nt, Human herpesvirus 7
uguguccagauaau

SEQ ID NO: 349063 - RNA, 22 nt, Human herpesvirus 7
uguguuaauugugguacaacaa

SEQ ID NO: 349064 - RNA, 17 nt, Human herpesvirus 7
uguguucgguguuuuaa

SEQ ID NO: 349065 - RNA, 21 nt, Human herpesvirus 7
uguuaaaaguucauaaugaca

SEQ ID NO: 349066 - RNA, 16 nt, Human herpesvirus 7
uguuaaaggaucaaaa

SEQ ID NO: 349067 - RNA, 17 nt, Human herpesvirus 7
uguuacaacuuugccaa

SEQ ID NO: 349068 - RNA, 21 nt, Human herpesvirus 7
uguuaggccaguucuaucuca

SEQ ID NO: 349069 - RNA, 18 nt, Human herpesvirus 7
uguuauuguaucuaugaa

SEQ ID NO: 349070 - RNA, 23 nt, Human herpesvirus 7
uguucaaaaaagauuccugauga

SEQ ID NO: 349071 - RNA, 16 nt, Human herpesvirus 7
uguucaaauaugcaug

SEQ ID NO: 349072 - RNA, 15 nt, Human herpesvirus 7
uguucaaucacauac

SEQ ID NO: 349073 - RNA, 13 nt, Human herpesvirus 7
uguucagcuccag

SEQ ID NO: 349074 - RNA, 16 nt, Human herpesvirus 7
uguucauaaaccugcu

SEQ ID NO: 349075 - RNA, 13 nt, Human herpesvirus 7
uguucauaucaau

SEQ ID NO: 349076 - RNA, 17 nt, Human herpesvirus 7
uguucgcaaauguacaa

SEQ ID NO: 349077 - RNA, 20 nt, Human herpesvirus 7
uguucgguguuuuaagauac

SEQ ID NO: 349078 - RNA, 15 nt, Human herpesvirus 7
uguucucaauagcau

SEQ ID NO: 349079 - RNA, 21 nt, Human herpesvirus 7
uguugaaagaaaagauguacg

SEQ ID NO: 349080 - RNA, 14 nt, Human herpesvirus 7
uguugaaguugaac

SEQ ID NO: 349081 - RNA, 22 nt, Human herpesvirus 7
uguugaaguugaacaauggugu

SEQ ID NO: 349082 - RNA, 22 nt, Human herpesvirus 7
uguugacuauauuuuguuaaga

SEQ ID NO: 349083 - RNA, 12 nt, Human herpesvirus 7
uguugauucucu

SEQ ID NO: 349084 - RNA, 22 nt, Human herpesvirus 7
uguugcaaauguuccacgauca

SEQ ID NO: 349085 - RNA, 13 nt, Human herpesvirus 7
uguugcauaucau

SEQ ID NO: 349086 - RNA, 23 nt, Human herpesvirus 7
uguuguagguaauuucuuauaau

SEQ ID NO: 349087 - RNA, 21 nt, Human herpesvirus 7
uguuuaaaugaagagaauuua

SEQ ID NO: 349088 - RNA, 13 nt, Human herpesvirus 7
uguuucagcuuuu

SEQ ID NO: 349089 - RNA, 23 nt, Human herpesvirus 7
uguuuccgaucuaaagacacuua

SEQ ID NO: 349090 - RNA, 23 nt, Human herpesvirus 7
uguuuccgcauaaaaaaucuaau

SEQ ID NO: 349091 - RNA, 17 nt, Human herpesvirus 7
uguuucuggaucugccu

SEQ ID NO: 349092 - RNA, 9 nt, Human herpesvirus 7
uguuugauc

SEQ ID NO: 349093 - RNA, 16 nt, Human herpesvirus 7
uguuuuaugacucaga

SEQ ID NO: 349094 - RNA, 18 nt, Human herpesvirus 7
uguuuugucucuuuacag

SEQ ID NO: 349095 - RNA, 17 nt, Human herpesvirus 7
uguuuuuuauuuagcua

SEQ ID NO: 349096 - RNA, 20 nt, Human herpesvirus 7
uuaaaaaaaaaaccacaaaa

SEQ ID NO: 349097 - RNA, 15 nt, Human herpesvirus 7
uuaaaaaccaugaaa

SEQ ID NO: 349098 - RNA, 14 nt, Human herpesvirus 7
uuaaaaauaucaga

SEQ ID NO: 349099 - RNA, 14 nt, Human herpesvirus 7
uuaaaaauuaacag

SEQ ID NO: 349100 - RNA, 16 nt, Human herpesvirus 7
uuaaaacaagacagaa

SEQ ID NO: 349101 - RNA, 13 nt, Human herpesvirus 7
uuaaaacuuugaa

SEQ ID NO: 349102 - RNA, 14 nt, Human herpesvirus 7
uuaaaauauguuca

SEQ ID NO: 349103 - RNA, 15 nt, Human herpesvirus 7
uuaaaaucuacugua

SEQ ID NO: 349104 - RNA, 12 nt, Human herpesvirus 7
uuaaaaugauua

SEQ ID NO: 349105 - RNA, 13 nt, Human herpesvirus 7
uuaaaaugauuag

SEQ ID NO: 349106 - RNA, 18 nt, Human herpesvirus 7
uuaaaauguacauaacuc

SEQ ID NO: 349107 - RNA, 23 nt, Human herpesvirus 7
uuaaaauuaauaauauuaguauu

SEQ ID NO: 349108 - RNA, 23 nt, Human herpesvirus 7
uuaaaauuauuaauauuaguauu

SEQ ID NO: 349109 - RNA, 15 nt, Human herpesvirus 7
uuaaaauucaguauu

SEQ ID NO: 349110 - RNA, 17 nt, Human herpesvirus 7
uuaaaauuucauaucua

SEQ ID NO: 349111 - RNA, 19 nt, Human herpesvirus 7
uuaaacagcguucaaucaa

SEQ ID NO: 349112 - RNA, 20 nt, Human herpesvirus 7
uuaaacgaacucuuguucau

SEQ ID NO: 349113 - RNA, 20 nt, Human herpesvirus 7
uuaaacuugugaaaauaaca

SEQ ID NO: 349114 - RNA, 17 nt, Human herpesvirus 7
uuaaagacggaauuugu

SEQ ID NO: 349115 - RNA, 13 nt, Human herpesvirus 7
uuaaagggggaaa

SEQ ID NO: 349116 - RNA, 12 nt, Human herpesvirus 7
uuaaagugugau

SEQ ID NO: 349117 - RNA, 14 nt, Human herpesvirus 7
uuaaauagugaauc

SEQ ID NO: 349118 - RNA, 18 nt, Human herpesvirus 7
uuaaaucaguuguuggaa

SEQ ID NO: 349119 - RNA, 15 nt, Human herpesvirus 7
uuaaaucauaccaua

SEQ ID NO: 349120 - RNA, 23 nt, Human herpesvirus 7
uuaaaucauaccauaaauaccaa

SEQ ID NO: 349121 - RNA, 21 nt, Human herpesvirus 7
uuaaaugaagagaauuuagau

SEQ ID NO: 349122 - RNA, 15 nt, Human herpesvirus 7
uuaaaugugucuuac

SEQ ID NO: 349123 - RNA, 21 nt, Human herpesvirus 7
uuaaauuauuauuaguauugu

SEQ ID NO: 349124 - RNA, 16 nt, Human herpesvirus 7
uuaaauuuccaucuac

SEQ ID NO: 349125 - RNA, 18 nt, Human herpesvirus 7
uuaacagcucuaucguca

SEQ ID NO: 349126 - RNA, 21 nt, Human herpesvirus 7
uuaacauguguauauuugcug

SEQ ID NO: 349127 - RNA, 18 nt, Human herpesvirus 7
uuaaccacaacugugaca

SEQ ID NO: 349128 - RNA, 19 nt, Human herpesvirus 7
uuaacgaaggcaucaagaa

SEQ ID NO: 349129 - RNA, 16 nt, Human herpesvirus 7
uuaacgacgaugcugc

SEQ ID NO: 349130 - RNA, 13 nt, Human herpesvirus 7
uuaacgcugaauu

SEQ ID NO: 349131 - RNA, 17 nt, Human herpesvirus 7
uuaacuauaucaucauc

SEQ ID NO: 349132 - RNA, 23 nt, Human herpesvirus 7
uuaacuggaauuauacacuguga

SEQ ID NO: 349133 - RNA, 17 nt, Human herpesvirus 7
uuaagaacagaaugaua

SEQ ID NO: 349134 - RNA, 12 nt, Human herpesvirus 7
uuaagaauucca

SEQ ID NO: 349135 - RNA, 18 nt, Human herpesvirus 7
uuaagacauuauuugcug

SEQ ID NO: 349136 - RNA, 21 nt, Human herpesvirus 7
uuaagagacauugaaaaugca

SEQ ID NO: 349137 - RNA, 20 nt, Human herpesvirus 7
uuaagccuaggauaccaaac

SEQ ID NO: 349138 - RNA, 23 nt, Human herpesvirus 7
uuaagcuucaaaaauguuuacaa

SEQ ID NO: 349139 - RNA, 22 nt, Human herpesvirus 7
uuaauaaaaacaaagacuauaa

SEQ ID NO: 349140 - RNA, 16 nt, Human herpesvirus 7
uuaauaaaaugaugau

SEQ ID NO: 349141 - RNA, 23 nt, Human herpesvirus 7
uuaauaaaaugaugaugacaaaa

SEQ ID NO: 349142 - RNA, 16 nt, Human herpesvirus 7
uuaauaacagcaccgu

SEQ ID NO: 349143 - RNA, 18 nt, Human herpesvirus 7
uuaauauuaauacgucca

SEQ ID NO: 349144 - RNA, 18 nt, Human herpesvirus 7
uuaauccguaucuagaga

SEQ ID NO: 349145 - RNA, 17 nt, Human herpesvirus 7
uuaaugaaaaagccaua

SEQ ID NO: 349146 - RNA, 16 nt, Human herpesvirus 7
uuaaugguaccuuaga

SEQ ID NO: 349147 - RNA, 14 nt, Human herpesvirus 7
uuaaugguuggcaa

SEQ ID NO: 349148 - RNA, 19 nt, Human herpesvirus 7
uuaaugucucuguucccac

SEQ ID NO: 349149 - RNA, 15 nt, Human herpesvirus 7
uuaaugucugugucu

SEQ ID NO: 349150 - RNA, 23 nt, Human herpesvirus 7
uuaauguuuuuccuaugauacaa

SEQ ID NO: 349151 - RNA, 20 nt, Human herpesvirus 7
uuaauugccgauuccuacaa

SEQ ID NO: 349152 - RNA, 17 nt, Human herpesvirus 7
uuaauugugguacaaca

SEQ ID NO: 349153 - RNA, 19 nt, Human herpesvirus 7
uuaauugugguacaacaaa

SEQ ID NO: 349154 - RNA, 21 nt, Human herpesvirus 7
uuaauugugguacaacaaaca

SEQ ID NO: 349155 - RNA, 21 nt, Human herpesvirus 7
uuaauuguuuuuuauuuagcu

SEQ ID NO: 349156 - RNA, 13 nt, Human herpesvirus 7
uuacaaaacaaag

SEQ ID NO: 349157 - RNA, 19 nt, Human herpesvirus 7
uuacaaaaugaguguaauu

SEQ ID NO: 349158 - RNA, 22 nt, Human herpesvirus 7
uuacaaacauguuccauucaau

SEQ ID NO: 349159 - RNA, 13 nt, Human herpesvirus 7
uuacaacaaagaa

SEQ ID NO: 349160 - RNA, 15 nt, Human herpesvirus 7
uuacaacuuugccaa

SEQ ID NO: 349161 - RNA, 20 nt, Human herpesvirus 7
uuacaagaugcgaguccaaa

SEQ ID NO: 349162 - RNA, 15 nt, Human herpesvirus 7
uuacaaggugacaga

SEQ ID NO: 349163 - RNA, 13 nt, Human herpesvirus 7
uuacagagaauuu

SEQ ID NO: 349164 - RNA, 21 nt, Human herpesvirus 7
uuacagccuguacaaauuucu

SEQ ID NO: 349165 - RNA, 11 nt, Human herpesvirus 7
uuacaguguuu

SEQ ID NO: 349166 - RNA, 21 nt, Human herpesvirus 7
uuacauauuaguuuaacuuac

SEQ ID NO: 349167 - RNA, 13 nt, Human herpesvirus 7
uuacauuacugga

SEQ ID NO: 349168 - RNA, 17 nt, Human herpesvirus 7
uuacauuauuauuugac

SEQ ID NO: 349169 - RNA, 11 nt, Human herpesvirus 7
uuacauugcag

SEQ ID NO: 349170 - RNA, 16 nt, Human herpesvirus 7
uuacauuucauuccaa

SEQ ID NO: 349171 - RNA, 22 nt, Human herpesvirus 7
uuaccauuucgaauuuguucaa

SEQ ID NO: 349172 - RNA, 20 nt, Human herpesvirus 7
uuaccgucuuuugauuuugc

SEQ ID NO: 349173 - RNA, 18 nt, Human herpesvirus 7
uuacgaugacagucuacu

SEQ ID NO: 349174 - RNA, 18 nt, Human herpesvirus 7
uuacgucuuuucuaccaa

SEQ ID NO: 349175 - RNA, 17 nt, Human herpesvirus 7
uuacgugaugccauaau

SEQ ID NO: 349176 - RNA, 21 nt, Human herpesvirus 7
uuacgugaugccauaauuuca

SEQ ID NO: 349177 - RNA, 15 nt, Human herpesvirus 7
uuacuauuugacugg

SEQ ID NO: 349178 - RNA, 17 nt, Human herpesvirus 7
uuacucgaugcuucaau

SEQ ID NO: 349179 - RNA, 15 nt, Human herpesvirus 7
uuacucugugguauu

SEQ ID NO: 349180 - RNA, 23 nt, Human herpesvirus 7
uuacuggaugauguuauacauaa

SEQ ID NO: 349181 - RNA, 21 nt, Human herpesvirus 7
uuacuggcagaaauauaugaa

SEQ ID NO: 349182 - RNA, 20 nt, Human herpesvirus 7
uuacuuauuuuaaauuuuuc

SEQ ID NO: 349183 - RNA, 23 nt, Human herpesvirus 7
uuacuuccuaaucuaacaguuuc

SEQ ID NO: 349184 - RNA, 22 nt, Human herpesvirus 7
uuacuuggaaacaaauugugga

SEQ ID NO: 349185 - RNA, 15 nt, Human herpesvirus 7
uuagaaaaucaaaaa

SEQ ID NO: 349186 - RNA, 18 nt, Human herpesvirus 7
uuagaaagcucacuucaa

SEQ ID NO: 349187 - RNA, 13 nt, Human herpesvirus 7
uuagaaaucuuuc

SEQ ID NO: 349188 - RNA, 17 nt, Human herpesvirus 7
uuagaaucuuuugcaca

SEQ ID NO: 349189 - RNA, 13 nt, Human herpesvirus 7
uuagaccuaucaa

SEQ ID NO: 349190 - RNA, 16 nt, Human herpesvirus 7
uuagagcauauuccau

SEQ ID NO: 349191 - RNA, 15 nt, Human herpesvirus 7
uuagauaaugacaaa

SEQ ID NO: 349192 - RNA, 14 nt, Human herpesvirus 7
uuagauuauacaaa

SEQ ID NO: 349193 - RNA, 15 nt, Human herpesvirus 7
uuagauuauacaaau

SEQ ID NO: 349194 - RNA, 19 nt, Human herpesvirus 7
uuagauuauacaaauccaa

SEQ ID NO: 349195 - RNA, 16 nt, Human herpesvirus 7
uuagauuccauuuaaa

SEQ ID NO: 349196 - RNA, 16 nt, Human herpesvirus 7
uuagcaccaacugaau

SEQ ID NO: 349197 - RNA, 18 nt, Human herpesvirus 7
uuagcgaauuugugcugu

SEQ ID NO: 349198 - RNA, 16 nt, Human herpesvirus 7
uuagcgaggcauuuac

SEQ ID NO: 349199 - RNA, 13 nt, Human herpesvirus 7
uuagcuaauucau

SEQ ID NO: 349200 - RNA, 18 nt, Human herpesvirus 7
uuagcuuucaugauuuca

SEQ ID NO: 349201 - RNA, 20 nt, Human herpesvirus 7
uuagcuuuugaauaaucuca

SEQ ID NO: 349202 - RNA, 22 nt, Human herpesvirus 7
uuagcuuuugaauaaucucaau

SEQ ID NO: 349203 - RNA, 18 nt, Human herpesvirus 7
uuaggaaucagaccagca

SEQ ID NO: 349204 - RNA, 13 nt, Human herpesvirus 7
uuaggacuuuaca

SEQ ID NO: 349205 - RNA, 18 nt, Human herpesvirus 7
uuaggcagcgcuugauac

SEQ ID NO: 349206 - RNA, 15 nt, Human herpesvirus 7
uuaggggaagaauca

SEQ ID NO: 349207 - RNA, 19 nt, Human herpesvirus 7
uuagugauagaguacaugu

SEQ ID NO: 349208 - RNA, 21 nt, Human herpesvirus 7
uuagugauagaguacaugugu

SEQ ID NO: 349209 - RNA, 20 nt, Human herpesvirus 7
uuauaaaagauggaaaguuu

SEQ ID NO: 349210 - RNA, 21 nt, Human herpesvirus 7
uuauaaaauauggacuuuuaa

SEQ ID NO: 349211 - RNA, 18 nt, Human herpesvirus 7
uuauaaauguaacuuuca

SEQ ID NO: 349212 - RNA, 19 nt, Human herpesvirus 7
uuauaacuuuaucauuacu

SEQ ID NO: 349213 - RNA, 21 nt, Human herpesvirus 7
uuauaauacuggcaugucuca

SEQ ID NO: 349214 - RNA, 14 nt, Human herpesvirus 7
uuauaauguaagaa

SEQ ID NO: 349215 - RNA, 14 nt, Human herpesvirus 7
uuauacacugugaa

SEQ ID NO: 349216 - RNA, 22 nt, Human herpesvirus 7
uuauacauaaagagaaaguaaa

SEQ ID NO: 349217 - RNA, 17 nt, Human herpesvirus 7
uuauacuuuuuuuacuu

SEQ ID NO: 349218 - RNA, 16 nt, Human herpesvirus 7
uuauagaaacauuccu

SEQ ID NO: 349219 - RNA, 18 nt, Human herpesvirus 7
uuauagaacaaguagaaa

SEQ ID NO: 349220 - RNA, 22 nt, Human herpesvirus 7
uuauauauaaccgauacagauc

SEQ ID NO: 349221 - RNA, 18 nt, Human herpesvirus 7
uuauauauggcaauaaau

SEQ ID NO: 349222 - RNA, 17 nt, Human herpesvirus 7
uuauauccaauaaugca

SEQ ID NO: 349223 - RNA, 23 nt, Human herpesvirus 7
uuauaucuuaauaaaguuuaauu

SEQ ID NO: 349224 - RNA, 20 nt, Human herpesvirus 7
uuauaugcaucaaaacauau

SEQ ID NO: 349225 - RNA, 23 nt, Human herpesvirus 7
uuaucaagauagugacauucccu

SEQ ID NO: 349226 - RNA, 21 nt, Human herpesvirus 7
uuaucaaguagaauaccagag

SEQ ID NO: 349227 - RNA, 16 nt, Human herpesvirus 7
uuaucaccauaugcca

SEQ ID NO: 349228 - RNA, 23 nt, Human herpesvirus 7
uuauccgucuguguuauacuuau

SEQ ID NO: 349229 - RNA, 17 nt, Human herpesvirus 7
uuauccuaagcuuuuca

SEQ ID NO: 349230 - RNA, 11 nt, Human herpesvirus 7
uuaucuaauau

SEQ ID NO: 349231 - RNA, 17 nt, Human herpesvirus 7
uuaucucauagcuuaaa

SEQ ID NO: 349232 - RNA, 22 nt, Human herpesvirus 7
uuaucuccauucuaaaccaaau

SEQ ID NO: 349233 - RNA, 13 nt, Human herpesvirus 7
uuaucugcauuga

SEQ ID NO: 349234 - RNA, 19 nt, Human herpesvirus 7
uuaugaacaagguucucau

SEQ ID NO: 349235 - RNA, 11 nt, Human herpesvirus 7
uuaugaugcau

SEQ ID NO: 349236 - RNA, 12 nt, Human herpesvirus 7
uuaugaugcauu

SEQ ID NO: 349237 - RNA, 14 nt, Human herpesvirus 7
uuaugcacauccaa

SEQ ID NO: 349238 - RNA, 18 nt, Human herpesvirus 7
uuauguacuauacaggau

SEQ ID NO: 349239 - RNA, 14 nt, Human herpesvirus 7
uuauguacucugau

SEQ ID NO: 349240 - RNA, 19 nt, Human herpesvirus 7
uuauguacucugauugacu

SEQ ID NO: 349241 - RNA, 13 nt, Human herpesvirus 7
uuauuagauucca

SEQ ID NO: 349242 - RNA, 17 nt, Human herpesvirus 7
uuauucaaagcuucuac

SEQ ID NO: 349243 - RNA, 21 nt, Human herpesvirus 7
uuauucauuugcuucuucuaa

SEQ ID NO: 349244 - RNA, 13 nt, Human herpesvirus 7
uuauugagcaauu

SEQ ID NO: 349245 - RNA, 13 nt, Human herpesvirus 7
uuauuuaaacagc

SEQ ID NO: 349246 - RNA, 20 nt, Human herpesvirus 7
uuauuuacugauucuauaga

SEQ ID NO: 349247 - RNA, 13 nt, Human herpesvirus 7
uuauuuagcuaau

SEQ ID NO: 349248 - RNA, 16 nt, Human herpesvirus 7
uuauuuagcuaauuca

SEQ ID NO: 349249 - RNA, 21 nt, Human herpesvirus 7
uuauuucuuauuggagauguc

SEQ ID NO: 349250 - RNA, 22 nt, Human herpesvirus 7
uuauuuucccagauacagcaua

SEQ ID NO: 349251 - RNA, 20 nt, Human herpesvirus 7
uuauuuuuuccaugucacau

SEQ ID NO: 349252 - RNA, 14 nt, Human herpesvirus 7
uucaaaauauaucu

SEQ ID NO: 349253 - RNA, 18 nt, Human herpesvirus 7
uucaaacgcuugaacaaa

SEQ ID NO: 349254 - RNA, 21 nt, Human herpesvirus 7
uucaaacgcuugaacaaauua

SEQ ID NO: 349255 - RNA, 18 nt, Human herpesvirus 7
ucuuugcuggaucauaga

SEQ ID NO: 349256 - RNA, 21 nt, Human herpesvirus 7
ucuuuguaaaaaugaauucaa

SEQ ID NO: 349257 - RNA, 15 nt, Human herpesvirus 7
ucuuuuacagaagaa

SEQ ID NO: 349258 - RNA, 22 nt, Human herpesvirus 7
ucuuuuaggggaagaaucaaga

SEQ ID NO: 349259 - RNA, 20 nt, Human herpesvirus 7
ucuuuuauaaauaguuucau

SEQ ID NO: 349260 - RNA, 16 nt, Human herpesvirus 7
ucuuuuucaaauggau

SEQ ID NO: 349261 - RNA, 22 nt, Human herpesvirus 7
ugaaaaaacaguucaagaaaua

SEQ ID NO: 349262 - RNA, 12 nt, Human herpesvirus 7
ugaaaaagccau

SEQ ID NO: 349263 - RNA, 18 nt, Human herpesvirus 7
ugaaaaauuuuuuacugu

SEQ ID NO: 349264 - RNA, 19 nt, Human herpesvirus 7
ugaaaacaauuaagaauca

SEQ ID NO: 349265 - RNA, 12 nt, Human herpesvirus 7
ugaaaacagcug

SEQ ID NO: 349266 - RNA, 20 nt, Human herpesvirus 7
ugaaaacauuagcauugaaa

SEQ ID NO: 349267 - RNA, 19 nt, Human herpesvirus 7
ugaaaacuuggaaaacaau

SEQ ID NO: 349268 - RNA, 22 nt, Human herpesvirus 7
ugaaaacuuggaaaacaaucaa

SEQ ID NO: 349269 - RNA, 20 nt, Human herpesvirus 7
ugaaaagcaacuuuucuuaa

SEQ ID NO: 349270 - RNA, 21 nt, Human herpesvirus 7
ugaaaagucauuauuuguuaa

SEQ ID NO: 349271 - RNA, 14 nt, Human herpesvirus 7
ugaaaauaacagga

SEQ ID NO: 349272 - RNA, 14 nt, Human herpesvirus 7
ugaaaauauauucc

SEQ ID NO: 349273 - RNA, 13 nt, Human herpesvirus 7
ugaaaaucuccuu

SEQ ID NO: 349274 - RNA, 17 nt, Human herpesvirus 7
ugaaaauugcguauuau

SEQ ID NO: 349275 - RNA, 22 nt, Human herpesvirus 7
ugaaacacauucugucuuggaa

SEQ ID NO: 349276 - RNA, 18 nt, Human herpesvirus 7
ugaaacguuucaaaucaa

SEQ ID NO: 349277 - RNA, 16 nt, Human herpesvirus 7
ugaaacucgaaacugg

SEQ ID NO: 349278 - RNA, 16 nt, Human herpesvirus 7
ugaaauaaacauuuca

SEQ ID NO: 349279 - RNA, 18 nt, Human herpesvirus 7
ugaaauaauagaugucug

SEQ ID NO: 349280 - RNA, 12 nt, Human herpesvirus 7
ugaaauaguguc

SEQ ID NO: 349281 - RNA, 15 nt, Human herpesvirus 7
ugaaauuccauacaa

SEQ ID NO: 349282 - RNA, 18 nt, Human herpesvirus 7
ugaaauuccauacaaaga

SEQ ID NO: 349283 - RNA, 15 nt, Human herpesvirus 7
ugaaauugacauggu

SEQ ID NO: 349284 - RNA, 12 nt, Human herpesvirus 7
ugaaauuucaaa

SEQ ID NO: 349285 - RNA, 15 nt, Human herpesvirus 7
ugaaauuucaaaaau

SEQ ID NO: 349286 - RNA, 19 nt, Human herpesvirus 7
ugaaauuucaaaaauucuc

SEQ ID NO: 349287 - RNA, 22 nt, Human herpesvirus 7
ugaaauuucuaaauaugaugaa

SEQ ID NO: 349288 - RNA, 16 nt, Human herpesvirus 7
ugaacaaauaaugagu

SEQ ID NO: 349289 - RNA, 17 nt, Human herpesvirus 7
ugaacaaguagugcuaa

SEQ ID NO: 349290 - RNA, 13 nt, Human herpesvirus 7
ugaacacuuuuac

SEQ ID NO: 349291 - RNA, 22 nt, Human herpesvirus 7
ugaacacuuuuacgugacuguc

SEQ ID NO: 349292 - RNA, 15 nt, Human herpesvirus 7
ugaacgcagacacaa

SEQ ID NO: 349293 - RNA, 20 nt, Human herpesvirus 7
ugaacggaauaaacaaugug

SEQ ID NO: 349294 - RNA, 15 nt, Human herpesvirus 7
ugaacucugucauca

SEQ ID NO: 349295 - RNA, 12 nt, Human herpesvirus 7
ugaacuguuaca

SEQ ID NO: 349296 - RNA, 13 nt, Human herpesvirus 7
ugaacuguugcca

SEQ ID NO: 349297 - RNA, 16 nt, Human herpesvirus 7
ugaacuuguuuugacu

SEQ ID NO: 349298 - RNA, 14 nt, Human herpesvirus 7
ugaagaaauuguga

SEQ ID NO: 349299 - RNA, 18 nt, Human herpesvirus 7
ugaagaacaacaugaaac

SEQ ID NO: 349300 - RNA, 12 nt, Human herpesvirus 7
ugaagaacauua

SEQ ID NO: 349301 - RNA, 15 nt, Human herpesvirus 7
ugaagaagugcacau

SEQ ID NO: 349302 - RNA, 14 nt, Human herpesvirus 7
ugaagacuacauaa

SEQ ID NO: 349303 - RNA, 13 nt, Human herpesvirus 7
ugaagagugcacu

SEQ ID NO: 349304 - RNA, 14 nt, Human herpesvirus 7
ugaagaguucuugu

SEQ ID NO: 349305 - RNA, 16 nt, Human herpesvirus 7
ugaagauaaguauaaa

SEQ ID NO: 349306 - RNA, 17 nt, Human herpesvirus 7
ugaagauuguuggaaag

SEQ ID NO: 349307 - RNA, 23 nt, Human herpesvirus 7
ugaagcacacacguuuucuguca

SEQ ID NO: 349308 - RNA, 20 nt, Human herpesvirus 7
ugaagcgcugagaucuucca

SEQ ID NO: 349309 - RNA, 22 nt, Human herpesvirus 7
ugaaggaugcguguguucaaaa

SEQ ID NO: 349310 - RNA, 13 nt, Human herpesvirus 7
ugaaggcugcuuu

SEQ ID NO: 349311 - RNA, 13 nt, Human herpesvirus 7
ugaaguuugcuga

SEQ ID NO: 349312 - RNA, 14 nt, Human herpesvirus 7
ugaaguuugcugaa

SEQ ID NO: 349313 - RNA, 22 nt, Human herpesvirus 7
ugaauaaagauuagcuauuaua

SEQ ID NO: 349314 - RNA, 22 nt, Human herpesvirus 7
ugaauaacgucauaaucaucuu

SEQ ID NO: 349315 - RNA, 13 nt, Human herpesvirus 7
ugaauauugcuag

SEQ ID NO: 349316 - RNA, 18 nt, Human herpesvirus 7
ugaauauugcuagucuca

SEQ ID NO: 349317 - RNA, 15 nt, Human herpesvirus 7
ugaaucaacagccau

SEQ ID NO: 349318 - RNA, 13 nt, Human herpesvirus 7
ugaaucugaagaa

SEQ ID NO: 349319 - RNA, 15 nt, Human herpesvirus 7
ugaaucugcaaagaa

SEQ ID NO: 349320 - RNA, 17 nt, Human herpesvirus 7
ugaaucugcacuaucuc

SEQ ID NO: 349321 - RNA, 20 nt, Human herpesvirus 7
ugaaugcaagcaacacuuaa

SEQ ID NO: 349322 - RNA, 18 nt, Human herpesvirus 7
ugaauuaagguggaaauc

SEQ ID NO: 349323 - RNA, 13 nt, Human herpesvirus 7
ugaauuagcuaaa

SEQ ID NO: 349324 - RNA, 23 nt, Human herpesvirus 7
ugaauuaucgcaauuaauucagu

SEQ ID NO: 349325 - RNA, 18 nt, Human herpesvirus 7
ugaauucguuaagcaccg

SEQ ID NO: 349326 - RNA, 15 nt, Human herpesvirus 7
ugaauuuuaagugga

SEQ ID NO: 349327 - RNA, 22 nt, Human herpesvirus 7
ugaauuuuaaguggaaucucau

SEQ ID NO: 349328 - RNA, 18 nt, Human herpesvirus 7
ugacaaaacugcaaaucc

SEQ ID NO: 349329 - RNA, 20 nt, Human herpesvirus 7
ugacaaaacugcaaauccaa

SEQ ID NO: 349330 - RNA, 14 nt, Human herpesvirus 7
ugacaacaaagcau

SEQ ID NO: 349331 - RNA, 16 nt, Human herpesvirus 7
ugacaacgguauacau

SEQ ID NO: 349332 - RNA, 13 nt, Human herpesvirus 7
ugacaacucaaua

SEQ ID NO: 349333 - RNA, 12 nt, Human herpesvirus 7
ugacaaugucaa

SEQ ID NO: 349334 - RNA, 14 nt, Human herpesvirus 7
ugacacgacacuga

SEQ ID NO: 349335 - RNA, 21 nt, Human herpesvirus 7
ugacagaccuauguguuuaca

SEQ ID NO: 349336 - RNA, 15 nt, Human herpesvirus 7
ugacagggugugaac

SEQ ID NO: 349337 - RNA, 16 nt, Human herpesvirus 7
ugacauaaucauggaa

SEQ ID NO: 349338 - RNA, 21 nt, Human herpesvirus 7
ugacauaaucauggaaaaugg

SEQ ID NO: 349339 - RNA, 17 nt, Human herpesvirus 7
ugacauucuuccagaaa

SEQ ID NO: 349340 - RNA, 19 nt, Human herpesvirus 7
ugacauuguacaauuacaa

SEQ ID NO: 349341 - RNA, 23 nt, Human herpesvirus 7
ugacauuuuuaccuccauaugaa

SEQ ID NO: 349342 - RNA, 19 nt, Human herpesvirus 7
ugacccugucacacuuauu

SEQ ID NO: 349343 - RNA, 14 nt, Human herpesvirus 7
ugaccgcaugugaa

SEQ ID NO: 349344 - RNA, 20 nt, Human herpesvirus 7
ugacgggaaaaaggauuuga

SEQ ID NO: 349345 - RNA, 16 nt, Human herpesvirus 7
ugacguuaucuaauau

SEQ ID NO: 349346 - RNA, 16 nt, Human herpesvirus 7
ugacguucagucguca

SEQ ID NO: 349347 - RNA, 17 nt, Human herpesvirus 7
ugacuaaagcuacagcu

SEQ ID NO: 349348 - RNA, 11 nt, Human herpesvirus 7
ugacuuugaau

SEQ ID NO: 349349 - RNA, 17 nt, Human herpesvirus 7
ugagaaaaaugacaaaa

SEQ ID NO: 349350 - RNA, 15 nt, Human herpesvirus 7
ugagaaauuacagua

SEQ ID NO: 349351 - RNA, 22 nt, Human herpesvirus 7
ugagaauguugagcuaucugau

SEQ ID NO: 349352 - RNA, 23 nt, Human herpesvirus 7
ugagacagcaacugugcaugaaa

SEQ ID NO: 349353 - RNA, 20 nt, Human herpesvirus 7
ugagaccgaauauacuuuag

SEQ ID NO: 349354 - RNA, 20 nt, Human herpesvirus 7
ugagaguuguggcaaaagau

SEQ ID NO: 349355 - RNA, 21 nt, Human herpesvirus 7
ugagauuauucaaaagcuaaa

SEQ ID NO: 349356 - RNA, 12 nt, Human herpesvirus 7
ugagauuugaaa

SEQ ID NO: 349357 - RNA, 17 nt, Human herpesvirus 7
ugagauuugccugccag

SEQ ID NO: 349358 - RNA, 12 nt, Human herpesvirus 7
ugagcaauacac

SEQ ID NO: 349359 - RNA, 15 nt, Human herpesvirus 7
ugagcaauucaugca

SEQ ID NO: 349360 - RNA, 22 nt, Human herpesvirus 7
ugagcacggcacacaacagcca

SEQ ID NO: 349361 - RNA, 14 nt, Human herpesvirus 7
ugagcuaucugauu

SEQ ID NO: 349362 - RNA, 23 nt, Human herpesvirus 7
ugaggaagauaagcucaaaaagu

SEQ ID NO: 349363 - RNA, 16 nt, Human herpesvirus 7
ugaguugcugcugucu

SEQ ID NO: 349364 - RNA, 15 nt, Human herpesvirus 7
ugaguuugauuguau

SEQ ID NO: 349365 - RNA, 20 nt, Human herpesvirus 7
ugauaagacugaagacaaaa

SEQ ID NO: 349366 - RNA, 18 nt, Human herpesvirus 7
ugauaauaagauguguug

SEQ ID NO: 349367 - RNA, 13 nt, Human herpesvirus 7
ugauaauuuacaa

SEQ ID NO: 349368 - RNA, 13 nt, Human herpesvirus 7
ugauagaguacau

SEQ ID NO: 349369 - RNA, 22 nt, Human herpesvirus 7
ugauagaguacaugugucguca

SEQ ID NO: 349370 - RNA, 13 nt, Human herpesvirus 7
ucauaaaccugcu

SEQ ID NO: 349371 - RNA, 20 nt, Human herpesvirus 7
ucauaaucauaguacaucuu

SEQ ID NO: 349372 - RNA, 18 nt, Human herpesvirus 7
ucauaauuacauugcagu

SEQ ID NO: 349373 - RNA, 19 nt, Human herpesvirus 7
ucauaauuacauugcaguc

SEQ ID NO: 349374 - RNA, 18 nt, Human herpesvirus 7
ucauaauucaaucugcaa

SEQ ID NO: 349375 - RNA, 16 nt, Human herpesvirus 7
ucauaauuuucaugaa

SEQ ID NO: 349376 - RNA, 13 nt, Human herpesvirus 7
ucauacaaugaau

SEQ ID NO: 349377 - RNA, 21 nt, Human herpesvirus 7
ucauacaaugaauuagcuaaa

SEQ ID NO: 349378 - RNA, 18 nt, Human herpesvirus 7
ucauaccauaaauaccaa

SEQ ID NO: 349379 - RNA, 20 nt, Human herpesvirus 7
ucauaccauaaauaccaaaa

SEQ ID NO: 349380 - RNA, 22 nt, Human herpesvirus 7
ucauaccauaaauaccaaaaac

SEQ ID NO: 349381 - RNA, 20 nt, Human herpesvirus 7
ucauagacgaggccaaucug

SEQ ID NO: 349382 - RNA, 20 nt, Human herpesvirus 7
ucauagagaaaacauuguga

SEQ ID NO: 349383 - RNA, 17 nt, Human herpesvirus 7
ucauagcacucauacua

SEQ ID NO: 349384 - RNA, 19 nt, Human herpesvirus 7
ucauagcaggaagcacaaa

SEQ ID NO: 349385 - RNA, 12 nt, Human herpesvirus 7
ucauauacuucu

SEQ ID NO: 349386 - RNA, 16 nt, Human herpesvirus 7
ucauaucuaugaugca

SEQ ID NO: 349387 - RNA, 18 nt, Human herpesvirus 7
ucauaucuaugaugcauc

SEQ ID NO: 349388 - RNA, 23 nt, Human herpesvirus 7
ucaucaucuuuuugaacagaauu

SEQ ID NO: 349389 - RNA, 23 nt, Human herpesvirus 7
ucaucccaaaccaugauguuaaa

SEQ ID NO: 349390 - RNA, 15 nt, Human herpesvirus 7
ucaucccaauaccgu

SEQ ID NO: 349391 - RNA, 17 nt, Human herpesvirus 7
ucaucccugcugauaca

SEQ ID NO: 349392 - RNA, 20 nt, Human herpesvirus 7
ucaucggguacguccauuuc

SEQ ID NO: 349393 - RNA, 22 nt, Human herpesvirus 7
ucaucgguuuucugagugcuaa

SEQ ID NO: 349394 - RNA, 15 nt, Human herpesvirus 7
ucaucucacuucaga

SEQ ID NO: 349395 - RNA, 15 nt, Human herpesvirus 7
ucaucugaacagguu

SEQ ID NO: 349396 - RNA, 15 nt, Human herpesvirus 7
ucaugaaaacagugg

SEQ ID NO: 349397 - RNA, 15 nt, Human herpesvirus 7
ucaugaacacaacau

SEQ ID NO: 349398 - RNA, 16 nt, Human herpesvirus 7
ucaugacgcagcaucc

SEQ ID NO: 349399 - RNA, 19 nt, Human herpesvirus 7
ucaugacuggacacaauca

SEQ ID NO: 349400 - RNA, 20 nt, Human herpesvirus 7
ucaugacuggacacaaucag

SEQ ID NO: 349401 - RNA, 22 nt, Human herpesvirus 7
ucaugauuauauaaguccuuca

SEQ ID NO: 349402 - RNA, 23 nt, Human herpesvirus 7
ucuacaaacaauuuuuuguucaa

SEQ ID NO: 349403 - RNA, 14 nt, Human herpesvirus 7
ucuacaaacagaag

SEQ ID NO: 349404 - RNA, 16 nt, Human herpesvirus 7
ucuacaauuucuggca

SEQ ID NO: 349405 - RNA, 18 nt, Human herpesvirus 7
ucuacauagaaaucuuua

SEQ ID NO: 349406 - RNA, 19 nt, Human herpesvirus 7
ucuacauuaaacagcauuu

SEQ ID NO: 349407 - RNA, 15 nt, Human herpesvirus 7
ucuacuguaaucuga

SEQ ID NO: 349408 - RNA, 20 nt, Human herpesvirus 7
ucuacuguacuuuugaucaa

SEQ ID NO: 349409 - RNA, 22 nt, Human herpesvirus 7
ucuacuguacuuuugaucaaaa

SEQ ID NO: 349410 - RNA, 14 nt, Human herpesvirus 7
ucuacuucuaguag

SEQ ID NO: 349411 - RNA, 16 nt, Human herpesvirus 7
ucuagaaaaucuacca

SEQ ID NO: 349412 - RNA, 22 nt, Human herpesvirus 7
ucuagaacaaacuguacccaaa

SEQ ID NO: 349413 - RNA, 23 nt, Human herpesvirus 7
ucuagaacuguuaaaaucuguuc

SEQ ID NO: 349414 - RNA, 16 nt, Human herpesvirus 7
ucuagaagaaagucau

SEQ ID NO: 349415 - RNA, 14 nt, Human herpesvirus 7
ucuagagcauauac

SEQ ID NO: 349416 - RNA, 17 nt, Human herpesvirus 7
ucuagcaaaauaugcaa

SEQ ID NO: 349417 - RNA, 21 nt, Human herpesvirus 7
ucuagcggaguuugaguuucu

SEQ ID NO: 349418 - RNA, 21 nt, Human herpesvirus 7
ucuagcuaaugcuuugcugca

SEQ ID NO: 349419 - RNA, 22 nt, Human herpesvirus 7
ucuagcuaaugcuuugcugcaa

SEQ ID NO: 349420 - RNA, 13 nt, Human herpesvirus 7
ucuaggcuugcau

SEQ ID NO: 349421 - RNA, 19 nt, Human herpesvirus 7
ucuaggucuuccacuguug

SEQ ID NO: 349422 - RNA, 20 nt, Human herpesvirus 7
ucuaggucuuccacuguugu

SEQ ID NO: 349423 - RNA, 12 nt, Human herpesvirus 7
ucuauaaacauu

SEQ ID NO: 349424 - RNA, 15 nt, Human herpesvirus 7
ucuauaaacauucua

SEQ ID NO: 349425 - RNA, 21 nt, Human herpesvirus 7
ucuauaugaagaauguaugaa

SEQ ID NO: 349426 - RNA, 12 nt, Human herpesvirus 7
ucuauauuugau

SEQ ID NO: 349427 - RNA, 14 nt, Human herpesvirus 7
ucuaucaccaagaa

SEQ ID NO: 349428 - RNA, 19 nt, Human herpesvirus 7
ucuaucaccaagaacaaua

SEQ ID NO: 349429 - RNA, 22 nt, Human herpesvirus 7
ucuaucgaucacguuuugcaaa

SEQ ID NO: 349430 - RNA, 16 nt, Human herpesvirus 7
ucuaugaguauaccua

SEQ ID NO: 349431 - RNA, 13 nt, Human herpesvirus 7
ucuaugaugcauc

SEQ ID NO: 349432 - RNA, 15 nt, Human herpesvirus 7
ucuauuacacaggaa

SEQ ID NO: 349433 - RNA, 22 nt, Human herpesvirus 7
ucuauuacagucuaguaaaccu

SEQ ID NO: 349434 - RNA, 17 nt, Human herpesvirus 7
ucuauuagauaaugaca

SEQ ID NO: 349435 - RNA, 18 nt, Human herpesvirus 7
ucuauuaguaugagugcu

SEQ ID NO: 349436 - RNA, 15 nt, Human herpesvirus 7
ucuauuauuucuaca

SEQ ID NO: 349437 - RNA, 21 nt, Human herpesvirus 7
ucuauuucaauuaaugcauug

SEQ ID NO: 349438 - RNA, 21 nt, Human herpesvirus 7
ucucaaaacaaacucugcuuc

SEQ ID NO: 349439 - RNA, 20 nt, Human herpesvirus 7
ucucaauaguuuuacaaaga

SEQ ID NO: 349440 - RNA, 13 nt, Human herpesvirus 7
ucucaaucaaaau

SEQ ID NO: 349441 - RNA, 17 nt, Human herpesvirus 7
ucucacgagaaagggca

SEQ ID NO: 349442 - RNA, 16 nt, Human herpesvirus 7
ucucagcucuguaaua

SEQ ID NO: 349443 - RNA, 12 nt, Human herpesvirus 7
ucucauagcuua

SEQ ID NO: 349444 - RNA, 13 nt, Human herpesvirus 7
ucucauagcuuaa

SEQ ID NO: 349445 - RNA, 16 nt, Human herpesvirus 7
ucucaucacucuuuuc

SEQ ID NO: 349446 - RNA, 21 nt, Human herpesvirus 7
ucucaugcgauaucugacugg

SEQ ID NO: 349447 - RNA, 17 nt, Human herpesvirus 7
ucucauuuucgacagaa

SEQ ID NO: 349448 - RNA, 13 nt, Human herpesvirus 7
ucuccaugcauau

SEQ ID NO: 349449 - RNA, 21 nt, Human herpesvirus 7
ucuccaugcauauuugaacau

SEQ ID NO: 349450 - RNA, 20 nt, Human herpesvirus 7
ucucccauucaauaauggca

SEQ ID NO: 349451 - RNA, 17 nt, Human herpesvirus 7
ucuccuggaaagcucau

SEQ ID NO: 349452 - RNA, 21 nt, Human herpesvirus 7
ucuccuggaaagcucauuuca

SEQ ID NO: 349453 - RNA, 19 nt, Human herpesvirus 7
ucuccuguaaccauuuauu

SEQ ID NO: 349454 - RNA, 15 nt, Human herpesvirus 7
ucucgaagaauucau

SEQ ID NO: 349455 - RNA, 15 nt, Human herpesvirus 7
ucucuaugauccagc

SEQ ID NO: 349456 - RNA, 22 nt, Human herpesvirus 7
ucucuccaggcuaaaacuguca

SEQ ID NO: 349457 - RNA, 21 nt, Human herpesvirus 7
ucucucgcaacuucugauauc

SEQ ID NO: 349458 - RNA, 22 nt, Human herpesvirus 7
ucucugucaaaagacgcuugcu

SEQ ID NO: 349459 - RNA, 23 nt, Human herpesvirus 7
ucucuugaggaaaugucuuuguc

SEQ ID NO: 349460 - RNA, 18 nt, Human herpesvirus 7
ucugaaaaucuccuugau

SEQ ID NO: 349461 - RNA, 21 nt, Human herpesvirus 7
ucugaaaccuucgcaacaauu

SEQ ID NO: 349462 - RNA, 20 nt, Human herpesvirus 7
ucugaaagccgcugccuucg

SEQ ID NO: 349463 - RNA, 15 nt, Human herpesvirus 7
ucugaaauaaacauu

SEQ ID NO: 349464 - RNA, 17 nt, Human herpesvirus 7
ucugaaauaaacauuuc

SEQ ID NO: 349465 - RNA, 20 nt, Human herpesvirus 7
ucugaaauaaacauuucaaa

SEQ ID NO: 349466 - RNA, 19 nt, Human herpesvirus 7
ucugaauagacacauuuau

SEQ ID NO: 349467 - RNA, 18 nt, Human herpesvirus 7
ucugacauuggaacuuua

SEQ ID NO: 349468 - RNA, 16 nt, Human herpesvirus 7
ucugacauuguacaau

SEQ ID NO: 349469 - RNA, 22 nt, Human herpesvirus 7
ucugacuaaagcuacagcuuug

SEQ ID NO: 349470 - RNA, 14 nt, Human herpesvirus 7
ucugagugcuaaaa

SEQ ID NO: 349471 - RNA, 21 nt, Human herpesvirus 7
ucugauucuuauucuacacau

SEQ ID NO: 349472 - RNA, 13 nt, Human herpesvirus 7
ucugauugacucg

SEQ ID NO: 349473 - RNA, 15 nt, Human herpesvirus 7
ucugcacuaucuccu

SEQ ID NO: 349474 - RNA, 22 nt, Human herpesvirus 7
ucuggauucaagaaaucagauu

SEQ ID NO: 349475 - RNA, 18 nt, Human herpesvirus 7
ucugguugauuugagcag

SEQ ID NO: 349476 - RNA, 17 nt, Human herpesvirus 7
ucugguuucuguugacu

SEQ ID NO: 349477 - RNA, 19 nt, Human herpesvirus 7
ucuguaaaauuuaaauacu

SEQ ID NO: 349478 - RNA, 21 nt, Human herpesvirus 7
ucugucauggacggcauuuaa

SEQ ID NO: 349479 - RNA, 18 nt, Human herpesvirus 7
ucugucuccaaaucaaaa

SEQ ID NO: 349480 - RNA, 11 nt, Human herpesvirus 7
ucugucugucg

SEQ ID NO: 349481 - RNA, 14 nt, Human herpesvirus 7
ucugugacuuagaa

SEQ ID NO: 349482 - RNA, 15 nt, Human herpesvirus 7
ucugugacuuagaaa

SEQ ID NO: 349483 - RNA, 20 nt, Human herpesvirus 7
ucuguguguuugaaugacau

SEQ ID NO: 349484 - RNA, 16 nt, Human herpesvirus 7
ucuguguuauacuuau

SEQ ID NO: 349485 - RNA, 23 nt, Human herpesvirus 7
ucuguuaguugggcaaacaguuu

SEQ ID NO: 349486 - RNA, 16 nt, Human herpesvirus 7
ucuguuguccagacag

SEQ ID NO: 349487 - RNA, 16 nt, Human herpesvirus 7
ucuuaaaugucaauga

SEQ ID NO: 349488 - RNA, 16 nt, Human herpesvirus 7
uaagacauuauuugcu

SEQ ID NO: 349489 - RNA, 21 nt, Human herpesvirus 7
uaagacugaagacaaaaccaa

SEQ ID NO: 349490 - RNA, 13 nt, Human herpesvirus 7
uaagagacauuga

SEQ ID NO: 349491 - RNA, 20 nt, Human herpesvirus 7
uaagagacauugaaaaugca

SEQ ID NO: 349492 - RNA, 17 nt, Human herpesvirus 7
uaagagcuuuugcaaag

SEQ ID NO: 349493 - RNA, 19 nt, Human herpesvirus 7
uaagaugauagccauaaau

SEQ ID NO: 349494 - RNA, 22 nt, Human herpesvirus 7
uaagcaaaaaaagguacuaucu

SEQ ID NO: 349495 - RNA, 21 nt, Human herpesvirus 7
uaagcaccgaagcagggaaaa

SEQ ID NO: 349496 - RNA, 21 nt, Human herpesvirus 7
uaagcagcuugaugaaucaaa

SEQ ID NO: 349497 - RNA, 22 nt, Human herpesvirus 7
uaagcuuuucaggcuaugacuu

SEQ ID NO: 349498 - RNA, 20 nt, Human herpesvirus 7
uaaggaaaaccuacuguuaa

SEQ ID NO: 349499 - RNA, 15 nt, Human herpesvirus 7
uaaggcgaaaaacac

SEQ ID NO: 349500 - RNA, 21 nt, Human herpesvirus 7
uaaggcuguaaaagaaaaucu

SEQ ID NO: 349501 - RNA, 17 nt, Human herpesvirus 7
uaaguaaggaagguaca

SEQ ID NO: 349502 - RNA, 17 nt, Human herpesvirus 7
uaaguauaaacagucca

SEQ ID NO: 349503 - RNA, 14 nt, Human herpesvirus 7
uaaguggaaucuca

SEQ ID NO: 349504 - RNA, 19 nt, Human herpesvirus 7
uaauaaaaagcccaugaac

SEQ ID NO: 349505 - RNA, 18 nt, Human herpesvirus 7
uaauaaacggugauugua

SEQ ID NO: 349506 - RNA, 20 nt, Human herpesvirus 7
uaauaacaaacgauuuggug

SEQ ID NO: 349507 - RNA, 16 nt, Human herpesvirus 7
uaauaauuauuugacu

SEQ ID NO: 349508 - RNA, 20 nt, Human herpesvirus 7
uaauacguccaaaaauugga

SEQ ID NO: 349509 - RNA, 17 nt, Human herpesvirus 7
uaauagccuuucacuug

SEQ ID NO: 349510 - RNA, 13 nt, Human herpesvirus 7
uaauaguggugaa

SEQ ID NO: 349511 - RNA, 23 nt, Human herpesvirus 7
uaauauagaaauuguuaccuaaa

SEQ ID NO: 349512 - RNA, 14 nt, Human herpesvirus 7
uaauauauuuuccu

SEQ ID NO: 349513 - RNA, 23 nt, Human herpesvirus 7
uaaucaaaauuuuggauugugua

SEQ ID NO: 349514 - RNA, 16 nt, Human herpesvirus 7
uaaucaauuuuugaca

SEQ ID NO: 349515 - RNA, 20 nt, Human herpesvirus 7
uaaucacaaguuaauuuugc

SEQ ID NO: 349516 - RNA, 23 nt, Human herpesvirus 7
uaaucauggaaaauggagcauua

SEQ ID NO: 349517 - RNA, 21 nt, Human herpesvirus 7
uaauccaaaccggccaaugau

SEQ ID NO: 349518 - RNA, 19 nt, Human herpesvirus 7
uaauccucugacauuugaa

SEQ ID NO: 349519 - RNA, 21 nt, Human herpesvirus 7
uaauccucugacauuugaaau

SEQ ID NO: 349520 - RNA, 19 nt, Human herpesvirus 7
uaaucugauugauacauuc

SEQ ID NO: 349521 - RNA, 12 nt, Human herpesvirus 7
uaaugauuagga

SEQ ID NO: 349522 - RNA, 13 nt, Human herpesvirus 7
uaauggauaacca

SEQ ID NO: 349523 - RNA, 21 nt, Human herpesvirus 7
uaauggcauuacuacagugga

SEQ ID NO: 349524 - RNA, 18 nt, Human herpesvirus 7
uaaugguuugaauaucuc

SEQ ID NO: 349525 - RNA, 22 nt, Human herpesvirus 7
uaauguauuuuucuccaugcau

SEQ ID NO: 349526 - RNA, 15 nt, Human herpesvirus 7
uaaugucugugucua

SEQ ID NO: 349527 - RNA, 21 nt, Human herpesvirus 7
uaauguuauuuuucaugccuu

SEQ ID NO: 349528 - RNA, 16 nt, Human herpesvirus 7
uaauuaaaguugcauu

SEQ ID NO: 349529 - RNA, 13 nt, Human herpesvirus 7
uaauuaacacuca

SEQ ID NO: 349530 - RNA, 14 nt, Human herpesvirus 7
uaauuaaucugcau

SEQ ID NO: 349531 - RNA, 14 nt, Human herpesvirus 7
uaauuacauugcag

SEQ ID NO: 349532 - RNA, 23 nt, Human herpesvirus 7
uaauuaggaaucagaccagcaca

SEQ ID NO: 349533 - RNA, 16 nt, Human herpesvirus 7
uaauucaaucaccaaa

SEQ ID NO: 349534 - RNA, 18 nt, Human herpesvirus 7
uaauucaaucaccaaaga

SEQ ID NO: 349535 - RNA, 16 nt, Human herpesvirus 7
uaauucauuguaugac

SEQ ID NO: 349536 - RNA, 19 nt, Human herpesvirus 7
uaauucuuucaguucccau

SEQ ID NO: 349537 - RNA, 18 nt, Human herpesvirus 7
uaauugccauuguguuaa

SEQ ID NO: 349538 - RNA, 18 nt, Human herpesvirus 7
uaauuuacaaaacaaaga

SEQ ID NO: 349539 - RNA, 22 nt, Human herpesvirus 7
uaauuuccacguuuuuuagcuu

SEQ ID NO: 349540 - RNA, 17 nt, Human herpesvirus 7
uaauuucuauaaucacg

SEQ ID NO: 349541 - RNA, 22 nt, Human herpesvirus 7
uaauuuggaaauuguuugauca

SEQ ID NO: 349542 - RNA, 14 nt, Human herpesvirus 7
uaauuuguucaauc

SEQ ID NO: 349543 - RNA, 15 nt, Human herpesvirus 7
uaauuuuccauucau

SEQ ID NO: 349544 - RNA, 21 nt, Human herpesvirus 7
uaauuuuggcgaaacaauaca

SEQ ID NO: 349545 - RNA, 20 nt, Human herpesvirus 7
uaauuuuguucuaucuagga

SEQ ID NO: 349546 - RNA, 20 nt, Human herpesvirus 7
uacaaaaagaauugauugaa

SEQ ID NO: 349547 - RNA, 15 nt, Human herpesvirus 7
uacaaacauguucca

SEQ ID NO: 349548 - RNA, 18 nt, Human herpesvirus 7
uacaaacauguuccauuc

SEQ ID NO: 349549 - RNA, 20 nt, Human herpesvirus 7
uacaaacauguuccauucaa

SEQ ID NO: 349550 - RNA, 14 nt, Human herpesvirus 7
uacaaagaacaugu

SEQ ID NO: 349551 - RNA, 22 nt, Human herpesvirus 7
uacaaagaacauguaguacaau

SEQ ID NO: 349552 - RNA, 16 nt, Human herpesvirus 7
uacaaagaagaauucc

SEQ ID NO: 349553 - RNA, 20 nt, Human herpesvirus 7
uacaaauugguucagcguga

SEQ ID NO: 349554 - RNA, 12 nt, Human herpesvirus 7
uacaacaaacau

SEQ ID NO: 349555 - RNA, 17 nt, Human herpesvirus 7
uacaacaaacauuccaa

SEQ ID NO: 349556 - RNA, 22 nt, Human herpesvirus 7
uacaaccgccauucuuuucaau

SEQ ID NO: 349557 - RNA, 23 nt, Human herpesvirus 7
uacaacuaaaauugacagcacca

SEQ ID NO: 349558 - RNA, 19 nt, Human herpesvirus 7
uacaacuucuacuaauaca

SEQ ID NO: 349559 - RNA, 14 nt, Human herpesvirus 7
uacaacuuugccaa

SEQ ID NO: 349560 - RNA, 15 nt, Human herpesvirus 7
uacaagguguuccuu

SEQ ID NO: 349561 - RNA, 19 nt, Human herpesvirus 7
uacaaugaauuagcuaaau

SEQ ID NO: 349562 - RNA, 21 nt, Human herpesvirus 7
uacaaugcugucguguaagau

SEQ ID NO: 349563 - RNA, 21 nt, Human herpesvirus 7
uacaaugguuuuuuugacaaa

SEQ ID NO: 349564 - RNA, 19 nt, Human herpesvirus 7
uacaauuucuggcaauaaa

SEQ ID NO: 349565 - RNA, 21 nt, Human herpesvirus 7
uacacaaauugauccugcuau

SEQ ID NO: 349566 - RNA, 21 nt, Human herpesvirus 7
uacacaggaauugcugucuau

SEQ ID NO: 349567 - RNA, 14 nt, Human herpesvirus 7
uacacucuguuacu

SEQ ID NO: 349568 - RNA, 15 nt, Human herpesvirus 7
uacagaaauugauga

SEQ ID NO: 349569 - RNA, 16 nt, Human herpesvirus 7
uacagacagaaugcca

SEQ ID NO: 349570 - RNA, 18 nt, Human herpesvirus 7
uacagacagaaugccaga

SEQ ID NO: 349571 - RNA, 15 nt, Human herpesvirus 7
uacagauugcuuguu

SEQ ID NO: 349572 - RNA, 20 nt, Human herpesvirus 7
uacagcauauaucuuugauu

SEQ ID NO: 349573 - RNA, 11 nt, Human herpesvirus 7
uacagccugua

SEQ ID NO: 349574 - RNA, 21 nt, Human herpesvirus 7
uacagcguggccuucuugccu

SEQ ID NO: 349575 - RNA, 14 nt, Human herpesvirus 7
uacagcucauguaa

SEQ ID NO: 349576 - RNA, 14 nt, Human herpesvirus 7
uacagcuuucauua

SEQ ID NO: 349577 - RNA, 22 nt, Human herpesvirus 7
uacagugcucuuugucuuugcu

SEQ ID NO: 349578 - RNA, 17 nt, Human herpesvirus 7
uacauaacucuaucucc

SEQ ID NO: 349579 - RNA, 13 nt, Human herpesvirus 7
uacauaauucaau

SEQ ID NO: 349580 - RNA, 16 nt, Human herpesvirus 7
uacauagaaaucuuua

SEQ ID NO: 349581 - RNA, 19 nt, Human herpesvirus 7
uacaucuaggucuuccacu

SEQ ID NO: 349582 - RNA, 17 nt, Human herpesvirus 7
uacaugaauuaucuaga

SEQ ID NO: 349583 - RNA, 23 nt, Human herpesvirus 7
uacaugccggacaguuugcaaca

SEQ ID NO: 349584 - RNA, 21 nt, Human herpesvirus 7
uacauggggcauuaauucuuu

SEQ ID NO: 349585 - RNA, 23 nt, Human herpesvirus 7
uacauuauaaauguaacuuucau

SEQ ID NO: 349586 - RNA, 23 nt, Human herpesvirus 7
uacauucgcaaggaauaugaaga

SEQ ID NO: 349587 - RNA, 20 nt, Human herpesvirus 7
uacauuugcuuuaccccaaa

SEQ ID NO: 349588 - RNA, 15 nt, Human herpesvirus 7
uacauuuuaccaaau

SEQ ID NO: 349589 - RNA, 15 nt, Human herpesvirus 7
uacauuuugcaauca

SEQ ID NO: 349590 - RNA, 14 nt, Human herpesvirus 7
uacauuuuugcaau

SEQ ID NO: 349591 - RNA, 13 nt, Human herpesvirus 7
uaccaugaaaaau

SEQ ID NO: 349592 - RNA, 20 nt, Human herpesvirus 7
uaccaugaaaaauaugagug

SEQ ID NO: 349593 - RNA, 12 nt, Human herpesvirus 7
uacccacauuuu

SEQ ID NO: 349594 - RNA, 21 nt, Human herpesvirus 7
uacccacauuuuuugcacgau

SEQ ID NO: 349595 - RNA, 14 nt, Human herpesvirus 7
uaccgcauaaauca

SEQ ID NO: 349596 - RNA, 18 nt, Human herpesvirus 7
uaccggaaacauugaaaa

SEQ ID NO: 349597 - RNA, 15 nt, Human herpesvirus 7
uaccggaccauuucc

SEQ ID NO: 349598 - RNA, 14 nt, Human herpesvirus 7
uaccgguacauuua

SEQ ID NO: 349599 - RNA, 20 nt, Human herpesvirus 7
uaccgucuuuugauuuugcc

SEQ ID NO: 349600 - RNA, 23 nt, Human herpesvirus 7
uaccguuuaaugaaaaagccaua

SEQ ID NO: 349601 - RNA, 22 nt, Human herpesvirus 7
uaccuuagaaucacaacauaua

SEQ ID NO: 349602 - RNA, 15 nt, Human herpesvirus 7
uaccuucauggcaca

SEQ ID NO: 349603 - RNA, 17 nt, Human herpesvirus 7
uacgaauauucuaggcu

SEQ ID NO: 349604 - RNA, 18 nt, Human herpesvirus 7
uacgaaugccaucuauaa

SEQ ID NO: 349605 - RNA, 14 nt, Human herpesvirus 7
uacggcucuaacau

SEQ ID NO: 349606 - RNA, 19 nt, Human herpesvirus 7
uacgucuugcuguuuguca

SEQ ID NO: 349607 - RNA, 24 nt, Human herpesvirus 7
uacgugaguguuguaacaacuagc

SEQ ID NO: 349608 - RNA, 19 nt, Human herpesvirus 7
uacgugcuuagacuuauca

SEQ ID NO: 349609 - RNA, 20 nt, Human herpesvirus 7
uacgugcuuagacuuaucac

SEQ ID NO: 349610 - RNA, 16 nt, Human herpesvirus 7
uacguuaguugcagcu

SEQ ID NO: 349611 - RNA, 17 nt, Human herpesvirus 7
uacguucugaaacaguc

SEQ ID NO: 349612 - RNA, 13 nt, Human herpesvirus 7
uacuaaagccaau

SEQ ID NO: 349613 - RNA, 16 nt, Human herpesvirus 7
uacuaaucacaaguua

SEQ ID NO: 349614 - RNA, 13 nt, Human herpesvirus 7
uacuacucagaag

SEQ ID NO: 349615 - RNA, 14 nt, Human herpesvirus 7
uacucugauugacu

SEQ ID NO: 349616 - RNA, 15 nt, Human herpesvirus 7
uacucuuucugacau

SEQ ID NO: 349617 - RNA, 14 nt, Human herpesvirus 7
uacugaagagccaa

SEQ ID NO: 349618 - RNA, 13 nt, Human herpesvirus 7
uacugaaucugaa

SEQ ID NO: 349619 - RNA, 20 nt, Human herpesvirus 7
uacugagagaauaaguucau

SEQ ID NO: 349620 - RNA, 17 nt, Human herpesvirus 7
uacugauucuauagaaa

SEQ ID NO: 349621 - RNA, 14 nt, Human herpesvirus 7
uacugcucaucaaa

SEQ ID NO: 349622 - RNA, 13 nt, Human herpesvirus 7
uacuggauguaua

SEQ ID NO: 349623 - RNA, 16 nt, Human herpesvirus 7
uacuguaaucugacuu

SEQ ID NO: 349624 - RNA, 13 nt, Human herpesvirus 7
uacuguaauuucu

SEQ ID NO: 349625 - RNA, 17 nt, Human herpesvirus 7
uacuguaauuucucaaa

SEQ ID NO: 349626 - RNA, 18 nt, Human herpesvirus 7
uacuguugcuaauuaccg

SEQ ID NO: 349627 - RNA, 18 nt, Human herpesvirus 7
uacuguuuacacauuaua

SEQ ID NO: 349628 - RNA, 19 nt, Human herpesvirus 7
uacuuaaauauuuuacaua

SEQ ID NO: 349629 - RNA, 16 nt, Human herpesvirus 7
uacuuauguguuacau

SEQ ID NO: 349630 - RNA, 18 nt, Human herpesvirus 7
uacuucuuugacaaaaau

SEQ ID NO: 349631 - RNA, 11 nt, Human herpesvirus 7
uacuugcaaug

SEQ ID NO: 349632 - RNA, 20 nt, Human herpesvirus 7
uacuuuacguauaucgaucu

SEQ ID NO: 349633 - RNA, 17 nt, Human herpesvirus 7
uagaaaaaaacaaugaa

SEQ ID NO: 349634 - RNA, 17 nt, Human herpesvirus 7
uagaaaaauguacaaua

SEQ ID NO: 349635 - RNA, 14 nt, Human herpesvirus 7
uagaaaacaucccu

SEQ ID NO: 349636 - RNA, 14 nt, Human herpesvirus 7
uagaaacaucuguu

SEQ ID NO: 349637 - RNA, 18 nt, Human herpesvirus 7
uagaaacuuauguacuau

SEQ ID NO: 349638 - RNA, 21 nt, Human herpesvirus 7
uagaagaaugcaagccuagaa

SEQ ID NO: 349639 - RNA, 21 nt, Human herpesvirus 7
uagaagagauucggcugagua

SEQ ID NO: 349640 - RNA, 14 nt, Human herpesvirus 7
uagaaucacaacau

SEQ ID NO: 349641 - RNA, 18 nt, Human herpesvirus 7
uagacaaauuaaacaauc

SEQ ID NO: 349642 - RNA, 17 nt, Human herpesvirus 7
uagacacauuuauccau

SEQ ID NO: 349643 - RNA, 13 nt, Human herpesvirus 7
uagaccuaucaaa

SEQ ID NO: 349644 - RNA, 19 nt, Human herpesvirus 7
uagaccuaucaaauuuauc

SEQ ID NO: 349645 - RNA, 22 nt, Human herpesvirus 7
uagacgaggccaaucugcacau

SEQ ID NO: 349646 - RNA, 21 nt, Human herpesvirus 7
uagacgcuuugagucucagag

SEQ ID NO: 349647 - RNA, 21 nt, Human herpesvirus 7
uagacuuaucaccauaugcca

SEQ ID NO: 349648 - RNA, 19 nt, Human herpesvirus 7
uagagacuggcagaguuac

SEQ ID NO: 349649 - RNA, 21 nt, Human herpesvirus 7
uagaguaucuccgugacaaag

SEQ ID NO: 349650 - RNA, 19 nt, Human herpesvirus 7
uagauauuuugacaaucuu

SEQ ID NO: 349651 - RNA, 14 nt, Human herpesvirus 7
uagaucuugacuca

SEQ ID NO: 349652 - RNA, 23 nt, Human herpesvirus 7
uagaucuugacucagauucgacu

SEQ ID NO: 349653 - RNA, 22 nt, Human herpesvirus 7
uagaugcagaaaaauccaaaau

SEQ ID NO: 349654 - RNA, 17 nt, Human herpesvirus 7
uagaugcauccaaagaa

SEQ ID NO: 349655 - RNA, 14 nt, Human herpesvirus 7
uagaugcaugcuaa

SEQ ID NO: 349656 - RNA, 16 nt, Human herpesvirus 7
uagaugcaugcuaaua

SEQ ID NO: 349657 - RNA, 20 nt, Human herpesvirus 7
uagaugcgaaagccacuguu

SEQ ID NO: 349658 - RNA, 22 nt, Human herpesvirus 7
uagaugcgaaagccacuguuga

SEQ ID NO: 349659 - RNA, 15 nt, Human herpesvirus 7
uagaugcugaaacau

SEQ ID NO: 349660 - RNA, 18 nt, Human herpesvirus 7
uagaugcugaaacaucaa

SEQ ID NO: 349661 - RNA, 17 nt, Human herpesvirus 7
uagauuaaauagcaaag

SEQ ID NO: 349662 - RNA, 14 nt, Human herpesvirus 7
uagauugacuauga

SEQ ID NO: 349663 - RNA, 21 nt, Human herpesvirus 7
uagccagaucguucauugauu

SEQ ID NO: 349664 - RNA, 19 nt, Human herpesvirus 7
uagcccuccuaacuauaau

SEQ ID NO: 349665 - RNA, 15 nt, Human herpesvirus 7
uagccuuucacuuga

SEQ ID NO: 349666 - RNA, 18 nt, Human herpesvirus 7
uagcggagguuugcuauu

SEQ ID NO: 349667 - RNA, 17 nt, Human herpesvirus 7
uagcguucgacagcaaa

SEQ ID NO: 349668 - RNA, 21 nt, Human herpesvirus 7
uagcuuaaaaaauacauugaa

SEQ ID NO: 349669 - RNA, 13 nt, Human herpesvirus 7
uagcuuucaugau

SEQ ID NO: 349670 - RNA, 19 nt, Human herpesvirus 7
uagcuuucaugauuucaau

SEQ ID NO: 349671 - RNA, 16 nt, Human herpesvirus 7
uaggauaccaaacaaa

SEQ ID NO: 349672 - RNA, 17 nt, Human herpesvirus 7
uaggauaccaaacaaaa

SEQ ID NO: 349673 - RNA, 17 nt, Human herpesvirus 7
uaggccaguucuaucuc

SEQ ID NO: 349674 - RNA, 15 nt, Human herpesvirus 7
uaggguuucuaggcu

SEQ ID NO: 349675 - RNA, 15 nt, Human herpesvirus 7
uagguaauagcuuua

SEQ ID NO: 349676 - RNA, 18 nt, Human herpesvirus 7
uaggucuuccacuguugu

SEQ ID NO: 349677 - RNA, 23 nt, Human herpesvirus 7
uagguuaagccuaggauaccaaa

SEQ ID NO: 349678 - RNA, 16 nt, Human herpesvirus 7
uagguuguugcaauuu

SEQ ID NO: 349679 - RNA, 14 nt, Human herpesvirus 7
uaguacaucuuucu

SEQ ID NO: 349680 - RNA, 14 nt, Human herpesvirus 7
uagugaaacacauu

SEQ ID NO: 349681 - RNA, 14 nt, Human herpesvirus 7
uagugauagaguac

SEQ ID NO: 349682 - RNA, 11 nt, Human herpesvirus 7
uagugcuguua

SEQ ID NO: 349683 - RNA, 15 nt, Human herpesvirus 7
uagugugcacacaaa

SEQ ID NO: 349684 - RNA, 15 nt, Human herpesvirus 7
uaguucgcaauggua

SEQ ID NO: 349685 - RNA, 12 nt, Human herpesvirus 7
uaguucuacuug

SEQ ID NO: 349686 - RNA, 17 nt, Human herpesvirus 7
uaguuuaacuuacuguu

SEQ ID NO: 349687 - RNA, 23 nt, Human herpesvirus 7
uaguuugguuauccaaguuuuaa

SEQ ID NO: 349688 - RNA, 14 nt, Human herpesvirus 7
uauaaacauucuaa

SEQ ID NO: 349689 - RNA, 21 nt, Human herpesvirus 7
uauaaacauucuaaauugaga

SEQ ID NO: 349690 - RNA, 18 nt, Human herpesvirus 7
uauaaacucuaugucaaa

SEQ ID NO: 349691 - RNA, 21 nt, Human herpesvirus 7
uauaaauguaacuuucaucug

SEQ ID NO: 349692 - RNA, 19 nt, Human herpesvirus 7
uauaacaauauuuaaagua

SEQ ID NO: 349693 - RNA, 21 nt, Human herpesvirus 7
uauaauaacaaacgauuuggu

SEQ ID NO: 349694 - RNA, 13 nt, Human herpesvirus 7
uauaauagccuuu

SEQ ID NO: 349695 - RNA, 18 nt, Human herpesvirus 7
uauaaucuuaauguuucu

SEQ ID NO: 349696 - RNA, 20 nt, Human herpesvirus 7
uauaaugguuugaauaucuc

SEQ ID NO: 349697 - RNA, 17 nt, Human herpesvirus 7
uauaauucucacagcuu

SEQ ID NO: 349698 - RNA, 13 nt, Human herpesvirus 7
uauacaaaagaca

SEQ ID NO: 349699 - RNA, 21 nt, Human herpesvirus 7
uauacaaaagacauaacaaaa

SEQ ID NO: 349700 - RNA, 22 nt, Human herpesvirus 7
uauacaaauuuuaauagucuaa

SEQ ID NO: 349701 - RNA, 21 nt, Human herpesvirus 7
uauacauaaagagaaaguaaa

SEQ ID NO: 349702 - RNA, 13 nt, Human herpesvirus 7
uauacauacuaaa

SEQ ID NO: 349703 - RNA, 14 nt, Human herpesvirus 7
uauacuucuugccc

SEQ ID NO: 349704 - RNA, 16 nt, Human herpesvirus 7
uauagccuggaauauu

SEQ ID NO: 349705 - RNA, 14 nt, Human herpesvirus 7
uauagucaggaucu

SEQ ID NO: 349706 - RNA, 19 nt, Human herpesvirus 7
uauauccaauaaugcauca

SEQ ID NO: 349707 - RNA, 18 nt, Human herpesvirus 7
uauaucuauuacagucua

SEQ ID NO: 349708 - RNA, 13 nt, Human herpesvirus 7
uauaugaaucaaa

SEQ ID NO: 349709 - RNA, 19 nt, Human herpesvirus 7
uauaugaaucaaauuucaa

SEQ ID NO: 349710 - RNA, 21 nt, Human herpesvirus 7
uauaugcaucaaaacauauca

SEQ ID NO: 349711 - RNA, 14 nt, Human herpesvirus 7
uauauggcaauaaa

SEQ ID NO: 349712 - RNA, 12 nt, Human herpesvirus 7
uauauuaaucuu

SEQ ID NO: 349713 - RNA, 14 nt, Human herpesvirus 7
uauauuaaucuuga

SEQ ID NO: 349714 - RNA, 22 nt, Human herpesvirus 7
uauauuggcaugcuuacaguga

SEQ ID NO: 349715 - RNA, 23 nt, Human herpesvirus 7
uauauuggcaugcuuacagugaa

SEQ ID NO: 349716 - RNA, 13 nt, Human herpesvirus 7
uauauuugcuugc

SEQ ID NO: 349717 - RNA, 16 nt, Human herpesvirus 7
uaucaaaauuccauuc

SEQ ID NO: 349718 - RNA, 21 nt, Human herpesvirus 7
uaucaaauccgagucaguaua

SEQ ID NO: 349719 - RNA, 16 nt, Human herpesvirus 7
uaucaaauuuaucuca

SEQ ID NO: 349720 - RNA, 23 nt, Human herpesvirus 7
uaucaaggucuuucaugcauugc

SEQ ID NO: 349721 - RNA, 19 nt, Human herpesvirus 7
uaucacuuccuguccaaau

SEQ ID NO: 349722 - RNA, 13 nt, Human herpesvirus 7
uaucagauuuuau

SEQ ID NO: 349723 - RNA, 15 nt, Human herpesvirus 7
uaucauacguuuaca

SEQ ID NO: 349724 - RNA, 17 nt, Human herpesvirus 7
uaucauuacucguguug

SEQ ID NO: 349725 - RNA, 17 nt, Human herpesvirus 7
uaucauuucuggaugaa

SEQ ID NO: 349726 - RNA, 15 nt, Human herpesvirus 7
uauccaguacgucuu

SEQ ID NO: 349727 - RNA, 22 nt, Human herpesvirus 7
uauccaguacgucuugcuguuu

SEQ ID NO: 349728 - RNA, 13 nt, Human herpesvirus 7
uauccaucaaaag

SEQ ID NO: 349729 - RNA, 15 nt, Human herpesvirus 7
uaucgcccacuauuu

SEQ ID NO: 349730 - RNA, 15 nt, Human herpesvirus 7
uaucgguuaucuuau

SEQ ID NO: 349731 - RNA, 18 nt, Human herpesvirus 7
uaucuaaaguggagacaa

SEQ ID NO: 349732 - RNA, 13 nt, Human herpesvirus 7
uaucuaacacugc

SEQ ID NO: 349733 - RNA, 15 nt, Human herpesvirus 7
uaucuaccgcuguac

SEQ ID NO: 349734 - RNA, 17 nt, Human herpesvirus 7
uaucuaccgcuguacaa

SEQ ID NO: 349735 - RNA, 16 nt, Human herpesvirus 7
uaucucaaaacaaacu

SEQ ID NO: 349736 - RNA, 15 nt, Human herpesvirus 7
uaucugagagaaccu

SEQ ID NO: 349737 - RNA, 22 nt, Human herpesvirus 7
uaucuguguguuugaaugacau

SEQ ID NO: 349738 - RNA, 22 nt, Human herpesvirus 7
uaucuuucggagacguugcuca

SEQ ID NO: 349739 - RNA, 15 nt, Human herpesvirus 7
uaugaaaacagcugg

SEQ ID NO: 349740 - RNA, 13 nt, Human herpesvirus 7
uaugaaauuucaa

SEQ ID NO: 349741 - RNA, 22 nt, Human herpesvirus 7
uaugaaauuucaaaaauucucc

SEQ ID NO: 349742 - RNA, 17 nt, Human herpesvirus 7
uaugaacuggcacauua

SEQ ID NO: 349743 - RNA, 14 nt, Human herpesvirus 7
uaugacagaccuau

SEQ ID NO: 349744 - RNA, 15 nt, Human herpesvirus 7
uaugacgacuuugaa

SEQ ID NO: 349745 - RNA, 22 nt, Human herpesvirus 7
uaugacuuugaaucaacagcca

SEQ ID NO: 349746 - RNA, 15 nt, Human herpesvirus 7
uaugagauauuuaau

SEQ ID NO: 349747 - RNA, 23 nt, Human herpesvirus 7
uaugagugcuaugaaaauuuccu

SEQ ID NO: 349748 - RNA, 21 nt, Human herpesvirus 7
uaugauccagcaaagacuugc

SEQ ID NO: 349749 - RNA, 17 nt, Human herpesvirus 7
uaugaugaaacuuccaa

SEQ ID NO: 349750 - RNA, 17 nt, Human herpesvirus 7
uaugaugacaacaaagc

SEQ ID NO: 349751 - RNA, 14 nt, Human herpesvirus 7
uaugaugacgcuaa

SEQ ID NO: 349752 - RNA, 13 nt, Human herpesvirus 7
uaugaugcauuuu

SEQ ID NO: 349753 - RNA, 22 nt, Human herpesvirus 7
uaugaugcauuuuuauugcagu

SEQ ID NO: 349754 - RNA, 18 nt, Human herpesvirus 7
uaugcaucaaaacauauc

SEQ ID NO: 349755 - RNA, 23 nt, Human herpesvirus 7
uaugcaucaaaacauaucagauu

SEQ ID NO: 349756 - RNA, 14 nt, Human herpesvirus 7
uaugcaugcaauuu

SEQ ID NO: 349757 - RNA, 19 nt, Human herpesvirus 7
uaugccggccgggugcugc

SEQ ID NO: 349758 - RNA, 13 nt, Human herpesvirus 7
uaugcuaagaaag

SEQ ID NO: 349759 - RNA, 20 nt, Human herpesvirus 7
uaugcuaagaaagaacauuu

SEQ ID NO: 349760 - RNA, 22 nt, Human herpesvirus 7
uauggaaaaauguuaugugcuu

SEQ ID NO: 349761 - RNA, 22 nt, Human herpesvirus 7
uauggaaccuacugaagagcca

SEQ ID NO: 349762 - RNA, 17 nt, Human herpesvirus 7
uauggcagauuuggggu

SEQ ID NO: 349763 - RNA, 20 nt, Human herpesvirus 7
uaugguucuuauaacaaagu

SEQ ID NO: 349764 - RNA, 17 nt, Human herpesvirus 7
uaugguuugaaaaccau

SEQ ID NO: 349765 - RNA, 22 nt, Human herpesvirus 7
uauguaaauuauuagauuccau

SEQ ID NO: 349766 - RNA, 13 nt, Human herpesvirus 7
uauguacgugugc

SEQ ID NO: 349767 - RNA, 22 nt, Human herpesvirus 7
uauguagcaucucuguggcugu

SEQ ID NO: 349768 - RNA, 20 nt, Human herpesvirus 7
uauguauuuuacuggaugau

SEQ ID NO: 349769 - RNA, 15 nt, Human herpesvirus 7
uaugucagauucucc

SEQ ID NO: 349770 - RNA, 19 nt, Human herpesvirus 7
uaugucaucgguagugucu

SEQ ID NO: 349771 - RNA, 15 nt, Human herpesvirus 7
uaugugagaaaacau

SEQ ID NO: 349772 - RNA, 17 nt, Human herpesvirus 7
uaugugcuuauaucuua

SEQ ID NO: 349773 - RNA, 13 nt, Human herpesvirus 7
uauguggcacaua

SEQ ID NO: 349774 - RNA, 15 nt, Human herpesvirus 7
uauguuaucauuuau

SEQ ID NO: 349775 - RNA, 17 nt, Human herpesvirus 7
uauguucaaauaugcau

SEQ ID NO: 349776 - RNA, 22 nt, Human herpesvirus 7
uauguucaaauaugcauggaga

SEQ ID NO: 349777 - RNA, 22 nt, Human herpesvirus 7
uauguucagauugaaauuccau

SEQ ID NO: 349778 - RNA, 16 nt, Human herpesvirus 7
uauguucgccugaaga

SEQ ID NO: 349779 - RNA, 18 nt, Human herpesvirus 7
uauguugaaguugaacaa

SEQ ID NO: 349780 - RNA, 16 nt, Human herpesvirus 7
uauguuuaaaugaaga

SEQ ID NO: 349781 - RNA, 19 nt, Human herpesvirus 7
uauuaaagcuuucaauuca

SEQ ID NO: 349782 - RNA, 19 nt, Human herpesvirus 7
uauuaaaucauaccauaaa

SEQ ID NO: 349783 - RNA, 18 nt, Human herpesvirus 7
uauuaauacguccaaaaa

SEQ ID NO: 349784 - RNA, 13 nt, Human herpesvirus 7
uauuaaucuugaa

SEQ ID NO: 349785 - RNA, 14 nt, Human herpesvirus 7
uauuaaucuugaaa

SEQ ID NO: 349786 - RNA, 15 nt, Human herpesvirus 7
uauuaguuuaacuua

SEQ ID NO: 349787 - RNA, 17 nt, Human herpesvirus 7
uauuauuucuacacaaa

SEQ ID NO: 349788 - RNA, 20 nt, Human herpesvirus 7
uauucaaacgcuugaacaaa

SEQ ID NO: 349789 - RNA, 17 nt, Human herpesvirus 7
uauucaauuguccauuu

SEQ ID NO: 349790 - RNA, 22 nt, Human herpesvirus 7
uauucacgcuuccaucacaaaa

SEQ ID NO: 349791 - RNA, 23 nt, Human herpesvirus 7
uauucauuugcuucuucuaauac

SEQ ID NO: 349792 - RNA, 16 nt, Human herpesvirus 7
uauuccagauaugaca

SEQ ID NO: 349793 - RNA, 18 nt, Human herpesvirus 7
uauuccuucccaacuaaa

SEQ ID NO: 349794 - RNA, 16 nt, Human herpesvirus 7
uauucuaacaaauacc

SEQ ID NO: 349795 - RNA, 22 nt, Human herpesvirus 7
uauucuaacaaauaccaugaaa

SEQ ID NO: 349796 - RNA, 18 nt, Human herpesvirus 8 (Kaposi`s sarcoma-associated h
aacacuucccaauaacaa

SEQ ID NO: 349797 - RNA, 16 nt, Human herpesvirus 8 (Kaposi`s sarcoma-associated h
aacagacggucuuuag

SEQ ID NO: 349798 - RNA, 23 nt, Human herpesvirus 8 (Kaposi`s sarcoma-associated h
aacaggaugcccgcucaugugcg

SEQ ID NO: 349799 - RNA, 23 nt, Human herpesvirus 8 (Kaposi`s sarcoma-associated h
aacaguggaauuacguuguagau

SEQ ID NO: 349800 - RNA, 13 nt, Human herpesvirus 8 (Kaposi`s sarcoma-associated h
aacauagacaugc

SEQ ID NO: 349801 - RNA, 14 nt, Human herpesvirus 8 (Kaposi`s sarcoma-associated h
aacauccacaggaa

SEQ ID NO: 349802 - RNA, 23 nt, Human herpesvirus 8 (Kaposi`s sarcoma-associated h
aacaugcuggaucccagugccuc

SEQ ID NO: 349803 - RNA, 21 nt, Human herpesvirus 8 (Kaposi`s sarcoma-associated h
aacauggagguguguauccca

SEQ ID NO: 349804 - RNA, 17 nt, Human herpesvirus 8 (Kaposi`s sarcoma-associated h
aacauuaaacacauaca

SEQ ID NO: 349805 - RNA, 21 nt, Human herpesvirus 8 (Kaposi`s sarcoma-associated h
aacauucaagagggccaguuu

SEQ ID NO: 349806 - RNA, 19 nt, Human herpesvirus 8 (Kaposi`s sarcoma-associated h
aacauuuuguaaugaauaa

SEQ ID NO: 349807 - RNA, 16 nt, Human herpesvirus 8 (Kaposi`s sarcoma-associated h
aaccaccacaguguau

SEQ ID NO: 349808 - RNA, 17 nt, Human herpesvirus 8 (Kaposi`s sarcoma-associated h
aaccacggcgcuguaca

SEQ ID NO: 349809 - RNA, 17 nt, Human herpesvirus 8 (Kaposi`s sarcoma-associated h
aaccacucauaaaaccu

SEQ ID NO: 349810 - RNA, 15 nt, Human herpesvirus 8 (Kaposi`s sarcoma-associated h
aaccaggccaccauu

SEQ ID NO: 349811 - RNA, 12 nt, Human herpesvirus 8 (Kaposi`s sarcoma-associated h
aacccacacugg

SEQ ID NO: 349812 - RNA, 12 nt, Human herpesvirus 8 (Kaposi`s sarcoma-associated h
aacccacagcau

SEQ ID NO: 349813 - RNA, 22 nt, Human herpesvirus 8 (Kaposi`s sarcoma-associated h
aacccacagcccauaguaugua

SEQ ID NO: 349814 - RNA, 21 nt, Human herpesvirus 8 (Kaposi`s sarcoma-associated h
aaccuaaaaaaugugcaugug

SEQ ID NO: 349815 - RNA, 16 nt, Human herpesvirus 8 (Kaposi`s sarcoma-associated h
aacgccccucuuggcu

SEQ ID NO: 349816 - RNA, 11 nt, Human herpesvirus 8 (Kaposi`s sarcoma-associated h
aacggacaauu

SEQ ID NO: 349817 - RNA, 14 nt, Human herpesvirus 8 (Kaposi`s sarcoma-associated h
aacuaaccacucau

SEQ ID NO: 349818 - RNA, 22 nt, Human herpesvirus 8 (Kaposi`s sarcoma-associated h
aacuaaccacucauaaaaccuc

SEQ ID NO: 349819 - RNA, 17 nt, Human herpesvirus 8 (Kaposi`s sarcoma-associated h
aacuaauauuaaccaua

SEQ ID NO: 349820 - RNA, 15 nt, Human herpesvirus 8 (Kaposi`s sarcoma-associated h
aacuaccagccauca

SEQ ID NO: 349821 - RNA, 17 nt, Human herpesvirus 8 (Kaposi`s sarcoma-associated h
aacuagcagagaccucu

SEQ ID NO: 349822 - RNA, 18 nt, Human herpesvirus 8 (Kaposi`s sarcoma-associated h
aacuauagcgcucugccc

SEQ ID NO: 349823 - RNA, 11 nt, Human herpesvirus 8 (Kaposi`s sarcoma-associated h
aacugccaaag

SEQ ID NO: 349824 - RNA, 22 nt, Human herpesvirus 8 (Kaposi`s sarcoma-associated h
aacugggcacggaugacaggga

SEQ ID NO: 349825 - RNA, 18 nt, Human herpesvirus 8 (Kaposi`s sarcoma-associated h
aacugucgagacauguca

SEQ ID NO: 349826 - RNA, 21 nt, Human herpesvirus 8 (Kaposi`s sarcoma-associated h
aacugucuccagaagagcauu

SEQ ID NO: 349827 - RNA, 23 nt, Human herpesvirus 8 (Kaposi`s sarcoma-associated h
aacuucuagcauaugcugccaag

SEQ ID NO: 349828 - RNA, 22 nt, Human herpesvirus 8 (Kaposi`s sarcoma-associated h
aacuucuauguuuccuguuaua

SEQ ID NO: 349829 - RNA, 21 nt, Human herpesvirus 8 (Kaposi`s sarcoma-associated h
aacuugcucuuuucaaccucg

SEQ ID NO: 349830 - RNA, 19 nt, Human herpesvirus 8 (Kaposi`s sarcoma-associated h
aacuuuuccauugcacuca

SEQ ID NO: 349831 - RNA, 13 nt, Human herpesvirus 8 (Kaposi`s sarcoma-associated h
aagaaaggugacu

SEQ ID NO: 349832 - RNA, 20 nt, Human herpesvirus 8 (Kaposi`s sarcoma-associated h
aagaaauccgagcaccucag

SEQ ID NO: 349833 - RNA, 16 nt, Human herpesvirus 8 (Kaposi`s sarcoma-associated h
aagaaauuuuauguca

SEQ ID NO: 349834 - RNA, 15 nt, Human herpesvirus 8 (Kaposi`s sarcoma-associated h
aagaagcgcacccag

SEQ ID NO: 349835 - RNA, 22 nt, Human herpesvirus 8 (Kaposi`s sarcoma-associated h
aagacauggugacccacauaga

SEQ ID NO: 349836 - RNA, 19 nt, Human herpesvirus 8 (Kaposi`s sarcoma-associated h
aagaccgagcguauucuca

SEQ ID NO: 349837 - RNA, 17 nt, Human herpesvirus 8 (Kaposi`s sarcoma-associated h
aagaccgcguccuccac

SEQ ID NO: 349838 - RNA, 16 nt, Human herpesvirus 8 (Kaposi`s sarcoma-associated h
aagacuaaaaaggcca

SEQ ID NO: 349839 - RNA, 23 nt, Human herpesvirus 8 (Kaposi`s sarcoma-associated h
aagagagaauuagaaacaaagca

SEQ ID NO: 349840 - RNA, 16 nt, Human herpesvirus 8 (Kaposi`s sarcoma-associated h
aagagcacacugugug

SEQ ID NO: 349841 - RNA, 13 nt, Human herpesvirus 8 (Kaposi`s sarcoma-associated h
aagagggccaguu

SEQ ID NO: 349842 - RNA, 14 nt, Human herpesvirus 8 (Kaposi`s sarcoma-associated h
aagaguagaggguu

SEQ ID NO: 349843 - RNA, 18 nt, Human herpesvirus 8 (Kaposi`s sarcoma-associated h
aagauaccgaccaauaca

SEQ ID NO: 349844 - RNA, 11 nt, Human herpesvirus 8 (Kaposi`s sarcoma-associated h
aagaugaagga

SEQ ID NO: 349845 - RNA, 16 nt, Human herpesvirus 8 (Kaposi`s sarcoma-associated h
aagauuaagauuauaa

SEQ ID NO: 349846 - RNA, 19 nt, Human herpesvirus 8 (Kaposi`s sarcoma-associated h
aagauugguguccagacag

SEQ ID NO: 349847 - RNA, 19 nt, Human herpesvirus 8 (Kaposi`s sarcoma-associated h
aagcacaacauuaaacaca

SEQ ID NO: 349848 - RNA, 17 nt, Human herpesvirus 8 (Kaposi`s sarcoma-associated h
aagcacauuuugcacgc

SEQ ID NO: 349849 - RNA, 16 nt, Human herpesvirus 8 (Kaposi`s sarcoma-associated h
aagcaguggagcaaga

SEQ ID NO: 349850 - RNA, 18 nt, Human herpesvirus 8 (Kaposi`s sarcoma-associated h
aagcauccggacugagau

SEQ ID NO: 349851 - RNA, 13 nt, Human herpesvirus 8 (Kaposi`s sarcoma-associated h
aagcauugucuua

SEQ ID NO: 349852 - RNA, 15 nt, Human herpesvirus 8 (Kaposi`s sarcoma-associated h
aagcauugucuuaag

SEQ ID NO: 349853 - RNA, 14 nt, Human herpesvirus 8 (Kaposi`s sarcoma-associated h
aagccgagccacaa

SEQ ID NO: 349854 - RNA, 17 nt, Human herpesvirus 8 (Kaposi`s sarcoma-associated h
aagccguucccaugagc

SEQ ID NO: 349855 - RNA, 19 nt, Human herpesvirus 8 (Kaposi`s sarcoma-associated h
aagcgaucacgacggauuu

SEQ ID NO: 349856 - RNA, 19 nt, Human herpesvirus 8 (Kaposi`s sarcoma-associated h
aagcgcugacgaaagcuau

SEQ ID NO: 349857 - RNA, 12 nt, Human herpesvirus 8 (Kaposi`s sarcoma-associated h
aagcuaugguuu

SEQ ID NO: 349858 - RNA, 18 nt, Human herpesvirus 8 (Kaposi`s sarcoma-associated h
aagcucgccgauggcuuu

SEQ ID NO: 349859 - RNA, 18 nt, Human herpesvirus 8 (Kaposi`s sarcoma-associated h
aagcuuaaccacaugcau

SEQ ID NO: 349860 - RNA, 17 nt, Human herpesvirus 8 (Kaposi`s sarcoma-associated h
aagcuugagcuuuucaa

SEQ ID NO: 349861 - RNA, 23 nt, Human herpesvirus 8 (Kaposi`s sarcoma-associated h
aaggaagcgcagcuuaccgcuac

SEQ ID NO: 349862 - RNA, 12 nt, Human herpesvirus 8 (Kaposi`s sarcoma-associated h
aaggacauggua

SEQ ID NO: 349863 - RNA, 20 nt, Human herpesvirus 8 (Kaposi`s sarcoma-associated h
aaggauggaaaacagucugu

SEQ ID NO: 349864 - RNA, 19 nt, Human herpesvirus 8 (Kaposi`s sarcoma-associated h
aaggggggggauuuaucua

SEQ ID NO: 349865 - RNA, 16 nt, Human herpesvirus 8 (Kaposi`s sarcoma-associated h
aaggucaauacauugu

SEQ ID NO: 349866 - RNA, 14 nt, Human herpesvirus 8 (Kaposi`s sarcoma-associated h
aaguacuuuuccau

SEQ ID NO: 349867 - RNA, 18 nt, Human herpesvirus 8 (Kaposi`s sarcoma-associated h
aaguaugucgugggaaau

SEQ ID NO: 349868 - RNA, 12 nt, Human herpesvirus 8 (Kaposi`s sarcoma-associated h
aagucauuaaac

SEQ ID NO: 349869 - RNA, 17 nt, Human herpesvirus 8 (Kaposi`s sarcoma-associated h
aagucccgaugccacug

SEQ ID NO: 349870 - RNA, 18 nt, Human herpesvirus 8 (Kaposi`s sarcoma-associated h
aagucguccgacaugugc

SEQ ID NO: 349871 - RNA, 16 nt, Human herpesvirus 8 (Kaposi`s sarcoma-associated h
agaaugcgugcuucug

SEQ ID NO: 349872 - RNA, 14 nt, Human herpesvirus 8 (Kaposi`s sarcoma-associated h
agaauggugucaau

SEQ ID NO: 349873 - RNA, 18 nt, Human herpesvirus 8 (Kaposi`s sarcoma-associated h
agaauuagaaacaaagca

SEQ ID NO: 349874 - RNA, 15 nt, Human herpesvirus 8 (Kaposi`s sarcoma-associated h
agaauuggagcacuu

SEQ ID NO: 349875 - RNA, 16 nt, Human herpesvirus 8 (Kaposi`s sarcoma-associated h
agacaaacacugugga

SEQ ID NO: 349876 - RNA, 22 nt, Human herpesvirus 8 (Kaposi`s sarcoma-associated h
agacaacacuacuaugucccaa

SEQ ID NO: 349877 - RNA, 21 nt, Human herpesvirus 8 (Kaposi`s sarcoma-associated h
agacaacuaauauuaaccaua

SEQ ID NO: 349878 - RNA, 15 nt, Human herpesvirus 8 (Kaposi`s sarcoma-associated h
agacaauaugcccaa

SEQ ID NO: 349879 - RNA, 14 nt, Human herpesvirus 8 (Kaposi`s sarcoma-associated h
agacaccaaagaca

SEQ ID NO: 349880 - RNA, 14 nt, Human herpesvirus 8 (Kaposi`s sarcoma-associated h
agacacuaucucgu

SEQ ID NO: 349881 - RNA, 15 nt, Human herpesvirus 8 (Kaposi`s sarcoma-associated h
agacacucugccaug

SEQ ID NO: 349882 - RNA, 14 nt, Human herpesvirus 8 (Kaposi`s sarcoma-associated h
agacaguuaaucuu

SEQ ID NO: 349883 - RNA, 18 nt, Human herpesvirus 8 (Kaposi`s sarcoma-associated h
agacaguuaaucuuuauu

SEQ ID NO: 349884 - RNA, 18 nt, Human herpesvirus 8 (Kaposi`s sarcoma-associated h
agaccgagcguauucuca

SEQ ID NO: 349885 - RNA, 13 nt, Human herpesvirus 8 (Kaposi`s sarcoma-associated h
agaccguacaucc

SEQ ID NO: 349886 - RNA, 14 nt, Human herpesvirus 8 (Kaposi`s sarcoma-associated h
agaccuacaucucc

SEQ ID NO: 349887 - RNA, 19 nt, Human herpesvirus 8 (Kaposi`s sarcoma-associated h
agacgcaggcgccuaugac

SEQ ID NO: 349888 - RNA, 15 nt, Human herpesvirus 8 (Kaposi`s sarcoma-associated h
agacgccuuccucag

SEQ ID NO: 349889 - RNA, 21 nt, Human herpesvirus 8 (Kaposi`s sarcoma-associated h
agacgugcccagacaccaaag

SEQ ID NO: 349890 - RNA, 15 nt, Human herpesvirus 8 (Kaposi`s sarcoma-associated h
agacguugacugcca

SEQ ID NO: 349891 - RNA, 18 nt, Human herpesvirus 8 (Kaposi`s sarcoma-associated h
agacuaucagguagcaaa

SEQ ID NO: 349892 - RNA, 20 nt, Human herpesvirus 8 (Kaposi`s sarcoma-associated h
agacuaugggaaugugccua

SEQ ID NO: 349893 - RNA, 18 nt, Human herpesvirus 8 (Kaposi`s sarcoma-associated h
agacucaauuggaugcua

SEQ ID NO: 349894 - RNA, 16 nt, Human herpesvirus 8 (Kaposi`s sarcoma-associated h
agacuccaguuuaaaa

SEQ ID NO: 349895 - RNA, 21 nt, Human herpesvirus 8 (Kaposi`s sarcoma-associated h
agacuccaguuuaaaagacuc

SEQ ID NO: 349896 - RNA, 14 nt, Human herpesvirus 8 (Kaposi`s sarcoma-associated h
agacuggcucugau

SEQ ID NO: 349897 - RNA, 15 nt, Human herpesvirus 8 (Kaposi`s sarcoma-associated h
agacuggcucugaua

SEQ ID NO: 349898 - RNA, 21 nt, Human herpesvirus 8 (Kaposi`s sarcoma-associated h
agagaauaaagccaaccuaug

SEQ ID NO: 349899 - RNA, 15 nt, Human herpesvirus 8 (Kaposi`s sarcoma-associated h
agagaauuagaaaca

SEQ ID NO: 349900 - RNA, 13 nt, Human herpesvirus 8 (Kaposi`s sarcoma-associated h
agagacacuaucu

SEQ ID NO: 349901 - RNA, 19 nt, Human herpesvirus 8 (Kaposi`s sarcoma-associated h
agagaccguacauccucug

SEQ ID NO: 349902 - RNA, 19 nt, Human herpesvirus 8 (Kaposi`s sarcoma-associated h
agagagguaccccaugcau

SEQ ID NO: 349903 - RNA, 22 nt, Human herpesvirus 8 (Kaposi`s sarcoma-associated h
agagcacacugugugguuggug

SEQ ID NO: 349904 - RNA, 22 nt, Human herpesvirus 8 (Kaposi`s sarcoma-associated h
agagcauuuuucccuccugcau

SEQ ID NO: 349905 - RNA, 19 nt, Human herpesvirus 8 (Kaposi`s sarcoma-associated h
agagcgacgcgggucucag

SEQ ID NO: 349906 - RNA, 19 nt, Human herpesvirus 8 (Kaposi`s sarcoma-associated h
agaggacagggugguuaua

SEQ ID NO: 349907 - RNA, 22 nt, Human herpesvirus 8 (Kaposi`s sarcoma-associated h
agaggcaauacagaaguggguu

SEQ ID NO: 349908 - RNA, 13 nt, Human herpesvirus 8 (Kaposi`s sarcoma-associated h
agagggaucccag

SEQ ID NO: 349909 - RNA, 19 nt, Human herpesvirus 8 (Kaposi`s sarcoma-associated h
agagguuggucugcacccu

SEQ ID NO: 349910 - RNA, 16 nt, Human herpesvirus 8 (Kaposi`s sarcoma-associated h
agaguagaggguugca

SEQ ID NO: 349911 - RNA, 13 nt, Human herpesvirus 8 (Kaposi`s sarcoma-associated h
agagucauuuccu

SEQ ID NO: 349912 - RNA, 14 nt, Human herpesvirus 8 (Kaposi`s sarcoma-associated h
agaguccaaccugg

SEQ ID NO: 349913 - RNA, 15 nt, Human herpesvirus 8 (Kaposi`s sarcoma-associated h
agaguccaaccuggc

SEQ ID NO: 349914 - RNA, 14 nt, Human herpesvirus 8 (Kaposi`s sarcoma-associated h
agagugucaguaaa

SEQ ID NO: 349915 - RNA, 20 nt, Human herpesvirus 8 (Kaposi`s sarcoma-associated h
agauaauugagcgcugugcu

SEQ ID NO: 349916 - RNA, 22 nt, Human herpesvirus 8 (Kaposi`s sarcoma-associated h
agauaauugagcgcugugcuuu

SEQ ID NO: 349917 - RNA, 16 nt, Human herpesvirus 8 (Kaposi`s sarcoma-associated h
agauauagcgugucuc

SEQ ID NO: 349918 - RNA, 17 nt, Human herpesvirus 8 (Kaposi`s sarcoma-associated h
agauauagcgugucuca

SEQ ID NO: 349919 - RNA, 14 nt, Human herpesvirus 8 (Kaposi`s sarcoma-associated h
agauaugucugccc

SEQ ID NO: 349920 - RNA, 19 nt, Human herpesvirus 8 (Kaposi`s sarcoma-associated h
agauauugauagccacuau

SEQ ID NO: 349921 - RNA, 16 nt, Human herpesvirus 8 (Kaposi`s sarcoma-associated h
agaucacccagugugc

SEQ ID NO: 349922 - RNA, 16 nt, Human herpesvirus 8 (Kaposi`s sarcoma-associated h
agaucggccucugacg

SEQ ID NO: 349923 - RNA, 22 nt, Human herpesvirus 8 (Kaposi`s sarcoma-associated h
agaugaagaagaaaaugacgau

SEQ ID NO: 349924 - RNA, 16 nt, Human herpesvirus 8 (Kaposi`s sarcoma-associated h
agaugaagcugucauu

SEQ ID NO: 349925 - RNA, 14 nt, Human herpesvirus 8 (Kaposi`s sarcoma-associated h
agaugaaugucuca

SEQ ID NO: 349926 - RNA, 21 nt, Human herpesvirus 8 (Kaposi`s sarcoma-associated h
agauguuagauagacccggcg

SEQ ID NO: 349927 - RNA, 13 nt, Human herpesvirus 8 (Kaposi`s sarcoma-associated h
agauguucuugcc

SEQ ID NO: 349928 - RNA, 15 nt, Human herpesvirus 8 (Kaposi`s sarcoma-associated h
agauuaacugucuac

SEQ ID NO: 349929 - RNA, 17 nt, Human herpesvirus 8 (Kaposi`s sarcoma-associated h
agauuauaaugggucua

SEQ ID NO: 349930 - RNA, 19 nt, Human herpesvirus 8 (Kaposi`s sarcoma-associated h
agauugacuggaacgccau

SEQ ID NO: 349931 - RNA, 15 nt, Human herpesvirus 8 (Kaposi`s sarcoma-associated h
agauugccaccguuu

SEQ ID NO: 349932 - RNA, 18 nt, Human herpesvirus 8 (Kaposi`s sarcoma-associated h
agauugguguccagacag

SEQ ID NO: 349933 - RNA, 15 nt, Human herpesvirus 8 (Kaposi`s sarcoma-associated h
agauuuacaaauggu

SEQ ID NO: 349934 - RNA, 17 nt, Human herpesvirus 8 (Kaposi`s sarcoma-associated h
agauuuaguacguggua

SEQ ID NO: 349935 - RNA, 12 nt, Human herpesvirus 8 (Kaposi`s sarcoma-associated h
agcaaagcacau

SEQ ID NO: 349936 - RNA, 13 nt, Human herpesvirus 8 (Kaposi`s sarcoma-associated h
agcaaagugucuc

SEQ ID NO: 349937 - RNA, 20 nt, Human herpesvirus 8 (Kaposi`s sarcoma-associated h
agcaaagugucucacccaau

SEQ ID NO: 349938 - RNA, 21 nt, Human herpesvirus 8 (Kaposi`s sarcoma-associated h
agcaacacccagcuagcagug

SEQ ID NO: 349939 - RNA, 16 nt, Human herpesvirus 8 (Kaposi`s sarcoma-associated h
agcaaccccucuggau

SEQ ID NO: 349940 - RNA, 17 nt, Human herpesvirus 8 (Kaposi`s sarcoma-associated h
agcaagacgccagacag

SEQ ID NO: 349941 - RNA, 12 nt, Human herpesvirus 8 (Kaposi`s sarcoma-associated h
agcaagcacaga

SEQ ID NO: 349942 - RNA, 15 nt, Human herpesvirus 8 (Kaposi`s sarcoma-associated h
agcaauaaagacaaa

SEQ ID NO: 349943 - RNA, 16 nt, Human herpesvirus 8 (Kaposi`s sarcoma-associated h
agcacacacgaugaag

SEQ ID NO: 349944 - RNA, 17 nt, Human herpesvirus 8 (Kaposi`s sarcoma-associated h
agcacacacgaugaaga

SEQ ID NO: 349945 - RNA, 18 nt, Human herpesvirus 8 (Kaposi`s sarcoma-associated h
agcaccuuggaacaaucu

SEQ ID NO: 349946 - RNA, 14 nt, Human herpesvirus 8 (Kaposi`s sarcoma-associated h
agcacgaagacaug

SEQ ID NO: 349947 - RNA, 15 nt, Human herpesvirus 8 (Kaposi`s sarcoma-associated h
agcacgaagacaugg

SEQ ID NO: 349948 - RNA, 19 nt, Human herpesvirus 8 (Kaposi`s sarcoma-associated h
agcacuccuguuagcacau

SEQ ID NO: 349949 - RNA, 17 nt, Human herpesvirus 8 (Kaposi`s sarcoma-associated h
agcagaguguccaguag

SEQ ID NO: 349950 - RNA, 11 nt, Human herpesvirus 8 (Kaposi`s sarcoma-associated h
agcagccaugu

SEQ ID NO: 349951 - RNA, 18 nt, Human herpesvirus 8 (Kaposi`s sarcoma-associated h
agcagccuaacauguggc

SEQ ID NO: 349952 - RNA, 15 nt, Human herpesvirus 8 (Kaposi`s sarcoma-associated h
agcagcgccagugga

SEQ ID NO: 349953 - RNA, 19 nt, Human herpesvirus 8 (Kaposi`s sarcoma-associated h
agcagcugucccggaucca

SEQ ID NO: 349954 - RNA, 18 nt, Human herpesvirus 8 (Kaposi`s sarcoma-associated h
agcaguguuugcugcugu

SEQ ID NO: 349955 - RNA, 22 nt, Human herpesvirus 8 (Kaposi`s sarcoma-associated h
agcauggccuuuuuaagacaaa

SEQ ID NO: 349956 - RNA, 12 nt, Human herpesvirus 8 (Kaposi`s sarcoma-associated h
agccaacaaaca

SEQ ID NO: 349957 - RNA, 15 nt, Human herpesvirus 8 (Kaposi`s sarcoma-associated h
agccaagaaccauaa

SEQ ID NO: 349958 - RNA, 17 nt, Human herpesvirus 8 (Kaposi`s sarcoma-associated h
agccaauugacugugga

SEQ ID NO: 349959 - RNA, 22 nt, Human herpesvirus 8 (Kaposi`s sarcoma-associated h
agccacaaacgccccucuuggc

SEQ ID NO: 349960 - RNA, 23 nt, Human herpesvirus 8 (Kaposi`s sarcoma-associated h
agccacaaacgccccucuuggcu

SEQ ID NO: 349961 - RNA, 21 nt, Human herpesvirus 8 (Kaposi`s sarcoma-associated h
agccaccacgccacaacccaa

SEQ ID NO: 349962 - RNA, 22 nt, Human herpesvirus 8 (Kaposi`s sarcoma-associated h
agccacggccaguuauaugcac

SEQ ID NO: 349963 - RNA, 17 nt, Human herpesvirus 8 (Kaposi`s sarcoma-associated h
agcccagagcuagcaca

SEQ ID NO: 349964 - RNA, 20 nt, Human herpesvirus 8 (Kaposi`s sarcoma-associated h
agcccuuaucagcucacugu

SEQ ID NO: 349965 - RNA, 14 nt, Human herpesvirus 8 (Kaposi`s sarcoma-associated h
agccgagccacaaa

SEQ ID NO: 349966 - RNA, 15 nt, Human herpesvirus 8 (Kaposi`s sarcoma-associated h
agccgcuugcugaua

SEQ ID NO: 349967 - RNA, 15 nt, Human herpesvirus 8 (Kaposi`s sarcoma-associated h
agccuaacauguggc

SEQ ID NO: 349968 - RNA, 14 nt, Human herpesvirus 8 (Kaposi`s sarcoma-associated h
agccucccuaauag

SEQ ID NO: 349969 - RNA, 14 nt, Human herpesvirus 8 (Kaposi`s sarcoma-associated h
agccucuguacaug

SEQ ID NO: 349970 - RNA, 13 nt, Human herpesvirus 8 (Kaposi`s sarcoma-associated h
agcgaccagucuu

SEQ ID NO: 349971 - RNA, 16 nt, Human herpesvirus 8 (Kaposi`s sarcoma-associated h
agcgaccagucuuaua

SEQ ID NO: 349972 - RNA, 16 nt, Human herpesvirus 8 (Kaposi`s sarcoma-associated h
agcggcgaaucugaau

SEQ ID NO: 349973 - RNA, 12 nt, Human herpesvirus 8 (Kaposi`s sarcoma-associated h
agcguauucuca

SEQ ID NO: 349974 - RNA, 21 nt, Human herpesvirus 8 (Kaposi`s sarcoma-associated h
agcgugcggucagaguggugg

SEQ ID NO: 349975 - RNA, 16 nt, Human herpesvirus 8 (Kaposi`s sarcoma-associated h
agcuacgcacugagcg

SEQ ID NO: 349976 - RNA, 18 nt, Human herpesvirus 8 (Kaposi`s sarcoma-associated h
agcucaucaaugggagaa

SEQ ID NO: 349977 - RNA, 18 nt, Human herpesvirus 8 (Kaposi`s sarcoma-associated h
agcucugcugccuguuau

SEQ ID NO: 349978 - RNA, 14 nt, Human herpesvirus 8 (Kaposi`s sarcoma-associated h
agcugagccacaaa

SEQ ID NO: 349979 - RNA, 16 nt, Human herpesvirus 8 (Kaposi`s sarcoma-associated h
agcugagccacaaacg

SEQ ID NO: 349980 - RNA, 14 nt, Human herpesvirus 8 (Kaposi`s sarcoma-associated h
agcugccaaggcaa

SEQ ID NO: 349981 - RNA, 15 nt, Human herpesvirus 8 (Kaposi`s sarcoma-associated h
agcugccaaggcaag

SEQ ID NO: 349982 - RNA, 18 nt, Human herpesvirus 8 (Kaposi`s sarcoma-associated h
agcugcugguucaggauu

SEQ ID NO: 349983 - RNA, 14 nt, Human herpesvirus 8 (Kaposi`s sarcoma-associated h
agcuggaccguccu

SEQ ID NO: 349984 - RNA, 21 nt, Human herpesvirus 8 (Kaposi`s sarcoma-associated h
agcuggagugcugaccacggc

SEQ ID NO: 349985 - RNA, 17 nt, Human herpesvirus 8 (Kaposi`s sarcoma-associated h
agcuggucccgugguca

SEQ ID NO: 349986 - RNA, 15 nt, Human herpesvirus 8 (Kaposi`s sarcoma-associated h
agcuguacauaaucc

SEQ ID NO: 349987 - RNA, 22 nt, Human herpesvirus 8 (Kaposi`s sarcoma-associated h
agcugucauugaggaagaucua

SEQ ID NO: 349988 - RNA, 17 nt, Human herpesvirus 8 (Kaposi`s sarcoma-associated h
agcuuaaccacaugcau

SEQ ID NO: 349989 - RNA, 19 nt, Human herpesvirus 8 (Kaposi`s sarcoma-associated h
agcuuaccgcuacuguggg

SEQ ID NO: 349990 - RNA, 16 nt, Human herpesvirus 8 (Kaposi`s sarcoma-associated h
agcuucggaaagcacu

SEQ ID NO: 349991 - RNA, 18 nt, Human herpesvirus 8 (Kaposi`s sarcoma-associated h
agcuucggaaagcacugg

SEQ ID NO: 349992 - RNA, 18 nt, Human herpesvirus 8 (Kaposi`s sarcoma-associated h
aggaaacuggguguaagc

SEQ ID NO: 349993 - RNA, 16 nt, Human herpesvirus 8 (Kaposi`s sarcoma-associated h
aggaagagcacuguua

SEQ ID NO: 349994 - RNA, 12 nt, Human herpesvirus 8 (Kaposi`s sarcoma-associated h
aggaagaugaag

SEQ ID NO: 349995 - RNA, 16 nt, Human herpesvirus 8 (Kaposi`s sarcoma-associated h
aggaagcaucuggucc

SEQ ID NO: 349996 - RNA, 22 nt, Human herpesvirus 8 (Kaposi`s sarcoma-associated h
aggaagcaucugguccuaagag

SEQ ID NO: 349997 - RNA, 17 nt, Human herpesvirus 8 (Kaposi`s sarcoma-associated h
aggaauuuuacuggugu

SEQ ID NO: 349998 - RNA, 16 nt, Human herpesvirus 8 (Kaposi`s sarcoma-associated h
aggacauaccuacuaa

SEQ ID NO: 349999 - RNA, 12 nt, Human herpesvirus 8 (Kaposi`s sarcoma-associated h
aggaccugauac

SEQ ID NO: 350000 - RNA, 22 nt, Human herpesvirus 8 (Kaposi`s sarcoma-associated h
aggagcagccugcaggggagca

SEQ ID NO: 350001 - RNA, 16 nt, Human herpesvirus 8 (Kaposi`s sarcoma-associated h
aggagcgacuggauca

SEQ ID NO: 350002 - RNA, 17 nt, Human herpesvirus 8 (Kaposi`s sarcoma-associated h
aggaggaagagcacugu

SEQ ID NO: 350003 - RNA, 15 nt, Human herpesvirus 8 (Kaposi`s sarcoma-associated h
aggagggcagguuaa

SEQ ID NO: 350004 - RNA, 15 nt, Human herpesvirus 8 (Kaposi`s sarcoma-associated h
aggagugggaucucc

SEQ ID NO: 350005 - RNA, 16 nt, Human herpesvirus 8 (Kaposi`s sarcoma-associated h
aggaguguugguuaca

SEQ ID NO: 350006 - RNA, 20 nt, Human herpesvirus 8 (Kaposi`s sarcoma-associated h
aggaucggaucuuuuacaau

SEQ ID NO: 350007 - RNA, 19 nt, Human herpesvirus 8 (Kaposi`s sarcoma-associated h
aggaugaggaagaugaaga

SEQ ID NO: 350008 - RNA, 21 nt, Human herpesvirus 8 (Kaposi`s sarcoma-associated h
aggaugugucugcguuccaca

SEQ ID NO: 350009 - RNA, 14 nt, Human herpesvirus 8 (Kaposi`s sarcoma-associated h
aggauuccaccauu

SEQ ID NO: 350010 - RNA, 15 nt, Human herpesvirus 8 (Kaposi`s sarcoma-associated h
aggauuuaaugagac

SEQ ID NO: 350011 - RNA, 18 nt, Human herpesvirus 8 (Kaposi`s sarcoma-associated h
aggauuucgaauaucuca

SEQ ID NO: 350012 - RNA, 14 nt, Human herpesvirus 8 (Kaposi`s sarcoma-associated h
aggcaacaugacau

SEQ ID NO: 350013 - RNA, 17 nt, Human herpesvirus 8 (Kaposi`s sarcoma-associated h
aggcauuuuguauuauu

SEQ ID NO: 350014 - RNA, 16 nt, Human herpesvirus 8 (Kaposi`s sarcoma-associated h
aggcccaugugggcuu

SEQ ID NO: 350015 - RNA, 13 nt, Human herpesvirus 8 (Kaposi`s sarcoma-associated h
aggcccugggcuu

SEQ ID NO: 350016 - RNA, 15 nt, Human herpesvirus 8 (Kaposi`s sarcoma-associated h
aggcgaacuucuagc

SEQ ID NO: 350017 - RNA, 18 nt, Human herpesvirus 8 (Kaposi`s sarcoma-associated h
aggcgaauaaaacaggaa

SEQ ID NO: 350018 - RNA, 16 nt, Human herpesvirus 8 (Kaposi`s sarcoma-associated h
aggcguguugggacau

SEQ ID NO: 350019 - RNA, 15 nt, Human herpesvirus 8 (Kaposi`s sarcoma-associated h
aggcuggaccuccuc

SEQ ID NO: 350020 - RNA, 19 nt, Human herpesvirus 8 (Kaposi`s sarcoma-associated h
agggaaauggggaacacag

SEQ ID NO: 350021 - RNA, 15 nt, Human herpesvirus 8 (Kaposi`s sarcoma-associated h
agggaauggccucca

SEQ ID NO: 350022 - RNA, 18 nt, Human herpesvirus 8 (Kaposi`s sarcoma-associated h
agggaguauaucauauca

SEQ ID NO: 350023 - RNA, 16 nt, Human herpesvirus 8 (Kaposi`s sarcoma-associated h
agggauacuguuuaua

SEQ ID NO: 350024 - RNA, 22 nt, Human herpesvirus 8 (Kaposi`s sarcoma-associated h
agggcaugaggcuggaccuccu

SEQ ID NO: 350025 - RNA, 14 nt, Human herpesvirus 8 (Kaposi`s sarcoma-associated h
agggccaagcuacu

SEQ ID NO: 350026 - RNA, 15 nt, Human herpesvirus 8 (Kaposi`s sarcoma-associated h
agggcguguccagga

SEQ ID NO: 350027 - RNA, 22 nt, Human herpesvirus 8 (Kaposi`s sarcoma-associated h
agggcuaugauugcuucuccac

SEQ ID NO: 350028 - RNA, 22 nt, Human herpesvirus 8 (Kaposi`s sarcoma-associated h
aggggguguccccugcaaugca

SEQ ID NO: 350029 - RNA, 14 nt, Human herpesvirus 8 (Kaposi`s sarcoma-associated h
aagucuucuuguca

SEQ ID NO: 350030 - RNA, 17 nt, Human herpesvirus 8 (Kaposi`s sarcoma-associated h
aagucuucuugucacuc

SEQ ID NO: 350031 - RNA, 21 nt, Human herpesvirus 8 (Kaposi`s sarcoma-associated h
aagugcaaccugcugcagcug

SEQ ID NO: 350032 - RNA, 12 nt, Human herpesvirus 8 (Kaposi`s sarcoma-associated h
aauaaacauacg

SEQ ID NO: 350033 - RNA, 17 nt, Human herpesvirus 8 (Kaposi`s sarcoma-associated h
aauaaagccgagccaca

SEQ ID NO: 350034 - RNA, 18 nt, Human herpesvirus 8 (Kaposi`s sarcoma-associated h
aauaaagccgagccacaa

SEQ ID NO: 350035 - RNA, 19 nt, Human herpesvirus 8 (Kaposi`s sarcoma-associated h
aauaaagccgagccacaaa

SEQ ID NO: 350036 - RNA, 17 nt, Human herpesvirus 8 (Kaposi`s sarcoma-associated h
aauaaagcugagccaca

SEQ ID NO: 350037 - RNA, 19 nt, Human herpesvirus 8 (Kaposi`s sarcoma-associated h
aauaaagcugagccacaaa

SEQ ID NO: 350038 - RNA, 14 nt, Human herpesvirus 8 (Kaposi`s sarcoma-associated h
aauaaagucauuaa

SEQ ID NO: 350039 - RNA, 18 nt, Human herpesvirus 8 (Kaposi`s sarcoma-associated h
aauaacuuuauuacaggu

SEQ ID NO: 350040 - RNA, 14 nt, Human herpesvirus 8 (Kaposi`s sarcoma-associated h
aauacaaaaacaca

SEQ ID NO: 350041 - RNA, 17 nt, Human herpesvirus 8 (Kaposi`s sarcoma-associated h
aauacaaaaacacaauc

SEQ ID NO: 350042 - RNA, 19 nt, Human herpesvirus 8 (Kaposi`s sarcoma-associated h
aauacaaaaacacaaucac

SEQ ID NO: 350043 - RNA, 16 nt, Human herpesvirus 8 (Kaposi`s sarcoma-associated h
aauacaagacaacuaa

SEQ ID NO: 350044 - RNA, 22 nt, Human herpesvirus 8 (Kaposi`s sarcoma-associated h
aauacagggguaucacuuccuc

SEQ ID NO: 350045 - RNA, 12 nt, Human herpesvirus 8 (Kaposi`s sarcoma-associated h
aauacauuguga

SEQ ID NO: 350046 - RNA, 13 nt, Human herpesvirus 8 (Kaposi`s sarcoma-associated h
aauacccuguuuc

SEQ ID NO: 350047 - RNA, 19 nt, Human herpesvirus 8 (Kaposi`s sarcoma-associated h
aauacgguguaggcauuuu

SEQ ID NO: 350048 - RNA, 21 nt, Human herpesvirus 8 (Kaposi`s sarcoma-associated h
aauacugcccaaguauggaau

SEQ ID NO: 350049 - RNA, 13 nt, Human herpesvirus 8 (Kaposi`s sarcoma-associated h
aauagaccucacc

SEQ ID NO: 350050 - RNA, 19 nt, Human herpesvirus 8 (Kaposi`s sarcoma-associated h
aauagcgcugucauucucc

SEQ ID NO: 350051 - RNA, 16 nt, Human herpesvirus 8 (Kaposi`s sarcoma-associated h
aauagggauacuguuu

SEQ ID NO: 350052 - RNA, 19 nt, Human herpesvirus 8 (Kaposi`s sarcoma-associated h
aauaucucauuaaaccuac

SEQ ID NO: 350053 - RNA, 15 nt, Human herpesvirus 8 (Kaposi`s sarcoma-associated h
aaucacgguugcacc

SEQ ID NO: 350054 - RNA, 23 nt, Human herpesvirus 8 (Kaposi`s sarcoma-associated h
aaucacgguugcaccaagcacaa

SEQ ID NO: 350055 - RNA, 15 nt, Human herpesvirus 8 (Kaposi`s sarcoma-associated h
aaucagugguugcca

SEQ ID NO: 350056 - RNA, 18 nt, Human herpesvirus 8 (Kaposi`s sarcoma-associated h
aauccccggcagcaccug

SEQ ID NO: 350057 - RNA, 14 nt, Human herpesvirus 8 (Kaposi`s sarcoma-associated h
aaucgcaccuuaaa

SEQ ID NO: 350058 - RNA, 17 nt, Human herpesvirus 8 (Kaposi`s sarcoma-associated h
aaucugaauaugacgag

SEQ ID NO: 350059 - RNA, 14 nt, Human herpesvirus 8 (Kaposi`s sarcoma-associated h
aaucuggcauguau

SEQ ID NO: 350060 - RNA, 16 nt, Human herpesvirus 8 (Kaposi`s sarcoma-associated h
aaucuguugaauguga

SEQ ID NO: 350061 - RNA, 19 nt, Human herpesvirus 8 (Kaposi`s sarcoma-associated h
aaucuuuauugucuagaca

SEQ ID NO: 350062 - RNA, 17 nt, Human herpesvirus 8 (Kaposi`s sarcoma-associated h
aaugaaauuguggcacu

SEQ ID NO: 350063 - RNA, 18 nt, Human herpesvirus 8 (Kaposi`s sarcoma-associated h
aaugagggugaguggaac

SEQ ID NO: 350064 - RNA, 23 nt, Human herpesvirus 8 (Kaposi`s sarcoma-associated h
aaugagucaggcguggucucuuc

SEQ ID NO: 350065 - RNA, 19 nt, Human herpesvirus 8 (Kaposi`s sarcoma-associated h
aaugcauauggacuguuaa

SEQ ID NO: 350066 - RNA, 22 nt, Human herpesvirus 8 (Kaposi`s sarcoma-associated h
aaugcccagaaugaaggacaua

SEQ ID NO: 350067 - RNA, 21 nt, Human herpesvirus 8 (Kaposi`s sarcoma-associated h
aaugcggagaggaaugguggc

SEQ ID NO: 350068 - RNA, 23 nt, Human herpesvirus 8 (Kaposi`s sarcoma-associated h
aaugcucaggucugucacuagaa

SEQ ID NO: 350069 - RNA, 19 nt, Human herpesvirus 8 (Kaposi`s sarcoma-associated h
aaugcuuccaauugaagga

SEQ ID NO: 350070 - RNA, 14 nt, Human herpesvirus 8 (Kaposi`s sarcoma-associated h
aauggcguccgcuc

SEQ ID NO: 350071 - RNA, 20 nt, Human herpesvirus 8 (Kaposi`s sarcoma-associated h
aaugguagaggggguggaaa

SEQ ID NO: 350072 - RNA, 13 nt, Human herpesvirus 8 (Kaposi`s sarcoma-associated h
aauguacugccau

SEQ ID NO: 350073 - RNA, 19 nt, Human herpesvirus 8 (Kaposi`s sarcoma-associated h
aaugucagguuccacccag

SEQ ID NO: 350074 - RNA, 22 nt, Human herpesvirus 8 (Kaposi`s sarcoma-associated h
aaugugccgcgcaucaaccagc

SEQ ID NO: 350075 - RNA, 17 nt, Human herpesvirus 8 (Kaposi`s sarcoma-associated h
aauguuuuggucucuuu

SEQ ID NO: 350076 - RNA, 17 nt, Human herpesvirus 8 (Kaposi`s sarcoma-associated h
aauuacaggagaacagc

SEQ ID NO: 350077 - RNA, 24 nt, Human herpesvirus 8 (Kaposi`s sarcoma-associated h
aauuaccguccgcagaucauggau

SEQ ID NO: 350078 - RNA, 17 nt, Human herpesvirus 8 (Kaposi`s sarcoma-associated h
aauuacgcguuaucucc

SEQ ID NO: 350079 - RNA, 18 nt, Human herpesvirus 8 (Kaposi`s sarcoma-associated h
aauuauugcaccauuuau

SEQ ID NO: 350080 - RNA, 18 nt, Human herpesvirus 8 (Kaposi`s sarcoma-associated h
aauucaaggaucucaaaa

SEQ ID NO: 350081 - RNA, 14 nt, Human herpesvirus 8 (Kaposi`s sarcoma-associated h
aauucgcagggaga

SEQ ID NO: 350082 - RNA, 18 nt, Human herpesvirus 8 (Kaposi`s sarcoma-associated h
aauucgcgugguccugga

SEQ ID NO: 350083 - RNA, 13 nt, Human herpesvirus 8 (Kaposi`s sarcoma-associated h
aauugacugugga

SEQ ID NO: 350084 - RNA, 17 nt, Human herpesvirus 8 (Kaposi`s sarcoma-associated h
aauuggauauagacuua

SEQ ID NO: 350085 - RNA, 18 nt, Human herpesvirus 8 (Kaposi`s sarcoma-associated h
aauuggauauagacuuaa

SEQ ID NO: 350086 - RNA, 19 nt, Human herpesvirus 8 (Kaposi`s sarcoma-associated h
aauuggauauagacuuaaa

SEQ ID NO: 350087 - RNA, 18 nt, Human herpesvirus 8 (Kaposi`s sarcoma-associated h
aauuguaauguguuuuau

SEQ ID NO: 350088 - RNA, 20 nt, Human herpesvirus 8 (Kaposi`s sarcoma-associated h
acaaacaagacacacccgcc

SEQ ID NO: 350089 - RNA, 19 nt, Human herpesvirus 8 (Kaposi`s sarcoma-associated h
acaaacgccccucuuggcu

SEQ ID NO: 350090 - RNA, 16 nt, Human herpesvirus 8 (Kaposi`s sarcoma-associated h
acaaauaauagaucuc

SEQ ID NO: 350091 - RNA, 20 nt, Human herpesvirus 8 (Kaposi`s sarcoma-associated h
acaaaugagggugaguggaa

SEQ ID NO: 350092 - RNA, 23 nt, Human herpesvirus 8 (Kaposi`s sarcoma-associated h
acaaauuaccguccgcagaucau

SEQ ID NO: 350093 - RNA, 21 nt, Human herpesvirus 8 (Kaposi`s sarcoma-associated h
acaacacgcaccgcaagcagc

SEQ ID NO: 350094 - RNA, 17 nt, Human herpesvirus 8 (Kaposi`s sarcoma-associated h
acaacauagacaugccc

SEQ ID NO: 350095 - RNA, 17 nt, Human herpesvirus 8 (Kaposi`s sarcoma-associated h
acaacauuaaacacaua

SEQ ID NO: 350096 - RNA, 17 nt, Human herpesvirus 8 (Kaposi`s sarcoma-associated h
acaacugccacaaguaa

SEQ ID NO: 350097 - RNA, 23 nt, Human herpesvirus 8 (Kaposi`s sarcoma-associated h
acaacuuguccggagcugccuag

SEQ ID NO: 350098 - RNA, 14 nt, Human herpesvirus 8 (Kaposi`s sarcoma-associated h
acaagacaccaaua

SEQ ID NO: 350099 - RNA, 15 nt, Human herpesvirus 8 (Kaposi`s sarcoma-associated h
acaagacaccaauaa

SEQ ID NO: 350100 - RNA, 18 nt, Human herpesvirus 8 (Kaposi`s sarcoma-associated h
acaagacaguugugaucu

SEQ ID NO: 350101 - RNA, 20 nt, Human herpesvirus 8 (Kaposi`s sarcoma-associated h
acaagcgcugacgaaagcua

SEQ ID NO: 350102 - RNA, 18 nt, Human herpesvirus 8 (Kaposi`s sarcoma-associated h
acaaggcgcggacaggca

SEQ ID NO: 350103 - RNA, 21 nt, Human herpesvirus 8 (Kaposi`s sarcoma-associated h
acaagggccaagcuacuggcc

SEQ ID NO: 350104 - RNA, 18 nt, Human herpesvirus 8 (Kaposi`s sarcoma-associated h
acaagucccagcaauaaa

SEQ ID NO: 350105 - RNA, 20 nt, Human herpesvirus 8 (Kaposi`s sarcoma-associated h
acaauaaagauuaacugucu

SEQ ID NO: 350106 - RNA, 21 nt, Human herpesvirus 8 (Kaposi`s sarcoma-associated h
acaauaaagauuaacugucua

SEQ ID NO: 350107 - RNA, 18 nt, Human herpesvirus 8 (Kaposi`s sarcoma-associated h
acaauaaagccgagccac

SEQ ID NO: 350108 - RNA, 20 nt, Human herpesvirus 8 (Kaposi`s sarcoma-associated h
acaauaaagccgagccacaa

SEQ ID NO: 350109 - RNA, 21 nt, Human herpesvirus 8 (Kaposi`s sarcoma-associated h
acaauaaagccgagccacaaa

SEQ ID NO: 350110 - RNA, 17 nt, Human herpesvirus 8 (Kaposi`s sarcoma-associated h
acaauaaagcugagcca

SEQ ID NO: 350111 - RNA, 21 nt, Human herpesvirus 8 (Kaposi`s sarcoma-associated h
acaauaaagcugagccacaaa

SEQ ID NO: 350112 - RNA, 17 nt, Human herpesvirus 8 (Kaposi`s sarcoma-associated h
acaauagggauacuguu

SEQ ID NO: 350113 - RNA, 23 nt, Human herpesvirus 8 (Kaposi`s sarcoma-associated h
acaauaugcccaacuucaucaca

SEQ ID NO: 350114 - RNA, 17 nt, Human herpesvirus 8 (Kaposi`s sarcoma-associated h
acaaugugucuguggcu

SEQ ID NO: 350115 - RNA, 23 nt, Human herpesvirus 8 (Kaposi`s sarcoma-associated h
acaauuucauuaacaaacaaggu

SEQ ID NO: 350116 - RNA, 13 nt, Human herpesvirus 8 (Kaposi`s sarcoma-associated h
acacaaaagcaag

SEQ ID NO: 350117 - RNA, 15 nt, Human herpesvirus 8 (Kaposi`s sarcoma-associated h
acacaacaccagacc

SEQ ID NO: 350118 - RNA, 19 nt, Human herpesvirus 8 (Kaposi`s sarcoma-associated h
acacacggaaggcagugga

SEQ ID NO: 350119 - RNA, 13 nt, Human herpesvirus 8 (Kaposi`s sarcoma-associated h
acacauacaaugc

SEQ ID NO: 350120 - RNA, 14 nt, Human herpesvirus 8 (Kaposi`s sarcoma-associated h
acacauacaaugcu

SEQ ID NO: 350121 - RNA, 14 nt, Human herpesvirus 8 (Kaposi`s sarcoma-associated h
acacaucauaaagu

SEQ ID NO: 350122 - RNA, 22 nt, Human herpesvirus 8 (Kaposi`s sarcoma-associated h
acacauuaagagugccacuaaa

SEQ ID NO: 350123 - RNA, 15 nt, Human herpesvirus 8 (Kaposi`s sarcoma-associated h
acacauuugucuuua

SEQ ID NO: 350124 - RNA, 15 nt, Human herpesvirus 8 (Kaposi`s sarcoma-associated h
acaccaucucggcca

SEQ ID NO: 350125 - RNA, 20 nt, Human herpesvirus 8 (Kaposi`s sarcoma-associated h
acacuacuaauguaaccuaa

SEQ ID NO: 350126 - RNA, 20 nt, Human herpesvirus 8 (Kaposi`s sarcoma-associated h
acacuacucccccuccucag

SEQ ID NO: 350127 - RNA, 14 nt, Human herpesvirus 8 (Kaposi`s sarcoma-associated h
acacuccucaaaca

SEQ ID NO: 350128 - RNA, 15 nt, Human herpesvirus 8 (Kaposi`s sarcoma-associated h
acacucuuuaccaca

SEQ ID NO: 350129 - RNA, 20 nt, Human herpesvirus 8 (Kaposi`s sarcoma-associated h
acacuggaagacgagcaauu

SEQ ID NO: 350130 - RNA, 22 nt, Human herpesvirus 8 (Kaposi`s sarcoma-associated h
acacuggaagacgagcaauugu

SEQ ID NO: 350131 - RNA, 11 nt, Human herpesvirus 8 (Kaposi`s sarcoma-associated h
acacuguggau

SEQ ID NO: 350132 - RNA, 22 nt, Human herpesvirus 8 (Kaposi`s sarcoma-associated h
acacuguggauuuuauggacau

SEQ ID NO: 350133 - RNA, 23 nt, Human herpesvirus 8 (Kaposi`s sarcoma-associated h
acagaaaggucaccuggcccaaa

SEQ ID NO: 350134 - RNA, 20 nt, Human herpesvirus 8 (Kaposi`s sarcoma-associated h
acagagucuacgugccagug

SEQ ID NO: 350135 - RNA, 18 nt, Human herpesvirus 8 (Kaposi`s sarcoma-associated h
acagaugucucccguggc

SEQ ID NO: 350136 - RNA, 15 nt, Human herpesvirus 8 (Kaposi`s sarcoma-associated h
acagauucuacuuaa

SEQ ID NO: 350137 - RNA, 13 nt, Human herpesvirus 8 (Kaposi`s sarcoma-associated h
acaggaagcgaaa

SEQ ID NO: 350138 - RNA, 20 nt, Human herpesvirus 8 (Kaposi`s sarcoma-associated h
acaggacaagcugauguggu

SEQ ID NO: 350139 - RNA, 16 nt, Human herpesvirus 8 (Kaposi`s sarcoma-associated h
acaggagauauugaua

SEQ ID NO: 350140 - RNA, 16 nt, Human herpesvirus 8 (Kaposi`s sarcoma-associated h
acaggcgcguauggga

SEQ ID NO: 350141 - RNA, 17 nt, Human herpesvirus 8 (Kaposi`s sarcoma-associated h
acagggacgcauaucac

SEQ ID NO: 350142 - RNA, 18 nt, Human herpesvirus 8 (Kaposi`s sarcoma-associated h
acagggguaucacuuccu

SEQ ID NO: 350143 - RNA, 18 nt, Human herpesvirus 8 (Kaposi`s sarcoma-associated h
acagguaauuaacaucca

SEQ ID NO: 350144 - RNA, 15 nt, Human herpesvirus 8 (Kaposi`s sarcoma-associated h
acagguauacucaag

SEQ ID NO: 350145 - RNA, 12 nt, Human herpesvirus 8 (Kaposi`s sarcoma-associated h
acaguaugguuu

SEQ ID NO: 350146 - RNA, 19 nt, Human herpesvirus 8 (Kaposi`s sarcoma-associated h
acagugaguggcuguagca

SEQ ID NO: 350147 - RNA, 16 nt, Human herpesvirus 8 (Kaposi`s sarcoma-associated h
acagugccugcaguaa

SEQ ID NO: 350148 - RNA, 23 nt, Human herpesvirus 8 (Kaposi`s sarcoma-associated h
acagugcucuuccuccuagucau

SEQ ID NO: 350149 - RNA, 18 nt, Human herpesvirus 8 (Kaposi`s sarcoma-associated h
acaguggaauuacguugu

SEQ ID NO: 350150 - RNA, 13 nt, Human herpesvirus 8 (Kaposi`s sarcoma-associated h
acauaccuacuaa

SEQ ID NO: 350151 - RNA, 17 nt, Human herpesvirus 8 (Kaposi`s sarcoma-associated h
acauacgucccucuugg

SEQ ID NO: 350152 - RNA, 23 nt, Human herpesvirus 8 (Kaposi`s sarcoma-associated h
acauacgucccucuuggcuguua

SEQ ID NO: 350153 - RNA, 12 nt, Human herpesvirus 8 (Kaposi`s sarcoma-associated h
acauagugccuc

SEQ ID NO: 350154 - RNA, 18 nt, Human herpesvirus 8 (Kaposi`s sarcoma-associated h
acauauguuaaacacguc

SEQ ID NO: 350155 - RNA, 14 nt, Human herpesvirus 8 (Kaposi`s sarcoma-associated h
acauauugguauau

SEQ ID NO: 350156 - RNA, 19 nt, Human herpesvirus 8 (Kaposi`s sarcoma-associated h
acaucccccccgcaggcca

SEQ ID NO: 350157 - RNA, 21 nt, Human herpesvirus 8 (Kaposi`s sarcoma-associated h
acauccccggauuccuccgca

SEQ ID NO: 350158 - RNA, 14 nt, Human herpesvirus 8 (Kaposi`s sarcoma-associated h
acauccgcugccac

SEQ ID NO: 350159 - RNA, 14 nt, Human herpesvirus 8 (Kaposi`s sarcoma-associated h
acaucgucaucucu

SEQ ID NO: 350160 - RNA, 20 nt, Human herpesvirus 8 (Kaposi`s sarcoma-associated h
acaucuacgcguaccugaca

SEQ ID NO: 350161 - RNA, 21 nt, Human herpesvirus 8 (Kaposi`s sarcoma-associated h
acaucuccggacuacauccaa

SEQ ID NO: 350162 - RNA, 16 nt, Human herpesvirus 8 (Kaposi`s sarcoma-associated h
acaugaaagacugccu

SEQ ID NO: 350163 - RNA, 22 nt, Human herpesvirus 8 (Kaposi`s sarcoma-associated h
acaugagagacugcaggccauc

SEQ ID NO: 350164 - RNA, 22 nt, Human herpesvirus 8 (Kaposi`s sarcoma-associated h
acaugcaacccucuacucuucc

SEQ ID NO: 350165 - RNA, 14 nt, Human herpesvirus 8 (Kaposi`s sarcoma-associated h
acaugccccaaagc

SEQ ID NO: 350166 - RNA, 13 nt, Human herpesvirus 8 (Kaposi`s sarcoma-associated h
acauggacagggg

SEQ ID NO: 350167 - RNA, 17 nt, Human herpesvirus 8 (Kaposi`s sarcoma-associated h
acauggccggacaccac

SEQ ID NO: 350168 - RNA, 18 nt, Human herpesvirus 8 (Kaposi`s sarcoma-associated h
acaugguacaagcaauga

SEQ ID NO: 350169 - RNA, 12 nt, Human herpesvirus 8 (Kaposi`s sarcoma-associated h
acaugugacuga

SEQ ID NO: 350170 - RNA, 19 nt, Human herpesvirus 8 (Kaposi`s sarcoma-associated h
acauguggagccacuggcg

SEQ ID NO: 350171 - RNA, 19 nt, Human herpesvirus 8 (Kaposi`s sarcoma-associated h
acauguggcccccuuuaca

SEQ ID NO: 350172 - RNA, 19 nt, Human herpesvirus 8 (Kaposi`s sarcoma-associated h
acauuaaaaggacauugua

SEQ ID NO: 350173 - RNA, 17 nt, Human herpesvirus 8 (Kaposi`s sarcoma-associated h
acauuaaacacauacaa

SEQ ID NO: 350174 - RNA, 13 nt, Human herpesvirus 8 (Kaposi`s sarcoma-associated h
acauugugucaac

SEQ ID NO: 350175 - RNA, 16 nt, Human herpesvirus 8 (Kaposi`s sarcoma-associated h
acauuguuuauuucaa

SEQ ID NO: 350176 - RNA, 21 nt, Human herpesvirus 8 (Kaposi`s sarcoma-associated h
acauuuccacccaccuacuuc

SEQ ID NO: 350177 - RNA, 17 nt, Human herpesvirus 8 (Kaposi`s sarcoma-associated h
acauuugacaacacgca

SEQ ID NO: 350178 - RNA, 14 nt, Human herpesvirus 8 (Kaposi`s sarcoma-associated h
acauuugucuuuau

SEQ ID NO: 350179 - RNA, 22 nt, Human herpesvirus 8 (Kaposi`s sarcoma-associated h
acauuugucuuuauugcuuuca

SEQ ID NO: 350180 - RNA, 20 nt, Human herpesvirus 8 (Kaposi`s sarcoma-associated h
acauuuucucgugugcccuu

SEQ ID NO: 350181 - RNA, 15 nt, Human herpesvirus 8 (Kaposi`s sarcoma-associated h
accaacaaguaugaa

SEQ ID NO: 350182 - RNA, 13 nt, Human herpesvirus 8 (Kaposi`s sarcoma-associated h
accaacaauauua

SEQ ID NO: 350183 - RNA, 19 nt, Human herpesvirus 8 (Kaposi`s sarcoma-associated h
accaacaauauuauuuauu

SEQ ID NO: 350184 - RNA, 14 nt, Human herpesvirus 8 (Kaposi`s sarcoma-associated h
accaagaucuucca

SEQ ID NO: 350185 - RNA, 14 nt, Human herpesvirus 8 (Kaposi`s sarcoma-associated h
accaagcacaacau

SEQ ID NO: 350186 - RNA, 17 nt, Human herpesvirus 8 (Kaposi`s sarcoma-associated h
accaagcacaacauuaa

SEQ ID NO: 350187 - RNA, 16 nt, Human herpesvirus 8 (Kaposi`s sarcoma-associated h
accacaagggccaagc

SEQ ID NO: 350188 - RNA, 15 nt, Human herpesvirus 8 (Kaposi`s sarcoma-associated h
accacauacagacug

SEQ ID NO: 350189 - RNA, 23 nt, Human herpesvirus 8 (Kaposi`s sarcoma-associated h
accacccuauuggucacaucuca

SEQ ID NO: 350190 - RNA, 20 nt, Human herpesvirus 8 (Kaposi`s sarcoma-associated h
accacggcgcuguacagugc

SEQ ID NO: 350191 - RNA, 20 nt, Human herpesvirus 8 (Kaposi`s sarcoma-associated h
accaggacggagccguccac

SEQ ID NO: 350192 - RNA, 21 nt, Human herpesvirus 8 (Kaposi`s sarcoma-associated h
accagguggcacccaacaucc

SEQ ID NO: 350193 - RNA, 18 nt, Human herpesvirus 8 (Kaposi`s sarcoma-associated h
accaguucagagugugua

SEQ ID NO: 350194 - RNA, 13 nt, Human herpesvirus 8 (Kaposi`s sarcoma-associated h
accaugccagacu

SEQ ID NO: 350195 - RNA, 15 nt, Human herpesvirus 8 (Kaposi`s sarcoma-associated h
accauguucaggugg

SEQ ID NO: 350196 - RNA, 15 nt, Human herpesvirus 8 (Kaposi`s sarcoma-associated h
accauguugcgcaau

SEQ ID NO: 350197 - RNA, 19 nt, Human herpesvirus 8 (Kaposi`s sarcoma-associated h
acccaaugucaggggacca

SEQ ID NO: 350198 - RNA, 19 nt, Human herpesvirus 8 (Kaposi`s sarcoma-associated h
acccaauguuaauguucuc

SEQ ID NO: 350199 - RNA, 22 nt, Human herpesvirus 8 (Kaposi`s sarcoma-associated h
acccacagcaucccccaaauaa

SEQ ID NO: 350200 - RNA, 21 nt, Human herpesvirus 8 (Kaposi`s sarcoma-associated h
acccacagcccauaguaugua

SEQ ID NO: 350201 - RNA, 15 nt, Human herpesvirus 8 (Kaposi`s sarcoma-associated h
acccacccccuucug

SEQ ID NO: 350202 - RNA, 19 nt, Human herpesvirus 8 (Kaposi`s sarcoma-associated h
acccacggugauagauaug

SEQ ID NO: 350203 - RNA, 14 nt, Human herpesvirus 8 (Kaposi`s sarcoma-associated h
acccggauuugccc

SEQ ID NO: 350204 - RNA, 13 nt, Human herpesvirus 8 (Kaposi`s sarcoma-associated h
acccguaccacaa

SEQ ID NO: 350205 - RNA, 18 nt, Human herpesvirus 8 (Kaposi`s sarcoma-associated h
acccguggcucauaacac

SEQ ID NO: 350206 - RNA, 16 nt, Human herpesvirus 8 (Kaposi`s sarcoma-associated h
acccuaauacauaaca

SEQ ID NO: 350207 - RNA, 21 nt, Human herpesvirus 8 (Kaposi`s sarcoma-associated h
acccucacuauauaaaacaga

SEQ ID NO: 350208 - RNA, 13 nt, Human herpesvirus 8 (Kaposi`s sarcoma-associated h
acccucacuucuc

SEQ ID NO: 350209 - RNA, 14 nt, Human herpesvirus 8 (Kaposi`s sarcoma-associated h
acccucagugugcu

SEQ ID NO: 350210 - RNA, 22 nt, Human herpesvirus 8 (Kaposi`s sarcoma-associated h
acccugagcugguaaccagcua

SEQ ID NO: 350211 - RNA, 19 nt, Human herpesvirus 8 (Kaposi`s sarcoma-associated h
acccugauuagcacuguau

SEQ ID NO: 350212 - RNA, 22 nt, Human herpesvirus 8 (Kaposi`s sarcoma-associated h
acccuggggacugucauccugu

SEQ ID NO: 350213 - RNA, 19 nt, Human herpesvirus 8 (Kaposi`s sarcoma-associated h
acccuuucauuagugacau

SEQ ID NO: 350214 - RNA, 14 nt, Human herpesvirus 8 (Kaposi`s sarcoma-associated h
accgaaccaggcaa

SEQ ID NO: 350215 - RNA, 17 nt, Human herpesvirus 8 (Kaposi`s sarcoma-associated h
accgagcguauucucag

SEQ ID NO: 350216 - RNA, 13 nt, Human herpesvirus 8 (Kaposi`s sarcoma-associated h
accgagugcuuua

SEQ ID NO: 350217 - RNA, 22 nt, Human herpesvirus 8 (Kaposi`s sarcoma-associated h
accgagugcuuuaaugcggaga

SEQ ID NO: 350218 - RNA, 19 nt, Human herpesvirus 8 (Kaposi`s sarcoma-associated h
accgcaaagauaagccaau

SEQ ID NO: 350219 - RNA, 14 nt, Human herpesvirus 8 (Kaposi`s sarcoma-associated h
accgcuacuguggg

SEQ ID NO: 350220 - RNA, 22 nt, Human herpesvirus 8 (Kaposi`s sarcoma-associated h
accgcuacugugggugcacuga

SEQ ID NO: 350221 - RNA, 16 nt, Human herpesvirus 8 (Kaposi`s sarcoma-associated h
accggaguagugcaag

SEQ ID NO: 350222 - RNA, 18 nt, Human herpesvirus 8 (Kaposi`s sarcoma-associated h
accggaguagugcaagug

SEQ ID NO: 350223 - RNA, 17 nt, Human herpesvirus 8 (Kaposi`s sarcoma-associated h
accggcaggcagccaag

SEQ ID NO: 350224 - RNA, 18 nt, Human herpesvirus 8 (Kaposi`s sarcoma-associated h
accgggauuuaaaaccgc

SEQ ID NO: 350225 - RNA, 16 nt, Human herpesvirus 8 (Kaposi`s sarcoma-associated h
accguaaucgugcagg

SEQ ID NO: 350226 - RNA, 15 nt, Human herpesvirus 8 (Kaposi`s sarcoma-associated h
accuaaaaaaugugc

SEQ ID NO: 350227 - RNA, 19 nt, Human herpesvirus 8 (Kaposi`s sarcoma-associated h
accucaggguaacucugaa

SEQ ID NO: 350228 - RNA, 14 nt, Human herpesvirus 8 (Kaposi`s sarcoma-associated h
accucccuuugucu

SEQ ID NO: 350229 - RNA, 23 nt, Human herpesvirus 8 (Kaposi`s sarcoma-associated h
accucuaucucgccgguguauga

SEQ ID NO: 350230 - RNA, 20 nt, Human herpesvirus 8 (Kaposi`s sarcoma-associated h
accucuccauagaacuggaa

SEQ ID NO: 350231 - RNA, 22 nt, Human herpesvirus 8 (Kaposi`s sarcoma-associated h
accucuccggcgguggcggcca

SEQ ID NO: 350232 - RNA, 22 nt, Human herpesvirus 8 (Kaposi`s sarcoma-associated h
accucuuucaucacuuccagga

SEQ ID NO: 350233 - RNA, 23 nt, Human herpesvirus 8 (Kaposi`s sarcoma-associated h
accucuuucaucacuuccaggau

SEQ ID NO: 350234 - RNA, 18 nt, Human herpesvirus 8 (Kaposi`s sarcoma-associated h
accugaccugaccagaca

SEQ ID NO: 350235 - RNA, 14 nt, Human herpesvirus 8 (Kaposi`s sarcoma-associated h
accugaggugcucu

SEQ ID NO: 350236 - RNA, 13 nt, Human herpesvirus 8 (Kaposi`s sarcoma-associated h
accugcaaacuuu

SEQ ID NO: 350237 - RNA, 14 nt, Human herpesvirus 8 (Kaposi`s sarcoma-associated h
accuggcugcaaag

SEQ ID NO: 350238 - RNA, 23 nt, Human herpesvirus 8 (Kaposi`s sarcoma-associated h
accuguucuaccagguaggucac

SEQ ID NO: 350239 - RNA, 15 nt, Human herpesvirus 8 (Kaposi`s sarcoma-associated h
accuuaaacacaaca

SEQ ID NO: 350240 - RNA, 21 nt, Human herpesvirus 8 (Kaposi`s sarcoma-associated h
acgaaugcucaggucugucac

SEQ ID NO: 350241 - RNA, 16 nt, Human herpesvirus 8 (Kaposi`s sarcoma-associated h
acgaccgggaucuguu

SEQ ID NO: 350242 - RNA, 15 nt, Human herpesvirus 8 (Kaposi`s sarcoma-associated h
acgagguuacugcca

SEQ ID NO: 350243 - RNA, 14 nt, Human herpesvirus 8 (Kaposi`s sarcoma-associated h
acgauguuuuccag

SEQ ID NO: 350244 - RNA, 15 nt, Human herpesvirus 8 (Kaposi`s sarcoma-associated h
acgauuaaaaaccac

SEQ ID NO: 350245 - RNA, 16 nt, Human herpesvirus 8 (Kaposi`s sarcoma-associated h
acgauuaaaaaccacu

SEQ ID NO: 350246 - RNA, 21 nt, Human herpesvirus 8 (Kaposi`s sarcoma-associated h
acgcagacccggcaacacugg

SEQ ID NO: 350247 - RNA, 23 nt, Human herpesvirus 8 (Kaposi`s sarcoma-associated h
acgcagacccggcaacacuggac

SEQ ID NO: 350248 - RNA, 16 nt, Human herpesvirus 8 (Kaposi`s sarcoma-associated h
acgcaggcgccuauga

SEQ ID NO: 350249 - RNA, 16 nt, Human herpesvirus 8 (Kaposi`s sarcoma-associated h
acgccaacccucagug

SEQ ID NO: 350250 - RNA, 22 nt, Human herpesvirus 8 (Kaposi`s sarcoma-associated h
acgccccucuuggcuguuacaa

SEQ ID NO: 350251 - RNA, 19 nt, Human herpesvirus 8 (Kaposi`s sarcoma-associated h
acgccgucgcggaccucaa

SEQ ID NO: 350252 - RNA, 20 nt, Human herpesvirus 8 (Kaposi`s sarcoma-associated h
acgcgcgagacuuggcagaa

SEQ ID NO: 350253 - RNA, 15 nt, Human herpesvirus 8 (Kaposi`s sarcoma-associated h
acgcggugaaacaga

SEQ ID NO: 350254 - RNA, 22 nt, Human herpesvirus 8 (Kaposi`s sarcoma-associated h
acgcugcaauguacugccauga

SEQ ID NO: 350255 - RNA, 18 nt, Human herpesvirus 8 (Kaposi`s sarcoma-associated h
acgcugucccgugcccag

SEQ ID NO: 350256 - RNA, 20 nt, Human herpesvirus 8 (Kaposi`s sarcoma-associated h
acggacgcaccgacacugga

SEQ ID NO: 350257 - RNA, 17 nt, Human herpesvirus 8 (Kaposi`s sarcoma-associated h
acggacgccacugcuuu

SEQ ID NO: 350258 - RNA, 22 nt, Human herpesvirus 8 (Kaposi`s sarcoma-associated h
acggaggauccuaggugggugu

SEQ ID NO: 350259 - RNA, 14 nt, Human herpesvirus 8 (Kaposi`s sarcoma-associated h
acggcacacuacuc

SEQ ID NO: 350260 - RNA, 15 nt, Human herpesvirus 8 (Kaposi`s sarcoma-associated h
acggcacaggaccca

SEQ ID NO: 350261 - RNA, 21 nt, Human herpesvirus 8 (Kaposi`s sarcoma-associated h
cauuuauuagacguuggugug

SEQ ID NO: 350262 - RNA, 24 nt, Human herpesvirus 8 (Kaposi`s sarcoma-associated h
cauuuggacacaacaugcaacaag

SEQ ID NO: 350263 - RNA, 22 nt, Human herpesvirus 8 (Kaposi`s sarcoma-associated h
cauuugucuuuauugcuuucaa

SEQ ID NO: 350264 - RNA, 12 nt, Human herpesvirus 8 (Kaposi`s sarcoma-associated h
cauuuugguguc

SEQ ID NO: 350265 - RNA, 18 nt, Human herpesvirus 8 (Kaposi`s sarcoma-associated h
cauuuuuuacggacaaua

SEQ ID NO: 350266 - RNA, 13 nt, Human herpesvirus 8 (Kaposi`s sarcoma-associated h
caagcuacuggcc

SEQ ID NO: 350267 - RNA, 19 nt, Human herpesvirus 8 (Kaposi`s sarcoma-associated h
caagcuugagcuuuucaaa

SEQ ID NO: 350268 - RNA, 13 nt, Human herpesvirus 8 (Kaposi`s sarcoma-associated h
caaggaguggcug

SEQ ID NO: 350269 - RNA, 15 nt, Human herpesvirus 8 (Kaposi`s sarcoma-associated h
caaggaucucaaaag

SEQ ID NO: 350270 - RNA, 23 nt, Human herpesvirus 8 (Kaposi`s sarcoma-associated h
caaguaagucguccgacaugugc

SEQ ID NO: 350271 - RNA, 22 nt, Human herpesvirus 8 (Kaposi`s sarcoma-associated h
caauaaagauuaacugucuaca

SEQ ID NO: 350272 - RNA, 19 nt, Human herpesvirus 8 (Kaposi`s sarcoma-associated h
caauaaagccgagccacaa

SEQ ID NO: 350273 - RNA, 20 nt, Human herpesvirus 8 (Kaposi`s sarcoma-associated h
caauaaagccgagccacaaa

SEQ ID NO: 350274 - RNA, 21 nt, Human herpesvirus 8 (Kaposi`s sarcoma-associated h
caauaaagccgagccacaaag

SEQ ID NO: 350275 - RNA, 20 nt, Human herpesvirus 8 (Kaposi`s sarcoma-associated h
caauaaagcugagccacaaa

SEQ ID NO: 350276 - RNA, 15 nt, Human herpesvirus 8 (Kaposi`s sarcoma-associated h
caauacgccuucagg

SEQ ID NO: 350277 - RNA, 14 nt, Human herpesvirus 8 (Kaposi`s sarcoma-associated h
caauacugcccaag

SEQ ID NO: 350278 - RNA, 16 nt, Human herpesvirus 8 (Kaposi`s sarcoma-associated h
caauagggauacuguu

SEQ ID NO: 350279 - RNA, 21 nt, Human herpesvirus 8 (Kaposi`s sarcoma-associated h
caauagggauacuguuuauaa

SEQ ID NO: 350280 - RNA, 15 nt, Human herpesvirus 8 (Kaposi`s sarcoma-associated h
caauauaguggccaa

SEQ ID NO: 350281 - RNA, 19 nt, Human herpesvirus 8 (Kaposi`s sarcoma-associated h
caaucucucauagacuuuc

SEQ ID NO: 350282 - RNA, 20 nt, Human herpesvirus 8 (Kaposi`s sarcoma-associated h
caaucucucauagacuuucu

SEQ ID NO: 350283 - RNA, 18 nt, Human herpesvirus 8 (Kaposi`s sarcoma-associated h
caaugaaacgacauugga

SEQ ID NO: 350284 - RNA, 11 nt, Human herpesvirus 8 (Kaposi`s sarcoma-associated h
caaugccaugg

SEQ ID NO: 350285 - RNA, 14 nt, Human herpesvirus 8 (Kaposi`s sarcoma-associated h
caaugcuucccaau

SEQ ID NO: 350286 - RNA, 13 nt, Human herpesvirus 8 (Kaposi`s sarcoma-associated h
caauguacugcca

SEQ ID NO: 350287 - RNA, 17 nt, Human herpesvirus 8 (Kaposi`s sarcoma-associated h
caaugucaggggaccau

SEQ ID NO: 350288 - RNA, 20 nt, Human herpesvirus 8 (Kaposi`s sarcoma-associated h
caaugucaggggaccauauc

SEQ ID NO: 350289 - RNA, 14 nt, Human herpesvirus 8 (Kaposi`s sarcoma-associated h
caaugucagguucc

SEQ ID NO: 350290 - RNA, 17 nt, Human herpesvirus 8 (Kaposi`s sarcoma-associated h
caaugugucuguggcua

SEQ ID NO: 350291 - RNA, 18 nt, Human herpesvirus 8 (Kaposi`s sarcoma-associated h
caauuauugcaccauuua

SEQ ID NO: 350292 - RNA, 23 nt, Human herpesvirus 8 (Kaposi`s sarcoma-associated h
caauugacuguggagaaucggga

SEQ ID NO: 350293 - RNA, 14 nt, Human herpesvirus 8 (Kaposi`s sarcoma-associated h
cacaaaacugccaa

SEQ ID NO: 350294 - RNA, 18 nt, Human herpesvirus 8 (Kaposi`s sarcoma-associated h
cacaaaugaaaugaguca

SEQ ID NO: 350295 - RNA, 19 nt, Human herpesvirus 8 (Kaposi`s sarcoma-associated h
cacaacaugcaacaagcaa

SEQ ID NO: 350296 - RNA, 17 nt, Human herpesvirus 8 (Kaposi`s sarcoma-associated h
cacaauauaagaaccaa

SEQ ID NO: 350297 - RNA, 19 nt, Human herpesvirus 8 (Kaposi`s sarcoma-associated h
cacaaucacgguugcacca

SEQ ID NO: 350298 - RNA, 15 nt, Human herpesvirus 8 (Kaposi`s sarcoma-associated h
cacacggaaggcagu

SEQ ID NO: 350299 - RNA, 17 nt, Human herpesvirus 8 (Kaposi`s sarcoma-associated h
cacacggacaacggcua

SEQ ID NO: 350300 - RNA, 23 nt, Human herpesvirus 8 (Kaposi`s sarcoma-associated h
cacacgguuacuagcaccacuau

SEQ ID NO: 350301 - RNA, 16 nt, Human herpesvirus 8 (Kaposi`s sarcoma-associated h
cacagacacaaauuac

SEQ ID NO: 350302 - RNA, 14 nt, Human herpesvirus 8 (Kaposi`s sarcoma-associated h
cacagacacgagcu

SEQ ID NO: 350303 - RNA, 17 nt, Human herpesvirus 8 (Kaposi`s sarcoma-associated h
cacagagccuaccccaa

SEQ ID NO: 350304 - RNA, 20 nt, Human herpesvirus 8 (Kaposi`s sarcoma-associated h
cacagagucuacgugccagu

SEQ ID NO: 350305 - RNA, 20 nt, Human herpesvirus 8 (Kaposi`s sarcoma-associated h
cacagcccauaguauguaaa

SEQ ID NO: 350306 - RNA, 22 nt, Human herpesvirus 8 (Kaposi`s sarcoma-associated h
cacaguauagggauacaggaga

SEQ ID NO: 350307 - RNA, 22 nt, Human herpesvirus 8 (Kaposi`s sarcoma-associated h
cacaucagcuuggcgaccucaa

SEQ ID NO: 350308 - RNA, 17 nt, Human herpesvirus 8 (Kaposi`s sarcoma-associated h
cacaucgcucaaacuca

SEQ ID NO: 350309 - RNA, 11 nt, Human herpesvirus 8 (Kaposi`s sarcoma-associated h
cacaucucacg

SEQ ID NO: 350310 - RNA, 16 nt, Human herpesvirus 8 (Kaposi`s sarcoma-associated h
cacaucuguguacaaa

SEQ ID NO: 350311 - RNA, 12 nt, Human herpesvirus 8 (Kaposi`s sarcoma-associated h
cacauggcagcu

SEQ ID NO: 350312 - RNA, 18 nt, Human herpesvirus 8 (Kaposi`s sarcoma-associated h
cacauggcagcugaauca

SEQ ID NO: 350313 - RNA, 22 nt, Human herpesvirus 8 (Kaposi`s sarcoma-associated h
cacauggcagcugaaucagcau

SEQ ID NO: 350314 - RNA, 18 nt, Human herpesvirus 8 (Kaposi`s sarcoma-associated h
cacauguagccugucacc

SEQ ID NO: 350315 - RNA, 15 nt, Human herpesvirus 8 (Kaposi`s sarcoma-associated h
cacauugugucaacc

SEQ ID NO: 350316 - RNA, 16 nt, Human herpesvirus 8 (Kaposi`s sarcoma-associated h
cacauuugucuuuauu

SEQ ID NO: 350317 - RNA, 14 nt, Human herpesvirus 8 (Kaposi`s sarcoma-associated h
cacauuuugcacgc

SEQ ID NO: 350318 - RNA, 22 nt, Human herpesvirus 8 (Kaposi`s sarcoma-associated h
caccaacguuuuugagaucuau

SEQ ID NO: 350319 - RNA, 20 nt, Human herpesvirus 8 (Kaposi`s sarcoma-associated h
caccaccggcuaguguaugc

SEQ ID NO: 350320 - RNA, 21 nt, Human herpesvirus 8 (Kaposi`s sarcoma-associated h
caccacggaauaaaauacgua

SEQ ID NO: 350321 - RNA, 21 nt, Human herpesvirus 8 (Kaposi`s sarcoma-associated h
caccauuccucuccgcauuaa

SEQ ID NO: 350322 - RNA, 21 nt, Human herpesvirus 8 (Kaposi`s sarcoma-associated h
cacccacacauuugucuuuau

SEQ ID NO: 350323 - RNA, 12 nt, Human herpesvirus 8 (Kaposi`s sarcoma-associated h
cacccagugugc

SEQ ID NO: 350324 - RNA, 20 nt, Human herpesvirus 8 (Kaposi`s sarcoma-associated h
caccccucccucgcguccaa

SEQ ID NO: 350325 - RNA, 22 nt, Human herpesvirus 8 (Kaposi`s sarcoma-associated h
caccgaugccgaaaucaguguc

SEQ ID NO: 350326 - RNA, 17 nt, Human herpesvirus 8 (Kaposi`s sarcoma-associated h
caccguggaguugccug

SEQ ID NO: 350327 - RNA, 13 nt, Human herpesvirus 8 (Kaposi`s sarcoma-associated h
caccuacuuccag

SEQ ID NO: 350328 - RNA, 13 nt, Human herpesvirus 8 (Kaposi`s sarcoma-associated h
caccucagaaagu

SEQ ID NO: 350329 - RNA, 14 nt, Human herpesvirus 8 (Kaposi`s sarcoma-associated h
caccuuaaacacaa

SEQ ID NO: 350330 - RNA, 20 nt, Human herpesvirus 8 (Kaposi`s sarcoma-associated h
caccuuaaacacaacaccag

SEQ ID NO: 350331 - RNA, 19 nt, Human herpesvirus 8 (Kaposi`s sarcoma-associated h
cacgagcuaggaguggacu

SEQ ID NO: 350332 - RNA, 17 nt, Human herpesvirus 8 (Kaposi`s sarcoma-associated h
cacgaugggaacuuuca

SEQ ID NO: 350333 - RNA, 19 nt, Human herpesvirus 8 (Kaposi`s sarcoma-associated h
cacgcaccgcaagcagcaa

SEQ ID NO: 350334 - RNA, 15 nt, Human herpesvirus 8 (Kaposi`s sarcoma-associated h
cacgcugcaauguac

SEQ ID NO: 350335 - RNA, 17 nt, Human herpesvirus 8 (Kaposi`s sarcoma-associated h
cacggggacauggacag

SEQ ID NO: 350336 - RNA, 13 nt, Human herpesvirus 8 (Kaposi`s sarcoma-associated h
cacggugcacuga

SEQ ID NO: 350337 - RNA, 21 nt, Human herpesvirus 8 (Kaposi`s sarcoma-associated h
cacggugucguguaugccaau

SEQ ID NO: 350338 - RNA, 21 nt, Human herpesvirus 8 (Kaposi`s sarcoma-associated h
cacgguuacuagcaccacuau

SEQ ID NO: 350339 - RNA, 13 nt, Human herpesvirus 8 (Kaposi`s sarcoma-associated h
cacgucacaucac

SEQ ID NO: 350340 - RNA, 18 nt, Human herpesvirus 8 (Kaposi`s sarcoma-associated h
cacuagacuccaguuuaa

SEQ ID NO: 350341 - RNA, 17 nt, Human herpesvirus 8 (Kaposi`s sarcoma-associated h
cacuagcagaaaacugu

SEQ ID NO: 350342 - RNA, 15 nt, Human herpesvirus 8 (Kaposi`s sarcoma-associated h
cacuauaaauaucau

SEQ ID NO: 350343 - RNA, 17 nt, Human herpesvirus 8 (Kaposi`s sarcoma-associated h
cacuauggggucagggu

SEQ ID NO: 350344 - RNA, 10 nt, Human herpesvirus 8 (Kaposi`s sarcoma-associated h
cacuauguag

SEQ ID NO: 350345 - RNA, 11 nt, Human herpesvirus 8 (Kaposi`s sarcoma-associated h
auuaugguucc

SEQ ID NO: 350346 - RNA, 21 nt, Human herpesvirus 8 (Kaposi`s sarcoma-associated h
auucacucagcugccaaggca

SEQ ID NO: 350347 - RNA, 22 nt, Human herpesvirus 8 (Kaposi`s sarcoma-associated h
auucagcaagguuguaacacaa

SEQ ID NO: 350348 - RNA, 17 nt, Human herpesvirus 8 (Kaposi`s sarcoma-associated h
auucaucgaguccuuga

SEQ ID NO: 350349 - RNA, 14 nt, Human herpesvirus 8 (Kaposi`s sarcoma-associated h
auucaugauuucau

SEQ ID NO: 350350 - RNA, 15 nt, Human herpesvirus 8 (Kaposi`s sarcoma-associated h
auucccaaacacauc

SEQ ID NO: 350351 - RNA, 16 nt, Human herpesvirus 8 (Kaposi`s sarcoma-associated h
auucccaaacacauca

SEQ ID NO: 350352 - RNA, 13 nt, Human herpesvirus 8 (Kaposi`s sarcoma-associated h
auuccgucauuca

SEQ ID NO: 350353 - RNA, 21 nt, Human herpesvirus 8 (Kaposi`s sarcoma-associated h
auucugacagacaacacuacu

SEQ ID NO: 350354 - RNA, 20 nt, Human herpesvirus 8 (Kaposi`s sarcoma-associated h
auugaaggagcgccucgcag

SEQ ID NO: 350355 - RNA, 16 nt, Human herpesvirus 8 (Kaposi`s sarcoma-associated h
auugacaccauucuuu

SEQ ID NO: 350356 - RNA, 22 nt, Human herpesvirus 8 (Kaposi`s sarcoma-associated h
auugaguguaaaucgggccacu

SEQ ID NO: 350357 - RNA, 16 nt, Human herpesvirus 8 (Kaposi`s sarcoma-associated h
auugcaacugaccaug

SEQ ID NO: 350358 - RNA, 22 nt, Human herpesvirus 8 (Kaposi`s sarcoma-associated h
auugcaccauuuauuguggaua

SEQ ID NO: 350359 - RNA, 11 nt, Human herpesvirus 8 (Kaposi`s sarcoma-associated h
auugcucuguu

SEQ ID NO: 350360 - RNA, 21 nt, Human herpesvirus 8 (Kaposi`s sarcoma-associated h
auuggcgggugugucuuguuu

SEQ ID NO: 350361 - RNA, 21 nt, Human herpesvirus 8 (Kaposi`s sarcoma-associated h
auuggucacaucucacgcaua

SEQ ID NO: 350362 - RNA, 15 nt, Human herpesvirus 8 (Kaposi`s sarcoma-associated h
auugguguccagaca

SEQ ID NO: 350363 - RNA, 21 nt, Human herpesvirus 8 (Kaposi`s sarcoma-associated h
auuguauaaccgugcuacuua

SEQ ID NO: 350364 - RNA, 23 nt, Human herpesvirus 8 (Kaposi`s sarcoma-associated h
auuguauaaccgugcuacuuaca

SEQ ID NO: 350365 - RNA, 20 nt, Human herpesvirus 8 (Kaposi`s sarcoma-associated h
auugugacuauuugugaaac

SEQ ID NO: 350366 - RNA, 21 nt, Human herpesvirus 8 (Kaposi`s sarcoma-associated h
auugugacuauuugugaaaca

SEQ ID NO: 350367 - RNA, 17 nt, Human herpesvirus 8 (Kaposi`s sarcoma-associated h
auuguguguaccuagcc

SEQ ID NO: 350368 - RNA, 12 nt, Human herpesvirus 8 (Kaposi`s sarcoma-associated h
auuguuacuugc

SEQ ID NO: 350369 - RNA, 14 nt, Human herpesvirus 8 (Kaposi`s sarcoma-associated h
auuguuaugggagg

SEQ ID NO: 350370 - RNA, 19 nt, Human herpesvirus 8 (Kaposi`s sarcoma-associated h
auuguuuuugaacaugugg

SEQ ID NO: 350371 - RNA, 19 nt, Human herpesvirus 8 (Kaposi`s sarcoma-associated h
auuuaaaaccgcccacuga

SEQ ID NO: 350372 - RNA, 20 nt, Human herpesvirus 8 (Kaposi`s sarcoma-associated h
auuuaaggcagucuaucguc

SEQ ID NO: 350373 - RNA, 20 nt, Human herpesvirus 8 (Kaposi`s sarcoma-associated h
auuuacgguggugugccugg

SEQ ID NO: 350374 - RNA, 17 nt, Human herpesvirus 8 (Kaposi`s sarcoma-associated h
auuuaucgcguuugaua

SEQ ID NO: 350375 - RNA, 23 nt, Human herpesvirus 8 (Kaposi`s sarcoma-associated h
auuuaucuaccuuagaagaccug

SEQ ID NO: 350376 - RNA, 16 nt, Human herpesvirus 8 (Kaposi`s sarcoma-associated h
auuucacugucacuuu

SEQ ID NO: 350377 - RNA, 17 nt, Human herpesvirus 8 (Kaposi`s sarcoma-associated h
auuucacugucacuuuc

SEQ ID NO: 350378 - RNA, 18 nt, Human herpesvirus 8 (Kaposi`s sarcoma-associated h
auuucacugucacuuuca

SEQ ID NO: 350379 - RNA, 23 nt, Human herpesvirus 8 (Kaposi`s sarcoma-associated h
auuucauuaacaaacaaggucaa

SEQ ID NO: 350380 - RNA, 22 nt, Human herpesvirus 8 (Kaposi`s sarcoma-associated h
auuucgcccgccuguguggaag

SEQ ID NO: 350381 - RNA, 21 nt, Human herpesvirus 8 (Kaposi`s sarcoma-associated h
auuucucugugcgucuacggc

SEQ ID NO: 350382 - RNA, 22 nt, Human herpesvirus 8 (Kaposi`s sarcoma-associated h
auuucugaaacagaaacugcuc

SEQ ID NO: 350383 - RNA, 15 nt, Human herpesvirus 8 (Kaposi`s sarcoma-associated h
auuugauacagggac

SEQ ID NO: 350384 - RNA, 13 nt, Human herpesvirus 8 (Kaposi`s sarcoma-associated h
auuuggacacaac

SEQ ID NO: 350385 - RNA, 18 nt, Human herpesvirus 8 (Kaposi`s sarcoma-associated h
auuuggacacaacaugca

SEQ ID NO: 350386 - RNA, 23 nt, Human herpesvirus 8 (Kaposi`s sarcoma-associated h
auuugucgcgccagaaagacaca

SEQ ID NO: 350387 - RNA, 20 nt, Human herpesvirus 8 (Kaposi`s sarcoma-associated h
auuugugaaacaauaaugau

SEQ ID NO: 350388 - RNA, 13 nt, Human herpesvirus 8 (Kaposi`s sarcoma-associated h
auuuuucaucuga

SEQ ID NO: 350389 - RNA, 16 nt, Human herpesvirus 8 (Kaposi`s sarcoma-associated h
auuuuuccaguguaag

SEQ ID NO: 350390 - RNA, 16 nt, Human herpesvirus 8 (Kaposi`s sarcoma-associated h
auuuuuuuccuaggcg

SEQ ID NO: 350391 - RNA, 22 nt, Human herpesvirus 8 (Kaposi`s sarcoma-associated h
caaaaaaaacauagugccucau

SEQ ID NO: 350392 - RNA, 12 nt, Human herpesvirus 8 (Kaposi`s sarcoma-associated h
caaaacaguaau

SEQ ID NO: 350393 - RNA, 13 nt, Human herpesvirus 8 (Kaposi`s sarcoma-associated h
caaaacugccaaa

SEQ ID NO: 350394 - RNA, 14 nt, Human herpesvirus 8 (Kaposi`s sarcoma-associated h
caaaacugccaaag

SEQ ID NO: 350395 - RNA, 13 nt, Human herpesvirus 8 (Kaposi`s sarcoma-associated h
caaaaugugcuuu

SEQ ID NO: 350396 - RNA, 14 nt, Human herpesvirus 8 (Kaposi`s sarcoma-associated h
caaaccccauggca

SEQ ID NO: 350397 - RNA, 21 nt, Human herpesvirus 8 (Kaposi`s sarcoma-associated h
caaacgccccucuuggcuguu

SEQ ID NO: 350398 - RNA, 18 nt, Human herpesvirus 8 (Kaposi`s sarcoma-associated h
caaacuuuuccauugcac

SEQ ID NO: 350399 - RNA, 17 nt, Human herpesvirus 8 (Kaposi`s sarcoma-associated h
caaagagugucaguaaa

SEQ ID NO: 350400 - RNA, 14 nt, Human herpesvirus 8 (Kaposi`s sarcoma-associated h
caaagauaagccaa

SEQ ID NO: 350401 - RNA, 19 nt, Human herpesvirus 8 (Kaposi`s sarcoma-associated h
caaagcacauuuugcacgc

SEQ ID NO: 350402 - RNA, 17 nt, Human herpesvirus 8 (Kaposi`s sarcoma-associated h
caaagcuuaaccacaug

SEQ ID NO: 350403 - RNA, 22 nt, Human herpesvirus 8 (Kaposi`s sarcoma-associated h
caaaggcggccguggcagucaa

SEQ ID NO: 350404 - RNA, 18 nt, Human herpesvirus 8 (Kaposi`s sarcoma-associated h
caaaguggaguuaaccua

SEQ ID NO: 350405 - RNA, 15 nt, Human herpesvirus 8 (Kaposi`s sarcoma-associated h
caaauaauagaucuc

SEQ ID NO: 350406 - RNA, 21 nt, Human herpesvirus 8 (Kaposi`s sarcoma-associated h
caaaugauauuuugauggugu

SEQ ID NO: 350407 - RNA, 16 nt, Human herpesvirus 8 (Kaposi`s sarcoma-associated h
caacaaacaagacaca

SEQ ID NO: 350408 - RNA, 22 nt, Human herpesvirus 8 (Kaposi`s sarcoma-associated h
caacaagacaguugugaucucu

SEQ ID NO: 350409 - RNA, 19 nt, Human herpesvirus 8 (Kaposi`s sarcoma-associated h
caacaauagggauacuguu

SEQ ID NO: 350410 - RNA, 19 nt, Human herpesvirus 8 (Kaposi`s sarcoma-associated h
caacacuacuaugucccaa

SEQ ID NO: 350411 - RNA, 14 nt, Human herpesvirus 8 (Kaposi`s sarcoma-associated h
caacauuaaacaca

SEQ ID NO: 350412 - RNA, 16 nt, Human herpesvirus 8 (Kaposi`s sarcoma-associated h
caacauuaaacacaua

SEQ ID NO: 350413 - RNA, 18 nt, Human herpesvirus 8 (Kaposi`s sarcoma-associated h
caaccggucgcaguggac

SEQ ID NO: 350414 - RNA, 22 nt, Human herpesvirus 8 (Kaposi`s sarcoma-associated h
caacgaccugaugcaggccacc

SEQ ID NO: 350415 - RNA, 24 nt, Human herpesvirus 8 (Kaposi`s sarcoma-associated h
caacuaauauuaaccauagugugc

SEQ ID NO: 350416 - RNA, 19 nt, Human herpesvirus 8 (Kaposi`s sarcoma-associated h
caacuugcgucuucaccuu

SEQ ID NO: 350417 - RNA, 14 nt, Human herpesvirus 8 (Kaposi`s sarcoma-associated h
caagacaccaauaa

SEQ ID NO: 350418 - RNA, 14 nt, Human herpesvirus 8 (Kaposi`s sarcoma-associated h
caagacaguuguga

SEQ ID NO: 350419 - RNA, 19 nt, Human herpesvirus 8 (Kaposi`s sarcoma-associated h
caagacuaaaaaggccacc

SEQ ID NO: 350420 - RNA, 22 nt, Human herpesvirus 8 (Kaposi`s sarcoma-associated h
caagcaaugauagacauggaca

SEQ ID NO: 350421 - RNA, 23 nt, Human herpesvirus 8 (Kaposi`s sarcoma-associated h
acggucuuuggggcuacacauca

SEQ ID NO: 350422 - RNA, 20 nt, Human herpesvirus 8 (Kaposi`s sarcoma-associated h
acgguuacuagcaccacuau

SEQ ID NO: 350423 - RNA, 19 nt, Human herpesvirus 8 (Kaposi`s sarcoma-associated h
acgguugcaccaagcacaa

SEQ ID NO: 350424 - RNA, 20 nt, Human herpesvirus 8 (Kaposi`s sarcoma-associated h
acgucccucuuggcuguuac

SEQ ID NO: 350425 - RNA, 22 nt, Human herpesvirus 8 (Kaposi`s sarcoma-associated h
acgucccucuuggcuguuacaa

SEQ ID NO: 350426 - RNA, 14 nt, Human herpesvirus 8 (Kaposi`s sarcoma-associated h
acgucgcucuuuac

SEQ ID NO: 350427 - RNA, 13 nt, Human herpesvirus 8 (Kaposi`s sarcoma-associated h
acgucguaagcca

SEQ ID NO: 350428 - RNA, 20 nt, Human herpesvirus 8 (Kaposi`s sarcoma-associated h
acgugcuuuuggugggcuac

SEQ ID NO: 350429 - RNA, 17 nt, Human herpesvirus 8 (Kaposi`s sarcoma-associated h
acguggugcugccuagg

SEQ ID NO: 350430 - RNA, 22 nt, Human herpesvirus 8 (Kaposi`s sarcoma-associated h
acguguccacggaguccauggc

SEQ ID NO: 350431 - RNA, 15 nt, Human herpesvirus 8 (Kaposi`s sarcoma-associated h
acguguccugccagg

SEQ ID NO: 350432 - RNA, 16 nt, Human herpesvirus 8 (Kaposi`s sarcoma-associated h
acuaaaagucuggccc

SEQ ID NO: 350433 - RNA, 18 nt, Human herpesvirus 8 (Kaposi`s sarcoma-associated h
acuaaacauuaccaauac

SEQ ID NO: 350434 - RNA, 21 nt, Human herpesvirus 8 (Kaposi`s sarcoma-associated h
acuaaacauuaccaauacuau

SEQ ID NO: 350435 - RNA, 21 nt, Human herpesvirus 8 (Kaposi`s sarcoma-associated h
acuaaagauaccgaccaauac

SEQ ID NO: 350436 - RNA, 16 nt, Human herpesvirus 8 (Kaposi`s sarcoma-associated h
acuaauauuaaccaua

SEQ ID NO: 350437 - RNA, 17 nt, Human herpesvirus 8 (Kaposi`s sarcoma-associated h
acuaauauuaaccauag

SEQ ID NO: 350438 - RNA, 22 nt, Human herpesvirus 8 (Kaposi`s sarcoma-associated h
acuaauauuaaccauagugugc

SEQ ID NO: 350439 - RNA, 18 nt, Human herpesvirus 8 (Kaposi`s sarcoma-associated h
acuaauguaaccuaaaaa

SEQ ID NO: 350440 - RNA, 13 nt, Human herpesvirus 8 (Kaposi`s sarcoma-associated h
acuacagguauac

SEQ ID NO: 350441 - RNA, 17 nt, Human herpesvirus 8 (Kaposi`s sarcoma-associated h
acuacagguauacucaa

SEQ ID NO: 350442 - RNA, 21 nt, Human herpesvirus 8 (Kaposi`s sarcoma-associated h
acuacauccaaauuaugcagu

SEQ ID NO: 350443 - RNA, 15 nt, Human herpesvirus 8 (Kaposi`s sarcoma-associated h
acuaccgacugugcc

SEQ ID NO: 350444 - RNA, 12 nt, Human herpesvirus 8 (Kaposi`s sarcoma-associated h
acuacugugaag

SEQ ID NO: 350445 - RNA, 20 nt, Human herpesvirus 8 (Kaposi`s sarcoma-associated h
acuaggaggaagagcacugu

SEQ ID NO: 350446 - RNA, 16 nt, Human herpesvirus 8 (Kaposi`s sarcoma-associated h
acuauggggucagggu

SEQ ID NO: 350447 - RNA, 17 nt, Human herpesvirus 8 (Kaposi`s sarcoma-associated h
acuaugggugaccacau

SEQ ID NO: 350448 - RNA, 15 nt, Human herpesvirus 8 (Kaposi`s sarcoma-associated h
acuauuugugaaaca

SEQ ID NO: 350449 - RNA, 23 nt, Human herpesvirus 8 (Kaposi`s sarcoma-associated h
acucauaaaaccuccaaacacag

SEQ ID NO: 350450 - RNA, 21 nt, Human herpesvirus 8 (Kaposi`s sarcoma-associated h
acuccauucccggucccacau

SEQ ID NO: 350451 - RNA, 15 nt, Human herpesvirus 8 (Kaposi`s sarcoma-associated h
acucccccaaccucu

SEQ ID NO: 350452 - RNA, 16 nt, Human herpesvirus 8 (Kaposi`s sarcoma-associated h
acucccucacaaugua

SEQ ID NO: 350453 - RNA, 19 nt, Human herpesvirus 8 (Kaposi`s sarcoma-associated h
acucccucccauaacaaua

SEQ ID NO: 350454 - RNA, 23 nt, Human herpesvirus 8 (Kaposi`s sarcoma-associated h
acuccucuucggagaucaaggac

SEQ ID NO: 350455 - RNA, 17 nt, Human herpesvirus 8 (Kaposi`s sarcoma-associated h
acuccuguuagcacauu

SEQ ID NO: 350456 - RNA, 19 nt, Human herpesvirus 8 (Kaposi`s sarcoma-associated h
acugaccauguucaggugg

SEQ ID NO: 350457 - RNA, 17 nt, Human herpesvirus 8 (Kaposi`s sarcoma-associated h
acugcagggcgcugcuc

SEQ ID NO: 350458 - RNA, 23 nt, Human herpesvirus 8 (Kaposi`s sarcoma-associated h
acugcagggcgcugcucuuguca

SEQ ID NO: 350459 - RNA, 16 nt, Human herpesvirus 8 (Kaposi`s sarcoma-associated h
acugcaugcucggcaa

SEQ ID NO: 350460 - RNA, 14 nt, Human herpesvirus 8 (Kaposi`s sarcoma-associated h
acugcauugguucc

SEQ ID NO: 350461 - RNA, 22 nt, Human herpesvirus 8 (Kaposi`s sarcoma-associated h
acugccgcucggagauugccac

SEQ ID NO: 350462 - RNA, 15 nt, Human herpesvirus 8 (Kaposi`s sarcoma-associated h
acugcuguuaccuua

SEQ ID NO: 350463 - RNA, 16 nt, Human herpesvirus 8 (Kaposi`s sarcoma-associated h
acuggcggguggcuca

SEQ ID NO: 350464 - RNA, 15 nt, Human herpesvirus 8 (Kaposi`s sarcoma-associated h
acugggauccacugc

SEQ ID NO: 350465 - RNA, 20 nt, Human herpesvirus 8 (Kaposi`s sarcoma-associated h
acuguagacaguuaaucuuu

SEQ ID NO: 350466 - RNA, 13 nt, Human herpesvirus 8 (Kaposi`s sarcoma-associated h
acuguuaacccaa

SEQ ID NO: 350467 - RNA, 18 nt, Human herpesvirus 8 (Kaposi`s sarcoma-associated h
acuguuaacccaauguca

SEQ ID NO: 350468 - RNA, 22 nt, Human herpesvirus 8 (Kaposi`s sarcoma-associated h
acuguuaacccaaugucagggg

SEQ ID NO: 350469 - RNA, 14 nt, Human herpesvirus 8 (Kaposi`s sarcoma-associated h
acuuaaaaugucuc

SEQ ID NO: 350470 - RNA, 22 nt, Human herpesvirus 8 (Kaposi`s sarcoma-associated h
acuuaacuguuuacugcuguua

SEQ ID NO: 350471 - RNA, 21 nt, Human herpesvirus 8 (Kaposi`s sarcoma-associated h
acuuaggcuaaccaccacagu

SEQ ID NO: 350472 - RNA, 24 nt, Human herpesvirus 8 (Kaposi`s sarcoma-associated h
acuuaucguggacgucaggaguca

SEQ ID NO: 350473 - RNA, 16 nt, Human herpesvirus 8 (Kaposi`s sarcoma-associated h
acuucauuguucucca

SEQ ID NO: 350474 - RNA, 20 nt, Human herpesvirus 8 (Kaposi`s sarcoma-associated h
acuucauuguucuccaggug

SEQ ID NO: 350475 - RNA, 17 nt, Human herpesvirus 8 (Kaposi`s sarcoma-associated h
acuucccaggcaguuua

SEQ ID NO: 350476 - RNA, 18 nt, Human herpesvirus 8 (Kaposi`s sarcoma-associated h
acuucccaggcaguuuau

SEQ ID NO: 350477 - RNA, 19 nt, Human herpesvirus 8 (Kaposi`s sarcoma-associated h
acuuccccgucuccaguca

SEQ ID NO: 350478 - RNA, 21 nt, Human herpesvirus 8 (Kaposi`s sarcoma-associated h
acuucugggccacaaaacugc

SEQ ID NO: 350479 - RNA, 22 nt, Human herpesvirus 8 (Kaposi`s sarcoma-associated h
acuucugggccacaaaacugcc

SEQ ID NO: 350480 - RNA, 13 nt, Human herpesvirus 8 (Kaposi`s sarcoma-associated h
acuugaacagggc

SEQ ID NO: 350481 - RNA, 14 nt, Human herpesvirus 8 (Kaposi`s sarcoma-associated h
acuugcucuuuuca

SEQ ID NO: 350482 - RNA, 22 nt, Human herpesvirus 8 (Kaposi`s sarcoma-associated h
acuuuacauuugacaacacgca

SEQ ID NO: 350483 - RNA, 13 nt, Human herpesvirus 8 (Kaposi`s sarcoma-associated h
acuuucuccguga

SEQ ID NO: 350484 - RNA, 19 nt, Human herpesvirus 8 (Kaposi`s sarcoma-associated h
acuuugcccuaaaugugac

SEQ ID NO: 350485 - RNA, 21 nt, Human herpesvirus 8 (Kaposi`s sarcoma-associated h
acuuugcgugucuagacaaua

SEQ ID NO: 350486 - RNA, 23 nt, Human herpesvirus 8 (Kaposi`s sarcoma-associated h
agaaaaggaugcacaacuauguu

SEQ ID NO: 350487 - RNA, 14 nt, Human herpesvirus 8 (Kaposi`s sarcoma-associated h
agaaaauucacacc

SEQ ID NO: 350488 - RNA, 18 nt, Human herpesvirus 8 (Kaposi`s sarcoma-associated h
agaaacaaagcacuggcu

SEQ ID NO: 350489 - RNA, 14 nt, Human herpesvirus 8 (Kaposi`s sarcoma-associated h
agaaagacacauga

SEQ ID NO: 350490 - RNA, 12 nt, Human herpesvirus 8 (Kaposi`s sarcoma-associated h
agaaaugaucau

SEQ ID NO: 350491 - RNA, 19 nt, Human herpesvirus 8 (Kaposi`s sarcoma-associated h
agaaccaugccagacuuug

SEQ ID NO: 350492 - RNA, 18 nt, Human herpesvirus 8 (Kaposi`s sarcoma-associated h
agaacugucgagacaugu

SEQ ID NO: 350493 - RNA, 18 nt, Human herpesvirus 8 (Kaposi`s sarcoma-associated h
agaagaccgcguccucca

SEQ ID NO: 350494 - RNA, 21 nt, Human herpesvirus 8 (Kaposi`s sarcoma-associated h
agaagcaauuuauuaagcaaa

SEQ ID NO: 350495 - RNA, 16 nt, Human herpesvirus 8 (Kaposi`s sarcoma-associated h
agaagcgcaccacaga

SEQ ID NO: 350496 - RNA, 14 nt, Human herpesvirus 8 (Kaposi`s sarcoma-associated h
agaauacagugcua

SEQ ID NO: 350497 - RNA, 15 nt, Human herpesvirus 8 (Kaposi`s sarcoma-associated h
aucuuguauucucau

SEQ ID NO: 350498 - RNA, 19 nt, Human herpesvirus 8 (Kaposi`s sarcoma-associated h
aucuuugcgcuauuugccg

SEQ ID NO: 350499 - RNA, 14 nt, Human herpesvirus 8 (Kaposi`s sarcoma-associated h
aucuuuuccaccua

SEQ ID NO: 350500 - RNA, 18 nt, Human herpesvirus 8 (Kaposi`s sarcoma-associated h
augaaaaguguucccaaa

SEQ ID NO: 350501 - RNA, 12 nt, Human herpesvirus 8 (Kaposi`s sarcoma-associated h
augaaacauucg

SEQ ID NO: 350502 - RNA, 15 nt, Human herpesvirus 8 (Kaposi`s sarcoma-associated h
augaaagacugccug

SEQ ID NO: 350503 - RNA, 16 nt, Human herpesvirus 8 (Kaposi`s sarcoma-associated h
augaaagacugccuga

SEQ ID NO: 350504 - RNA, 15 nt, Human herpesvirus 8 (Kaposi`s sarcoma-associated h
augaacauuguucaa

SEQ ID NO: 350505 - RNA, 18 nt, Human herpesvirus 8 (Kaposi`s sarcoma-associated h
augaagugcaaccugcug

SEQ ID NO: 350506 - RNA, 23 nt, Human herpesvirus 8 (Kaposi`s sarcoma-associated h
augacuaggaggaagagcacugu

SEQ ID NO: 350507 - RNA, 22 nt, Human herpesvirus 8 (Kaposi`s sarcoma-associated h
augacuuccccgucuccaguca

SEQ ID NO: 350508 - RNA, 22 nt, Human herpesvirus 8 (Kaposi`s sarcoma-associated h
augagcaugacuuccccgucuc

SEQ ID NO: 350509 - RNA, 17 nt, Human herpesvirus 8 (Kaposi`s sarcoma-associated h
augaggucggauacuua

SEQ ID NO: 350510 - RNA, 14 nt, Human herpesvirus 8 (Kaposi`s sarcoma-associated h
augagucaggcgug

SEQ ID NO: 350511 - RNA, 14 nt, Human herpesvirus 8 (Kaposi`s sarcoma-associated h
augauagacaugga

SEQ ID NO: 350512 - RNA, 20 nt, Human herpesvirus 8 (Kaposi`s sarcoma-associated h
augauauacucccucccaua

SEQ ID NO: 350513 - RNA, 16 nt, Human herpesvirus 8 (Kaposi`s sarcoma-associated h
augcauaucguugaca

SEQ ID NO: 350514 - RNA, 20 nt, Human herpesvirus 8 (Kaposi`s sarcoma-associated h
augccaguagcaugcugaug

SEQ ID NO: 350515 - RNA, 19 nt, Human herpesvirus 8 (Kaposi`s sarcoma-associated h
augcccaacuucaucacau

SEQ ID NO: 350516 - RNA, 20 nt, Human herpesvirus 8 (Kaposi`s sarcoma-associated h
augccccaaagccguuccca

SEQ ID NO: 350517 - RNA, 18 nt, Human herpesvirus 8 (Kaposi`s sarcoma-associated h
augccgaacagguugcca

SEQ ID NO: 350518 - RNA, 20 nt, Human herpesvirus 8 (Kaposi`s sarcoma-associated h
augccuacaccguauuguua

SEQ ID NO: 350519 - RNA, 19 nt, Human herpesvirus 8 (Kaposi`s sarcoma-associated h
augcgggcgauuacaggaa

SEQ ID NO: 350520 - RNA, 15 nt, Human herpesvirus 8 (Kaposi`s sarcoma-associated h
augcgugaacccuca

SEQ ID NO: 350521 - RNA, 15 nt, Human herpesvirus 8 (Kaposi`s sarcoma-associated h
augcucaggucuguc

SEQ ID NO: 350522 - RNA, 16 nt, Human herpesvirus 8 (Kaposi`s sarcoma-associated h
augcucaggucuguca

SEQ ID NO: 350523 - RNA, 18 nt, Human herpesvirus 8 (Kaposi`s sarcoma-associated h
augcucaggucugucacu

SEQ ID NO: 350524 - RNA, 19 nt, Human herpesvirus 8 (Kaposi`s sarcoma-associated h
augcucaggucugucacua

SEQ ID NO: 350525 - RNA, 21 nt, Human herpesvirus 8 (Kaposi`s sarcoma-associated h
auggacauuuaccaugguuau

SEQ ID NO: 350526 - RNA, 15 nt, Human herpesvirus 8 (Kaposi`s sarcoma-associated h
auggcaaaaaacacu

SEQ ID NO: 350527 - RNA, 19 nt, Human herpesvirus 8 (Kaposi`s sarcoma-associated h
auggcccuggauacaccca

SEQ ID NO: 350528 - RNA, 17 nt, Human herpesvirus 8 (Kaposi`s sarcoma-associated h
auggccggcacgcggug

SEQ ID NO: 350529 - RNA, 20 nt, Human herpesvirus 8 (Kaposi`s sarcoma-associated h
auggccuccacccaccaagc

SEQ ID NO: 350530 - RNA, 21 nt, Human herpesvirus 8 (Kaposi`s sarcoma-associated h
auggcggggcggcuguggcac

SEQ ID NO: 350531 - RNA, 20 nt, Human herpesvirus 8 (Kaposi`s sarcoma-associated h
auggcuucuauaagcaccuu

SEQ ID NO: 350532 - RNA, 22 nt, Human herpesvirus 8 (Kaposi`s sarcoma-associated h
auggcuuucgauucccgcgggc

SEQ ID NO: 350533 - RNA, 18 nt, Human herpesvirus 8 (Kaposi`s sarcoma-associated h
augggaacuuucauccau

SEQ ID NO: 350534 - RNA, 22 nt, Human herpesvirus 8 (Kaposi`s sarcoma-associated h
augggcauauacuuggcaagaa

SEQ ID NO: 350535 - RNA, 18 nt, Human herpesvirus 8 (Kaposi`s sarcoma-associated h
augggcuuguacaugugu

SEQ ID NO: 350536 - RNA, 16 nt, Human herpesvirus 8 (Kaposi`s sarcoma-associated h
augggugugugccagu

SEQ ID NO: 350537 - RNA, 16 nt, Human herpesvirus 8 (Kaposi`s sarcoma-associated h
auggguuaacagugga

SEQ ID NO: 350538 - RNA, 18 nt, Human herpesvirus 8 (Kaposi`s sarcoma-associated h
auggucauagccagauua

SEQ ID NO: 350539 - RNA, 18 nt, Human herpesvirus 8 (Kaposi`s sarcoma-associated h
auggucuguauugacacc

SEQ ID NO: 350540 - RNA, 20 nt, Human herpesvirus 8 (Kaposi`s sarcoma-associated h
augguuauuggccaggacaa

SEQ ID NO: 350541 - RNA, 20 nt, Human herpesvirus 8 (Kaposi`s sarcoma-associated h
auguaaauuggccacugcag

SEQ ID NO: 350542 - RNA, 19 nt, Human herpesvirus 8 (Kaposi`s sarcoma-associated h
auguaaucuuguaguccaa

SEQ ID NO: 350543 - RNA, 12 nt, Human herpesvirus 8 (Kaposi`s sarcoma-associated h
auguacugccau

SEQ ID NO: 350544 - RNA, 15 nt, Human herpesvirus 8 (Kaposi`s sarcoma-associated h
auguacugccaugaa

SEQ ID NO: 350545 - RNA, 22 nt, Human herpesvirus 8 (Kaposi`s sarcoma-associated h
auguaucugauuuaauaaacac

SEQ ID NO: 350546 - RNA, 20 nt, Human herpesvirus 8 (Kaposi`s sarcoma-associated h
augucaggggaccauaucaa

SEQ ID NO: 350547 - RNA, 22 nt, Human herpesvirus 8 (Kaposi`s sarcoma-associated h
augucauuuuuacuuuuacaag

SEQ ID NO: 350548 - RNA, 20 nt, Human herpesvirus 8 (Kaposi`s sarcoma-associated h
auguccugauuuuccaggga

SEQ ID NO: 350549 - RNA, 21 nt, Human herpesvirus 8 (Kaposi`s sarcoma-associated h
auguccugauuuuccagggac

SEQ ID NO: 350550 - RNA, 16 nt, Human herpesvirus 8 (Kaposi`s sarcoma-associated h
auguccuucacuuugg

SEQ ID NO: 350551 - RNA, 14 nt, Human herpesvirus 8 (Kaposi`s sarcoma-associated h
augugaucacggag

SEQ ID NO: 350552 - RNA, 20 nt, Human herpesvirus 8 (Kaposi`s sarcoma-associated h
auguggcacacgcugcaaug

SEQ ID NO: 350553 - RNA, 21 nt, Human herpesvirus 8 (Kaposi`s sarcoma-associated h
auguggcccccuuuacagauc

SEQ ID NO: 350554 - RNA, 19 nt, Human herpesvirus 8 (Kaposi`s sarcoma-associated h
augugggcuucauuaugca

SEQ ID NO: 350555 - RNA, 21 nt, Human herpesvirus 8 (Kaposi`s sarcoma-associated h
augugguggucccacugcugc

SEQ ID NO: 350556 - RNA, 19 nt, Human herpesvirus 8 (Kaposi`s sarcoma-associated h
augugucuguggcuaucuu

SEQ ID NO: 350557 - RNA, 20 nt, Human herpesvirus 8 (Kaposi`s sarcoma-associated h
augugugggugggaaccgga

SEQ ID NO: 350558 - RNA, 11 nt, Human herpesvirus 8 (Kaposi`s sarcoma-associated h
auguucaggag

SEQ ID NO: 350559 - RNA, 13 nt, Human herpesvirus 8 (Kaposi`s sarcoma-associated h
auguucagguggu

SEQ ID NO: 350560 - RNA, 12 nt, Human herpesvirus 8 (Kaposi`s sarcoma-associated h
auguucuugcca

SEQ ID NO: 350561 - RNA, 18 nt, Human herpesvirus 8 (Kaposi`s sarcoma-associated h
auguuucccacgugcacc

SEQ ID NO: 350562 - RNA, 16 nt, Human herpesvirus 8 (Kaposi`s sarcoma-associated h
auguuuuaugcaaaau

SEQ ID NO: 350563 - RNA, 14 nt, Human herpesvirus 8 (Kaposi`s sarcoma-associated h
auguuuuggucucu

SEQ ID NO: 350564 - RNA, 14 nt, Human herpesvirus 8 (Kaposi`s sarcoma-associated h
auuaaacacauaca

SEQ ID NO: 350565 - RNA, 16 nt, Human herpesvirus 8 (Kaposi`s sarcoma-associated h
auuaaagcacucggug

SEQ ID NO: 350566 - RNA, 15 nt, Human herpesvirus 8 (Kaposi`s sarcoma-associated h
auuaaauuaaggggg

SEQ ID NO: 350567 - RNA, 16 nt, Human herpesvirus 8 (Kaposi`s sarcoma-associated h
auuaauaaccaugagu

SEQ ID NO: 350568 - RNA, 17 nt, Human herpesvirus 8 (Kaposi`s sarcoma-associated h
auuaauuggagcucuua

SEQ ID NO: 350569 - RNA, 14 nt, Human herpesvirus 8 (Kaposi`s sarcoma-associated h
auuacagacucugu

SEQ ID NO: 350570 - RNA, 16 nt, Human herpesvirus 8 (Kaposi`s sarcoma-associated h
auuacucgcacaagcg

SEQ ID NO: 350571 - RNA, 14 nt, Human herpesvirus 8 (Kaposi`s sarcoma-associated h
auuagaaacaaagc

SEQ ID NO: 350572 - RNA, 19 nt, Human herpesvirus 8 (Kaposi`s sarcoma-associated h
auuauagaugaaacauucg

SEQ ID NO: 350573 - RNA, 15 nt, Human herpesvirus 8 (Kaposi`s sarcoma-associated h
auuaucuuaacuaaa

SEQ ID NO: 350574 - RNA, 22 nt, Human herpesvirus 8 (Kaposi`s sarcoma-associated h
guagaucuggauacacuacuua

SEQ ID NO: 350575 - RNA, 15 nt, Human herpesvirus 8 (Kaposi`s sarcoma-associated h
guagaugaaugucuc

SEQ ID NO: 350576 - RNA, 22 nt, Human herpesvirus 8 (Kaposi`s sarcoma-associated h
guagccauaaaaugggccauga

SEQ ID NO: 350577 - RNA, 14 nt, Human herpesvirus 8 (Kaposi`s sarcoma-associated h
guagcugccuggua

SEQ ID NO: 350578 - RNA, 17 nt, Human herpesvirus 8 (Kaposi`s sarcoma-associated h
guaggcccaugugggcu

SEQ ID NO: 350579 - RNA, 21 nt, Human herpesvirus 8 (Kaposi`s sarcoma-associated h
guaggucuccgagcacugcga

SEQ ID NO: 350580 - RNA, 21 nt, Human herpesvirus 8 (Kaposi`s sarcoma-associated h
guaguccaaauaaaccagaca

SEQ ID NO: 350581 - RNA, 22 nt, Human herpesvirus 8 (Kaposi`s sarcoma-associated h
guaguccaaauaaaccagacac

SEQ ID NO: 350582 - RNA, 12 nt, Human herpesvirus 8 (Kaposi`s sarcoma-associated h
guaguugugcuu

SEQ ID NO: 350583 - RNA, 18 nt, Human herpesvirus 8 (Kaposi`s sarcoma-associated h
guauaacaugcaacccuc

SEQ ID NO: 350584 - RNA, 18 nt, Human herpesvirus 8 (Kaposi`s sarcoma-associated h
guauaaccgugcuacuua

SEQ ID NO: 350585 - RNA, 15 nt, Human herpesvirus 8 (Kaposi`s sarcoma-associated h
guauacucaaggcaa

SEQ ID NO: 350586 - RNA, 16 nt, Human herpesvirus 8 (Kaposi`s sarcoma-associated h
uucucaucgcaugcga

SEQ ID NO: 350587 - RNA, 19 nt, Human herpesvirus 8 (Kaposi`s sarcoma-associated h
uucugggccacaaaacugc

SEQ ID NO: 350588 - RNA, 23 nt, Human herpesvirus 8 (Kaposi`s sarcoma-associated h
uucugggccacaaaacugccaaa

SEQ ID NO: 350589 - RNA, 14 nt, Human herpesvirus 8 (Kaposi`s sarcoma-associated h
uucugggcgaagaa

SEQ ID NO: 350590 - RNA, 15 nt, Human herpesvirus 8 (Kaposi`s sarcoma-associated h
uugaacaauguucau

SEQ ID NO: 350591 - RNA, 14 nt, Human herpesvirus 8 (Kaposi`s sarcoma-associated h
uugacaccuauaau

SEQ ID NO: 350592 - RNA, 15 nt, Human herpesvirus 8 (Kaposi`s sarcoma-associated h
uugaccaugacaccc

SEQ ID NO: 350593 - RNA, 13 nt, Human herpesvirus 8 (Kaposi`s sarcoma-associated h
uugaccugcaaac

SEQ ID NO: 350594 - RNA, 11 nt, Human herpesvirus 8 (Kaposi`s sarcoma-associated h
uugagcugcau

SEQ ID NO: 350595 - RNA, 12 nt, Human herpesvirus 8 (Kaposi`s sarcoma-associated h
uugaguguaaau

SEQ ID NO: 350596 - RNA, 19 nt, Human herpesvirus 8 (Kaposi`s sarcoma-associated h
uugaucgcgcggaccuguu

SEQ ID NO: 350597 - RNA, 13 nt, Human herpesvirus 8 (Kaposi`s sarcoma-associated h
uugauguuuccca

SEQ ID NO: 350598 - RNA, 15 nt, Human herpesvirus 8 (Kaposi`s sarcoma-associated h
uugcaccaagcacaa

SEQ ID NO: 350599 - RNA, 23 nt, Human herpesvirus 8 (Kaposi`s sarcoma-associated h
uugcacgccaacccucagugugc

SEQ ID NO: 350600 - RNA, 14 nt, Human herpesvirus 8 (Kaposi`s sarcoma-associated h
uugcagugugcagu

SEQ ID NO: 350601 - RNA, 15 nt, Human herpesvirus 8 (Kaposi`s sarcoma-associated h
uugcaguuggagaaa

SEQ ID NO: 350602 - RNA, 18 nt, Human herpesvirus 8 (Kaposi`s sarcoma-associated h
uugccuaaaaagaugccu

SEQ ID NO: 350603 - RNA, 23 nt, Human herpesvirus 8 (Kaposi`s sarcoma-associated h
uugccuaaaaagaugccucgcua

SEQ ID NO: 350604 - RNA, 14 nt, Human herpesvirus 8 (Kaposi`s sarcoma-associated h
uugcgauugcucaa

SEQ ID NO: 350605 - RNA, 15 nt, Human herpesvirus 8 (Kaposi`s sarcoma-associated h
uugcgcuauuugccg

SEQ ID NO: 350606 - RNA, 21 nt, Human herpesvirus 8 (Kaposi`s sarcoma-associated h
uugcuacggaucaugcucuca

SEQ ID NO: 350607 - RNA, 21 nt, Human herpesvirus 8 (Kaposi`s sarcoma-associated h
uugcucaagcaacaugcccuu

SEQ ID NO: 350608 - RNA, 21 nt, Human herpesvirus 8 (Kaposi`s sarcoma-associated h
uugcuuaaacgucuguaaaac

SEQ ID NO: 350609 - RNA, 14 nt, Human herpesvirus 8 (Kaposi`s sarcoma-associated h
uuggacaacuuguc

SEQ ID NO: 350610 - RNA, 12 nt, Human herpesvirus 8 (Kaposi`s sarcoma-associated h
uuggacacuccu

SEQ ID NO: 350611 - RNA, 17 nt, Human herpesvirus 8 (Kaposi`s sarcoma-associated h
uuggauauagacuuaaa

SEQ ID NO: 350612 - RNA, 12 nt, Human herpesvirus 8 (Kaposi`s sarcoma-associated h
uuggaugcuaug

SEQ ID NO: 350613 - RNA, 16 nt, Human herpesvirus 8 (Kaposi`s sarcoma-associated h
uuggcagcuuggugaa

SEQ ID NO: 350614 - RNA, 19 nt, Human herpesvirus 8 (Kaposi`s sarcoma-associated h
uuggcgcccacguaugggu

SEQ ID NO: 350615 - RNA, 11 nt, Human herpesvirus 8 (Kaposi`s sarcoma-associated h
uuggcuguuac

SEQ ID NO: 350616 - RNA, 15 nt, Human herpesvirus 8 (Kaposi`s sarcoma-associated h
uugggaauggccgaa

SEQ ID NO: 350617 - RNA, 14 nt, Human herpesvirus 8 (Kaposi`s sarcoma-associated h
uugggaccuuucaa

SEQ ID NO: 350618 - RNA, 19 nt, Human herpesvirus 8 (Kaposi`s sarcoma-associated h
uugggagugugcacuagca

SEQ ID NO: 350619 - RNA, 22 nt, Human herpesvirus 8 (Kaposi`s sarcoma-associated h
uugggauucacucagcugccaa

SEQ ID NO: 350620 - RNA, 23 nt, Human herpesvirus 8 (Kaposi`s sarcoma-associated h
uugggauucacucagcugccaag

SEQ ID NO: 350621 - RNA, 19 nt, Human herpesvirus 8 (Kaposi`s sarcoma-associated h
uuggucuuauaacagugcu

SEQ ID NO: 350622 - RNA, 18 nt, Human herpesvirus 8 (Kaposi`s sarcoma-associated h
uugguguccagacaguua

SEQ ID NO: 350623 - RNA, 23 nt, Human herpesvirus 8 (Kaposi`s sarcoma-associated h
uuguaaacugauggguacuaugg

SEQ ID NO: 350624 - RNA, 17 nt, Human herpesvirus 8 (Kaposi`s sarcoma-associated h
uuguagaucuggauaca

SEQ ID NO: 350625 - RNA, 13 nt, Human herpesvirus 8 (Kaposi`s sarcoma-associated h
uuguaugauacuu

SEQ ID NO: 350626 - RNA, 17 nt, Human herpesvirus 8 (Kaposi`s sarcoma-associated h
uuguaugggcauauacu

SEQ ID NO: 350627 - RNA, 19 nt, Human herpesvirus 8 (Kaposi`s sarcoma-associated h
uugucagguucacuuggga

SEQ ID NO: 350628 - RNA, 13 nt, Human herpesvirus 8 (Kaposi`s sarcoma-associated h
uugucggauuuug

SEQ ID NO: 350629 - RNA, 23 nt, Human herpesvirus 8 (Kaposi`s sarcoma-associated h
uugucuuguaaaaauaaauguga

SEQ ID NO: 350630 - RNA, 19 nt, Human herpesvirus 8 (Kaposi`s sarcoma-associated h
uuguggcaccugaggugcu

SEQ ID NO: 350631 - RNA, 10 nt, Human herpesvirus 8 (Kaposi`s sarcoma-associated h
uuguggcauu

SEQ ID NO: 350632 - RNA, 22 nt, Human herpesvirus 8 (Kaposi`s sarcoma-associated h
uuguggggauaugggcuuguac

SEQ ID NO: 350633 - RNA, 12 nt, Human herpesvirus 8 (Kaposi`s sarcoma-associated h
uuguugaccaug

SEQ ID NO: 350634 - RNA, 20 nt, Human herpesvirus 8 (Kaposi`s sarcoma-associated h
uuuaaccgcuaagggauuau

SEQ ID NO: 350635 - RNA, 23 nt, Human herpesvirus 8 (Kaposi`s sarcoma-associated h
uuuaccaguauagugguuuacau

SEQ ID NO: 350636 - RNA, 18 nt, Human herpesvirus 8 (Kaposi`s sarcoma-associated h
uuuacgcgacggaucucu

SEQ ID NO: 350637 - RNA, 16 nt, Human herpesvirus 8 (Kaposi`s sarcoma-associated h
uuuacuuuuacaagga

SEQ ID NO: 350638 - RNA, 14 nt, Human herpesvirus 8 (Kaposi`s sarcoma-associated h
uuuagauuguauca

SEQ ID NO: 350639 - RNA, 22 nt, Human herpesvirus 8 (Kaposi`s sarcoma-associated h
uuuagcauccuaucgcacagac

SEQ ID NO: 350640 - RNA, 13 nt, Human herpesvirus 8 (Kaposi`s sarcoma-associated h
uuuauaacaauga

SEQ ID NO: 350641 - RNA, 14 nt, Human herpesvirus 8 (Kaposi`s sarcoma-associated h
uuuauaacaaugaa

SEQ ID NO: 350642 - RNA, 14 nt, Human herpesvirus 8 (Kaposi`s sarcoma-associated h
uuuaucauccacgc

SEQ ID NO: 350643 - RNA, 15 nt, Human herpesvirus 8 (Kaposi`s sarcoma-associated h
uuuaucaugugaaca

SEQ ID NO: 350644 - RNA, 15 nt, Human herpesvirus 8 (Kaposi`s sarcoma-associated h
uuuaucuucaaggcc

SEQ ID NO: 350645 - RNA, 14 nt, Human herpesvirus 8 (Kaposi`s sarcoma-associated h
uuuauggacauuua

SEQ ID NO: 350646 - RNA, 22 nt, Human herpesvirus 8 (Kaposi`s sarcoma-associated h
uuuaugguuuuguguuacacua

SEQ ID NO: 350647 - RNA, 24 nt, Human herpesvirus 8 (Kaposi`s sarcoma-associated h
uuuauucaaaagaacauugaugcc

SEQ ID NO: 350648 - RNA, 11 nt, Human herpesvirus 8 (Kaposi`s sarcoma-associated h
uuucaaccucg

SEQ ID NO: 350649 - RNA, 16 nt, Human herpesvirus 8 (Kaposi`s sarcoma-associated h
uuucauagccuuguug

SEQ ID NO: 350650 - RNA, 15 nt, Human herpesvirus 8 (Kaposi`s sarcoma-associated h
uuuccaaggccugug

SEQ ID NO: 350651 - RNA, 22 nt, Human herpesvirus 8 (Kaposi`s sarcoma-associated h
uuucccacgugcaccagcucag

SEQ ID NO: 350652 - RNA, 15 nt, Human herpesvirus 8 (Kaposi`s sarcoma-associated h
uuuccugugauuucu

SEQ ID NO: 350653 - RNA, 20 nt, Human herpesvirus 8 (Kaposi`s sarcoma-associated h
uuuccuuuguuuuuccacau

SEQ ID NO: 350654 - RNA, 11 nt, Human herpesvirus 8 (Kaposi`s sarcoma-associated h
uuucucucaua

SEQ ID NO: 350655 - RNA, 23 nt, Human herpesvirus 8 (Kaposi`s sarcoma-associated h
uuucugaauguuuguaauuuccu

SEQ ID NO: 350656 - RNA, 15 nt, Human herpesvirus 8 (Kaposi`s sarcoma-associated h
uuucuggguuuacau

SEQ ID NO: 350657 - RNA, 17 nt, Human herpesvirus 8 (Kaposi`s sarcoma-associated h
uuucuguaaucaucgca

SEQ ID NO: 350658 - RNA, 19 nt, Human herpesvirus 8 (Kaposi`s sarcoma-associated h
uuugaaaaaaaauaaacau

SEQ ID NO: 350659 - RNA, 20 nt, Human herpesvirus 8 (Kaposi`s sarcoma-associated h
uuugauauuacagacucugu

SEQ ID NO: 350660 - RNA, 16 nt, Human herpesvirus 8 (Kaposi`s sarcoma-associated h
uuugcagugucuaugu

SEQ ID NO: 350661 - RNA, 20 nt, Human herpesvirus 8 (Kaposi`s sarcoma-associated h
uuuggcccacguggugcugc

SEQ ID NO: 350662 - RNA, 21 nt, Human herpesvirus 8 (Kaposi`s sarcoma-associated h
uuugggaauaaagcaugagac

SEQ ID NO: 350663 - RNA, 12 nt, Human herpesvirus 8 (Kaposi`s sarcoma-associated h
uuuggucucuuu

SEQ ID NO: 350664 - RNA, 22 nt, Human herpesvirus 8 (Kaposi`s sarcoma-associated h
uuugugauagcuggagugcuga

SEQ ID NO: 350665 - RNA, 22 nt, Human herpesvirus 8 (Kaposi`s sarcoma-associated h
uuuguguuacacuauguagggu

SEQ ID NO: 350666 - RNA, 21 nt, Human herpesvirus 8 (Kaposi`s sarcoma-associated h
uuuuaugcaaaauacauuuua

SEQ ID NO: 350667 - RNA, 21 nt, Human herpesvirus 8 (Kaposi`s sarcoma-associated h
uuuuccacaucggugccuuca

SEQ ID NO: 350668 - RNA, 14 nt, Human herpesvirus 8 (Kaposi`s sarcoma-associated h
uuuucggacgcuau

SEQ ID NO: 350669 - RNA, 19 nt, Human herpesvirus 8 (Kaposi`s sarcoma-associated h
uuuucucgugugcccuuca

SEQ ID NO: 350670 - RNA, 21 nt, Human herpesvirus 8 (Kaposi`s sarcoma-associated h
uuuugacaagucuucuuguca

SEQ ID NO: 350671 - RNA, 23 nt, Human herpesvirus 8 (Kaposi`s sarcoma-associated h
uuuuuaaugcgggauauggggau

SEQ ID NO: 350672 - RNA, 16 nt, Human herpesvirus 8 (Kaposi`s sarcoma-associated h
uuuuucaacaacaguc

SEQ ID NO: 350673 - RNA, 21 nt, Human herpesvirus 8 (Kaposi`s sarcoma-associated h
uuuuucacccaccacggaaua

SEQ ID NO: 350674 - RNA, 17 nt, Human herpesvirus 8 (Kaposi`s sarcoma-associated h
uuuuuccaucuccauga

SEQ ID NO: 350675 - RNA, 22 nt, Human herpesvirus 8 (Kaposi`s sarcoma-associated h
uuuuuguuauuguuacuugcaa

SEQ ID NO: 350676 - RNA, 17 nt, Human herpesvirus 8 (Kaposi`s sarcoma-associated h
ugggacuccggacucgu

SEQ ID NO: 350677 - RNA, 20 nt, Human herpesvirus 8 (Kaposi`s sarcoma-associated h
ugggagcggguugucuacau

SEQ ID NO: 350678 - RNA, 19 nt, Human herpesvirus 8 (Kaposi`s sarcoma-associated h
ugggauagaguccaaaaca

SEQ ID NO: 350679 - RNA, 20 nt, Human herpesvirus 8 (Kaposi`s sarcoma-associated h
ugggaucgaacagaagaccc

SEQ ID NO: 350680 - RNA, 18 nt, Human herpesvirus 8 (Kaposi`s sarcoma-associated h
ugggauuccgucauucac

SEQ ID NO: 350681 - RNA, 16 nt, Human herpesvirus 8 (Kaposi`s sarcoma-associated h
ugggcaaaauaccugu

SEQ ID NO: 350682 - RNA, 17 nt, Human herpesvirus 8 (Kaposi`s sarcoma-associated h
ugggccacaaaacugcc

SEQ ID NO: 350683 - RNA, 18 nt, Human herpesvirus 8 (Kaposi`s sarcoma-associated h
ugggccacaaaacugcca

SEQ ID NO: 350684 - RNA, 21 nt, Human herpesvirus 8 (Kaposi`s sarcoma-associated h
ugggccacaaaacugccaaag

SEQ ID NO: 350685 - RNA, 14 nt, Human herpesvirus 8 (Kaposi`s sarcoma-associated h
ugggcuagugccaa

SEQ ID NO: 350686 - RNA, 15 nt, Human herpesvirus 8 (Kaposi`s sarcoma-associated h
uggggaccagaggac

SEQ ID NO: 350687 - RNA, 22 nt, Human herpesvirus 8 (Kaposi`s sarcoma-associated h
uggggaccagaggacagggugg

SEQ ID NO: 350688 - RNA, 12 nt, Human herpesvirus 8 (Kaposi`s sarcoma-associated h
uggggaugacuc

SEQ ID NO: 350689 - RNA, 15 nt, Human herpesvirus 8 (Kaposi`s sarcoma-associated h
uggggcuacacauca

SEQ ID NO: 350690 - RNA, 16 nt, Human herpesvirus 8 (Kaposi`s sarcoma-associated h
ugggggauccacucag

SEQ ID NO: 350691 - RNA, 17 nt, Human herpesvirus 8 (Kaposi`s sarcoma-associated h
ugggguugcauagggcu

SEQ ID NO: 350692 - RNA, 21 nt, Human herpesvirus 8 (Kaposi`s sarcoma-associated h
uggguacuaugggugaccaca

SEQ ID NO: 350693 - RNA, 23 nt, Human herpesvirus 8 (Kaposi`s sarcoma-associated h
uggguacuaugggugaccacaua

SEQ ID NO: 350694 - RNA, 21 nt, Human herpesvirus 8 (Kaposi`s sarcoma-associated h
ugggucguggcgccuuuggca

SEQ ID NO: 350695 - RNA, 14 nt, Human herpesvirus 8 (Kaposi`s sarcoma-associated h
ugggugaccacaua

SEQ ID NO: 350696 - RNA, 20 nt, Human herpesvirus 8 (Kaposi`s sarcoma-associated h
ugggugcaacgacaaaugag

SEQ ID NO: 350697 - RNA, 22 nt, Human herpesvirus 8 (Kaposi`s sarcoma-associated h
ugguaacucccucaagcauuga

SEQ ID NO: 350698 - RNA, 14 nt, Human herpesvirus 8 (Kaposi`s sarcoma-associated h
ugguaauaaaguca

SEQ ID NO: 350699 - RNA, 19 nt, Human herpesvirus 8 (Kaposi`s sarcoma-associated h
ugguaccagagaauaaagc

SEQ ID NO: 350700 - RNA, 14 nt, Human herpesvirus 8 (Kaposi`s sarcoma-associated h
ugguauauuggucc

SEQ ID NO: 350701 - RNA, 20 nt, Human herpesvirus 8 (Kaposi`s sarcoma-associated h
uggucccguggucauugugu

SEQ ID NO: 350702 - RNA, 14 nt, Human herpesvirus 8 (Kaposi`s sarcoma-associated h
uggugggagucucu

SEQ ID NO: 350703 - RNA, 20 nt, Human herpesvirus 8 (Kaposi`s sarcoma-associated h
ugguuaagcuuugcagccag

SEQ ID NO: 350704 - RNA, 18 nt, Human herpesvirus 8 (Kaposi`s sarcoma-associated h
ugguuacucaaaugggaa

SEQ ID NO: 350705 - RNA, 21 nt, Human herpesvirus 8 (Kaposi`s sarcoma-associated h
ugguucuaagucgcacguuag

SEQ ID NO: 350706 - RNA, 13 nt, Human herpesvirus 8 (Kaposi`s sarcoma-associated h
ugguugugccguc

SEQ ID NO: 350707 - RNA, 20 nt, Human herpesvirus 8 (Kaposi`s sarcoma-associated h
ugguuucugggacagucuaa

SEQ ID NO: 350708 - RNA, 17 nt, Human herpesvirus 8 (Kaposi`s sarcoma-associated h
ugguuuuucucucauaa

SEQ ID NO: 350709 - RNA, 16 nt, Human herpesvirus 8 (Kaposi`s sarcoma-associated h
uguaacccugccaaau

SEQ ID NO: 350710 - RNA, 21 nt, Human herpesvirus 8 (Kaposi`s sarcoma-associated h
uguaaccuaaaaaaugugcau

SEQ ID NO: 350711 - RNA, 22 nt, Human herpesvirus 8 (Kaposi`s sarcoma-associated h
uguaaccuaaaaaaugugcaug

SEQ ID NO: 350712 - RNA, 22 nt, Human herpesvirus 8 (Kaposi`s sarcoma-associated h
uguaauguguuuuauguuuaua

SEQ ID NO: 350713 - RNA, 19 nt, Human herpesvirus 8 (Kaposi`s sarcoma-associated h
uguaauuuccugcugucua

SEQ ID NO: 350714 - RNA, 19 nt, Human herpesvirus 8 (Kaposi`s sarcoma-associated h
uguacagugaguggcugua

SEQ ID NO: 350715 - RNA, 22 nt, Human herpesvirus 8 (Kaposi`s sarcoma-associated h
uguacauggagggaauggccuc

SEQ ID NO: 350716 - RNA, 21 nt, Human herpesvirus 8 (Kaposi`s sarcoma-associated h
uguacuuugaggauggggacu

SEQ ID NO: 350717 - RNA, 22 nt, Human herpesvirus 8 (Kaposi`s sarcoma-associated h
uguagacuaugggaaugugccu

SEQ ID NO: 350718 - RNA, 17 nt, Human herpesvirus 8 (Kaposi`s sarcoma-associated h
uguagaucuggauacac

SEQ ID NO: 350719 - RNA, 20 nt, Human herpesvirus 8 (Kaposi`s sarcoma-associated h
uguaucagaacaguggugca

SEQ ID NO: 350720 - RNA, 23 nt, Human herpesvirus 8 (Kaposi`s sarcoma-associated h
uguaucagaacaguggugcacua

SEQ ID NO: 350721 - RNA, 19 nt, Human herpesvirus 8 (Kaposi`s sarcoma-associated h
uguaucaggcuagugcugu

SEQ ID NO: 350722 - RNA, 20 nt, Human herpesvirus 8 (Kaposi`s sarcoma-associated h
uguaucaggcuagugcugua

SEQ ID NO: 350723 - RNA, 23 nt, Human herpesvirus 8 (Kaposi`s sarcoma-associated h
uguaugccgcacucggcguacag

SEQ ID NO: 350724 - RNA, 14 nt, Human herpesvirus 8 (Kaposi`s sarcoma-associated h
uguauugacaccau

SEQ ID NO: 350725 - RNA, 24 nt, Human herpesvirus 8 (Kaposi`s sarcoma-associated h
ugucacuagaauuggagcacuuuu

SEQ ID NO: 350726 - RNA, 22 nt, Human herpesvirus 8 (Kaposi`s sarcoma-associated h
ugucacuccccgaggauauaau

SEQ ID NO: 350727 - RNA, 16 nt, Human herpesvirus 8 (Kaposi`s sarcoma-associated h
ugucagaaguuucaaa

SEQ ID NO: 350728 - RNA, 21 nt, Human herpesvirus 8 (Kaposi`s sarcoma-associated h
ugucaguaaaauaaaauacaa

SEQ ID NO: 350729 - RNA, 20 nt, Human herpesvirus 8 (Kaposi`s sarcoma-associated h
ugucccucagccacaaauaa

SEQ ID NO: 350730 - RNA, 22 nt, Human herpesvirus 8 (Kaposi`s sarcoma-associated h
uguccuccucugaguuugacga

SEQ ID NO: 350731 - RNA, 22 nt, Human herpesvirus 8 (Kaposi`s sarcoma-associated h
ugucgcgaaaaggucaauuuca

SEQ ID NO: 350732 - RNA, 18 nt, Human herpesvirus 8 (Kaposi`s sarcoma-associated h
ugucucacccaauacuua

SEQ ID NO: 350733 - RNA, 22 nt, Human herpesvirus 8 (Kaposi`s sarcoma-associated h
ugucucuggcagcgcaccacau

SEQ ID NO: 350734 - RNA, 16 nt, Human herpesvirus 8 (Kaposi`s sarcoma-associated h
ugucugaauguggaau

SEQ ID NO: 350735 - RNA, 17 nt, Human herpesvirus 8 (Kaposi`s sarcoma-associated h
ugucuuuguguguguua

SEQ ID NO: 350736 - RNA, 22 nt, Human herpesvirus 8 (Kaposi`s sarcoma-associated h
ugucuuuuuaaccgcuaaggga

SEQ ID NO: 350737 - RNA, 13 nt, Human herpesvirus 8 (Kaposi`s sarcoma-associated h
ugugaaguuuaca

SEQ ID NO: 350738 - RNA, 16 nt, Human herpesvirus 8 (Kaposi`s sarcoma-associated h
ugugagcaucaccaac

SEQ ID NO: 350739 - RNA, 23 nt, Human herpesvirus 8 (Kaposi`s sarcoma-associated h
ugugcgcgcagcuuuccugugau

SEQ ID NO: 350740 - RNA, 16 nt, Human herpesvirus 8 (Kaposi`s sarcoma-associated h
uguggauuuuauggac

SEQ ID NO: 350741 - RNA, 19 nt, Human herpesvirus 8 (Kaposi`s sarcoma-associated h
uguggauuuuauggacauu

SEQ ID NO: 350742 - RNA, 13 nt, Human herpesvirus 8 (Kaposi`s sarcoma-associated h
uguggcaccaaau

SEQ ID NO: 350743 - RNA, 13 nt, Human herpesvirus 8 (Kaposi`s sarcoma-associated h
uguggcaccugag

SEQ ID NO: 350744 - RNA, 23 nt, Human herpesvirus 8 (Kaposi`s sarcoma-associated h
uguggcccccuuuacagaucuag

SEQ ID NO: 350745 - RNA, 15 nt, Human herpesvirus 8 (Kaposi`s sarcoma-associated h
uguguagugcaucga

SEQ ID NO: 350746 - RNA, 12 nt, Human herpesvirus 8 (Kaposi`s sarcoma-associated h
ugugugccagua

SEQ ID NO: 350747 - RNA, 17 nt, Human herpesvirus 8 (Kaposi`s sarcoma-associated h
uguguuccugugggcua

SEQ ID NO: 350748 - RNA, 19 nt, Human herpesvirus 8 (Kaposi`s sarcoma-associated h
uguguugaaggacggauca

SEQ ID NO: 350749 - RNA, 21 nt, Human herpesvirus 8 (Kaposi`s sarcoma-associated h
uguuaacccaaugucagggga

SEQ ID NO: 350750 - RNA, 22 nt, Human herpesvirus 8 (Kaposi`s sarcoma-associated h
uguuacccugcucuggacaaug

SEQ ID NO: 350751 - RNA, 17 nt, Human herpesvirus 8 (Kaposi`s sarcoma-associated h
uguuauaagaccaauca

SEQ ID NO: 350752 - RNA, 23 nt, Human herpesvirus 8 (Kaposi`s sarcoma-associated h
uguuccaagagcgagugugccuc

SEQ ID NO: 350753 - RNA, 15 nt, Human herpesvirus 8 (Kaposi`s sarcoma-associated h
uguugagcugcauau

SEQ ID NO: 350754 - RNA, 14 nt, Human herpesvirus 8 (Kaposi`s sarcoma-associated h
uguugcgcacauca

SEQ ID NO: 350755 - RNA, 22 nt, Human herpesvirus 8 (Kaposi`s sarcoma-associated h
uguuucccacgugcaccagcuc

SEQ ID NO: 350756 - RNA, 20 nt, Human herpesvirus 8 (Kaposi`s sarcoma-associated h
uguuuuucuggucgcugcca

SEQ ID NO: 350757 - RNA, 12 nt, Human herpesvirus 8 (Kaposi`s sarcoma-associated h
uuaaaaaccacu

SEQ ID NO: 350758 - RNA, 18 nt, Human herpesvirus 8 (Kaposi`s sarcoma-associated h
uuaaaaaccacucacuga

SEQ ID NO: 350759 - RNA, 17 nt, Human herpesvirus 8 (Kaposi`s sarcoma-associated h
uuaaaaccgcccacuga

SEQ ID NO: 350760 - RNA, 18 nt, Human herpesvirus 8 (Kaposi`s sarcoma-associated h
uuaaacacaacaccagac

SEQ ID NO: 350761 - RNA, 14 nt, Human herpesvirus 8 (Kaposi`s sarcoma-associated h
uuaaacacauacaa

SEQ ID NO: 350762 - RNA, 18 nt, Human herpesvirus 8 (Kaposi`s sarcoma-associated h
uuaaacacauacaaugcu

SEQ ID NO: 350763 - RNA, 16 nt, Human herpesvirus 8 (Kaposi`s sarcoma-associated h
uuaaacgucuguaaaa

SEQ ID NO: 350764 - RNA, 18 nt, Human herpesvirus 8 (Kaposi`s sarcoma-associated h
uuaaagcugucacuaaua

SEQ ID NO: 350765 - RNA, 21 nt, Human herpesvirus 8 (Kaposi`s sarcoma-associated h
uuaacgugucugaauguggaa

SEQ ID NO: 350766 - RNA, 13 nt, Human herpesvirus 8 (Kaposi`s sarcoma-associated h
uuaacuguuuacu

SEQ ID NO: 350767 - RNA, 14 nt, Human herpesvirus 8 (Kaposi`s sarcoma-associated h
uuaacuguuuacug

SEQ ID NO: 350768 - RNA, 14 nt, Human herpesvirus 8 (Kaposi`s sarcoma-associated h
uuaacuucaccucc

SEQ ID NO: 350769 - RNA, 13 nt, Human herpesvirus 8 (Kaposi`s sarcoma-associated h
uuaagaagccacu

SEQ ID NO: 350770 - RNA, 16 nt, Human herpesvirus 8 (Kaposi`s sarcoma-associated h
uuaagacaaacacugu

SEQ ID NO: 350771 - RNA, 18 nt, Human herpesvirus 8 (Kaposi`s sarcoma-associated h
uuaagagugccacuaaaa

SEQ ID NO: 350772 - RNA, 16 nt, Human herpesvirus 8 (Kaposi`s sarcoma-associated h
uuaaggugagagaccc

SEQ ID NO: 350773 - RNA, 12 nt, Human herpesvirus 8 (Kaposi`s sarcoma-associated h
uuaauaaccaug

SEQ ID NO: 350774 - RNA, 20 nt, Human herpesvirus 8 (Kaposi`s sarcoma-associated h
uuaaucgcauaauaaaacaa

SEQ ID NO: 350775 - RNA, 23 nt, Human herpesvirus 8 (Kaposi`s sarcoma-associated h
uuaaucgcauaauaaaacaaaua

SEQ ID NO: 350776 - RNA, 22 nt, Human herpesvirus 8 (Kaposi`s sarcoma-associated h
uuacaauaaagccgagccacaa

SEQ ID NO: 350777 - RNA, 15 nt, Human herpesvirus 8 (Kaposi`s sarcoma-associated h
uuacagagucacaaa

SEQ ID NO: 350778 - RNA, 13 nt, Human herpesvirus 8 (Kaposi`s sarcoma-associated h
uuaccaauacuau

SEQ ID NO: 350779 - RNA, 22 nt, Human herpesvirus 8 (Kaposi`s sarcoma-associated h
uuaccaguauagugguuuacau

SEQ ID NO: 350780 - RNA, 22 nt, Human herpesvirus 8 (Kaposi`s sarcoma-associated h
uuacgcagggugcggugcugcc

SEQ ID NO: 350781 - RNA, 15 nt, Human herpesvirus 8 (Kaposi`s sarcoma-associated h
uuacuagcaccacua

SEQ ID NO: 350782 - RNA, 13 nt, Human herpesvirus 8 (Kaposi`s sarcoma-associated h
uuacuguccauua

SEQ ID NO: 350783 - RNA, 20 nt, Human herpesvirus 8 (Kaposi`s sarcoma-associated h
uuagcagccaugugcugguu

SEQ ID NO: 350784 - RNA, 16 nt, Human herpesvirus 8 (Kaposi`s sarcoma-associated h
uuagcgccaccgugug

SEQ ID NO: 350785 - RNA, 13 nt, Human herpesvirus 8 (Kaposi`s sarcoma-associated h
uuaggaaacacgg

SEQ ID NO: 350786 - RNA, 14 nt, Human herpesvirus 8 (Kaposi`s sarcoma-associated h
uuaggaaacacggc

SEQ ID NO: 350787 - RNA, 22 nt, Human herpesvirus 8 (Kaposi`s sarcoma-associated h
uuagugaaacccccugugccuu

SEQ ID NO: 350788 - RNA, 21 nt, Human herpesvirus 8 (Kaposi`s sarcoma-associated h
uuaucaaagaaaggugacuua

SEQ ID NO: 350789 - RNA, 17 nt, Human herpesvirus 8 (Kaposi`s sarcoma-associated h
uuaucagcucacuguuc

SEQ ID NO: 350790 - RNA, 15 nt, Human herpesvirus 8 (Kaposi`s sarcoma-associated h
uuaucuccugcucau

SEQ ID NO: 350791 - RNA, 20 nt, Human herpesvirus 8 (Kaposi`s sarcoma-associated h
uuaugaggucggauacuuau

SEQ ID NO: 350792 - RNA, 15 nt, Human herpesvirus 8 (Kaposi`s sarcoma-associated h
uuaugcaugcaauac

SEQ ID NO: 350793 - RNA, 14 nt, Human herpesvirus 8 (Kaposi`s sarcoma-associated h
uuaugucaguucca

SEQ ID NO: 350794 - RNA, 22 nt, Human herpesvirus 8 (Kaposi`s sarcoma-associated h
uuauguuguuuguauaacaugc

SEQ ID NO: 350795 - RNA, 23 nt, Human herpesvirus 8 (Kaposi`s sarcoma-associated h
uuauguuguuuguauaacaugca

SEQ ID NO: 350796 - RNA, 19 nt, Human herpesvirus 8 (Kaposi`s sarcoma-associated h
uuauguuuauagcuacaaa

SEQ ID NO: 350797 - RNA, 20 nt, Human herpesvirus 8 (Kaposi`s sarcoma-associated h
uuauuaugaggccuaucuga

SEQ ID NO: 350798 - RNA, 20 nt, Human herpesvirus 8 (Kaposi`s sarcoma-associated h
uuauugcauggcaucccaua

SEQ ID NO: 350799 - RNA, 13 nt, Human herpesvirus 8 (Kaposi`s sarcoma-associated h
uuauuuauugcau

SEQ ID NO: 350800 - RNA, 17 nt, Human herpesvirus 8 (Kaposi`s sarcoma-associated h
uucaaagucguguaaga

SEQ ID NO: 350801 - RNA, 11 nt, Human herpesvirus 8 (Kaposi`s sarcoma-associated h
uucaaccugga

SEQ ID NO: 350802 - RNA, 18 nt, Human herpesvirus 8 (Kaposi`s sarcoma-associated h
uucaagagccuaugcugg

SEQ ID NO: 350803 - RNA, 22 nt, Human herpesvirus 8 (Kaposi`s sarcoma-associated h
uucacgguagagaagagaccac

SEQ ID NO: 350804 - RNA, 21 nt, Human herpesvirus 8 (Kaposi`s sarcoma-associated h
uucacucagcugccaaggcaa

SEQ ID NO: 350805 - RNA, 13 nt, Human herpesvirus 8 (Kaposi`s sarcoma-associated h
uucacugcuggua

SEQ ID NO: 350806 - RNA, 15 nt, Human herpesvirus 8 (Kaposi`s sarcoma-associated h
uucagaaaagggcau

SEQ ID NO: 350807 - RNA, 15 nt, Human herpesvirus 8 (Kaposi`s sarcoma-associated h
uucagacguccaguu

SEQ ID NO: 350808 - RNA, 20 nt, Human herpesvirus 8 (Kaposi`s sarcoma-associated h
uucagcuucaggaauacguc

SEQ ID NO: 350809 - RNA, 22 nt, Human herpesvirus 8 (Kaposi`s sarcoma-associated h
uucagugggacagcaacaccca

SEQ ID NO: 350810 - RNA, 22 nt, Human herpesvirus 8 (Kaposi`s sarcoma-associated h
uucauaccucaacccacacugg

SEQ ID NO: 350811 - RNA, 17 nt, Human herpesvirus 8 (Kaposi`s sarcoma-associated h
uucaucgaguccuugag

SEQ ID NO: 350812 - RNA, 17 nt, Human herpesvirus 8 (Kaposi`s sarcoma-associated h
uucauuagugacauaca

SEQ ID NO: 350813 - RNA, 15 nt, Human herpesvirus 8 (Kaposi`s sarcoma-associated h
uucauuaugcaugca

SEQ ID NO: 350814 - RNA, 20 nt, Human herpesvirus 8 (Kaposi`s sarcoma-associated h
uucauucucuccacuagacu

SEQ ID NO: 350815 - RNA, 17 nt, Human herpesvirus 8 (Kaposi`s sarcoma-associated h
uuccagugacccuaguc

SEQ ID NO: 350816 - RNA, 16 nt, Human herpesvirus 8 (Kaposi`s sarcoma-associated h
uuccaucuccaugagc

SEQ ID NO: 350817 - RNA, 13 nt, Human herpesvirus 8 (Kaposi`s sarcoma-associated h
uuccauuuuccaa

SEQ ID NO: 350818 - RNA, 19 nt, Human herpesvirus 8 (Kaposi`s sarcoma-associated h
uucccaauagcgcugucau

SEQ ID NO: 350819 - RNA, 15 nt, Human herpesvirus 8 (Kaposi`s sarcoma-associated h
uucccacgugcacca

SEQ ID NO: 350820 - RNA, 18 nt, Human herpesvirus 8 (Kaposi`s sarcoma-associated h
uuccccgucuccagucac

SEQ ID NO: 350821 - RNA, 20 nt, Human herpesvirus 8 (Kaposi`s sarcoma-associated h
uucccuccugcauuuggaca

SEQ ID NO: 350822 - RNA, 23 nt, Human herpesvirus 8 (Kaposi`s sarcoma-associated h
uuccggacgugaaggcuagucua

SEQ ID NO: 350823 - RNA, 13 nt, Human herpesvirus 8 (Kaposi`s sarcoma-associated h
uuccuagccagau

SEQ ID NO: 350824 - RNA, 12 nt, Human herpesvirus 8 (Kaposi`s sarcoma-associated h
uucgaggccagg

SEQ ID NO: 350825 - RNA, 19 nt, Human herpesvirus 8 (Kaposi`s sarcoma-associated h
uucgccaauuauugcacca

SEQ ID NO: 350826 - RNA, 11 nt, Human herpesvirus 8 (Kaposi`s sarcoma-associated h
uucgugcagcc

SEQ ID NO: 350827 - RNA, 15 nt, Human herpesvirus 8 (Kaposi`s sarcoma-associated h
uucuaaucuuagucu

SEQ ID NO: 350828 - RNA, 23 nt, Human herpesvirus 8 (Kaposi`s sarcoma-associated h
uucuaccagguaggucaccgggu

SEQ ID NO: 350829 - RNA, 14 nt, Human herpesvirus 8 (Kaposi`s sarcoma-associated h
uucuacgaggcaau

SEQ ID NO: 350830 - RNA, 19 nt, Human herpesvirus 8 (Kaposi`s sarcoma-associated h
uucuacgaggcaauugcca

SEQ ID NO: 350831 - RNA, 21 nt, Human herpesvirus 8 (Kaposi`s sarcoma-associated h
uucuauacaugccccuuaucu

SEQ ID NO: 350832 - RNA, 14 nt, Human herpesvirus 8 (Kaposi`s sarcoma-associated h
uucucacaacggcu

SEQ ID NO: 350833 - RNA, 14 nt, Human herpesvirus 8 (Kaposi`s sarcoma-associated h
ugaaagacugccug

SEQ ID NO: 350834 - RNA, 19 nt, Human herpesvirus 8 (Kaposi`s sarcoma-associated h
ugaaagcaggacguccagg

SEQ ID NO: 350835 - RNA, 15 nt, Human herpesvirus 8 (Kaposi`s sarcoma-associated h
ugaaaggugguucua

SEQ ID NO: 350836 - RNA, 12 nt, Human herpesvirus 8 (Kaposi`s sarcoma-associated h
ugaaaugaguca

SEQ ID NO: 350837 - RNA, 13 nt, Human herpesvirus 8 (Kaposi`s sarcoma-associated h
ugaaaugagucag

SEQ ID NO: 350838 - RNA, 11 nt, Human herpesvirus 8 (Kaposi`s sarcoma-associated h
ugaacaugugg

SEQ ID NO: 350839 - RNA, 14 nt, Human herpesvirus 8 (Kaposi`s sarcoma-associated h
ugaacauuguucaa

SEQ ID NO: 350840 - RNA, 14 nt, Human herpesvirus 8 (Kaposi`s sarcoma-associated h
ugaaccccgugugg

SEQ ID NO: 350841 - RNA, 19 nt, Human herpesvirus 8 (Kaposi`s sarcoma-associated h
ugaaggcgaauaaaacagg

SEQ ID NO: 350842 - RNA, 19 nt, Human herpesvirus 8 (Kaposi`s sarcoma-associated h
ugaagucccgaugccacug

SEQ ID NO: 350843 - RNA, 21 nt, Human herpesvirus 8 (Kaposi`s sarcoma-associated h
ugaauaacuuuauuacaggua

SEQ ID NO: 350844 - RNA, 22 nt, Human herpesvirus 8 (Kaposi`s sarcoma-associated h
ugaauaacuuuauuacagguau

SEQ ID NO: 350845 - RNA, 21 nt, Human herpesvirus 8 (Kaposi`s sarcoma-associated h
ugaauacccuggaucagggaa

SEQ ID NO: 350846 - RNA, 19 nt, Human herpesvirus 8 (Kaposi`s sarcoma-associated h
ugaaugggggcagugcacg

SEQ ID NO: 350847 - RNA, 13 nt, Human herpesvirus 8 (Kaposi`s sarcoma-associated h
ugacaacugccac

SEQ ID NO: 350848 - RNA, 18 nt, Human herpesvirus 8 (Kaposi`s sarcoma-associated h
ugacaagcuauaggacag

SEQ ID NO: 350849 - RNA, 18 nt, Human herpesvirus 8 (Kaposi`s sarcoma-associated h
ugacaagucuucuuguca

SEQ ID NO: 350850 - RNA, 18 nt, Human herpesvirus 8 (Kaposi`s sarcoma-associated h
ugacaaucuggaugugua

SEQ ID NO: 350851 - RNA, 20 nt, Human herpesvirus 8 (Kaposi`s sarcoma-associated h
ugacacccuggauggguuaa

SEQ ID NO: 350852 - RNA, 19 nt, Human herpesvirus 8 (Kaposi`s sarcoma-associated h
ugacagggacgcauaucac

SEQ ID NO: 350853 - RNA, 13 nt, Human herpesvirus 8 (Kaposi`s sarcoma-associated h
ugacauacaugag

SEQ ID NO: 350854 - RNA, 16 nt, Human herpesvirus 8 (Kaposi`s sarcoma-associated h
ugacauacaugagaga

SEQ ID NO: 350855 - RNA, 16 nt, Human herpesvirus 8 (Kaposi`s sarcoma-associated h
ugacauguggagccac

SEQ ID NO: 350856 - RNA, 12 nt, Human herpesvirus 8 (Kaposi`s sarcoma-associated h
ugaccacggcac

SEQ ID NO: 350857 - RNA, 22 nt, Human herpesvirus 8 (Kaposi`s sarcoma-associated h
ugacccacauagaccuacaccc

SEQ ID NO: 350858 - RNA, 21 nt, Human herpesvirus 8 (Kaposi`s sarcoma-associated h
ugacgauguucaggaggaaga

SEQ ID NO: 350859 - RNA, 20 nt, Human herpesvirus 8 (Kaposi`s sarcoma-associated h
ugacgggguaucgccgccag

SEQ ID NO: 350860 - RNA, 17 nt, Human herpesvirus 8 (Kaposi`s sarcoma-associated h
ugacggguuugugauag

SEQ ID NO: 350861 - RNA, 13 nt, Human herpesvirus 8 (Kaposi`s sarcoma-associated h
ugacggugacauu

SEQ ID NO: 350862 - RNA, 12 nt, Human herpesvirus 8 (Kaposi`s sarcoma-associated h
ugacuuaucuaa

SEQ ID NO: 350863 - RNA, 20 nt, Human herpesvirus 8 (Kaposi`s sarcoma-associated h
ugacuuccccgucuccaguc

SEQ ID NO: 350864 - RNA, 22 nt, Human herpesvirus 8 (Kaposi`s sarcoma-associated h
ugacuuccccgucuccagucac

SEQ ID NO: 350865 - RNA, 23 nt, Human herpesvirus 8 (Kaposi`s sarcoma-associated h
ugacuuuuugugagauagccaca

SEQ ID NO: 350866 - RNA, 16 nt, Human herpesvirus 8 (Kaposi`s sarcoma-associated h
ugagaaauuacugcac

SEQ ID NO: 350867 - RNA, 16 nt, Human herpesvirus 8 (Kaposi`s sarcoma-associated h
ugagagucagagaaua

SEQ ID NO: 350868 - RNA, 13 nt, Human herpesvirus 8 (Kaposi`s sarcoma-associated h
ugagauagccaca

SEQ ID NO: 350869 - RNA, 20 nt, Human herpesvirus 8 (Kaposi`s sarcoma-associated h
ugagauuucccuacauugcu

SEQ ID NO: 350870 - RNA, 15 nt, Human herpesvirus 8 (Kaposi`s sarcoma-associated h
ugaggaagcaucugg

SEQ ID NO: 350871 - RNA, 18 nt, Human herpesvirus 8 (Kaposi`s sarcoma-associated h
ugaggaucggaucuuuua

SEQ ID NO: 350872 - RNA, 16 nt, Human herpesvirus 8 (Kaposi`s sarcoma-associated h
ugaggccaagugcauu

SEQ ID NO: 350873 - RNA, 16 nt, Human herpesvirus 8 (Kaposi`s sarcoma-associated h
ugagggugaguggaac

SEQ ID NO: 350874 - RNA, 22 nt, Human herpesvirus 8 (Kaposi`s sarcoma-associated h
ugagguaauucuagaaagcgga

SEQ ID NO: 350875 - RNA, 16 nt, Human herpesvirus 8 (Kaposi`s sarcoma-associated h
ugaggucggauacuua

SEQ ID NO: 350876 - RNA, 12 nt, Human herpesvirus 8 (Kaposi`s sarcoma-associated h
ugaguguaaaaa

SEQ ID NO: 350877 - RNA, 11 nt, Human herpesvirus 8 (Kaposi`s sarcoma-associated h
ugauaaucucc

SEQ ID NO: 350878 - RNA, 23 nt, Human herpesvirus 8 (Kaposi`s sarcoma-associated h
ugauagcagauauaaacauggca

SEQ ID NO: 350879 - RNA, 19 nt, Human herpesvirus 8 (Kaposi`s sarcoma-associated h
ugauauacucccucccaua

SEQ ID NO: 350880 - RNA, 17 nt, Human herpesvirus 8 (Kaposi`s sarcoma-associated h
ugauaugauauacuccc

SEQ ID NO: 350881 - RNA, 22 nt, Human herpesvirus 8 (Kaposi`s sarcoma-associated h
ugauauugcggugguugccgaa

SEQ ID NO: 350882 - RNA, 14 nt, Human herpesvirus 8 (Kaposi`s sarcoma-associated h
ugauauuuugaugg

SEQ ID NO: 350883 - RNA, 18 nt, Human herpesvirus 8 (Kaposi`s sarcoma-associated h
ugauuacagagucacaaa

SEQ ID NO: 350884 - RNA, 14 nt, Human herpesvirus 8 (Kaposi`s sarcoma-associated h
ugauuagcacugua

SEQ ID NO: 350885 - RNA, 20 nt, Human herpesvirus 8 (Kaposi`s sarcoma-associated h
ugcaaaagagacacuaucuc

SEQ ID NO: 350886 - RNA, 15 nt, Human herpesvirus 8 (Kaposi`s sarcoma-associated h
ugcaaaauaaagucu

SEQ ID NO: 350887 - RNA, 15 nt, Human herpesvirus 8 (Kaposi`s sarcoma-associated h
ugcaaaaugugcuuu

SEQ ID NO: 350888 - RNA, 13 nt, Human herpesvirus 8 (Kaposi`s sarcoma-associated h
ugcaaacuauaca

SEQ ID NO: 350889 - RNA, 21 nt, Human herpesvirus 8 (Kaposi`s sarcoma-associated h
ugcaaccaacaauauuauuua

SEQ ID NO: 350890 - RNA, 18 nt, Human herpesvirus 8 (Kaposi`s sarcoma-associated h
ugcaacccucguguuugg

SEQ ID NO: 350891 - RNA, 17 nt, Human herpesvirus 8 (Kaposi`s sarcoma-associated h
ugcaacccucuacucuu

SEQ ID NO: 350892 - RNA, 19 nt, Human herpesvirus 8 (Kaposi`s sarcoma-associated h
ugcaagcuguuggcgcuuu

SEQ ID NO: 350893 - RNA, 13 nt, Human herpesvirus 8 (Kaposi`s sarcoma-associated h
ugcacaacauaug

SEQ ID NO: 350894 - RNA, 14 nt, Human herpesvirus 8 (Kaposi`s sarcoma-associated h
ugcaccaagcacaa

SEQ ID NO: 350895 - RNA, 15 nt, Human herpesvirus 8 (Kaposi`s sarcoma-associated h
ugcaccucuaucucg

SEQ ID NO: 350896 - RNA, 20 nt, Human herpesvirus 8 (Kaposi`s sarcoma-associated h
ugcaccuugauguuucccac

SEQ ID NO: 350897 - RNA, 20 nt, Human herpesvirus 8 (Kaposi`s sarcoma-associated h
ugcacgcaccaggauccaga

SEQ ID NO: 350898 - RNA, 23 nt, Human herpesvirus 8 (Kaposi`s sarcoma-associated h
ugcacgccaacccucagugugcu

SEQ ID NO: 350899 - RNA, 11 nt, Human herpesvirus 8 (Kaposi`s sarcoma-associated h
ugcacuagcag

SEQ ID NO: 350900 - RNA, 18 nt, Human herpesvirus 8 (Kaposi`s sarcoma-associated h
ugcacuagcagaaaacug

SEQ ID NO: 350901 - RNA, 17 nt, Human herpesvirus 8 (Kaposi`s sarcoma-associated h
ugcagacccuuagggau

SEQ ID NO: 350902 - RNA, 21 nt, Human herpesvirus 8 (Kaposi`s sarcoma-associated h
ugcagcagcgugacacuacua

SEQ ID NO: 350903 - RNA, 19 nt, Human herpesvirus 8 (Kaposi`s sarcoma-associated h
ugcagcuggacuggaguca

SEQ ID NO: 350904 - RNA, 20 nt, Human herpesvirus 8 (Kaposi`s sarcoma-associated h
ugcaguuggagaaacagugg

SEQ ID NO: 350905 - RNA, 23 nt, Human herpesvirus 8 (Kaposi`s sarcoma-associated h
ugcauauggacuguuaacccaau

SEQ ID NO: 350906 - RNA, 21 nt, Human herpesvirus 8 (Kaposi`s sarcoma-associated h
ugcaugcucggcaacauucaa

SEQ ID NO: 350907 - RNA, 12 nt, Human herpesvirus 8 (Kaposi`s sarcoma-associated h
ugcaugugguua

SEQ ID NO: 350908 - RNA, 19 nt, Human herpesvirus 8 (Kaposi`s sarcoma-associated h
ugcauguuauacaaacaac

SEQ ID NO: 350909 - RNA, 11 nt, Human herpesvirus 8 (Kaposi`s sarcoma-associated h
ugcauugcucu

SEQ ID NO: 350910 - RNA, 20 nt, Human herpesvirus 8 (Kaposi`s sarcoma-associated h
ugccaacgaccugaugcagg

SEQ ID NO: 350911 - RNA, 17 nt, Human herpesvirus 8 (Kaposi`s sarcoma-associated h
ugccaauaacccgcccu

SEQ ID NO: 350912 - RNA, 13 nt, Human herpesvirus 8 (Kaposi`s sarcoma-associated h
ugccaugguacca

SEQ ID NO: 350913 - RNA, 20 nt, Human herpesvirus 8 (Kaposi`s sarcoma-associated h
ugcccacccuguacaugaac

SEQ ID NO: 350914 - RNA, 16 nt, Human herpesvirus 8 (Kaposi`s sarcoma-associated h
ugccccuuaucuccac

SEQ ID NO: 350915 - RNA, 14 nt, Human herpesvirus 8 (Kaposi`s sarcoma-associated h
ugcccgcaauauaa

SEQ ID NO: 350916 - RNA, 18 nt, Human herpesvirus 8 (Kaposi`s sarcoma-associated h
ugccgaaaucagugucca

SEQ ID NO: 350917 - RNA, 14 nt, Human herpesvirus 8 (Kaposi`s sarcoma-associated h
ugccgaugugucag

SEQ ID NO: 350918 - RNA, 17 nt, Human herpesvirus 8 (Kaposi`s sarcoma-associated h
ugccgccuggacaguga

SEQ ID NO: 350919 - RNA, 13 nt, Human herpesvirus 8 (Kaposi`s sarcoma-associated h
ugccuccaccgga

SEQ ID NO: 350920 - RNA, 19 nt, Human herpesvirus 8 (Kaposi`s sarcoma-associated h
ugccugguauuuaguggag

SEQ ID NO: 350921 - RNA, 18 nt, Human herpesvirus 8 (Kaposi`s sarcoma-associated h
ugccugucagauuuacaa

SEQ ID NO: 350922 - RNA, 16 nt, Human herpesvirus 8 (Kaposi`s sarcoma-associated h
ugccuuuugcuuaaac

SEQ ID NO: 350923 - RNA, 19 nt, Human herpesvirus 8 (Kaposi`s sarcoma-associated h
ugcgaacuugcucuuuuca

SEQ ID NO: 350924 - RNA, 23 nt, Human herpesvirus 8 (Kaposi`s sarcoma-associated h
ugcgauagggggaugagccagaa

SEQ ID NO: 350925 - RNA, 23 nt, Human herpesvirus 8 (Kaposi`s sarcoma-associated h
ugcgcagaacaguacccacgaaa

SEQ ID NO: 350926 - RNA, 14 nt, Human herpesvirus 8 (Kaposi`s sarcoma-associated h
ugcgcuauuugccg

SEQ ID NO: 350927 - RNA, 21 nt, Human herpesvirus 8 (Kaposi`s sarcoma-associated h
ugcggcggccgcuaagaaaau

SEQ ID NO: 350928 - RNA, 12 nt, Human herpesvirus 8 (Kaposi`s sarcoma-associated h
ugcgucuacugc

SEQ ID NO: 350929 - RNA, 16 nt, Human herpesvirus 8 (Kaposi`s sarcoma-associated h
ugcuacggaucaugcu

SEQ ID NO: 350930 - RNA, 18 nt, Human herpesvirus 8 (Kaposi`s sarcoma-associated h
ugcuauuuuucaucugaa

SEQ ID NO: 350931 - RNA, 22 nt, Human herpesvirus 8 (Kaposi`s sarcoma-associated h
ugcucaucgcgaccgcugccaa

SEQ ID NO: 350932 - RNA, 21 nt, Human herpesvirus 8 (Kaposi`s sarcoma-associated h
ugcucgaggcgacaacgccau

SEQ ID NO: 350933 - RNA, 17 nt, Human herpesvirus 8 (Kaposi`s sarcoma-associated h
ugcucuuuucaaccucg

SEQ ID NO: 350934 - RNA, 22 nt, Human herpesvirus 8 (Kaposi`s sarcoma-associated h
ugcugauauaugaguguaaaaa

SEQ ID NO: 350935 - RNA, 21 nt, Human herpesvirus 8 (Kaposi`s sarcoma-associated h
ugcugaugcgaaugugccagc

SEQ ID NO: 350936 - RNA, 20 nt, Human herpesvirus 8 (Kaposi`s sarcoma-associated h
ugcugcauaaagucauggga

SEQ ID NO: 350937 - RNA, 14 nt, Human herpesvirus 8 (Kaposi`s sarcoma-associated h
ugcuucuguuugaa

SEQ ID NO: 350938 - RNA, 21 nt, Human herpesvirus 8 (Kaposi`s sarcoma-associated h
ugcuuuauucccaaacacauc

SEQ ID NO: 350939 - RNA, 14 nt, Human herpesvirus 8 (Kaposi`s sarcoma-associated h
uggaaaacaaaaca

SEQ ID NO: 350940 - RNA, 13 nt, Human herpesvirus 8 (Kaposi`s sarcoma-associated h
uggaaaauucucc

SEQ ID NO: 350941 - RNA, 20 nt, Human herpesvirus 8 (Kaposi`s sarcoma-associated h
uggacaaccguggagucaca

SEQ ID NO: 350942 - RNA, 11 nt, Human herpesvirus 8 (Kaposi`s sarcoma-associated h
uggacacuccu

SEQ ID NO: 350943 - RNA, 17 nt, Human herpesvirus 8 (Kaposi`s sarcoma-associated h
uggaccgcccgucgcug

SEQ ID NO: 350944 - RNA, 17 nt, Human herpesvirus 8 (Kaposi`s sarcoma-associated h
uggacgauguacuugaa

SEQ ID NO: 350945 - RNA, 23 nt, Human herpesvirus 8 (Kaposi`s sarcoma-associated h
uggacgcggccuucgucaugcac

SEQ ID NO: 350946 - RNA, 17 nt, Human herpesvirus 8 (Kaposi`s sarcoma-associated h
uggacgggguugucuuc

SEQ ID NO: 350947 - RNA, 21 nt, Human herpesvirus 8 (Kaposi`s sarcoma-associated h
uggacuguuaacccaauguca

SEQ ID NO: 350948 - RNA, 14 nt, Human herpesvirus 8 (Kaposi`s sarcoma-associated h
uggagaaacagugg

SEQ ID NO: 350949 - RNA, 19 nt, Human herpesvirus 8 (Kaposi`s sarcoma-associated h
uggagaauauccacggugu

SEQ ID NO: 350950 - RNA, 20 nt, Human herpesvirus 8 (Kaposi`s sarcoma-associated h
uggagcaagacgccagacag

SEQ ID NO: 350951 - RNA, 16 nt, Human herpesvirus 8 (Kaposi`s sarcoma-associated h
uggagcacuuuuggaa

SEQ ID NO: 350952 - RNA, 23 nt, Human herpesvirus 8 (Kaposi`s sarcoma-associated h
uggagcacuuuuggaaaacgugg

SEQ ID NO: 350953 - RNA, 20 nt, Human herpesvirus 8 (Kaposi`s sarcoma-associated h
uggagcucuuagagcuuuaa

SEQ ID NO: 350954 - RNA, 23 nt, Human herpesvirus 8 (Kaposi`s sarcoma-associated h
uggagggcacagauuguggcauu

SEQ ID NO: 350955 - RNA, 15 nt, Human herpesvirus 8 (Kaposi`s sarcoma-associated h
uggauaaaagaauaa

SEQ ID NO: 350956 - RNA, 18 nt, Human herpesvirus 8 (Kaposi`s sarcoma-associated h
uggaucaugacuacgcuc

SEQ ID NO: 350957 - RNA, 19 nt, Human herpesvirus 8 (Kaposi`s sarcoma-associated h
uggauccgcaaugucaggu

SEQ ID NO: 350958 - RNA, 16 nt, Human herpesvirus 8 (Kaposi`s sarcoma-associated h
uggauccuacacuuua

SEQ ID NO: 350959 - RNA, 20 nt, Human herpesvirus 8 (Kaposi`s sarcoma-associated h
uggauugccgucacauauca

SEQ ID NO: 350960 - RNA, 22 nt, Human herpesvirus 8 (Kaposi`s sarcoma-associated h
uggcaaaaucuguugaauguga

SEQ ID NO: 350961 - RNA, 12 nt, Human herpesvirus 8 (Kaposi`s sarcoma-associated h
uggcaacugcca

SEQ ID NO: 350962 - RNA, 21 nt, Human herpesvirus 8 (Kaposi`s sarcoma-associated h
uggcaagcaguggagcaagac

SEQ ID NO: 350963 - RNA, 19 nt, Human herpesvirus 8 (Kaposi`s sarcoma-associated h
uggcacacgcugcaaugua

SEQ ID NO: 350964 - RNA, 22 nt, Human herpesvirus 8 (Kaposi`s sarcoma-associated h
uggcacacgcugcaauguacug

SEQ ID NO: 350965 - RNA, 23 nt, Human herpesvirus 8 (Kaposi`s sarcoma-associated h
uggcacacgguuacuagcaccac

SEQ ID NO: 350966 - RNA, 20 nt, Human herpesvirus 8 (Kaposi`s sarcoma-associated h
uggcaccugaggugcucuuc

SEQ ID NO: 350967 - RNA, 17 nt, Human herpesvirus 8 (Kaposi`s sarcoma-associated h
uggcagcccagccucug

SEQ ID NO: 350968 - RNA, 19 nt, Human herpesvirus 8 (Kaposi`s sarcoma-associated h
uggcauaccacguguguga

SEQ ID NO: 350969 - RNA, 18 nt, Human herpesvirus 8 (Kaposi`s sarcoma-associated h
uggcauucgguaccacau

SEQ ID NO: 350970 - RNA, 14 nt, Human herpesvirus 8 (Kaposi`s sarcoma-associated h
uggccaggacaaug

SEQ ID NO: 350971 - RNA, 21 nt, Human herpesvirus 8 (Kaposi`s sarcoma-associated h
uggccauaacgagcgaccagu

SEQ ID NO: 350972 - RNA, 15 nt, Human herpesvirus 8 (Kaposi`s sarcoma-associated h
uggcccgucuguaua

SEQ ID NO: 350973 - RNA, 18 nt, Human herpesvirus 8 (Kaposi`s sarcoma-associated h
uggcccgucuguauacgu

SEQ ID NO: 350974 - RNA, 18 nt, Human herpesvirus 8 (Kaposi`s sarcoma-associated h
uggccgacgcaaacgcca

SEQ ID NO: 350975 - RNA, 12 nt, Human herpesvirus 8 (Kaposi`s sarcoma-associated h
uggccgcauuug

SEQ ID NO: 350976 - RNA, 20 nt, Human herpesvirus 8 (Kaposi`s sarcoma-associated h
uggcgagucccuuaugucag

SEQ ID NO: 350977 - RNA, 16 nt, Human herpesvirus 8 (Kaposi`s sarcoma-associated h
uggcgcaagcacuuuu

SEQ ID NO: 350978 - RNA, 21 nt, Human herpesvirus 8 (Kaposi`s sarcoma-associated h
uggcgcaggagucagagcagu

SEQ ID NO: 350979 - RNA, 16 nt, Human herpesvirus 8 (Kaposi`s sarcoma-associated h
uggcgcccacguaugg

SEQ ID NO: 350980 - RNA, 22 nt, Human herpesvirus 8 (Kaposi`s sarcoma-associated h
uggcgcguaacggcaggcguga

SEQ ID NO: 350981 - RNA, 13 nt, Human herpesvirus 8 (Kaposi`s sarcoma-associated h
uggcggaaggugg

SEQ ID NO: 350982 - RNA, 22 nt, Human herpesvirus 8 (Kaposi`s sarcoma-associated h
uggcggguagaaucaauguggu

SEQ ID NO: 350983 - RNA, 13 nt, Human herpesvirus 8 (Kaposi`s sarcoma-associated h
uggcucauaacac

SEQ ID NO: 350984 - RNA, 18 nt, Human herpesvirus 8 (Kaposi`s sarcoma-associated h
uggcuguuacaauaaagc

SEQ ID NO: 350985 - RNA, 12 nt, Human herpesvirus 8 (Kaposi`s sarcoma-associated h
ugggaacuguga

SEQ ID NO: 350986 - RNA, 16 nt, Human herpesvirus 8 (Kaposi`s sarcoma-associated h
ugggaacuuucaucca

SEQ ID NO: 350987 - RNA, 18 nt, Human herpesvirus 8 (Kaposi`s sarcoma-associated h
ugggaaugugccuaucaa

SEQ ID NO: 350988 - RNA, 19 nt, Human herpesvirus 8 (Kaposi`s sarcoma-associated h
ugggacaacuagaguccaa

SEQ ID NO: 350989 - RNA, 23 nt, Human herpesvirus 8 (Kaposi`s sarcoma-associated h
ugggaccuuucaacaaucucuua

SEQ ID NO: 350990 - RNA, 17 nt, Human herpesvirus 8 (Kaposi`s sarcoma-associated h
ucagcuuggcgaccuca

SEQ ID NO: 350991 - RNA, 22 nt, Human herpesvirus 8 (Kaposi`s sarcoma-associated h
ucaggagcuccucgcagaacau

SEQ ID NO: 350992 - RNA, 19 nt, Human herpesvirus 8 (Kaposi`s sarcoma-associated h
ucaggauuucgaauaucuc

SEQ ID NO: 350993 - RNA, 15 nt, Human herpesvirus 8 (Kaposi`s sarcoma-associated h
ucagggagcacguga

SEQ ID NO: 350994 - RNA, 18 nt, Human herpesvirus 8 (Kaposi`s sarcoma-associated h
ucaggucugucacuagaa

SEQ ID NO: 350995 - RNA, 11 nt, Human herpesvirus 8 (Kaposi`s sarcoma-associated h
ucagucagggg

SEQ ID NO: 350996 - RNA, 14 nt, Human herpesvirus 8 (Kaposi`s sarcoma-associated h
ucagugguugccau

SEQ ID NO: 350997 - RNA, 23 nt, Human herpesvirus 8 (Kaposi`s sarcoma-associated h
ucaguucgaccaccccugcaccu

SEQ ID NO: 350998 - RNA, 17 nt, Human herpesvirus 8 (Kaposi`s sarcoma-associated h
ucauaacacagucacag

SEQ ID NO: 350999 - RNA, 22 nt, Human herpesvirus 8 (Kaposi`s sarcoma-associated h
ucaucccgccgguugguggugu

SEQ ID NO: 351000 - RNA, 13 nt, Human herpesvirus 8 (Kaposi`s sarcoma-associated h
ucaucguagcuca

SEQ ID NO: 351001 - RNA, 23 nt, Human herpesvirus 8 (Kaposi`s sarcoma-associated h
ucaucuacccugauuagcacugu

SEQ ID NO: 351002 - RNA, 15 nt, Human herpesvirus 8 (Kaposi`s sarcoma-associated h
ucaucuucauucucu

SEQ ID NO: 351003 - RNA, 20 nt, Human herpesvirus 8 (Kaposi`s sarcoma-associated h
ucaugauuacagagucacaa

SEQ ID NO: 351004 - RNA, 13 nt, Human herpesvirus 8 (Kaposi`s sarcoma-associated h
ucaugggaccgug

SEQ ID NO: 351005 - RNA, 22 nt, Human herpesvirus 8 (Kaposi`s sarcoma-associated h
ucauguaccuggcguccagcua

SEQ ID NO: 351006 - RNA, 20 nt, Human herpesvirus 8 (Kaposi`s sarcoma-associated h
ucauguacgucguaagccag

SEQ ID NO: 351007 - RNA, 18 nt, Human herpesvirus 8 (Kaposi`s sarcoma-associated h
ucauuaaaccuacugccu

SEQ ID NO: 351008 - RNA, 13 nt, Human herpesvirus 8 (Kaposi`s sarcoma-associated h
ucauuaaacgaca

SEQ ID NO: 351009 - RNA, 13 nt, Human herpesvirus 8 (Kaposi`s sarcoma-associated h
ucauuagugacau

SEQ ID NO: 351010 - RNA, 14 nt, Human herpesvirus 8 (Kaposi`s sarcoma-associated h
ucauuagugacaua

SEQ ID NO: 351011 - RNA, 16 nt, Human herpesvirus 8 (Kaposi`s sarcoma-associated h
ucauuagugacauaca

SEQ ID NO: 351012 - RNA, 18 nt, Human herpesvirus 8 (Kaposi`s sarcoma-associated h
ucauuaugcaugcaauac

SEQ ID NO: 351013 - RNA, 19 nt, Human herpesvirus 8 (Kaposi`s sarcoma-associated h
ucauucacccgagccacau

SEQ ID NO: 351014 - RNA, 20 nt, Human herpesvirus 8 (Kaposi`s sarcoma-associated h
uccacauggcagcugaauca

SEQ ID NO: 351015 - RNA, 14 nt, Human herpesvirus 8 (Kaposi`s sarcoma-associated h
uccacggaguccau

SEQ ID NO: 351016 - RNA, 23 nt, Human herpesvirus 8 (Kaposi`s sarcoma-associated h
uccacggugucguguaugccaau

SEQ ID NO: 351017 - RNA, 21 nt, Human herpesvirus 8 (Kaposi`s sarcoma-associated h
uccagacucuucgcugaugaa

SEQ ID NO: 351018 - RNA, 17 nt, Human herpesvirus 8 (Kaposi`s sarcoma-associated h
uccagacugguccaagc

SEQ ID NO: 351019 - RNA, 18 nt, Human herpesvirus 8 (Kaposi`s sarcoma-associated h
uccagaguuuuaugggcu

SEQ ID NO: 351020 - RNA, 19 nt, Human herpesvirus 8 (Kaposi`s sarcoma-associated h
uccagaguuuuaugggcuc

SEQ ID NO: 351021 - RNA, 13 nt, Human herpesvirus 8 (Kaposi`s sarcoma-associated h
uccagcaaagcac

SEQ ID NO: 351022 - RNA, 14 nt, Human herpesvirus 8 (Kaposi`s sarcoma-associated h
uccagcaaagcaca

SEQ ID NO: 351023 - RNA, 16 nt, Human herpesvirus 8 (Kaposi`s sarcoma-associated h
uccagccacaucagcu

SEQ ID NO: 351024 - RNA, 18 nt, Human herpesvirus 8 (Kaposi`s sarcoma-associated h
uccaggagcgacuggauc

SEQ ID NO: 351025 - RNA, 17 nt, Human herpesvirus 8 (Kaposi`s sarcoma-associated h
uccagggacaucaccuc

SEQ ID NO: 351026 - RNA, 23 nt, Human herpesvirus 8 (Kaposi`s sarcoma-associated h
uccaguguuagacagggcuauga

SEQ ID NO: 351027 - RNA, 23 nt, Human herpesvirus 8 (Kaposi`s sarcoma-associated h
uccauaugaggccaagugcauug

SEQ ID NO: 351028 - RNA, 22 nt, Human herpesvirus 8 (Kaposi`s sarcoma-associated h
uccauggcuucuauaagcaccu

SEQ ID NO: 351029 - RNA, 22 nt, Human herpesvirus 8 (Kaposi`s sarcoma-associated h
uccauugcacucagaacauaaa

SEQ ID NO: 351030 - RNA, 13 nt, Human herpesvirus 8 (Kaposi`s sarcoma-associated h
ucccaaaccacac

SEQ ID NO: 351031 - RNA, 16 nt, Human herpesvirus 8 (Kaposi`s sarcoma-associated h
ucccaaagagugucag

SEQ ID NO: 351032 - RNA, 12 nt, Human herpesvirus 8 (Kaposi`s sarcoma-associated h
ucccaacaugua

SEQ ID NO: 351033 - RNA, 20 nt, Human herpesvirus 8 (Kaposi`s sarcoma-associated h
ucccaggcaggaguauauca

SEQ ID NO: 351034 - RNA, 14 nt, Human herpesvirus 8 (Kaposi`s sarcoma-associated h
ucccagugccucag

SEQ ID NO: 351035 - RNA, 13 nt, Human herpesvirus 8 (Kaposi`s sarcoma-associated h
ucccaugaugcag

SEQ ID NO: 351036 - RNA, 21 nt, Human herpesvirus 8 (Kaposi`s sarcoma-associated h
uccccaacaagacaguuguga

SEQ ID NO: 351037 - RNA, 19 nt, Human herpesvirus 8 (Kaposi`s sarcoma-associated h
uccccgggaacggacaauu

SEQ ID NO: 351038 - RNA, 16 nt, Human herpesvirus 8 (Kaposi`s sarcoma-associated h
uccccgucuccaguca

SEQ ID NO: 351039 - RNA, 17 nt, Human herpesvirus 8 (Kaposi`s sarcoma-associated h
uccccuaaaaguucuau

SEQ ID NO: 351040 - RNA, 14 nt, Human herpesvirus 8 (Kaposi`s sarcoma-associated h
uccccugcaaugca

SEQ ID NO: 351041 - RNA, 15 nt, Human herpesvirus 8 (Kaposi`s sarcoma-associated h
uccccugcacaacau

SEQ ID NO: 351042 - RNA, 23 nt, Human herpesvirus 8 (Kaposi`s sarcoma-associated h
ucccuaagcgggacgcacuugau

SEQ ID NO: 351043 - RNA, 14 nt, Human herpesvirus 8 (Kaposi`s sarcoma-associated h
ucccuagaagccac

SEQ ID NO: 351044 - RNA, 14 nt, Human herpesvirus 8 (Kaposi`s sarcoma-associated h
ucccucacaaugua

SEQ ID NO: 351045 - RNA, 15 nt, Human herpesvirus 8 (Kaposi`s sarcoma-associated h
ucccuccugcauuug

SEQ ID NO: 351046 - RNA, 19 nt, Human herpesvirus 8 (Kaposi`s sarcoma-associated h
ucccucuuggcuguuacaa

SEQ ID NO: 351047 - RNA, 13 nt, Human herpesvirus 8 (Kaposi`s sarcoma-associated h
ucccuuugucuua

SEQ ID NO: 351048 - RNA, 16 nt, Human herpesvirus 8 (Kaposi`s sarcoma-associated h
uccgagcaccucagaa

SEQ ID NO: 351049 - RNA, 23 nt, Human herpesvirus 8 (Kaposi`s sarcoma-associated h
uccgaggaucugugugugaagca

SEQ ID NO: 351050 - RNA, 12 nt, Human herpesvirus 8 (Kaposi`s sarcoma-associated h
uccgcaauguca

SEQ ID NO: 351051 - RNA, 17 nt, Human herpesvirus 8 (Kaposi`s sarcoma-associated h
uccgcauuaaagcacuc

SEQ ID NO: 351052 - RNA, 14 nt, Human herpesvirus 8 (Kaposi`s sarcoma-associated h
uccgcgaacacgga

SEQ ID NO: 351053 - RNA, 21 nt, Human herpesvirus 8 (Kaposi`s sarcoma-associated h
uccggacucgucuacccugcc

SEQ ID NO: 351054 - RNA, 17 nt, Human herpesvirus 8 (Kaposi`s sarcoma-associated h
uccgguggcaacauaca

SEQ ID NO: 351055 - RNA, 20 nt, Human herpesvirus 8 (Kaposi`s sarcoma-associated h
uccguauuucugcauuguag

SEQ ID NO: 351056 - RNA, 22 nt, Human herpesvirus 8 (Kaposi`s sarcoma-associated h
uccguauuucugcauuguagug

SEQ ID NO: 351057 - RNA, 16 nt, Human herpesvirus 8 (Kaposi`s sarcoma-associated h
uccguuuggacacucc

SEQ ID NO: 351058 - RNA, 19 nt, Human herpesvirus 8 (Kaposi`s sarcoma-associated h
uccguuuggacacuccuca

SEQ ID NO: 351059 - RNA, 13 nt, Human herpesvirus 8 (Kaposi`s sarcoma-associated h
uccuaaacaagga

SEQ ID NO: 351060 - RNA, 19 nt, Human herpesvirus 8 (Kaposi`s sarcoma-associated h
uccuagaaugaagugcaac

SEQ ID NO: 351061 - RNA, 20 nt, Human herpesvirus 8 (Kaposi`s sarcoma-associated h
uccuaggugggugugcauuu

SEQ ID NO: 351062 - RNA, 16 nt, Human herpesvirus 8 (Kaposi`s sarcoma-associated h
uccucgucuacaacag

SEQ ID NO: 351063 - RNA, 17 nt, Human herpesvirus 8 (Kaposi`s sarcoma-associated h
uccucuaucagcugcag

SEQ ID NO: 351064 - RNA, 21 nt, Human herpesvirus 8 (Kaposi`s sarcoma-associated h
uccucuccgcauuaaagcacu

SEQ ID NO: 351065 - RNA, 23 nt, Human herpesvirus 8 (Kaposi`s sarcoma-associated h
uccucugccuaaagagggauccc

SEQ ID NO: 351066 - RNA, 16 nt, Human herpesvirus 8 (Kaposi`s sarcoma-associated h
uccugcauuuggacac

SEQ ID NO: 351067 - RNA, 20 nt, Human herpesvirus 8 (Kaposi`s sarcoma-associated h
uccugugggcuaacuugccg

SEQ ID NO: 351068 - RNA, 23 nt, Human herpesvirus 8 (Kaposi`s sarcoma-associated h
ucgaaaaaaauaaugcagacaga

SEQ ID NO: 351069 - RNA, 15 nt, Human herpesvirus 8 (Kaposi`s sarcoma-associated h
ucgauauguccuuca

SEQ ID NO: 351070 - RNA, 19 nt, Human herpesvirus 8 (Kaposi`s sarcoma-associated h
ucgcaugaauacccuggau

SEQ ID NO: 351071 - RNA, 17 nt, Human herpesvirus 8 (Kaposi`s sarcoma-associated h
ucgccucccaacaugua

SEQ ID NO: 351072 - RNA, 18 nt, Human herpesvirus 8 (Kaposi`s sarcoma-associated h
ucgccucccaacauguaa

SEQ ID NO: 351073 - RNA, 15 nt, Human herpesvirus 8 (Kaposi`s sarcoma-associated h
ucgcgaaaaugcacu

SEQ ID NO: 351074 - RNA, 16 nt, Human herpesvirus 8 (Kaposi`s sarcoma-associated h
ucgcgaccgcugccaa

SEQ ID NO: 351075 - RNA, 23 nt, Human herpesvirus 8 (Kaposi`s sarcoma-associated h
ucgcuggcccaaacuagcagaga

SEQ ID NO: 351076 - RNA, 17 nt, Human herpesvirus 8 (Kaposi`s sarcoma-associated h
ucggaauguaagcugcu

SEQ ID NO: 351077 - RNA, 15 nt, Human herpesvirus 8 (Kaposi`s sarcoma-associated h
ucggaucuuuuacaa

SEQ ID NO: 351078 - RNA, 14 nt, Human herpesvirus 8 (Kaposi`s sarcoma-associated h
ucggcaacauucaa

SEQ ID NO: 351079 - RNA, 17 nt, Human herpesvirus 8 (Kaposi`s sarcoma-associated h
ucggcggugcaugugac

SEQ ID NO: 351080 - RNA, 16 nt, Human herpesvirus 8 (Kaposi`s sarcoma-associated h
ucgguacugcgcauuu

SEQ ID NO: 351081 - RNA, 16 nt, Human herpesvirus 8 (Kaposi`s sarcoma-associated h
ucggugccuucacaua

SEQ ID NO: 351082 - RNA, 15 nt, Human herpesvirus 8 (Kaposi`s sarcoma-associated h
ucgguggguggcuug

SEQ ID NO: 351083 - RNA, 20 nt, Human herpesvirus 8 (Kaposi`s sarcoma-associated h
ucgguucuguguuugucuga

SEQ ID NO: 351084 - RNA, 15 nt, Human herpesvirus 8 (Kaposi`s sarcoma-associated h
ucguccgacaugugc

SEQ ID NO: 351085 - RNA, 22 nt, Human herpesvirus 8 (Kaposi`s sarcoma-associated h
ucguccgggagaaccaugccag

SEQ ID NO: 351086 - RNA, 15 nt, Human herpesvirus 8 (Kaposi`s sarcoma-associated h
ucgucgagcacuccu

SEQ ID NO: 351087 - RNA, 17 nt, Human herpesvirus 8 (Kaposi`s sarcoma-associated h
ucgucuacaacagacuu

SEQ ID NO: 351088 - RNA, 18 nt, Human herpesvirus 8 (Kaposi`s sarcoma-associated h
ucgucuacccugccacuc

SEQ ID NO: 351089 - RNA, 13 nt, Human herpesvirus 8 (Kaposi`s sarcoma-associated h
ucgucugugucac

SEQ ID NO: 351090 - RNA, 15 nt, Human herpesvirus 8 (Kaposi`s sarcoma-associated h
ucgugacggugacau

SEQ ID NO: 351091 - RNA, 23 nt, Human herpesvirus 8 (Kaposi`s sarcoma-associated h
ucgugcaaaagagacacuaucuc

SEQ ID NO: 351092 - RNA, 13 nt, Human herpesvirus 8 (Kaposi`s sarcoma-associated h
ucgugcagccuug

SEQ ID NO: 351093 - RNA, 16 nt, Human herpesvirus 8 (Kaposi`s sarcoma-associated h
ucgugcagccuugcau

SEQ ID NO: 351094 - RNA, 22 nt, Human herpesvirus 8 (Kaposi`s sarcoma-associated h
ucgugggagcggguugucuaca

SEQ ID NO: 351095 - RNA, 22 nt, Human herpesvirus 8 (Kaposi`s sarcoma-associated h
ucguugcuacggaucaugcucu

SEQ ID NO: 351096 - RNA, 17 nt, Human herpesvirus 8 (Kaposi`s sarcoma-associated h
ucuaaauauucucuaua

SEQ ID NO: 351097 - RNA, 19 nt, Human herpesvirus 8 (Kaposi`s sarcoma-associated h
ucuaaggcccccaccaaac

SEQ ID NO: 351098 - RNA, 21 nt, Human herpesvirus 8 (Kaposi`s sarcoma-associated h
ucuaauaaacaagcuaccugc

SEQ ID NO: 351099 - RNA, 16 nt, Human herpesvirus 8 (Kaposi`s sarcoma-associated h
ucuaaucuggcaugua

SEQ ID NO: 351100 - RNA, 22 nt, Human herpesvirus 8 (Kaposi`s sarcoma-associated h
ucuacagguaggccacauacgc

SEQ ID NO: 351101 - RNA, 15 nt, Human herpesvirus 8 (Kaposi`s sarcoma-associated h
ucuacccugccacuc

SEQ ID NO: 351102 - RNA, 15 nt, Human herpesvirus 8 (Kaposi`s sarcoma-associated h
ucuaccucaacugaa

SEQ ID NO: 351103 - RNA, 20 nt, Human herpesvirus 8 (Kaposi`s sarcoma-associated h
ucuaccugccggacacugaa

SEQ ID NO: 351104 - RNA, 23 nt, Human herpesvirus 8 (Kaposi`s sarcoma-associated h
ucuacgcggcuaggcacccggaa

SEQ ID NO: 351105 - RNA, 18 nt, Human herpesvirus 8 (Kaposi`s sarcoma-associated h
ucuagagcccgcugcuau

SEQ ID NO: 351106 - RNA, 19 nt, Human herpesvirus 8 (Kaposi`s sarcoma-associated h
ucuagcauaugcugccaag

SEQ ID NO: 351107 - RNA, 18 nt, Human herpesvirus 8 (Kaposi`s sarcoma-associated h
ucuagucguuguaguggu

SEQ ID NO: 351108 - RNA, 14 nt, Human herpesvirus 8 (Kaposi`s sarcoma-associated h
ucuauaagcaccuu

SEQ ID NO: 351109 - RNA, 17 nt, Human herpesvirus 8 (Kaposi`s sarcoma-associated h
ucuaucucgccggugua

SEQ ID NO: 351110 - RNA, 16 nt, Human herpesvirus 8 (Kaposi`s sarcoma-associated h
ucuaucucugguggug

SEQ ID NO: 351111 - RNA, 16 nt, Human herpesvirus 8 (Kaposi`s sarcoma-associated h
ucuauuuaaggcaguc

SEQ ID NO: 351112 - RNA, 21 nt, Human herpesvirus 8 (Kaposi`s sarcoma-associated h
ucucacgacccaucuaccuca

SEQ ID NO: 351113 - RNA, 14 nt, Human herpesvirus 8 (Kaposi`s sarcoma-associated h
ucucauaacuagug

SEQ ID NO: 351114 - RNA, 16 nt, Human herpesvirus 8 (Kaposi`s sarcoma-associated h
ucuccagaagagcauu

SEQ ID NO: 351115 - RNA, 21 nt, Human herpesvirus 8 (Kaposi`s sarcoma-associated h
ucuccagaucacccagugugc

SEQ ID NO: 351116 - RNA, 14 nt, Human herpesvirus 8 (Kaposi`s sarcoma-associated h
ucucccaaaccaca

SEQ ID NO: 351117 - RNA, 22 nt, Human herpesvirus 8 (Kaposi`s sarcoma-associated h
ucuccgccagggacgccgauag

SEQ ID NO: 351118 - RNA, 13 nt, Human herpesvirus 8 (Kaposi`s sarcoma-associated h
ucucugguggugg

SEQ ID NO: 351119 - RNA, 17 nt, Human herpesvirus 8 (Kaposi`s sarcoma-associated h
ucugauucugacagaca

SEQ ID NO: 351120 - RNA, 20 nt, Human herpesvirus 8 (Kaposi`s sarcoma-associated h
ucugauucuuagauaguguu

SEQ ID NO: 351121 - RNA, 21 nt, Human herpesvirus 8 (Kaposi`s sarcoma-associated h
ucugcugcaucacgccauacc

SEQ ID NO: 351122 - RNA, 18 nt, Human herpesvirus 8 (Kaposi`s sarcoma-associated h
ucuggauacacuacuuau

SEQ ID NO: 351123 - RNA, 19 nt, Human herpesvirus 8 (Kaposi`s sarcoma-associated h
ucuggcuggcgcucagggu

SEQ ID NO: 351124 - RNA, 14 nt, Human herpesvirus 8 (Kaposi`s sarcoma-associated h
ucuggucgcugcca

SEQ ID NO: 351125 - RNA, 16 nt, Human herpesvirus 8 (Kaposi`s sarcoma-associated h
ucuguaaaacacuguu

SEQ ID NO: 351126 - RNA, 23 nt, Human herpesvirus 8 (Kaposi`s sarcoma-associated h
ucugucgucucuuccaggguuga

SEQ ID NO: 351127 - RNA, 14 nt, Human herpesvirus 8 (Kaposi`s sarcoma-associated h
ucugugucacuccc

SEQ ID NO: 351128 - RNA, 15 nt, Human herpesvirus 8 (Kaposi`s sarcoma-associated h
ucuguguuugucuga

SEQ ID NO: 351129 - RNA, 13 nt, Human herpesvirus 8 (Kaposi`s sarcoma-associated h
ucuguuacuggca

SEQ ID NO: 351130 - RNA, 17 nt, Human herpesvirus 8 (Kaposi`s sarcoma-associated h
ucuguugaaugugauca

SEQ ID NO: 351131 - RNA, 13 nt, Human herpesvirus 8 (Kaposi`s sarcoma-associated h
ucuguugccaggc

SEQ ID NO: 351132 - RNA, 21 nt, Human herpesvirus 8 (Kaposi`s sarcoma-associated h
ucuuacuaagagaacagcaca

SEQ ID NO: 351133 - RNA, 17 nt, Human herpesvirus 8 (Kaposi`s sarcoma-associated h
ucuuaggacacugaugu

SEQ ID NO: 351134 - RNA, 17 nt, Human herpesvirus 8 (Kaposi`s sarcoma-associated h
ucuuagucuuacuguca

SEQ ID NO: 351135 - RNA, 15 nt, Human herpesvirus 8 (Kaposi`s sarcoma-associated h
ucuuccuccuaguca

SEQ ID NO: 351136 - RNA, 16 nt, Human herpesvirus 8 (Kaposi`s sarcoma-associated h
ucuucuguugccaggc

SEQ ID NO: 351137 - RNA, 12 nt, Human herpesvirus 8 (Kaposi`s sarcoma-associated h
ucuucuugucac

SEQ ID NO: 351138 - RNA, 23 nt, Human herpesvirus 8 (Kaposi`s sarcoma-associated h
ucuugcgcgaccugcuucacuua

SEQ ID NO: 351139 - RNA, 20 nt, Human herpesvirus 8 (Kaposi`s sarcoma-associated h
ucuugcugcauaaagucaug

SEQ ID NO: 351140 - RNA, 14 nt, Human herpesvirus 8 (Kaposi`s sarcoma-associated h
ucuuggcuguuaca

SEQ ID NO: 351141 - RNA, 13 nt, Human herpesvirus 8 (Kaposi`s sarcoma-associated h
ucuuuauugauau

SEQ ID NO: 351142 - RNA, 19 nt, Human herpesvirus 8 (Kaposi`s sarcoma-associated h
ucuuugcgguccacucuau

SEQ ID NO: 351143 - RNA, 19 nt, Human herpesvirus 8 (Kaposi`s sarcoma-associated h
ucuuuggggcuacacauca

SEQ ID NO: 351144 - RNA, 19 nt, Human herpesvirus 8 (Kaposi`s sarcoma-associated h
ugaaacaauaaugauuaaa

SEQ ID NO: 351145 - RNA, 11 nt, Human herpesvirus 8 (Kaposi`s sarcoma-associated h
ugaaacauucg

SEQ ID NO: 351146 - RNA, 16 nt, Human herpesvirus 8 (Kaposi`s sarcoma-associated h
ugaaacuaccagccau

SEQ ID NO: 351147 - RNA, 14 nt, Human herpesvirus 8 (Kaposi`s sarcoma-associated h
uaaccgcuaaggga

SEQ ID NO: 351148 - RNA, 16 nt, Human herpesvirus 8 (Kaposi`s sarcoma-associated h
uaaccgugcuacuuac

SEQ ID NO: 351149 - RNA, 19 nt, Human herpesvirus 8 (Kaposi`s sarcoma-associated h
uaaccuaaaaaaugugcau

SEQ ID NO: 351150 - RNA, 20 nt, Human herpesvirus 8 (Kaposi`s sarcoma-associated h
uaaccuguccaugucgcaca

SEQ ID NO: 351151 - RNA, 19 nt, Human herpesvirus 8 (Kaposi`s sarcoma-associated h
uaacgccugcaccucuauc

SEQ ID NO: 351152 - RNA, 19 nt, Human herpesvirus 8 (Kaposi`s sarcoma-associated h
uaacggagaaaugaucaug

SEQ ID NO: 351153 - RNA, 19 nt, Human herpesvirus 8 (Kaposi`s sarcoma-associated h
uaacggcuucggcauuauu

SEQ ID NO: 351154 - RNA, 16 nt, Human herpesvirus 8 (Kaposi`s sarcoma-associated h
uaacucacguagccuu

SEQ ID NO: 351155 - RNA, 17 nt, Human herpesvirus 8 (Kaposi`s sarcoma-associated h
uaacuguuuacugcugu

SEQ ID NO: 351156 - RNA, 14 nt, Human herpesvirus 8 (Kaposi`s sarcoma-associated h
uaacuucaccucca

SEQ ID NO: 351157 - RNA, 18 nt, Human herpesvirus 8 (Kaposi`s sarcoma-associated h
uaacuuuauuacagguau

SEQ ID NO: 351158 - RNA, 16 nt, Human herpesvirus 8 (Kaposi`s sarcoma-associated h
uaagacaaacacugug

SEQ ID NO: 351159 - RNA, 15 nt, Human herpesvirus 8 (Kaposi`s sarcoma-associated h
uaagagcacacugug

SEQ ID NO: 351160 - RNA, 15 nt, Human herpesvirus 8 (Kaposi`s sarcoma-associated h
uaagcugcauacaua

SEQ ID NO: 351161 - RNA, 17 nt, Human herpesvirus 8 (Kaposi`s sarcoma-associated h
uaaggcccccaccaaac

SEQ ID NO: 351162 - RNA, 17 nt, Human herpesvirus 8 (Kaposi`s sarcoma-associated h
uaagggaagcaaaacac

SEQ ID NO: 351163 - RNA, 20 nt, Human herpesvirus 8 (Kaposi`s sarcoma-associated h
uaaggggauuacuguccauu

SEQ ID NO: 351164 - RNA, 15 nt, Human herpesvirus 8 (Kaposi`s sarcoma-associated h
uaauaaagucauuaa

SEQ ID NO: 351165 - RNA, 13 nt, Human herpesvirus 8 (Kaposi`s sarcoma-associated h
uaauaaauugcuu

SEQ ID NO: 351166 - RNA, 13 nt, Human herpesvirus 8 (Kaposi`s sarcoma-associated h
uaauacauaacac

SEQ ID NO: 351167 - RNA, 18 nt, Human herpesvirus 8 (Kaposi`s sarcoma-associated h
uaauuggauauagacuua

SEQ ID NO: 351168 - RNA, 23 nt, Human herpesvirus 8 (Kaposi`s sarcoma-associated h
uaauuuuugguccguagaaugua

SEQ ID NO: 351169 - RNA, 13 nt, Human herpesvirus 8 (Kaposi`s sarcoma-associated h
uacaaaaacacaa

SEQ ID NO: 351170 - RNA, 18 nt, Human herpesvirus 8 (Kaposi`s sarcoma-associated h
uacaaacaacauaaacau

SEQ ID NO: 351171 - RNA, 22 nt, Human herpesvirus 8 (Kaposi`s sarcoma-associated h
uacaacagacuuuucccauuuc

SEQ ID NO: 351172 - RNA, 14 nt, Human herpesvirus 8 (Kaposi`s sarcoma-associated h
uacaagacaacuaa

SEQ ID NO: 351173 - RNA, 20 nt, Human herpesvirus 8 (Kaposi`s sarcoma-associated h
uacaauaaagcugagccaca

SEQ ID NO: 351174 - RNA, 15 nt, Human herpesvirus 8 (Kaposi`s sarcoma-associated h
uacacccacauacac

SEQ ID NO: 351175 - RNA, 16 nt, Human herpesvirus 8 (Kaposi`s sarcoma-associated h
uacacccucacguguu

SEQ ID NO: 351176 - RNA, 14 nt, Human herpesvirus 8 (Kaposi`s sarcoma-associated h
uacagaaaaccaua

SEQ ID NO: 351177 - RNA, 18 nt, Human herpesvirus 8 (Kaposi`s sarcoma-associated h
uacagggguaucacuucc

SEQ ID NO: 351178 - RNA, 19 nt, Human herpesvirus 8 (Kaposi`s sarcoma-associated h
uacagggguaucacuuccu

SEQ ID NO: 351179 - RNA, 16 nt, Human herpesvirus 8 (Kaposi`s sarcoma-associated h
uacauaacacacacaa

SEQ ID NO: 351180 - RNA, 21 nt, Human herpesvirus 8 (Kaposi`s sarcoma-associated h
uacaugugacugaacauggag

SEQ ID NO: 351181 - RNA, 19 nt, Human herpesvirus 8 (Kaposi`s sarcoma-associated h
uacauuaaaaggacauugu

SEQ ID NO: 351182 - RNA, 15 nt, Human herpesvirus 8 (Kaposi`s sarcoma-associated h
uacauuugacaacac

SEQ ID NO: 351183 - RNA, 17 nt, Human herpesvirus 8 (Kaposi`s sarcoma-associated h
uacccuggaucagggaa

SEQ ID NO: 351184 - RNA, 14 nt, Human herpesvirus 8 (Kaposi`s sarcoma-associated h
uaccgggucugugc

SEQ ID NO: 351185 - RNA, 19 nt, Human herpesvirus 8 (Kaposi`s sarcoma-associated h
uaccucaacccacacuggc

SEQ ID NO: 351186 - RNA, 20 nt, Human herpesvirus 8 (Kaposi`s sarcoma-associated h
uaccucaacccacacuggcc

SEQ ID NO: 351187 - RNA, 18 nt, Human herpesvirus 8 (Kaposi`s sarcoma-associated h
uaccucaacugaacacac

SEQ ID NO: 351188 - RNA, 16 nt, Human herpesvirus 8 (Kaposi`s sarcoma-associated h
uaccugaccugaccag

SEQ ID NO: 351189 - RNA, 18 nt, Human herpesvirus 8 (Kaposi`s sarcoma-associated h
uaccuuauccgcuagcca

SEQ ID NO: 351190 - RNA, 12 nt, Human herpesvirus 8 (Kaposi`s sarcoma-associated h
uacgcagggugc

SEQ ID NO: 351191 - RNA, 20 nt, Human herpesvirus 8 (Kaposi`s sarcoma-associated h
uacgugaguuacauggaaua

SEQ ID NO: 351192 - RNA, 23 nt, Human herpesvirus 8 (Kaposi`s sarcoma-associated h
uacuaagagaacagcacauaugu

SEQ ID NO: 351193 - RNA, 17 nt, Human herpesvirus 8 (Kaposi`s sarcoma-associated h
uacuaauguaaccuaaa

SEQ ID NO: 351194 - RNA, 12 nt, Human herpesvirus 8 (Kaposi`s sarcoma-associated h
uacuacagguau

SEQ ID NO: 351195 - RNA, 15 nt, Human herpesvirus 8 (Kaposi`s sarcoma-associated h
uacuacagguauacu

SEQ ID NO: 351196 - RNA, 17 nt, Human herpesvirus 8 (Kaposi`s sarcoma-associated h
uacuacagguauacuca

SEQ ID NO: 351197 - RNA, 19 nt, Human herpesvirus 8 (Kaposi`s sarcoma-associated h
uacuacagguauacucaag

SEQ ID NO: 351198 - RNA, 14 nt, Human herpesvirus 8 (Kaposi`s sarcoma-associated h
uacuagcaccacua

SEQ ID NO: 351199 - RNA, 23 nt, Human herpesvirus 8 (Kaposi`s sarcoma-associated h
uacuauaaacagccuuggugcua

SEQ ID NO: 351200 - RNA, 14 nt, Human herpesvirus 8 (Kaposi`s sarcoma-associated h
uacucaaaugggaa

SEQ ID NO: 351201 - RNA, 16 nt, Human herpesvirus 8 (Kaposi`s sarcoma-associated h
uacucccccuccucag

SEQ ID NO: 351202 - RNA, 13 nt, Human herpesvirus 8 (Kaposi`s sarcoma-associated h
uacugccagaccc

SEQ ID NO: 351203 - RNA, 15 nt, Human herpesvirus 8 (Kaposi`s sarcoma-associated h
uacuggacguggcca

SEQ ID NO: 351204 - RNA, 16 nt, Human herpesvirus 8 (Kaposi`s sarcoma-associated h
uacugugaaguuuaca

SEQ ID NO: 351205 - RNA, 16 nt, Human herpesvirus 8 (Kaposi`s sarcoma-associated h
uacuuaacuguuuacu

SEQ ID NO: 351206 - RNA, 12 nt, Human herpesvirus 8 (Kaposi`s sarcoma-associated h
uagaaacaaagc

SEQ ID NO: 351207 - RNA, 21 nt, Human herpesvirus 8 (Kaposi`s sarcoma-associated h
uagaaacaaagcacuggcugc

SEQ ID NO: 351208 - RNA, 23 nt, Human herpesvirus 8 (Kaposi`s sarcoma-associated h
uagaaaccccgcccccuggugcu

SEQ ID NO: 351209 - RNA, 17 nt, Human herpesvirus 8 (Kaposi`s sarcoma-associated h
uagaacuaaccacucau

SEQ ID NO: 351210 - RNA, 20 nt, Human herpesvirus 8 (Kaposi`s sarcoma-associated h
uagaagaaaaggaugcacaa

SEQ ID NO: 351211 - RNA, 19 nt, Human herpesvirus 8 (Kaposi`s sarcoma-associated h
uagaaucaaugugguucua

SEQ ID NO: 351212 - RNA, 15 nt, Human herpesvirus 8 (Kaposi`s sarcoma-associated h
uagaaugaagugcaa

SEQ ID NO: 351213 - RNA, 22 nt, Human herpesvirus 8 (Kaposi`s sarcoma-associated h
uagacgcaggcgccuaugacua

SEQ ID NO: 351214 - RNA, 16 nt, Human herpesvirus 8 (Kaposi`s sarcoma-associated h
uagacuuucuaaaggu

SEQ ID NO: 351215 - RNA, 22 nt, Human herpesvirus 8 (Kaposi`s sarcoma-associated h
uagaucuggauacacuacuuau

SEQ ID NO: 351216 - RNA, 15 nt, Human herpesvirus 8 (Kaposi`s sarcoma-associated h
uagaugaaugucuca

SEQ ID NO: 351217 - RNA, 14 nt, Human herpesvirus 8 (Kaposi`s sarcoma-associated h
uagauugacuggaa

SEQ ID NO: 351218 - RNA, 18 nt, Human herpesvirus 8 (Kaposi`s sarcoma-associated h
uagauuuaguacguggua

SEQ ID NO: 351219 - RNA, 15 nt, Human herpesvirus 8 (Kaposi`s sarcoma-associated h
uagcagauauaaaca

SEQ ID NO: 351220 - RNA, 18 nt, Human herpesvirus 8 (Kaposi`s sarcoma-associated h
uagcauccuaucgcacag

SEQ ID NO: 351221 - RNA, 21 nt, Human herpesvirus 8 (Kaposi`s sarcoma-associated h
uagcauccuaucgcacagaca

SEQ ID NO: 351222 - RNA, 15 nt, Human herpesvirus 8 (Kaposi`s sarcoma-associated h
uagcaugcugaugau

SEQ ID NO: 351223 - RNA, 21 nt, Human herpesvirus 8 (Kaposi`s sarcoma-associated h
uagccauccauuauagcacac

SEQ ID NO: 351224 - RNA, 18 nt, Human herpesvirus 8 (Kaposi`s sarcoma-associated h
uagccggugaaacagaua

SEQ ID NO: 351225 - RNA, 17 nt, Human herpesvirus 8 (Kaposi`s sarcoma-associated h
uagcuacaaauguuuua

SEQ ID NO: 351226 - RNA, 12 nt, Human herpesvirus 8 (Kaposi`s sarcoma-associated h
uaggaccuuucu

SEQ ID NO: 351227 - RNA, 16 nt, Human herpesvirus 8 (Kaposi`s sarcoma-associated h
uaggauucgugcagcc

SEQ ID NO: 351228 - RNA, 21 nt, Human herpesvirus 8 (Kaposi`s sarcoma-associated h
uaggauucgugcagccuugca

SEQ ID NO: 351229 - RNA, 18 nt, Human herpesvirus 8 (Kaposi`s sarcoma-associated h
uaggccaauacugcccaa

SEQ ID NO: 351230 - RNA, 20 nt, Human herpesvirus 8 (Kaposi`s sarcoma-associated h
uaggggcacccuauccauca

SEQ ID NO: 351231 - RNA, 15 nt, Human herpesvirus 8 (Kaposi`s sarcoma-associated h
uagguagauugacug

SEQ ID NO: 351232 - RNA, 11 nt, Human herpesvirus 8 (Kaposi`s sarcoma-associated h
uaggugucaag

SEQ ID NO: 351233 - RNA, 14 nt, Human herpesvirus 8 (Kaposi`s sarcoma-associated h
uagucguuguagug

SEQ ID NO: 351234 - RNA, 21 nt, Human herpesvirus 8 (Kaposi`s sarcoma-associated h
uagugaaacccccugugccuu

SEQ ID NO: 351235 - RNA, 13 nt, Human herpesvirus 8 (Kaposi`s sarcoma-associated h
uauaaacauggca

SEQ ID NO: 351236 - RNA, 16 nt, Human herpesvirus 8 (Kaposi`s sarcoma-associated h
uauaacagcaacaugu

SEQ ID NO: 351237 - RNA, 17 nt, Human herpesvirus 8 (Kaposi`s sarcoma-associated h
uauaacagcaacauguu

SEQ ID NO: 351238 - RNA, 14 nt, Human herpesvirus 8 (Kaposi`s sarcoma-associated h
uauaacagugcucu

SEQ ID NO: 351239 - RNA, 23 nt, Human herpesvirus 8 (Kaposi`s sarcoma-associated h
uauaaggacaagucccagcaaua

SEQ ID NO: 351240 - RNA, 15 nt, Human herpesvirus 8 (Kaposi`s sarcoma-associated h
uauaaguuaaaccaa

SEQ ID NO: 351241 - RNA, 21 nt, Human herpesvirus 8 (Kaposi`s sarcoma-associated h
uauaauggucuguauugacac

SEQ ID NO: 351242 - RNA, 23 nt, Human herpesvirus 8 (Kaposi`s sarcoma-associated h
uauacacaaaugaaaugagucag

SEQ ID NO: 351243 - RNA, 22 nt, Human herpesvirus 8 (Kaposi`s sarcoma-associated h
uauacagguaaaacggccaaag

SEQ ID NO: 351244 - RNA, 17 nt, Human herpesvirus 8 (Kaposi`s sarcoma-associated h
uauacagguguccaaga

SEQ ID NO: 351245 - RNA, 16 nt, Human herpesvirus 8 (Kaposi`s sarcoma-associated h
uauacucccucccaua

SEQ ID NO: 351246 - RNA, 15 nt, Human herpesvirus 8 (Kaposi`s sarcoma-associated h
uauagugguuuacau

SEQ ID NO: 351247 - RNA, 23 nt, Human herpesvirus 8 (Kaposi`s sarcoma-associated h
uauauuggcauuauaaacccauc

SEQ ID NO: 351248 - RNA, 15 nt, Human herpesvirus 8 (Kaposi`s sarcoma-associated h
uaucacggacgccac

SEQ ID NO: 351249 - RNA, 21 nt, Human herpesvirus 8 (Kaposi`s sarcoma-associated h
uaucagaacaguggugcacua

SEQ ID NO: 351250 - RNA, 14 nt, Human herpesvirus 8 (Kaposi`s sarcoma-associated h
uaucaggggaacca

SEQ ID NO: 351251 - RNA, 14 nt, Human herpesvirus 8 (Kaposi`s sarcoma-associated h
uaucauaucaauaa

SEQ ID NO: 351252 - RNA, 23 nt, Human herpesvirus 8 (Kaposi`s sarcoma-associated h
uaucgaucacgcccgugugcaug

SEQ ID NO: 351253 - RNA, 23 nt, Human herpesvirus 8 (Kaposi`s sarcoma-associated h
uaucucgccgguguaugacccug

SEQ ID NO: 351254 - RNA, 19 nt, Human herpesvirus 8 (Kaposi`s sarcoma-associated h
uaugaccggcuuguuuaua

SEQ ID NO: 351255 - RNA, 15 nt, Human herpesvirus 8 (Kaposi`s sarcoma-associated h
uaugaggccuaucug

SEQ ID NO: 351256 - RNA, 15 nt, Human herpesvirus 8 (Kaposi`s sarcoma-associated h
uaugaggucggauac

SEQ ID NO: 351257 - RNA, 19 nt, Human herpesvirus 8 (Kaposi`s sarcoma-associated h
uaugaggucggauacuuau

SEQ ID NO: 351258 - RNA, 22 nt, Human herpesvirus 8 (Kaposi`s sarcoma-associated h
uaugauacuuacguccuaagga

SEQ ID NO: 351259 - RNA, 15 nt, Human herpesvirus 8 (Kaposi`s sarcoma-associated h
uaugcaccgugcagg

SEQ ID NO: 351260 - RNA, 12 nt, Human herpesvirus 8 (Kaposi`s sarcoma-associated h
uaugcaccucca

SEQ ID NO: 351261 - RNA, 17 nt, Human herpesvirus 8 (Kaposi`s sarcoma-associated h
uaugcaccuccaaaaca

SEQ ID NO: 351262 - RNA, 15 nt, Human herpesvirus 8 (Kaposi`s sarcoma-associated h
uauggcgcaagcacu

SEQ ID NO: 351263 - RNA, 18 nt, Human herpesvirus 8 (Kaposi`s sarcoma-associated h
uaugggcuuguacaugug

SEQ ID NO: 351264 - RNA, 22 nt, Human herpesvirus 8 (Kaposi`s sarcoma-associated h
uauggggauugcgauugcucaa

SEQ ID NO: 351265 - RNA, 19 nt, Human herpesvirus 8 (Kaposi`s sarcoma-associated h
uaugucccaaagacuguuu

SEQ ID NO: 351266 - RNA, 19 nt, Human herpesvirus 8 (Kaposi`s sarcoma-associated h
uaugucuuuguguguguua

SEQ ID NO: 351267 - RNA, 16 nt, Human herpesvirus 8 (Kaposi`s sarcoma-associated h
uauguggcuuuuguca

SEQ ID NO: 351268 - RNA, 18 nt, Human herpesvirus 8 (Kaposi`s sarcoma-associated h
uauguuuuuaccaguaua

SEQ ID NO: 351269 - RNA, 21 nt, Human herpesvirus 8 (Kaposi`s sarcoma-associated h
uauuagaggguggacagugcc

SEQ ID NO: 351270 - RNA, 23 nt, Human herpesvirus 8 (Kaposi`s sarcoma-associated h
uauuaucaaagaaaggugacuua

SEQ ID NO: 351271 - RNA, 13 nt, Human herpesvirus 8 (Kaposi`s sarcoma-associated h
uauuaugccaggg

SEQ ID NO: 351272 - RNA, 14 nt, Human herpesvirus 8 (Kaposi`s sarcoma-associated h
uauugaagcauguu

SEQ ID NO: 351273 - RNA, 17 nt, Human herpesvirus 8 (Kaposi`s sarcoma-associated h
uauugcaacugaccaug

SEQ ID NO: 351274 - RNA, 18 nt, Human herpesvirus 8 (Kaposi`s sarcoma-associated h
uauuuacuuuuaugguuu

SEQ ID NO: 351275 - RNA, 14 nt, Human herpesvirus 8 (Kaposi`s sarcoma-associated h
uauuuaucagucca

SEQ ID NO: 351276 - RNA, 22 nt, Human herpesvirus 8 (Kaposi`s sarcoma-associated h
uauuuauuuuuuacuacaggua

SEQ ID NO: 351277 - RNA, 14 nt, Human herpesvirus 8 (Kaposi`s sarcoma-associated h
uauuuugauggugu

SEQ ID NO: 351278 - RNA, 18 nt, Human herpesvirus 8 (Kaposi`s sarcoma-associated h
uauuuuuuacuacaggua

SEQ ID NO: 351279 - RNA, 19 nt, Human herpesvirus 8 (Kaposi`s sarcoma-associated h
ucaaagacgccuuccucag

SEQ ID NO: 351280 - RNA, 18 nt, Human herpesvirus 8 (Kaposi`s sarcoma-associated h
ucaaccaggccaccauuc

SEQ ID NO: 351281 - RNA, 18 nt, Human herpesvirus 8 (Kaposi`s sarcoma-associated h
ucaaccucgaugggauau

SEQ ID NO: 351282 - RNA, 14 nt, Human herpesvirus 8 (Kaposi`s sarcoma-associated h
ucaacgucucuaua

SEQ ID NO: 351283 - RNA, 15 nt, Human herpesvirus 8 (Kaposi`s sarcoma-associated h
ucaauaaagagacca

SEQ ID NO: 351284 - RNA, 16 nt, Human herpesvirus 8 (Kaposi`s sarcoma-associated h
ucaauaaagagaccaa

SEQ ID NO: 351285 - RNA, 13 nt, Human herpesvirus 8 (Kaposi`s sarcoma-associated h
ucaauacauugug

SEQ ID NO: 351286 - RNA, 15 nt, Human herpesvirus 8 (Kaposi`s sarcoma-associated h
ucaauuggaugcuau

SEQ ID NO: 351287 - RNA, 16 nt, Human herpesvirus 8 (Kaposi`s sarcoma-associated h
ucacaacagacuaccc

SEQ ID NO: 351288 - RNA, 18 nt, Human herpesvirus 8 (Kaposi`s sarcoma-associated h
ucacaacagacuaccccu

SEQ ID NO: 351289 - RNA, 23 nt, Human herpesvirus 8 (Kaposi`s sarcoma-associated h
ucacaccguauauaaacaaggaa

SEQ ID NO: 351290 - RNA, 14 nt, Human herpesvirus 8 (Kaposi`s sarcoma-associated h
ucacccagugugcg

SEQ ID NO: 351291 - RNA, 16 nt, Human herpesvirus 8 (Kaposi`s sarcoma-associated h
ucaccccagcuccuau

SEQ ID NO: 351292 - RNA, 16 nt, Human herpesvirus 8 (Kaposi`s sarcoma-associated h
ucaccgcgguccauua

SEQ ID NO: 351293 - RNA, 14 nt, Human herpesvirus 8 (Kaposi`s sarcoma-associated h
ucaccggaggaaug

SEQ ID NO: 351294 - RNA, 23 nt, Human herpesvirus 8 (Kaposi`s sarcoma-associated h
ucaccgugggaacugugaguaau

SEQ ID NO: 351295 - RNA, 14 nt, Human herpesvirus 8 (Kaposi`s sarcoma-associated h
ucacggacuuuauu

SEQ ID NO: 351296 - RNA, 21 nt, Human herpesvirus 8 (Kaposi`s sarcoma-associated h
ucacgguagagaagagaccac

SEQ ID NO: 351297 - RNA, 21 nt, Human herpesvirus 8 (Kaposi`s sarcoma-associated h
ucacuacagggaaguuucaga

SEQ ID NO: 351298 - RNA, 20 nt, Human herpesvirus 8 (Kaposi`s sarcoma-associated h
ucacuagaauuggagcacuu

SEQ ID NO: 351299 - RNA, 14 nt, Human herpesvirus 8 (Kaposi`s sarcoma-associated h
ucacucagcugcca

SEQ ID NO: 351300 - RNA, 23 nt, Human herpesvirus 8 (Kaposi`s sarcoma-associated h
ucacuccauucccggucccacau

SEQ ID NO: 351301 - RNA, 19 nt, Human herpesvirus 8 (Kaposi`s sarcoma-associated h
ucacugcugguaucuggaa

SEQ ID NO: 351302 - RNA, 13 nt, Human herpesvirus 8 (Kaposi`s sarcoma-associated h
ucagaacauaaaa

SEQ ID NO: 351303 - RNA, 20 nt, Human herpesvirus 8 (Kaposi`s sarcoma-associated h
ucagaggcccauauuaccga

SEQ ID NO: 351304 - RNA, 16 nt, Human herpesvirus 8 (Kaposi`s sarcoma-associated h
ucagcagcaagcacag

SEQ ID NO: 351305 - RNA, 15 nt, Human herpesvirus 8 (Kaposi`s sarcoma-associated h
gugucagcccuagcc

SEQ ID NO: 351306 - RNA, 22 nt, Human herpesvirus 8 (Kaposi`s sarcoma-associated h
gugucaguaaaauaaaauacaa

SEQ ID NO: 351307 - RNA, 18 nt, Human herpesvirus 8 (Kaposi`s sarcoma-associated h
guguccagccacaucagc

SEQ ID NO: 351308 - RNA, 15 nt, Human herpesvirus 8 (Kaposi`s sarcoma-associated h
gugugcacuagcaga

SEQ ID NO: 351309 - RNA, 15 nt, Human herpesvirus 8 (Kaposi`s sarcoma-associated h
guguuacacuaugua

SEQ ID NO: 351310 - RNA, 18 nt, Human herpesvirus 8 (Kaposi`s sarcoma-associated h
guguuagacagggcuaug

SEQ ID NO: 351311 - RNA, 13 nt, Human herpesvirus 8 (Kaposi`s sarcoma-associated h
guguuugcugcug

SEQ ID NO: 351312 - RNA, 13 nt, Human herpesvirus 8 (Kaposi`s sarcoma-associated h
guguuugucugau

SEQ ID NO: 351313 - RNA, 14 nt, Human herpesvirus 8 (Kaposi`s sarcoma-associated h
guuaagaagccacu

SEQ ID NO: 351314 - RNA, 21 nt, Human herpesvirus 8 (Kaposi`s sarcoma-associated h
guuaccguaccggcaucugca

SEQ ID NO: 351315 - RNA, 20 nt, Human herpesvirus 8 (Kaposi`s sarcoma-associated h
guuaccuuauccgcuagcca

SEQ ID NO: 351316 - RNA, 17 nt, Human herpesvirus 8 (Kaposi`s sarcoma-associated h
guuacugccagacccac

SEQ ID NO: 351317 - RNA, 13 nt, Human herpesvirus 8 (Kaposi`s sarcoma-associated h
guuagauggcaca

SEQ ID NO: 351318 - RNA, 17 nt, Human herpesvirus 8 (Kaposi`s sarcoma-associated h
guuaugggugugugcca

SEQ ID NO: 351319 - RNA, 20 nt, Human herpesvirus 8 (Kaposi`s sarcoma-associated h
guuaugggugugugccagua

SEQ ID NO: 351320 - RNA, 15 nt, Human herpesvirus 8 (Kaposi`s sarcoma-associated h
guucaacugcauugg

SEQ ID NO: 351321 - RNA, 19 nt, Human herpesvirus 8 (Kaposi`s sarcoma-associated h
guucauauucccaccucca

SEQ ID NO: 351322 - RNA, 15 nt, Human herpesvirus 8 (Kaposi`s sarcoma-associated h
guucaucagccucac

SEQ ID NO: 351323 - RNA, 14 nt, Human herpesvirus 8 (Kaposi`s sarcoma-associated h
guuccugugggcua

SEQ ID NO: 351324 - RNA, 15 nt, Human herpesvirus 8 (Kaposi`s sarcoma-associated h
guucuaaccacaagu

SEQ ID NO: 351325 - RNA, 19 nt, Human herpesvirus 8 (Kaposi`s sarcoma-associated h
guucuuauugaagcauguu

SEQ ID NO: 351326 - RNA, 14 nt, Human herpesvirus 8 (Kaposi`s sarcoma-associated h
guugaaugugauca

SEQ ID NO: 351327 - RNA, 20 nt, Human herpesvirus 8 (Kaposi`s sarcoma-associated h
guugaaugugaucacggagc

SEQ ID NO: 351328 - RNA, 22 nt, Human herpesvirus 8 (Kaposi`s sarcoma-associated h
guugaucuucuugacgcuccau

SEQ ID NO: 351329 - RNA, 22 nt, Human herpesvirus 8 (Kaposi`s sarcoma-associated h
guugaugcgcggcacauugugu

SEQ ID NO: 351330 - RNA, 16 nt, Human herpesvirus 8 (Kaposi`s sarcoma-associated h
guugcaccaagcacaa

SEQ ID NO: 351331 - RNA, 22 nt, Human herpesvirus 8 (Kaposi`s sarcoma-associated h
guuggccuccagcaaagcacau

SEQ ID NO: 351332 - RNA, 15 nt, Human herpesvirus 8 (Kaposi`s sarcoma-associated h
guuguggcaccugag

SEQ ID NO: 351333 - RNA, 21 nt, Human herpesvirus 8 (Kaposi`s sarcoma-associated h
guuuacuugcagcagccuaac

SEQ ID NO: 351334 - RNA, 18 nt, Human herpesvirus 8 (Kaposi`s sarcoma-associated h
guuuauuucaagagccua

SEQ ID NO: 351335 - RNA, 16 nt, Human herpesvirus 8 (Kaposi`s sarcoma-associated h
guuuauuuuuagcaau

SEQ ID NO: 351336 - RNA, 20 nt, Human herpesvirus 8 (Kaposi`s sarcoma-associated h
guuucugaucccuaaggguc

SEQ ID NO: 351337 - RNA, 23 nt, Human herpesvirus 8 (Kaposi`s sarcoma-associated h
guuugaaaaaaaauaaacauacg

SEQ ID NO: 351338 - RNA, 18 nt, Human herpesvirus 8 (Kaposi`s sarcoma-associated h
guuugagucuuucuagca

SEQ ID NO: 351339 - RNA, 14 nt, Human herpesvirus 8 (Kaposi`s sarcoma-associated h
guuuggaguggagu

SEQ ID NO: 351340 - RNA, 19 nt, Human herpesvirus 8 (Kaposi`s sarcoma-associated h
guuuggaguggaguggugu

SEQ ID NO: 351341 - RNA, 21 nt, Human herpesvirus 8 (Kaposi`s sarcoma-associated h
guuugggagagcggacgccau

SEQ ID NO: 351342 - RNA, 16 nt, Human herpesvirus 8 (Kaposi`s sarcoma-associated h
guuugggcaaaacaca

SEQ ID NO: 351343 - RNA, 14 nt, Human herpesvirus 8 (Kaposi`s sarcoma-associated h
guuuuaucuucaag

SEQ ID NO: 351344 - RNA, 21 nt, Human herpesvirus 8 (Kaposi`s sarcoma-associated h
guuuuccauccguguccucua

SEQ ID NO: 351345 - RNA, 12 nt, Human herpesvirus 8 (Kaposi`s sarcoma-associated h
guuuugcacuau

SEQ ID NO: 351346 - RNA, 15 nt, Human herpesvirus 8 (Kaposi`s sarcoma-associated h
guuuuugaacaugug

SEQ ID NO: 351347 - RNA, 14 nt, Human herpesvirus 8 (Kaposi`s sarcoma-associated h
guuuuuugccaugg

SEQ ID NO: 351348 - RNA, 16 nt, Human herpesvirus 8 (Kaposi`s sarcoma-associated h
uaaaaaaugugcaugu

SEQ ID NO: 351349 - RNA, 18 nt, Human herpesvirus 8 (Kaposi`s sarcoma-associated h
uaaaaaccacucacugag

SEQ ID NO: 351350 - RNA, 16 nt, Human herpesvirus 8 (Kaposi`s sarcoma-associated h
uaaaaccgcccacuga

SEQ ID NO: 351351 - RNA, 17 nt, Human herpesvirus 8 (Kaposi`s sarcoma-associated h
uaaaaccgcccacugau

SEQ ID NO: 351352 - RNA, 16 nt, Human herpesvirus 8 (Kaposi`s sarcoma-associated h
uaaaacgaagcaaagu

SEQ ID NO: 351353 - RNA, 20 nt, Human herpesvirus 8 (Kaposi`s sarcoma-associated h
uaaaacgaagcaaagugucu

SEQ ID NO: 351354 - RNA, 13 nt, Human herpesvirus 8 (Kaposi`s sarcoma-associated h
uaaaacggccaaa

SEQ ID NO: 351355 - RNA, 17 nt, Human herpesvirus 8 (Kaposi`s sarcoma-associated h
uaaaacuucauuguucu

SEQ ID NO: 351356 - RNA, 23 nt, Human herpesvirus 8 (Kaposi`s sarcoma-associated h
uaaaagucuggcccucacuacag

SEQ ID NO: 351357 - RNA, 22 nt, Human herpesvirus 8 (Kaposi`s sarcoma-associated h
uaaaaguucuauuuaaggcagu

SEQ ID NO: 351358 - RNA, 21 nt, Human herpesvirus 8 (Kaposi`s sarcoma-associated h
uaaaauacaaaaacacaauca

SEQ ID NO: 351359 - RNA, 22 nt, Human herpesvirus 8 (Kaposi`s sarcoma-associated h
uaaacauacguuuugaacaaug

SEQ ID NO: 351360 - RNA, 21 nt, Human herpesvirus 8 (Kaposi`s sarcoma-associated h
uaaacccacagcccauaguau

SEQ ID NO: 351361 - RNA, 15 nt, Human herpesvirus 8 (Kaposi`s sarcoma-associated h
uaaaccgaaguacug

SEQ ID NO: 351362 - RNA, 23 nt, Human herpesvirus 8 (Kaposi`s sarcoma-associated h
uaaagauggguccguauuucugc

SEQ ID NO: 351363 - RNA, 15 nt, Human herpesvirus 8 (Kaposi`s sarcoma-associated h
uaaagccgagccaca

SEQ ID NO: 351364 - RNA, 15 nt, Human herpesvirus 8 (Kaposi`s sarcoma-associated h
uaaagcugagccaca

SEQ ID NO: 351365 - RNA, 16 nt, Human herpesvirus 8 (Kaposi`s sarcoma-associated h
uaaagcugagccacaa

SEQ ID NO: 351366 - RNA, 13 nt, Human herpesvirus 8 (Kaposi`s sarcoma-associated h
uaaagcugucacu

SEQ ID NO: 351367 - RNA, 17 nt, Human herpesvirus 8 (Kaposi`s sarcoma-associated h
uaaagcugucacuaaua

SEQ ID NO: 351368 - RNA, 18 nt, Human herpesvirus 8 (Kaposi`s sarcoma-associated h
uaaagucauuaaacgaca

SEQ ID NO: 351369 - RNA, 12 nt, Human herpesvirus 8 (Kaposi`s sarcoma-associated h
uaaauauucucu

SEQ ID NO: 351370 - RNA, 19 nt, Human herpesvirus 8 (Kaposi`s sarcoma-associated h
uaaaugugacaaucuggau

SEQ ID NO: 351371 - RNA, 20 nt, Human herpesvirus 8 (Kaposi`s sarcoma-associated h
uaaauuaagggggaagggca

SEQ ID NO: 351372 - RNA, 17 nt, Human herpesvirus 8 (Kaposi`s sarcoma-associated h
uaacacagucacaguuc

SEQ ID NO: 351373 - RNA, 19 nt, Human herpesvirus 8 (Kaposi`s sarcoma-associated h
uaacacuucccaauaacaa

SEQ ID NO: 351374 - RNA, 14 nt, Human herpesvirus 8 (Kaposi`s sarcoma-associated h
uaacagcaacaugu

SEQ ID NO: 351375 - RNA, 15 nt, Human herpesvirus 8 (Kaposi`s sarcoma-associated h
uaacagcaacauguu

SEQ ID NO: 351376 - RNA, 22 nt, Human herpesvirus 8 (Kaposi`s sarcoma-associated h
uaacagccacgacguggcccac

SEQ ID NO: 351377 - RNA, 18 nt, Human herpesvirus 8 (Kaposi`s sarcoma-associated h
uaacaguuuggugcaaag

SEQ ID NO: 351378 - RNA, 14 nt, Human herpesvirus 8 (Kaposi`s sarcoma-associated h
uaacauccacagga

SEQ ID NO: 351379 - RNA, 19 nt, Human herpesvirus 8 (Kaposi`s sarcoma-associated h
uaacauuuuguaaugaaua

SEQ ID NO: 351380 - RNA, 18 nt, Human herpesvirus 8 (Kaposi`s sarcoma-associated h
uaaccauagugugcguuu

SEQ ID NO: 351381 - RNA, 21 nt, Human herpesvirus 8 (Kaposi`s sarcoma-associated h
uaacccgcuccgccacgcagc

SEQ ID NO: 351382 - RNA, 19 nt, Human herpesvirus 8 (Kaposi`s sarcoma-associated h
uaaccgagcucugcugccu

SEQ ID NO: 351383 - RNA, 13 nt, Human herpesvirus 8 (Kaposi`s sarcoma-associated h
guaugacugcccu

SEQ ID NO: 351384 - RNA, 22 nt, Human herpesvirus 8 (Kaposi`s sarcoma-associated h
guaugccgcguuagcagccaug

SEQ ID NO: 351385 - RNA, 19 nt, Human herpesvirus 8 (Kaposi`s sarcoma-associated h
guaugggaacacaauacua

SEQ ID NO: 351386 - RNA, 22 nt, Human herpesvirus 8 (Kaposi`s sarcoma-associated h
guauucuagagcccgcugcuau

SEQ ID NO: 351387 - RNA, 13 nt, Human herpesvirus 8 (Kaposi`s sarcoma-associated h
guauucucugacu

SEQ ID NO: 351388 - RNA, 15 nt, Human herpesvirus 8 (Kaposi`s sarcoma-associated h
gucaauacauuguga

SEQ ID NO: 351389 - RNA, 22 nt, Human herpesvirus 8 (Kaposi`s sarcoma-associated h
gucacaaagggggcaaccucuu

SEQ ID NO: 351390 - RNA, 14 nt, Human herpesvirus 8 (Kaposi`s sarcoma-associated h
gucaccgacaccau

SEQ ID NO: 351391 - RNA, 16 nt, Human herpesvirus 8 (Kaposi`s sarcoma-associated h
gucacgucgcucuuua

SEQ ID NO: 351392 - RNA, 21 nt, Human herpesvirus 8 (Kaposi`s sarcoma-associated h
gucagagaauacagugcuaau

SEQ ID NO: 351393 - RNA, 14 nt, Human herpesvirus 8 (Kaposi`s sarcoma-associated h
gucagauuucucua

SEQ ID NO: 351394 - RNA, 19 nt, Human herpesvirus 8 (Kaposi`s sarcoma-associated h
gucagcagcaagcacagaa

SEQ ID NO: 351395 - RNA, 14 nt, Human herpesvirus 8 (Kaposi`s sarcoma-associated h
gucagcaguguuug

SEQ ID NO: 351396 - RNA, 17 nt, Human herpesvirus 8 (Kaposi`s sarcoma-associated h
gucagguuccacccagu

SEQ ID NO: 351397 - RNA, 15 nt, Human herpesvirus 8 (Kaposi`s sarcoma-associated h
gucaucuugcgccau

SEQ ID NO: 351398 - RNA, 16 nt, Human herpesvirus 8 (Kaposi`s sarcoma-associated h
guccacaagucuaagg

SEQ ID NO: 351399 - RNA, 12 nt, Human herpesvirus 8 (Kaposi`s sarcoma-associated h
guccaccauucc

SEQ ID NO: 351400 - RNA, 14 nt, Human herpesvirus 8 (Kaposi`s sarcoma-associated h
guccacgacuacgu

SEQ ID NO: 351401 - RNA, 15 nt, Human herpesvirus 8 (Kaposi`s sarcoma-associated h
guccagccacaucag

SEQ ID NO: 351402 - RNA, 20 nt, Human herpesvirus 8 (Kaposi`s sarcoma-associated h
guccaggccucuagcuguag

SEQ ID NO: 351403 - RNA, 17 nt, Human herpesvirus 8 (Kaposi`s sarcoma-associated h
guccccaauuucaguac

SEQ ID NO: 351404 - RNA, 18 nt, Human herpesvirus 8 (Kaposi`s sarcoma-associated h
guccccggggacccucac

SEQ ID NO: 351405 - RNA, 16 nt, Human herpesvirus 8 (Kaposi`s sarcoma-associated h
guccccugcaaugcaa

SEQ ID NO: 351406 - RNA, 22 nt, Human herpesvirus 8 (Kaposi`s sarcoma-associated h
gucccucagccacaaauaauga

SEQ ID NO: 351407 - RNA, 20 nt, Human herpesvirus 8 (Kaposi`s sarcoma-associated h
gucccucuuggcuguuacaa

SEQ ID NO: 351408 - RNA, 20 nt, Human herpesvirus 8 (Kaposi`s sarcoma-associated h
gucccuuaugucaguuccac

SEQ ID NO: 351409 - RNA, 16 nt, Human herpesvirus 8 (Kaposi`s sarcoma-associated h
guccgccaucaccaac

SEQ ID NO: 351410 - RNA, 13 nt, Human herpesvirus 8 (Kaposi`s sarcoma-associated h
guccggacauuuu

SEQ ID NO: 351411 - RNA, 18 nt, Human herpesvirus 8 (Kaposi`s sarcoma-associated h
guccugauuuuccaggga

SEQ ID NO: 351412 - RNA, 20 nt, Human herpesvirus 8 (Kaposi`s sarcoma-associated h
gucgagcacuccuguuagca

SEQ ID NO: 351413 - RNA, 18 nt, Human herpesvirus 8 (Kaposi`s sarcoma-associated h
gucgccagggucaucccg

SEQ ID NO: 351414 - RNA, 19 nt, Human herpesvirus 8 (Kaposi`s sarcoma-associated h
gucgguucacugcugguau

SEQ ID NO: 351415 - RNA, 18 nt, Human herpesvirus 8 (Kaposi`s sarcoma-associated h
gucuaauacguaacuguu

SEQ ID NO: 351416 - RNA, 21 nt, Human herpesvirus 8 (Kaposi`s sarcoma-associated h
gucuaccugccggacacugaa

SEQ ID NO: 351417 - RNA, 14 nt, Human herpesvirus 8 (Kaposi`s sarcoma-associated h
gucuagacaauaaa

SEQ ID NO: 351418 - RNA, 14 nt, Human herpesvirus 8 (Kaposi`s sarcoma-associated h
gucuccgccaggga

SEQ ID NO: 351419 - RNA, 23 nt, Human herpesvirus 8 (Kaposi`s sarcoma-associated h
gucugagaaauuacugcaccucg

SEQ ID NO: 351420 - RNA, 21 nt, Human herpesvirus 8 (Kaposi`s sarcoma-associated h
gucugauucuuagauaguguu

SEQ ID NO: 351421 - RNA, 17 nt, Human herpesvirus 8 (Kaposi`s sarcoma-associated h
gucuguaaaacacuguu

SEQ ID NO: 351422 - RNA, 20 nt, Human herpesvirus 8 (Kaposi`s sarcoma-associated h
gucuguaaagaaaguagaua

SEQ ID NO: 351423 - RNA, 16 nt, Human herpesvirus 8 (Kaposi`s sarcoma-associated h
gucuuauaacagugcu

SEQ ID NO: 351424 - RNA, 22 nt, Human herpesvirus 8 (Kaposi`s sarcoma-associated h
gugaaacccggauuugccccau

SEQ ID NO: 351425 - RNA, 19 nt, Human herpesvirus 8 (Kaposi`s sarcoma-associated h
gugacaaucuggaugugua

SEQ ID NO: 351426 - RNA, 14 nt, Human herpesvirus 8 (Kaposi`s sarcoma-associated h
gugacaccuuucag

SEQ ID NO: 351427 - RNA, 16 nt, Human herpesvirus 8 (Kaposi`s sarcoma-associated h
gugacacuacuaaugu

SEQ ID NO: 351428 - RNA, 14 nt, Human herpesvirus 8 (Kaposi`s sarcoma-associated h
gugacccacauaga

SEQ ID NO: 351429 - RNA, 18 nt, Human herpesvirus 8 (Kaposi`s sarcoma-associated h
gugacccacauagaccua

SEQ ID NO: 351430 - RNA, 21 nt, Human herpesvirus 8 (Kaposi`s sarcoma-associated h
gugacgcugucccgugcccag

SEQ ID NO: 351431 - RNA, 15 nt, Human herpesvirus 8 (Kaposi`s sarcoma-associated h
gugaguccuggcccc

SEQ ID NO: 351432 - RNA, 22 nt, Human herpesvirus 8 (Kaposi`s sarcoma-associated h
gugauuacucgcacaagcgcug

SEQ ID NO: 351433 - RNA, 16 nt, Human herpesvirus 8 (Kaposi`s sarcoma-associated h
gugcaaccugcugcag

SEQ ID NO: 351434 - RNA, 14 nt, Human herpesvirus 8 (Kaposi`s sarcoma-associated h
gugcaugugguaug

SEQ ID NO: 351435 - RNA, 13 nt, Human herpesvirus 8 (Kaposi`s sarcoma-associated h
gugcauuggcuau

SEQ ID NO: 351436 - RNA, 23 nt, Human herpesvirus 8 (Kaposi`s sarcoma-associated h
gugcccaggccgccgaccaugcu

SEQ ID NO: 351437 - RNA, 20 nt, Human herpesvirus 8 (Kaposi`s sarcoma-associated h
gugccgcgcaucaaccagcg

SEQ ID NO: 351438 - RNA, 23 nt, Human herpesvirus 8 (Kaposi`s sarcoma-associated h
gugccuaucaaucugagaaaagu

SEQ ID NO: 351439 - RNA, 21 nt, Human herpesvirus 8 (Kaposi`s sarcoma-associated h
gugccugguggagcacgaaga

SEQ ID NO: 351440 - RNA, 13 nt, Human herpesvirus 8 (Kaposi`s sarcoma-associated h
gugcgggccaaug

SEQ ID NO: 351441 - RNA, 20 nt, Human herpesvirus 8 (Kaposi`s sarcoma-associated h
gugcuauaauggauggcuau

SEQ ID NO: 351442 - RNA, 19 nt, Human herpesvirus 8 (Kaposi`s sarcoma-associated h
guggaaaauucuccaggca

SEQ ID NO: 351443 - RNA, 17 nt, Human herpesvirus 8 (Kaposi`s sarcoma-associated h
guggaauauaaugugaa

SEQ ID NO: 351444 - RNA, 23 nt, Human herpesvirus 8 (Kaposi`s sarcoma-associated h
guggaccguguguuugguggugu

SEQ ID NO: 351445 - RNA, 20 nt, Human herpesvirus 8 (Kaposi`s sarcoma-associated h
guggacuuuuaccaguucag

SEQ ID NO: 351446 - RNA, 15 nt, Human herpesvirus 8 (Kaposi`s sarcoma-associated h
guggaugagaggguu

SEQ ID NO: 351447 - RNA, 21 nt, Human herpesvirus 8 (Kaposi`s sarcoma-associated h
guggauugccgucacauauca

SEQ ID NO: 351448 - RNA, 23 nt, Human herpesvirus 8 (Kaposi`s sarcoma-associated h
guggauuuuauggacauuuacca

SEQ ID NO: 351449 - RNA, 20 nt, Human herpesvirus 8 (Kaposi`s sarcoma-associated h
guggcccugaaaugaucguc

SEQ ID NO: 351450 - RNA, 14 nt, Human herpesvirus 8 (Kaposi`s sarcoma-associated h
guggcccugccuag

SEQ ID NO: 351451 - RNA, 18 nt, Human herpesvirus 8 (Kaposi`s sarcoma-associated h
guggcugaugcucuggcc

SEQ ID NO: 351452 - RNA, 17 nt, Human herpesvirus 8 (Kaposi`s sarcoma-associated h
gugggaaauagaccuca

SEQ ID NO: 351453 - RNA, 23 nt, Human herpesvirus 8 (Kaposi`s sarcoma-associated h
gugguagagaccgacgccaucaa

SEQ ID NO: 351454 - RNA, 11 nt, Human herpesvirus 8 (Kaposi`s sarcoma-associated h
guggucucuuc

SEQ ID NO: 351455 - RNA, 13 nt, Human herpesvirus 8 (Kaposi`s sarcoma-associated h
guggugacgcugu

SEQ ID NO: 351456 - RNA, 15 nt, Human herpesvirus 8 (Kaposi`s sarcoma-associated h
guggugcccugcccu

SEQ ID NO: 351457 - RNA, 17 nt, Human herpesvirus 8 (Kaposi`s sarcoma-associated h
guggugcccugcccuca

SEQ ID NO: 351458 - RNA, 13 nt, Human herpesvirus 8 (Kaposi`s sarcoma-associated h
guguacaaaccaa

SEQ ID NO: 351459 - RNA, 16 nt, Human herpesvirus 8 (Kaposi`s sarcoma-associated h
guguacaauacgccuu

SEQ ID NO: 351460 - RNA, 14 nt, Human herpesvirus 8 (Kaposi`s sarcoma-associated h
guguaccuagcccu

SEQ ID NO: 351461 - RNA, 19 nt, Human herpesvirus 8 (Kaposi`s sarcoma-associated h
aaauacaaaaacacaauca

SEQ ID NO: 351462 - RNA, 20 nt, Human herpesvirus 8 (Kaposi`s sarcoma-associated h
aaauacguacagaaaaccau

SEQ ID NO: 351463 - RNA, 19 nt, Human herpesvirus 8 (Kaposi`s sarcoma-associated h
aaauauacaggcauugggc

SEQ ID NO: 351464 - RNA, 13 nt, Human herpesvirus 8 (Kaposi`s sarcoma-associated h
aaaucgaagccag

SEQ ID NO: 351465 - RNA, 17 nt, Human herpesvirus 8 (Kaposi`s sarcoma-associated h
aaaucuguugaauguga

SEQ ID NO: 351466 - RNA, 22 nt, Human herpesvirus 8 (Kaposi`s sarcoma-associated h
aaaugggccaugacaacugcca

SEQ ID NO: 351467 - RNA, 12 nt, Human herpesvirus 8 (Kaposi`s sarcoma-associated h
aaaugguccggg

SEQ ID NO: 351468 - RNA, 12 nt, Human herpesvirus 8 (Kaposi`s sarcoma-associated h
aaauuacugcac

SEQ ID NO: 351469 - RNA, 15 nt, Human herpesvirus 8 (Kaposi`s sarcoma-associated h
aaauuuuaacagcca

SEQ ID NO: 351470 - RNA, 15 nt, Human herpesvirus 8 (Kaposi`s sarcoma-associated h
aacaacgcacugguu

SEQ ID NO: 351471 - RNA, 17 nt, Human herpesvirus 8 (Kaposi`s sarcoma-associated h
aacaagcuaccugcaaa

SEQ ID NO: 351472 - RNA, 21 nt, Human herpesvirus 8 (Kaposi`s sarcoma-associated h
aacaaggucaauacauuguga

SEQ ID NO: 351473 - RNA, 16 nt, Human herpesvirus 8 (Kaposi`s sarcoma-associated h
aacaaucucuuacuuc

SEQ ID NO: 351474 - RNA, 14 nt, Human herpesvirus 8 (Kaposi`s sarcoma-associated h
aacacaaaagcaag

SEQ ID NO: 351475 - RNA, 12 nt, Human herpesvirus 8 (Kaposi`s sarcoma-associated h
aacacaaucacg

SEQ ID NO: 351476 - RNA, 18 nt, Human herpesvirus 8 (Kaposi`s sarcoma-associated h
aacacauuaagagugcca

SEQ ID NO: 351477 - RNA, 22 nt, Human herpesvirus 8 (Kaposi`s sarcoma-associated h
aacacgacacgauguuuuccag

SEQ ID NO: 351478 - RNA, 15 nt, Human herpesvirus 8 (Kaposi`s sarcoma-associated h
aacacguacaucuac

SEQ ID NO: 351479 - RNA, 16 nt, Human herpesvirus 8 (Kaposi`s sarcoma-associated h
aacacuggacacuaaa

SEQ ID NO: 351480 - RNA, 15 nt, Human herpesvirus 8 (Kaposi`s sarcoma-associated h
aacacuucccaauaa

SEQ ID NO: 351481 - RNA, 15 nt, Human herpesvirus 8 (Kaposi`s sarcoma-associated h
aacagguugccaugg

SEQ ID NO: 351482 - RNA, 19 nt, Human herpesvirus 8 (Kaposi`s sarcoma-associated h
aacaguuuggugcaaagug

SEQ ID NO: 351483 - RNA, 18 nt, Human herpesvirus 8 (Kaposi`s sarcoma-associated h
aacauaauuguaaugugu

SEQ ID NO: 351484 - RNA, 22 nt, Human herpesvirus 8 (Kaposi`s sarcoma-associated h
aacauaauuguaauguguuuua

SEQ ID NO: 351485 - RNA, 20 nt, Human herpesvirus 8 (Kaposi`s sarcoma-associated h
aacaugacauggucugacaa

SEQ ID NO: 351486 - RNA, 19 nt, Human herpesvirus 8 (Kaposi`s sarcoma-associated h
aacaugcccuuuucugaaa

SEQ ID NO: 351487 - RNA, 9 nt, Human herpesvirus 8 (Kaposi`s sarcoma-associated h
aacaugugg

SEQ ID NO: 351488 - RNA, 19 nt, Human herpesvirus 8 (Kaposi`s sarcoma-associated h
aacauuaccaauacuauua

SEQ ID NO: 351489 - RNA, 20 nt, Human herpesvirus 8 (Kaposi`s sarcoma-associated h
aacauucggugagugucuuc

SEQ ID NO: 351490 - RNA, 15 nt, Human herpesvirus 8 (Kaposi`s sarcoma-associated h
aacauuguuuauuuc

SEQ ID NO: 351491 - RNA, 23 nt, Human herpesvirus 8 (Kaposi`s sarcoma-associated h
aaccacggcgcuguacagugccu

SEQ ID NO: 351492 - RNA, 13 nt, Human herpesvirus 8 (Kaposi`s sarcoma-associated h
aaccacucauaaa

SEQ ID NO: 351493 - RNA, 17 nt, Human herpesvirus 8 (Kaposi`s sarcoma-associated h
aaccagcuacgcacuga

SEQ ID NO: 351494 - RNA, 12 nt, Human herpesvirus 8 (Kaposi`s sarcoma-associated h
aaccauacuguu

SEQ ID NO: 351495 - RNA, 21 nt, Human herpesvirus 8 (Kaposi`s sarcoma-associated h
aaccauuuuuuacggacaaua

SEQ ID NO: 351496 - RNA, 15 nt, Human herpesvirus 8 (Kaposi`s sarcoma-associated h
aacccacacuggccc

SEQ ID NO: 351497 - RNA, 15 nt, Human herpesvirus 8 (Kaposi`s sarcoma-associated h
aacccacagcccaua

SEQ ID NO: 351498 - RNA, 21 nt, Human herpesvirus 8 (Kaposi`s sarcoma-associated h
aaccccgcgcguaucucucua

SEQ ID NO: 351499 - RNA, 15 nt, Human herpesvirus 8 (Kaposi`s sarcoma-associated h
aacccgcuccgccac

SEQ ID NO: 351500 - RNA, 15 nt, Human herpesvirus 8 (Kaposi`s sarcoma-associated h
aacccggauuugccc

SEQ ID NO: 351501 - RNA, 14 nt, Human herpesvirus 8 (Kaposi`s sarcoma-associated h
aacccucagugugc

SEQ ID NO: 351502 - RNA, 14 nt, Human herpesvirus 8 (Kaposi`s sarcoma-associated h
aacccugccaaaug

SEQ ID NO: 351503 - RNA, 16 nt, Human herpesvirus 8 (Kaposi`s sarcoma-associated h
aaccgaugguuuccua

SEQ ID NO: 351504 - RNA, 20 nt, Human herpesvirus 8 (Kaposi`s sarcoma-associated h
aaccgcaaagauaagccaau

SEQ ID NO: 351505 - RNA, 18 nt, Human herpesvirus 8 (Kaposi`s sarcoma-associated h
aaccggcuuguacaguga

SEQ ID NO: 351506 - RNA, 19 nt, Human herpesvirus 8 (Kaposi`s sarcoma-associated h
aaccggcuuguacagugag

SEQ ID NO: 351507 - RNA, 19 nt, Human herpesvirus 8 (Kaposi`s sarcoma-associated h
aaccgucuccgccagggac

SEQ ID NO: 351508 - RNA, 17 nt, Human herpesvirus 8 (Kaposi`s sarcoma-associated h
aaccuccaaacacaggc

SEQ ID NO: 351509 - RNA, 18 nt, Human herpesvirus 8 (Kaposi`s sarcoma-associated h
aaccuguccaugucgcac

SEQ ID NO: 351510 - RNA, 20 nt, Human herpesvirus 8 (Kaposi`s sarcoma-associated h
aacgauauggccacccuacu

SEQ ID NO: 351511 - RNA, 17 nt, Human herpesvirus 8 (Kaposi`s sarcoma-associated h
aacgauggcaaaggaac

SEQ ID NO: 351512 - RNA, 13 nt, Human herpesvirus 8 (Kaposi`s sarcoma-associated h
aacgcacacgaau

SEQ ID NO: 351513 - RNA, 21 nt, Human herpesvirus 8 (Kaposi`s sarcoma-associated h
aacgccaucgugcgccuaggc

SEQ ID NO: 351514 - RNA, 22 nt, Human herpesvirus 8 (Kaposi`s sarcoma-associated h
aacgccccucuuggcuguuaca

SEQ ID NO: 351515 - RNA, 23 nt, Human herpesvirus 8 (Kaposi`s sarcoma-associated h
aacgccccucuuggcuguuacaa

SEQ ID NO: 351516 - RNA, 15 nt, Human herpesvirus 8 (Kaposi`s sarcoma-associated h
aacgguguucuguca

SEQ ID NO: 351517 - RNA, 14 nt, Human herpesvirus 8 (Kaposi`s sarcoma-associated h
aacguguccugcca

SEQ ID NO: 351518 - RNA, 22 nt, Human herpesvirus 8 (Kaposi`s sarcoma-associated h
aacguuuuucccagaagcgcac

SEQ ID NO: 351519 - RNA, 17 nt, Human herpesvirus 8 (Kaposi`s sarcoma-associated h
aacuaaacauuaccaau

SEQ ID NO: 351520 - RNA, 18 nt, Human herpesvirus 8 (Kaposi`s sarcoma-associated h
aacuaauauuaaccauag

SEQ ID NO: 351521 - RNA, 14 nt, Human herpesvirus 8 (Kaposi`s sarcoma-associated h
aacuaccagccauc

SEQ ID NO: 351522 - RNA, 19 nt, Human herpesvirus 8 (Kaposi`s sarcoma-associated h
aacucaguugagagucaga

SEQ ID NO: 351523 - RNA, 23 nt, Human herpesvirus 8 (Kaposi`s sarcoma-associated h
aacugcaugcucggcaacauuca

SEQ ID NO: 351524 - RNA, 19 nt, Human herpesvirus 8 (Kaposi`s sarcoma-associated h
aacugucgagacaugucac

SEQ ID NO: 351525 - RNA, 21 nt, Human herpesvirus 8 (Kaposi`s sarcoma-associated h
aacugucgagacaugucacca

SEQ ID NO: 351526 - RNA, 18 nt, Human herpesvirus 8 (Kaposi`s sarcoma-associated h
aacuugcgucuucaccuu

SEQ ID NO: 351527 - RNA, 16 nt, Human herpesvirus 8 (Kaposi`s sarcoma-associated h
aacuuuauuacaggua

SEQ ID NO: 351528 - RNA, 16 nt, Human herpesvirus 8 (Kaposi`s sarcoma-associated h
aagaaaaucgaagcca

SEQ ID NO: 351529 - RNA, 16 nt, Human herpesvirus 8 (Kaposi`s sarcoma-associated h
aagaagcgcacccagc

SEQ ID NO: 351530 - RNA, 16 nt, Human herpesvirus 8 (Kaposi`s sarcoma-associated h
aagacaguugugaucu

SEQ ID NO: 351531 - RNA, 19 nt, Human herpesvirus 8 (Kaposi`s sarcoma-associated h
aagacaguugugaucucug

SEQ ID NO: 351532 - RNA, 21 nt, Human herpesvirus 8 (Kaposi`s sarcoma-associated h
aagacauagugacuguagaca

SEQ ID NO: 351533 - RNA, 20 nt, Human herpesvirus 8 (Kaposi`s sarcoma-associated h
aagaccgagcguauucucag

SEQ ID NO: 351534 - RNA, 15 nt, Human herpesvirus 8 (Kaposi`s sarcoma-associated h
aagagaccgcaucuc

SEQ ID NO: 351535 - RNA, 15 nt, Human herpesvirus 8 (Kaposi`s sarcoma-associated h
aagagcacacugugu

SEQ ID NO: 351536 - RNA, 15 nt, Human herpesvirus 8 (Kaposi`s sarcoma-associated h
aagauaacccgagac

SEQ ID NO: 351537 - RNA, 12 nt, Human herpesvirus 8 (Kaposi`s sarcoma-associated h
aagauaagccaa

SEQ ID NO: 351538 - RNA, 19 nt, Human herpesvirus 8 (Kaposi`s sarcoma-associated h
aagauaccgaccaauacaa

SEQ ID NO: 351539 - RNA, 14 nt, Human herpesvirus 8 (Kaposi`s sarcoma-associated h
aagcaaaacacaaa

SEQ ID NO: 351540 - RNA, 17 nt, Human herpesvirus 8 (Kaposi`s sarcoma-associated h
acaaacgccccucuugg

SEQ ID NO: 351541 - RNA, 18 nt, Human herpesvirus 8 (Kaposi`s sarcoma-associated h
acaaacgccccucuuggc

SEQ ID NO: 351542 - RNA, 23 nt, Human herpesvirus 8 (Kaposi`s sarcoma-associated h
acaaacgccccucuuggcuguua

SEQ ID NO: 351543 - RNA, 21 nt, Human herpesvirus 8 (Kaposi`s sarcoma-associated h
acaaaugagggugaguggaac

SEQ ID NO: 351544 - RNA, 14 nt, Human herpesvirus 8 (Kaposi`s sarcoma-associated h
acaaaugguccggg

SEQ ID NO: 351545 - RNA, 13 nt, Human herpesvirus 8 (Kaposi`s sarcoma-associated h
acaacagacuuuu

SEQ ID NO: 351546 - RNA, 21 nt, Human herpesvirus 8 (Kaposi`s sarcoma-associated h
acaacgccaucgugcgccuag

SEQ ID NO: 351547 - RNA, 19 nt, Human herpesvirus 8 (Kaposi`s sarcoma-associated h
acaacuaauauuaaccaua

SEQ ID NO: 351548 - RNA, 16 nt, Human herpesvirus 8 (Kaposi`s sarcoma-associated h
acaagacaccaauaac

SEQ ID NO: 351549 - RNA, 21 nt, Human herpesvirus 8 (Kaposi`s sarcoma-associated h
acaagacaccaauaacgaagg

SEQ ID NO: 351550 - RNA, 17 nt, Human herpesvirus 8 (Kaposi`s sarcoma-associated h
acaagaguaugcaggcu

SEQ ID NO: 351551 - RNA, 21 nt, Human herpesvirus 8 (Kaposi`s sarcoma-associated h
acaagcaaugauagacaugga

SEQ ID NO: 351552 - RNA, 15 nt, Human herpesvirus 8 (Kaposi`s sarcoma-associated h
acaaggaaugcauau

SEQ ID NO: 351553 - RNA, 13 nt, Human herpesvirus 8 (Kaposi`s sarcoma-associated h
acaaggucaauac

SEQ ID NO: 351554 - RNA, 13 nt, Human herpesvirus 8 (Kaposi`s sarcoma-associated h
acaaguaccacca

SEQ ID NO: 351555 - RNA, 15 nt, Human herpesvirus 8 (Kaposi`s sarcoma-associated h
acaagucuaaggcca

SEQ ID NO: 351556 - RNA, 16 nt, Human herpesvirus 8 (Kaposi`s sarcoma-associated h
acaagucuucuuguca

SEQ ID NO: 351557 - RNA, 18 nt, Human herpesvirus 8 (Kaposi`s sarcoma-associated h
acaauaaagcugagccac

SEQ ID NO: 351558 - RNA, 20 nt, Human herpesvirus 8 (Kaposi`s sarcoma-associated h
acaauaaagcugagccacaa

SEQ ID NO: 351559 - RNA, 22 nt, Human herpesvirus 8 (Kaposi`s sarcoma-associated h
acaauacgguguaggcauuuug

SEQ ID NO: 351560 - RNA, 23 nt, Human herpesvirus 8 (Kaposi`s sarcoma-associated h
acaaugaguuauuucagcccuua

SEQ ID NO: 351561 - RNA, 13 nt, Human herpesvirus 8 (Kaposi`s sarcoma-associated h
acaaugugucugu

SEQ ID NO: 351562 - RNA, 16 nt, Human herpesvirus 8 (Kaposi`s sarcoma-associated h
acaauucugagaaaga

SEQ ID NO: 351563 - RNA, 13 nt, Human herpesvirus 8 (Kaposi`s sarcoma-associated h
acaauuucauuaa

SEQ ID NO: 351564 - RNA, 19 nt, Human herpesvirus 8 (Kaposi`s sarcoma-associated h
acaauuucauuaacaaaca

SEQ ID NO: 351565 - RNA, 21 nt, Human herpesvirus 8 (Kaposi`s sarcoma-associated h
acacagaaacucccccaaccu

SEQ ID NO: 351566 - RNA, 17 nt, Human herpesvirus 8 (Kaposi`s sarcoma-associated h
acacagucacaguucag

SEQ ID NO: 351567 - RNA, 15 nt, Human herpesvirus 8 (Kaposi`s sarcoma-associated h
acacaucaguguccu

SEQ ID NO: 351568 - RNA, 13 nt, Human herpesvirus 8 (Kaposi`s sarcoma-associated h
acacaucauaaag

SEQ ID NO: 351569 - RNA, 17 nt, Human herpesvirus 8 (Kaposi`s sarcoma-associated h
acacauuugucuuuauu

SEQ ID NO: 351570 - RNA, 14 nt, Human herpesvirus 8 (Kaposi`s sarcoma-associated h
acaccacgauuaaa

SEQ ID NO: 351571 - RNA, 18 nt, Human herpesvirus 8 (Kaposi`s sarcoma-associated h
acacgaaugguaccaugg

SEQ ID NO: 351572 - RNA, 22 nt, Human herpesvirus 8 (Kaposi`s sarcoma-associated h
acacggaguuggcuacgugcuu

SEQ ID NO: 351573 - RNA, 22 nt, Human herpesvirus 8 (Kaposi`s sarcoma-associated h
acacuaacaaguuuuguaagaa

SEQ ID NO: 351574 - RNA, 18 nt, Human herpesvirus 8 (Kaposi`s sarcoma-associated h
acacuacuaugucccaaa

SEQ ID NO: 351575 - RNA, 10 nt, Human herpesvirus 8 (Kaposi`s sarcoma-associated h
acacuaugua

SEQ ID NO: 351576 - RNA, 18 nt, Human herpesvirus 8 (Kaposi`s sarcoma-associated h
acacucccucacaaugua

SEQ ID NO: 351577 - RNA, 15 nt, Human herpesvirus 8 (Kaposi`s sarcoma-associated h
acacuggacacuaaa

SEQ ID NO: 351578 - RNA, 22 nt, Human herpesvirus 8 (Kaposi`s sarcoma-associated h
acacuggcccaauuaauuggag

SEQ ID NO: 351579 - RNA, 18 nt, Human herpesvirus 8 (Kaposi`s sarcoma-associated h
acacuuaacuguggcuac

SEQ ID NO: 351580 - RNA, 11 nt, Human herpesvirus 8 (Kaposi`s sarcoma-associated h
acacuucccaa

SEQ ID NO: 351581 - RNA, 19 nt, Human herpesvirus 8 (Kaposi`s sarcoma-associated h
acacuuuuuguucuuguga

SEQ ID NO: 351582 - RNA, 22 nt, Human herpesvirus 8 (Kaposi`s sarcoma-associated h
acagaaaggucaccuggcccaa

SEQ ID NO: 351583 - RNA, 16 nt, Human herpesvirus 8 (Kaposi`s sarcoma-associated h
acagagccuaccccaa

SEQ ID NO: 351584 - RNA, 15 nt, Human herpesvirus 8 (Kaposi`s sarcoma-associated h
acagauuguggcauu

SEQ ID NO: 351585 - RNA, 20 nt, Human herpesvirus 8 (Kaposi`s sarcoma-associated h
acagcccgauggcccuucag

SEQ ID NO: 351586 - RNA, 15 nt, Human herpesvirus 8 (Kaposi`s sarcoma-associated h
acagccuuggugcua

SEQ ID NO: 351587 - RNA, 15 nt, Human herpesvirus 8 (Kaposi`s sarcoma-associated h
acaggacaagcugau

SEQ ID NO: 351588 - RNA, 13 nt, Human herpesvirus 8 (Kaposi`s sarcoma-associated h
acagggcaugagg

SEQ ID NO: 351589 - RNA, 16 nt, Human herpesvirus 8 (Kaposi`s sarcoma-associated h
acaggggaguagggua

SEQ ID NO: 351590 - RNA, 22 nt, Human herpesvirus 8 (Kaposi`s sarcoma-associated h
acagguaauuaacauccacagg

SEQ ID NO: 351591 - RNA, 12 nt, Human herpesvirus 8 (Kaposi`s sarcoma-associated h
acaguauucuca

SEQ ID NO: 351592 - RNA, 13 nt, Human herpesvirus 8 (Kaposi`s sarcoma-associated h
acaguauucucac

SEQ ID NO: 351593 - RNA, 22 nt, Human herpesvirus 8 (Kaposi`s sarcoma-associated h
acagugcucuuccuccuaguca

SEQ ID NO: 351594 - RNA, 21 nt, Human herpesvirus 8 (Kaposi`s sarcoma-associated h
acaguugugaucucuggagac

SEQ ID NO: 351595 - RNA, 16 nt, Human herpesvirus 8 (Kaposi`s sarcoma-associated h
acaguuuggugcaaag

SEQ ID NO: 351596 - RNA, 23 nt, Human herpesvirus 8 (Kaposi`s sarcoma-associated h
acauaacacacacaaagacauag

SEQ ID NO: 351597 - RNA, 15 nt, Human herpesvirus 8 (Kaposi`s sarcoma-associated h
acauaaggaacagau

SEQ ID NO: 351598 - RNA, 18 nt, Human herpesvirus 8 (Kaposi`s sarcoma-associated h
acauacgucccucuuggc

SEQ ID NO: 351599 - RNA, 14 nt, Human herpesvirus 8 (Kaposi`s sarcoma-associated h
acauagacaugccc

SEQ ID NO: 351600 - RNA, 22 nt, Human herpesvirus 8 (Kaposi`s sarcoma-associated h
acauaugucucccuucgugccc

SEQ ID NO: 351601 - RNA, 19 nt, Human herpesvirus 8 (Kaposi`s sarcoma-associated h
acauccaaauuaugcagua

SEQ ID NO: 351602 - RNA, 12 nt, Human herpesvirus 8 (Kaposi`s sarcoma-associated h
acauccacagga

SEQ ID NO: 351603 - RNA, 20 nt, Human herpesvirus 8 (Kaposi`s sarcoma-associated h
acaucgcucaaacucaucuc

SEQ ID NO: 351604 - RNA, 16 nt, Human herpesvirus 8 (Kaposi`s sarcoma-associated h
acaucgucaucucuaa

SEQ ID NO: 351605 - RNA, 17 nt, Human herpesvirus 8 (Kaposi`s sarcoma-associated h
acaugaaagacugccug

SEQ ID NO: 351606 - RNA, 17 nt, Human herpesvirus 8 (Kaposi`s sarcoma-associated h
acaugccccuuaucucc

SEQ ID NO: 351607 - RNA, 19 nt, Human herpesvirus 8 (Kaposi`s sarcoma-associated h
acauggaauacgggagaca

SEQ ID NO: 351608 - RNA, 20 nt, Human herpesvirus 8 (Kaposi`s sarcoma-associated h
acauggucugacaacauaga

SEQ ID NO: 351609 - RNA, 14 nt, Human herpesvirus 8 (Kaposi`s sarcoma-associated h
acaugugucuauca

SEQ ID NO: 351610 - RNA, 18 nt, Human herpesvirus 8 (Kaposi`s sarcoma-associated h
acauuaaaaggacauugu

SEQ ID NO: 351611 - RNA, 14 nt, Human herpesvirus 8 (Kaposi`s sarcoma-associated h
acauuaaacacaua

SEQ ID NO: 351612 - RNA, 13 nt, Human herpesvirus 8 (Kaposi`s sarcoma-associated h
acauuaccaauac

SEQ ID NO: 351613 - RNA, 16 nt, Human herpesvirus 8 (Kaposi`s sarcoma-associated h
acauuaccaauacuau

SEQ ID NO: 351614 - RNA, 16 nt, Human herpesvirus 8 (Kaposi`s sarcoma-associated h
acauuaucuuaacuaa

SEQ ID NO: 351615 - RNA, 19 nt, Human herpesvirus 8 (Kaposi`s sarcoma-associated h
acauucaagagggccaguu

SEQ ID NO: 351616 - RNA, 22 nt, Human herpesvirus 8 (Kaposi`s sarcoma-associated h
acauucguaagaggacccaggg

SEQ ID NO: 351617 - RNA, 23 nt, Human herpesvirus 8 (Kaposi`s sarcoma-associated h
acauuggauuggaucaacuaagg

SEQ ID NO: 351618 - RNA, 18 nt, Human herpesvirus 8 (Kaposi`s sarcoma-associated h
acauugugucaaccaggg

SEQ ID NO: 351619 - RNA, 22 nt, Human herpesvirus 8 (Kaposi`s sarcoma-associated h
acgcagacccggcaacacugga

SEQ ID NO: 351620 - RNA, 15 nt, Human herpesvirus 8 (Kaposi`s sarcoma-associated h
acgcaggcgccuaug

SEQ ID NO: 351621 - RNA, 21 nt, Human herpesvirus 8 (Kaposi`s sarcoma-associated h
acgcauauacagguaaaacgg

SEQ ID NO: 351622 - RNA, 19 nt, Human herpesvirus 8 (Kaposi`s sarcoma-associated h
acgccaacccucagugugc

SEQ ID NO: 351623 - RNA, 20 nt, Human herpesvirus 8 (Kaposi`s sarcoma-associated h
acgccccucuuggcuguuac

SEQ ID NO: 351624 - RNA, 12 nt, Human herpesvirus 8 (Kaposi`s sarcoma-associated h
acgccccuggug

SEQ ID NO: 351625 - RNA, 15 nt, Human herpesvirus 8 (Kaposi`s sarcoma-associated h
acgccugcaccucua

SEQ ID NO: 351626 - RNA, 13 nt, Human herpesvirus 8 (Kaposi`s sarcoma-associated h
acgcggugucaac

SEQ ID NO: 351627 - RNA, 17 nt, Human herpesvirus 8 (Kaposi`s sarcoma-associated h
acgcggugucaaccagg

SEQ ID NO: 351628 - RNA, 23 nt, Human herpesvirus 8 (Kaposi`s sarcoma-associated h
acgcgguuguuuacgcagggugc

SEQ ID NO: 351629 - RNA, 19 nt, Human herpesvirus 8 (Kaposi`s sarcoma-associated h
acgcugcaauguacugcca

SEQ ID NO: 351630 - RNA, 12 nt, Human herpesvirus 8 (Kaposi`s sarcoma-associated h
acggaaggcagu

SEQ ID NO: 351631 - RNA, 13 nt, Human herpesvirus 8 (Kaposi`s sarcoma-associated h
acggaaggcagug

SEQ ID NO: 351632 - RNA, 23 nt, Human herpesvirus 8 (Kaposi`s sarcoma-associated h
acggaauaaaauacguacagaaa

SEQ ID NO: 351633 - RNA, 17 nt, Human herpesvirus 8 (Kaposi`s sarcoma-associated h
acggagaccuacacugc

SEQ ID NO: 351634 - RNA, 18 nt, Human herpesvirus 8 (Kaposi`s sarcoma-associated h
acggagaccuacacugca

SEQ ID NO: 351635 - RNA, 15 nt, Human herpesvirus 8 (Kaposi`s sarcoma-associated h
acggaucaugcucuc

SEQ ID NO: 351636 - RNA, 18 nt, Human herpesvirus 8 (Kaposi`s sarcoma-associated h
acggcgguguaucaggcg

SEQ ID NO: 351637 - RNA, 12 nt, Human herpesvirus 8 (Kaposi`s sarcoma-associated h
acggcuccgucc

SEQ ID NO: 351638 - RNA, 12 nt, Human herpesvirus 8 (Kaposi`s sarcoma-associated h
acgggagacacu

SEQ ID NO: 351639 - RNA, 19 nt, Human herpesvirus 8 (Kaposi`s sarcoma-associated h
acgguagagaagagaccac

SEQ ID NO: 351640 - RNA, 20 nt, Human herpesvirus 8 (Kaposi`s sarcoma-associated h
acgguagagaagagaccacg

SEQ ID NO: 351641 - RNA, 20 nt, Human herpesvirus 8 (Kaposi`s sarcoma-associated h
acggugucguguaugccaau

SEQ ID NO: 351642 - RNA, 23 nt, Human herpesvirus 8 (Kaposi`s sarcoma-associated h
acguagccuuucucuaauaaaca

SEQ ID NO: 351643 - RNA, 21 nt, Human herpesvirus 8 (Kaposi`s sarcoma-associated h
acgucccucuuggcuguuaca

SEQ ID NO: 351644 - RNA, 16 nt, Human herpesvirus 8 (Kaposi`s sarcoma-associated h
acgucuguaaaacacu

SEQ ID NO: 351645 - RNA, 19 nt, Human herpesvirus 8 (Kaposi`s sarcoma-associated h
acgugcccagacaccaaag

SEQ ID NO: 351646 - RNA, 18 nt, Human herpesvirus 8 (Kaposi`s sarcoma-associated h
acguggagccaacaaaca

SEQ ID NO: 351647 - RNA, 15 nt, Human herpesvirus 8 (Kaposi`s sarcoma-associated h
acguucaccgugccu

SEQ ID NO: 351648 - RNA, 22 nt, Human herpesvirus 8 (Kaposi`s sarcoma-associated h
acuaauauacuuugcgugucua

SEQ ID NO: 351649 - RNA, 10 nt, Human herpesvirus 8 (Kaposi`s sarcoma-associated h
acuacaggua

SEQ ID NO: 351650 - RNA, 20 nt, Human herpesvirus 8 (Kaposi`s sarcoma-associated h
acuaccggagugccggcugg

SEQ ID NO: 351651 - RNA, 18 nt, Human herpesvirus 8 (Kaposi`s sarcoma-associated h
acuacuaauguaaccuaa

SEQ ID NO: 351652 - RNA, 18 nt, Human herpesvirus 8 (Kaposi`s sarcoma-associated h
acuacucccccuccucag

SEQ ID NO: 351653 - RNA, 18 nt, Human herpesvirus 8 (Kaposi`s sarcoma-associated h
acuacugugaaguuuaca

SEQ ID NO: 351654 - RNA, 19 nt, Human herpesvirus 8 (Kaposi`s sarcoma-associated h
acuagcagaaaacugucuc

SEQ ID NO: 351655 - RNA, 21 nt, Human herpesvirus 8 (Kaposi`s sarcoma-associated h
acuaggaggaagagcacuguu

SEQ ID NO: 351656 - RNA, 14 nt, Human herpesvirus 8 (Kaposi`s sarcoma-associated h
acuauaaacagccu

SEQ ID NO: 351657 - RNA, 17 nt, Human herpesvirus 8 (Kaposi`s sarcoma-associated h
acuauccaugucuuucc

SEQ ID NO: 351658 - RNA, 22 nt, Human herpesvirus 8 (Kaposi`s sarcoma-associated h
acuauuugugaaacaauaauga

SEQ ID NO: 351659 - RNA, 13 nt, Human herpesvirus 8 (Kaposi`s sarcoma-associated h
acucacugagugg

SEQ ID NO: 351660 - RNA, 20 nt, Human herpesvirus 8 (Kaposi`s sarcoma-associated h
acucacugggggucucggga

SEQ ID NO: 351661 - RNA, 17 nt, Human herpesvirus 8 (Kaposi`s sarcoma-associated h
acucagcugccaaggca

SEQ ID NO: 351662 - RNA, 17 nt, Human herpesvirus 8 (Kaposi`s sarcoma-associated h
acucagguguuuuccaa

SEQ ID NO: 351663 - RNA, 14 nt, Human herpesvirus 8 (Kaposi`s sarcoma-associated h
acuccaagccaguc

SEQ ID NO: 351664 - RNA, 19 nt, Human herpesvirus 8 (Kaposi`s sarcoma-associated h
acuccucuucggagaucaa

SEQ ID NO: 351665 - RNA, 16 nt, Human herpesvirus 8 (Kaposi`s sarcoma-associated h
acuccuguuagcacau

SEQ ID NO: 351666 - RNA, 17 nt, Human herpesvirus 8 (Kaposi`s sarcoma-associated h
acucgcacaagcgcuga

SEQ ID NO: 351667 - RNA, 19 nt, Human herpesvirus 8 (Kaposi`s sarcoma-associated h
acucgucuacccugccacu

SEQ ID NO: 351668 - RNA, 19 nt, Human herpesvirus 8 (Kaposi`s sarcoma-associated h
acucguugcacacagacac

SEQ ID NO: 351669 - RNA, 14 nt, Human herpesvirus 8 (Kaposi`s sarcoma-associated h
acugagaugucuuu

SEQ ID NO: 351670 - RNA, 19 nt, Human herpesvirus 8 (Kaposi`s sarcoma-associated h
acugagcgugccugcuuac

SEQ ID NO: 351671 - RNA, 21 nt, Human herpesvirus 8 (Kaposi`s sarcoma-associated h
acugcacaaaauugucuugua

SEQ ID NO: 351672 - RNA, 16 nt, Human herpesvirus 8 (Kaposi`s sarcoma-associated h
acugccacaaguaagu

SEQ ID NO: 351673 - RNA, 18 nt, Human herpesvirus 8 (Kaposi`s sarcoma-associated h
acuggcaccuaaguggau

SEQ ID NO: 351674 - RNA, 15 nt, Human herpesvirus 8 (Kaposi`s sarcoma-associated h
acuggcgcguugccg

SEQ ID NO: 351675 - RNA, 19 nt, Human herpesvirus 8 (Kaposi`s sarcoma-associated h
acugggacuugauaaucuc

SEQ ID NO: 351676 - RNA, 17 nt, Human herpesvirus 8 (Kaposi`s sarcoma-associated h
acugucgagacauguca

SEQ ID NO: 351677 - RNA, 16 nt, Human herpesvirus 8 (Kaposi`s sarcoma-associated h
acugugggugcacuga

SEQ ID NO: 351678 - RNA, 19 nt, Human herpesvirus 8 (Kaposi`s sarcoma-associated h
acuguuaacccaaugucag

SEQ ID NO: 351679 - RNA, 23 nt, Human herpesvirus 8 (Kaposi`s sarcoma-associated h
acuguucuccacguagacgggga

SEQ ID NO: 351680 - RNA, 19 nt, Human herpesvirus 8 (Kaposi`s sarcoma-associated h
acuuacugcagcacuaggu

SEQ ID NO: 351681 - RNA, 18 nt, Human herpesvirus 8 (Kaposi`s sarcoma-associated h
acuuauaacaucaccaag

SEQ ID NO: 351682 - RNA, 20 nt, Human herpesvirus 8 (Kaposi`s sarcoma-associated h
acuucagccgcuugcugaua

SEQ ID NO: 351683 - RNA, 22 nt, Human herpesvirus 8 (Kaposi`s sarcoma-associated h
acuucccagauuaaacaaaaag

SEQ ID NO: 351684 - RNA, 18 nt, Human herpesvirus 8 (Kaposi`s sarcoma-associated h
acuucgggggaucuugua

SEQ ID NO: 351685 - RNA, 23 nt, Human herpesvirus 8 (Kaposi`s sarcoma-associated h
acuucuagcauaugcugccaaga

SEQ ID NO: 351686 - RNA, 20 nt, Human herpesvirus 8 (Kaposi`s sarcoma-associated h
acuuuauuauagaugcuuua

SEQ ID NO: 351687 - RNA, 22 nt, Human herpesvirus 8 (Kaposi`s sarcoma-associated h
acuuugcgugucuagacaauaa

SEQ ID NO: 351688 - RNA, 21 nt, Human herpesvirus 8 (Kaposi`s sarcoma-associated h
acuuuuccauugcacucagaa

SEQ ID NO: 351689 - RNA, 16 nt, Human herpesvirus 8 (Kaposi`s sarcoma-associated h
acuuuuucguggaccg

SEQ ID NO: 351690 - RNA, 19 nt, Human herpesvirus 8 (Kaposi`s sarcoma-associated h
acuuuuuguucuugugaug

SEQ ID NO: 351691 - RNA, 16 nt, Human herpesvirus 8 (Kaposi`s sarcoma-associated h
agaaaaccauacuguu

SEQ ID NO: 351692 - RNA, 22 nt, Human herpesvirus 8 (Kaposi`s sarcoma-associated h
agaaaaccauacuguuugcuua

SEQ ID NO: 351693 - RNA, 17 nt, Human herpesvirus 8 (Kaposi`s sarcoma-associated h
agaaacacugugaggca

SEQ ID NO: 351694 - RNA, 19 nt, Human herpesvirus 8 (Kaposi`s sarcoma-associated h
agaaacucccccaaccucu

SEQ ID NO: 351695 - RNA, 14 nt, Human herpesvirus 8 (Kaposi`s sarcoma-associated h
agaaaggugacuua

SEQ ID NO: 351696 - RNA, 18 nt, Human herpesvirus 8 (Kaposi`s sarcoma-associated h
agaaaggugacuuaucua

SEQ ID NO: 351697 - RNA, 13 nt, Human herpesvirus 8 (Kaposi`s sarcoma-associated h
agcguauucucag

SEQ ID NO: 351698 - RNA, 18 nt, Human herpesvirus 8 (Kaposi`s sarcoma-associated h
agcgucuuuaugauuucc

SEQ ID NO: 351699 - RNA, 16 nt, Human herpesvirus 8 (Kaposi`s sarcoma-associated h
agcgugacacuacuaa

SEQ ID NO: 351700 - RNA, 22 nt, Human herpesvirus 8 (Kaposi`s sarcoma-associated h
agcgugccugcuuacaaugugu

SEQ ID NO: 351701 - RNA, 22 nt, Human herpesvirus 8 (Kaposi`s sarcoma-associated h
agcgugucgcccgucacuggau

SEQ ID NO: 351702 - RNA, 13 nt, Human herpesvirus 8 (Kaposi`s sarcoma-associated h
agcuacaaauguu

SEQ ID NO: 351703 - RNA, 22 nt, Human herpesvirus 8 (Kaposi`s sarcoma-associated h
agcuaccugcaaacuauacaca

SEQ ID NO: 351704 - RNA, 14 nt, Human herpesvirus 8 (Kaposi`s sarcoma-associated h
agcuagcagugcua

SEQ ID NO: 351705 - RNA, 21 nt, Human herpesvirus 8 (Kaposi`s sarcoma-associated h
agcucaucaaugggagaacca

SEQ ID NO: 351706 - RNA, 13 nt, Human herpesvirus 8 (Kaposi`s sarcoma-associated h
agcugauguggug

SEQ ID NO: 351707 - RNA, 17 nt, Human herpesvirus 8 (Kaposi`s sarcoma-associated h
agcuggagugcugacca

SEQ ID NO: 351708 - RNA, 23 nt, Human herpesvirus 8 (Kaposi`s sarcoma-associated h
agcuggguauaaaggagggauuu

SEQ ID NO: 351709 - RNA, 16 nt, Human herpesvirus 8 (Kaposi`s sarcoma-associated h
agcugguaaccagcua

SEQ ID NO: 351710 - RNA, 14 nt, Human herpesvirus 8 (Kaposi`s sarcoma-associated h
agcugucacuaaua

SEQ ID NO: 351711 - RNA, 19 nt, Human herpesvirus 8 (Kaposi`s sarcoma-associated h
agcuguugugguuuuucuc

SEQ ID NO: 351712 - RNA, 14 nt, Human herpesvirus 8 (Kaposi`s sarcoma-associated h
agcuucaucguggu

SEQ ID NO: 351713 - RNA, 19 nt, Human herpesvirus 8 (Kaposi`s sarcoma-associated h
agcuucaucguggugcccu

SEQ ID NO: 351714 - RNA, 15 nt, Human herpesvirus 8 (Kaposi`s sarcoma-associated h
aggaaacugggugua

SEQ ID NO: 351715 - RNA, 14 nt, Human herpesvirus 8 (Kaposi`s sarcoma-associated h
aggaagagcacugu

SEQ ID NO: 351716 - RNA, 18 nt, Human herpesvirus 8 (Kaposi`s sarcoma-associated h
aggaagcauccggacuga

SEQ ID NO: 351717 - RNA, 20 nt, Human herpesvirus 8 (Kaposi`s sarcoma-associated h
aggaagcauccggacugaga

SEQ ID NO: 351718 - RNA, 20 nt, Human herpesvirus 8 (Kaposi`s sarcoma-associated h
aggaaugcauauggacuguu

SEQ ID NO: 351719 - RNA, 21 nt, Human herpesvirus 8 (Kaposi`s sarcoma-associated h
aggaaugcauauggacuguua

SEQ ID NO: 351720 - RNA, 21 nt, Human herpesvirus 8 (Kaposi`s sarcoma-associated h
aggaauuuuacugguguacaa

SEQ ID NO: 351721 - RNA, 21 nt, Human herpesvirus 8 (Kaposi`s sarcoma-associated h
aggacaagcugaugugguggu

SEQ ID NO: 351722 - RNA, 14 nt, Human herpesvirus 8 (Kaposi`s sarcoma-associated h
aggacauuguauaa

SEQ ID NO: 351723 - RNA, 17 nt, Human herpesvirus 8 (Kaposi`s sarcoma-associated h
aggaccucgucuagcac

SEQ ID NO: 351724 - RNA, 19 nt, Human herpesvirus 8 (Kaposi`s sarcoma-associated h
aggagguugacagaacacc

SEQ ID NO: 351725 - RNA, 20 nt, Human herpesvirus 8 (Kaposi`s sarcoma-associated h
aggaguguugguuacacuaa

SEQ ID NO: 351726 - RNA, 19 nt, Human herpesvirus 8 (Kaposi`s sarcoma-associated h
aggaucuguuaacccaugg

SEQ ID NO: 351727 - RNA, 17 nt, Human herpesvirus 8 (Kaposi`s sarcoma-associated h
aggaucuuccucuaagg

SEQ ID NO: 351728 - RNA, 13 nt, Human herpesvirus 8 (Kaposi`s sarcoma-associated h
aggaugugucugc

SEQ ID NO: 351729 - RNA, 18 nt, Human herpesvirus 8 (Kaposi`s sarcoma-associated h
aggcaauugccaacgacc

SEQ ID NO: 351730 - RNA, 15 nt, Human herpesvirus 8 (Kaposi`s sarcoma-associated h
aggcacauaaggaac

SEQ ID NO: 351731 - RNA, 15 nt, Human herpesvirus 8 (Kaposi`s sarcoma-associated h
aggccaagugcauug

SEQ ID NO: 351732 - RNA, 22 nt, Human herpesvirus 8 (Kaposi`s sarcoma-associated h
aggcccccaccaaaccugguga

SEQ ID NO: 351733 - RNA, 18 nt, Human herpesvirus 8 (Kaposi`s sarcoma-associated h
aggcccgagaaacacugu

SEQ ID NO: 351734 - RNA, 12 nt, Human herpesvirus 8 (Kaposi`s sarcoma-associated h
aggccuaucuga

SEQ ID NO: 351735 - RNA, 18 nt, Human herpesvirus 8 (Kaposi`s sarcoma-associated h
aggccucauaauaaugau

SEQ ID NO: 351736 - RNA, 22 nt, Human herpesvirus 8 (Kaposi`s sarcoma-associated h
aggcgcaaacuucggaauuucc

SEQ ID NO: 351737 - RNA, 15 nt, Human herpesvirus 8 (Kaposi`s sarcoma-associated h
aggcuaggugcccag

SEQ ID NO: 351738 - RNA, 21 nt, Human herpesvirus 8 (Kaposi`s sarcoma-associated h
aggcuagugcuguaauggugu

SEQ ID NO: 351739 - RNA, 14 nt, Human herpesvirus 8 (Kaposi`s sarcoma-associated h
aggcuggaauggau

SEQ ID NO: 351740 - RNA, 18 nt, Human herpesvirus 8 (Kaposi`s sarcoma-associated h
agggaaauggggaacaca

SEQ ID NO: 351741 - RNA, 14 nt, Human herpesvirus 8 (Kaposi`s sarcoma-associated h
agggacguuugcag

SEQ ID NO: 351742 - RNA, 13 nt, Human herpesvirus 8 (Kaposi`s sarcoma-associated h
aggggaguagggu

SEQ ID NO: 351743 - RNA, 22 nt, Human herpesvirus 8 (Kaposi`s sarcoma-associated h
aggggcuuaugucauuuuuacu

SEQ ID NO: 351744 - RNA, 16 nt, Human herpesvirus 8 (Kaposi`s sarcoma-associated h
agggggaugagccaga

SEQ ID NO: 351745 - RNA, 18 nt, Human herpesvirus 8 (Kaposi`s sarcoma-associated h
aggggguguccccugcaa

SEQ ID NO: 351746 - RNA, 22 nt, Human herpesvirus 8 (Kaposi`s sarcoma-associated h
agggugaaacccggauuugccc

SEQ ID NO: 351747 - RNA, 20 nt, Human herpesvirus 8 (Kaposi`s sarcoma-associated h
agggugcccugguugacaca

SEQ ID NO: 351748 - RNA, 20 nt, Human herpesvirus 8 (Kaposi`s sarcoma-associated h
aggucuccgagcacugcgag

SEQ ID NO: 351749 - RNA, 16 nt, Human herpesvirus 8 (Kaposi`s sarcoma-associated h
aggucugucacuagaa

SEQ ID NO: 351750 - RNA, 20 nt, Human herpesvirus 8 (Kaposi`s sarcoma-associated h
aggugacuuaucuaaaaaga

SEQ ID NO: 351751 - RNA, 19 nt, Human herpesvirus 8 (Kaposi`s sarcoma-associated h
aggugagagaccccgugau

SEQ ID NO: 351752 - RNA, 13 nt, Human herpesvirus 8 (Kaposi`s sarcoma-associated h
aggugggugugca

SEQ ID NO: 351753 - RNA, 17 nt, Human herpesvirus 8 (Kaposi`s sarcoma-associated h
aggugucugcgggacaa

SEQ ID NO: 351754 - RNA, 17 nt, Human herpesvirus 8 (Kaposi`s sarcoma-associated h
agguuaggaucuugccc

SEQ ID NO: 351755 - RNA, 20 nt, Human herpesvirus 8 (Kaposi`s sarcoma-associated h
agguugacagggacgcauau

SEQ ID NO: 351756 - RNA, 21 nt, Human herpesvirus 8 (Kaposi`s sarcoma-associated h
agguuguaacacaaaagcaag

SEQ ID NO: 351757 - RNA, 22 nt, Human herpesvirus 8 (Kaposi`s sarcoma-associated h
aguaagucguccgacaugugcu

SEQ ID NO: 351758 - RNA, 12 nt, Human herpesvirus 8 (Kaposi`s sarcoma-associated h
aguaauguguau

SEQ ID NO: 351759 - RNA, 13 nt, Human herpesvirus 8 (Kaposi`s sarcoma-associated h
aguacauaagugu

SEQ ID NO: 351760 - RNA, 14 nt, Human herpesvirus 8 (Kaposi`s sarcoma-associated h
aguacugcuuaaac

SEQ ID NO: 351761 - RNA, 15 nt, Human herpesvirus 8 (Kaposi`s sarcoma-associated h
aguagaucagaguag

SEQ ID NO: 351762 - RNA, 21 nt, Human herpesvirus 8 (Kaposi`s sarcoma-associated h
aguagcuguugacuuucaaac

SEQ ID NO: 351763 - RNA, 17 nt, Human herpesvirus 8 (Kaposi`s sarcoma-associated h
aguaguucaacugcauu

SEQ ID NO: 351764 - RNA, 22 nt, Human herpesvirus 8 (Kaposi`s sarcoma-associated h
aguauauaagagcacacugugu

SEQ ID NO: 351765 - RNA, 15 nt, Human herpesvirus 8 (Kaposi`s sarcoma-associated h
aguauauuaguguua

SEQ ID NO: 351766 - RNA, 16 nt, Human herpesvirus 8 (Kaposi`s sarcoma-associated h
aguaugucgugggaaa

SEQ ID NO: 351767 - RNA, 12 nt, Human herpesvirus 8 (Kaposi`s sarcoma-associated h
aguauuaugcca

SEQ ID NO: 351768 - RNA, 11 nt, Human herpesvirus 8 (Kaposi`s sarcoma-associated h
aguauucucac

SEQ ID NO: 351769 - RNA, 15 nt, Human herpesvirus 8 (Kaposi`s sarcoma-associated h
agucacaucugugua

SEQ ID NO: 351770 - RNA, 16 nt, Human herpesvirus 8 (Kaposi`s sarcoma-associated h
agucaccggaggaaug

SEQ ID NO: 351771 - RNA, 19 nt, Human herpesvirus 8 (Kaposi`s sarcoma-associated h
agucacuuccccauuuugg

SEQ ID NO: 351772 - RNA, 15 nt, Human herpesvirus 8 (Kaposi`s sarcoma-associated h
agucauuaaacgaca

SEQ ID NO: 351773 - RNA, 20 nt, Human herpesvirus 8 (Kaposi`s sarcoma-associated h
aguccaaauaaaccagacac

SEQ ID NO: 351774 - RNA, 19 nt, Human herpesvirus 8 (Kaposi`s sarcoma-associated h
agucgccgguagcugccug

SEQ ID NO: 351775 - RNA, 21 nt, Human herpesvirus 8 (Kaposi`s sarcoma-associated h
agucguccgacaugugcuuuu

SEQ ID NO: 351776 - RNA, 17 nt, Human herpesvirus 8 (Kaposi`s sarcoma-associated h
auauguccuucacuuug

SEQ ID NO: 351777 - RNA, 13 nt, Human herpesvirus 8 (Kaposi`s sarcoma-associated h
auaugugugccca

SEQ ID NO: 351778 - RNA, 18 nt, Human herpesvirus 8 (Kaposi`s sarcoma-associated h
auauuaguguuauaagaa

SEQ ID NO: 351779 - RNA, 15 nt, Human herpesvirus 8 (Kaposi`s sarcoma-associated h
auauugauagccacu

SEQ ID NO: 351780 - RNA, 18 nt, Human herpesvirus 8 (Kaposi`s sarcoma-associated h
auauugauagccacuaug

SEQ ID NO: 351781 - RNA, 11 nt, Human herpesvirus 8 (Kaposi`s sarcoma-associated h
aucaacacuuc

SEQ ID NO: 351782 - RNA, 11 nt, Human herpesvirus 8 (Kaposi`s sarcoma-associated h
aucaacuaagg

SEQ ID NO: 351783 - RNA, 22 nt, Human herpesvirus 8 (Kaposi`s sarcoma-associated h
aucaccaagggcuuuaacuaua

SEQ ID NO: 351784 - RNA, 14 nt, Human herpesvirus 8 (Kaposi`s sarcoma-associated h
aucacccagugugc

SEQ ID NO: 351785 - RNA, 15 nt, Human herpesvirus 8 (Kaposi`s sarcoma-associated h
aucacccagugugcg

SEQ ID NO: 351786 - RNA, 18 nt, Human herpesvirus 8 (Kaposi`s sarcoma-associated h
aucacugcggguuaauag

SEQ ID NO: 351787 - RNA, 23 nt, Human herpesvirus 8 (Kaposi`s sarcoma-associated h
aucacugcggguuaauaggauuu

SEQ ID NO: 351788 - RNA, 11 nt, Human herpesvirus 8 (Kaposi`s sarcoma-associated h
aucacuuccag

SEQ ID NO: 351789 - RNA, 13 nt, Human herpesvirus 8 (Kaposi`s sarcoma-associated h
aucacuuccagga

SEQ ID NO: 351790 - RNA, 17 nt, Human herpesvirus 8 (Kaposi`s sarcoma-associated h
aucagaacaguggugca

SEQ ID NO: 351791 - RNA, 21 nt, Human herpesvirus 8 (Kaposi`s sarcoma-associated h
aucaggcggggaggagggggu

SEQ ID NO: 351792 - RNA, 19 nt, Human herpesvirus 8 (Kaposi`s sarcoma-associated h
aucaucgcaggaugcauaa

SEQ ID NO: 351793 - RNA, 20 nt, Human herpesvirus 8 (Kaposi`s sarcoma-associated h
aucaucgcaggaugcauaag

SEQ ID NO: 351794 - RNA, 22 nt, Human herpesvirus 8 (Kaposi`s sarcoma-associated h
aucaucugcagacccuuaggga

SEQ ID NO: 351795 - RNA, 23 nt, Human herpesvirus 8 (Kaposi`s sarcoma-associated h
aucauguacgucguaagccagug

SEQ ID NO: 351796 - RNA, 14 nt, Human herpesvirus 8 (Kaposi`s sarcoma-associated h
auccacccuaauac

SEQ ID NO: 351797 - RNA, 22 nt, Human herpesvirus 8 (Kaposi`s sarcoma-associated h
auccacggugucguguaugcca

SEQ ID NO: 351798 - RNA, 21 nt, Human herpesvirus 8 (Kaposi`s sarcoma-associated h
auccacucagguguuuuccaa

SEQ ID NO: 351799 - RNA, 20 nt, Human herpesvirus 8 (Kaposi`s sarcoma-associated h
auccaugucuuuccgugucu

SEQ ID NO: 351800 - RNA, 19 nt, Human herpesvirus 8 (Kaposi`s sarcoma-associated h
auccgagcaccucagaaag

SEQ ID NO: 351801 - RNA, 18 nt, Human herpesvirus 8 (Kaposi`s sarcoma-associated h
auccgcgggcuacguggu

SEQ ID NO: 351802 - RNA, 23 nt, Human herpesvirus 8 (Kaposi`s sarcoma-associated h
auccggcagcaauauuaaaggga

SEQ ID NO: 351803 - RNA, 14 nt, Human herpesvirus 8 (Kaposi`s sarcoma-associated h
auccuaggugacug

SEQ ID NO: 351804 - RNA, 14 nt, Human herpesvirus 8 (Kaposi`s sarcoma-associated h
aucgaguaccccuc

SEQ ID NO: 351805 - RNA, 20 nt, Human herpesvirus 8 (Kaposi`s sarcoma-associated h
aucgcauaauaaaacaaaua

SEQ ID NO: 351806 - RNA, 19 nt, Human herpesvirus 8 (Kaposi`s sarcoma-associated h
aucgucaucucuaaucgag

SEQ ID NO: 351807 - RNA, 17 nt, Human herpesvirus 8 (Kaposi`s sarcoma-associated h
aucuacccugauuagca

SEQ ID NO: 351808 - RNA, 22 nt, Human herpesvirus 8 (Kaposi`s sarcoma-associated h
aucuacccugauuagcacugua

SEQ ID NO: 351809 - RNA, 18 nt, Human herpesvirus 8 (Kaposi`s sarcoma-associated h
aucuacuuuggacaguuu

SEQ ID NO: 351810 - RNA, 15 nt, Human herpesvirus 8 (Kaposi`s sarcoma-associated h
aucucauuaaaccua

SEQ ID NO: 351811 - RNA, 21 nt, Human herpesvirus 8 (Kaposi`s sarcoma-associated h
aucugaaacuaccagccauca

SEQ ID NO: 351812 - RNA, 15 nt, Human herpesvirus 8 (Kaposi`s sarcoma-associated h
aucuggaaaacaagg

SEQ ID NO: 351813 - RNA, 14 nt, Human herpesvirus 8 (Kaposi`s sarcoma-associated h
aucuggauacacua

SEQ ID NO: 351814 - RNA, 19 nt, Human herpesvirus 8 (Kaposi`s sarcoma-associated h
aucuggauacacuacuuau

SEQ ID NO: 351815 - RNA, 17 nt, Human herpesvirus 8 (Kaposi`s sarcoma-associated h
aucuggggguuggcgaa

SEQ ID NO: 351816 - RNA, 20 nt, Human herpesvirus 8 (Kaposi`s sarcoma-associated h
aucuguguacaaaccaaauu

SEQ ID NO: 351817 - RNA, 14 nt, Human herpesvirus 8 (Kaposi`s sarcoma-associated h
aucuguuacuggca

SEQ ID NO: 351818 - RNA, 20 nt, Human herpesvirus 8 (Kaposi`s sarcoma-associated h
aucuuguauucucaucgcau

SEQ ID NO: 351819 - RNA, 19 nt, Human herpesvirus 8 (Kaposi`s sarcoma-associated h
augaaacauucggugagug

SEQ ID NO: 351820 - RNA, 23 nt, Human herpesvirus 8 (Kaposi`s sarcoma-associated h
augaauaacuuuauuacagguau

SEQ ID NO: 351821 - RNA, 17 nt, Human herpesvirus 8 (Kaposi`s sarcoma-associated h
augaauacccuggauca

SEQ ID NO: 351822 - RNA, 18 nt, Human herpesvirus 8 (Kaposi`s sarcoma-associated h
augaauacccuggaucag

SEQ ID NO: 351823 - RNA, 14 nt, Human herpesvirus 8 (Kaposi`s sarcoma-associated h
augacaacugccac

SEQ ID NO: 351824 - RNA, 19 nt, Human herpesvirus 8 (Kaposi`s sarcoma-associated h
augacaccccucccucgcg

SEQ ID NO: 351825 - RNA, 16 nt, Human herpesvirus 8 (Kaposi`s sarcoma-associated h
augacgauguucagga

SEQ ID NO: 351826 - RNA, 22 nt, Human herpesvirus 8 (Kaposi`s sarcoma-associated h
augacuacugugaaguuuacau

SEQ ID NO: 351827 - RNA, 13 nt, Human herpesvirus 8 (Kaposi`s sarcoma-associated h
augacuccgggga

SEQ ID NO: 351828 - RNA, 21 nt, Human herpesvirus 8 (Kaposi`s sarcoma-associated h
augagccucccuuagugacau

SEQ ID NO: 351829 - RNA, 22 nt, Human herpesvirus 8 (Kaposi`s sarcoma-associated h
augagccucccuuagugacauc

SEQ ID NO: 351830 - RNA, 14 nt, Human herpesvirus 8 (Kaposi`s sarcoma-associated h
augaggccuaucug

SEQ ID NO: 351831 - RNA, 16 nt, Human herpesvirus 8 (Kaposi`s sarcoma-associated h
augaggggucugaucc

SEQ ID NO: 351832 - RNA, 20 nt, Human herpesvirus 8 (Kaposi`s sarcoma-associated h
augagucaggcguggucucu

SEQ ID NO: 351833 - RNA, 16 nt, Human herpesvirus 8 (Kaposi`s sarcoma-associated h
augauaggcaacauga

SEQ ID NO: 351834 - RNA, 22 nt, Human herpesvirus 8 (Kaposi`s sarcoma-associated h
augauaggcaacaugacauggu

SEQ ID NO: 351835 - RNA, 16 nt, Human herpesvirus 8 (Kaposi`s sarcoma-associated h
augaucguccacggac

SEQ ID NO: 351836 - RNA, 12 nt, Human herpesvirus 8 (Kaposi`s sarcoma-associated h
augauuacagag

SEQ ID NO: 351837 - RNA, 18 nt, Human herpesvirus 8 (Kaposi`s sarcoma-associated h
augauuacagagucacaa

SEQ ID NO: 351838 - RNA, 18 nt, Human herpesvirus 8 (Kaposi`s sarcoma-associated h
augcaaaauacauuuuau

SEQ ID NO: 351839 - RNA, 13 nt, Human herpesvirus 8 (Kaposi`s sarcoma-associated h
augcaacaagcaa

SEQ ID NO: 351840 - RNA, 23 nt, Human herpesvirus 8 (Kaposi`s sarcoma-associated h
augcagcagcgugacacuacuaa

SEQ ID NO: 351841 - RNA, 12 nt, Human herpesvirus 8 (Kaposi`s sarcoma-associated h
augcaguaucua

SEQ ID NO: 351842 - RNA, 21 nt, Human herpesvirus 8 (Kaposi`s sarcoma-associated h
augcauaucguugacaugugg

SEQ ID NO: 351843 - RNA, 13 nt, Human herpesvirus 8 (Kaposi`s sarcoma-associated h
augcaugcaauac

SEQ ID NO: 351844 - RNA, 17 nt, Human herpesvirus 8 (Kaposi`s sarcoma-associated h
augccaguagcaugcug

SEQ ID NO: 351845 - RNA, 15 nt, Human herpesvirus 8 (Kaposi`s sarcoma-associated h
augcccaacuucauc

SEQ ID NO: 351846 - RNA, 22 nt, Human herpesvirus 8 (Kaposi`s sarcoma-associated h
augcccccuuuuuucaguggga

SEQ ID NO: 351847 - RNA, 18 nt, Human herpesvirus 8 (Kaposi`s sarcoma-associated h
augcgcggcacauugugu

SEQ ID NO: 351848 - RNA, 18 nt, Human herpesvirus 8 (Kaposi`s sarcoma-associated h
augcguucuccugcauac

SEQ ID NO: 351849 - RNA, 16 nt, Human herpesvirus 8 (Kaposi`s sarcoma-associated h
augcuagcgugucuga

SEQ ID NO: 351850 - RNA, 17 nt, Human herpesvirus 8 (Kaposi`s sarcoma-associated h
augcucggcaacauuca

SEQ ID NO: 351851 - RNA, 12 nt, Human herpesvirus 8 (Kaposi`s sarcoma-associated h
augcucuggcca

SEQ ID NO: 351852 - RNA, 19 nt, Human herpesvirus 8 (Kaposi`s sarcoma-associated h
augcugaagagcaggcgua

SEQ ID NO: 351853 - RNA, 17 nt, Human herpesvirus 8 (Kaposi`s sarcoma-associated h
augcugccccuagaccu

SEQ ID NO: 351854 - RNA, 19 nt, Human herpesvirus 8 (Kaposi`s sarcoma-associated h
auggaagaccuaaccgcaa

SEQ ID NO: 351855 - RNA, 18 nt, Human herpesvirus 8 (Kaposi`s sarcoma-associated h
auuuucucacgaaucugg

SEQ ID NO: 351856 - RNA, 23 nt, Human herpesvirus 8 (Kaposi`s sarcoma-associated h
auuuuuaacaguuuggugcaaag

SEQ ID NO: 351857 - RNA, 13 nt, Human herpesvirus 8 (Kaposi`s sarcoma-associated h
auuuuucacccac

SEQ ID NO: 351858 - RNA, 21 nt, Human herpesvirus 8 (Kaposi`s sarcoma-associated h
auuuuuuacggacaauacuga

SEQ ID NO: 351859 - RNA, 10 nt, Human herpesvirus 8 (Kaposi`s sarcoma-associated h
caaaaacaca

SEQ ID NO: 351860 - RNA, 14 nt, Human herpesvirus 8 (Kaposi`s sarcoma-associated h
caaaaacacaauca

SEQ ID NO: 351861 - RNA, 22 nt, Human herpesvirus 8 (Kaposi`s sarcoma-associated h
caaaaacagcuggaccggaggc

SEQ ID NO: 351862 - RNA, 22 nt, Human herpesvirus 8 (Kaposi`s sarcoma-associated h
caaaacacgcaccgcuugaccu

SEQ ID NO: 351863 - RNA, 20 nt, Human herpesvirus 8 (Kaposi`s sarcoma-associated h
caaaagaacauugaugccuu

SEQ ID NO: 351864 - RNA, 15 nt, Human herpesvirus 8 (Kaposi`s sarcoma-associated h
caaaagcaaguggac

SEQ ID NO: 351865 - RNA, 19 nt, Human herpesvirus 8 (Kaposi`s sarcoma-associated h
caaaaucuguugaauguga

SEQ ID NO: 351866 - RNA, 21 nt, Human herpesvirus 8 (Kaposi`s sarcoma-associated h
caaaaucuguugaaugugauc

SEQ ID NO: 351867 - RNA, 15 nt, Human herpesvirus 8 (Kaposi`s sarcoma-associated h
caaaaugugcuuugc

SEQ ID NO: 351868 - RNA, 23 nt, Human herpesvirus 8 (Kaposi`s sarcoma-associated h
caaacaaggucaauacauuguga

SEQ ID NO: 351869 - RNA, 20 nt, Human herpesvirus 8 (Kaposi`s sarcoma-associated h
caaacaugggguuccagugc

SEQ ID NO: 351870 - RNA, 22 nt, Human herpesvirus 8 (Kaposi`s sarcoma-associated h
caaacaugggguuccagugcgc

SEQ ID NO: 351871 - RNA, 10 nt, Human herpesvirus 8 (Kaposi`s sarcoma-associated h
caaaccacac

SEQ ID NO: 351872 - RNA, 15 nt, Human herpesvirus 8 (Kaposi`s sarcoma-associated h
caaaccccauggcag

SEQ ID NO: 351873 - RNA, 22 nt, Human herpesvirus 8 (Kaposi`s sarcoma-associated h
caaacgccccucuuggcuguua

SEQ ID NO: 351874 - RNA, 23 nt, Human herpesvirus 8 (Kaposi`s sarcoma-associated h
caaacugggacuugauaaucucc

SEQ ID NO: 351875 - RNA, 19 nt, Human herpesvirus 8 (Kaposi`s sarcoma-associated h
caaacuuuuccauugcacu

SEQ ID NO: 351876 - RNA, 18 nt, Human herpesvirus 8 (Kaposi`s sarcoma-associated h
caaagacgccuuccucag

SEQ ID NO: 351877 - RNA, 19 nt, Human herpesvirus 8 (Kaposi`s sarcoma-associated h
caaagagugucaguaaaau

SEQ ID NO: 351878 - RNA, 16 nt, Human herpesvirus 8 (Kaposi`s sarcoma-associated h
caaaguauauuagugu

SEQ ID NO: 351879 - RNA, 21 nt, Human herpesvirus 8 (Kaposi`s sarcoma-associated h
caaauaaaccgaaguacugcu

SEQ ID NO: 351880 - RNA, 21 nt, Human herpesvirus 8 (Kaposi`s sarcoma-associated h
caaauauugaggaucuguuaa

SEQ ID NO: 351881 - RNA, 20 nt, Human herpesvirus 8 (Kaposi`s sarcoma-associated h
caaaugcccagaaugaagga

SEQ ID NO: 351882 - RNA, 22 nt, Human herpesvirus 8 (Kaposi`s sarcoma-associated h
caaaugcccagaaugaaggaca

SEQ ID NO: 351883 - RNA, 16 nt, Human herpesvirus 8 (Kaposi`s sarcoma-associated h
caaaugcggccaguuu

SEQ ID NO: 351884 - RNA, 19 nt, Human herpesvirus 8 (Kaposi`s sarcoma-associated h
caaauguuuuaugcaaaau

SEQ ID NO: 351885 - RNA, 13 nt, Human herpesvirus 8 (Kaposi`s sarcoma-associated h
caacaaacaagac

SEQ ID NO: 351886 - RNA, 16 nt, Human herpesvirus 8 (Kaposi`s sarcoma-associated h
caacaccagaccgcca

SEQ ID NO: 351887 - RNA, 17 nt, Human herpesvirus 8 (Kaposi`s sarcoma-associated h
caacacuggacacuaaa

SEQ ID NO: 351888 - RNA, 19 nt, Human herpesvirus 8 (Kaposi`s sarcoma-associated h
caacauagacaugccccaa

SEQ ID NO: 351889 - RNA, 14 nt, Human herpesvirus 8 (Kaposi`s sarcoma-associated h
caacaugacauggu

SEQ ID NO: 351890 - RNA, 20 nt, Human herpesvirus 8 (Kaposi`s sarcoma-associated h
caacauuaaacacauacaau

SEQ ID NO: 351891 - RNA, 20 nt, Human herpesvirus 8 (Kaposi`s sarcoma-associated h
caacccucuacucuuccggg

SEQ ID NO: 351892 - RNA, 16 nt, Human herpesvirus 8 (Kaposi`s sarcoma-associated h
caagacacacccgcca

SEQ ID NO: 351893 - RNA, 16 nt, Human herpesvirus 8 (Kaposi`s sarcoma-associated h
caagacaguugugauc

SEQ ID NO: 351894 - RNA, 19 nt, Human herpesvirus 8 (Kaposi`s sarcoma-associated h
caagaccgagcguauucuc

SEQ ID NO: 351895 - RNA, 20 nt, Human herpesvirus 8 (Kaposi`s sarcoma-associated h
caagaccgagcguauucuca

SEQ ID NO: 351896 - RNA, 21 nt, Human herpesvirus 8 (Kaposi`s sarcoma-associated h
caagaccgagcguauucucag

SEQ ID NO: 351897 - RNA, 16 nt, Human herpesvirus 8 (Kaposi`s sarcoma-associated h
caagagcgagugugcc

SEQ ID NO: 351898 - RNA, 16 nt, Human herpesvirus 8 (Kaposi`s sarcoma-associated h
caagcacaacauuaaa

SEQ ID NO: 351899 - RNA, 13 nt, Human herpesvirus 8 (Kaposi`s sarcoma-associated h
caagcuaccugca

SEQ ID NO: 351900 - RNA, 23 nt, Human herpesvirus 8 (Kaposi`s sarcoma-associated h
caaggaaugcauauggacuguua

SEQ ID NO: 351901 - RNA, 17 nt, Human herpesvirus 8 (Kaposi`s sarcoma-associated h
caaggagugggaucucc

SEQ ID NO: 351902 - RNA, 16 nt, Human herpesvirus 8 (Kaposi`s sarcoma-associated h
caaggccugugcccaa

SEQ ID NO: 351903 - RNA, 22 nt, Human herpesvirus 8 (Kaposi`s sarcoma-associated h
caagguauuuuuuagcauccua

SEQ ID NO: 351904 - RNA, 19 nt, Human herpesvirus 8 (Kaposi`s sarcoma-associated h
caaggucaauacauuguga

SEQ ID NO: 351905 - RNA, 22 nt, Human herpesvirus 8 (Kaposi`s sarcoma-associated h
caagguuguaacacaaaagcaa

SEQ ID NO: 351906 - RNA, 14 nt, Human herpesvirus 8 (Kaposi`s sarcoma-associated h
caagucuucuuguc

SEQ ID NO: 351907 - RNA, 15 nt, Human herpesvirus 8 (Kaposi`s sarcoma-associated h
caagucuucuuguca

SEQ ID NO: 351908 - RNA, 18 nt, Human herpesvirus 8 (Kaposi`s sarcoma-associated h
caagucuucuugucacuc

SEQ ID NO: 351909 - RNA, 12 nt, Human herpesvirus 8 (Kaposi`s sarcoma-associated h
caauaaaagaga

SEQ ID NO: 351910 - RNA, 18 nt, Human herpesvirus 8 (Kaposi`s sarcoma-associated h
caauaaagccgagccaca

SEQ ID NO: 351911 - RNA, 17 nt, Human herpesvirus 8 (Kaposi`s sarcoma-associated h
caauaaagcguagauuu

SEQ ID NO: 351912 - RNA, 18 nt, Human herpesvirus 8 (Kaposi`s sarcoma-associated h
caauaaagcugagccaca

SEQ ID NO: 351913 - RNA, 19 nt, Human herpesvirus 8 (Kaposi`s sarcoma-associated h
caauaaagcugagccacaa

SEQ ID NO: 351914 - RNA, 22 nt, Human herpesvirus 8 (Kaposi`s sarcoma-associated h
caauaaagcugagccacaaacg

SEQ ID NO: 351915 - RNA, 16 nt, Human herpesvirus 8 (Kaposi`s sarcoma-associated h
caauacaagacaacua

SEQ ID NO: 351916 - RNA, 19 nt, Human herpesvirus 8 (Kaposi`s sarcoma-associated h
caauacccccaaaaugucc

SEQ ID NO: 351917 - RNA, 21 nt, Human herpesvirus 8 (Kaposi`s sarcoma-associated h
caauacuauuauaacauuuug

SEQ ID NO: 351918 - RNA, 19 nt, Human herpesvirus 8 (Kaposi`s sarcoma-associated h
caauacuuaagucccugaa

SEQ ID NO: 351919 - RNA, 15 nt, Human herpesvirus 8 (Kaposi`s sarcoma-associated h
caauagggauacugu

SEQ ID NO: 351920 - RNA, 21 nt, Human herpesvirus 8 (Kaposi`s sarcoma-associated h
caauauuauuuauuuuuuacu

SEQ ID NO: 351921 - RNA, 16 nt, Human herpesvirus 8 (Kaposi`s sarcoma-associated h
caaucacgguugcacc

SEQ ID NO: 351922 - RNA, 21 nt, Human herpesvirus 8 (Kaposi`s sarcoma-associated h
caauccuuaagaaaguggaua

SEQ ID NO: 351923 - RNA, 15 nt, Human herpesvirus 8 (Kaposi`s sarcoma-associated h
caaucuggcauaugc

SEQ ID NO: 351924 - RNA, 16 nt, Human herpesvirus 8 (Kaposi`s sarcoma-associated h
caauguacugccauga

SEQ ID NO: 351925 - RNA, 19 nt, Human herpesvirus 8 (Kaposi`s sarcoma-associated h
caaugugccgcgcaucaac

SEQ ID NO: 351926 - RNA, 18 nt, Human herpesvirus 8 (Kaposi`s sarcoma-associated h
caauguuaauguucucua

SEQ ID NO: 351927 - RNA, 14 nt, Human herpesvirus 8 (Kaposi`s sarcoma-associated h
caauugacugugga

SEQ ID NO: 351928 - RNA, 14 nt, Human herpesvirus 8 (Kaposi`s sarcoma-associated h
caauuggaugcuau

SEQ ID NO: 351929 - RNA, 16 nt, Human herpesvirus 8 (Kaposi`s sarcoma-associated h
cacaaaagcaagugga

SEQ ID NO: 351930 - RNA, 19 nt, Human herpesvirus 8 (Kaposi`s sarcoma-associated h
cacaagggccaagcuacug

SEQ ID NO: 351931 - RNA, 21 nt, Human herpesvirus 8 (Kaposi`s sarcoma-associated h
cacaauauaagaaccaaagga

SEQ ID NO: 351932 - RNA, 14 nt, Human herpesvirus 8 (Kaposi`s sarcoma-associated h
cacaauuucauuaa

SEQ ID NO: 351933 - RNA, 14 nt, Human herpesvirus 8 (Kaposi`s sarcoma-associated h
cagaguguccagua

SEQ ID NO: 351934 - RNA, 20 nt, Human herpesvirus 8 (Kaposi`s sarcoma-associated h
cagaguuuuaugggcucauc

SEQ ID NO: 351935 - RNA, 20 nt, Human herpesvirus 8 (Kaposi`s sarcoma-associated h
cagaugaauaugauccugua

SEQ ID NO: 351936 - RNA, 14 nt, Human herpesvirus 8 (Kaposi`s sarcoma-associated h
cagaugauaggcaa

SEQ ID NO: 351937 - RNA, 16 nt, Human herpesvirus 8 (Kaposi`s sarcoma-associated h
cagauguucuugccag

SEQ ID NO: 351938 - RNA, 12 nt, Human herpesvirus 8 (Kaposi`s sarcoma-associated h
cagcaaagcaca

SEQ ID NO: 351939 - RNA, 21 nt, Human herpesvirus 8 (Kaposi`s sarcoma-associated h
cagcaaagcacauuuugcacg

SEQ ID NO: 351940 - RNA, 13 nt, Human herpesvirus 8 (Kaposi`s sarcoma-associated h
cagcaacugcguc

SEQ ID NO: 351941 - RNA, 15 nt, Human herpesvirus 8 (Kaposi`s sarcoma-associated h
cagcacauaugucuc

SEQ ID NO: 351942 - RNA, 16 nt, Human herpesvirus 8 (Kaposi`s sarcoma-associated h
cagccaccacgccaca

SEQ ID NO: 351943 - RNA, 23 nt, Human herpesvirus 8 (Kaposi`s sarcoma-associated h
cagccaccacgccacaacccaac

SEQ ID NO: 351944 - RNA, 16 nt, Human herpesvirus 8 (Kaposi`s sarcoma-associated h
cagccaugugcugguu

SEQ ID NO: 351945 - RNA, 17 nt, Human herpesvirus 8 (Kaposi`s sarcoma-associated h
cagcccauaguauguaa

SEQ ID NO: 351946 - RNA, 14 nt, Human herpesvirus 8 (Kaposi`s sarcoma-associated h
cagccuaacaugug

SEQ ID NO: 351947 - RNA, 20 nt, Human herpesvirus 8 (Kaposi`s sarcoma-associated h
cagccucacggacaacgcca

SEQ ID NO: 351948 - RNA, 19 nt, Human herpesvirus 8 (Kaposi`s sarcoma-associated h
cagcgcucaauuaucuaca

SEQ ID NO: 351949 - RNA, 20 nt, Human herpesvirus 8 (Kaposi`s sarcoma-associated h
cagcucaucaaugggagaac

SEQ ID NO: 351950 - RNA, 23 nt, Human herpesvirus 8 (Kaposi`s sarcoma-associated h
cagcugaaucagcauauacaggu

SEQ ID NO: 351951 - RNA, 20 nt, Human herpesvirus 8 (Kaposi`s sarcoma-associated h
cagcuggacuggagucaggu

SEQ ID NO: 351952 - RNA, 22 nt, Human herpesvirus 8 (Kaposi`s sarcoma-associated h
caggaagugucgggaggcaugu

SEQ ID NO: 351953 - RNA, 22 nt, Human herpesvirus 8 (Kaposi`s sarcoma-associated h
caggaguauaucaggggaacca

SEQ ID NO: 351954 - RNA, 16 nt, Human herpesvirus 8 (Kaposi`s sarcoma-associated h
caggagucagagcagu

SEQ ID NO: 351955 - RNA, 17 nt, Human herpesvirus 8 (Kaposi`s sarcoma-associated h
caggagucagagcagug

SEQ ID NO: 351956 - RNA, 18 nt, Human herpesvirus 8 (Kaposi`s sarcoma-associated h
caggagucagagcagugc

SEQ ID NO: 351957 - RNA, 15 nt, Human herpesvirus 8 (Kaposi`s sarcoma-associated h
caggaucaacacuuc

SEQ ID NO: 351958 - RNA, 23 nt, Human herpesvirus 8 (Kaposi`s sarcoma-associated h
caggaugcauaagcugcauacau

SEQ ID NO: 351959 - RNA, 21 nt, Human herpesvirus 8 (Kaposi`s sarcoma-associated h
caggccaagauccaacccagc

SEQ ID NO: 351960 - RNA, 18 nt, Human herpesvirus 8 (Kaposi`s sarcoma-associated h
caggccaccauuccucuc

SEQ ID NO: 351961 - RNA, 15 nt, Human herpesvirus 8 (Kaposi`s sarcoma-associated h
cagggacaucaccuc

SEQ ID NO: 351962 - RNA, 22 nt, Human herpesvirus 8 (Kaposi`s sarcoma-associated h
caggggcagacccaaaaaggac

SEQ ID NO: 351963 - RNA, 16 nt, Human herpesvirus 8 (Kaposi`s sarcoma-associated h
cagguaaaacggccaa

SEQ ID NO: 351964 - RNA, 17 nt, Human herpesvirus 8 (Kaposi`s sarcoma-associated h
cagguaauuaacaucca

SEQ ID NO: 351965 - RNA, 21 nt, Human herpesvirus 8 (Kaposi`s sarcoma-associated h
cagguggcacccaacauccau

SEQ ID NO: 351966 - RNA, 14 nt, Human herpesvirus 8 (Kaposi`s sarcoma-associated h
cagguguccaagac

SEQ ID NO: 351967 - RNA, 15 nt, Human herpesvirus 8 (Kaposi`s sarcoma-associated h
cagguguccaagacu

SEQ ID NO: 351968 - RNA, 19 nt, Human herpesvirus 8 (Kaposi`s sarcoma-associated h
caggugucugcgggacaau

SEQ ID NO: 351969 - RNA, 18 nt, Human herpesvirus 8 (Kaposi`s sarcoma-associated h
caguauagugguuuacau

SEQ ID NO: 351970 - RNA, 12 nt, Human herpesvirus 8 (Kaposi`s sarcoma-associated h
caguauucucac

SEQ ID NO: 351971 - RNA, 17 nt, Human herpesvirus 8 (Kaposi`s sarcoma-associated h
cagucaacgucucuaua

SEQ ID NO: 351972 - RNA, 21 nt, Human herpesvirus 8 (Kaposi`s sarcoma-associated h
cagucgcuccuuauaacgcgu

SEQ ID NO: 351973 - RNA, 17 nt, Human herpesvirus 8 (Kaposi`s sarcoma-associated h
cagugagcgcgcucugu

SEQ ID NO: 351974 - RNA, 14 nt, Human herpesvirus 8 (Kaposi`s sarcoma-associated h
cagugccugcagua

SEQ ID NO: 351975 - RNA, 17 nt, Human herpesvirus 8 (Kaposi`s sarcoma-associated h
caguggaugaccaacag

SEQ ID NO: 351976 - RNA, 13 nt, Human herpesvirus 8 (Kaposi`s sarcoma-associated h
caguggugcacua

SEQ ID NO: 351977 - RNA, 20 nt, Human herpesvirus 8 (Kaposi`s sarcoma-associated h
cagugucuaugucuguguuu

SEQ ID NO: 351978 - RNA, 12 nt, Human herpesvirus 8 (Kaposi`s sarcoma-associated h
cagugugcagua

SEQ ID NO: 351979 - RNA, 16 nt, Human herpesvirus 8 (Kaposi`s sarcoma-associated h
cagugugcaguaguaa

SEQ ID NO: 351980 - RNA, 18 nt, Human herpesvirus 8 (Kaposi`s sarcoma-associated h
cagugugcuguccagcgu

SEQ ID NO: 351981 - RNA, 23 nt, Human herpesvirus 8 (Kaposi`s sarcoma-associated h
caguuaaccggcuuguacaguga

SEQ ID NO: 351982 - RNA, 23 nt, Human herpesvirus 8 (Kaposi`s sarcoma-associated h
caguugaucgauuucuguauaca

SEQ ID NO: 351983 - RNA, 16 nt, Human herpesvirus 8 (Kaposi`s sarcoma-associated h
cauaaaguacuuuucc

SEQ ID NO: 351984 - RNA, 13 nt, Human herpesvirus 8 (Kaposi`s sarcoma-associated h
cauaacacaguca

SEQ ID NO: 351985 - RNA, 20 nt, Human herpesvirus 8 (Kaposi`s sarcoma-associated h
cauaaccgagcucugcugcc

SEQ ID NO: 351986 - RNA, 21 nt, Human herpesvirus 8 (Kaposi`s sarcoma-associated h
cauaaguguuuggaguggagu

SEQ ID NO: 351987 - RNA, 22 nt, Human herpesvirus 8 (Kaposi`s sarcoma-associated h
cauaauaaaacaaauacauagu

SEQ ID NO: 351988 - RNA, 15 nt, Human herpesvirus 8 (Kaposi`s sarcoma-associated h
cauacacuagacugg

SEQ ID NO: 351989 - RNA, 13 nt, Human herpesvirus 8 (Kaposi`s sarcoma-associated h
cauaccuacuaag

SEQ ID NO: 351990 - RNA, 20 nt, Human herpesvirus 8 (Kaposi`s sarcoma-associated h
cauaccucaacccacacugg

SEQ ID NO: 351991 - RNA, 18 nt, Human herpesvirus 8 (Kaposi`s sarcoma-associated h
cauacguuuugaacaaug

SEQ ID NO: 351992 - RNA, 16 nt, Human herpesvirus 8 (Kaposi`s sarcoma-associated h
cauacugggaucccuu

SEQ ID NO: 351993 - RNA, 18 nt, Human herpesvirus 8 (Kaposi`s sarcoma-associated h
cauacugggaucccuuca

SEQ ID NO: 351994 - RNA, 13 nt, Human herpesvirus 8 (Kaposi`s sarcoma-associated h
cauagacaugccc

SEQ ID NO: 351995 - RNA, 21 nt, Human herpesvirus 8 (Kaposi`s sarcoma-associated h
cauagucacaucuguguacaa

SEQ ID NO: 351996 - RNA, 22 nt, Human herpesvirus 8 (Kaposi`s sarcoma-associated h
cauauacaagccggcaccaugg

SEQ ID NO: 351997 - RNA, 15 nt, Human herpesvirus 8 (Kaposi`s sarcoma-associated h
cauaucaaggucuuu

SEQ ID NO: 351998 - RNA, 14 nt, Human herpesvirus 8 (Kaposi`s sarcoma-associated h
cauauggacuguua

SEQ ID NO: 351999 - RNA, 22 nt, Human herpesvirus 8 (Kaposi`s sarcoma-associated h
cauauugguauaugacuacugu

SEQ ID NO: 352000 - RNA, 16 nt, Human herpesvirus 8 (Kaposi`s sarcoma-associated h
caucaacgauacugau

SEQ ID NO: 352001 - RNA, 20 nt, Human herpesvirus 8 (Kaposi`s sarcoma-associated h
caucaacgauacugaucacu

SEQ ID NO: 352002 - RNA, 15 nt, Human herpesvirus 8 (Kaposi`s sarcoma-associated h
caucacuuccaggau

SEQ ID NO: 352003 - RNA, 15 nt, Human herpesvirus 8 (Kaposi`s sarcoma-associated h
caucagcggcaccac

SEQ ID NO: 352004 - RNA, 16 nt, Human herpesvirus 8 (Kaposi`s sarcoma-associated h
caucauaaaguacuuu

SEQ ID NO: 352005 - RNA, 23 nt, Human herpesvirus 8 (Kaposi`s sarcoma-associated h
cauccacaggaagcgaaaagccu

SEQ ID NO: 352006 - RNA, 12 nt, Human herpesvirus 8 (Kaposi`s sarcoma-associated h
caucccauaacg

SEQ ID NO: 352007 - RNA, 23 nt, Human herpesvirus 8 (Kaposi`s sarcoma-associated h
cauccccggcguccucucaugug

SEQ ID NO: 352008 - RNA, 17 nt, Human herpesvirus 8 (Kaposi`s sarcoma-associated h
caucgcugccccaaaag

SEQ ID NO: 352009 - RNA, 15 nt, Human herpesvirus 8 (Kaposi`s sarcoma-associated h
caucgucuucccacg

SEQ ID NO: 352010 - RNA, 19 nt, Human herpesvirus 8 (Kaposi`s sarcoma-associated h
caucuccggacuacaucca

SEQ ID NO: 352011 - RNA, 20 nt, Human herpesvirus 8 (Kaposi`s sarcoma-associated h
ccaccguguggcugcaaaau

SEQ ID NO: 352012 - RNA, 18 nt, Human herpesvirus 8 (Kaposi`s sarcoma-associated h
ccacggggacauggacag

SEQ ID NO: 352013 - RNA, 22 nt, Human herpesvirus 8 (Kaposi`s sarcoma-associated h
ccacgguggcccugccuagugg

SEQ ID NO: 352014 - RNA, 22 nt, Human herpesvirus 8 (Kaposi`s sarcoma-associated h
ccacggugucguguaugccaau

SEQ ID NO: 352015 - RNA, 20 nt, Human herpesvirus 8 (Kaposi`s sarcoma-associated h
ccacguggagccaacaaaca

SEQ ID NO: 352016 - RNA, 16 nt, Human herpesvirus 8 (Kaposi`s sarcoma-associated h
ccacucuugccaacga

SEQ ID NO: 352017 - RNA, 21 nt, Human herpesvirus 8 (Kaposi`s sarcoma-associated h
ccacuugggugcacagagaua

SEQ ID NO: 352018 - RNA, 18 nt, Human herpesvirus 8 (Kaposi`s sarcoma-associated h
ccagaagcgcaccacaga

SEQ ID NO: 352019 - RNA, 13 nt, Human herpesvirus 8 (Kaposi`s sarcoma-associated h
ccagacaccaaag

SEQ ID NO: 352020 - RNA, 20 nt, Human herpesvirus 8 (Kaposi`s sarcoma-associated h
ccagaccgccaccagguggc

SEQ ID NO: 352021 - RNA, 22 nt, Human herpesvirus 8 (Kaposi`s sarcoma-associated h
ccagacuuugugugguaagaag

SEQ ID NO: 352022 - RNA, 17 nt, Human herpesvirus 8 (Kaposi`s sarcoma-associated h
ccagauaccccugcacc

SEQ ID NO: 352023 - RNA, 17 nt, Human herpesvirus 8 (Kaposi`s sarcoma-associated h
ccagaugaauaugaucc

SEQ ID NO: 352024 - RNA, 12 nt, Human herpesvirus 8 (Kaposi`s sarcoma-associated h
ccagcaaagcac

SEQ ID NO: 352025 - RNA, 17 nt, Human herpesvirus 8 (Kaposi`s sarcoma-associated h
ccagccucuguacaugg

SEQ ID NO: 352026 - RNA, 15 nt, Human herpesvirus 8 (Kaposi`s sarcoma-associated h
ccagcuacgcacuga

SEQ ID NO: 352027 - RNA, 13 nt, Human herpesvirus 8 (Kaposi`s sarcoma-associated h
ccagcuagcagug

SEQ ID NO: 352028 - RNA, 15 nt, Human herpesvirus 8 (Kaposi`s sarcoma-associated h
ccaggaaguucaaug

SEQ ID NO: 352029 - RNA, 16 nt, Human herpesvirus 8 (Kaposi`s sarcoma-associated h
ccaggacaaugaaaag

SEQ ID NO: 352030 - RNA, 16 nt, Human herpesvirus 8 (Kaposi`s sarcoma-associated h
ccaggaucaacacuuc

SEQ ID NO: 352031 - RNA, 17 nt, Human herpesvirus 8 (Kaposi`s sarcoma-associated h
ccaggaugcggguuggg

SEQ ID NO: 352032 - RNA, 23 nt, Human herpesvirus 8 (Kaposi`s sarcoma-associated h
ccaggccucuagcuguagaguca

SEQ ID NO: 352033 - RNA, 13 nt, Human herpesvirus 8 (Kaposi`s sarcoma-associated h
ccagggucauccc

SEQ ID NO: 352034 - RNA, 16 nt, Human herpesvirus 8 (Kaposi`s sarcoma-associated h
ccagguaacaaagccg

SEQ ID NO: 352035 - RNA, 20 nt, Human herpesvirus 8 (Kaposi`s sarcoma-associated h
ccaguagguagucauggaau

SEQ ID NO: 352036 - RNA, 18 nt, Human herpesvirus 8 (Kaposi`s sarcoma-associated h
ccaguaguucaacugcau

SEQ ID NO: 352037 - RNA, 12 nt, Human herpesvirus 8 (Kaposi`s sarcoma-associated h
ccaguauagugg

SEQ ID NO: 352038 - RNA, 16 nt, Human herpesvirus 8 (Kaposi`s sarcoma-associated h
ccagugccuggcauac

SEQ ID NO: 352039 - RNA, 20 nt, Human herpesvirus 8 (Kaposi`s sarcoma-associated h
ccagugucgccagugccugg

SEQ ID NO: 352040 - RNA, 21 nt, Human herpesvirus 8 (Kaposi`s sarcoma-associated h
ccagugugcgcgcagcuuucc

SEQ ID NO: 352041 - RNA, 19 nt, Human herpesvirus 8 (Kaposi`s sarcoma-associated h
ccaguuuuuccaucuccau

SEQ ID NO: 352042 - RNA, 14 nt, Human herpesvirus 8 (Kaposi`s sarcoma-associated h
ccauagcagucgcc

SEQ ID NO: 352043 - RNA, 23 nt, Human herpesvirus 8 (Kaposi`s sarcoma-associated h
ccauaguauguaaagaugggucc

SEQ ID NO: 352044 - RNA, 15 nt, Human herpesvirus 8 (Kaposi`s sarcoma-associated h
ccauagugugcguuu

SEQ ID NO: 352045 - RNA, 18 nt, Human herpesvirus 8 (Kaposi`s sarcoma-associated h
ccaucuaccucaacugaa

SEQ ID NO: 352046 - RNA, 15 nt, Human herpesvirus 8 (Kaposi`s sarcoma-associated h
ccaugacaacugcca

SEQ ID NO: 352047 - RNA, 12 nt, Human herpesvirus 8 (Kaposi`s sarcoma-associated h
ccauggcaaaaa

SEQ ID NO: 352048 - RNA, 17 nt, Human herpesvirus 8 (Kaposi`s sarcoma-associated h
ccauggcaaaaaacacu

SEQ ID NO: 352049 - RNA, 21 nt, Human herpesvirus 8 (Kaposi`s sarcoma-associated h
ccauggcccacggggacaugg

SEQ ID NO: 352050 - RNA, 14 nt, Human herpesvirus 8 (Kaposi`s sarcoma-associated h
ccauuauagcacac

SEQ ID NO: 352051 - RNA, 21 nt, Human herpesvirus 8 (Kaposi`s sarcoma-associated h
ccauucaugccuuucuguaau

SEQ ID NO: 352052 - RNA, 19 nt, Human herpesvirus 8 (Kaposi`s sarcoma-associated h
ccauuuuuguggcugccug

SEQ ID NO: 352053 - RNA, 12 nt, Human herpesvirus 8 (Kaposi`s sarcoma-associated h
cccaaaccacac

SEQ ID NO: 352054 - RNA, 12 nt, Human herpesvirus 8 (Kaposi`s sarcoma-associated h
cccaacauguaa

SEQ ID NO: 352055 - RNA, 17 nt, Human herpesvirus 8 (Kaposi`s sarcoma-associated h
cccaauguuaauguucu

SEQ ID NO: 352056 - RNA, 13 nt, Human herpesvirus 8 (Kaposi`s sarcoma-associated h
cccacacuggccc

SEQ ID NO: 352057 - RNA, 15 nt, Human herpesvirus 8 (Kaposi`s sarcoma-associated h
cccacaggacaagcu

SEQ ID NO: 352058 - RNA, 15 nt, Human herpesvirus 8 (Kaposi`s sarcoma-associated h
cccaccaaaccuggu

SEQ ID NO: 352059 - RNA, 16 nt, Human herpesvirus 8 (Kaposi`s sarcoma-associated h
cccaccccucauuuau

SEQ ID NO: 352060 - RNA, 15 nt, Human herpesvirus 8 (Kaposi`s sarcoma-associated h
cccaccuacuuccag

SEQ ID NO: 352061 - RNA, 16 nt, Human herpesvirus 8 (Kaposi`s sarcoma-associated h
cccacgcuaugugagg

SEQ ID NO: 352062 - RNA, 14 nt, Human herpesvirus 8 (Kaposi`s sarcoma-associated h
cccacggugcacug

SEQ ID NO: 352063 - RNA, 15 nt, Human herpesvirus 8 (Kaposi`s sarcoma-associated h
cccacguggugcugc

SEQ ID NO: 352064 - RNA, 17 nt, Human herpesvirus 8 (Kaposi`s sarcoma-associated h
cccagauguucuugcca

SEQ ID NO: 352065 - RNA, 20 nt, Human herpesvirus 8 (Kaposi`s sarcoma-associated h
cccagcuccuauugcaacug

SEQ ID NO: 352066 - RNA, 13 nt, Human herpesvirus 8 (Kaposi`s sarcoma-associated h
cccaggaucuucc

SEQ ID NO: 352067 - RNA, 19 nt, Human herpesvirus 8 (Kaposi`s sarcoma-associated h
cccaggcaggaguauauca

SEQ ID NO: 352068 - RNA, 14 nt, Human herpesvirus 8 (Kaposi`s sarcoma-associated h
cccagggugcgaag

SEQ ID NO: 352069 - RNA, 16 nt, Human herpesvirus 8 (Kaposi`s sarcoma-associated h
cccagugccucagcaa

SEQ ID NO: 352070 - RNA, 14 nt, Human herpesvirus 8 (Kaposi`s sarcoma-associated h
cccaucuaccucaa

SEQ ID NO: 352071 - RNA, 22 nt, Human herpesvirus 8 (Kaposi`s sarcoma-associated h
ccccaaagccguucccaugagc

SEQ ID NO: 352072 - RNA, 17 nt, Human herpesvirus 8 (Kaposi`s sarcoma-associated h
ccccucauuuaaucgca

SEQ ID NO: 352073 - RNA, 23 nt, Human herpesvirus 8 (Kaposi`s sarcoma-associated h
ccccucauuuaucgcguuugaua

SEQ ID NO: 352074 - RNA, 11 nt, Human herpesvirus 8 (Kaposi`s sarcoma-associated h
ccccugcaaug

SEQ ID NO: 352075 - RNA, 16 nt, Human herpesvirus 8 (Kaposi`s sarcoma-associated h
ccccugcaaugcaagg

SEQ ID NO: 352076 - RNA, 15 nt, Human herpesvirus 8 (Kaposi`s sarcoma-associated h
ccccuguuugaaaaa

SEQ ID NO: 352077 - RNA, 19 nt, Human herpesvirus 8 (Kaposi`s sarcoma-associated h
cccgagagagguaccccau

SEQ ID NO: 352078 - RNA, 13 nt, Human herpesvirus 8 (Kaposi`s sarcoma-associated h
cccgcguauagca

SEQ ID NO: 352079 - RNA, 13 nt, Human herpesvirus 8 (Kaposi`s sarcoma-associated h
cccggauuugccc

SEQ ID NO: 352080 - RNA, 20 nt, Human herpesvirus 8 (Kaposi`s sarcoma-associated h
cccggcaacacuggacacua

SEQ ID NO: 352081 - RNA, 17 nt, Human herpesvirus 8 (Kaposi`s sarcoma-associated h
cccggguuaugggugug

SEQ ID NO: 352082 - RNA, 14 nt, Human herpesvirus 8 (Kaposi`s sarcoma-associated h
cccgucuccaguca

SEQ ID NO: 352083 - RNA, 17 nt, Human herpesvirus 8 (Kaposi`s sarcoma-associated h
cccguggcucauaacac

SEQ ID NO: 352084 - RNA, 21 nt, Human herpesvirus 8 (Kaposi`s sarcoma-associated h
cccuaagggucugcagaugau

SEQ ID NO: 352085 - RNA, 15 nt, Human herpesvirus 8 (Kaposi`s sarcoma-associated h
cccuaauaaacuggc

SEQ ID NO: 352086 - RNA, 20 nt, Human herpesvirus 8 (Kaposi`s sarcoma-associated h
cccucacuauauaaaacaga

SEQ ID NO: 352087 - RNA, 20 nt, Human herpesvirus 8 (Kaposi`s sarcoma-associated h
cccucagccacaaauaauga

SEQ ID NO: 352088 - RNA, 22 nt, Human herpesvirus 8 (Kaposi`s sarcoma-associated h
cccuccugucuaaaaucaggag

SEQ ID NO: 352089 - RNA, 20 nt, Human herpesvirus 8 (Kaposi`s sarcoma-associated h
cccucgucgacagagccagc

SEQ ID NO: 352090 - RNA, 21 nt, Human herpesvirus 8 (Kaposi`s sarcoma-associated h
cgaaugcguucuccugcauac

SEQ ID NO: 352091 - RNA, 22 nt, Human herpesvirus 8 (Kaposi`s sarcoma-associated h
cgacaggcgcguaugggaacac

SEQ ID NO: 352092 - RNA, 9 nt, Human herpesvirus 8 (Kaposi`s sarcoma-associated h
cgacauuuc

SEQ ID NO: 352093 - RNA, 23 nt, Human herpesvirus 8 (Kaposi`s sarcoma-associated h
cgaccaauacaagacaacuaaua

SEQ ID NO: 352094 - RNA, 12 nt, Human herpesvirus 8 (Kaposi`s sarcoma-associated h
cgacuggaucau

SEQ ID NO: 352095 - RNA, 23 nt, Human herpesvirus 8 (Kaposi`s sarcoma-associated h
cgagacggacgcaccgacacugg

SEQ ID NO: 352096 - RNA, 12 nt, Human herpesvirus 8 (Kaposi`s sarcoma-associated h
cgagcaccucag

SEQ ID NO: 352097 - RNA, 23 nt, Human herpesvirus 8 (Kaposi`s sarcoma-associated h
cgagccauucaucgaguccuuga

SEQ ID NO: 352098 - RNA, 15 nt, Human herpesvirus 8 (Kaposi`s sarcoma-associated h
cgagcguauucucag

SEQ ID NO: 352099 - RNA, 17 nt, Human herpesvirus 8 (Kaposi`s sarcoma-associated h
cgagugugccuccuuag

SEQ ID NO: 352100 - RNA, 19 nt, Human herpesvirus 8 (Kaposi`s sarcoma-associated h
cgauauguccuucacuuug

SEQ ID NO: 352101 - RNA, 12 nt, Human herpesvirus 8 (Kaposi`s sarcoma-associated h
cgauuacaggaa

SEQ ID NO: 352102 - RNA, 14 nt, Human herpesvirus 8 (Kaposi`s sarcoma-associated h
cgcacaagcgcuga

SEQ ID NO: 352103 - RNA, 22 nt, Human herpesvirus 8 (Kaposi`s sarcoma-associated h
cgcagaacaguacccacgaaau

SEQ ID NO: 352104 - RNA, 19 nt, Human herpesvirus 8 (Kaposi`s sarcoma-associated h
cgcaggagucagagcagug

SEQ ID NO: 352105 - RNA, 20 nt, Human herpesvirus 8 (Kaposi`s sarcoma-associated h
cgcauccgugguacccaguc

SEQ ID NO: 352106 - RNA, 22 nt, Human herpesvirus 8 (Kaposi`s sarcoma-associated h
cgcauuuacgcgacggaucucu

SEQ ID NO: 352107 - RNA, 15 nt, Human herpesvirus 8 (Kaposi`s sarcoma-associated h
cgccacguggagcca

SEQ ID NO: 352108 - RNA, 17 nt, Human herpesvirus 8 (Kaposi`s sarcoma-associated h
cgccaggaaguucaaug

SEQ ID NO: 352109 - RNA, 22 nt, Human herpesvirus 8 (Kaposi`s sarcoma-associated h
cgccauuugcgugcaaaaugug

SEQ ID NO: 352110 - RNA, 19 nt, Human herpesvirus 8 (Kaposi`s sarcoma-associated h
cgccccucuuggcuguuac

SEQ ID NO: 352111 - RNA, 19 nt, Human herpesvirus 8 (Kaposi`s sarcoma-associated h
cgcccuccguuuugcacua

SEQ ID NO: 352112 - RNA, 23 nt, Human herpesvirus 8 (Kaposi`s sarcoma-associated h
cgccucugaagcaccacauacag

SEQ ID NO: 352113 - RNA, 15 nt, Human herpesvirus 8 (Kaposi`s sarcoma-associated h
cgcggaaacugggca

SEQ ID NO: 352114 - RNA, 15 nt, Human herpesvirus 8 (Kaposi`s sarcoma-associated h
cgcggcacauugugu

SEQ ID NO: 352115 - RNA, 12 nt, Human herpesvirus 8 (Kaposi`s sarcoma-associated h
cgcuauuugccg

SEQ ID NO: 352116 - RNA, 18 nt, Human herpesvirus 8 (Kaposi`s sarcoma-associated h
cgcucaauuaucuacagc

SEQ ID NO: 352117 - RNA, 23 nt, Human herpesvirus 8 (Kaposi`s sarcoma-associated h
cgcucaucuacuuuggacaguuu

SEQ ID NO: 352118 - RNA, 23 nt, Human herpesvirus 8 (Kaposi`s sarcoma-associated h
cgcuggcccaaacuagcagagac

SEQ ID NO: 352119 - RNA, 14 nt, Human herpesvirus 8 (Kaposi`s sarcoma-associated h
cgcuugccuuuugc

SEQ ID NO: 352120 - RNA, 13 nt, Human herpesvirus 8 (Kaposi`s sarcoma-associated h
cgcuugcugauau

SEQ ID NO: 352121 - RNA, 13 nt, Human herpesvirus 8 (Kaposi`s sarcoma-associated h
cggacuacaucca

SEQ ID NO: 352122 - RNA, 22 nt, Human herpesvirus 8 (Kaposi`s sarcoma-associated h
cggaggcccgagaaacacugug

SEQ ID NO: 352123 - RNA, 22 nt, Human herpesvirus 8 (Kaposi`s sarcoma-associated h
cggaggcuggaauggaucugcg

SEQ ID NO: 352124 - RNA, 14 nt, Human herpesvirus 8 (Kaposi`s sarcoma-associated h
cggagggcuguucu

SEQ ID NO: 352125 - RNA, 15 nt, Human herpesvirus 8 (Kaposi`s sarcoma-associated h
cggauacuuauuaaa

SEQ ID NO: 352126 - RNA, 22 nt, Human herpesvirus 8 (Kaposi`s sarcoma-associated h
cggaugcgggcgauuacaggaa

SEQ ID NO: 352127 - RNA, 20 nt, Human herpesvirus 8 (Kaposi`s sarcoma-associated h
cggcaacacuggacacuaaa

SEQ ID NO: 352128 - RNA, 18 nt, Human herpesvirus 8 (Kaposi`s sarcoma-associated h
cggccaguauuaugccag

SEQ ID NO: 352129 - RNA, 14 nt, Human herpesvirus 8 (Kaposi`s sarcoma-associated h
cggccaguuuauua

SEQ ID NO: 352130 - RNA, 22 nt, Human herpesvirus 8 (Kaposi`s sarcoma-associated h
cggcgcuauaggaaaauugcca

SEQ ID NO: 352131 - RNA, 18 nt, Human herpesvirus 8 (Kaposi`s sarcoma-associated h
cggcgucaccgacaccau

SEQ ID NO: 352132 - RNA, 23 nt, Human herpesvirus 8 (Kaposi`s sarcoma-associated h
cggcuuaaguuugguugucucug

SEQ ID NO: 352133 - RNA, 22 nt, Human herpesvirus 8 (Kaposi`s sarcoma-associated h
cgggagcuucggaaagcacugg

SEQ ID NO: 352134 - RNA, 20 nt, Human herpesvirus 8 (Kaposi`s sarcoma-associated h
cgggaugcuagcgugucuga

SEQ ID NO: 352135 - RNA, 21 nt, Human herpesvirus 8 (Kaposi`s sarcoma-associated h
cggguagaaucaaugugguuc

SEQ ID NO: 352136 - RNA, 17 nt, Human herpesvirus 8 (Kaposi`s sarcoma-associated h
cgggucgccgacauuga

SEQ ID NO: 352137 - RNA, 14 nt, Human herpesvirus 8 (Kaposi`s sarcoma-associated h
cgggugauuaagca

SEQ ID NO: 352138 - RNA, 18 nt, Human herpesvirus 8 (Kaposi`s sarcoma-associated h
cggugauagauaugucug

SEQ ID NO: 352139 - RNA, 14 nt, Human herpesvirus 8 (Kaposi`s sarcoma-associated h
cggugccuucacau

SEQ ID NO: 352140 - RNA, 15 nt, Human herpesvirus 8 (Kaposi`s sarcoma-associated h
cggugccuucacaua

SEQ ID NO: 352141 - RNA, 16 nt, Human herpesvirus 8 (Kaposi`s sarcoma-associated h
cggugucguguaugcc

SEQ ID NO: 352142 - RNA, 19 nt, Human herpesvirus 8 (Kaposi`s sarcoma-associated h
cgguucccacccacacauu

SEQ ID NO: 352143 - RNA, 22 nt, Human herpesvirus 8 (Kaposi`s sarcoma-associated h
cgguugguggugugugggaaac

SEQ ID NO: 352144 - RNA, 16 nt, Human herpesvirus 8 (Kaposi`s sarcoma-associated h
cguacccaauguuaau

SEQ ID NO: 352145 - RNA, 18 nt, Human herpesvirus 8 (Kaposi`s sarcoma-associated h
cguaugggaacacaauac

SEQ ID NO: 352146 - RNA, 16 nt, Human herpesvirus 8 (Kaposi`s sarcoma-associated h
cgucacuggauguaag

SEQ ID NO: 352147 - RNA, 13 nt, Human herpesvirus 8 (Kaposi`s sarcoma-associated h
cgucaugcacggu

SEQ ID NO: 352148 - RNA, 22 nt, Human herpesvirus 8 (Kaposi`s sarcoma-associated h
cgucauucacccgagccacauc

SEQ ID NO: 352149 - RNA, 19 nt, Human herpesvirus 8 (Kaposi`s sarcoma-associated h
cgucccucuuggcuguuac

SEQ ID NO: 352150 - RNA, 14 nt, Human herpesvirus 8 (Kaposi`s sarcoma-associated h
cgucgcgcugguug

SEQ ID NO: 352151 - RNA, 19 nt, Human herpesvirus 8 (Kaposi`s sarcoma-associated h
cgucggcggugcaugugac

SEQ ID NO: 352152 - RNA, 19 nt, Human herpesvirus 8 (Kaposi`s sarcoma-associated h
cgucguggaugagaggguu

SEQ ID NO: 352153 - RNA, 18 nt, Human herpesvirus 8 (Kaposi`s sarcoma-associated h
cgucuaauaaaacuaauc

SEQ ID NO: 352154 - RNA, 21 nt, Human herpesvirus 8 (Kaposi`s sarcoma-associated h
cgucugccgaagucagugcca

SEQ ID NO: 352155 - RNA, 22 nt, Human herpesvirus 8 (Kaposi`s sarcoma-associated h
cgugaaucgcaccuuaaacaca

SEQ ID NO: 352156 - RNA, 17 nt, Human herpesvirus 8 (Kaposi`s sarcoma-associated h
cgugacggugacauugc

SEQ ID NO: 352157 - RNA, 17 nt, Human herpesvirus 8 (Kaposi`s sarcoma-associated h
cgugaguuacauggaau

SEQ ID NO: 352158 - RNA, 13 nt, Human herpesvirus 8 (Kaposi`s sarcoma-associated h
cgugcaccagcuc

SEQ ID NO: 352159 - RNA, 19 nt, Human herpesvirus 8 (Kaposi`s sarcoma-associated h
cgugcccagacaccaaaga

SEQ ID NO: 352160 - RNA, 21 nt, Human herpesvirus 8 (Kaposi`s sarcoma-associated h
cgugcguuugcagugugcagu

SEQ ID NO: 352161 - RNA, 20 nt, Human herpesvirus 8 (Kaposi`s sarcoma-associated h
cgugcuacuuacagcauggc

SEQ ID NO: 352162 - RNA, 21 nt, Human herpesvirus 8 (Kaposi`s sarcoma-associated h
cguggacaccacauuuccacc

SEQ ID NO: 352163 - RNA, 13 nt, Human herpesvirus 8 (Kaposi`s sarcoma-associated h
cgugucauugcca

SEQ ID NO: 352164 - RNA, 18 nt, Human herpesvirus 8 (Kaposi`s sarcoma-associated h
cgugucgcccgucacugg

SEQ ID NO: 352165 - RNA, 15 nt, Human herpesvirus 8 (Kaposi`s sarcoma-associated h
cgugucuagacaaua

SEQ ID NO: 352166 - RNA, 21 nt, Human herpesvirus 8 (Kaposi`s sarcoma-associated h
cgugugggauuccgucauuca

SEQ ID NO: 352167 - RNA, 17 nt, Human herpesvirus 8 (Kaposi`s sarcoma-associated h
cguguguggcuguggga

SEQ ID NO: 352168 - RNA, 17 nt, Human herpesvirus 8 (Kaposi`s sarcoma-associated h
cucuaauaaacaagcua

SEQ ID NO: 352169 - RNA, 12 nt, Human herpesvirus 8 (Kaposi`s sarcoma-associated h
cucuauaacaua

SEQ ID NO: 352170 - RNA, 10 nt, Human herpesvirus 8 (Kaposi`s sarcoma-associated h
cucucauaac

SEQ ID NO: 352171 - RNA, 14 nt, Human herpesvirus 8 (Kaposi`s sarcoma-associated h
cucucccaaaccac

SEQ ID NO: 352172 - RNA, 16 nt, Human herpesvirus 8 (Kaposi`s sarcoma-associated h
cucucccaaaccacac

SEQ ID NO: 352173 - RNA, 18 nt, Human herpesvirus 8 (Kaposi`s sarcoma-associated h
cucucuuaggacacugau

SEQ ID NO: 352174 - RNA, 14 nt, Human herpesvirus 8 (Kaposi`s sarcoma-associated h
cucucuugcugguc

SEQ ID NO: 352175 - RNA, 21 nt, Human herpesvirus 8 (Kaposi`s sarcoma-associated h
cucucuugcuggucgguucac

SEQ ID NO: 352176 - RNA, 16 nt, Human herpesvirus 8 (Kaposi`s sarcoma-associated h
cucuguggcauaagac

SEQ ID NO: 352177 - RNA, 14 nt, Human herpesvirus 8 (Kaposi`s sarcoma-associated h
cucuguuuucccac

SEQ ID NO: 352178 - RNA, 13 nt, Human herpesvirus 8 (Kaposi`s sarcoma-associated h
cucuuggcuguua

SEQ ID NO: 352179 - RNA, 18 nt, Human herpesvirus 8 (Kaposi`s sarcoma-associated h
cucuuggcuguuacaaua

SEQ ID NO: 352180 - RNA, 18 nt, Human herpesvirus 8 (Kaposi`s sarcoma-associated h
cugaagccucccuaauag

SEQ ID NO: 352181 - RNA, 22 nt, Human herpesvirus 8 (Kaposi`s sarcoma-associated h
cugaaguagucagacauucgua

SEQ ID NO: 352182 - RNA, 18 nt, Human herpesvirus 8 (Kaposi`s sarcoma-associated h
cugacagagcacccugaa

SEQ ID NO: 352183 - RNA, 14 nt, Human herpesvirus 8 (Kaposi`s sarcoma-associated h
cugaccacggcaca

SEQ ID NO: 352184 - RNA, 16 nt, Human herpesvirus 8 (Kaposi`s sarcoma-associated h
cugacggccaccgaga

SEQ ID NO: 352185 - RNA, 22 nt, Human herpesvirus 8 (Kaposi`s sarcoma-associated h
cugagcugguaaccagcuacgc

SEQ ID NO: 352186 - RNA, 21 nt, Human herpesvirus 8 (Kaposi`s sarcoma-associated h
cugauaugcaugugucugugc

SEQ ID NO: 352187 - RNA, 13 nt, Human herpesvirus 8 (Kaposi`s sarcoma-associated h
cugaugaacuggc

SEQ ID NO: 352188 - RNA, 14 nt, Human herpesvirus 8 (Kaposi`s sarcoma-associated h
cugauuagcacugu

SEQ ID NO: 352189 - RNA, 15 nt, Human herpesvirus 8 (Kaposi`s sarcoma-associated h
cugauuagcacugua

SEQ ID NO: 352190 - RNA, 15 nt, Human herpesvirus 8 (Kaposi`s sarcoma-associated h
cugauuuuccaggga

SEQ ID NO: 352191 - RNA, 17 nt, Human herpesvirus 8 (Kaposi`s sarcoma-associated h
cugauuuuuuuacgcua

SEQ ID NO: 352192 - RNA, 17 nt, Human herpesvirus 8 (Kaposi`s sarcoma-associated h
cugcaaacuauacacaa

SEQ ID NO: 352193 - RNA, 21 nt, Human herpesvirus 8 (Kaposi`s sarcoma-associated h
cugcaaacuauacacaaauga

SEQ ID NO: 352194 - RNA, 17 nt, Human herpesvirus 8 (Kaposi`s sarcoma-associated h
cugcaauguacugccau

SEQ ID NO: 352195 - RNA, 14 nt, Human herpesvirus 8 (Kaposi`s sarcoma-associated h
cugcacaacauaug

SEQ ID NO: 352196 - RNA, 14 nt, Human herpesvirus 8 (Kaposi`s sarcoma-associated h
cugcaccuugaugu

SEQ ID NO: 352197 - RNA, 17 nt, Human herpesvirus 8 (Kaposi`s sarcoma-associated h
cugcacuccaagccagu

SEQ ID NO: 352198 - RNA, 20 nt, Human herpesvirus 8 (Kaposi`s sarcoma-associated h
cugcagggcgcugcucuugu

SEQ ID NO: 352199 - RNA, 18 nt, Human herpesvirus 8 (Kaposi`s sarcoma-associated h
cugcauaaagucauggga

SEQ ID NO: 352200 - RNA, 18 nt, Human herpesvirus 8 (Kaposi`s sarcoma-associated h
cugccaauauaguggcca

SEQ ID NO: 352201 - RNA, 19 nt, Human herpesvirus 8 (Kaposi`s sarcoma-associated h
cugccagguucccaaaaua

SEQ ID NO: 352202 - RNA, 19 nt, Human herpesvirus 8 (Kaposi`s sarcoma-associated h
cugccaugaaaggugguuc

SEQ ID NO: 352203 - RNA, 21 nt, Human herpesvirus 8 (Kaposi`s sarcoma-associated h
cugccaugaaaggugguucua

SEQ ID NO: 352204 - RNA, 15 nt, Human herpesvirus 8 (Kaposi`s sarcoma-associated h
cugccggacacugaa

SEQ ID NO: 352205 - RNA, 21 nt, Human herpesvirus 8 (Kaposi`s sarcoma-associated h
cugccuaaagagggaucccag

SEQ ID NO: 352206 - RNA, 23 nt, Human herpesvirus 8 (Kaposi`s sarcoma-associated h
cugccuagaacuaaccacucaua

SEQ ID NO: 352207 - RNA, 18 nt, Human herpesvirus 8 (Kaposi`s sarcoma-associated h
cugcgucauguaccuggc

SEQ ID NO: 352208 - RNA, 16 nt, Human herpesvirus 8 (Kaposi`s sarcoma-associated h
cugcguguucccggcg

SEQ ID NO: 352209 - RNA, 20 nt, Human herpesvirus 8 (Kaposi`s sarcoma-associated h
cugcuauuuuucaucugaaa

SEQ ID NO: 352210 - RNA, 13 nt, Human herpesvirus 8 (Kaposi`s sarcoma-associated h
cugcucucgcugc

SEQ ID NO: 352211 - RNA, 19 nt, Human herpesvirus 8 (Kaposi`s sarcoma-associated h
cugcucuugucaguauagu

SEQ ID NO: 352212 - RNA, 14 nt, Human herpesvirus 8 (Kaposi`s sarcoma-associated h
cugcuggcuucaac

SEQ ID NO: 352213 - RNA, 13 nt, Human herpesvirus 8 (Kaposi`s sarcoma-associated h
cuggacacuaaaa

SEQ ID NO: 352214 - RNA, 15 nt, Human herpesvirus 8 (Kaposi`s sarcoma-associated h
cuggacaguauucuc

SEQ ID NO: 352215 - RNA, 16 nt, Human herpesvirus 8 (Kaposi`s sarcoma-associated h
cuggacaguauucuca

SEQ ID NO: 352216 - RNA, 17 nt, Human herpesvirus 8 (Kaposi`s sarcoma-associated h
cuggacaguauucucac

SEQ ID NO: 352217 - RNA, 14 nt, Human herpesvirus 8 (Kaposi`s sarcoma-associated h
cuggacuggaguca

SEQ ID NO: 352218 - RNA, 21 nt, Human herpesvirus 8 (Kaposi`s sarcoma-associated h
cuggagcccgagaucaucuuu

SEQ ID NO: 352219 - RNA, 16 nt, Human herpesvirus 8 (Kaposi`s sarcoma-associated h
cuggauguguaucuua

SEQ ID NO: 352220 - RNA, 14 nt, Human herpesvirus 8 (Kaposi`s sarcoma-associated h
cuggcguccagcua

SEQ ID NO: 352221 - RNA, 18 nt, Human herpesvirus 8 (Kaposi`s sarcoma-associated h
cuggcguuuaguguggau

SEQ ID NO: 352222 - RNA, 24 nt, Human herpesvirus 8 (Kaposi`s sarcoma-associated h
cuggcugcaaagcuuaaccacaug

SEQ ID NO: 352223 - RNA, 21 nt, Human herpesvirus 8 (Kaposi`s sarcoma-associated h
cugggccacaaaacugccaaa

SEQ ID NO: 352224 - RNA, 19 nt, Human herpesvirus 8 (Kaposi`s sarcoma-associated h
cuggguagcuaugcccacc

SEQ ID NO: 352225 - RNA, 21 nt, Human herpesvirus 8 (Kaposi`s sarcoma-associated h
cuggguguaagcuguacauaa

SEQ ID NO: 352226 - RNA, 22 nt, Human herpesvirus 8 (Kaposi`s sarcoma-associated h
cugguaccagagaauaaagcca

SEQ ID NO: 352227 - RNA, 18 nt, Human herpesvirus 8 (Kaposi`s sarcoma-associated h
cugguggaacaugcugcc

SEQ ID NO: 352228 - RNA, 19 nt, Human herpesvirus 8 (Kaposi`s sarcoma-associated h
cuguacauaauccccggca

SEQ ID NO: 352229 - RNA, 19 nt, Human herpesvirus 8 (Kaposi`s sarcoma-associated h
cuguacaugaaccagaauc

SEQ ID NO: 352230 - RNA, 15 nt, Human herpesvirus 8 (Kaposi`s sarcoma-associated h
cuguauugacaccau

SEQ ID NO: 352231 - RNA, 15 nt, Human herpesvirus 8 (Kaposi`s sarcoma-associated h
cugucacggucuaca

SEQ ID NO: 352232 - RNA, 23 nt, Human herpesvirus 8 (Kaposi`s sarcoma-associated h
cugucacuagaauuggagcacuu

SEQ ID NO: 352233 - RNA, 16 nt, Human herpesvirus 8 (Kaposi`s sarcoma-associated h
cugucccgugcccagg

SEQ ID NO: 352234 - RNA, 14 nt, Human herpesvirus 8 (Kaposi`s sarcoma-associated h
cuguccggacauuu

SEQ ID NO: 352235 - RNA, 17 nt, Human herpesvirus 8 (Kaposi`s sarcoma-associated h
cugucgagacaugucac

SEQ ID NO: 352236 - RNA, 23 nt, Human herpesvirus 8 (Kaposi`s sarcoma-associated h
cugucgagacaugucaccaacgu

SEQ ID NO: 352237 - RNA, 22 nt, Human herpesvirus 8 (Kaposi`s sarcoma-associated h
cugucgcuuccauuuuccaagg

SEQ ID NO: 352238 - RNA, 23 nt, Human herpesvirus 8 (Kaposi`s sarcoma-associated h
cugucuaaaaucaggagggucaa

SEQ ID NO: 352239 - RNA, 21 nt, Human herpesvirus 8 (Kaposi`s sarcoma-associated h
cugucuccagaagagcauuuu

SEQ ID NO: 352240 - RNA, 15 nt, Human herpesvirus 8 (Kaposi`s sarcoma-associated h
cugucuuuguaggca

SEQ ID NO: 352241 - RNA, 20 nt, Human herpesvirus 8 (Kaposi`s sarcoma-associated h
cuguguccuccucugaguuu

SEQ ID NO: 352242 - RNA, 14 nt, Human herpesvirus 8 (Kaposi`s sarcoma-associated h
cuguuacccugcuc

SEQ ID NO: 352243 - RNA, 16 nt, Human herpesvirus 8 (Kaposi`s sarcoma-associated h
cuguugaaugugauca

SEQ ID NO: 352244 - RNA, 13 nt, Human herpesvirus 8 (Kaposi`s sarcoma-associated h
cuguugacuuuca

SEQ ID NO: 352245 - RNA, 13 nt, Human herpesvirus 8 (Kaposi`s sarcoma-associated h
cuguuuccaguga

SEQ ID NO: 352246 - RNA, 22 nt, Human herpesvirus 8 (Kaposi`s sarcoma-associated h
cuguuuccagugacccuaguca

SEQ ID NO: 352247 - RNA, 17 nt, Human herpesvirus 8 (Kaposi`s sarcoma-associated h
gaagagagaaugcuucc

SEQ ID NO: 352248 - RNA, 14 nt, Human herpesvirus 8 (Kaposi`s sarcoma-associated h
gaagagcacuguua

SEQ ID NO: 352249 - RNA, 22 nt, Human herpesvirus 8 (Kaposi`s sarcoma-associated h
gaagcaauacccccaaaauguc

SEQ ID NO: 352250 - RNA, 19 nt, Human herpesvirus 8 (Kaposi`s sarcoma-associated h
gaagcaccacauacagacu

SEQ ID NO: 352251 - RNA, 16 nt, Human herpesvirus 8 (Kaposi`s sarcoma-associated h
gaagcauccggacuga

SEQ ID NO: 352252 - RNA, 20 nt, Human herpesvirus 8 (Kaposi`s sarcoma-associated h
gaagcaucugguccuaagag

SEQ ID NO: 352253 - RNA, 13 nt, Human herpesvirus 8 (Kaposi`s sarcoma-associated h
gaagcauguugcg

SEQ ID NO: 352254 - RNA, 18 nt, Human herpesvirus 8 (Kaposi`s sarcoma-associated h
gaagcuaugugguuucug

SEQ ID NO: 352255 - RNA, 23 nt, Human herpesvirus 8 (Kaposi`s sarcoma-associated h
gaaggaauuguuauccggcagca

SEQ ID NO: 352256 - RNA, 15 nt, Human herpesvirus 8 (Kaposi`s sarcoma-associated h
gaaggccgcguccau

SEQ ID NO: 352257 - RNA, 17 nt, Human herpesvirus 8 (Kaposi`s sarcoma-associated h
gaaggcgaauaaaacag

SEQ ID NO: 352258 - RNA, 15 nt, Human herpesvirus 8 (Kaposi`s sarcoma-associated h
gaagucagugccaca

SEQ ID NO: 352259 - RNA, 17 nt, Human herpesvirus 8 (Kaposi`s sarcoma-associated h
gaagucccgaugccacu

SEQ ID NO: 352260 - RNA, 23 nt, Human herpesvirus 8 (Kaposi`s sarcoma-associated h
gaaguucauauucccaccuccac

SEQ ID NO: 352261 - RNA, 19 nt, Human herpesvirus 8 (Kaposi`s sarcoma-associated h
gaaguuggccuccagcaaa

SEQ ID NO: 352262 - RNA, 16 nt, Human herpesvirus 8 (Kaposi`s sarcoma-associated h
gaauaaagaaugcccu

SEQ ID NO: 352263 - RNA, 16 nt, Human herpesvirus 8 (Kaposi`s sarcoma-associated h
gaauaaagccaaccua

SEQ ID NO: 352264 - RNA, 22 nt, Human herpesvirus 8 (Kaposi`s sarcoma-associated h
gaaucgcaccuuaaacacaaca

SEQ ID NO: 352265 - RNA, 22 nt, Human herpesvirus 8 (Kaposi`s sarcoma-associated h
gaaugguaccauggcaaaaaac

SEQ ID NO: 352266 - RNA, 13 nt, Human herpesvirus 8 (Kaposi`s sarcoma-associated h
gaauggugucaau

SEQ ID NO: 352267 - RNA, 22 nt, Human herpesvirus 8 (Kaposi`s sarcoma-associated h
gaaugugccuaucaaucugaga

SEQ ID NO: 352268 - RNA, 22 nt, Human herpesvirus 8 (Kaposi`s sarcoma-associated h
gaauuacguuguagaucuggau

SEQ ID NO: 352269 - RNA, 14 nt, Human herpesvirus 8 (Kaposi`s sarcoma-associated h
gaauuagaaacaaa

SEQ ID NO: 352270 - RNA, 15 nt, Human herpesvirus 8 (Kaposi`s sarcoma-associated h
gaauuauaaaaccgg

SEQ ID NO: 352271 - RNA, 20 nt, Human herpesvirus 8 (Kaposi`s sarcoma-associated h
gaauucaaaggcgggaucau

SEQ ID NO: 352272 - RNA, 19 nt, Human herpesvirus 8 (Kaposi`s sarcoma-associated h
gaauucgcgugguccugga

SEQ ID NO: 352273 - RNA, 22 nt, Human herpesvirus 8 (Kaposi`s sarcoma-associated h
gacaaaugagggugaguggaac

SEQ ID NO: 352274 - RNA, 15 nt, Human herpesvirus 8 (Kaposi`s sarcoma-associated h
gacaacuagagucca

SEQ ID NO: 352275 - RNA, 15 nt, Human herpesvirus 8 (Kaposi`s sarcoma-associated h
gacaagcugaugugg

SEQ ID NO: 352276 - RNA, 19 nt, Human herpesvirus 8 (Kaposi`s sarcoma-associated h
gacaagucccagcaauaaa

SEQ ID NO: 352277 - RNA, 17 nt, Human herpesvirus 8 (Kaposi`s sarcoma-associated h
gacaagucuucuuguca

SEQ ID NO: 352278 - RNA, 17 nt, Human herpesvirus 8 (Kaposi`s sarcoma-associated h
gacagcaacacccagcu

SEQ ID NO: 352279 - RNA, 17 nt, Human herpesvirus 8 (Kaposi`s sarcoma-associated h
gacagcuuucagagucu

SEQ ID NO: 352280 - RNA, 22 nt, Human herpesvirus 8 (Kaposi`s sarcoma-associated h
gacagggacgcauaucacggga

SEQ ID NO: 352281 - RNA, 15 nt, Human herpesvirus 8 (Kaposi`s sarcoma-associated h
gacagggcuaugauu

SEQ ID NO: 352282 - RNA, 13 nt, Human herpesvirus 8 (Kaposi`s sarcoma-associated h
gacaguauucuca

SEQ ID NO: 352283 - RNA, 14 nt, Human herpesvirus 8 (Kaposi`s sarcoma-associated h
gacaguauucucac

SEQ ID NO: 352284 - RNA, 15 nt, Human herpesvirus 8 (Kaposi`s sarcoma-associated h
gacaguuaccauuca

SEQ ID NO: 352285 - RNA, 23 nt, Human herpesvirus 8 (Kaposi`s sarcoma-associated h
gacaguuaccauucaugauuuca

SEQ ID NO: 352286 - RNA, 20 nt, Human herpesvirus 8 (Kaposi`s sarcoma-associated h
gacauggacauuaugaaggg

SEQ ID NO: 352287 - RNA, 14 nt, Human herpesvirus 8 (Kaposi`s sarcoma-associated h
gacauggucugaca

SEQ ID NO: 352288 - RNA, 23 nt, Human herpesvirus 8 (Kaposi`s sarcoma-associated h
gacauucguaagaggacccaggg

SEQ ID NO: 352289 - RNA, 13 nt, Human herpesvirus 8 (Kaposi`s sarcoma-associated h
gaccaacaggcug

SEQ ID NO: 352290 - RNA, 16 nt, Human herpesvirus 8 (Kaposi`s sarcoma-associated h
gacccagaaaauuucu

SEQ ID NO: 352291 - RNA, 20 nt, Human herpesvirus 8 (Kaposi`s sarcoma-associated h
gacccggcaacacuggacac

SEQ ID NO: 352292 - RNA, 22 nt, Human herpesvirus 8 (Kaposi`s sarcoma-associated h
gacccucacuucuccguugaca

SEQ ID NO: 352293 - RNA, 13 nt, Human herpesvirus 8 (Kaposi`s sarcoma-associated h
gaccuacacccuc

SEQ ID NO: 352294 - RNA, 14 nt, Human herpesvirus 8 (Kaposi`s sarcoma-associated h
gaccucugucuucu

SEQ ID NO: 352295 - RNA, 12 nt, Human herpesvirus 8 (Kaposi`s sarcoma-associated h
gacgaaagcuau

SEQ ID NO: 352296 - RNA, 19 nt, Human herpesvirus 8 (Kaposi`s sarcoma-associated h
gacgacugggccaccaaga

SEQ ID NO: 352297 - RNA, 21 nt, Human herpesvirus 8 (Kaposi`s sarcoma-associated h
gacgacugggccaccaagauc

SEQ ID NO: 352298 - RNA, 17 nt, Human herpesvirus 8 (Kaposi`s sarcoma-associated h
gacgcacagcaugccgu

SEQ ID NO: 352299 - RNA, 17 nt, Human herpesvirus 8 (Kaposi`s sarcoma-associated h
gacgcauaucacgggau

SEQ ID NO: 352300 - RNA, 20 nt, Human herpesvirus 8 (Kaposi`s sarcoma-associated h
gacgucuucgccgaggacac

SEQ ID NO: 352301 - RNA, 13 nt, Human herpesvirus 8 (Kaposi`s sarcoma-associated h
gacgugacgcccu

SEQ ID NO: 352302 - RNA, 22 nt, Human herpesvirus 8 (Kaposi`s sarcoma-associated h
gacuaggaggaagagcacuguu

SEQ ID NO: 352303 - RNA, 16 nt, Human herpesvirus 8 (Kaposi`s sarcoma-associated h
gacuaugggaaugugc

SEQ ID NO: 352304 - RNA, 14 nt, Human herpesvirus 8 (Kaposi`s sarcoma-associated h
gacuggcucugaua

SEQ ID NO: 352305 - RNA, 18 nt, Human herpesvirus 8 (Kaposi`s sarcoma-associated h
gacuuaucuaaaaagagg

SEQ ID NO: 352306 - RNA, 21 nt, Human herpesvirus 8 (Kaposi`s sarcoma-associated h
gagaaauuacugcaccucgcc

SEQ ID NO: 352307 - RNA, 20 nt, Human herpesvirus 8 (Kaposi`s sarcoma-associated h
gagaacaugcuggaucccag

SEQ ID NO: 352308 - RNA, 20 nt, Human herpesvirus 8 (Kaposi`s sarcoma-associated h
gagaacugucgagacauguc

SEQ ID NO: 352309 - RNA, 21 nt, Human herpesvirus 8 (Kaposi`s sarcoma-associated h
gagaacugucgagacauguca

SEQ ID NO: 352310 - RNA, 15 nt, Human herpesvirus 8 (Kaposi`s sarcoma-associated h
gagaauggcgugcca

SEQ ID NO: 352311 - RNA, 14 nt, Human herpesvirus 8 (Kaposi`s sarcoma-associated h
gagacuggugcgca

SEQ ID NO: 352312 - RNA, 12 nt, Human herpesvirus 8 (Kaposi`s sarcoma-associated h
gagagacugcag

SEQ ID NO: 352313 - RNA, 18 nt, Human herpesvirus 8 (Kaposi`s sarcoma-associated h
gagcacgaagacauggug

SEQ ID NO: 352314 - RNA, 13 nt, Human herpesvirus 8 (Kaposi`s sarcoma-associated h
gagccaacaaaca

SEQ ID NO: 352315 - RNA, 23 nt, Human herpesvirus 8 (Kaposi`s sarcoma-associated h
gagccauucaucgaguccuugag

SEQ ID NO: 352316 - RNA, 23 nt, Human herpesvirus 8 (Kaposi`s sarcoma-associated h
gagcccggaggagguugacagaa

SEQ ID NO: 352317 - RNA, 18 nt, Human herpesvirus 8 (Kaposi`s sarcoma-associated h
gagccguccaccauuccu

SEQ ID NO: 352318 - RNA, 16 nt, Human herpesvirus 8 (Kaposi`s sarcoma-associated h
gagccuucacggcaca

SEQ ID NO: 352319 - RNA, 16 nt, Human herpesvirus 8 (Kaposi`s sarcoma-associated h
gagcgagugugccucc

SEQ ID NO: 352320 - RNA, 15 nt, Human herpesvirus 8 (Kaposi`s sarcoma-associated h
gagcgggguuuccag

SEQ ID NO: 352321 - RNA, 12 nt, Human herpesvirus 8 (Kaposi`s sarcoma-associated h
gagcguauucuc

SEQ ID NO: 352322 - RNA, 14 nt, Human herpesvirus 8 (Kaposi`s sarcoma-associated h
gagcguauucucag

SEQ ID NO: 352323 - RNA, 16 nt, Human herpesvirus 8 (Kaposi`s sarcoma-associated h
gaggaagagcacuguu

SEQ ID NO: 352324 - RNA, 13 nt, Human herpesvirus 8 (Kaposi`s sarcoma-associated h
gaggaauaugugg

SEQ ID NO: 352325 - RNA, 22 nt, Human herpesvirus 8 (Kaposi`s sarcoma-associated h
gaggacacgccaucgccgccag

SEQ ID NO: 352326 - RNA, 18 nt, Human herpesvirus 8 (Kaposi`s sarcoma-associated h
gcaccuugauguuuccca

SEQ ID NO: 352327 - RNA, 17 nt, Human herpesvirus 8 (Kaposi`s sarcoma-associated h
gcacgcggugucaacca

SEQ ID NO: 352328 - RNA, 18 nt, Human herpesvirus 8 (Kaposi`s sarcoma-associated h
gcacggaucggcuugcac

SEQ ID NO: 352329 - RNA, 12 nt, Human herpesvirus 8 (Kaposi`s sarcoma-associated h
gcacuauagugc

SEQ ID NO: 352330 - RNA, 15 nt, Human herpesvirus 8 (Kaposi`s sarcoma-associated h
gcacuccaagccagu

SEQ ID NO: 352331 - RNA, 13 nt, Human herpesvirus 8 (Kaposi`s sarcoma-associated h
gcagaaaacuguc

SEQ ID NO: 352332 - RNA, 18 nt, Human herpesvirus 8 (Kaposi`s sarcoma-associated h
gcagaaaacugucuccag

SEQ ID NO: 352333 - RNA, 18 nt, Human herpesvirus 8 (Kaposi`s sarcoma-associated h
gcagaacaguacccacga

SEQ ID NO: 352334 - RNA, 20 nt, Human herpesvirus 8 (Kaposi`s sarcoma-associated h
gcagaaccgaugguuuccua

SEQ ID NO: 352335 - RNA, 19 nt, Human herpesvirus 8 (Kaposi`s sarcoma-associated h
gcagagaccucuugcgcga

SEQ ID NO: 352336 - RNA, 15 nt, Human herpesvirus 8 (Kaposi`s sarcoma-associated h
gcagcaagcacagaa

SEQ ID NO: 352337 - RNA, 14 nt, Human herpesvirus 8 (Kaposi`s sarcoma-associated h
gcagcaauauuaaa

SEQ ID NO: 352338 - RNA, 23 nt, Human herpesvirus 8 (Kaposi`s sarcoma-associated h
gcagccuugcauacccuguagau

SEQ ID NO: 352339 - RNA, 16 nt, Human herpesvirus 8 (Kaposi`s sarcoma-associated h
gcagcuggacuggagu

SEQ ID NO: 352340 - RNA, 20 nt, Human herpesvirus 8 (Kaposi`s sarcoma-associated h
gcagcuuaccgcuacugugg

SEQ ID NO: 352341 - RNA, 18 nt, Human herpesvirus 8 (Kaposi`s sarcoma-associated h
gcagcuuggugaagcaga

SEQ ID NO: 352342 - RNA, 19 nt, Human herpesvirus 8 (Kaposi`s sarcoma-associated h
gcaggcgccuaugacuagg

SEQ ID NO: 352343 - RNA, 15 nt, Human herpesvirus 8 (Kaposi`s sarcoma-associated h
gcagucacuucccca

SEQ ID NO: 352344 - RNA, 14 nt, Human herpesvirus 8 (Kaposi`s sarcoma-associated h
gcagucgccaguuu

SEQ ID NO: 352345 - RNA, 13 nt, Human herpesvirus 8 (Kaposi`s sarcoma-associated h
gcagugugcagua

SEQ ID NO: 352346 - RNA, 17 nt, Human herpesvirus 8 (Kaposi`s sarcoma-associated h
gcaguguuugcugcugu

SEQ ID NO: 352347 - RNA, 22 nt, Human herpesvirus 8 (Kaposi`s sarcoma-associated h
gcaucaccccagauguucuugc

SEQ ID NO: 352348 - RNA, 23 nt, Human herpesvirus 8 (Kaposi`s sarcoma-associated h
gcaucaccccagauguucuugcc

SEQ ID NO: 352349 - RNA, 18 nt, Human herpesvirus 8 (Kaposi`s sarcoma-associated h
gcaugcucggcaacauuc

SEQ ID NO: 352350 - RNA, 22 nt, Human herpesvirus 8 (Kaposi`s sarcoma-associated h
gcaugugauuacucgcacaagc

SEQ ID NO: 352351 - RNA, 14 nt, Human herpesvirus 8 (Kaposi`s sarcoma-associated h
gcauuaaagcacuc

SEQ ID NO: 352352 - RNA, 13 nt, Human herpesvirus 8 (Kaposi`s sarcoma-associated h
gcauuagaagaaa

SEQ ID NO: 352353 - RNA, 16 nt, Human herpesvirus 8 (Kaposi`s sarcoma-associated h
gcauuauaaacccauc

SEQ ID NO: 352354 - RNA, 17 nt, Human herpesvirus 8 (Kaposi`s sarcoma-associated h
gcauuauuucgaguacg

SEQ ID NO: 352355 - RNA, 13 nt, Human herpesvirus 8 (Kaposi`s sarcoma-associated h
gcauuggcuauuu

SEQ ID NO: 352356 - RNA, 19 nt, Human herpesvirus 8 (Kaposi`s sarcoma-associated h
gcauuuuucccuccugcau

SEQ ID NO: 352357 - RNA, 21 nt, Human herpesvirus 8 (Kaposi`s sarcoma-associated h
gccaaaugcccagaaugaagg

SEQ ID NO: 352358 - RNA, 19 nt, Human herpesvirus 8 (Kaposi`s sarcoma-associated h
gccaaaugcggccaguuua

SEQ ID NO: 352359 - RNA, 17 nt, Human herpesvirus 8 (Kaposi`s sarcoma-associated h
gccaacccucagugugc

SEQ ID NO: 352360 - RNA, 22 nt, Human herpesvirus 8 (Kaposi`s sarcoma-associated h
gccaagccauuauacacacggg

SEQ ID NO: 352361 - RNA, 15 nt, Human herpesvirus 8 (Kaposi`s sarcoma-associated h
gccaagcuacuggcc

SEQ ID NO: 352362 - RNA, 13 nt, Human herpesvirus 8 (Kaposi`s sarcoma-associated h
gccaagugcauug

SEQ ID NO: 352363 - RNA, 20 nt, Human herpesvirus 8 (Kaposi`s sarcoma-associated h
gccaauuauugcaccauuua

SEQ ID NO: 352364 - RNA, 16 nt, Human herpesvirus 8 (Kaposi`s sarcoma-associated h
gccaauugacugugga

SEQ ID NO: 352365 - RNA, 21 nt, Human herpesvirus 8 (Kaposi`s sarcoma-associated h
gccacaaacgccccucuuggc

SEQ ID NO: 352366 - RNA, 22 nt, Human herpesvirus 8 (Kaposi`s sarcoma-associated h
gccacauacgcucgccacucua

SEQ ID NO: 352367 - RNA, 21 nt, Human herpesvirus 8 (Kaposi`s sarcoma-associated h
gccacauacgucccucuuggc

SEQ ID NO: 352368 - RNA, 11 nt, Human herpesvirus 8 (Kaposi`s sarcoma-associated h
gccacauuucc

SEQ ID NO: 352369 - RNA, 22 nt, Human herpesvirus 8 (Kaposi`s sarcoma-associated h
gccaccaagaucuuccagucuc

SEQ ID NO: 352370 - RNA, 23 nt, Human herpesvirus 8 (Kaposi`s sarcoma-associated h
gccacguaugggcaaaauaccug

SEQ ID NO: 352371 - RNA, 20 nt, Human herpesvirus 8 (Kaposi`s sarcoma-associated h
gccacugcuuugcggcuuaa

SEQ ID NO: 352372 - RNA, 15 nt, Human herpesvirus 8 (Kaposi`s sarcoma-associated h
gccaggaaguucaau

SEQ ID NO: 352373 - RNA, 17 nt, Human herpesvirus 8 (Kaposi`s sarcoma-associated h
gccaggacaaugaaaag

SEQ ID NO: 352374 - RNA, 18 nt, Human herpesvirus 8 (Kaposi`s sarcoma-associated h
gccagucguacgcggcca

SEQ ID NO: 352375 - RNA, 22 nt, Human herpesvirus 8 (Kaposi`s sarcoma-associated h
gccauagcagucgccaguuuuu

SEQ ID NO: 352376 - RNA, 22 nt, Human herpesvirus 8 (Kaposi`s sarcoma-associated h
gccaucaaagacgccuuccuca

SEQ ID NO: 352377 - RNA, 17 nt, Human herpesvirus 8 (Kaposi`s sarcoma-associated h
gccaucaacgauacuga

SEQ ID NO: 352378 - RNA, 20 nt, Human herpesvirus 8 (Kaposi`s sarcoma-associated h
gccauccgcgagccauucau

SEQ ID NO: 352379 - RNA, 16 nt, Human herpesvirus 8 (Kaposi`s sarcoma-associated h
gccaugaaaggugguu

SEQ ID NO: 352380 - RNA, 11 nt, Human herpesvirus 8 (Kaposi`s sarcoma-associated h
gccaugguacc

SEQ ID NO: 352381 - RNA, 22 nt, Human herpesvirus 8 (Kaposi`s sarcoma-associated h
gccauuauagaugaaacauucg

SEQ ID NO: 352382 - RNA, 21 nt, Human herpesvirus 8 (Kaposi`s sarcoma-associated h
gccauucuaggagacgcgcaa

SEQ ID NO: 352383 - RNA, 22 nt, Human herpesvirus 8 (Kaposi`s sarcoma-associated h
gcccaaucucucauagacuuuc

SEQ ID NO: 352384 - RNA, 21 nt, Human herpesvirus 8 (Kaposi`s sarcoma-associated h
gcccaccgucggcggugcaug

SEQ ID NO: 352385 - RNA, 16 nt, Human herpesvirus 8 (Kaposi`s sarcoma-associated h
gcccacggugcacuga

SEQ ID NO: 352386 - RNA, 13 nt, Human herpesvirus 8 (Kaposi`s sarcoma-associated h
gcccacuggugua

SEQ ID NO: 352387 - RNA, 18 nt, Human herpesvirus 8 (Kaposi`s sarcoma-associated h
gcccacugguguaucaga

SEQ ID NO: 352388 - RNA, 14 nt, Human herpesvirus 8 (Kaposi`s sarcoma-associated h
gcccagacaccaaa

SEQ ID NO: 352389 - RNA, 15 nt, Human herpesvirus 8 (Kaposi`s sarcoma-associated h
gcccagacaccaaag

SEQ ID NO: 352390 - RNA, 16 nt, Human herpesvirus 8 (Kaposi`s sarcoma-associated h
gcccagacaccaaaga

SEQ ID NO: 352391 - RNA, 17 nt, Human herpesvirus 8 (Kaposi`s sarcoma-associated h
gcccagacaccaaagac

SEQ ID NO: 352392 - RNA, 22 nt, Human herpesvirus 8 (Kaposi`s sarcoma-associated h
gcccagcgacucucaagcagua

SEQ ID NO: 352393 - RNA, 19 nt, Human herpesvirus 8 (Kaposi`s sarcoma-associated h
gcccccccauagccaucca

SEQ ID NO: 352394 - RNA, 20 nt, Human herpesvirus 8 (Kaposi`s sarcoma-associated h
gccccucuuggcuguuacaa

SEQ ID NO: 352395 - RNA, 23 nt, Human herpesvirus 8 (Kaposi`s sarcoma-associated h
gcccgggggccaggacucacugg

SEQ ID NO: 352396 - RNA, 14 nt, Human herpesvirus 8 (Kaposi`s sarcoma-associated h
gcccgucacuggau

SEQ ID NO: 352397 - RNA, 17 nt, Human herpesvirus 8 (Kaposi`s sarcoma-associated h
gcccucaaauucucaca

SEQ ID NO: 352398 - RNA, 19 nt, Human herpesvirus 8 (Kaposi`s sarcoma-associated h
gcccuggauacacccacau

SEQ ID NO: 352399 - RNA, 14 nt, Human herpesvirus 8 (Kaposi`s sarcoma-associated h
gccgaaaucagugu

SEQ ID NO: 352400 - RNA, 15 nt, Human herpesvirus 8 (Kaposi`s sarcoma-associated h
gccgaaaucaguguc

SEQ ID NO: 352401 - RNA, 18 nt, Human herpesvirus 8 (Kaposi`s sarcoma-associated h
gccgaagucagugccaca

SEQ ID NO: 352402 - RNA, 23 nt, Human herpesvirus 8 (Kaposi`s sarcoma-associated h
gccgacgcaaacgccacaggcgg

SEQ ID NO: 352403 - RNA, 19 nt, Human herpesvirus 8 (Kaposi`s sarcoma-associated h
gccgagccacaaaguacau

SEQ ID NO: 352404 - RNA, 24 nt, Human herpesvirus 8 (Kaposi`s sarcoma-associated h
gcuguugugguuuuucucucauaa

SEQ ID NO: 352405 - RNA, 15 nt, Human herpesvirus 8 (Kaposi`s sarcoma-associated h
gcuuaaccacaugca

SEQ ID NO: 352406 - RNA, 18 nt, Human herpesvirus 8 (Kaposi`s sarcoma-associated h
gcuuaccgcuacuguggg

SEQ ID NO: 352407 - RNA, 16 nt, Human herpesvirus 8 (Kaposi`s sarcoma-associated h
gcuucagcuucaggaa

SEQ ID NO: 352408 - RNA, 20 nt, Human herpesvirus 8 (Kaposi`s sarcoma-associated h
gcuucauuaugcaugcaaua

SEQ ID NO: 352409 - RNA, 17 nt, Human herpesvirus 8 (Kaposi`s sarcoma-associated h
gcuucggaaagcacugg

SEQ ID NO: 352410 - RNA, 20 nt, Human herpesvirus 8 (Kaposi`s sarcoma-associated h
gcuucggaaagcacugggau

SEQ ID NO: 352411 - RNA, 14 nt, Human herpesvirus 8 (Kaposi`s sarcoma-associated h
gcuucggcauuauu

SEQ ID NO: 352412 - RNA, 16 nt, Human herpesvirus 8 (Kaposi`s sarcoma-associated h
gcuugaggauggugcu

SEQ ID NO: 352413 - RNA, 14 nt, Human herpesvirus 8 (Kaposi`s sarcoma-associated h
gcuugcugauauau

SEQ ID NO: 352414 - RNA, 21 nt, Human herpesvirus 8 (Kaposi`s sarcoma-associated h
gcuuguacagugaguggcugu

SEQ ID NO: 352415 - RNA, 14 nt, Human herpesvirus 8 (Kaposi`s sarcoma-associated h
ggaaagcacuggga

SEQ ID NO: 352416 - RNA, 23 nt, Human herpesvirus 8 (Kaposi`s sarcoma-associated h
ggaaagcagcgcccacuggugua

SEQ ID NO: 352417 - RNA, 16 nt, Human herpesvirus 8 (Kaposi`s sarcoma-associated h
ggaacaugcugccacu

SEQ ID NO: 352418 - RNA, 20 nt, Human herpesvirus 8 (Kaposi`s sarcoma-associated h
ggaagauugguguccagaca

SEQ ID NO: 352419 - RNA, 19 nt, Human herpesvirus 8 (Kaposi`s sarcoma-associated h
ggaagugucgggaggcaug

SEQ ID NO: 352420 - RNA, 14 nt, Human herpesvirus 8 (Kaposi`s sarcoma-associated h
ggacaacgccaugc

SEQ ID NO: 352421 - RNA, 19 nt, Human herpesvirus 8 (Kaposi`s sarcoma-associated h
ggacaagucccagcaauaa

SEQ ID NO: 352422 - RNA, 14 nt, Human herpesvirus 8 (Kaposi`s sarcoma-associated h
ggacacaacaugca

SEQ ID NO: 352423 - RNA, 17 nt, Human herpesvirus 8 (Kaposi`s sarcoma-associated h
ggacaggacgcggccau

SEQ ID NO: 352424 - RNA, 17 nt, Human herpesvirus 8 (Kaposi`s sarcoma-associated h
ggacauggacaggggug

SEQ ID NO: 352425 - RNA, 17 nt, Human herpesvirus 8 (Kaposi`s sarcoma-associated h
ggaccagaggacagggu

SEQ ID NO: 352426 - RNA, 17 nt, Human herpesvirus 8 (Kaposi`s sarcoma-associated h
ggaccgcgagacaucag

SEQ ID NO: 352427 - RNA, 17 nt, Human herpesvirus 8 (Kaposi`s sarcoma-associated h
ggaccgggauagcccgu

SEQ ID NO: 352428 - RNA, 22 nt, Human herpesvirus 8 (Kaposi`s sarcoma-associated h
ggaccuuacgauggaagaccua

SEQ ID NO: 352429 - RNA, 13 nt, Human herpesvirus 8 (Kaposi`s sarcoma-associated h
ggacgccauuugc

SEQ ID NO: 352430 - RNA, 20 nt, Human herpesvirus 8 (Kaposi`s sarcoma-associated h
ggacucacugggggucucgg

SEQ ID NO: 352431 - RNA, 21 nt, Human herpesvirus 8 (Kaposi`s sarcoma-associated h
ggacucgucuacccugccacu

SEQ ID NO: 352432 - RNA, 14 nt, Human herpesvirus 8 (Kaposi`s sarcoma-associated h
ggagaaacagugga

SEQ ID NO: 352433 - RNA, 16 nt, Human herpesvirus 8 (Kaposi`s sarcoma-associated h
ggagaggaaugguggc

SEQ ID NO: 352434 - RNA, 14 nt, Human herpesvirus 8 (Kaposi`s sarcoma-associated h
ggagcaagacgcca

SEQ ID NO: 352435 - RNA, 17 nt, Human herpesvirus 8 (Kaposi`s sarcoma-associated h
ggagcacuuuuggaaaa

SEQ ID NO: 352436 - RNA, 18 nt, Human herpesvirus 8 (Kaposi`s sarcoma-associated h
ggagcccgagaucaucuu

SEQ ID NO: 352437 - RNA, 16 nt, Human herpesvirus 8 (Kaposi`s sarcoma-associated h
ggaggaagagcacugu

SEQ ID NO: 352438 - RNA, 21 nt, Human herpesvirus 8 (Kaposi`s sarcoma-associated h
ggagucacaaguaccacuucu

SEQ ID NO: 352439 - RNA, 22 nt, Human herpesvirus 8 (Kaposi`s sarcoma-associated h
ggaguguuuuuugccaugguac

SEQ ID NO: 352440 - RNA, 17 nt, Human herpesvirus 8 (Kaposi`s sarcoma-associated h
ggauagaguccaaaaca

SEQ ID NO: 352441 - RNA, 14 nt, Human herpesvirus 8 (Kaposi`s sarcoma-associated h
ggauaugggcuugu

SEQ ID NO: 352442 - RNA, 23 nt, Human herpesvirus 8 (Kaposi`s sarcoma-associated h
ggaucagggaaauaugucgcagg

SEQ ID NO: 352443 - RNA, 14 nt, Human herpesvirus 8 (Kaposi`s sarcoma-associated h
ggauccagacuggu

SEQ ID NO: 352444 - RNA, 14 nt, Human herpesvirus 8 (Kaposi`s sarcoma-associated h
ggaucuagacugcu

SEQ ID NO: 352445 - RNA, 16 nt, Human herpesvirus 8 (Kaposi`s sarcoma-associated h
ggaucugugugugaag

SEQ ID NO: 352446 - RNA, 22 nt, Human herpesvirus 8 (Kaposi`s sarcoma-associated h
ggaucuguuacuggcaccuaag

SEQ ID NO: 352447 - RNA, 19 nt, Human herpesvirus 8 (Kaposi`s sarcoma-associated h
ggaugcacaguauagggau

SEQ ID NO: 352448 - RNA, 16 nt, Human herpesvirus 8 (Kaposi`s sarcoma-associated h
ggauggaucccucuga

SEQ ID NO: 352449 - RNA, 19 nt, Human herpesvirus 8 (Kaposi`s sarcoma-associated h
ggauucacucagcugccaa

SEQ ID NO: 352450 - RNA, 22 nt, Human herpesvirus 8 (Kaposi`s sarcoma-associated h
ggcaaaauaccugucgcuucca

SEQ ID NO: 352451 - RNA, 13 nt, Human herpesvirus 8 (Kaposi`s sarcoma-associated h
ggcaacacuggac

SEQ ID NO: 352452 - RNA, 17 nt, Human herpesvirus 8 (Kaposi`s sarcoma-associated h
ggcacagauuguggcau

SEQ ID NO: 352453 - RNA, 20 nt, Human herpesvirus 8 (Kaposi`s sarcoma-associated h
ggcacccaacauccauuaug

SEQ ID NO: 352454 - RNA, 21 nt, Human herpesvirus 8 (Kaposi`s sarcoma-associated h
ggcaggcgugagaggcaauac

SEQ ID NO: 352455 - RNA, 14 nt, Human herpesvirus 8 (Kaposi`s sarcoma-associated h
ggcaguccaagguc

SEQ ID NO: 352456 - RNA, 18 nt, Human herpesvirus 8 (Kaposi`s sarcoma-associated h
ggcagucuaucgucucca

SEQ ID NO: 352457 - RNA, 14 nt, Human herpesvirus 8 (Kaposi`s sarcoma-associated h
ggcauaccacgugu

SEQ ID NO: 352458 - RNA, 18 nt, Human herpesvirus 8 (Kaposi`s sarcoma-associated h
ggccacaaaacugccaaa

SEQ ID NO: 352459 - RNA, 16 nt, Human herpesvirus 8 (Kaposi`s sarcoma-associated h
ggccacugcagggcgc

SEQ ID NO: 352460 - RNA, 23 nt, Human herpesvirus 8 (Kaposi`s sarcoma-associated h
ggccacuuugcccuaaaugugac

SEQ ID NO: 352461 - RNA, 21 nt, Human herpesvirus 8 (Kaposi`s sarcoma-associated h
ggccauccgcgagccauucau

SEQ ID NO: 352462 - RNA, 22 nt, Human herpesvirus 8 (Kaposi`s sarcoma-associated h
ggcccagcgucgucgaugggag

SEQ ID NO: 352463 - RNA, 14 nt, Human herpesvirus 8 (Kaposi`s sarcoma-associated h
ggcccccaccaaac

SEQ ID NO: 352464 - RNA, 15 nt, Human herpesvirus 8 (Kaposi`s sarcoma-associated h
ggcccccaccaaacc

SEQ ID NO: 352465 - RNA, 23 nt, Human herpesvirus 8 (Kaposi`s sarcoma-associated h
ggcccugggcuuacguucuuauu

SEQ ID NO: 352466 - RNA, 24 nt, Human herpesvirus 8 (Kaposi`s sarcoma-associated h
ggccggcugguuacucaaauggga

SEQ ID NO: 352467 - RNA, 20 nt, Human herpesvirus 8 (Kaposi`s sarcoma-associated h
ggccuccacccaccaagcua

SEQ ID NO: 352468 - RNA, 16 nt, Human herpesvirus 8 (Kaposi`s sarcoma-associated h
ggccuugggugcgaug

SEQ ID NO: 352469 - RNA, 17 nt, Human herpesvirus 8 (Kaposi`s sarcoma-associated h
ggcgaauaaaacaggaa

SEQ ID NO: 352470 - RNA, 19 nt, Human herpesvirus 8 (Kaposi`s sarcoma-associated h
ggcgagauuggaggcacau

SEQ ID NO: 352471 - RNA, 15 nt, Human herpesvirus 8 (Kaposi`s sarcoma-associated h
ggcgagcucaugccc

SEQ ID NO: 352472 - RNA, 22 nt, Human herpesvirus 8 (Kaposi`s sarcoma-associated h
ggcgauaccgcgccacguaugg

SEQ ID NO: 352473 - RNA, 14 nt, Human herpesvirus 8 (Kaposi`s sarcoma-associated h
ggcgauuacaggaa

SEQ ID NO: 352474 - RNA, 20 nt, Human herpesvirus 8 (Kaposi`s sarcoma-associated h
ggcgauuacaggaaacuggg

SEQ ID NO: 352475 - RNA, 12 nt, Human herpesvirus 8 (Kaposi`s sarcoma-associated h
ggcgcccacgua

SEQ ID NO: 352476 - RNA, 18 nt, Human herpesvirus 8 (Kaposi`s sarcoma-associated h
ggcgcgaaaguccgucaa

SEQ ID NO: 352477 - RNA, 18 nt, Human herpesvirus 8 (Kaposi`s sarcoma-associated h
ggcgcgggguuuuuccau

SEQ ID NO: 352478 - RNA, 18 nt, Human herpesvirus 8 (Kaposi`s sarcoma-associated h
ggcgguugggauucacuc

SEQ ID NO: 352479 - RNA, 12 nt, Human herpesvirus 8 (Kaposi`s sarcoma-associated h
ggcuaguguaug

SEQ ID NO: 352480 - RNA, 15 nt, Human herpesvirus 8 (Kaposi`s sarcoma-associated h
ggcucauaacacagu

SEQ ID NO: 352481 - RNA, 23 nt, Human herpesvirus 8 (Kaposi`s sarcoma-associated h
ggcugcgcgucuucuauacaugc

SEQ ID NO: 352482 - RNA, 19 nt, Human herpesvirus 8 (Kaposi`s sarcoma-associated h
guauuucugcauuguagug

SEQ ID NO: 352483 - RNA, 23 nt, Human herpesvirus 8 (Kaposi`s sarcoma-associated h
gucaaaugguaaaggggggcaua

SEQ ID NO: 352484 - RNA, 19 nt, Human herpesvirus 8 (Kaposi`s sarcoma-associated h
gucaaccaggccaccauuc

SEQ ID NO: 352485 - RNA, 14 nt, Human herpesvirus 8 (Kaposi`s sarcoma-associated h
gucaauacauugug

SEQ ID NO: 352486 - RNA, 20 nt, Human herpesvirus 8 (Kaposi`s sarcoma-associated h
gucacaaauuuuaacagcca

SEQ ID NO: 352487 - RNA, 19 nt, Human herpesvirus 8 (Kaposi`s sarcoma-associated h
gucacagucgccaacuguc

SEQ ID NO: 352488 - RNA, 16 nt, Human herpesvirus 8 (Kaposi`s sarcoma-associated h
gucacaucucacgcau

SEQ ID NO: 352489 - RNA, 20 nt, Human herpesvirus 8 (Kaposi`s sarcoma-associated h
gucaccgugggaacugugag

SEQ ID NO: 352490 - RNA, 22 nt, Human herpesvirus 8 (Kaposi`s sarcoma-associated h
gucacuagaauuggagcacuuu

SEQ ID NO: 352491 - RNA, 18 nt, Human herpesvirus 8 (Kaposi`s sarcoma-associated h
gucagagaauacagugcu

SEQ ID NO: 352492 - RNA, 20 nt, Human herpesvirus 8 (Kaposi`s sarcoma-associated h
gucagagaauacagugcuaa

SEQ ID NO: 352493 - RNA, 23 nt, Human herpesvirus 8 (Kaposi`s sarcoma-associated h
gucaucccgccgguugguggugu

SEQ ID NO: 352494 - RNA, 18 nt, Human herpesvirus 8 (Kaposi`s sarcoma-associated h
gucaucgccgccgccaaa

SEQ ID NO: 352495 - RNA, 13 nt, Human herpesvirus 8 (Kaposi`s sarcoma-associated h
gucaugcacggua

SEQ ID NO: 352496 - RNA, 21 nt, Human herpesvirus 8 (Kaposi`s sarcoma-associated h
gucauggaauuguauagacca

SEQ ID NO: 352497 - RNA, 17 nt, Human herpesvirus 8 (Kaposi`s sarcoma-associated h
gucccacaugauuugau

SEQ ID NO: 352498 - RNA, 14 nt, Human herpesvirus 8 (Kaposi`s sarcoma-associated h
guccccugcaaugc

SEQ ID NO: 352499 - RNA, 18 nt, Human herpesvirus 8 (Kaposi`s sarcoma-associated h
gucccucagccacaaaua

SEQ ID NO: 352500 - RNA, 19 nt, Human herpesvirus 8 (Kaposi`s sarcoma-associated h
gucccucuuggcuguuaca

SEQ ID NO: 352501 - RNA, 19 nt, Human herpesvirus 8 (Kaposi`s sarcoma-associated h
gucccugaagccucccuaa

SEQ ID NO: 352502 - RNA, 21 nt, Human herpesvirus 8 (Kaposi`s sarcoma-associated h
guccgcucucccaaaccacac

SEQ ID NO: 352503 - RNA, 16 nt, Human herpesvirus 8 (Kaposi`s sarcoma-associated h
guccggccaccgugga

SEQ ID NO: 352504 - RNA, 23 nt, Human herpesvirus 8 (Kaposi`s sarcoma-associated h
guccucuaguuuucgggugauua

SEQ ID NO: 352505 - RNA, 22 nt, Human herpesvirus 8 (Kaposi`s sarcoma-associated h
gucgcaaacuuauaacaucacc

SEQ ID NO: 352506 - RNA, 15 nt, Human herpesvirus 8 (Kaposi`s sarcoma-associated h
gucgcagagaccucu

SEQ ID NO: 352507 - RNA, 22 nt, Human herpesvirus 8 (Kaposi`s sarcoma-associated h
gucgcagagaccucuugcgcga

SEQ ID NO: 352508 - RNA, 20 nt, Human herpesvirus 8 (Kaposi`s sarcoma-associated h
gucgcaggccgaauaccucg

SEQ ID NO: 352509 - RNA, 13 nt, Human herpesvirus 8 (Kaposi`s sarcoma-associated h
gucgccaacuguc

SEQ ID NO: 352510 - RNA, 15 nt, Human herpesvirus 8 (Kaposi`s sarcoma-associated h
gucgcgccagaaaga

SEQ ID NO: 352511 - RNA, 16 nt, Human herpesvirus 8 (Kaposi`s sarcoma-associated h
gucgucugacgccaua

SEQ ID NO: 352512 - RNA, 20 nt, Human herpesvirus 8 (Kaposi`s sarcoma-associated h
gucguuguagugguggcaga

SEQ ID NO: 352513 - RNA, 18 nt, Human herpesvirus 8 (Kaposi`s sarcoma-associated h
gucuccagaagagcauuu

SEQ ID NO: 352514 - RNA, 16 nt, Human herpesvirus 8 (Kaposi`s sarcoma-associated h
gucuccggugccuguu

SEQ ID NO: 352515 - RNA, 19 nt, Human herpesvirus 8 (Kaposi`s sarcoma-associated h
gucucuauaccgugcauga

SEQ ID NO: 352516 - RNA, 15 nt, Human herpesvirus 8 (Kaposi`s sarcoma-associated h
gucugagugguuauu

SEQ ID NO: 352517 - RNA, 19 nt, Human herpesvirus 8 (Kaposi`s sarcoma-associated h
gucugaucccaaaagcaau

SEQ ID NO: 352518 - RNA, 14 nt, Human herpesvirus 8 (Kaposi`s sarcoma-associated h
gucuggcuggcgcu

SEQ ID NO: 352519 - RNA, 22 nt, Human herpesvirus 8 (Kaposi`s sarcoma-associated h
gucuggguggucgcaccuggua

SEQ ID NO: 352520 - RNA, 15 nt, Human herpesvirus 8 (Kaposi`s sarcoma-associated h
gucuguaaagaaagu

SEQ ID NO: 352521 - RNA, 23 nt, Human herpesvirus 8 (Kaposi`s sarcoma-associated h
gucugugcguacuuaacuguuua

SEQ ID NO: 352522 - RNA, 23 nt, Human herpesvirus 8 (Kaposi`s sarcoma-associated h
gucuuauaacagugcucuuccuc

SEQ ID NO: 352523 - RNA, 21 nt, Human herpesvirus 8 (Kaposi`s sarcoma-associated h
gucuucgccuaugaaaauaca

SEQ ID NO: 352524 - RNA, 24 nt, Human herpesvirus 8 (Kaposi`s sarcoma-associated h
gucuuguaaaaauaaaugugaaug

SEQ ID NO: 352525 - RNA, 19 nt, Human herpesvirus 8 (Kaposi`s sarcoma-associated h
gucuuuaacgccugcaccu

SEQ ID NO: 352526 - RNA, 17 nt, Human herpesvirus 8 (Kaposi`s sarcoma-associated h
gucuuuuuaaccgcuaa

SEQ ID NO: 352527 - RNA, 19 nt, Human herpesvirus 8 (Kaposi`s sarcoma-associated h
gugaaacccggauuugccc

SEQ ID NO: 352528 - RNA, 13 nt, Human herpesvirus 8 (Kaposi`s sarcoma-associated h
gugaaguuuacau

SEQ ID NO: 352529 - RNA, 16 nt, Human herpesvirus 8 (Kaposi`s sarcoma-associated h
gugacgugacgcccug

SEQ ID NO: 352530 - RNA, 14 nt, Human herpesvirus 8 (Kaposi`s sarcoma-associated h
gugagacaucuccg

SEQ ID NO: 352531 - RNA, 14 nt, Human herpesvirus 8 (Kaposi`s sarcoma-associated h
gugagggaguguuu

SEQ ID NO: 352532 - RNA, 22 nt, Human herpesvirus 8 (Kaposi`s sarcoma-associated h
gugaucucuggagacggccauc

SEQ ID NO: 352533 - RNA, 18 nt, Human herpesvirus 8 (Kaposi`s sarcoma-associated h
gugcacuaccuaucugcu

SEQ ID NO: 352534 - RNA, 19 nt, Human herpesvirus 8 (Kaposi`s sarcoma-associated h
gugcccugguugacacaau

SEQ ID NO: 352535 - RNA, 22 nt, Human herpesvirus 8 (Kaposi`s sarcoma-associated h
gugcccugguugacacaaugug

SEQ ID NO: 352536 - RNA, 23 nt, Human herpesvirus 8 (Kaposi`s sarcoma-associated h
gugccuccuuagaccuacaucuc

SEQ ID NO: 352537 - RNA, 12 nt, Human herpesvirus 8 (Kaposi`s sarcoma-associated h
gugcguaugcuc

SEQ ID NO: 352538 - RNA, 16 nt, Human herpesvirus 8 (Kaposi`s sarcoma-associated h
gugcguugugaagcau

SEQ ID NO: 352539 - RNA, 12 nt, Human herpesvirus 8 (Kaposi`s sarcoma-associated h
gugcuacuuaca

SEQ ID NO: 352540 - RNA, 13 nt, Human herpesvirus 8 (Kaposi`s sarcoma-associated h
guggacaccacau

SEQ ID NO: 352541 - RNA, 21 nt, Human herpesvirus 8 (Kaposi`s sarcoma-associated h
guggagucacaaguaccacuu

SEQ ID NO: 352542 - RNA, 20 nt, Human herpesvirus 8 (Kaposi`s sarcoma-associated h
guggauccgcaaugucaggu

SEQ ID NO: 352543 - RNA, 18 nt, Human herpesvirus 8 (Kaposi`s sarcoma-associated h
guggaucuagacugcuag

SEQ ID NO: 352544 - RNA, 21 nt, Human herpesvirus 8 (Kaposi`s sarcoma-associated h
guggauuuuauggacauuuac

SEQ ID NO: 352545 - RNA, 19 nt, Human herpesvirus 8 (Kaposi`s sarcoma-associated h
guggcgcggaaacugggca

SEQ ID NO: 352546 - RNA, 15 nt, Human herpesvirus 8 (Kaposi`s sarcoma-associated h
guggcugccuggaca

SEQ ID NO: 352547 - RNA, 13 nt, Human herpesvirus 8 (Kaposi`s sarcoma-associated h
gugggaacuguga

SEQ ID NO: 352548 - RNA, 12 nt, Human herpesvirus 8 (Kaposi`s sarcoma-associated h
gugggacacggu

SEQ ID NO: 352549 - RNA, 23 nt, Human herpesvirus 8 (Kaposi`s sarcoma-associated h
gugggcgaguuuauugguaguga

SEQ ID NO: 352550 - RNA, 15 nt, Human herpesvirus 8 (Kaposi`s sarcoma-associated h
gugggugcacugagu

SEQ ID NO: 352551 - RNA, 18 nt, Human herpesvirus 8 (Kaposi`s sarcoma-associated h
gugguaagggaagcaaaa

SEQ ID NO: 352552 - RNA, 22 nt, Human herpesvirus 8 (Kaposi`s sarcoma-associated h
gugguauguauuguacuaaaga

SEQ ID NO: 352553 - RNA, 20 nt, Human herpesvirus 8 (Kaposi`s sarcoma-associated h
guggucuccggugccuguug

SEQ ID NO: 352554 - RNA, 19 nt, Human herpesvirus 8 (Kaposi`s sarcoma-associated h
gugguuaacuucaccucca

SEQ ID NO: 352555 - RNA, 20 nt, Human herpesvirus 8 (Kaposi`s sarcoma-associated h
gugguuaacuucaccuccag

SEQ ID NO: 352556 - RNA, 13 nt, Human herpesvirus 8 (Kaposi`s sarcoma-associated h
guguaagaacauu

SEQ ID NO: 352557 - RNA, 21 nt, Human herpesvirus 8 (Kaposi`s sarcoma-associated h
guguaagcaagucgauuugaa

SEQ ID NO: 352558 - RNA, 16 nt, Human herpesvirus 8 (Kaposi`s sarcoma-associated h
guguacaaaaaaaaca

SEQ ID NO: 352559 - RNA, 19 nt, Human herpesvirus 8 (Kaposi`s sarcoma-associated h
guguaucccccacaggaca

SEQ ID NO: 352560 - RNA, 15 nt, Human herpesvirus 8 (Kaposi`s sarcoma-associated h
uaacccgcuccgcca

SEQ ID NO: 352561 - RNA, 18 nt, Human herpesvirus 8 (Kaposi`s sarcoma-associated h
uaacggcuucggcauuau

SEQ ID NO: 352562 - RNA, 20 nt, Human herpesvirus 8 (Kaposi`s sarcoma-associated h
uaacgugucugaauguggaa

SEQ ID NO: 352563 - RNA, 14 nt, Human herpesvirus 8 (Kaposi`s sarcoma-associated h
uaacugcaugcucg

SEQ ID NO: 352564 - RNA, 23 nt, Human herpesvirus 8 (Kaposi`s sarcoma-associated h
uaacugccgguuuacuugcagca

SEQ ID NO: 352565 - RNA, 13 nt, Human herpesvirus 8 (Kaposi`s sarcoma-associated h
uaacuguggcuac

SEQ ID NO: 352566 - RNA, 21 nt, Human herpesvirus 8 (Kaposi`s sarcoma-associated h
uaacuucccaggcaguuuauu

SEQ ID NO: 352567 - RNA, 19 nt, Human herpesvirus 8 (Kaposi`s sarcoma-associated h
uaagaaaaucgaagccagg

SEQ ID NO: 352568 - RNA, 14 nt, Human herpesvirus 8 (Kaposi`s sarcoma-associated h
uaagacaaacacug

SEQ ID NO: 352569 - RNA, 15 nt, Human herpesvirus 8 (Kaposi`s sarcoma-associated h
uaagacaaacacugu

SEQ ID NO: 352570 - RNA, 19 nt, Human herpesvirus 8 (Kaposi`s sarcoma-associated h
uaagccaauugacugugga

SEQ ID NO: 352571 - RNA, 16 nt, Human herpesvirus 8 (Kaposi`s sarcoma-associated h
uaagcgccaagccauu

SEQ ID NO: 352572 - RNA, 16 nt, Human herpesvirus 8 (Kaposi`s sarcoma-associated h
uaagcugcauacauau

SEQ ID NO: 352573 - RNA, 18 nt, Human herpesvirus 8 (Kaposi`s sarcoma-associated h
uaagcuuugcagccaggu

SEQ ID NO: 352574 - RNA, 22 nt, Human herpesvirus 8 (Kaposi`s sarcoma-associated h
uaaggcccccaccaaaccuggu

SEQ ID NO: 352575 - RNA, 18 nt, Human herpesvirus 8 (Kaposi`s sarcoma-associated h
uaagucguccgacaugug

SEQ ID NO: 352576 - RNA, 13 nt, Human herpesvirus 8 (Kaposi`s sarcoma-associated h
uaauauacuuugc

SEQ ID NO: 352577 - RNA, 22 nt, Human herpesvirus 8 (Kaposi`s sarcoma-associated h
uaauauacuuugcgugucuaga

SEQ ID NO: 352578 - RNA, 21 nt, Human herpesvirus 8 (Kaposi`s sarcoma-associated h
uaaugcggagaggaauggugg

SEQ ID NO: 352579 - RNA, 14 nt, Human herpesvirus 8 (Kaposi`s sarcoma-associated h
uaauggauggcuau

SEQ ID NO: 352580 - RNA, 19 nt, Human herpesvirus 8 (Kaposi`s sarcoma-associated h
uaauuaucacggacgccac

SEQ ID NO: 352581 - RNA, 20 nt, Human herpesvirus 8 (Kaposi`s sarcoma-associated h
uaauugagcgcugugcuuuu

SEQ ID NO: 352582 - RNA, 12 nt, Human herpesvirus 8 (Kaposi`s sarcoma-associated h
uacaaaaacaca

SEQ ID NO: 352583 - RNA, 13 nt, Human herpesvirus 8 (Kaposi`s sarcoma-associated h
uacaacuauuucc

SEQ ID NO: 352584 - RNA, 23 nt, Human herpesvirus 8 (Kaposi`s sarcoma-associated h
uacaacuauuuccuuuuuucaaa

SEQ ID NO: 352585 - RNA, 19 nt, Human herpesvirus 8 (Kaposi`s sarcoma-associated h
uacaagcaaugauagacau

SEQ ID NO: 352586 - RNA, 20 nt, Human herpesvirus 8 (Kaposi`s sarcoma-associated h
uacaauaaagccgagccaca

SEQ ID NO: 352587 - RNA, 18 nt, Human herpesvirus 8 (Kaposi`s sarcoma-associated h
uacacuaaccacaacaau

SEQ ID NO: 352588 - RNA, 12 nt, Human herpesvirus 8 (Kaposi`s sarcoma-associated h
uacacuacuuau

SEQ ID NO: 352589 - RNA, 15 nt, Human herpesvirus 8 (Kaposi`s sarcoma-associated h
uacacuauguagggu

SEQ ID NO: 352590 - RNA, 21 nt, Human herpesvirus 8 (Kaposi`s sarcoma-associated h
uacacucauauaucagcaagc

SEQ ID NO: 352591 - RNA, 16 nt, Human herpesvirus 8 (Kaposi`s sarcoma-associated h
uacacuuuacugugua

SEQ ID NO: 352592 - RNA, 19 nt, Human herpesvirus 8 (Kaposi`s sarcoma-associated h
uacagguauacucaaggca

SEQ ID NO: 352593 - RNA, 19 nt, Human herpesvirus 8 (Kaposi`s sarcoma-associated h
uacauaacacacacaaaga

SEQ ID NO: 352594 - RNA, 20 nt, Human herpesvirus 8 (Kaposi`s sarcoma-associated h
uacauagucacaucugugua

SEQ ID NO: 352595 - RNA, 20 nt, Human herpesvirus 8 (Kaposi`s sarcoma-associated h
uacauauugguauaugacua

SEQ ID NO: 352596 - RNA, 16 nt, Human herpesvirus 8 (Kaposi`s sarcoma-associated h
uacauccucugccuaa

SEQ ID NO: 352597 - RNA, 19 nt, Human herpesvirus 8 (Kaposi`s sarcoma-associated h
uacaugccccuuaucucca

SEQ ID NO: 352598 - RNA, 20 nt, Human herpesvirus 8 (Kaposi`s sarcoma-associated h
uacaugccccuuaucuccac

SEQ ID NO: 352599 - RNA, 17 nt, Human herpesvirus 8 (Kaposi`s sarcoma-associated h
uacauggaauacgggag

SEQ ID NO: 352600 - RNA, 20 nt, Human herpesvirus 8 (Kaposi`s sarcoma-associated h
uacauggagggaauggccuc

SEQ ID NO: 352601 - RNA, 16 nt, Human herpesvirus 8 (Kaposi`s sarcoma-associated h
uacauuaaaaggacau

SEQ ID NO: 352602 - RNA, 11 nt, Human herpesvirus 8 (Kaposi`s sarcoma-associated h
uacauuaucuu

SEQ ID NO: 352603 - RNA, 18 nt, Human herpesvirus 8 (Kaposi`s sarcoma-associated h
uacauuugacaacacgca

SEQ ID NO: 352604 - RNA, 19 nt, Human herpesvirus 8 (Kaposi`s sarcoma-associated h
uaccaauacuauuauaaca

SEQ ID NO: 352605 - RNA, 13 nt, Human herpesvirus 8 (Kaposi`s sarcoma-associated h
uaccaccaagaag

SEQ ID NO: 352606 - RNA, 21 nt, Human herpesvirus 8 (Kaposi`s sarcoma-associated h
uaccauggcaaaaaacacucc

SEQ ID NO: 352607 - RNA, 19 nt, Human herpesvirus 8 (Kaposi`s sarcoma-associated h
uaccauguugcgcaauuca

SEQ ID NO: 352608 - RNA, 19 nt, Human herpesvirus 8 (Kaposi`s sarcoma-associated h
uacccaauguuaauguucu

SEQ ID NO: 352609 - RNA, 22 nt, Human herpesvirus 8 (Kaposi`s sarcoma-associated h
uacccauguuggguccacaagu

SEQ ID NO: 352610 - RNA, 17 nt, Human herpesvirus 8 (Kaposi`s sarcoma-associated h
uacccugauuagcacug

SEQ ID NO: 352611 - RNA, 18 nt, Human herpesvirus 8 (Kaposi`s sarcoma-associated h
uacccugauuagcacugu

SEQ ID NO: 352612 - RNA, 19 nt, Human herpesvirus 8 (Kaposi`s sarcoma-associated h
uacccugauuagcacugua

SEQ ID NO: 352613 - RNA, 22 nt, Human herpesvirus 8 (Kaposi`s sarcoma-associated h
uacccugccguuguucuuugcg

SEQ ID NO: 352614 - RNA, 15 nt, Human herpesvirus 8 (Kaposi`s sarcoma-associated h
uaccgaccaauacaa

SEQ ID NO: 352615 - RNA, 19 nt, Human herpesvirus 8 (Kaposi`s sarcoma-associated h
uaccgcccuccguuuugca

SEQ ID NO: 352616 - RNA, 20 nt, Human herpesvirus 8 (Kaposi`s sarcoma-associated h
uaccguaccggcaucugcaa

SEQ ID NO: 352617 - RNA, 16 nt, Human herpesvirus 8 (Kaposi`s sarcoma-associated h
uacgcgacggaucucu

SEQ ID NO: 352618 - RNA, 16 nt, Human herpesvirus 8 (Kaposi`s sarcoma-associated h
uacgcgguuguuuacg

SEQ ID NO: 352619 - RNA, 16 nt, Human herpesvirus 8 (Kaposi`s sarcoma-associated h
uacgucccucuuggcu

SEQ ID NO: 352620 - RNA, 22 nt, Human herpesvirus 8 (Kaposi`s sarcoma-associated h
uacgucccucuuggcuguuaca

SEQ ID NO: 352621 - RNA, 23 nt, Human herpesvirus 8 (Kaposi`s sarcoma-associated h
uacgucccucuuggcuguuacaa

SEQ ID NO: 352622 - RNA, 12 nt, Human herpesvirus 8 (Kaposi`s sarcoma-associated h
uacgugccagug

SEQ ID NO: 352623 - RNA, 18 nt, Human herpesvirus 8 (Kaposi`s sarcoma-associated h
uacguuguagaucuggau

SEQ ID NO: 352624 - RNA, 16 nt, Human herpesvirus 8 (Kaposi`s sarcoma-associated h
uacuaagagaacagca

SEQ ID NO: 352625 - RNA, 16 nt, Human herpesvirus 8 (Kaposi`s sarcoma-associated h
uacuaauguaaccuaa

SEQ ID NO: 352626 - RNA, 11 nt, Human herpesvirus 8 (Kaposi`s sarcoma-associated h
uacuacaggua

SEQ ID NO: 352627 - RNA, 19 nt, Human herpesvirus 8 (Kaposi`s sarcoma-associated h
uacugcccaaguauggaau

SEQ ID NO: 352628 - RNA, 14 nt, Human herpesvirus 8 (Kaposi`s sarcoma-associated h
uacugcuuguucag

SEQ ID NO: 352629 - RNA, 16 nt, Human herpesvirus 8 (Kaposi`s sarcoma-associated h
uacugggaucccuuca

SEQ ID NO: 352630 - RNA, 17 nt, Human herpesvirus 8 (Kaposi`s sarcoma-associated h
uacugugggugcacuga

SEQ ID NO: 352631 - RNA, 16 nt, Human herpesvirus 8 (Kaposi`s sarcoma-associated h
uacuuaacgugucuga

SEQ ID NO: 352632 - RNA, 20 nt, Human herpesvirus 8 (Kaposi`s sarcoma-associated h
uacuucagccgcuugcugau

SEQ ID NO: 352633 - RNA, 16 nt, Human herpesvirus 8 (Kaposi`s sarcoma-associated h
uagaaacaaagcacug

SEQ ID NO: 352634 - RNA, 16 nt, Human herpesvirus 8 (Kaposi`s sarcoma-associated h
uagaacuaaccacuca

SEQ ID NO: 352635 - RNA, 19 nt, Human herpesvirus 8 (Kaposi`s sarcoma-associated h
uagaacuaaccacucauaa

SEQ ID NO: 352636 - RNA, 19 nt, Human herpesvirus 8 (Kaposi`s sarcoma-associated h
uagacaguuaaucuuuauu

SEQ ID NO: 352637 - RNA, 20 nt, Human herpesvirus 8 (Kaposi`s sarcoma-associated h
uagacaugccccaaagccgu

SEQ ID NO: 352638 - RNA, 12 nt, Human herpesvirus 8 (Kaposi`s sarcoma-associated h
uauuaaccauag

SEQ ID NO: 352639 - RNA, 22 nt, Human herpesvirus 8 (Kaposi`s sarcoma-associated h
uauuagagaaaggcuacgugag

SEQ ID NO: 352640 - RNA, 15 nt, Human herpesvirus 8 (Kaposi`s sarcoma-associated h
uauuaucaaagaaag

SEQ ID NO: 352641 - RNA, 14 nt, Human herpesvirus 8 (Kaposi`s sarcoma-associated h
uauucaggcagaag

SEQ ID NO: 352642 - RNA, 21 nt, Human herpesvirus 8 (Kaposi`s sarcoma-associated h
uauucuagagcccgcugcuau

SEQ ID NO: 352643 - RNA, 13 nt, Human herpesvirus 8 (Kaposi`s sarcoma-associated h
uauugaagcaugu

SEQ ID NO: 352644 - RNA, 13 nt, Human herpesvirus 8 (Kaposi`s sarcoma-associated h
uauugcauggcau

SEQ ID NO: 352645 - RNA, 21 nt, Human herpesvirus 8 (Kaposi`s sarcoma-associated h
uauugucuagacacgcaaagu

SEQ ID NO: 352646 - RNA, 17 nt, Human herpesvirus 8 (Kaposi`s sarcoma-associated h
uauuguuuuugaacaug

SEQ ID NO: 352647 - RNA, 19 nt, Human herpesvirus 8 (Kaposi`s sarcoma-associated h
uauuguuuuugaacaugug

SEQ ID NO: 352648 - RNA, 21 nt, Human herpesvirus 8 (Kaposi`s sarcoma-associated h
uauuuaaggcagucuaucguc

SEQ ID NO: 352649 - RNA, 11 nt, Human herpesvirus 8 (Kaposi`s sarcoma-associated h
uauuucaagag

SEQ ID NO: 352650 - RNA, 17 nt, Human herpesvirus 8 (Kaposi`s sarcoma-associated h
uauuugggggaugcugu

SEQ ID NO: 352651 - RNA, 15 nt, Human herpesvirus 8 (Kaposi`s sarcoma-associated h
uauuuugaugguguu

SEQ ID NO: 352652 - RNA, 18 nt, Human herpesvirus 8 (Kaposi`s sarcoma-associated h
uauuuuuuuucaaacagg

SEQ ID NO: 352653 - RNA, 18 nt, Human herpesvirus 8 (Kaposi`s sarcoma-associated h
ucaaagaaaggugacuua

SEQ ID NO: 352654 - RNA, 16 nt, Human herpesvirus 8 (Kaposi`s sarcoma-associated h
ucaaauaaaacggugu

SEQ ID NO: 352655 - RNA, 16 nt, Human herpesvirus 8 (Kaposi`s sarcoma-associated h
ucaaaugggaacaaug

SEQ ID NO: 352656 - RNA, 21 nt, Human herpesvirus 8 (Kaposi`s sarcoma-associated h
ucaaccaggccaccauuccuc

SEQ ID NO: 352657 - RNA, 23 nt, Human herpesvirus 8 (Kaposi`s sarcoma-associated h
ucaacuaaggggcuuaugucauu

SEQ ID NO: 352658 - RNA, 21 nt, Human herpesvirus 8 (Kaposi`s sarcoma-associated h
ucaagaccgagcguauucuca

SEQ ID NO: 352659 - RNA, 22 nt, Human herpesvirus 8 (Kaposi`s sarcoma-associated h
ucaagaccgagcguauucucag

SEQ ID NO: 352660 - RNA, 14 nt, Human herpesvirus 8 (Kaposi`s sarcoma-associated h
ucacacucuuuacc

SEQ ID NO: 352661 - RNA, 18 nt, Human herpesvirus 8 (Kaposi`s sarcoma-associated h
ucacagucgccaacuguc

SEQ ID NO: 352662 - RNA, 22 nt, Human herpesvirus 8 (Kaposi`s sarcoma-associated h
ucacaucuguguacaaaccaaa

SEQ ID NO: 352663 - RNA, 13 nt, Human herpesvirus 8 (Kaposi`s sarcoma-associated h
ucacccagugugc

SEQ ID NO: 352664 - RNA, 21 nt, Human herpesvirus 8 (Kaposi`s sarcoma-associated h
ucaccccagauguucuugcca

SEQ ID NO: 352665 - RNA, 13 nt, Human herpesvirus 8 (Kaposi`s sarcoma-associated h
ucaccgacaccau

SEQ ID NO: 352666 - RNA, 13 nt, Human herpesvirus 8 (Kaposi`s sarcoma-associated h
ucacggccguguu

SEQ ID NO: 352667 - RNA, 14 nt, Human herpesvirus 8 (Kaposi`s sarcoma-associated h
ucacgggaugcuag

SEQ ID NO: 352668 - RNA, 21 nt, Human herpesvirus 8 (Kaposi`s sarcoma-associated h
ucacguagccuuucucuaaua

SEQ ID NO: 352669 - RNA, 13 nt, Human herpesvirus 8 (Kaposi`s sarcoma-associated h
ucacuacagggaa

SEQ ID NO: 352670 - RNA, 20 nt, Human herpesvirus 8 (Kaposi`s sarcoma-associated h
ucacucagcugccaaggcaa

SEQ ID NO: 352671 - RNA, 13 nt, Human herpesvirus 8 (Kaposi`s sarcoma-associated h
ucacugcugguau

SEQ ID NO: 352672 - RNA, 19 nt, Human herpesvirus 8 (Kaposi`s sarcoma-associated h
ucacugggggucucgggaa

SEQ ID NO: 352673 - RNA, 18 nt, Human herpesvirus 8 (Kaposi`s sarcoma-associated h
ucacuucuccguugacag

SEQ ID NO: 352674 - RNA, 13 nt, Human herpesvirus 8 (Kaposi`s sarcoma-associated h
ucagaacaguggu

SEQ ID NO: 352675 - RNA, 17 nt, Human herpesvirus 8 (Kaposi`s sarcoma-associated h
ucagagaauacagugcu

SEQ ID NO: 352676 - RNA, 19 nt, Human herpesvirus 8 (Kaposi`s sarcoma-associated h
ucagagaauacagugcuaa

SEQ ID NO: 352677 - RNA, 20 nt, Human herpesvirus 8 (Kaposi`s sarcoma-associated h
ucagagcuguuacccugcuc

SEQ ID NO: 352678 - RNA, 15 nt, Human herpesvirus 8 (Kaposi`s sarcoma-associated h
ucagcaacugcguca

SEQ ID NO: 352679 - RNA, 17 nt, Human herpesvirus 8 (Kaposi`s sarcoma-associated h
ucagcccuagccaugga

SEQ ID NO: 352680 - RNA, 20 nt, Human herpesvirus 8 (Kaposi`s sarcoma-associated h
ucagcccuuaucagcucacu

SEQ ID NO: 352681 - RNA, 16 nt, Human herpesvirus 8 (Kaposi`s sarcoma-associated h
ucagccgcuugcugau

SEQ ID NO: 352682 - RNA, 22 nt, Human herpesvirus 8 (Kaposi`s sarcoma-associated h
ucagccucacggacaacgccau

SEQ ID NO: 352683 - RNA, 20 nt, Human herpesvirus 8 (Kaposi`s sarcoma-associated h
ucaggauuucgaauaucuca

SEQ ID NO: 352684 - RNA, 14 nt, Human herpesvirus 8 (Kaposi`s sarcoma-associated h
ucaggcgccgccaa

SEQ ID NO: 352685 - RNA, 21 nt, Human herpesvirus 8 (Kaposi`s sarcoma-associated h
ucagguaaugccacauuuccc

SEQ ID NO: 352686 - RNA, 19 nt, Human herpesvirus 8 (Kaposi`s sarcoma-associated h
ucagguucacuugggagcu

SEQ ID NO: 352687 - RNA, 13 nt, Human herpesvirus 8 (Kaposi`s sarcoma-associated h
ucaguacuccuuc

SEQ ID NO: 352688 - RNA, 16 nt, Human herpesvirus 8 (Kaposi`s sarcoma-associated h
ucaucaaugggagaac

SEQ ID NO: 352689 - RNA, 19 nt, Human herpesvirus 8 (Kaposi`s sarcoma-associated h
ucauccuguuggucugcuu

SEQ ID NO: 352690 - RNA, 20 nt, Human herpesvirus 8 (Kaposi`s sarcoma-associated h
ucaucgcgaccgcugccaau

SEQ ID NO: 352691 - RNA, 10 nt, Human herpesvirus 8 (Kaposi`s sarcoma-associated h
ucaugcucau

SEQ ID NO: 352692 - RNA, 22 nt, Human herpesvirus 8 (Kaposi`s sarcoma-associated h
ucauguacgucguaagccagug

SEQ ID NO: 352693 - RNA, 15 nt, Human herpesvirus 8 (Kaposi`s sarcoma-associated h
ucauuaugcaugcaa

SEQ ID NO: 352694 - RNA, 22 nt, Human herpesvirus 8 (Kaposi`s sarcoma-associated h
ucauuauuaugaggccuaucug

SEQ ID NO: 352695 - RNA, 22 nt, Human herpesvirus 8 (Kaposi`s sarcoma-associated h
ucauucagagacucaauuggau

SEQ ID NO: 352696 - RNA, 18 nt, Human herpesvirus 8 (Kaposi`s sarcoma-associated h
ucauuucauuuguguaua

SEQ ID NO: 352697 - RNA, 13 nt, Human herpesvirus 8 (Kaposi`s sarcoma-associated h
ucauuuuuacuuu

SEQ ID NO: 352698 - RNA, 19 nt, Human herpesvirus 8 (Kaposi`s sarcoma-associated h
uccaaaggccgcuuguauu

SEQ ID NO: 352699 - RNA, 18 nt, Human herpesvirus 8 (Kaposi`s sarcoma-associated h
uccaaauaaaccagacac

SEQ ID NO: 352700 - RNA, 14 nt, Human herpesvirus 8 (Kaposi`s sarcoma-associated h
uccacccaccaagc

SEQ ID NO: 352701 - RNA, 13 nt, Human herpesvirus 8 (Kaposi`s sarcoma-associated h
uccacgcggauag

SEQ ID NO: 352702 - RNA, 15 nt, Human herpesvirus 8 (Kaposi`s sarcoma-associated h
uccagaagagcauuu

SEQ ID NO: 352703 - RNA, 16 nt, Human herpesvirus 8 (Kaposi`s sarcoma-associated h
uccagaagagcauuuu

SEQ ID NO: 352704 - RNA, 15 nt, Human herpesvirus 8 (Kaposi`s sarcoma-associated h
uccagcaaagcacau

SEQ ID NO: 352705 - RNA, 19 nt, Human herpesvirus 8 (Kaposi`s sarcoma-associated h
uccaggagcgacuggauca

SEQ ID NO: 352706 - RNA, 23 nt, Human herpesvirus 8 (Kaposi`s sarcoma-associated h
uccaggcucuacagguaggccac

SEQ ID NO: 352707 - RNA, 21 nt, Human herpesvirus 8 (Kaposi`s sarcoma-associated h
uccagggaaacaugcccuccu

SEQ ID NO: 352708 - RNA, 14 nt, Human herpesvirus 8 (Kaposi`s sarcoma-associated h
uccaucagucaggg

SEQ ID NO: 352709 - RNA, 18 nt, Human herpesvirus 8 (Kaposi`s sarcoma-associated h
uccauccguguccucuag

SEQ ID NO: 352710 - RNA, 16 nt, Human herpesvirus 8 (Kaposi`s sarcoma-associated h
uccauggcaguggaca

SEQ ID NO: 352711 - RNA, 17 nt, Human herpesvirus 8 (Kaposi`s sarcoma-associated h
ucccaaaaaaccuuaau

SEQ ID NO: 352712 - RNA, 12 nt, Human herpesvirus 8 (Kaposi`s sarcoma-associated h
ucccaaaccaca

SEQ ID NO: 352713 - RNA, 15 nt, Human herpesvirus 8 (Kaposi`s sarcoma-associated h
ucccaugaugcagag

SEQ ID NO: 352714 - RNA, 15 nt, Human herpesvirus 8 (Kaposi`s sarcoma-associated h
ucccauucaugccuu

SEQ ID NO: 352715 - RNA, 20 nt, Human herpesvirus 8 (Kaposi`s sarcoma-associated h
ucccauuugauauauggaaa

SEQ ID NO: 352716 - RNA, 13 nt, Human herpesvirus 8 (Kaposi`s sarcoma-associated h
ucccccaaccucu

SEQ ID NO: 352717 - RNA, 15 nt, Human herpesvirus 8 (Kaposi`s sarcoma-associated h
ucucuggugguggcu

SEQ ID NO: 352718 - RNA, 15 nt, Human herpesvirus 8 (Kaposi`s sarcoma-associated h
ucugaagcaccacau

SEQ ID NO: 352719 - RNA, 13 nt, Human herpesvirus 8 (Kaposi`s sarcoma-associated h
ucugaauaugacg

SEQ ID NO: 352720 - RNA, 21 nt, Human herpesvirus 8 (Kaposi`s sarcoma-associated h
ucugacgccggcgacaaugaa

SEQ ID NO: 352721 - RNA, 15 nt, Human herpesvirus 8 (Kaposi`s sarcoma-associated h
ucugcacccuuucau

SEQ ID NO: 352722 - RNA, 14 nt, Human herpesvirus 8 (Kaposi`s sarcoma-associated h
ucugcaucauggga

SEQ ID NO: 352723 - RNA, 19 nt, Human herpesvirus 8 (Kaposi`s sarcoma-associated h
ucugcguuccacaaacaca

SEQ ID NO: 352724 - RNA, 18 nt, Human herpesvirus 8 (Kaposi`s sarcoma-associated h
ucugcugucuaguggaga

SEQ ID NO: 352725 - RNA, 16 nt, Human herpesvirus 8 (Kaposi`s sarcoma-associated h
ucuggcccucacuaca

SEQ ID NO: 352726 - RNA, 16 nt, Human herpesvirus 8 (Kaposi`s sarcoma-associated h
ucuggccugugcccaa

SEQ ID NO: 352727 - RNA, 21 nt, Human herpesvirus 8 (Kaposi`s sarcoma-associated h
ucugggccacaaaacugccaa

SEQ ID NO: 352728 - RNA, 15 nt, Human herpesvirus 8 (Kaposi`s sarcoma-associated h
ucuguaaaacacugu

SEQ ID NO: 352729 - RNA, 13 nt, Human herpesvirus 8 (Kaposi`s sarcoma-associated h
ucuguauugacac

SEQ ID NO: 352730 - RNA, 23 nt, Human herpesvirus 8 (Kaposi`s sarcoma-associated h
ucugugccugcguuaacuuccca

SEQ ID NO: 352731 - RNA, 16 nt, Human herpesvirus 8 (Kaposi`s sarcoma-associated h
ucuguggcuaucuugc

SEQ ID NO: 352732 - RNA, 16 nt, Human herpesvirus 8 (Kaposi`s sarcoma-associated h
ucuguuuccagugacc

SEQ ID NO: 352733 - RNA, 12 nt, Human herpesvirus 8 (Kaposi`s sarcoma-associated h
ucuuacuaagag

SEQ ID NO: 352734 - RNA, 22 nt, Human herpesvirus 8 (Kaposi`s sarcoma-associated h
ucuuacuaagagaacagcacau

SEQ ID NO: 352735 - RNA, 17 nt, Human herpesvirus 8 (Kaposi`s sarcoma-associated h
ucuuacuucgcauaugc

SEQ ID NO: 352736 - RNA, 20 nt, Human herpesvirus 8 (Kaposi`s sarcoma-associated h
ucuuauaacacuaauauacu

SEQ ID NO: 352737 - RNA, 20 nt, Human herpesvirus 8 (Kaposi`s sarcoma-associated h
ucuucauucucuccacuaga

SEQ ID NO: 352738 - RNA, 12 nt, Human herpesvirus 8 (Kaposi`s sarcoma-associated h
ucuuccagucuc

SEQ ID NO: 352739 - RNA, 16 nt, Human herpesvirus 8 (Kaposi`s sarcoma-associated h
ucuuccuccuagucau

SEQ ID NO: 352740 - RNA, 14 nt, Human herpesvirus 8 (Kaposi`s sarcoma-associated h
ucuucgcugaugaa

SEQ ID NO: 352741 - RNA, 17 nt, Human herpesvirus 8 (Kaposi`s sarcoma-associated h
ucuucucauucagagac

SEQ ID NO: 352742 - RNA, 17 nt, Human herpesvirus 8 (Kaposi`s sarcoma-associated h
ucuucuuggugugcuga

SEQ ID NO: 352743 - RNA, 13 nt, Human herpesvirus 8 (Kaposi`s sarcoma-associated h
ucuuggcuguuac

SEQ ID NO: 352744 - RNA, 18 nt, Human herpesvirus 8 (Kaposi`s sarcoma-associated h
ucuuugcgcuauuugccg

SEQ ID NO: 352745 - RNA, 20 nt, Human herpesvirus 8 (Kaposi`s sarcoma-associated h
ucuuuggggcuacacaucau

SEQ ID NO: 352746 - RNA, 14 nt, Human herpesvirus 8 (Kaposi`s sarcoma-associated h
ucuuuucaaccucg

SEQ ID NO: 352747 - RNA, 16 nt, Human herpesvirus 8 (Kaposi`s sarcoma-associated h
ucuuuuccaccuacac

SEQ ID NO: 352748 - RNA, 14 nt, Human herpesvirus 8 (Kaposi`s sarcoma-associated h
ugaaaaagaggcaa

SEQ ID NO: 352749 - RNA, 15 nt, Human herpesvirus 8 (Kaposi`s sarcoma-associated h
ugaaaaguguuccca

SEQ ID NO: 352750 - RNA, 12 nt, Human herpesvirus 8 (Kaposi`s sarcoma-associated h
ugaaaauacagg

SEQ ID NO: 352751 - RNA, 13 nt, Human herpesvirus 8 (Kaposi`s sarcoma-associated h
ugaaagcaauaaa

SEQ ID NO: 352752 - RNA, 15 nt, Human herpesvirus 8 (Kaposi`s sarcoma-associated h
ugaacauguggcaca

SEQ ID NO: 352753 - RNA, 22 nt, Human herpesvirus 8 (Kaposi`s sarcoma-associated h
ugaagcaccacauacagacugc

SEQ ID NO: 352754 - RNA, 18 nt, Human herpesvirus 8 (Kaposi`s sarcoma-associated h
ugaaggagcgccucgcag

SEQ ID NO: 352755 - RNA, 14 nt, Human herpesvirus 8 (Kaposi`s sarcoma-associated h
ugaaguuuacauua

SEQ ID NO: 352756 - RNA, 16 nt, Human herpesvirus 8 (Kaposi`s sarcoma-associated h
ugaauacccuggauca

SEQ ID NO: 352757 - RNA, 18 nt, Human herpesvirus 8 (Kaposi`s sarcoma-associated h
ugaaugggggcagugcac

SEQ ID NO: 352758 - RNA, 13 nt, Human herpesvirus 8 (Kaposi`s sarcoma-associated h
ugaaugugaucac

SEQ ID NO: 352759 - RNA, 14 nt, Human herpesvirus 8 (Kaposi`s sarcoma-associated h
ugaaugugaucacg

SEQ ID NO: 352760 - RNA, 14 nt, Human herpesvirus 8 (Kaposi`s sarcoma-associated h
ugacaacauagaca

SEQ ID NO: 352761 - RNA, 16 nt, Human herpesvirus 8 (Kaposi`s sarcoma-associated h
ugacaaucuggaugug

SEQ ID NO: 352762 - RNA, 18 nt, Human herpesvirus 8 (Kaposi`s sarcoma-associated h
ugacagacaacacuacua

SEQ ID NO: 352763 - RNA, 15 nt, Human herpesvirus 8 (Kaposi`s sarcoma-associated h
ugacauaaaauuucu

SEQ ID NO: 352764 - RNA, 14 nt, Human herpesvirus 8 (Kaposi`s sarcoma-associated h
ugacauacaugaga

SEQ ID NO: 352765 - RNA, 16 nt, Human herpesvirus 8 (Kaposi`s sarcoma-associated h
ugacauaggcgacaaa

SEQ ID NO: 352766 - RNA, 15 nt, Human herpesvirus 8 (Kaposi`s sarcoma-associated h
ugaccacgcacuaua

SEQ ID NO: 352767 - RNA, 22 nt, Human herpesvirus 8 (Kaposi`s sarcoma-associated h
ugaccggcuuguuuauaacaau

SEQ ID NO: 352768 - RNA, 21 nt, Human herpesvirus 8 (Kaposi`s sarcoma-associated h
ugaccuuguuuguuaaugaaa

SEQ ID NO: 352769 - RNA, 13 nt, Human herpesvirus 8 (Kaposi`s sarcoma-associated h
ugacgaaugcauc

SEQ ID NO: 352770 - RNA, 21 nt, Human herpesvirus 8 (Kaposi`s sarcoma-associated h
ugacgcccuggucgacgccgu

SEQ ID NO: 352771 - RNA, 22 nt, Human herpesvirus 8 (Kaposi`s sarcoma-associated h
ugacuaggaggaagagcacugu

SEQ ID NO: 352772 - RNA, 23 nt, Human herpesvirus 8 (Kaposi`s sarcoma-associated h
ugacuaggaggaagagcacuguu

SEQ ID NO: 352773 - RNA, 13 nt, Human herpesvirus 8 (Kaposi`s sarcoma-associated h
ugacucauuucau

SEQ ID NO: 352774 - RNA, 17 nt, Human herpesvirus 8 (Kaposi`s sarcoma-associated h
ugacuggaacgccaugg

SEQ ID NO: 352775 - RNA, 22 nt, Human herpesvirus 8 (Kaposi`s sarcoma-associated h
ugagagaccccgugauccagga

SEQ ID NO: 352776 - RNA, 22 nt, Human herpesvirus 8 (Kaposi`s sarcoma-associated h
ugagagcuggagggcacagauu

SEQ ID NO: 352777 - RNA, 16 nt, Human herpesvirus 8 (Kaposi`s sarcoma-associated h
ugagaggcaauacaga

SEQ ID NO: 352778 - RNA, 14 nt, Human herpesvirus 8 (Kaposi`s sarcoma-associated h
ugagauagccacau

SEQ ID NO: 352779 - RNA, 22 nt, Human herpesvirus 8 (Kaposi`s sarcoma-associated h
ugagauuucccuacauugcucc

SEQ ID NO: 352780 - RNA, 12 nt, Human herpesvirus 8 (Kaposi`s sarcoma-associated h
ugagccacaaac

SEQ ID NO: 352781 - RNA, 21 nt, Human herpesvirus 8 (Kaposi`s sarcoma-associated h
ugagccucccuuagugacauc

SEQ ID NO: 352782 - RNA, 15 nt, Human herpesvirus 8 (Kaposi`s sarcoma-associated h
ugaggaagaucuaag

SEQ ID NO: 352783 - RNA, 14 nt, Human herpesvirus 8 (Kaposi`s sarcoma-associated h
ugaggaccuuguca

SEQ ID NO: 352784 - RNA, 17 nt, Human herpesvirus 8 (Kaposi`s sarcoma-associated h
ugaggccuaucugagga

SEQ ID NO: 352785 - RNA, 23 nt, Human herpesvirus 8 (Kaposi`s sarcoma-associated h
ugagggaguguuuuuugccaugg

SEQ ID NO: 352786 - RNA, 17 nt, Human herpesvirus 8 (Kaposi`s sarcoma-associated h
ugaggugcucuucccac

SEQ ID NO: 352787 - RNA, 15 nt, Human herpesvirus 8 (Kaposi`s sarcoma-associated h
ugaguaauguguauu

SEQ ID NO: 352788 - RNA, 13 nt, Human herpesvirus 8 (Kaposi`s sarcoma-associated h
ugauacagggaca

SEQ ID NO: 352789 - RNA, 16 nt, Human herpesvirus 8 (Kaposi`s sarcoma-associated h
ugauaggcaacaugac

SEQ ID NO: 352790 - RNA, 17 nt, Human herpesvirus 8 (Kaposi`s sarcoma-associated h
ugauaggcaacaugaca

SEQ ID NO: 352791 - RNA, 16 nt, Human herpesvirus 8 (Kaposi`s sarcoma-associated h
ugauaugauauacucc

SEQ ID NO: 352792 - RNA, 22 nt, Human herpesvirus 8 (Kaposi`s sarcoma-associated h
ugaucccaaaagcaauguuuag

SEQ ID NO: 352793 - RNA, 21 nt, Human herpesvirus 8 (Kaposi`s sarcoma-associated h
ugauguaaauuuaggaaacac

SEQ ID NO: 352794 - RNA, 13 nt, Human herpesvirus 8 (Kaposi`s sarcoma-associated h
ugcaaaagagaca

SEQ ID NO: 352795 - RNA, 14 nt, Human herpesvirus 8 (Kaposi`s sarcoma-associated h
ugcaaaaugugcuu

SEQ ID NO: 352796 - RNA, 23 nt, Human herpesvirus 8 (Kaposi`s sarcoma-associated h
uggauccuacacuuuacugugua

SEQ ID NO: 352797 - RNA, 22 nt, Human herpesvirus 8 (Kaposi`s sarcoma-associated h
uggaucugcgcgucagcagugu

SEQ ID NO: 352798 - RNA, 22 nt, Human herpesvirus 8 (Kaposi`s sarcoma-associated h
uggcaagaaauccgagcaccuc

SEQ ID NO: 352799 - RNA, 16 nt, Human herpesvirus 8 (Kaposi`s sarcoma-associated h
uggcacccaacaucca

SEQ ID NO: 352800 - RNA, 21 nt, Human herpesvirus 8 (Kaposi`s sarcoma-associated h
uggcacccaacauccauuaug

SEQ ID NO: 352801 - RNA, 13 nt, Human herpesvirus 8 (Kaposi`s sarcoma-associated h
uggccaauaaugc

SEQ ID NO: 352802 - RNA, 23 nt, Human herpesvirus 8 (Kaposi`s sarcoma-associated h
uggcccaauuaauuggagcucuu

SEQ ID NO: 352803 - RNA, 18 nt, Human herpesvirus 8 (Kaposi`s sarcoma-associated h
uggcccacguggugcugc

SEQ ID NO: 352804 - RNA, 20 nt, Human herpesvirus 8 (Kaposi`s sarcoma-associated h
uggcccccuuuacagaucua

SEQ ID NO: 352805 - RNA, 18 nt, Human herpesvirus 8 (Kaposi`s sarcoma-associated h
uggccgaacgccuaguua

SEQ ID NO: 352806 - RNA, 18 nt, Human herpesvirus 8 (Kaposi`s sarcoma-associated h
uggccgcgcccaggggca

SEQ ID NO: 352807 - RNA, 15 nt, Human herpesvirus 8 (Kaposi`s sarcoma-associated h
uggccggguuuacuc

SEQ ID NO: 352808 - RNA, 20 nt, Human herpesvirus 8 (Kaposi`s sarcoma-associated h
uggccuccagcaaagcacau

SEQ ID NO: 352809 - RNA, 20 nt, Human herpesvirus 8 (Kaposi`s sarcoma-associated h
uggccucgaaggcacgguga

SEQ ID NO: 352810 - RNA, 19 nt, Human herpesvirus 8 (Kaposi`s sarcoma-associated h
uggccugugcccaaaucug

SEQ ID NO: 352811 - RNA, 17 nt, Human herpesvirus 8 (Kaposi`s sarcoma-associated h
uggccuuuuuaagacaa

SEQ ID NO: 352812 - RNA, 14 nt, Human herpesvirus 8 (Kaposi`s sarcoma-associated h
uggcgccaugggug

SEQ ID NO: 352813 - RNA, 16 nt, Human herpesvirus 8 (Kaposi`s sarcoma-associated h
uggcguuuaccugcac

SEQ ID NO: 352814 - RNA, 16 nt, Human herpesvirus 8 (Kaposi`s sarcoma-associated h
uggcuaucuugcugca

SEQ ID NO: 352815 - RNA, 19 nt, Human herpesvirus 8 (Kaposi`s sarcoma-associated h
uggcugccuggacaguauu

SEQ ID NO: 352816 - RNA, 12 nt, Human herpesvirus 8 (Kaposi`s sarcoma-associated h
uggcuguuacaa

SEQ ID NO: 352817 - RNA, 15 nt, Human herpesvirus 8 (Kaposi`s sarcoma-associated h
uggcuguuacaauaa

SEQ ID NO: 352818 - RNA, 21 nt, Human herpesvirus 8 (Kaposi`s sarcoma-associated h
uggcuguuacaauaaagccga

SEQ ID NO: 352819 - RNA, 21 nt, Human herpesvirus 8 (Kaposi`s sarcoma-associated h
uggcuguuacaauaaagcuga

SEQ ID NO: 352820 - RNA, 19 nt, Human herpesvirus 8 (Kaposi`s sarcoma-associated h
uggcuucuauaagcaccuu

SEQ ID NO: 352821 - RNA, 19 nt, Human herpesvirus 8 (Kaposi`s sarcoma-associated h
ugggaaacguguccugcca

SEQ ID NO: 352822 - RNA, 20 nt, Human herpesvirus 8 (Kaposi`s sarcoma-associated h
ugggaaacguguccugccag

SEQ ID NO: 352823 - RNA, 18 nt, Human herpesvirus 8 (Kaposi`s sarcoma-associated h
ugggaacuuucauccauu

SEQ ID NO: 352824 - RNA, 14 nt, Human herpesvirus 8 (Kaposi`s sarcoma-associated h
ugggaccuuucaac

SEQ ID NO: 352825 - RNA, 18 nt, Human herpesvirus 8 (Kaposi`s sarcoma-associated h
ugggacgugcgggccaau

SEQ ID NO: 352826 - RNA, 17 nt, Human herpesvirus 8 (Kaposi`s sarcoma-associated h
ugggacuugauaaucuc

SEQ ID NO: 352827 - RNA, 23 nt, Human herpesvirus 8 (Kaposi`s sarcoma-associated h
ugggagcggguugucuacaugaa

SEQ ID NO: 352828 - RNA, 20 nt, Human herpesvirus 8 (Kaposi`s sarcoma-associated h
ugggagcugucccaccagag

SEQ ID NO: 352829 - RNA, 23 nt, Human herpesvirus 8 (Kaposi`s sarcoma-associated h
ugggagggaguauaucauaucaa

SEQ ID NO: 352830 - RNA, 18 nt, Human herpesvirus 8 (Kaposi`s sarcoma-associated h
ugggagugugcacuagca

SEQ ID NO: 352831 - RNA, 21 nt, Human herpesvirus 8 (Kaposi`s sarcoma-associated h
ugggauucacucagcugccaa

SEQ ID NO: 352832 - RNA, 15 nt, Human herpesvirus 8 (Kaposi`s sarcoma-associated h
ugggcaaaauaccug

SEQ ID NO: 352833 - RNA, 16 nt, Human herpesvirus 8 (Kaposi`s sarcoma-associated h
ugggccacaaaacugc

SEQ ID NO: 352834 - RNA, 19 nt, Human herpesvirus 8 (Kaposi`s sarcoma-associated h
ugggccaugacaacugcca

SEQ ID NO: 352835 - RNA, 21 nt, Human herpesvirus 8 (Kaposi`s sarcoma-associated h
ugggcgucaccgcgguccauu

SEQ ID NO: 352836 - RNA, 21 nt, Human herpesvirus 8 (Kaposi`s sarcoma-associated h
ugggcgugguauauuggucca

SEQ ID NO: 352837 - RNA, 17 nt, Human herpesvirus 8 (Kaposi`s sarcoma-associated h
ugggcuuguacaugugu

SEQ ID NO: 352838 - RNA, 19 nt, Human herpesvirus 8 (Kaposi`s sarcoma-associated h
ugggcuuguacaugugucu

SEQ ID NO: 352839 - RNA, 20 nt, Human herpesvirus 8 (Kaposi`s sarcoma-associated h
uggggauugcgauugcucaa

SEQ ID NO: 352840 - RNA, 20 nt, Human herpesvirus 8 (Kaposi`s sarcoma-associated h
uggggcaugggcaccacgga

SEQ ID NO: 352841 - RNA, 14 nt, Human herpesvirus 8 (Kaposi`s sarcoma-associated h
ugggggucucggga

SEQ ID NO: 352842 - RNA, 22 nt, Human herpesvirus 8 (Kaposi`s sarcoma-associated h
ugggucuacuucgcuaacugua

SEQ ID NO: 352843 - RNA, 22 nt, Human herpesvirus 8 (Kaposi`s sarcoma-associated h
uggguuuauaaugccaauauau

SEQ ID NO: 352844 - RNA, 20 nt, Human herpesvirus 8 (Kaposi`s sarcoma-associated h
ugguccguagaauguaugua

SEQ ID NO: 352845 - RNA, 17 nt, Human herpesvirus 8 (Kaposi`s sarcoma-associated h
ugguccuggaugguucc

SEQ ID NO: 352846 - RNA, 14 nt, Human herpesvirus 8 (Kaposi`s sarcoma-associated h
uggucugcacccuu

SEQ ID NO: 352847 - RNA, 19 nt, Human herpesvirus 8 (Kaposi`s sarcoma-associated h
ugguguacaaaaaaaacau

SEQ ID NO: 352848 - RNA, 14 nt, Human herpesvirus 8 (Kaposi`s sarcoma-associated h
ugguguccagacag

SEQ ID NO: 352849 - RNA, 21 nt, Human herpesvirus 8 (Kaposi`s sarcoma-associated h
ugguguuguguuuaaggugcg

SEQ ID NO: 352850 - RNA, 22 nt, Human herpesvirus 8 (Kaposi`s sarcoma-associated h
ugguuaagcuuugcagccaggu

SEQ ID NO: 352851 - RNA, 20 nt, Human herpesvirus 8 (Kaposi`s sarcoma-associated h
ugguuauuggccaggacaau

SEQ ID NO: 352852 - RNA, 18 nt, Human herpesvirus 8 (Kaposi`s sarcoma-associated h
ugguuccacgaaugucag

SEQ ID NO: 352853 - RNA, 23 nt, Human herpesvirus 8 (Kaposi`s sarcoma-associated h
ugguuccguucuccuucuugaug

SEQ ID NO: 352854 - RNA, 18 nt, Human herpesvirus 8 (Kaposi`s sarcoma-associated h
uguaaaaauaaaugugaa

SEQ ID NO: 352855 - RNA, 15 nt, Human herpesvirus 8 (Kaposi`s sarcoma-associated h
uguaaacguguaacc

SEQ ID NO: 352856 - RNA, 17 nt, Human herpesvirus 8 (Kaposi`s sarcoma-associated h
uguaagcuguacauaau

SEQ ID NO: 352857 - RNA, 13 nt, Human herpesvirus 8 (Kaposi`s sarcoma-associated h
uguaaucuuguag

SEQ ID NO: 352858 - RNA, 12 nt, Human herpesvirus 8 (Kaposi`s sarcoma-associated h
uguaauggugug

SEQ ID NO: 352859 - RNA, 15 nt, Human herpesvirus 8 (Kaposi`s sarcoma-associated h
uguacaaaccaaauu

SEQ ID NO: 352860 - RNA, 19 nt, Human herpesvirus 8 (Kaposi`s sarcoma-associated h
uguacaugaaccagaauca

SEQ ID NO: 352861 - RNA, 15 nt, Human herpesvirus 8 (Kaposi`s sarcoma-associated h
uguacaugugucuau

SEQ ID NO: 352862 - RNA, 19 nt, Human herpesvirus 8 (Kaposi`s sarcoma-associated h
uguagacaguuaaucuuua

SEQ ID NO: 352863 - RNA, 15 nt, Human herpesvirus 8 (Kaposi`s sarcoma-associated h
uguagaucuggauac

SEQ ID NO: 352864 - RNA, 16 nt, Human herpesvirus 8 (Kaposi`s sarcoma-associated h
uguaggcguagagggu

SEQ ID NO: 352865 - RNA, 19 nt, Human herpesvirus 8 (Kaposi`s sarcoma-associated h
uguauaaccgugcuacuua

SEQ ID NO: 352866 - RNA, 19 nt, Human herpesvirus 8 (Kaposi`s sarcoma-associated h
uguauccuagaaugaagug

SEQ ID NO: 352867 - RNA, 21 nt, Human herpesvirus 8 (Kaposi`s sarcoma-associated h
uguauccucgcgaaaaugcac

SEQ ID NO: 352868 - RNA, 14 nt, Human herpesvirus 8 (Kaposi`s sarcoma-associated h
uguauuguacuaaa

SEQ ID NO: 352869 - RNA, 20 nt, Human herpesvirus 8 (Kaposi`s sarcoma-associated h
ugucagauuucucuaucuau

SEQ ID NO: 352870 - RNA, 14 nt, Human herpesvirus 8 (Kaposi`s sarcoma-associated h
ugucauugccaccc

SEQ ID NO: 352871 - RNA, 23 nt, Human herpesvirus 8 (Kaposi`s sarcoma-associated h
ugucauuuuuacuuuuacaagga

SEQ ID NO: 352872 - RNA, 17 nt, Human herpesvirus 8 (Kaposi`s sarcoma-associated h
uguccccucggagacaa

SEQ ID NO: 352873 - RNA, 14 nt, Human herpesvirus 8 (Kaposi`s sarcoma-associated h
ugucccucagccac

SEQ ID NO: 352874 - RNA, 13 nt, Human herpesvirus 8 (Kaposi`s sarcoma-associated h
uuaggggcgguga

SEQ ID NO: 352875 - RNA, 19 nt, Human herpesvirus 8 (Kaposi`s sarcoma-associated h
uuaguacgugguaagggaa

SEQ ID NO: 352876 - RNA, 11 nt, Human herpesvirus 8 (Kaposi`s sarcoma-associated h
uuauaacaaug

SEQ ID NO: 352877 - RNA, 19 nt, Human herpesvirus 8 (Kaposi`s sarcoma-associated h
uuaucagcucacuguucuc

SEQ ID NO: 352878 - RNA, 14 nt, Human herpesvirus 8 (Kaposi`s sarcoma-associated h
uuaucuuaacuaaa

SEQ ID NO: 352879 - RNA, 19 nt, Human herpesvirus 8 (Kaposi`s sarcoma-associated h
uuaugggugugugccagua

SEQ ID NO: 352880 - RNA, 18 nt, Human herpesvirus 8 (Kaposi`s sarcoma-associated h
uuauuaaaagcauugucu

SEQ ID NO: 352881 - RNA, 19 nt, Human herpesvirus 8 (Kaposi`s sarcoma-associated h
uuauucccaaacacaucag

SEQ ID NO: 352882 - RNA, 17 nt, Human herpesvirus 8 (Kaposi`s sarcoma-associated h
uuauuugaaagcaauaa

SEQ ID NO: 352883 - RNA, 21 nt, Human herpesvirus 8 (Kaposi`s sarcoma-associated h
uucaaaggcgggaucaucugc

SEQ ID NO: 352884 - RNA, 22 nt, Human herpesvirus 8 (Kaposi`s sarcoma-associated h
uucaagagccuaugcugggaca

SEQ ID NO: 352885 - RNA, 20 nt, Human herpesvirus 8 (Kaposi`s sarcoma-associated h
uucaaugguuuuugugguua

SEQ ID NO: 352886 - RNA, 21 nt, Human herpesvirus 8 (Kaposi`s sarcoma-associated h
uucacuauggggucagggugg

SEQ ID NO: 352887 - RNA, 11 nt, Human herpesvirus 8 (Kaposi`s sarcoma-associated h
uucacugcugg

SEQ ID NO: 352888 - RNA, 13 nt, Human herpesvirus 8 (Kaposi`s sarcoma-associated h
uucaucacuucca

SEQ ID NO: 352889 - RNA, 20 nt, Human herpesvirus 8 (Kaposi`s sarcoma-associated h
uucauuacugguaccagaga

SEQ ID NO: 352890 - RNA, 18 nt, Human herpesvirus 8 (Kaposi`s sarcoma-associated h
uuccauuuuccaaggccu

SEQ ID NO: 352891 - RNA, 17 nt, Human herpesvirus 8 (Kaposi`s sarcoma-associated h
uucccuacauugcuccg

SEQ ID NO: 352892 - RNA, 14 nt, Human herpesvirus 8 (Kaposi`s sarcoma-associated h
uuccguccaccagg

SEQ ID NO: 352893 - RNA, 23 nt, Human herpesvirus 8 (Kaposi`s sarcoma-associated h
uuccucuaaggcccccaccaaac

SEQ ID NO: 352894 - RNA, 10 nt, Human herpesvirus 8 (Kaposi`s sarcoma-associated h
uuccuguggg

SEQ ID NO: 352895 - RNA, 13 nt, Human herpesvirus 8 (Kaposi`s sarcoma-associated h
uuccugugggcua

SEQ ID NO: 352896 - RNA, 18 nt, Human herpesvirus 8 (Kaposi`s sarcoma-associated h
uucguaagaggacccagg

SEQ ID NO: 352897 - RNA, 17 nt, Human herpesvirus 8 (Kaposi`s sarcoma-associated h
uucuaaucuggcaugua

SEQ ID NO: 352898 - RNA, 18 nt, Human herpesvirus 8 (Kaposi`s sarcoma-associated h
uucuaaucuggcauguau

SEQ ID NO: 352899 - RNA, 20 nt, Human herpesvirus 8 (Kaposi`s sarcoma-associated h
uucuagagcccgcugcuauu

SEQ ID NO: 352900 - RNA, 20 nt, Human herpesvirus 8 (Kaposi`s sarcoma-associated h
uucuagcauaugcugccaag

SEQ ID NO: 352901 - RNA, 22 nt, Human herpesvirus 8 (Kaposi`s sarcoma-associated h
uucuaggagacgcgcaaagggg

SEQ ID NO: 352902 - RNA, 17 nt, Human herpesvirus 8 (Kaposi`s sarcoma-associated h
uucuccguugacaggga

SEQ ID NO: 352903 - RNA, 14 nt, Human herpesvirus 8 (Kaposi`s sarcoma-associated h
uucucuauaacaua

SEQ ID NO: 352904 - RNA, 20 nt, Human herpesvirus 8 (Kaposi`s sarcoma-associated h
uucucuauaacauaauugua

SEQ ID NO: 352905 - RNA, 18 nt, Human herpesvirus 8 (Kaposi`s sarcoma-associated h
uucugcugcaucacgcca

SEQ ID NO: 352906 - RNA, 21 nt, Human herpesvirus 8 (Kaposi`s sarcoma-associated h
uucuggcuuggcgcuuagccu

SEQ ID NO: 352907 - RNA, 15 nt, Human herpesvirus 8 (Kaposi`s sarcoma-associated h
uucuuagauaguguu

SEQ ID NO: 352908 - RNA, 13 nt, Human herpesvirus 8 (Kaposi`s sarcoma-associated h
uugaacagggcau

SEQ ID NO: 352909 - RNA, 13 nt, Human herpesvirus 8 (Kaposi`s sarcoma-associated h
uugaaugugauca

SEQ ID NO: 352910 - RNA, 18 nt, Human herpesvirus 8 (Kaposi`s sarcoma-associated h
uugacaucucgguacugc

SEQ ID NO: 352911 - RNA, 15 nt, Human herpesvirus 8 (Kaposi`s sarcoma-associated h
uugagcgcugugcuu

SEQ ID NO: 352912 - RNA, 13 nt, Human herpesvirus 8 (Kaposi`s sarcoma-associated h
uugauaccaaacu

SEQ ID NO: 352913 - RNA, 21 nt, Human herpesvirus 8 (Kaposi`s sarcoma-associated h
uugaugccuuggaagauaugu

SEQ ID NO: 352914 - RNA, 20 nt, Human herpesvirus 8 (Kaposi`s sarcoma-associated h
uugaugcgcggcacauugug

SEQ ID NO: 352915 - RNA, 13 nt, Human herpesvirus 8 (Kaposi`s sarcoma-associated h
uugauugugacua

SEQ ID NO: 352916 - RNA, 14 nt, Human herpesvirus 8 (Kaposi`s sarcoma-associated h
uugcacacagacac

SEQ ID NO: 352917 - RNA, 14 nt, Human herpesvirus 8 (Kaposi`s sarcoma-associated h
uugcaccaagcaca

SEQ ID NO: 352918 - RNA, 22 nt, Human herpesvirus 8 (Kaposi`s sarcoma-associated h
uugcacgccaacccucagugug

SEQ ID NO: 352919 - RNA, 18 nt, Human herpesvirus 8 (Kaposi`s sarcoma-associated h
uugccaaaccccauggca

SEQ ID NO: 352920 - RNA, 15 nt, Human herpesvirus 8 (Kaposi`s sarcoma-associated h
uugccagcugcgcau

SEQ ID NO: 352921 - RNA, 19 nt, Human herpesvirus 8 (Kaposi`s sarcoma-associated h
uugccauggagaauaucca

SEQ ID NO: 352922 - RNA, 21 nt, Human herpesvirus 8 (Kaposi`s sarcoma-associated h
uugcgugcaaaaugugcuuug

SEQ ID NO: 352923 - RNA, 17 nt, Human herpesvirus 8 (Kaposi`s sarcoma-associated h
uugcuggaggccaacuu

SEQ ID NO: 352924 - RNA, 13 nt, Human herpesvirus 8 (Kaposi`s sarcoma-associated h
uuggacacuccuc

SEQ ID NO: 352925 - RNA, 20 nt, Human herpesvirus 8 (Kaposi`s sarcoma-associated h
uuggacuagagcgacugcug

SEQ ID NO: 352926 - RNA, 23 nt, Human herpesvirus 8 (Kaposi`s sarcoma-associated h
uuggcagaaccgaugguuuccua

SEQ ID NO: 352927 - RNA, 19 nt, Human herpesvirus 8 (Kaposi`s sarcoma-associated h
uuggcccacguggugcugc

SEQ ID NO: 352928 - RNA, 15 nt, Human herpesvirus 8 (Kaposi`s sarcoma-associated h
uuggcgcuuugcucu

SEQ ID NO: 352929 - RNA, 16 nt, Human herpesvirus 8 (Kaposi`s sarcoma-associated h
uuggcguuuaccugca

SEQ ID NO: 352930 - RNA, 16 nt, Human herpesvirus 8 (Kaposi`s sarcoma-associated h
uuggcuguuacaauaa

SEQ ID NO: 352931 - RNA, 19 nt, Human herpesvirus 8 (Kaposi`s sarcoma-associated h
uuggguugggaggugaccc

SEQ ID NO: 352932 - RNA, 16 nt, Human herpesvirus 8 (Kaposi`s sarcoma-associated h
uugguaacucccucaa

SEQ ID NO: 352933 - RNA, 14 nt, Human herpesvirus 8 (Kaposi`s sarcoma-associated h
uugguauaugacua

SEQ ID NO: 352934 - RNA, 20 nt, Human herpesvirus 8 (Kaposi`s sarcoma-associated h
uugguauaugacuacuguga

SEQ ID NO: 352935 - RNA, 19 nt, Human herpesvirus 8 (Kaposi`s sarcoma-associated h
uuggucugcacccuuucau

SEQ ID NO: 352936 - RNA, 22 nt, Human herpesvirus 8 (Kaposi`s sarcoma-associated h
uuggugaagcagacgaugcuuu

SEQ ID NO: 352937 - RNA, 21 nt, Human herpesvirus 8 (Kaposi`s sarcoma-associated h
uugguuuguacacagauguga

SEQ ID NO: 352938 - RNA, 16 nt, Human herpesvirus 8 (Kaposi`s sarcoma-associated h
uuguacaugugucuau

SEQ ID NO: 352939 - RNA, 22 nt, Human herpesvirus 8 (Kaposi`s sarcoma-associated h
uugucacaaauuuuaacagcca

SEQ ID NO: 352940 - RNA, 17 nt, Human herpesvirus 8 (Kaposi`s sarcoma-associated h
uugucccucagccacaa

SEQ ID NO: 352941 - RNA, 18 nt, Human herpesvirus 8 (Kaposi`s sarcoma-associated h
uugucggauuuugauaug

SEQ ID NO: 352942 - RNA, 19 nt, Human herpesvirus 8 (Kaposi`s sarcoma-associated h
uugucggauuuugauaugu

SEQ ID NO: 352943 - RNA, 14 nt, Human herpesvirus 8 (Kaposi`s sarcoma-associated h
uugucuuaaguaca

SEQ ID NO: 352944 - RNA, 17 nt, Human herpesvirus 8 (Kaposi`s sarcoma-associated h
uugucuuaaguacauua

SEQ ID NO: 352945 - RNA, 10 nt, Human herpesvirus 8 (Kaposi`s sarcoma-associated h
uugugaucuc

SEQ ID NO: 352946 - RNA, 19 nt, Human herpesvirus 8 (Kaposi`s sarcoma-associated h
uugugcucgacggagacac

SEQ ID NO: 352947 - RNA, 14 nt, Human herpesvirus 8 (Kaposi`s sarcoma-associated h
uuguggcaccugag

SEQ ID NO: 352948 - RNA, 21 nt, Human herpesvirus 8 (Kaposi`s sarcoma-associated h
uuguggucucucuugcugguc

SEQ ID NO: 352949 - RNA, 11 nt, Human herpesvirus 8 (Kaposi`s sarcoma-associated h
uuguuacuugc

SEQ ID NO: 352950 - RNA, 13 nt, Human herpesvirus 8 (Kaposi`s sarcoma-associated h
uuguuagauggca

SEQ ID NO: 352951 - RNA, 19 nt, Human herpesvirus 8 (Kaposi`s sarcoma-associated h
uuuaaaaccgcccacugau

SEQ ID NO: 352952 - RNA, 20 nt, Human herpesvirus 8 (Kaposi`s sarcoma-associated h
uuuaagauuaagauuauaau

SEQ ID NO: 352953 - RNA, 19 nt, Human herpesvirus 8 (Kaposi`s sarcoma-associated h
aaaaacacucccucacaau

SEQ ID NO: 352954 - RNA, 21 nt, Human herpesvirus 8 (Kaposi`s sarcoma-associated h
aaaaaccccgcgccaccuucc

SEQ ID NO: 352955 - RNA, 15 nt, Human herpesvirus 8 (Kaposi`s sarcoma-associated h
aaaaacguauaugcc

SEQ ID NO: 352956 - RNA, 14 nt, Human herpesvirus 8 (Kaposi`s sarcoma-associated h
aaaaaggaccuuac

SEQ ID NO: 352957 - RNA, 20 nt, Human herpesvirus 8 (Kaposi`s sarcoma-associated h
aaaaaguuuccguccaccag

SEQ ID NO: 352958 - RNA, 14 nt, Human herpesvirus 8 (Kaposi`s sarcoma-associated h
aaaaauaaauguga

SEQ ID NO: 352959 - RNA, 17 nt, Human herpesvirus 8 (Kaposi`s sarcoma-associated h
aaaaauaaugcagacag

SEQ ID NO: 352960 - RNA, 18 nt, Human herpesvirus 8 (Kaposi`s sarcoma-associated h
aaaaccauacuguuugcu

SEQ ID NO: 352961 - RNA, 17 nt, Human herpesvirus 8 (Kaposi`s sarcoma-associated h
aaaaccgcccacugauu

SEQ ID NO: 352962 - RNA, 18 nt, Human herpesvirus 8 (Kaposi`s sarcoma-associated h
aaaaccuuaauuggauau

SEQ ID NO: 352963 - RNA, 13 nt, Human herpesvirus 8 (Kaposi`s sarcoma-associated h
aaaacgaagucuc

SEQ ID NO: 352964 - RNA, 14 nt, Human herpesvirus 8 (Kaposi`s sarcoma-associated h
aaaacguuuuuccc

SEQ ID NO: 352965 - RNA, 17 nt, Human herpesvirus 8 (Kaposi`s sarcoma-associated h
aaaacuaaucaguguua

SEQ ID NO: 352966 - RNA, 20 nt, Human herpesvirus 8 (Kaposi`s sarcoma-associated h
aaaacuaccgucuaccugcc

SEQ ID NO: 352967 - RNA, 17 nt, Human herpesvirus 8 (Kaposi`s sarcoma-associated h
aaaagagacacuaucuc

SEQ ID NO: 352968 - RNA, 13 nt, Human herpesvirus 8 (Kaposi`s sarcoma-associated h
aaaagcauugucu

SEQ ID NO: 352969 - RNA, 15 nt, Human herpesvirus 8 (Kaposi`s sarcoma-associated h
aaaaggacauuguau

SEQ ID NO: 352970 - RNA, 17 nt, Human herpesvirus 8 (Kaposi`s sarcoma-associated h
aaaauacaaaaacacaa

SEQ ID NO: 352971 - RNA, 19 nt, Human herpesvirus 8 (Kaposi`s sarcoma-associated h
aaaauaccugucgcuucca

SEQ ID NO: 352972 - RNA, 23 nt, Human herpesvirus 8 (Kaposi`s sarcoma-associated h
aaaaugggccaugacaacugcca

SEQ ID NO: 352973 - RNA, 20 nt, Human herpesvirus 8 (Kaposi`s sarcoma-associated h
aaacacaaucacgguugcac

SEQ ID NO: 352974 - RNA, 20 nt, Human herpesvirus 8 (Kaposi`s sarcoma-associated h
aaacacucccucacaaugua

SEQ ID NO: 352975 - RNA, 13 nt, Human herpesvirus 8 (Kaposi`s sarcoma-associated h
aaacacuguggau

SEQ ID NO: 352976 - RNA, 17 nt, Human herpesvirus 8 (Kaposi`s sarcoma-associated h
aaacauuguuuauuuca

SEQ ID NO: 352977 - RNA, 20 nt, Human herpesvirus 8 (Kaposi`s sarcoma-associated h
aaaccaguaaagaguaccac

SEQ ID NO: 352978 - RNA, 20 nt, Human herpesvirus 8 (Kaposi`s sarcoma-associated h
aaaccauacuguuugcuuaa

SEQ ID NO: 352979 - RNA, 16 nt, Human herpesvirus 8 (Kaposi`s sarcoma-associated h
aaacccggauuugccc

SEQ ID NO: 352980 - RNA, 23 nt, Human herpesvirus 8 (Kaposi`s sarcoma-associated h
aaaccggaguagugcaagugcac

SEQ ID NO: 352981 - RNA, 16 nt, Human herpesvirus 8 (Kaposi`s sarcoma-associated h
aaacgccacaggcggc

SEQ ID NO: 352982 - RNA, 15 nt, Human herpesvirus 8 (Kaposi`s sarcoma-associated h
aaacggccaaagcaa

SEQ ID NO: 352983 - RNA, 23 nt, Human herpesvirus 8 (Kaposi`s sarcoma-associated h
aaacguggcugaugcucuggcca

SEQ ID NO: 352984 - RNA, 15 nt, Human herpesvirus 8 (Kaposi`s sarcoma-associated h
aaacuaccagccauc

SEQ ID NO: 352985 - RNA, 17 nt, Human herpesvirus 8 (Kaposi`s sarcoma-associated h
aaacucccccaaccucu

SEQ ID NO: 352986 - RNA, 17 nt, Human herpesvirus 8 (Kaposi`s sarcoma-associated h
aaacuggccgcauuugg

SEQ ID NO: 352987 - RNA, 22 nt, Human herpesvirus 8 (Kaposi`s sarcoma-associated h
aaacuuuuccauugcacucaga

SEQ ID NO: 352988 - RNA, 20 nt, Human herpesvirus 8 (Kaposi`s sarcoma-associated h
aaagaugguaucacaauaaa

SEQ ID NO: 352989 - RNA, 15 nt, Human herpesvirus 8 (Kaposi`s sarcoma-associated h
aaagcggauugagug

SEQ ID NO: 352990 - RNA, 24 nt, Human herpesvirus 8 (Kaposi`s sarcoma-associated h
aaagcuaugguuuuucaauaaagu

SEQ ID NO: 352991 - RNA, 20 nt, Human herpesvirus 8 (Kaposi`s sarcoma-associated h
aaagcuggguauaaaggagg

SEQ ID NO: 352992 - RNA, 12 nt, Human herpesvirus 8 (Kaposi`s sarcoma-associated h
aaagcugucacu

SEQ ID NO: 352993 - RNA, 13 nt, Human herpesvirus 8 (Kaposi`s sarcoma-associated h
aaagcugucacua

SEQ ID NO: 352994 - RNA, 16 nt, Human herpesvirus 8 (Kaposi`s sarcoma-associated h
aaagcugucacuaaua

SEQ ID NO: 352995 - RNA, 16 nt, Human herpesvirus 8 (Kaposi`s sarcoma-associated h
aaaggccgcuuguauu

SEQ ID NO: 352996 - RNA, 17 nt, Human herpesvirus 8 (Kaposi`s sarcoma-associated h
aaaggggacgugucauu

SEQ ID NO: 352997 - RNA, 14 nt, Human herpesvirus 8 (Kaposi`s sarcoma-associated h
aaauaaaacggugu

SEQ ID NO: 352998 - RNA, 16 nt, Human herpesvirus 8 (Kaposi`s sarcoma-associated h
aaauaaagucugagug

SEQ ID NO: 352999 - RNA, 16 nt, Human herpesvirus 8 (Kaposi`s sarcoma-associated h
aaauacaaaaacacaa

SEQ ID NO: 353000 - RNA, 21 nt, Human herpesvirus 8 (Kaposi`s sarcoma-associated h
aaauacguacagaaaaccaua

SEQ ID NO: 353001 - RNA, 16 nt, Human herpesvirus 8 (Kaposi`s sarcoma-associated h
aaauagcucauuuucu

SEQ ID NO: 353002 - RNA, 18 nt, Human herpesvirus 8 (Kaposi`s sarcoma-associated h
aaauaugucgcaggccga

SEQ ID NO: 353003 - RNA, 16 nt, Human herpesvirus 8 (Kaposi`s sarcoma-associated h
aaauccgagcaccuca

SEQ ID NO: 353004 - RNA, 12 nt, Human herpesvirus 8 (Kaposi`s sarcoma-associated h
aaaugaucaugu

SEQ ID NO: 353005 - RNA, 13 nt, Human herpesvirus 8 (Kaposi`s sarcoma-associated h
aaaugggaacaau

SEQ ID NO: 353006 - RNA, 21 nt, Human herpesvirus 8 (Kaposi`s sarcoma-associated h
aaaugggccaugacaacugcc

SEQ ID NO: 353007 - RNA, 18 nt, Human herpesvirus 8 (Kaposi`s sarcoma-associated h
aaauugccaccucuguca

SEQ ID NO: 353008 - RNA, 14 nt, Human herpesvirus 8 (Kaposi`s sarcoma-associated h
aaauuggccacugc

SEQ ID NO: 353009 - RNA, 23 nt, Human herpesvirus 8 (Kaposi`s sarcoma-associated h
aaauuguguguaccuagcccugu

SEQ ID NO: 353010 - RNA, 20 nt, Human herpesvirus 8 (Kaposi`s sarcoma-associated h
aaauuucuguuuccagugac

SEQ ID NO: 353011 - RNA, 20 nt, Human herpesvirus 8 (Kaposi`s sarcoma-associated h
aacaaacaagacacacccgc

SEQ ID NO: 353012 - RNA, 17 nt, Human herpesvirus 8 (Kaposi`s sarcoma-associated h
aacaaacaaggucaaua

SEQ ID NO: 353013 - RNA, 13 nt, Human herpesvirus 8 (Kaposi`s sarcoma-associated h
aacaaagcacugg

SEQ ID NO: 353014 - RNA, 21 nt, Human herpesvirus 8 (Kaposi`s sarcoma-associated h
aacaaguagcuguugacuuuc

SEQ ID NO: 353015 - RNA, 22 nt, Human herpesvirus 8 (Kaposi`s sarcoma-associated h
aacaaguagcuguugacuuuca

SEQ ID NO: 353016 - RNA, 17 nt, Human herpesvirus 8 (Kaposi`s sarcoma-associated h
aacacccagcuagcagu

SEQ ID NO: 353017 - RNA, 18 nt, Human herpesvirus 8 (Kaposi`s sarcoma-associated h
aacacguaccugaccuga

SEQ ID NO: 353018 - RNA, 17 nt, Human herpesvirus 8 (Kaposi`s sarcoma-associated h
agaauagaccagccuga

SEQ ID NO: 353019 - RNA, 11 nt, Human herpesvirus 8 (Kaposi`s sarcoma-associated h
aggggugacac

SEQ ID NO: 353020 - RNA, 16 nt, Human herpesvirus 8 (Kaposi`s sarcoma-associated h
agggucugcagaugau

SEQ ID NO: 353021 - RNA, 16 nt, Human herpesvirus 8 (Kaposi`s sarcoma-associated h
agggugcacauuuuca

SEQ ID NO: 353022 - RNA, 15 nt, Human herpesvirus 8 (Kaposi`s sarcoma-associated h
aggguggacagugcc

SEQ ID NO: 353023 - RNA, 14 nt, Human herpesvirus 8 (Kaposi`s sarcoma-associated h
aggguugcauguua

SEQ ID NO: 353024 - RNA, 21 nt, Human herpesvirus 8 (Kaposi`s sarcoma-associated h
agguaauuaacauccacagga

SEQ ID NO: 353025 - RNA, 17 nt, Human herpesvirus 8 (Kaposi`s sarcoma-associated h
agguagauugacuggaa

SEQ ID NO: 353026 - RNA, 15 nt, Human herpesvirus 8 (Kaposi`s sarcoma-associated h
agguauguuuuuacc

SEQ ID NO: 353027 - RNA, 17 nt, Human herpesvirus 8 (Kaposi`s sarcoma-associated h
aggucaauacauuguga

SEQ ID NO: 353028 - RNA, 15 nt, Human herpesvirus 8 (Kaposi`s sarcoma-associated h
aggucaccuggccca

SEQ ID NO: 353029 - RNA, 21 nt, Human herpesvirus 8 (Kaposi`s sarcoma-associated h
aggugccgacgucgucgcaaa

SEQ ID NO: 353030 - RNA, 18 nt, Human herpesvirus 8 (Kaposi`s sarcoma-associated h
aggugguaauaaagucau

SEQ ID NO: 353031 - RNA, 18 nt, Human herpesvirus 8 (Kaposi`s sarcoma-associated h
aggugucugcgggacaau

SEQ ID NO: 353032 - RNA, 18 nt, Human herpesvirus 8 (Kaposi`s sarcoma-associated h
agguuguaacacaaaagc

SEQ ID NO: 353033 - RNA, 19 nt, Human herpesvirus 8 (Kaposi`s sarcoma-associated h
agguuguaacacaaaagca

SEQ ID NO: 353034 - RNA, 20 nt, Human herpesvirus 8 (Kaposi`s sarcoma-associated h
aguaacgagguuacugccag

SEQ ID NO: 353035 - RNA, 21 nt, Human herpesvirus 8 (Kaposi`s sarcoma-associated h
aguaagucguccgacaugugc

SEQ ID NO: 353036 - RNA, 23 nt, Human herpesvirus 8 (Kaposi`s sarcoma-associated h
aguagacgcaggcgccuaugacu

SEQ ID NO: 353037 - RNA, 16 nt, Human herpesvirus 8 (Kaposi`s sarcoma-associated h
aguauagugguuuaca

SEQ ID NO: 353038 - RNA, 17 nt, Human herpesvirus 8 (Kaposi`s sarcoma-associated h
aguauagugguuuacau

SEQ ID NO: 353039 - RNA, 16 nt, Human herpesvirus 8 (Kaposi`s sarcoma-associated h
aguauauuaguguuau

SEQ ID NO: 353040 - RNA, 15 nt, Human herpesvirus 8 (Kaposi`s sarcoma-associated h
aguauuaugccaggg

SEQ ID NO: 353041 - RNA, 19 nt, Human herpesvirus 8 (Kaposi`s sarcoma-associated h
agucacaucuguguacaaa

SEQ ID NO: 353042 - RNA, 18 nt, Human herpesvirus 8 (Kaposi`s sarcoma-associated h
agucaggggguggacgac

SEQ ID NO: 353043 - RNA, 14 nt, Human herpesvirus 8 (Kaposi`s sarcoma-associated h
agucagugccacaa

SEQ ID NO: 353044 - RNA, 19 nt, Human herpesvirus 8 (Kaposi`s sarcoma-associated h
aguccaaauaaaccagaca

SEQ ID NO: 353045 - RNA, 18 nt, Human herpesvirus 8 (Kaposi`s sarcoma-associated h
aguccauggcaguggaca

SEQ ID NO: 353046 - RNA, 21 nt, Human herpesvirus 8 (Kaposi`s sarcoma-associated h
agucccagcaauaaacccaca

SEQ ID NO: 353047 - RNA, 12 nt, Human herpesvirus 8 (Kaposi`s sarcoma-associated h
agucgccaguuu

SEQ ID NO: 353048 - RNA, 15 nt, Human herpesvirus 8 (Kaposi`s sarcoma-associated h
agucuacgugccagu

SEQ ID NO: 353049 - RNA, 16 nt, Human herpesvirus 8 (Kaposi`s sarcoma-associated h
agucuacgugccagug

SEQ ID NO: 353050 - RNA, 12 nt, Human herpesvirus 8 (Kaposi`s sarcoma-associated h
agugaccugcug

SEQ ID NO: 353051 - RNA, 16 nt, Human herpesvirus 8 (Kaposi`s sarcoma-associated h
agugagcgcgcucugu

SEQ ID NO: 353052 - RNA, 21 nt, Human herpesvirus 8 (Kaposi`s sarcoma-associated h
agugccucagcaacugcguca

SEQ ID NO: 353053 - RNA, 21 nt, Human herpesvirus 8 (Kaposi`s sarcoma-associated h
aguggaccgcgagacaucaga

SEQ ID NO: 353054 - RNA, 18 nt, Human herpesvirus 8 (Kaposi`s sarcoma-associated h
aguggacuuucuccguga

SEQ ID NO: 353055 - RNA, 13 nt, Human herpesvirus 8 (Kaposi`s sarcoma-associated h
aguggaguggugu

SEQ ID NO: 353056 - RNA, 15 nt, Human herpesvirus 8 (Kaposi`s sarcoma-associated h
aguggugaucuuagg

SEQ ID NO: 353057 - RNA, 23 nt, Human herpesvirus 8 (Kaposi`s sarcoma-associated h
agugguuauuuuuuuccuaggcg

SEQ ID NO: 353058 - RNA, 12 nt, Human herpesvirus 8 (Kaposi`s sarcoma-associated h
agugguuuacau

SEQ ID NO: 353059 - RNA, 14 nt, Human herpesvirus 8 (Kaposi`s sarcoma-associated h
aguguacacagcca

SEQ ID NO: 353060 - RNA, 17 nt, Human herpesvirus 8 (Kaposi`s sarcoma-associated h
aguguacacagccaaug

SEQ ID NO: 353061 - RNA, 19 nt, Human herpesvirus 8 (Kaposi`s sarcoma-associated h
aguguccagccacaucagc

SEQ ID NO: 353062 - RNA, 14 nt, Human herpesvirus 8 (Kaposi`s sarcoma-associated h
agugucgccagugc

SEQ ID NO: 353063 - RNA, 20 nt, Human herpesvirus 8 (Kaposi`s sarcoma-associated h
aguguggacuuuuaccaguu

SEQ ID NO: 353064 - RNA, 15 nt, Human herpesvirus 8 (Kaposi`s sarcoma-associated h
aguguguagugcauc

SEQ ID NO: 353065 - RNA, 17 nt, Human herpesvirus 8 (Kaposi`s sarcoma-associated h
aguguugguuacacuaa

SEQ ID NO: 353066 - RNA, 16 nt, Human herpesvirus 8 (Kaposi`s sarcoma-associated h
aguuaaagcugucacu

SEQ ID NO: 353067 - RNA, 19 nt, Human herpesvirus 8 (Kaposi`s sarcoma-associated h
aguuaaucuuuauugucua

SEQ ID NO: 353068 - RNA, 13 nt, Human herpesvirus 8 (Kaposi`s sarcoma-associated h
aguuaccauucau

SEQ ID NO: 353069 - RNA, 14 nt, Human herpesvirus 8 (Kaposi`s sarcoma-associated h
aguucagagugugu

SEQ ID NO: 353070 - RNA, 13 nt, Human herpesvirus 8 (Kaposi`s sarcoma-associated h
aguugacggguuu

SEQ ID NO: 353071 - RNA, 18 nt, Human herpesvirus 8 (Kaposi`s sarcoma-associated h
aguuuaaaagacucuaga

SEQ ID NO: 353072 - RNA, 17 nt, Human herpesvirus 8 (Kaposi`s sarcoma-associated h
aguuuccguccaccagg

SEQ ID NO: 353073 - RNA, 20 nt, Human herpesvirus 8 (Kaposi`s sarcoma-associated h
aguuugagaagcaucuuuag

SEQ ID NO: 353074 - RNA, 15 nt, Human herpesvirus 8 (Kaposi`s sarcoma-associated h
auaaaacgguguucu

SEQ ID NO: 353075 - RNA, 19 nt, Human herpesvirus 8 (Kaposi`s sarcoma-associated h
auaaaagaauggugucaau

SEQ ID NO: 353076 - RNA, 13 nt, Human herpesvirus 8 (Kaposi`s sarcoma-associated h
auaaaccagacac

SEQ ID NO: 353077 - RNA, 17 nt, Human herpesvirus 8 (Kaposi`s sarcoma-associated h
auaaagccgagccacaa

SEQ ID NO: 353078 - RNA, 18 nt, Human herpesvirus 8 (Kaposi`s sarcoma-associated h
auaaagccgagccacaaa

SEQ ID NO: 353079 - RNA, 18 nt, Human herpesvirus 8 (Kaposi`s sarcoma-associated h
auaaagcugagccacaaa

SEQ ID NO: 353080 - RNA, 15 nt, Human herpesvirus 8 (Kaposi`s sarcoma-associated h
auaaagucugagugg

SEQ ID NO: 353081 - RNA, 23 nt, Human herpesvirus 8 (Kaposi`s sarcoma-associated h
auaacaagguuaggaucuugccc

SEQ ID NO: 353082 - RNA, 14 nt, Human herpesvirus 8 (Kaposi`s sarcoma-associated h
auaacacagucaca

SEQ ID NO: 353083 - RNA, 17 nt, Human herpesvirus 8 (Kaposi`s sarcoma-associated h
auaacacagucacaguu

SEQ ID NO: 353084 - RNA, 12 nt, Human herpesvirus 8 (Kaposi`s sarcoma-associated h
auaacagugcuc

SEQ ID NO: 353085 - RNA, 16 nt, Human herpesvirus 8 (Kaposi`s sarcoma-associated h
auaacaugcaacccuc

SEQ ID NO: 353086 - RNA, 21 nt, Human herpesvirus 8 (Kaposi`s sarcoma-associated h
auaaccgagcucugcugccug

SEQ ID NO: 353087 - RNA, 17 nt, Human herpesvirus 8 (Kaposi`s sarcoma-associated h
auaaccgugcuacuuac

SEQ ID NO: 353088 - RNA, 18 nt, Human herpesvirus 8 (Kaposi`s sarcoma-associated h
auaacuuuauuacaggua

SEQ ID NO: 353089 - RNA, 18 nt, Human herpesvirus 8 (Kaposi`s sarcoma-associated h
auaagaaauuuuauguca

SEQ ID NO: 353090 - RNA, 17 nt, Human herpesvirus 8 (Kaposi`s sarcoma-associated h
auaagaaccaaaggaca

SEQ ID NO: 353091 - RNA, 22 nt, Human herpesvirus 8 (Kaposi`s sarcoma-associated h
auaagaaccaaaggacauggua

SEQ ID NO: 353092 - RNA, 20 nt, Human herpesvirus 8 (Kaposi`s sarcoma-associated h
auaagccaauugacugugga

SEQ ID NO: 353093 - RNA, 12 nt, Human herpesvirus 8 (Kaposi`s sarcoma-associated h
auaaugaaugug

SEQ ID NO: 353094 - RNA, 13 nt, Human herpesvirus 8 (Kaposi`s sarcoma-associated h
auaaugaaugugu

SEQ ID NO: 353095 - RNA, 22 nt, Human herpesvirus 8 (Kaposi`s sarcoma-associated h
auaaugccaauauaucagcuaa

SEQ ID NO: 353096 - RNA, 19 nt, Human herpesvirus 8 (Kaposi`s sarcoma-associated h
auaauggucuguauugaca

SEQ ID NO: 353097 - RNA, 18 nt, Human herpesvirus 8 (Kaposi`s sarcoma-associated h
acggcuagcguacucucg

SEQ ID NO: 353098 - RNA, 16 nt, Human herpesvirus 8 (Kaposi`s sarcoma-associated h
acgggaaauccucuau

SEQ ID NO: 353099 - RNA, 21 nt, Human herpesvirus 8 (Kaposi`s sarcoma-associated h
aagucguguaagaacauugga

SEQ ID NO: 353100 - RNA, 13 nt, Human herpesvirus 8 (Kaposi`s sarcoma-associated h
aagucuucuuguc

SEQ ID NO: 353101 - RNA, 13 nt, Human herpesvirus 8 (Kaposi`s sarcoma-associated h
ccaaaacacgcac

SEQ ID NO: 353102 - RNA, 19 nt, Human herpesvirus 8 (Kaposi`s sarcoma-associated h
ccaaacacaucaguguccu

SEQ ID NO: 353103 - RNA, 18 nt, Human herpesvirus 8 (Kaposi`s sarcoma-associated h
ccaaacaggcgcagauuu

SEQ ID NO: 353104 - RNA, 14 nt, Human herpesvirus 8 (Kaposi`s sarcoma-associated h
ccaaagagugucag

SEQ ID NO: 353105 - RNA, 18 nt, Human herpesvirus 8 (Kaposi`s sarcoma-associated h
ccaaaggacaugguacaa

SEQ ID NO: 353106 - RNA, 22 nt, Human herpesvirus 8 (Kaposi`s sarcoma-associated h
ccaaaggacaugguacaagcaa

SEQ ID NO: 353107 - RNA, 19 nt, Human herpesvirus 8 (Kaposi`s sarcoma-associated h
ccaacuucaucacaucccc

SEQ ID NO: 353108 - RNA, 19 nt, Human herpesvirus 8 (Kaposi`s sarcoma-associated h
ccaagaucuuccagucucc

SEQ ID NO: 353109 - RNA, 15 nt, Human herpesvirus 8 (Kaposi`s sarcoma-associated h
ccaagcuacuggccu

SEQ ID NO: 353110 - RNA, 18 nt, Human herpesvirus 8 (Kaposi`s sarcoma-associated h
ccaaggagugggaucucc

SEQ ID NO: 353111 - RNA, 17 nt, Human herpesvirus 8 (Kaposi`s sarcoma-associated h
ccaauaaugcaaugcuu

SEQ ID NO: 353112 - RNA, 19 nt, Human herpesvirus 8 (Kaposi`s sarcoma-associated h
ccaauacuauuauaacauu

SEQ ID NO: 353113 - RNA, 11 nt, Human herpesvirus 8 (Kaposi`s sarcoma-associated h
ccaaugccaug

SEQ ID NO: 353114 - RNA, 15 nt, Human herpesvirus 8 (Kaposi`s sarcoma-associated h
ccacaaaacugccaa

SEQ ID NO: 353115 - RNA, 13 nt, Human herpesvirus 8 (Kaposi`s sarcoma-associated h
ccacaaauaauga

SEQ ID NO: 353116 - RNA, 12 nt, Human herpesvirus 8 (Kaposi`s sarcoma-associated h
ccacacagauuc

SEQ ID NO: 353117 - RNA, 19 nt, Human herpesvirus 8 (Kaposi`s sarcoma-associated h
ccacacauuugucuuuauu

SEQ ID NO: 353118 - RNA, 19 nt, Human herpesvirus 8 (Kaposi`s sarcoma-associated h
ccacagcccauaguaugua

SEQ ID NO: 353119 - RNA, 17 nt, Human herpesvirus 8 (Kaposi`s sarcoma-associated h
ccacauacagacugcag

SEQ ID NO: 353120 - RNA, 22 nt, Human herpesvirus 8 (Kaposi`s sarcoma-associated h
ccacaucagcuuggcgaccuca

SEQ ID NO: 353121 - RNA, 14 nt, Human herpesvirus 8 (Kaposi`s sarcoma-associated h
ccacccaccuacuu

SEQ ID NO: 353122 - RNA, 18 nt, Human herpesvirus 8 (Kaposi`s sarcoma-associated h
ccaccguguggcugcaaa

SEQ ID NO: 353123 - RNA, 14 nt, Human herpesvirus 8 (Kaposi`s sarcoma-associated h
ccaccuccccuaaa

SEQ ID NO: 353124 - RNA, 17 nt, Human herpesvirus 8 (Kaposi`s sarcoma-associated h
ccacgaaauacauuaac

SEQ ID NO: 353125 - RNA, 21 nt, Human herpesvirus 8 (Kaposi`s sarcoma-associated h
ccacguugggagugugcacua

SEQ ID NO: 353126 - RNA, 15 nt, Human herpesvirus 8 (Kaposi`s sarcoma-associated h
ccacuaaaaccggag

SEQ ID NO: 353127 - RNA, 16 nt, Human herpesvirus 8 (Kaposi`s sarcoma-associated h
ccacuauuaugccgaa

SEQ ID NO: 353128 - RNA, 21 nt, Human herpesvirus 8 (Kaposi`s sarcoma-associated h
ccacucuauauggcaacugcc

SEQ ID NO: 353129 - RNA, 22 nt, Human herpesvirus 8 (Kaposi`s sarcoma-associated h
ccacugggguccgauugcuuca

SEQ ID NO: 353130 - RNA, 15 nt, Human herpesvirus 8 (Kaposi`s sarcoma-associated h
ccacuugggugcaca

SEQ ID NO: 353131 - RNA, 17 nt, Human herpesvirus 8 (Kaposi`s sarcoma-associated h
ccacuuuuuguuugaug

SEQ ID NO: 353132 - RNA, 14 nt, Human herpesvirus 8 (Kaposi`s sarcoma-associated h
ccagaagagcauuu

SEQ ID NO: 353133 - RNA, 21 nt, Human herpesvirus 8 (Kaposi`s sarcoma-associated h
ccagaaugaaggacauaccua

SEQ ID NO: 353134 - RNA, 23 nt, Human herpesvirus 8 (Kaposi`s sarcoma-associated h
ccagacaccaaagacaaguacca

SEQ ID NO: 353135 - RNA, 15 nt, Human herpesvirus 8 (Kaposi`s sarcoma-associated h
ccagacugguccaag

SEQ ID NO: 353136 - RNA, 16 nt, Human herpesvirus 8 (Kaposi`s sarcoma-associated h
ccagagaauaaagcca

SEQ ID NO: 353137 - RNA, 18 nt, Human herpesvirus 8 (Kaposi`s sarcoma-associated h
ccagauccuccacagagc

SEQ ID NO: 353138 - RNA, 14 nt, Human herpesvirus 8 (Kaposi`s sarcoma-associated h
ccagcaaagcacau

SEQ ID NO: 353139 - RNA, 14 nt, Human herpesvirus 8 (Kaposi`s sarcoma-associated h
ccagcaaccccucu

SEQ ID NO: 353140 - RNA, 18 nt, Human herpesvirus 8 (Kaposi`s sarcoma-associated h
ccagcaaccccucuggau

SEQ ID NO: 353141 - RNA, 16 nt, Human herpesvirus 8 (Kaposi`s sarcoma-associated h
ccagcaauaaacccac

SEQ ID NO: 353142 - RNA, 13 nt, Human herpesvirus 8 (Kaposi`s sarcoma-associated h
ccagcuaguugug

SEQ ID NO: 353143 - RNA, 21 nt, Human herpesvirus 8 (Kaposi`s sarcoma-associated h
ccagcuccuauugcaacugac

SEQ ID NO: 353144 - RNA, 18 nt, Human herpesvirus 8 (Kaposi`s sarcoma-associated h
ccaggacccguaccacaa

SEQ ID NO: 353145 - RNA, 23 nt, Human herpesvirus 8 (Kaposi`s sarcoma-associated h
ccaggcucuacagguaggccaca

SEQ ID NO: 353146 - RNA, 23 nt, Human herpesvirus 8 (Kaposi`s sarcoma-associated h
ccagggaagaugaaggacacggg

SEQ ID NO: 353147 - RNA, 21 nt, Human herpesvirus 8 (Kaposi`s sarcoma-associated h
ccagguggcacccaacaucca

SEQ ID NO: 353148 - RNA, 20 nt, Human herpesvirus 8 (Kaposi`s sarcoma-associated h
ccaguagcaugcugaugauc

SEQ ID NO: 353149 - RNA, 13 nt, Human herpesvirus 8 (Kaposi`s sarcoma-associated h
ccagugccucagc

SEQ ID NO: 353150 - RNA, 15 nt, Human herpesvirus 8 (Kaposi`s sarcoma-associated h
ccaguucagagugug

SEQ ID NO: 353151 - RNA, 18 nt, Human herpesvirus 8 (Kaposi`s sarcoma-associated h
ccauacuguuugcuuaau

SEQ ID NO: 353152 - RNA, 14 nt, Human herpesvirus 8 (Kaposi`s sarcoma-associated h
ccauagugugcguu

SEQ ID NO: 353153 - RNA, 21 nt, Human herpesvirus 8 (Kaposi`s sarcoma-associated h
ccauaugaggccaagugcauu

SEQ ID NO: 353154 - RNA, 20 nt, Human herpesvirus 8 (Kaposi`s sarcoma-associated h
ccaucaacgauacugaucac

SEQ ID NO: 353155 - RNA, 16 nt, Human herpesvirus 8 (Kaposi`s sarcoma-associated h
ccauccgcgagccauu

SEQ ID NO: 353156 - RNA, 17 nt, Human herpesvirus 8 (Kaposi`s sarcoma-associated h
ccaugccagacuuugug

SEQ ID NO: 353157 - RNA, 17 nt, Human herpesvirus 8 (Kaposi`s sarcoma-associated h
ccauggggaucuuugcg

SEQ ID NO: 353158 - RNA, 22 nt, Human herpesvirus 8 (Kaposi`s sarcoma-associated h
ccaugggugcuggugugugugg

SEQ ID NO: 353159 - RNA, 13 nt, Human herpesvirus 8 (Kaposi`s sarcoma-associated h
ccauuaacuuucc

SEQ ID NO: 353160 - RNA, 16 nt, Human herpesvirus 8 (Kaposi`s sarcoma-associated h
cccaaacuagcagaga

SEQ ID NO: 353161 - RNA, 19 nt, Human herpesvirus 8 (Kaposi`s sarcoma-associated h
cccaaagccguucccauga

SEQ ID NO: 353162 - RNA, 18 nt, Human herpesvirus 8 (Kaposi`s sarcoma-associated h
cccaacaagacaguugug

SEQ ID NO: 353163 - RNA, 22 nt, Human herpesvirus 8 (Kaposi`s sarcoma-associated h
cccaacaagacaguugugaucu

SEQ ID NO: 353164 - RNA, 20 nt, Human herpesvirus 8 (Kaposi`s sarcoma-associated h
cccaacauguaaauuggcca

SEQ ID NO: 353165 - RNA, 14 nt, Human herpesvirus 8 (Kaposi`s sarcoma-associated h
cccaaguauggaau

SEQ ID NO: 353166 - RNA, 16 nt, Human herpesvirus 8 (Kaposi`s sarcoma-associated h
cccaauagcgcuguca

SEQ ID NO: 353167 - RNA, 19 nt, Human herpesvirus 8 (Kaposi`s sarcoma-associated h
cccacccccuucugauucu

SEQ ID NO: 353168 - RNA, 23 nt, Human herpesvirus 8 (Kaposi`s sarcoma-associated h
cccacgaugggaacuuucaucca

SEQ ID NO: 353169 - RNA, 13 nt, Human herpesvirus 8 (Kaposi`s sarcoma-associated h
cccacguggugcu

SEQ ID NO: 353170 - RNA, 21 nt, Human herpesvirus 8 (Kaposi`s sarcoma-associated h
cccacugauuuuuuuacgcua

SEQ ID NO: 353171 - RNA, 19 nt, Human herpesvirus 8 (Kaposi`s sarcoma-associated h
cccagaagcgcaccacaga

SEQ ID NO: 353172 - RNA, 21 nt, Human herpesvirus 8 (Kaposi`s sarcoma-associated h
cccagaaugaaggacauaccu

SEQ ID NO: 353173 - RNA, 14 nt, Human herpesvirus 8 (Kaposi`s sarcoma-associated h
cccagcuagcagug

SEQ ID NO: 353174 - RNA, 16 nt, Human herpesvirus 8 (Kaposi`s sarcoma-associated h
cccagcuccuauugca

SEQ ID NO: 353175 - RNA, 21 nt, Human herpesvirus 8 (Kaposi`s sarcoma-associated h
cccagcuccuauugcaacuga

SEQ ID NO: 353176 - RNA, 13 nt, Human herpesvirus 8 (Kaposi`s sarcoma-associated h
cccagucggccca

SEQ ID NO: 353177 - RNA, 23 nt, Human herpesvirus 8 (Kaposi`s sarcoma-associated h
cccaguuaaccggcuuguacagu

SEQ ID NO: 353178 - RNA, 14 nt, Human herpesvirus 8 (Kaposi`s sarcoma-associated h
cccauagccaucca

SEQ ID NO: 353179 - RNA, 14 nt, Human herpesvirus 8 (Kaposi`s sarcoma-associated h
ccccacaggacaag

SEQ ID NO: 353180 - RNA, 17 nt, Human herpesvirus 8 (Kaposi`s sarcoma-associated h
cccccaucgucuuccca

SEQ ID NO: 353181 - RNA, 19 nt, Human herpesvirus 8 (Kaposi`s sarcoma-associated h
cccccucgucgacagagcc

SEQ ID NO: 353182 - RNA, 23 nt, Human herpesvirus 8 (Kaposi`s sarcoma-associated h
ccccguucuaaucuggcauguau

SEQ ID NO: 353183 - RNA, 19 nt, Human herpesvirus 8 (Kaposi`s sarcoma-associated h
ccccucuggaucuacagau

SEQ ID NO: 353184 - RNA, 12 nt, Human herpesvirus 8 (Kaposi`s sarcoma-associated h
ccccucuuggcu

SEQ ID NO: 353185 - RNA, 17 nt, Human herpesvirus 8 (Kaposi`s sarcoma-associated h
ccccucuuggcuguuac

SEQ ID NO: 353186 - RNA, 18 nt, Human herpesvirus 8 (Kaposi`s sarcoma-associated h
ccccucuuggcuguuaca

SEQ ID NO: 353187 - RNA, 19 nt, Human herpesvirus 8 (Kaposi`s sarcoma-associated h
ccccucuuggcuguuacaa

SEQ ID NO: 353188 - RNA, 17 nt, Human herpesvirus 8 (Kaposi`s sarcoma-associated h
cccgccuguguggaaga

SEQ ID NO: 353189 - RNA, 12 nt, Human herpesvirus 8 (Kaposi`s sarcoma-associated h
cccggaaacgga

SEQ ID NO: 353190 - RNA, 18 nt, Human herpesvirus 8 (Kaposi`s sarcoma-associated h
cccggauuccuccgcaca

SEQ ID NO: 353191 - RNA, 22 nt, Human herpesvirus 8 (Kaposi`s sarcoma-associated h
cccguaccacaagggccaagcu

SEQ ID NO: 353192 - RNA, 14 nt, Human herpesvirus 8 (Kaposi`s sarcoma-associated h
cccuagaagccacc

SEQ ID NO: 353193 - RNA, 14 nt, Human herpesvirus 8 (Kaposi`s sarcoma-associated h
cccuccguuuugca

SEQ ID NO: 353194 - RNA, 12 nt, Human herpesvirus 8 (Kaposi`s sarcoma-associated h
cccugaaacucc

SEQ ID NO: 353195 - RNA, 13 nt, Human herpesvirus 8 (Kaposi`s sarcoma-associated h
cccugccacucua

SEQ ID NO: 353196 - RNA, 18 nt, Human herpesvirus 8 (Kaposi`s sarcoma-associated h
cccuguacaugaaccaga

SEQ ID NO: 353197 - RNA, 24 nt, Human herpesvirus 8 (Kaposi`s sarcoma-associated h
cccuucaggccuccuugagugucu

SEQ ID NO: 353198 - RNA, 13 nt, Human herpesvirus 8 (Kaposi`s sarcoma-associated h
cccuucagucaaa

SEQ ID NO: 353199 - RNA, 19 nt, Human herpesvirus 8 (Kaposi`s sarcoma-associated h
ccgagccacaaaguacaua

SEQ ID NO: 353200 - RNA, 17 nt, Human herpesvirus 8 (Kaposi`s sarcoma-associated h
ccgcaaagauaagccaa

SEQ ID NO: 353201 - RNA, 22 nt, Human herpesvirus 8 (Kaposi`s sarcoma-associated h
ccgcaaucaugccuguggauuu

SEQ ID NO: 353202 - RNA, 15 nt, Human herpesvirus 8 (Kaposi`s sarcoma-associated h
ccgccaucaccaaca

SEQ ID NO: 353203 - RNA, 20 nt, Human herpesvirus 8 (Kaposi`s sarcoma-associated h
ccgccucugaagcaccacau

SEQ ID NO: 353204 - RNA, 14 nt, Human herpesvirus 8 (Kaposi`s sarcoma-associated h
ccgcgaguccugua

SEQ ID NO: 353205 - RNA, 22 nt, Human herpesvirus 8 (Kaposi`s sarcoma-associated h
ccggaguucagagcguagauga

SEQ ID NO: 353206 - RNA, 16 nt, Human herpesvirus 8 (Kaposi`s sarcoma-associated h
ccggcagcaauauuaa

SEQ ID NO: 353207 - RNA, 16 nt, Human herpesvirus 8 (Kaposi`s sarcoma-associated h
ccggcuuguacaguga

SEQ ID NO: 353208 - RNA, 15 nt, Human herpesvirus 8 (Kaposi`s sarcoma-associated h
ccggcuuguuuauaa

SEQ ID NO: 353209 - RNA, 12 nt, Human herpesvirus 8 (Kaposi`s sarcoma-associated h
ccggugccuguu

SEQ ID NO: 353210 - RNA, 17 nt, Human herpesvirus 8 (Kaposi`s sarcoma-associated h
ccgguguaugacccuga

SEQ ID NO: 353211 - RNA, 19 nt, Human herpesvirus 8 (Kaposi`s sarcoma-associated h
ccguaccggcaucugcaag

SEQ ID NO: 353212 - RNA, 19 nt, Human herpesvirus 8 (Kaposi`s sarcoma-associated h
ccgucaggggagugacaag

SEQ ID NO: 353213 - RNA, 17 nt, Human herpesvirus 8 (Kaposi`s sarcoma-associated h
ccgucugugaagucucc

SEQ ID NO: 353214 - RNA, 19 nt, Human herpesvirus 8 (Kaposi`s sarcoma-associated h
ccgugaaccgucgugcuua

SEQ ID NO: 353215 - RNA, 17 nt, Human herpesvirus 8 (Kaposi`s sarcoma-associated h
ccgugaaucgcaccuua

SEQ ID NO: 353216 - RNA, 13 nt, Human herpesvirus 8 (Kaposi`s sarcoma-associated h
ccgugagguugua

SEQ ID NO: 353217 - RNA, 18 nt, Human herpesvirus 8 (Kaposi`s sarcoma-associated h
ccgugaugggccacuuag

SEQ ID NO: 353218 - RNA, 21 nt, Human herpesvirus 8 (Kaposi`s sarcoma-associated h
ccgugcgccuagaugcgcugg

SEQ ID NO: 353219 - RNA, 15 nt, Human herpesvirus 8 (Kaposi`s sarcoma-associated h
ccguggacaccacau

SEQ ID NO: 353220 - RNA, 18 nt, Human herpesvirus 8 (Kaposi`s sarcoma-associated h
ccguggacaccacauuuc

SEQ ID NO: 353221 - RNA, 16 nt, Human herpesvirus 8 (Kaposi`s sarcoma-associated h
ccguguguggcugugg

SEQ ID NO: 353222 - RNA, 20 nt, Human herpesvirus 8 (Kaposi`s sarcoma-associated h
ccguugucgacuauaaccug

SEQ ID NO: 353223 - RNA, 15 nt, Human herpesvirus 8 (Kaposi`s sarcoma-associated h
ccuaauaaacuggcc

SEQ ID NO: 353224 - RNA, 15 nt, Human herpesvirus 8 (Kaposi`s sarcoma-associated h
ccuacauugcuccgc

SEQ ID NO: 353225 - RNA, 18 nt, Human herpesvirus 8 (Kaposi`s sarcoma-associated h
ccuacgaaaaucuggcau

SEQ ID NO: 353226 - RNA, 20 nt, Human herpesvirus 8 (Kaposi`s sarcoma-associated h
ccuacgcguuaagaagccac

SEQ ID NO: 353227 - RNA, 18 nt, Human herpesvirus 8 (Kaposi`s sarcoma-associated h
ccuacucguugcacacag

SEQ ID NO: 353228 - RNA, 14 nt, Human herpesvirus 8 (Kaposi`s sarcoma-associated h
ccuagcgggcacaa

SEQ ID NO: 353229 - RNA, 22 nt, Human herpesvirus 8 (Kaposi`s sarcoma-associated h
ccuaggcgguugggauucacuc

SEQ ID NO: 353230 - RNA, 13 nt, Human herpesvirus 8 (Kaposi`s sarcoma-associated h
ccuagucacucca

SEQ ID NO: 353231 - RNA, 23 nt, Human herpesvirus 8 (Kaposi`s sarcoma-associated h
ccucaaacaugggguuccagugc

SEQ ID NO: 353232 - RNA, 13 nt, Human herpesvirus 8 (Kaposi`s sarcoma-associated h
ccucaaauucuca

SEQ ID NO: 353233 - RNA, 23 nt, Human herpesvirus 8 (Kaposi`s sarcoma-associated h
ccucagugugcuguccagcgugg

SEQ ID NO: 353234 - RNA, 15 nt, Human herpesvirus 8 (Kaposi`s sarcoma-associated h
ccucauaauaaugau

SEQ ID NO: 353235 - RNA, 15 nt, Human herpesvirus 8 (Kaposi`s sarcoma-associated h
ccucccuuugucuua

SEQ ID NO: 353236 - RNA, 22 nt, Human herpesvirus 8 (Kaposi`s sarcoma-associated h
ccuccgcgagcgcgaaaccacu

SEQ ID NO: 353237 - RNA, 16 nt, Human herpesvirus 8 (Kaposi`s sarcoma-associated h
ccuccguuuugcacua

SEQ ID NO: 353238 - RNA, 21 nt, Human herpesvirus 8 (Kaposi`s sarcoma-associated h
ccuccuuagaccuacaucucc

SEQ ID NO: 353239 - RNA, 16 nt, Human herpesvirus 8 (Kaposi`s sarcoma-associated h
ccuccuugagugucua

SEQ ID NO: 353240 - RNA, 18 nt, Human herpesvirus 8 (Kaposi`s sarcoma-associated h
ccucgagcgugcugauuu

SEQ ID NO: 353241 - RNA, 23 nt, Human herpesvirus 8 (Kaposi`s sarcoma-associated h
ccucgcugccaccguuuggccca

SEQ ID NO: 353242 - RNA, 21 nt, Human herpesvirus 8 (Kaposi`s sarcoma-associated h
ccucgggccuugggugcgaug

SEQ ID NO: 353243 - RNA, 23 nt, Human herpesvirus 8 (Kaposi`s sarcoma-associated h
ccucgugcaaaagagacacuauc

SEQ ID NO: 353244 - RNA, 21 nt, Human herpesvirus 8 (Kaposi`s sarcoma-associated h
ccucuaaggcccccaccaaac

SEQ ID NO: 353245 - RNA, 19 nt, Human herpesvirus 8 (Kaposi`s sarcoma-associated h
ccucuccauagaacuggaa

SEQ ID NO: 353246 - RNA, 19 nt, Human herpesvirus 8 (Kaposi`s sarcoma-associated h
ccucuccgcauuaaagcac

SEQ ID NO: 353247 - RNA, 16 nt, Human herpesvirus 8 (Kaposi`s sarcoma-associated h
ccucugaagcaccaca

SEQ ID NO: 353248 - RNA, 17 nt, Human herpesvirus 8 (Kaposi`s sarcoma-associated h
ccucugaagcaccacau

SEQ ID NO: 353249 - RNA, 22 nt, Human herpesvirus 8 (Kaposi`s sarcoma-associated h
ccucugccuaaagagggauccc

SEQ ID NO: 353250 - RNA, 17 nt, Human herpesvirus 8 (Kaposi`s sarcoma-associated h
ccucuguuuucccacga

SEQ ID NO: 353251 - RNA, 16 nt, Human herpesvirus 8 (Kaposi`s sarcoma-associated h
ccucuugcgcuaugug

SEQ ID NO: 353252 - RNA, 16 nt, Human herpesvirus 8 (Kaposi`s sarcoma-associated h
ccucuuggcuguuaca

SEQ ID NO: 353253 - RNA, 18 nt, Human herpesvirus 8 (Kaposi`s sarcoma-associated h
ccucuuggcuguuacaau

SEQ ID NO: 353254 - RNA, 20 nt, Human herpesvirus 8 (Kaposi`s sarcoma-associated h
ccugaagucccgaugccacu

SEQ ID NO: 353255 - RNA, 16 nt, Human herpesvirus 8 (Kaposi`s sarcoma-associated h
ccugaccagacaagaa

SEQ ID NO: 353256 - RNA, 24 nt, Human herpesvirus 8 (Kaposi`s sarcoma-associated h
ccugacgacggucgccucgaccac

SEQ ID NO: 353257 - RNA, 21 nt, Human herpesvirus 8 (Kaposi`s sarcoma-associated h
caagcacaacauuaaacacau

SEQ ID NO: 353258 - RNA, 21 nt, Human herpesvirus 8 (Kaposi`s sarcoma-associated h
caagccucccgugauuggucu

SEQ ID NO: 353259 - RNA, 17 nt, Human herpesvirus 8 (Kaposi`s sarcoma-associated h
auacaaaaacacaauca

SEQ ID NO: 353260 - RNA, 22 nt, Human herpesvirus 8 (Kaposi`s sarcoma-associated h
auacaaaaacacaaucacgguu

SEQ ID NO: 353261 - RNA, 22 nt, Human herpesvirus 8 (Kaposi`s sarcoma-associated h
auacaagccggcaccauggcca

SEQ ID NO: 353262 - RNA, 21 nt, Human herpesvirus 8 (Kaposi`s sarcoma-associated h
auacacaaaugaaaugaguca

SEQ ID NO: 353263 - RNA, 12 nt, Human herpesvirus 8 (Kaposi`s sarcoma-associated h
auacacuacuua

SEQ ID NO: 353264 - RNA, 13 nt, Human herpesvirus 8 (Kaposi`s sarcoma-associated h
auacacuacuuau

SEQ ID NO: 353265 - RNA, 16 nt, Human herpesvirus 8 (Kaposi`s sarcoma-associated h
auacauaacacacaca

SEQ ID NO: 353266 - RNA, 12 nt, Human herpesvirus 8 (Kaposi`s sarcoma-associated h
auacccuguuuc

SEQ ID NO: 353267 - RNA, 13 nt, Human herpesvirus 8 (Kaposi`s sarcoma-associated h
auacccuguuuca

SEQ ID NO: 353268 - RNA, 21 nt, Human herpesvirus 8 (Kaposi`s sarcoma-associated h
auacgcuugccuuuugcuuaa

SEQ ID NO: 353269 - RNA, 19 nt, Human herpesvirus 8 (Kaposi`s sarcoma-associated h
auacguacagaaaaccaua

SEQ ID NO: 353270 - RNA, 20 nt, Human herpesvirus 8 (Kaposi`s sarcoma-associated h
auacugcccaaguauggaau

SEQ ID NO: 353271 - RNA, 12 nt, Human herpesvirus 8 (Kaposi`s sarcoma-associated h
auagaagagccu

SEQ ID NO: 353272 - RNA, 14 nt, Human herpesvirus 8 (Kaposi`s sarcoma-associated h
auagaagagccuga

SEQ ID NO: 353273 - RNA, 16 nt, Human herpesvirus 8 (Kaposi`s sarcoma-associated h
auagacuuaaaauguc

SEQ ID NO: 353274 - RNA, 22 nt, Human herpesvirus 8 (Kaposi`s sarcoma-associated h
auagccggggaaaaguggacgg

SEQ ID NO: 353275 - RNA, 19 nt, Human herpesvirus 8 (Kaposi`s sarcoma-associated h
auagcuacaaauguuuuau

SEQ ID NO: 353276 - RNA, 20 nt, Human herpesvirus 8 (Kaposi`s sarcoma-associated h
auaggauggcuagauuucgc

SEQ ID NO: 353277 - RNA, 13 nt, Human herpesvirus 8 (Kaposi`s sarcoma-associated h
auagggcuuugau

SEQ ID NO: 353278 - RNA, 19 nt, Human herpesvirus 8 (Kaposi`s sarcoma-associated h
auagggggaugagccagaa

SEQ ID NO: 353279 - RNA, 17 nt, Human herpesvirus 8 (Kaposi`s sarcoma-associated h
auagugacuguagacag

SEQ ID NO: 353280 - RNA, 18 nt, Human herpesvirus 8 (Kaposi`s sarcoma-associated h
auauaacagcaacauguu

SEQ ID NO: 353281 - RNA, 14 nt, Human herpesvirus 8 (Kaposi`s sarcoma-associated h
auauaagaaccaaa

SEQ ID NO: 353282 - RNA, 17 nt, Human herpesvirus 8 (Kaposi`s sarcoma-associated h
auauaaguuaaaccaaa

SEQ ID NO: 353283 - RNA, 24 nt, Human herpesvirus 8 (Kaposi`s sarcoma-associated h
auauccacggugucguguaugcca

SEQ ID NO: 353284 - RNA, 15 nt, Human herpesvirus 8 (Kaposi`s sarcoma-associated h
auaugacuacuguga

SEQ ID NO: 353285 - RNA, 13 nt, Human herpesvirus 8 (Kaposi`s sarcoma-associated h
auaugcaccucca

SEQ ID NO: 353286 - RNA, 15 nt, Human herpesvirus 8 (Kaposi`s sarcoma-associated h
auaugcugccaagau

SEQ ID NO: 353287 - RNA, 22 nt, Human herpesvirus 8 (Kaposi`s sarcoma-associated h
auaugggcuuguacaugugucu

SEQ ID NO: 353288 - RNA, 22 nt, Human herpesvirus 8 (Kaposi`s sarcoma-associated h
auauggggauugcgauugcuca

SEQ ID NO: 353289 - RNA, 16 nt, Human herpesvirus 8 (Kaposi`s sarcoma-associated h
auauguccuucacuuu

SEQ ID NO: 353290 - RNA, 15 nt, Human herpesvirus 8 (Kaposi`s sarcoma-associated h
auaugucugccccag

SEQ ID NO: 353291 - RNA, 19 nt, Human herpesvirus 8 (Kaposi`s sarcoma-associated h
auauucggagaacaugcug

SEQ ID NO: 353292 - RNA, 22 nt, Human herpesvirus 8 (Kaposi`s sarcoma-associated h
aucaacuaaggggcuuauguca

SEQ ID NO: 353293 - RNA, 14 nt, Human herpesvirus 8 (Kaposi`s sarcoma-associated h
aucaccucuacaga

SEQ ID NO: 353294 - RNA, 22 nt, Human herpesvirus 8 (Kaposi`s sarcoma-associated h
aucacgguugcaccaagcacaa

SEQ ID NO: 353295 - RNA, 14 nt, Human herpesvirus 8 (Kaposi`s sarcoma-associated h
aucacuuccaggau

SEQ ID NO: 353296 - RNA, 19 nt, Human herpesvirus 8 (Kaposi`s sarcoma-associated h
aucagaacaguggugcacu

SEQ ID NO: 353297 - RNA, 20 nt, Human herpesvirus 8 (Kaposi`s sarcoma-associated h
aucagcucacuguucuccac

SEQ ID NO: 353298 - RNA, 17 nt, Human herpesvirus 8 (Kaposi`s sarcoma-associated h
aucagcugcagccagga

SEQ ID NO: 353299 - RNA, 19 nt, Human herpesvirus 8 (Kaposi`s sarcoma-associated h
aucagcugcagccaggaag

SEQ ID NO: 353300 - RNA, 16 nt, Human herpesvirus 8 (Kaposi`s sarcoma-associated h
aucaggagggucaaug

SEQ ID NO: 353301 - RNA, 14 nt, Human herpesvirus 8 (Kaposi`s sarcoma-associated h
aucaggcuagugcu

SEQ ID NO: 353302 - RNA, 16 nt, Human herpesvirus 8 (Kaposi`s sarcoma-associated h
aucaggcuagugcugu

SEQ ID NO: 353303 - RNA, 17 nt, Human herpesvirus 8 (Kaposi`s sarcoma-associated h
aucaggcuagugcugua

SEQ ID NO: 353304 - RNA, 15 nt, Human herpesvirus 8 (Kaposi`s sarcoma-associated h
aucaugccuguggau

SEQ ID NO: 353305 - RNA, 20 nt, Human herpesvirus 8 (Kaposi`s sarcoma-associated h
aucauuaaagguuagcgcca

SEQ ID NO: 353306 - RNA, 18 nt, Human herpesvirus 8 (Kaposi`s sarcoma-associated h
aucauuucugaaacagaa

SEQ ID NO: 353307 - RNA, 16 nt, Human herpesvirus 8 (Kaposi`s sarcoma-associated h
auccaaauuaugcagu

SEQ ID NO: 353308 - RNA, 12 nt, Human herpesvirus 8 (Kaposi`s sarcoma-associated h
auccacaggaag

SEQ ID NO: 353309 - RNA, 22 nt, Human herpesvirus 8 (Kaposi`s sarcoma-associated h
auccaccacuuggcgucugccg

SEQ ID NO: 353310 - RNA, 19 nt, Human herpesvirus 8 (Kaposi`s sarcoma-associated h
auccacccuaauacauaac

SEQ ID NO: 353311 - RNA, 11 nt, Human herpesvirus 8 (Kaposi`s sarcoma-associated h
auccacucagg

SEQ ID NO: 353312 - RNA, 13 nt, Human herpesvirus 8 (Kaposi`s sarcoma-associated h
auccauuauagca

SEQ ID NO: 353313 - RNA, 18 nt, Human herpesvirus 8 (Kaposi`s sarcoma-associated h
aucccccacaggacaagc

SEQ ID NO: 353314 - RNA, 12 nt, Human herpesvirus 8 (Kaposi`s sarcoma-associated h
auccgagcaccu

SEQ ID NO: 353315 - RNA, 18 nt, Human herpesvirus 8 (Kaposi`s sarcoma-associated h
auccgcgagccauucauc

SEQ ID NO: 353316 - RNA, 19 nt, Human herpesvirus 8 (Kaposi`s sarcoma-associated h
auccuacacuuuacugugu

SEQ ID NO: 353317 - RNA, 20 nt, Human herpesvirus 8 (Kaposi`s sarcoma-associated h
auccuagaaugaagugcaac

SEQ ID NO: 353318 - RNA, 21 nt, Human herpesvirus 8 (Kaposi`s sarcoma-associated h
aucgacuaauacgugaccaug

SEQ ID NO: 353319 - RNA, 23 nt, Human herpesvirus 8 (Kaposi`s sarcoma-associated h
aucgagggcauacccguggcuca

SEQ ID NO: 353320 - RNA, 15 nt, Human herpesvirus 8 (Kaposi`s sarcoma-associated h
aucgaguccuugagg

SEQ ID NO: 353321 - RNA, 20 nt, Human herpesvirus 8 (Kaposi`s sarcoma-associated h
aucgcaccuuaaacacaaca

SEQ ID NO: 353322 - RNA, 21 nt, Human herpesvirus 8 (Kaposi`s sarcoma-associated h
aucgccuuaugaagcuuaaac

SEQ ID NO: 353323 - RNA, 20 nt, Human herpesvirus 8 (Kaposi`s sarcoma-associated h
aucgcucaaacucaucucuc

SEQ ID NO: 353324 - RNA, 14 nt, Human herpesvirus 8 (Kaposi`s sarcoma-associated h
aucguagcucauga

SEQ ID NO: 353325 - RNA, 23 nt, Human herpesvirus 8 (Kaposi`s sarcoma-associated h
aucgucuccagaucacccagugu

SEQ ID NO: 353326 - RNA, 21 nt, Human herpesvirus 8 (Kaposi`s sarcoma-associated h
aucuacccugauuagcacugu

SEQ ID NO: 353327 - RNA, 17 nt, Human herpesvirus 8 (Kaposi`s sarcoma-associated h
aucuauccaagugcaca

SEQ ID NO: 353328 - RNA, 20 nt, Human herpesvirus 8 (Kaposi`s sarcoma-associated h
aucuauccaagugcacacuc

SEQ ID NO: 353329 - RNA, 18 nt, Human herpesvirus 8 (Kaposi`s sarcoma-associated h
aucugcaaggguauucua

SEQ ID NO: 353330 - RNA, 20 nt, Human herpesvirus 8 (Kaposi`s sarcoma-associated h
aucugguccuaagagugugg

SEQ ID NO: 353331 - RNA, 12 nt, Human herpesvirus 8 (Kaposi`s sarcoma-associated h
aucuguccucau

SEQ ID NO: 353332 - RNA, 19 nt, Human herpesvirus 8 (Kaposi`s sarcoma-associated h
aucuguuaacccauggguc

SEQ ID NO: 353333 - RNA, 20 nt, Human herpesvirus 8 (Kaposi`s sarcoma-associated h
aucuguuacuggcaccuaag

SEQ ID NO: 353334 - RNA, 18 nt, Human herpesvirus 8 (Kaposi`s sarcoma-associated h
aucuuauuggugcguugu

SEQ ID NO: 353335 - RNA, 13 nt, Human herpesvirus 8 (Kaposi`s sarcoma-associated h
aucuucucauuca

SEQ ID NO: 353336 - RNA, 24 nt, Human herpesvirus 8 (Kaposi`s sarcoma-associated h
aucuugcugcauaaagucauggga

SEQ ID NO: 353337 - RNA, 21 nt, Human herpesvirus 8 (Kaposi`s sarcoma-associated h
auuaugaggccuaucugagga

SEQ ID NO: 353338 - RNA, 15 nt, Human herpesvirus 8 (Kaposi`s sarcoma-associated h
cacuauuaugccgaa

SEQ ID NO: 353339 - RNA, 14 nt, Human herpesvirus 8 (Kaposi`s sarcoma-associated h
cacuccuguuagca

SEQ ID NO: 353340 - RNA, 18 nt, Human herpesvirus 8 (Kaposi`s sarcoma-associated h
cacugcugguaucuggaa

SEQ ID NO: 353341 - RNA, 13 nt, Human herpesvirus 8 (Kaposi`s sarcoma-associated h
cacugucacuuuc

SEQ ID NO: 353342 - RNA, 13 nt, Human herpesvirus 8 (Kaposi`s sarcoma-associated h
cacugugugguug

SEQ ID NO: 353343 - RNA, 12 nt, Human herpesvirus 8 (Kaposi`s sarcoma-associated h
cagaaaaccaua

SEQ ID NO: 353344 - RNA, 20 nt, Human herpesvirus 8 (Kaposi`s sarcoma-associated h
cagaaacucccccaaccucu

SEQ ID NO: 353345 - RNA, 21 nt, Human herpesvirus 8 (Kaposi`s sarcoma-associated h
cagaaacucccccaaccucug

SEQ ID NO: 353346 - RNA, 15 nt, Human herpesvirus 8 (Kaposi`s sarcoma-associated h
cagaaagacacauga

SEQ ID NO: 353347 - RNA, 22 nt, Human herpesvirus 8 (Kaposi`s sarcoma-associated h
cagaaccgaugguuuccuagcc

SEQ ID NO: 353348 - RNA, 16 nt, Human herpesvirus 8 (Kaposi`s sarcoma-associated h
cagaagcgcaccacag

SEQ ID NO: 353349 - RNA, 14 nt, Human herpesvirus 8 (Kaposi`s sarcoma-associated h
cagacaccaaagac

SEQ ID NO: 353350 - RNA, 17 nt, Human herpesvirus 8 (Kaposi`s sarcoma-associated h
cagacaguuaccauuca

SEQ ID NO: 353351 - RNA, 20 nt, Human herpesvirus 8 (Kaposi`s sarcoma-associated h
cagacauggccggacaccac

SEQ ID NO: 353352 - RNA, 19 nt, Human herpesvirus 8 (Kaposi`s sarcoma-associated h
cagacccggcaacacugga

SEQ ID NO: 353353 - RNA, 20 nt, Human herpesvirus 8 (Kaposi`s sarcoma-associated h
cagacccggcaacacuggac

SEQ ID NO: 353354 - RNA, 18 nt, Human herpesvirus 8 (Kaposi`s sarcoma-associated h
cagacgacaaaacgcaca

SEQ ID NO: 353355 - RNA, 13 nt, Human herpesvirus 8 (Kaposi`s sarcoma-associated h
cagacgugcccag

SEQ ID NO: 353356 - RNA, 23 nt, Human herpesvirus 8 (Kaposi`s sarcoma-associated h
cagacgugcccagacaccaaaga

SEQ ID NO: 353357 - RNA, 15 nt, Human herpesvirus 8 (Kaposi`s sarcoma-associated h
cagacugguccaagc

SEQ ID NO: 353358 - RNA, 18 nt, Human herpesvirus 8 (Kaposi`s sarcoma-associated h
cagacuuuucccauuucu

SEQ ID NO: 353359 - RNA, 18 nt, Human herpesvirus 8 (Kaposi`s sarcoma-associated h
cagagaugggucuaugau

SEQ ID NO: 353360 - RNA, 13 nt, Human herpesvirus 8 (Kaposi`s sarcoma-associated h
cagagcagugcuc

SEQ ID NO: 353361 - RNA, 14 nt, Human herpesvirus 8 (Kaposi`s sarcoma-associated h
cagagcuguuaccc

SEQ ID NO: 353362 - RNA, 19 nt, Human herpesvirus 8 (Kaposi`s sarcoma-associated h
cagagcuguuacccugcuc

SEQ ID NO: 353363 - RNA, 14 nt, Human herpesvirus 8 (Kaposi`s sarcoma-associated h
cagagucacaaagg

SEQ ID NO: 353364 - RNA, 15 nt, Human herpesvirus 8 (Kaposi`s sarcoma-associated h
cagagucuacgugcc

SEQ ID NO: 353365 - RNA, 15 nt, Human herpesvirus 8 (Kaposi`s sarcoma-associated h
cagagucugaacccc

SEQ ID NO: 353366 - RNA, 14 nt, Human herpesvirus 8 (Kaposi`s sarcoma-associated h
cagagucugcucua

SEQ ID NO: 353367 - RNA, 15 nt, Human herpesvirus 8 (Kaposi`s sarcoma-associated h
cagaguuguggaccu

SEQ ID NO: 353368 - RNA, 23 nt, Human herpesvirus 8 (Kaposi`s sarcoma-associated h
cagauaggccucauaauaaugau

SEQ ID NO: 353369 - RNA, 18 nt, Human herpesvirus 8 (Kaposi`s sarcoma-associated h
cagauauaaacauggcac

SEQ ID NO: 353370 - RNA, 21 nt, Human herpesvirus 8 (Kaposi`s sarcoma-associated h
cagauggccggguuuacucug

SEQ ID NO: 353371 - RNA, 14 nt, Human herpesvirus 8 (Kaposi`s sarcoma-associated h
cagauguucuugcc

SEQ ID NO: 353372 - RNA, 16 nt, Human herpesvirus 8 (Kaposi`s sarcoma-associated h
cagauuagaacugaua

SEQ ID NO: 353373 - RNA, 20 nt, Human herpesvirus 8 (Kaposi`s sarcoma-associated h
cagcaaacggagaccuacac

SEQ ID NO: 353374 - RNA, 13 nt, Human herpesvirus 8 (Kaposi`s sarcoma-associated h
cagcaaagcacau

SEQ ID NO: 353375 - RNA, 16 nt, Human herpesvirus 8 (Kaposi`s sarcoma-associated h
cagcaacauguuuaca

SEQ ID NO: 353376 - RNA, 22 nt, Human herpesvirus 8 (Kaposi`s sarcoma-associated h
cagcaagcggcugaaguaguca

SEQ ID NO: 353377 - RNA, 15 nt, Human herpesvirus 8 (Kaposi`s sarcoma-associated h
cagcaauaaacccac

SEQ ID NO: 353378 - RNA, 16 nt, Human herpesvirus 8 (Kaposi`s sarcoma-associated h
cagcaauaaacccaca

SEQ ID NO: 353379 - RNA, 14 nt, Human herpesvirus 8 (Kaposi`s sarcoma-associated h
cagcaccuguuucc

SEQ ID NO: 353380 - RNA, 23 nt, Human herpesvirus 8 (Kaposi`s sarcoma-associated h
cagcauauacagguguccaagac

SEQ ID NO: 353381 - RNA, 21 nt, Human herpesvirus 8 (Kaposi`s sarcoma-associated h
cagcccgauggcccuucaggc

SEQ ID NO: 353382 - RNA, 15 nt, Human herpesvirus 8 (Kaposi`s sarcoma-associated h
cagccuaacaugugg

SEQ ID NO: 353383 - RNA, 17 nt, Human herpesvirus 8 (Kaposi`s sarcoma-associated h
cagccucuguacaugga

SEQ ID NO: 353384 - RNA, 14 nt, Human herpesvirus 8 (Kaposi`s sarcoma-associated h
cagccuuggugcua

SEQ ID NO: 353385 - RNA, 14 nt, Human herpesvirus 8 (Kaposi`s sarcoma-associated h
cagcguauacaccc

SEQ ID NO: 353386 - RNA, 20 nt, Human herpesvirus 8 (Kaposi`s sarcoma-associated h
cagcgucgccuuagcagagu

SEQ ID NO: 353387 - RNA, 18 nt, Human herpesvirus 8 (Kaposi`s sarcoma-associated h
cagcuaaaugaauaucau

SEQ ID NO: 353388 - RNA, 14 nt, Human herpesvirus 8 (Kaposi`s sarcoma-associated h
cagcuacgcacuga

SEQ ID NO: 353389 - RNA, 22 nt, Human herpesvirus 8 (Kaposi`s sarcoma-associated h
cagcuccuauugcaacugacca

SEQ ID NO: 353390 - RNA, 17 nt, Human herpesvirus 8 (Kaposi`s sarcoma-associated h
cagcuggacuggaguca

SEQ ID NO: 353391 - RNA, 19 nt, Human herpesvirus 8 (Kaposi`s sarcoma-associated h
caggacaaugaaaaguguu

SEQ ID NO: 353392 - RNA, 18 nt, Human herpesvirus 8 (Kaposi`s sarcoma-associated h
caggaguauaucagggga

SEQ ID NO: 353393 - RNA, 18 nt, Human herpesvirus 8 (Kaposi`s sarcoma-associated h
caggcaguuuauuuuuaa

SEQ ID NO: 353394 - RNA, 21 nt, Human herpesvirus 8 (Kaposi`s sarcoma-associated h
caggcccucuucuguugccag

SEQ ID NO: 353395 - RNA, 15 nt, Human herpesvirus 8 (Kaposi`s sarcoma-associated h
caggcgccuaugacu

SEQ ID NO: 353396 - RNA, 15 nt, Human herpesvirus 8 (Kaposi`s sarcoma-associated h
caggcuagugcugua

SEQ ID NO: 353397 - RNA, 13 nt, Human herpesvirus 8 (Kaposi`s sarcoma-associated h
cagggaaguuuca

SEQ ID NO: 353398 - RNA, 12 nt, Human herpesvirus 8 (Kaposi`s sarcoma-associated h
cagggcuaugau

SEQ ID NO: 353399 - RNA, 18 nt, Human herpesvirus 8 (Kaposi`s sarcoma-associated h
caggggaguaggguagga

SEQ ID NO: 353400 - RNA, 15 nt, Human herpesvirus 8 (Kaposi`s sarcoma-associated h
caggguagaugagca

SEQ ID NO: 353401 - RNA, 17 nt, Human herpesvirus 8 (Kaposi`s sarcoma-associated h
cagguaaaacggccaaa

SEQ ID NO: 353402 - RNA, 17 nt, Human herpesvirus 8 (Kaposi`s sarcoma-associated h
caggucugucacuagaa

SEQ ID NO: 353403 - RNA, 13 nt, Human herpesvirus 8 (Kaposi`s sarcoma-associated h
caguaaagaguac

SEQ ID NO: 353404 - RNA, 15 nt, Human herpesvirus 8 (Kaposi`s sarcoma-associated h
caguagaucagagua

SEQ ID NO: 353405 - RNA, 17 nt, Human herpesvirus 8 (Kaposi`s sarcoma-associated h
caguagcaugcugauga

SEQ ID NO: 353406 - RNA, 22 nt, Human herpesvirus 8 (Kaposi`s sarcoma-associated h
caguagcccgccgcaaggagca

SEQ ID NO: 353407 - RNA, 17 nt, Human herpesvirus 8 (Kaposi`s sarcoma-associated h
caguauagugguuuaca

SEQ ID NO: 353408 - RNA, 16 nt, Human herpesvirus 8 (Kaposi`s sarcoma-associated h
cagucacuaugucuuu

SEQ ID NO: 353409 - RNA, 22 nt, Human herpesvirus 8 (Kaposi`s sarcoma-associated h
cagucgaggcgaacuucuagca

SEQ ID NO: 353410 - RNA, 16 nt, Human herpesvirus 8 (Kaposi`s sarcoma-associated h
cagucgccaguuuuuc

SEQ ID NO: 353411 - RNA, 15 nt, Human herpesvirus 8 (Kaposi`s sarcoma-associated h
cagucuccagaguuu

SEQ ID NO: 353412 - RNA, 16 nt, Human herpesvirus 8 (Kaposi`s sarcoma-associated h
cagucuguaaagaaag

SEQ ID NO: 353413 - RNA, 14 nt, Human herpesvirus 8 (Kaposi`s sarcoma-associated h
cagugacccuaguc

SEQ ID NO: 353414 - RNA, 18 nt, Human herpesvirus 8 (Kaposi`s sarcoma-associated h
cagugaguggcuguagca

SEQ ID NO: 353415 - RNA, 14 nt, Human herpesvirus 8 (Kaposi`s sarcoma-associated h
cagugccucagcaa

SEQ ID NO: 353416 - RNA, 23 nt, Human herpesvirus 8 (Kaposi`s sarcoma-associated h
cagugcucuuccuccuagucaua

SEQ ID NO: 353417 - RNA, 15 nt, Human herpesvirus 8 (Kaposi`s sarcoma-associated h
caguggacacagucu

SEQ ID NO: 353418 - RNA, 17 nt, Human herpesvirus 8 (Kaposi`s sarcoma-associated h
caguguccagccacauc

SEQ ID NO: 353419 - RNA, 20 nt, Human herpesvirus 8 (Kaposi`s sarcoma-associated h
cagugugcgcgcagcuuucc

SEQ ID NO: 353420 - RNA, 18 nt, Human herpesvirus 8 (Kaposi`s sarcoma-associated h
caguuaucaacccuacuc

SEQ ID NO: 353421 - RNA, 19 nt, Human herpesvirus 8 (Kaposi`s sarcoma-associated h
caguuggagaaacagugga

SEQ ID NO: 353422 - RNA, 20 nt, Human herpesvirus 8 (Kaposi`s sarcoma-associated h
caguuggagaaacaguggaa

SEQ ID NO: 353423 - RNA, 22 nt, Human herpesvirus 8 (Kaposi`s sarcoma-associated h
caguugggcggggcuguuuuuc

SEQ ID NO: 353424 - RNA, 12 nt, Human herpesvirus 8 (Kaposi`s sarcoma-associated h
caguugugaucu

SEQ ID NO: 353425 - RNA, 23 nt, Human herpesvirus 8 (Kaposi`s sarcoma-associated h
caguuuaaaagacucuagauaaa

SEQ ID NO: 353426 - RNA, 15 nt, Human herpesvirus 8 (Kaposi`s sarcoma-associated h
caguuuggugcaaag

SEQ ID NO: 353427 - RNA, 20 nt, Human herpesvirus 8 (Kaposi`s sarcoma-associated h
cauaaaaccuccaaacacag

SEQ ID NO: 353428 - RNA, 21 nt, Human herpesvirus 8 (Kaposi`s sarcoma-associated h
cauaaaaccuccaaacacagg

SEQ ID NO: 353429 - RNA, 19 nt, Human herpesvirus 8 (Kaposi`s sarcoma-associated h
cauaaaaugggccaugaca

SEQ ID NO: 353430 - RNA, 18 nt, Human herpesvirus 8 (Kaposi`s sarcoma-associated h
cauaaagucaugggaccg

SEQ ID NO: 353431 - RNA, 16 nt, Human herpesvirus 8 (Kaposi`s sarcoma-associated h
cauaagcugcauacau

SEQ ID NO: 353432 - RNA, 15 nt, Human herpesvirus 8 (Kaposi`s sarcoma-associated h
cauaaggaacagauu

SEQ ID NO: 353433 - RNA, 16 nt, Human herpesvirus 8 (Kaposi`s sarcoma-associated h
cauaauaaaacaaaua

SEQ ID NO: 353434 - RNA, 23 nt, Human herpesvirus 8 (Kaposi`s sarcoma-associated h
cauaauaaugaugggcaauuaag

SEQ ID NO: 353435 - RNA, 18 nt, Human herpesvirus 8 (Kaposi`s sarcoma-associated h
cauacgucccucuuggcu

SEQ ID NO: 353436 - RNA, 21 nt, Human herpesvirus 8 (Kaposi`s sarcoma-associated h
cauacgucccucuuggcuguu

SEQ ID NO: 353437 - RNA, 22 nt, Human herpesvirus 8 (Kaposi`s sarcoma-associated h
cauacgucccucuuggcuguua

SEQ ID NO: 353438 - RNA, 17 nt, Human herpesvirus 8 (Kaposi`s sarcoma-associated h
cauacguuuugaacaau

SEQ ID NO: 353439 - RNA, 23 nt, Human herpesvirus 8 (Kaposi`s sarcoma-associated h
cauacugggaucccuucacagug

SEQ ID NO: 353440 - RNA, 18 nt, Human herpesvirus 8 (Kaposi`s sarcoma-associated h
cauagcagucgccaguuu

SEQ ID NO: 353441 - RNA, 18 nt, Human herpesvirus 8 (Kaposi`s sarcoma-associated h
cauauacagguaaaacgg

SEQ ID NO: 353442 - RNA, 18 nt, Human herpesvirus 8 (Kaposi`s sarcoma-associated h
cauauacagguguccaag

SEQ ID NO: 353443 - RNA, 18 nt, Human herpesvirus 8 (Kaposi`s sarcoma-associated h
cauaucguugacaugugg

SEQ ID NO: 353444 - RNA, 16 nt, Human herpesvirus 8 (Kaposi`s sarcoma-associated h
cauaugaggccaagug

SEQ ID NO: 353445 - RNA, 21 nt, Human herpesvirus 8 (Kaposi`s sarcoma-associated h
cauaugaggccaagugcauug

SEQ ID NO: 353446 - RNA, 13 nt, Human herpesvirus 8 (Kaposi`s sarcoma-associated h
cauauggacuguu

SEQ ID NO: 353447 - RNA, 20 nt, Human herpesvirus 8 (Kaposi`s sarcoma-associated h
cauauucuuucccgucaggg

SEQ ID NO: 353448 - RNA, 15 nt, Human herpesvirus 8 (Kaposi`s sarcoma-associated h
cauauugguauauga

SEQ ID NO: 353449 - RNA, 18 nt, Human herpesvirus 8 (Kaposi`s sarcoma-associated h
caucaaagacgccuuccu

SEQ ID NO: 353450 - RNA, 18 nt, Human herpesvirus 8 (Kaposi`s sarcoma-associated h
cauccccggauuccuccg

SEQ ID NO: 353451 - RNA, 19 nt, Human herpesvirus 8 (Kaposi`s sarcoma-associated h
cauccccggcguccucuca

SEQ ID NO: 353452 - RNA, 18 nt, Human herpesvirus 8 (Kaposi`s sarcoma-associated h
caucgcaggaugcauaag

SEQ ID NO: 353453 - RNA, 19 nt, Human herpesvirus 8 (Kaposi`s sarcoma-associated h
caucgcgaccgcugccaau

SEQ ID NO: 353454 - RNA, 22 nt, Human herpesvirus 8 (Kaposi`s sarcoma-associated h
caucgcgaccgcugccaauaua

SEQ ID NO: 353455 - RNA, 20 nt, Human herpesvirus 8 (Kaposi`s sarcoma-associated h
caucguagcucaugauuaca

SEQ ID NO: 353456 - RNA, 22 nt, Human herpesvirus 8 (Kaposi`s sarcoma-associated h
caucuacccugauuagcacugu

SEQ ID NO: 353457 - RNA, 23 nt, Human herpesvirus 8 (Kaposi`s sarcoma-associated h
caucuacccugauuagcacugua

SEQ ID NO: 353458 - RNA, 18 nt, Human herpesvirus 8 (Kaposi`s sarcoma-associated h
caucucucacacccugac

SEQ ID NO: 353459 - RNA, 20 nt, Human herpesvirus 8 (Kaposi`s sarcoma-associated h
caucugguccuaagagugug

SEQ ID NO: 353460 - RNA, 16 nt, Human herpesvirus 8 (Kaposi`s sarcoma-associated h
caucuuugggcuagug

SEQ ID NO: 353461 - RNA, 15 nt, Human herpesvirus 8 (Kaposi`s sarcoma-associated h
caucuuuuccaccua

SEQ ID NO: 353462 - RNA, 21 nt, Human herpesvirus 8 (Kaposi`s sarcoma-associated h
caugaaaggugguucuauauc

SEQ ID NO: 353463 - RNA, 15 nt, Human herpesvirus 8 (Kaposi`s sarcoma-associated h
caugaaccagaauca

SEQ ID NO: 353464 - RNA, 23 nt, Human herpesvirus 8 (Kaposi`s sarcoma-associated h
caugaaucggugacuuuuuguga

SEQ ID NO: 353465 - RNA, 19 nt, Human herpesvirus 8 (Kaposi`s sarcoma-associated h
caugacuacgcucaccauc

SEQ ID NO: 353466 - RNA, 19 nt, Human herpesvirus 8 (Kaposi`s sarcoma-associated h
caugaguuccacacagauu

SEQ ID NO: 353467 - RNA, 20 nt, Human herpesvirus 8 (Kaposi`s sarcoma-associated h
caugcaacccucuacucuuc

SEQ ID NO: 353468 - RNA, 21 nt, Human herpesvirus 8 (Kaposi`s sarcoma-associated h
caugccaucuuugggcuagug

SEQ ID NO: 353469 - RNA, 22 nt, Human herpesvirus 8 (Kaposi`s sarcoma-associated h
caugcuagggcgauaccgcgcc

SEQ ID NO: 353470 - RNA, 16 nt, Human herpesvirus 8 (Kaposi`s sarcoma-associated h
caugcucggcaacauu

SEQ ID NO: 353471 - RNA, 16 nt, Human herpesvirus 8 (Kaposi`s sarcoma-associated h
cauggcaaaaaacacu

SEQ ID NO: 353472 - RNA, 19 nt, Human herpesvirus 8 (Kaposi`s sarcoma-associated h
caugggaacgggaggcuag

SEQ ID NO: 353473 - RNA, 14 nt, Human herpesvirus 8 (Kaposi`s sarcoma-associated h
caugggcaccacgg

SEQ ID NO: 353474 - RNA, 18 nt, Human herpesvirus 8 (Kaposi`s sarcoma-associated h
caugggguuccagugcgc

SEQ ID NO: 353475 - RNA, 23 nt, Human herpesvirus 8 (Kaposi`s sarcoma-associated h
caugguaccauucgugugguuug

SEQ ID NO: 353476 - RNA, 19 nt, Human herpesvirus 8 (Kaposi`s sarcoma-associated h
cauggugacccacauagac

SEQ ID NO: 353477 - RNA, 18 nt, Human herpesvirus 8 (Kaposi`s sarcoma-associated h
caugugcguauuuagugg

SEQ ID NO: 353478 - RNA, 18 nt, Human herpesvirus 8 (Kaposi`s sarcoma-associated h
cauguuggguccacaagu

SEQ ID NO: 353479 - RNA, 17 nt, Human herpesvirus 8 (Kaposi`s sarcoma-associated h
cauuaaaaggacauugu

SEQ ID NO: 353480 - RNA, 21 nt, Human herpesvirus 8 (Kaposi`s sarcoma-associated h
cauuaaaaggacauuguauaa

SEQ ID NO: 353481 - RNA, 15 nt, Human herpesvirus 8 (Kaposi`s sarcoma-associated h
cauuaaacacauaca

SEQ ID NO: 353482 - RNA, 12 nt, Human herpesvirus 8 (Kaposi`s sarcoma-associated h
cauuaccaauac

SEQ ID NO: 353483 - RNA, 17 nt, Human herpesvirus 8 (Kaposi`s sarcoma-associated h
cauuaucuuaacuaaac

SEQ ID NO: 353484 - RNA, 16 nt, Human herpesvirus 8 (Kaposi`s sarcoma-associated h
cauuaugcaugcaaua

SEQ ID NO: 353485 - RNA, 14 nt, Human herpesvirus 8 (Kaposi`s sarcoma-associated h
cauugaugccuugg

SEQ ID NO: 353486 - RNA, 17 nt, Human herpesvirus 8 (Kaposi`s sarcoma-associated h
cauugcacucagaacau

SEQ ID NO: 353487 - RNA, 19 nt, Human herpesvirus 8 (Kaposi`s sarcoma-associated h
cauugcacucagaacauaa

SEQ ID NO: 353488 - RNA, 15 nt, Human herpesvirus 8 (Kaposi`s sarcoma-associated h
cauuggauuggauca

SEQ ID NO: 353489 - RNA, 18 nt, Human herpesvirus 8 (Kaposi`s sarcoma-associated h
cauuuaucgacccaacuc

SEQ ID NO: 353490 - RNA, 13 nt, Human herpesvirus 8 (Kaposi`s sarcoma-associated h
gauuucucuaucu

SEQ ID NO: 353491 - RNA, 14 nt, Human herpesvirus 8 (Kaposi`s sarcoma-associated h
gauuugauacaggg

SEQ ID NO: 353492 - RNA, 23 nt, Human herpesvirus 8 (Kaposi`s sarcoma-associated h
gauuuugauaugugugcccaauc

SEQ ID NO: 353493 - RNA, 13 nt, Human herpesvirus 8 (Kaposi`s sarcoma-associated h
gcaaaaaacacuc

SEQ ID NO: 353494 - RNA, 19 nt, Human herpesvirus 8 (Kaposi`s sarcoma-associated h
gcaaacuuuuccauugcac

SEQ ID NO: 353495 - RNA, 16 nt, Human herpesvirus 8 (Kaposi`s sarcoma-associated h
gcaaagauaagccaau

SEQ ID NO: 353496 - RNA, 23 nt, Human herpesvirus 8 (Kaposi`s sarcoma-associated h
gcaaagugucucacccaauacuu

SEQ ID NO: 353497 - RNA, 14 nt, Human herpesvirus 8 (Kaposi`s sarcoma-associated h
gcaacauguuuaca

SEQ ID NO: 353498 - RNA, 15 nt, Human herpesvirus 8 (Kaposi`s sarcoma-associated h
gcaacugcgucaugu

SEQ ID NO: 353499 - RNA, 17 nt, Human herpesvirus 8 (Kaposi`s sarcoma-associated h
gcaacuucuauguuucc

SEQ ID NO: 353500 - RNA, 13 nt, Human herpesvirus 8 (Kaposi`s sarcoma-associated h
gcaagcacagaaa

SEQ ID NO: 353501 - RNA, 11 nt, Human herpesvirus 8 (Kaposi`s sarcoma-associated h
gcaagugcacg

SEQ ID NO: 353502 - RNA, 17 nt, Human herpesvirus 8 (Kaposi`s sarcoma-associated h
gcaaugucagguuccac

SEQ ID NO: 353503 - RNA, 17 nt, Human herpesvirus 8 (Kaposi`s sarcoma-associated h
gcacaacauuaaacaca

SEQ ID NO: 353504 - RNA, 18 nt, Human herpesvirus 8 (Kaposi`s sarcoma-associated h
gcacaacauuaaacacau

SEQ ID NO: 353505 - RNA, 22 nt, Human herpesvirus 8 (Kaposi`s sarcoma-associated h
gcacaagcgcugacgaaagcua

SEQ ID NO: 353506 - RNA, 15 nt, Human herpesvirus 8 (Kaposi`s sarcoma-associated h
gcacacugugugguu

SEQ ID NO: 353507 - RNA, 17 nt, Human herpesvirus 8 (Kaposi`s sarcoma-associated h
gcacagacacgagcuag

SEQ ID NO: 353508 - RNA, 22 nt, Human herpesvirus 8 (Kaposi`s sarcoma-associated h
gcacagagucuacgugccagug

SEQ ID NO: 353509 - RNA, 15 nt, Human herpesvirus 8 (Kaposi`s sarcoma-associated h
gcacauaugucuccc

SEQ ID NO: 353510 - RNA, 23 nt, Human herpesvirus 8 (Kaposi`s sarcoma-associated h
gcaccacgcccgggggccaggac

SEQ ID NO: 353511 - RNA, 23 nt, Human herpesvirus 8 (Kaposi`s sarcoma-associated h
gcaccagcucagcgaugccgaca

SEQ ID NO: 353512 - RNA, 20 nt, Human herpesvirus 8 (Kaposi`s sarcoma-associated h
gcacccuauccaucagucag

SEQ ID NO: 353513 - RNA, 17 nt, Human herpesvirus 8 (Kaposi`s sarcoma-associated h
gcaccuguuuccugcaa

SEQ ID NO: 353514 - RNA, 18 nt, Human herpesvirus 8 (Kaposi`s sarcoma-associated h
gcaccuguuuccugcaac

SEQ ID NO: 353515 - RNA, 20 nt, Human herpesvirus 8 (Kaposi`s sarcoma-associated h
gcacuauaaauaucauugcc

SEQ ID NO: 353516 - RNA, 12 nt, Human herpesvirus 8 (Kaposi`s sarcoma-associated h
gcacucagaaca

SEQ ID NO: 353517 - RNA, 17 nt, Human herpesvirus 8 (Kaposi`s sarcoma-associated h
gcacuccuguuagcaca

SEQ ID NO: 353518 - RNA, 21 nt, Human herpesvirus 8 (Kaposi`s sarcoma-associated h
gcacuccuguuagcacauucu

SEQ ID NO: 353519 - RNA, 21 nt, Human herpesvirus 8 (Kaposi`s sarcoma-associated h
gcacuguuauaagaccaauca

SEQ ID NO: 353520 - RNA, 12 nt, Human herpesvirus 8 (Kaposi`s sarcoma-associated h
gcacuucuugac

SEQ ID NO: 353521 - RNA, 15 nt, Human herpesvirus 8 (Kaposi`s sarcoma-associated h
gcagaacaguaccca

SEQ ID NO: 353522 - RNA, 20 nt, Human herpesvirus 8 (Kaposi`s sarcoma-associated h
gcagacccggcaacacugga

SEQ ID NO: 353523 - RNA, 22 nt, Human herpesvirus 8 (Kaposi`s sarcoma-associated h
gcagacccggcaacacuggaca

SEQ ID NO: 353524 - RNA, 15 nt, Human herpesvirus 8 (Kaposi`s sarcoma-associated h
gcagacgaccccccg

SEQ ID NO: 353525 - RNA, 15 nt, Human herpesvirus 8 (Kaposi`s sarcoma-associated h
gcagaguguccagua

SEQ ID NO: 353526 - RNA, 23 nt, Human herpesvirus 8 (Kaposi`s sarcoma-associated h
gcagagugucucccguauuccau

SEQ ID NO: 353527 - RNA, 18 nt, Human herpesvirus 8 (Kaposi`s sarcoma-associated h
gcagauauaaacauggca

SEQ ID NO: 353528 - RNA, 23 nt, Human herpesvirus 8 (Kaposi`s sarcoma-associated h
gcagauauaaacauggcacucuu

SEQ ID NO: 353529 - RNA, 21 nt, Human herpesvirus 8 (Kaposi`s sarcoma-associated h
gcagcagcgugacacuacuaa

SEQ ID NO: 353530 - RNA, 14 nt, Human herpesvirus 8 (Kaposi`s sarcoma-associated h
gcagcagcugcuug

SEQ ID NO: 353531 - RNA, 22 nt, Human herpesvirus 8 (Kaposi`s sarcoma-associated h
gcagcaucaccccagauguucu

SEQ ID NO: 353532 - RNA, 14 nt, Human herpesvirus 8 (Kaposi`s sarcoma-associated h
gcagccucuacccu

SEQ ID NO: 353533 - RNA, 21 nt, Human herpesvirus 8 (Kaposi`s sarcoma-associated h
gcagcuuaccgcuacuguggg

SEQ ID NO: 353534 - RNA, 18 nt, Human herpesvirus 8 (Kaposi`s sarcoma-associated h
gcaggagucagagcagug

SEQ ID NO: 353535 - RNA, 13 nt, Human herpesvirus 8 (Kaposi`s sarcoma-associated h
gcaggcagccaag

SEQ ID NO: 353536 - RNA, 17 nt, Human herpesvirus 8 (Kaposi`s sarcoma-associated h
gcaggcuuauaccggcc

SEQ ID NO: 353537 - RNA, 19 nt, Human herpesvirus 8 (Kaposi`s sarcoma-associated h
gcagugcacgcaccaggau

SEQ ID NO: 353538 - RNA, 21 nt, Human herpesvirus 8 (Kaposi`s sarcoma-associated h
gcauaaccgagcucugcugcc

SEQ ID NO: 353539 - RNA, 17 nt, Human herpesvirus 8 (Kaposi`s sarcoma-associated h
gcauaauaaaacaaaua

SEQ ID NO: 353540 - RNA, 19 nt, Human herpesvirus 8 (Kaposi`s sarcoma-associated h
gcauauacagguguccaag

SEQ ID NO: 353541 - RNA, 18 nt, Human herpesvirus 8 (Kaposi`s sarcoma-associated h
gcauccuaucgcacagac

SEQ ID NO: 353542 - RNA, 18 nt, Human herpesvirus 8 (Kaposi`s sarcoma-associated h
gcaucuuuagagagcuag

SEQ ID NO: 353543 - RNA, 19 nt, Human herpesvirus 8 (Kaposi`s sarcoma-associated h
gcaugcucggcaacauuca

SEQ ID NO: 353544 - RNA, 20 nt, Human herpesvirus 8 (Kaposi`s sarcoma-associated h
gcaugcucggcaacauucaa

SEQ ID NO: 353545 - RNA, 12 nt, Human herpesvirus 8 (Kaposi`s sarcoma-associated h
gcaugguugcaa

SEQ ID NO: 353546 - RNA, 18 nt, Human herpesvirus 8 (Kaposi`s sarcoma-associated h
gcaugguugcaacagacg

SEQ ID NO: 353547 - RNA, 21 nt, Human herpesvirus 8 (Kaposi`s sarcoma-associated h
gcaugugguuaagcuuugcag

SEQ ID NO: 353548 - RNA, 15 nt, Human herpesvirus 8 (Kaposi`s sarcoma-associated h
gcauuggcuauuuua

SEQ ID NO: 353549 - RNA, 21 nt, Human herpesvirus 8 (Kaposi`s sarcoma-associated h
gcauuuccugcccugguucua

SEQ ID NO: 353550 - RNA, 18 nt, Human herpesvirus 8 (Kaposi`s sarcoma-associated h
gccaaaugcggccaguuu

SEQ ID NO: 353551 - RNA, 20 nt, Human herpesvirus 8 (Kaposi`s sarcoma-associated h
gccaagccauuauacacacg

SEQ ID NO: 353552 - RNA, 14 nt, Human herpesvirus 8 (Kaposi`s sarcoma-associated h
gccaauacugccca

SEQ ID NO: 353553 - RNA, 17 nt, Human herpesvirus 8 (Kaposi`s sarcoma-associated h
gccacaaaacugccaaa

SEQ ID NO: 353554 - RNA, 22 nt, Human herpesvirus 8 (Kaposi`s sarcoma-associated h
gccacaaacgccccucuuggcu

SEQ ID NO: 353555 - RNA, 13 nt, Human herpesvirus 8 (Kaposi`s sarcoma-associated h
gccacaacccaac

SEQ ID NO: 353556 - RNA, 21 nt, Human herpesvirus 8 (Kaposi`s sarcoma-associated h
gccaccgagaaggaagcgcag

SEQ ID NO: 353557 - RNA, 21 nt, Human herpesvirus 8 (Kaposi`s sarcoma-associated h
gccaccguaacuucaccgugg

SEQ ID NO: 353558 - RNA, 16 nt, Human herpesvirus 8 (Kaposi`s sarcoma-associated h
gccacggauggaacau

SEQ ID NO: 353559 - RNA, 16 nt, Human herpesvirus 8 (Kaposi`s sarcoma-associated h
gccacguaugggcaaa

SEQ ID NO: 353560 - RNA, 18 nt, Human herpesvirus 8 (Kaposi`s sarcoma-associated h
gccacugccacggaugga

SEQ ID NO: 353561 - RNA, 13 nt, Human herpesvirus 8 (Kaposi`s sarcoma-associated h
gccagacagccga

SEQ ID NO: 353562 - RNA, 15 nt, Human herpesvirus 8 (Kaposi`s sarcoma-associated h
gccagauggccgggu

SEQ ID NO: 353563 - RNA, 18 nt, Human herpesvirus 8 (Kaposi`s sarcoma-associated h
gccagccgcgcgaccucc

SEQ ID NO: 353564 - RNA, 23 nt, Human herpesvirus 8 (Kaposi`s sarcoma-associated h
gccaggaacacgcgaaugcagca

SEQ ID NO: 353565 - RNA, 16 nt, Human herpesvirus 8 (Kaposi`s sarcoma-associated h
gccaggaaguucaaug

SEQ ID NO: 353566 - RNA, 22 nt, Human herpesvirus 8 (Kaposi`s sarcoma-associated h
gccagugccuggcauaccacgu

SEQ ID NO: 353567 - RNA, 22 nt, Human herpesvirus 8 (Kaposi`s sarcoma-associated h
gccaguggaggaauauguggcu

SEQ ID NO: 353568 - RNA, 16 nt, Human herpesvirus 8 (Kaposi`s sarcoma-associated h
gccauccgcgagccau

SEQ ID NO: 353569 - RNA, 15 nt, Human herpesvirus 8 (Kaposi`s sarcoma-associated h
gccaugguaccauuc

SEQ ID NO: 353570 - RNA, 20 nt, Human herpesvirus 8 (Kaposi`s sarcoma-associated h
gccauucaucgaguccuuga

SEQ ID NO: 353571 - RNA, 13 nt, Human herpesvirus 8 (Kaposi`s sarcoma-associated h
gccauucgcacca

SEQ ID NO: 353572 - RNA, 12 nt, Human herpesvirus 8 (Kaposi`s sarcoma-associated h
gcccaacuucau

SEQ ID NO: 353573 - RNA, 22 nt, Human herpesvirus 8 (Kaposi`s sarcoma-associated h
gcccaacuucaucacauccccg

SEQ ID NO: 353574 - RNA, 17 nt, Human herpesvirus 8 (Kaposi`s sarcoma-associated h
gcccacccuguacauga

SEQ ID NO: 353575 - RNA, 19 nt, Human herpesvirus 8 (Kaposi`s sarcoma-associated h
gcccacccuguacaugaac

SEQ ID NO: 353576 - RNA, 15 nt, Human herpesvirus 8 (Kaposi`s sarcoma-associated h
gcccacguauggguu

SEQ ID NO: 353577 - RNA, 20 nt, Human herpesvirus 8 (Kaposi`s sarcoma-associated h
gccccauggggaucuuugcg

SEQ ID NO: 353578 - RNA, 14 nt, Human herpesvirus 8 (Kaposi`s sarcoma-associated h
gcccccaccaaacc

SEQ ID NO: 353579 - RNA, 19 nt, Human herpesvirus 8 (Kaposi`s sarcoma-associated h
gccccucuuggcuguuaca

SEQ ID NO: 353580 - RNA, 13 nt, Human herpesvirus 8 (Kaposi`s sarcoma-associated h
gcccggcggacca

SEQ ID NO: 353581 - RNA, 15 nt, Human herpesvirus 8 (Kaposi`s sarcoma-associated h
gcccgucacuggaug

SEQ ID NO: 353582 - RNA, 22 nt, Human herpesvirus 8 (Kaposi`s sarcoma-associated h
gcccuucauaccgggucugugc

SEQ ID NO: 353583 - RNA, 17 nt, Human herpesvirus 8 (Kaposi`s sarcoma-associated h
gccgaacagguugccau

SEQ ID NO: 353584 - RNA, 14 nt, Human herpesvirus 8 (Kaposi`s sarcoma-associated h
gccgccaaacuggg

SEQ ID NO: 353585 - RNA, 14 nt, Human herpesvirus 8 (Kaposi`s sarcoma-associated h
gccgcuugcugaua

SEQ ID NO: 353586 - RNA, 15 nt, Human herpesvirus 8 (Kaposi`s sarcoma-associated h
gccggacaccaccgu

SEQ ID NO: 353587 - RNA, 13 nt, Human herpesvirus 8 (Kaposi`s sarcoma-associated h
gccggacacugaa

SEQ ID NO: 353588 - RNA, 15 nt, Human herpesvirus 8 (Kaposi`s sarcoma-associated h
gccguccaccauucc

SEQ ID NO: 353589 - RNA, 17 nt, Human herpesvirus 8 (Kaposi`s sarcoma-associated h
gccgucgcggaccucaa

SEQ ID NO: 353590 - RNA, 22 nt, Human herpesvirus 8 (Kaposi`s sarcoma-associated h
gccuagugggguggcgcgccac

SEQ ID NO: 353591 - RNA, 20 nt, Human herpesvirus 8 (Kaposi`s sarcoma-associated h
gccucuagcuguagagucau

SEQ ID NO: 353592 - RNA, 18 nt, Human herpesvirus 8 (Kaposi`s sarcoma-associated h
gccucugaagcaccacau

SEQ ID NO: 353593 - RNA, 21 nt, Human herpesvirus 8 (Kaposi`s sarcoma-associated h
gccuguccucgcccaacuuug

SEQ ID NO: 353594 - RNA, 15 nt, Human herpesvirus 8 (Kaposi`s sarcoma-associated h
gccuugggugcgaug

SEQ ID NO: 353595 - RNA, 13 nt, Human herpesvirus 8 (Kaposi`s sarcoma-associated h
gccuuggugcuag

SEQ ID NO: 353596 - RNA, 22 nt, Human herpesvirus 8 (Kaposi`s sarcoma-associated h
gccuuucucuaauaaacaagcu

SEQ ID NO: 353597 - RNA, 13 nt, Human herpesvirus 8 (Kaposi`s sarcoma-associated h
gccuuucuguaau

SEQ ID NO: 353598 - RNA, 14 nt, Human herpesvirus 8 (Kaposi`s sarcoma-associated h
gcgaacuaacgggu

SEQ ID NO: 353599 - RNA, 13 nt, Human herpesvirus 8 (Kaposi`s sarcoma-associated h
gcgaccagucuua

SEQ ID NO: 353600 - RNA, 22 nt, Human herpesvirus 8 (Kaposi`s sarcoma-associated h
gcgaccucaaccggucgcagug

SEQ ID NO: 353601 - RNA, 13 nt, Human herpesvirus 8 (Kaposi`s sarcoma-associated h
gcgagacaucaga

SEQ ID NO: 353602 - RNA, 20 nt, Human herpesvirus 8 (Kaposi`s sarcoma-associated h
gcgagcucaugcccacccug

SEQ ID NO: 353603 - RNA, 21 nt, Human herpesvirus 8 (Kaposi`s sarcoma-associated h
gcgauuaaaugaggggucuga

SEQ ID NO: 353604 - RNA, 13 nt, Human herpesvirus 8 (Kaposi`s sarcoma-associated h
gcgauugcucaag

SEQ ID NO: 353605 - RNA, 23 nt, Human herpesvirus 8 (Kaposi`s sarcoma-associated h
gcgcagcuuaccgcuacuguggg

SEQ ID NO: 353606 - RNA, 13 nt, Human herpesvirus 8 (Kaposi`s sarcoma-associated h
gcgccacguaugg

SEQ ID NO: 353607 - RNA, 18 nt, Human herpesvirus 8 (Kaposi`s sarcoma-associated h
gcgccacucccaccaugu

SEQ ID NO: 353608 - RNA, 19 nt, Human herpesvirus 8 (Kaposi`s sarcoma-associated h
gcgcccacugguguaucag

SEQ ID NO: 353609 - RNA, 17 nt, Human herpesvirus 8 (Kaposi`s sarcoma-associated h
gcgccuagaugcgcugg

SEQ ID NO: 353610 - RNA, 12 nt, Human herpesvirus 8 (Kaposi`s sarcoma-associated h
gcgcgaccuccc

SEQ ID NO: 353611 - RNA, 16 nt, Human herpesvirus 8 (Kaposi`s sarcoma-associated h
gcgcggcacauugugu

SEQ ID NO: 353612 - RNA, 23 nt, Human herpesvirus 8 (Kaposi`s sarcoma-associated h
gcgcugguugaugcgcggcacau

SEQ ID NO: 353613 - RNA, 22 nt, Human herpesvirus 8 (Kaposi`s sarcoma-associated h
gcgcuguacagugccugcagua

SEQ ID NO: 353614 - RNA, 18 nt, Human herpesvirus 8 (Kaposi`s sarcoma-associated h
gcgggcgauuacaggaaa

SEQ ID NO: 353615 - RNA, 14 nt, Human herpesvirus 8 (Kaposi`s sarcoma-associated h
gcggugguugccga

SEQ ID NO: 353616 - RNA, 21 nt, Human herpesvirus 8 (Kaposi`s sarcoma-associated h
gcgucagcagcaagcacagaa

SEQ ID NO: 353617 - RNA, 13 nt, Human herpesvirus 8 (Kaposi`s sarcoma-associated h
gcgucugugccug

SEQ ID NO: 353618 - RNA, 15 nt, Human herpesvirus 8 (Kaposi`s sarcoma-associated h
gcgugcaucggucuc

SEQ ID NO: 353619 - RNA, 13 nt, Human herpesvirus 8 (Kaposi`s sarcoma-associated h
gcguuucuuugua

SEQ ID NO: 353620 - RNA, 21 nt, Human herpesvirus 8 (Kaposi`s sarcoma-associated h
gcuaagaaaaucgaagccagg

SEQ ID NO: 353621 - RNA, 14 nt, Human herpesvirus 8 (Kaposi`s sarcoma-associated h
gcuagaggcuuccg

SEQ ID NO: 353622 - RNA, 12 nt, Human herpesvirus 8 (Kaposi`s sarcoma-associated h
gcucacuguucu

SEQ ID NO: 353623 - RNA, 20 nt, Human herpesvirus 8 (Kaposi`s sarcoma-associated h
gcucaggucugucacuagaa

SEQ ID NO: 353624 - RNA, 13 nt, Human herpesvirus 8 (Kaposi`s sarcoma-associated h
gcucauaacacag

SEQ ID NO: 353625 - RNA, 18 nt, Human herpesvirus 8 (Kaposi`s sarcoma-associated h
gcucauaacacagucaca

SEQ ID NO: 353626 - RNA, 23 nt, Human herpesvirus 8 (Kaposi`s sarcoma-associated h
gcucaucgcgaccgcugccaaua

SEQ ID NO: 353627 - RNA, 19 nt, Human herpesvirus 8 (Kaposi`s sarcoma-associated h
gcuccaguguuagacaggg

SEQ ID NO: 353628 - RNA, 12 nt, Human herpesvirus 8 (Kaposi`s sarcoma-associated h
gcuccgcacuug

SEQ ID NO: 353629 - RNA, 19 nt, Human herpesvirus 8 (Kaposi`s sarcoma-associated h
gcuccuauugcaacugacc

SEQ ID NO: 353630 - RNA, 17 nt, Human herpesvirus 8 (Kaposi`s sarcoma-associated h
gcucgcaugaauacccu

SEQ ID NO: 353631 - RNA, 22 nt, Human herpesvirus 8 (Kaposi`s sarcoma-associated h
gcucgccacucuauauggcaac

SEQ ID NO: 353632 - RNA, 15 nt, Human herpesvirus 8 (Kaposi`s sarcoma-associated h
gcucggcaacauuca

SEQ ID NO: 353633 - RNA, 16 nt, Human herpesvirus 8 (Kaposi`s sarcoma-associated h
gcucucccaaaccaca

SEQ ID NO: 353634 - RNA, 17 nt, Human herpesvirus 8 (Kaposi`s sarcoma-associated h
gcucugucgcucuucag

SEQ ID NO: 353635 - RNA, 21 nt, Human herpesvirus 8 (Kaposi`s sarcoma-associated h
gcucuuagagcuuuaaaggag

SEQ ID NO: 353636 - RNA, 13 nt, Human herpesvirus 8 (Kaposi`s sarcoma-associated h
gcugaugcgaaug

SEQ ID NO: 353637 - RNA, 13 nt, Human herpesvirus 8 (Kaposi`s sarcoma-associated h
gcugcaauguacu

SEQ ID NO: 353638 - RNA, 17 nt, Human herpesvirus 8 (Kaposi`s sarcoma-associated h
gcugcaauguacugcca

SEQ ID NO: 353639 - RNA, 12 nt, Human herpesvirus 8 (Kaposi`s sarcoma-associated h
gcugccaagauc

SEQ ID NO: 353640 - RNA, 20 nt, Human herpesvirus 8 (Kaposi`s sarcoma-associated h
gcugccaauauaguggccaa

SEQ ID NO: 353641 - RNA, 18 nt, Human herpesvirus 8 (Kaposi`s sarcoma-associated h
gcugcgauccagaggaua

SEQ ID NO: 353642 - RNA, 22 nt, Human herpesvirus 8 (Kaposi`s sarcoma-associated h
gcugcgcgucuucuauacaugc

SEQ ID NO: 353643 - RNA, 20 nt, Human herpesvirus 8 (Kaposi`s sarcoma-associated h
gcugcuauuuuucaucugaa

SEQ ID NO: 353644 - RNA, 13 nt, Human herpesvirus 8 (Kaposi`s sarcoma-associated h
gcuggaagagaau

SEQ ID NO: 353645 - RNA, 22 nt, Human herpesvirus 8 (Kaposi`s sarcoma-associated h
gcugguaaccagcuacgcacug

SEQ ID NO: 353646 - RNA, 14 nt, Human herpesvirus 8 (Kaposi`s sarcoma-associated h
gcugguuacucaaa

SEQ ID NO: 353647 - RNA, 20 nt, Human herpesvirus 8 (Kaposi`s sarcoma-associated h
gcuguacagugccugcagua

SEQ ID NO: 353648 - RNA, 19 nt, Human herpesvirus 8 (Kaposi`s sarcoma-associated h
gcuguccucgcaagcuuga

SEQ ID NO: 353649 - RNA, 13 nt, Human herpesvirus 8 (Kaposi`s sarcoma-associated h
gcuguggcaccaa

SEQ ID NO: 353650 - RNA, 19 nt, Human herpesvirus 8 (Kaposi`s sarcoma-associated h
gcuuaagcgccaagccauu

SEQ ID NO: 353651 - RNA, 13 nt, Human herpesvirus 8 (Kaposi`s sarcoma-associated h
gcuuacguucuua

SEQ ID NO: 353652 - RNA, 22 nt, Human herpesvirus 8 (Kaposi`s sarcoma-associated h
gcuucauacgcauauacaggua

SEQ ID NO: 353653 - RNA, 18 nt, Human herpesvirus 8 (Kaposi`s sarcoma-associated h
gcuucauuaugcaugcaa

SEQ ID NO: 353654 - RNA, 15 nt, Human herpesvirus 8 (Kaposi`s sarcoma-associated h
gcuugagcuuuucaa

SEQ ID NO: 353655 - RNA, 15 nt, Human herpesvirus 8 (Kaposi`s sarcoma-associated h
gcuuguacagugagu

SEQ ID NO: 353656 - RNA, 14 nt, Human herpesvirus 8 (Kaposi`s sarcoma-associated h
gcuuugcagccagg

SEQ ID NO: 353657 - RNA, 20 nt, Human herpesvirus 8 (Kaposi`s sarcoma-associated h
gcuuuugggaucagaccccu

SEQ ID NO: 353658 - RNA, 23 nt, Human herpesvirus 8 (Kaposi`s sarcoma-associated h
ggaacaaucuggggguuggcgaa

SEQ ID NO: 353659 - RNA, 22 nt, Human herpesvirus 8 (Kaposi`s sarcoma-associated h
ggaaccacggcgcuguacagug

SEQ ID NO: 353660 - RNA, 22 nt, Human herpesvirus 8 (Kaposi`s sarcoma-associated h
ggaagauugguguccagacagu

SEQ ID NO: 353661 - RNA, 19 nt, Human herpesvirus 8 (Kaposi`s sarcoma-associated h
ggaagcauccggacugaga

SEQ ID NO: 353662 - RNA, 17 nt, Human herpesvirus 8 (Kaposi`s sarcoma-associated h
ggaaguuucagagccuu

SEQ ID NO: 353663 - RNA, 17 nt, Human herpesvirus 8 (Kaposi`s sarcoma-associated h
ggaaugcauauggacug

SEQ ID NO: 353664 - RNA, 17 nt, Human herpesvirus 8 (Kaposi`s sarcoma-associated h
ggaauggccuccaccca

SEQ ID NO: 353665 - RNA, 22 nt, Human herpesvirus 8 (Kaposi`s sarcoma-associated h
ggaauggccuccacccaccaag

SEQ ID NO: 353666 - RNA, 22 nt, Human herpesvirus 8 (Kaposi`s sarcoma-associated h
ggaauggcucacggacuuuauu

SEQ ID NO: 353667 - RNA, 13 nt, Human herpesvirus 8 (Kaposi`s sarcoma-associated h
ggacaaccgugga

SEQ ID NO: 353668 - RNA, 12 nt, Human herpesvirus 8 (Kaposi`s sarcoma-associated h
ggacacugaugu

SEQ ID NO: 353669 - RNA, 23 nt, Human herpesvirus 8 (Kaposi`s sarcoma-associated h
ggaccguguguuuggugguguca

SEQ ID NO: 353670 - RNA, 12 nt, Human herpesvirus 8 (Kaposi`s sarcoma-associated h
ggacgcauauca

SEQ ID NO: 353671 - RNA, 22 nt, Human herpesvirus 8 (Kaposi`s sarcoma-associated h
ggacgugcgggccaaugccaug

SEQ ID NO: 353672 - RNA, 13 nt, Human herpesvirus 8 (Kaposi`s sarcoma-associated h
ggacucacugggg

SEQ ID NO: 353673 - RNA, 22 nt, Human herpesvirus 8 (Kaposi`s sarcoma-associated h
ggacucacugggggucucggga

SEQ ID NO: 353674 - RNA, 14 nt, Human herpesvirus 8 (Kaposi`s sarcoma-associated h
ggacugagauuucc

SEQ ID NO: 353675 - RNA, 15 nt, Human herpesvirus 8 (Kaposi`s sarcoma-associated h
ggacuggcagggugg

SEQ ID NO: 353676 - RNA, 21 nt, Human herpesvirus 8 (Kaposi`s sarcoma-associated h
ggacuucuggaucccacgcua

SEQ ID NO: 353677 - RNA, 19 nt, Human herpesvirus 8 (Kaposi`s sarcoma-associated h
ggagaaccaaccucuccau

SEQ ID NO: 353678 - RNA, 16 nt, Human herpesvirus 8 (Kaposi`s sarcoma-associated h
ggagaccuacacugca

SEQ ID NO: 353679 - RNA, 22 nt, Human herpesvirus 8 (Kaposi`s sarcoma-associated h
ggagaccuacacugcauucuac

SEQ ID NO: 353680 - RNA, 19 nt, Human herpesvirus 8 (Kaposi`s sarcoma-associated h
ggagacggccaucgcuaua

SEQ ID NO: 353681 - RNA, 12 nt, Human herpesvirus 8 (Kaposi`s sarcoma-associated h
ggagagggccac

SEQ ID NO: 353682 - RNA, 17 nt, Human herpesvirus 8 (Kaposi`s sarcoma-associated h
ggagauauugauagcca

SEQ ID NO: 353683 - RNA, 14 nt, Human herpesvirus 8 (Kaposi`s sarcoma-associated h
ggagaucaaggaca

SEQ ID NO: 353684 - RNA, 21 nt, Human herpesvirus 8 (Kaposi`s sarcoma-associated h
ggagauugccaccguuuacaa

SEQ ID NO: 353685 - RNA, 23 nt, Human herpesvirus 8 (Kaposi`s sarcoma-associated h
ggagcagacgugcccagacacca

SEQ ID NO: 353686 - RNA, 20 nt, Human herpesvirus 8 (Kaposi`s sarcoma-associated h
ggagcagccugcaggggagc

SEQ ID NO: 353687 - RNA, 14 nt, Human herpesvirus 8 (Kaposi`s sarcoma-associated h
ggagccaacaaaca

SEQ ID NO: 353688 - RNA, 19 nt, Human herpesvirus 8 (Kaposi`s sarcoma-associated h
ggaggcuaggugcccagcg

SEQ ID NO: 353689 - RNA, 18 nt, Human herpesvirus 8 (Kaposi`s sarcoma-associated h
ggagucacaaguaccacu

SEQ ID NO: 353690 - RNA, 13 nt, Human herpesvirus 8 (Kaposi`s sarcoma-associated h
ggauaaccagguu

SEQ ID NO: 353691 - RNA, 20 nt, Human herpesvirus 8 (Kaposi`s sarcoma-associated h
ggauaacuucugggccacaa

SEQ ID NO: 353692 - RNA, 17 nt, Human herpesvirus 8 (Kaposi`s sarcoma-associated h
ggaucccuucacagugc

SEQ ID NO: 353693 - RNA, 21 nt, Human herpesvirus 8 (Kaposi`s sarcoma-associated h
ggauccuacacuuuacugugu

SEQ ID NO: 353694 - RNA, 14 nt, Human herpesvirus 8 (Kaposi`s sarcoma-associated h
ggaugggugcaacg

SEQ ID NO: 353695 - RNA, 17 nt, Human herpesvirus 8 (Kaposi`s sarcoma-associated h
ggaugucuacgugcccu

SEQ ID NO: 353696 - RNA, 22 nt, Human herpesvirus 8 (Kaposi`s sarcoma-associated h
ggauuuaaaaccgcccacugau

SEQ ID NO: 353697 - RNA, 21 nt, Human herpesvirus 8 (Kaposi`s sarcoma-associated h
ggcaagaaauccgagcaccuc

SEQ ID NO: 353698 - RNA, 20 nt, Human herpesvirus 8 (Kaposi`s sarcoma-associated h
ggcacaacucuacugcacaa

SEQ ID NO: 353699 - RNA, 18 nt, Human herpesvirus 8 (Kaposi`s sarcoma-associated h
ggcaguggacacagucug

SEQ ID NO: 353700 - RNA, 14 nt, Human herpesvirus 8 (Kaposi`s sarcoma-associated h
ggcaguugacgggu

SEQ ID NO: 353701 - RNA, 17 nt, Human herpesvirus 8 (Kaposi`s sarcoma-associated h
ggcauacccguggcuca

SEQ ID NO: 353702 - RNA, 17 nt, Human herpesvirus 8 (Kaposi`s sarcoma-associated h
ggcauauacuuggcaag

SEQ ID NO: 353703 - RNA, 21 nt, Human herpesvirus 8 (Kaposi`s sarcoma-associated h
ggccaguauuaugccagggaa

SEQ ID NO: 353704 - RNA, 17 nt, Human herpesvirus 8 (Kaposi`s sarcoma-associated h
ggccauggcgauguuug

SEQ ID NO: 353705 - RNA, 13 nt, Human herpesvirus 8 (Kaposi`s sarcoma-associated h
ggcccccaccaaa

SEQ ID NO: 353706 - RNA, 23 nt, Human herpesvirus 8 (Kaposi`s sarcoma-associated h
ggcccuggauacacccacauaca

SEQ ID NO: 353707 - RNA, 14 nt, Human herpesvirus 8 (Kaposi`s sarcoma-associated h
ggccggacaccacc

SEQ ID NO: 353708 - RNA, 14 nt, Human herpesvirus 8 (Kaposi`s sarcoma-associated h
ggccuaucugagga

SEQ ID NO: 353709 - RNA, 19 nt, Human herpesvirus 8 (Kaposi`s sarcoma-associated h
ggccuccagcaaagcacau

SEQ ID NO: 353710 - RNA, 23 nt, Human herpesvirus 8 (Kaposi`s sarcoma-associated h
ggccuccagcaaagcacauuuug

SEQ ID NO: 353711 - RNA, 22 nt, Human herpesvirus 8 (Kaposi`s sarcoma-associated h
ggccuuuuuuugcguuucccau

SEQ ID NO: 353712 - RNA, 22 nt, Human herpesvirus 8 (Kaposi`s sarcoma-associated h
ggcgauuuaucauccacgcgga

SEQ ID NO: 353713 - RNA, 15 nt, Human herpesvirus 8 (Kaposi`s sarcoma-associated h
ggcgcggaaacuggg

SEQ ID NO: 353714 - RNA, 14 nt, Human herpesvirus 8 (Kaposi`s sarcoma-associated h
ggcgcucagggugc

SEQ ID NO: 353715 - RNA, 22 nt, Human herpesvirus 8 (Kaposi`s sarcoma-associated h
ggcggggcggcuguggcaccaa

SEQ ID NO: 353716 - RNA, 13 nt, Human herpesvirus 8 (Kaposi`s sarcoma-associated h
ggcgguugggauu

SEQ ID NO: 353717 - RNA, 16 nt, Human herpesvirus 8 (Kaposi`s sarcoma-associated h
ggcuaaccaccacagu

SEQ ID NO: 353718 - RNA, 21 nt, Human herpesvirus 8 (Kaposi`s sarcoma-associated h
ggcuaacuugccggacagcuu

SEQ ID NO: 353719 - RNA, 23 nt, Human herpesvirus 8 (Kaposi`s sarcoma-associated h
ggcuacacaucauaaaguacuuu

SEQ ID NO: 353720 - RNA, 19 nt, Human herpesvirus 8 (Kaposi`s sarcoma-associated h
ggcuagucauggcacucga

SEQ ID NO: 353721 - RNA, 17 nt, Human herpesvirus 8 (Kaposi`s sarcoma-associated h
ggcuaguuaucuucaga

SEQ ID NO: 353722 - RNA, 23 nt, Human herpesvirus 8 (Kaposi`s sarcoma-associated h
ggcugcaaagcuuaaccacaugc

SEQ ID NO: 353723 - RNA, 11 nt, Human herpesvirus 8 (Kaposi`s sarcoma-associated h
ggcuguuacaa

SEQ ID NO: 353724 - RNA, 14 nt, Human herpesvirus 8 (Kaposi`s sarcoma-associated h
ggcuguuacaauaa

SEQ ID NO: 353725 - RNA, 18 nt, Human herpesvirus 8 (Kaposi`s sarcoma-associated h
gaacugugaguaaugugu

SEQ ID NO: 353726 - RNA, 12 nt, Human herpesvirus 8 (Kaposi`s sarcoma-associated h
gaacuucuagca

SEQ ID NO: 353727 - RNA, 17 nt, Human herpesvirus 8 (Kaposi`s sarcoma-associated h
gaacuugcuccaguguu

SEQ ID NO: 353728 - RNA, 22 nt, Human herpesvirus 8 (Kaposi`s sarcoma-associated h
gaacuugcucuuuucaaccucg

SEQ ID NO: 353729 - RNA, 13 nt, Human herpesvirus 8 (Kaposi`s sarcoma-associated h
gaacuuucaucca

SEQ ID NO: 353730 - RNA, 22 nt, Human herpesvirus 8 (Kaposi`s sarcoma-associated h
gaagaagaaaaugacgauguuc

SEQ ID NO: 353731 - RNA, 15 nt, Human herpesvirus 8 (Kaposi`s sarcoma-associated h
gaagacauggugacc

SEQ ID NO: 353732 - RNA, 21 nt, Human herpesvirus 8 (Kaposi`s sarcoma-associated h
gaagagccugaguauacaugu

SEQ ID NO: 353733 - RNA, 20 nt, Human herpesvirus 8 (Kaposi`s sarcoma-associated h
gaagauauuuuucaacaaca

SEQ ID NO: 353734 - RNA, 24 nt, Human herpesvirus 8 (Kaposi`s sarcoma-associated h
gaagcaguuucaggacgcacagca

SEQ ID NO: 353735 - RNA, 20 nt, Human herpesvirus 8 (Kaposi`s sarcoma-associated h
gaagccagggucaggacaau

SEQ ID NO: 353736 - RNA, 23 nt, Human herpesvirus 8 (Kaposi`s sarcoma-associated h
gaagccagggucaggacaauauu

SEQ ID NO: 353737 - RNA, 16 nt, Human herpesvirus 8 (Kaposi`s sarcoma-associated h
gaagccucccuaauag

SEQ ID NO: 353738 - RNA, 23 nt, Human herpesvirus 8 (Kaposi`s sarcoma-associated h
gaagcgccagcgucagcagcaag

SEQ ID NO: 353739 - RNA, 23 nt, Human herpesvirus 8 (Kaposi`s sarcoma-associated h
gaaguuuacauuaucuuaacuaa

SEQ ID NO: 353740 - RNA, 16 nt, Human herpesvirus 8 (Kaposi`s sarcoma-associated h
gaaguuucagagccuu

SEQ ID NO: 353741 - RNA, 20 nt, Human herpesvirus 8 (Kaposi`s sarcoma-associated h
gaauaacuuuauuacaggua

SEQ ID NO: 353742 - RNA, 22 nt, Human herpesvirus 8 (Kaposi`s sarcoma-associated h
gaaugaagugcaaccugcugca

SEQ ID NO: 353743 - RNA, 19 nt, Human herpesvirus 8 (Kaposi`s sarcoma-associated h
gaaugcauauggacuguua

SEQ ID NO: 353744 - RNA, 20 nt, Human herpesvirus 8 (Kaposi`s sarcoma-associated h
gaaugcucaggucugucacu

SEQ ID NO: 353745 - RNA, 19 nt, Human herpesvirus 8 (Kaposi`s sarcoma-associated h
gaauggagaggagaccccc

SEQ ID NO: 353746 - RNA, 12 nt, Human herpesvirus 8 (Kaposi`s sarcoma-associated h
gacaaacacugu

SEQ ID NO: 353747 - RNA, 15 nt, Human herpesvirus 8 (Kaposi`s sarcoma-associated h
gacaaacacugugga

SEQ ID NO: 353748 - RNA, 15 nt, Human herpesvirus 8 (Kaposi`s sarcoma-associated h
gacaaagcgucuuua

SEQ ID NO: 353749 - RNA, 21 nt, Human herpesvirus 8 (Kaposi`s sarcoma-associated h
gacaacacuacuaugucccaa

SEQ ID NO: 353750 - RNA, 17 nt, Human herpesvirus 8 (Kaposi`s sarcoma-associated h
gacaacggcgacgacaa

SEQ ID NO: 353751 - RNA, 15 nt, Human herpesvirus 8 (Kaposi`s sarcoma-associated h
gacaaggaguggcug

SEQ ID NO: 353752 - RNA, 20 nt, Human herpesvirus 8 (Kaposi`s sarcoma-associated h
gacaagucuucuugucacuc

SEQ ID NO: 353753 - RNA, 16 nt, Human herpesvirus 8 (Kaposi`s sarcoma-associated h
gacaauaugcccaacu

SEQ ID NO: 353754 - RNA, 18 nt, Human herpesvirus 8 (Kaposi`s sarcoma-associated h
gacacacggaaggcagug

SEQ ID NO: 353755 - RNA, 21 nt, Human herpesvirus 8 (Kaposi`s sarcoma-associated h
gacaccaaagacaaguaccac

SEQ ID NO: 353756 - RNA, 22 nt, Human herpesvirus 8 (Kaposi`s sarcoma-associated h
gacagaacaccguuuuauuuga

SEQ ID NO: 353757 - RNA, 11 nt, Human herpesvirus 8 (Kaposi`s sarcoma-associated h
gacagagccag

SEQ ID NO: 353758 - RNA, 20 nt, Human herpesvirus 8 (Kaposi`s sarcoma-associated h
gacagcucguaaacaaaggc

SEQ ID NO: 353759 - RNA, 18 nt, Human herpesvirus 8 (Kaposi`s sarcoma-associated h
gacaggcacgcaaugcuc

SEQ ID NO: 353760 - RNA, 12 nt, Human herpesvirus 8 (Kaposi`s sarcoma-associated h
gacaguauucuc

SEQ ID NO: 353761 - RNA, 12 nt, Human herpesvirus 8 (Kaposi`s sarcoma-associated h
gacagugccugg

SEQ ID NO: 353762 - RNA, 17 nt, Human herpesvirus 8 (Kaposi`s sarcoma-associated h
gacaguugugaucucug

SEQ ID NO: 353763 - RNA, 11 nt, Human herpesvirus 8 (Kaposi`s sarcoma-associated h
gacauacauga

SEQ ID NO: 353764 - RNA, 22 nt, Human herpesvirus 8 (Kaposi`s sarcoma-associated h
gacaucccccccgcaggccagc

SEQ ID NO: 353765 - RNA, 17 nt, Human herpesvirus 8 (Kaposi`s sarcoma-associated h
gacaugaaagacugccu

SEQ ID NO: 353766 - RNA, 16 nt, Human herpesvirus 8 (Kaposi`s sarcoma-associated h
gacauuuugucagguu

SEQ ID NO: 353767 - RNA, 20 nt, Human herpesvirus 8 (Kaposi`s sarcoma-associated h
gaccaauacaagacaacuaa

SEQ ID NO: 353768 - RNA, 22 nt, Human herpesvirus 8 (Kaposi`s sarcoma-associated h
gaccacgccugacucauuucau

SEQ ID NO: 353769 - RNA, 14 nt, Human herpesvirus 8 (Kaposi`s sarcoma-associated h
gacccaaaaaggac

SEQ ID NO: 353770 - RNA, 18 nt, Human herpesvirus 8 (Kaposi`s sarcoma-associated h
gaccccgugauccaggag

SEQ ID NO: 353771 - RNA, 23 nt, Human herpesvirus 8 (Kaposi`s sarcoma-associated h
gacccggcaacacuggacacuaa

SEQ ID NO: 353772 - RNA, 13 nt, Human herpesvirus 8 (Kaposi`s sarcoma-associated h
gaccguacauccu

SEQ ID NO: 353773 - RNA, 12 nt, Human herpesvirus 8 (Kaposi`s sarcoma-associated h
gaccuacaucuc

SEQ ID NO: 353774 - RNA, 14 nt, Human herpesvirus 8 (Kaposi`s sarcoma-associated h
gaccucuccggcgg

SEQ ID NO: 353775 - RNA, 14 nt, Human herpesvirus 8 (Kaposi`s sarcoma-associated h
gaccucuguggcau

SEQ ID NO: 353776 - RNA, 17 nt, Human herpesvirus 8 (Kaposi`s sarcoma-associated h
gaccugaugcaggccac

SEQ ID NO: 353777 - RNA, 14 nt, Human herpesvirus 8 (Kaposi`s sarcoma-associated h
gacgauguacuuga

SEQ ID NO: 353778 - RNA, 20 nt, Human herpesvirus 8 (Kaposi`s sarcoma-associated h
gacgccgucgcggaccucaa

SEQ ID NO: 353779 - RNA, 21 nt, Human herpesvirus 8 (Kaposi`s sarcoma-associated h
gacgcggccuucgucaugcac

SEQ ID NO: 353780 - RNA, 17 nt, Human herpesvirus 8 (Kaposi`s sarcoma-associated h
gacggacggcaccaagg

SEQ ID NO: 353781 - RNA, 23 nt, Human herpesvirus 8 (Kaposi`s sarcoma-associated h
gacggcgucaccgacaccaucuc

SEQ ID NO: 353782 - RNA, 13 nt, Human herpesvirus 8 (Kaposi`s sarcoma-associated h
gacggugacauug

SEQ ID NO: 353783 - RNA, 21 nt, Human herpesvirus 8 (Kaposi`s sarcoma-associated h
gacgugacgcccuggguguua

SEQ ID NO: 353784 - RNA, 22 nt, Human herpesvirus 8 (Kaposi`s sarcoma-associated h
gacgugcccagacaccaaagac

SEQ ID NO: 353785 - RNA, 15 nt, Human herpesvirus 8 (Kaposi`s sarcoma-associated h
gacgugcgggccaau

SEQ ID NO: 353786 - RNA, 17 nt, Human herpesvirus 8 (Kaposi`s sarcoma-associated h
gacguggccagcgugua

SEQ ID NO: 353787 - RNA, 15 nt, Human herpesvirus 8 (Kaposi`s sarcoma-associated h
gacuaaaaaggccac

SEQ ID NO: 353788 - RNA, 12 nt, Human herpesvirus 8 (Kaposi`s sarcoma-associated h
gacuacauccaa

SEQ ID NO: 353789 - RNA, 13 nt, Human herpesvirus 8 (Kaposi`s sarcoma-associated h
gacuacugugaag

SEQ ID NO: 353790 - RNA, 17 nt, Human herpesvirus 8 (Kaposi`s sarcoma-associated h
gacuaucagguagcaaa

SEQ ID NO: 353791 - RNA, 19 nt, Human herpesvirus 8 (Kaposi`s sarcoma-associated h
gacucaauuggaugcuaug

SEQ ID NO: 353792 - RNA, 18 nt, Human herpesvirus 8 (Kaposi`s sarcoma-associated h
gacuccaguuuaaaagac

SEQ ID NO: 353793 - RNA, 20 nt, Human herpesvirus 8 (Kaposi`s sarcoma-associated h
gacugccacggccgccuuug

SEQ ID NO: 353794 - RNA, 15 nt, Human herpesvirus 8 (Kaposi`s sarcoma-associated h
gacugggccaccaag

SEQ ID NO: 353795 - RNA, 20 nt, Human herpesvirus 8 (Kaposi`s sarcoma-associated h
gacuggugcgcacaggccaa

SEQ ID NO: 353796 - RNA, 16 nt, Human herpesvirus 8 (Kaposi`s sarcoma-associated h
gacuguuaacccaaug

SEQ ID NO: 353797 - RNA, 17 nt, Human herpesvirus 8 (Kaposi`s sarcoma-associated h
gacuuacugcagcacua

SEQ ID NO: 353798 - RNA, 16 nt, Human herpesvirus 8 (Kaposi`s sarcoma-associated h
gacuuaucuaaaaaga

SEQ ID NO: 353799 - RNA, 22 nt, Human herpesvirus 8 (Kaposi`s sarcoma-associated h
gacuuccccgucuccagucacc

SEQ ID NO: 353800 - RNA, 20 nt, Human herpesvirus 8 (Kaposi`s sarcoma-associated h
gagaaaucccauuugauaua

SEQ ID NO: 353801 - RNA, 11 nt, Human herpesvirus 8 (Kaposi`s sarcoma-associated h
gagaaccaugc

SEQ ID NO: 353802 - RNA, 17 nt, Human herpesvirus 8 (Kaposi`s sarcoma-associated h
gagaaccaugccagacu

SEQ ID NO: 353803 - RNA, 19 nt, Human herpesvirus 8 (Kaposi`s sarcoma-associated h
gagaauuagaaacaaagca

SEQ ID NO: 353804 - RNA, 22 nt, Human herpesvirus 8 (Kaposi`s sarcoma-associated h
gagaccuacacugcauucuacg

SEQ ID NO: 353805 - RNA, 17 nt, Human herpesvirus 8 (Kaposi`s sarcoma-associated h
gagacgcgcaaaggggg

SEQ ID NO: 353806 - RNA, 17 nt, Human herpesvirus 8 (Kaposi`s sarcoma-associated h
gagacggggaagucaug

SEQ ID NO: 353807 - RNA, 14 nt, Human herpesvirus 8 (Kaposi`s sarcoma-associated h
gagacuagcugccu

SEQ ID NO: 353808 - RNA, 20 nt, Human herpesvirus 8 (Kaposi`s sarcoma-associated h
gagacucaauuggaugcuau

SEQ ID NO: 353809 - RNA, 21 nt, Human herpesvirus 8 (Kaposi`s sarcoma-associated h
gagacugcaggccaucgcucu

SEQ ID NO: 353810 - RNA, 21 nt, Human herpesvirus 8 (Kaposi`s sarcoma-associated h
gagacuggugcgcacaggcca

SEQ ID NO: 353811 - RNA, 19 nt, Human herpesvirus 8 (Kaposi`s sarcoma-associated h
gagacuuacugcagcacua

SEQ ID NO: 353812 - RNA, 23 nt, Human herpesvirus 8 (Kaposi`s sarcoma-associated h
gagauaacggugucuaacugccg

SEQ ID NO: 353813 - RNA, 13 nt, Human herpesvirus 8 (Kaposi`s sarcoma-associated h
gagcacacugugu

SEQ ID NO: 353814 - RNA, 14 nt, Human herpesvirus 8 (Kaposi`s sarcoma-associated h
gagcacacuuccca

SEQ ID NO: 353815 - RNA, 15 nt, Human herpesvirus 8 (Kaposi`s sarcoma-associated h
gagcacacuucccag

SEQ ID NO: 353816 - RNA, 18 nt, Human herpesvirus 8 (Kaposi`s sarcoma-associated h
gagcacccugaaacucca

SEQ ID NO: 353817 - RNA, 16 nt, Human herpesvirus 8 (Kaposi`s sarcoma-associated h
gagcagcgccagugga

SEQ ID NO: 353818 - RNA, 13 nt, Human herpesvirus 8 (Kaposi`s sarcoma-associated h
gagcagugcuccc

SEQ ID NO: 353819 - RNA, 14 nt, Human herpesvirus 8 (Kaposi`s sarcoma-associated h
gagcagugcucccg

SEQ ID NO: 353820 - RNA, 20 nt, Human herpesvirus 8 (Kaposi`s sarcoma-associated h
gagcagugcucccgugcguu

SEQ ID NO: 353821 - RNA, 14 nt, Human herpesvirus 8 (Kaposi`s sarcoma-associated h
gagcaugacuuccc

SEQ ID NO: 353822 - RNA, 19 nt, Human herpesvirus 8 (Kaposi`s sarcoma-associated h
gagccacaucgucaucucu

SEQ ID NO: 353823 - RNA, 22 nt, Human herpesvirus 8 (Kaposi`s sarcoma-associated h
gagccuucacggcacacuacuc

SEQ ID NO: 353824 - RNA, 15 nt, Human herpesvirus 8 (Kaposi`s sarcoma-associated h
gagcgacuggaucau

SEQ ID NO: 353825 - RNA, 14 nt, Human herpesvirus 8 (Kaposi`s sarcoma-associated h
gagcggacgccauu

SEQ ID NO: 353826 - RNA, 18 nt, Human herpesvirus 8 (Kaposi`s sarcoma-associated h
gagcuucggaaagcacug

SEQ ID NO: 353827 - RNA, 20 nt, Human herpesvirus 8 (Kaposi`s sarcoma-associated h
gagcuucggaaagcacuggg

SEQ ID NO: 353828 - RNA, 15 nt, Human herpesvirus 8 (Kaposi`s sarcoma-associated h
gaggaagagcacugu

SEQ ID NO: 353829 - RNA, 14 nt, Human herpesvirus 8 (Kaposi`s sarcoma-associated h
gaggccuaucugag

SEQ ID NO: 353830 - RNA, 15 nt, Human herpesvirus 8 (Kaposi`s sarcoma-associated h
gaggcuaggugccca

SEQ ID NO: 353831 - RNA, 22 nt, Human herpesvirus 8 (Kaposi`s sarcoma-associated h
gaggguuuauagaagagccuga

SEQ ID NO: 353832 - RNA, 12 nt, Human herpesvirus 8 (Kaposi`s sarcoma-associated h
gaguaggguagg

SEQ ID NO: 353833 - RNA, 12 nt, Human herpesvirus 8 (Kaposi`s sarcoma-associated h
gagucacaaagg

SEQ ID NO: 353834 - RNA, 15 nt, Human herpesvirus 8 (Kaposi`s sarcoma-associated h
gagucuacgugccag

SEQ ID NO: 353835 - RNA, 16 nt, Human herpesvirus 8 (Kaposi`s sarcoma-associated h
gagucuacgugccagu

SEQ ID NO: 353836 - RNA, 14 nt, Human herpesvirus 8 (Kaposi`s sarcoma-associated h
gaguguaaaaaacu

SEQ ID NO: 353837 - RNA, 16 nt, Human herpesvirus 8 (Kaposi`s sarcoma-associated h
gaguguacacagccaa

SEQ ID NO: 353838 - RNA, 20 nt, Human herpesvirus 8 (Kaposi`s sarcoma-associated h
gagugucucccguauuccau

SEQ ID NO: 353839 - RNA, 23 nt, Human herpesvirus 8 (Kaposi`s sarcoma-associated h
gagugucucccguauuccaugua

SEQ ID NO: 353840 - RNA, 22 nt, Human herpesvirus 8 (Kaposi`s sarcoma-associated h
gaguuacauggaauacgggaga

SEQ ID NO: 353841 - RNA, 21 nt, Human herpesvirus 8 (Kaposi`s sarcoma-associated h
gaguuuuucuacgaggcaauu

SEQ ID NO: 353842 - RNA, 21 nt, Human herpesvirus 8 (Kaposi`s sarcoma-associated h
gauaagccaauugacugugga

SEQ ID NO: 353843 - RNA, 13 nt, Human herpesvirus 8 (Kaposi`s sarcoma-associated h
gauacacuacuua

SEQ ID NO: 353844 - RNA, 13 nt, Human herpesvirus 8 (Kaposi`s sarcoma-associated h
gauauaaacaugg

SEQ ID NO: 353845 - RNA, 19 nt, Human herpesvirus 8 (Kaposi`s sarcoma-associated h
gauaugcaugugucugugc

SEQ ID NO: 353846 - RNA, 23 nt, Human herpesvirus 8 (Kaposi`s sarcoma-associated h
gauaugcaugugucugugcccug

SEQ ID NO: 353847 - RNA, 14 nt, Human herpesvirus 8 (Kaposi`s sarcoma-associated h
gauaugugugccca

SEQ ID NO: 353848 - RNA, 15 nt, Human herpesvirus 8 (Kaposi`s sarcoma-associated h
gauaugugugcccaa

SEQ ID NO: 353849 - RNA, 16 nt, Human herpesvirus 8 (Kaposi`s sarcoma-associated h
gauauuacagacucug

SEQ ID NO: 353850 - RNA, 15 nt, Human herpesvirus 8 (Kaposi`s sarcoma-associated h
gaucacccagugugc

SEQ ID NO: 353851 - RNA, 13 nt, Human herpesvirus 8 (Kaposi`s sarcoma-associated h
gaucagaccccuc

SEQ ID NO: 353852 - RNA, 15 nt, Human herpesvirus 8 (Kaposi`s sarcoma-associated h
gaucaucuuuuccac

SEQ ID NO: 353853 - RNA, 23 nt, Human herpesvirus 8 (Kaposi`s sarcoma-associated h
gaucaugacuacgcucaccaucc

SEQ ID NO: 353854 - RNA, 23 nt, Human herpesvirus 8 (Kaposi`s sarcoma-associated h
gaucccaggcaggaguauaucag

SEQ ID NO: 353855 - RNA, 16 nt, Human herpesvirus 8 (Kaposi`s sarcoma-associated h
gaucccuucacagugc

SEQ ID NO: 353856 - RNA, 20 nt, Human herpesvirus 8 (Kaposi`s sarcoma-associated h
gauccuguagaugagacaga

SEQ ID NO: 353857 - RNA, 20 nt, Human herpesvirus 8 (Kaposi`s sarcoma-associated h
gaucgaacagaagacccaga

SEQ ID NO: 353858 - RNA, 16 nt, Human herpesvirus 8 (Kaposi`s sarcoma-associated h
gaucucagaggcccau

SEQ ID NO: 353859 - RNA, 15 nt, Human herpesvirus 8 (Kaposi`s sarcoma-associated h
gaucuguuacuggca

SEQ ID NO: 353860 - RNA, 13 nt, Human herpesvirus 8 (Kaposi`s sarcoma-associated h
gaucuuaggccag

SEQ ID NO: 353861 - RNA, 15 nt, Human herpesvirus 8 (Kaposi`s sarcoma-associated h
gaugagcaugacuuc

SEQ ID NO: 353862 - RNA, 17 nt, Human herpesvirus 8 (Kaposi`s sarcoma-associated h
gaugcagggccuggccu

SEQ ID NO: 353863 - RNA, 12 nt, Human herpesvirus 8 (Kaposi`s sarcoma-associated h
gaugccacuguu

SEQ ID NO: 353864 - RNA, 18 nt, Human herpesvirus 8 (Kaposi`s sarcoma-associated h
gaugcgaaugugccagca

SEQ ID NO: 353865 - RNA, 18 nt, Human herpesvirus 8 (Kaposi`s sarcoma-associated h
gaugcgcggcacauugug

SEQ ID NO: 353866 - RNA, 13 nt, Human herpesvirus 8 (Kaposi`s sarcoma-associated h
gaugcggguuggg

SEQ ID NO: 353867 - RNA, 23 nt, Human herpesvirus 8 (Kaposi`s sarcoma-associated h
gauguccugauuuuccagggaca

SEQ ID NO: 353868 - RNA, 20 nt, Human herpesvirus 8 (Kaposi`s sarcoma-associated h
gauuacucgcacaagcgcug

SEQ ID NO: 353869 - RNA, 12 nt, Human herpesvirus 8 (Kaposi`s sarcoma-associated h
gauuagcacugu

SEQ ID NO: 353870 - RNA, 14 nt, Human herpesvirus 8 (Kaposi`s sarcoma-associated h
gauuagcacuguau

SEQ ID NO: 353871 - RNA, 16 nt, Human herpesvirus 8 (Kaposi`s sarcoma-associated h
gauuauaaugggucua

SEQ ID NO: 353872 - RNA, 13 nt, Human herpesvirus 8 (Kaposi`s sarcoma-associated h
gauuauaccggga

SEQ ID NO: 353873 - RNA, 21 nt, Human herpesvirus 8 (Kaposi`s sarcoma-associated h
gauucaguugaucgauuucug

SEQ ID NO: 353874 - RNA, 16 nt, Human herpesvirus 8 (Kaposi`s sarcoma-associated h
gauuccgucauucacc

SEQ ID NO: 353875 - RNA, 19 nt, Human herpesvirus 8 (Kaposi`s sarcoma-associated h
gauucgaucccgcaaccca

SEQ ID NO: 353876 - RNA, 14 nt, Human herpesvirus 8 (Kaposi`s sarcoma-associated h
gauucgcacagaaa

SEQ ID NO: 353877 - RNA, 20 nt, Human herpesvirus 8 (Kaposi`s sarcoma-associated h
gauucugacagacaacacua

SEQ ID NO: 353878 - RNA, 18 nt, Human herpesvirus 8 (Kaposi`s sarcoma-associated h
gauugacuggaacgccau

SEQ ID NO: 353879 - RNA, 16 nt, Human herpesvirus 8 (Kaposi`s sarcoma-associated h
gauugcucaagcaaca

SEQ ID NO: 353880 - RNA, 21 nt, Human herpesvirus 8 (Kaposi`s sarcoma-associated h
gauuuacgguggugugccugg

SEQ ID NO: 353881 - RNA, 20 nt, Human herpesvirus 8 (Kaposi`s sarcoma-associated h
gauuuagacaauaugcccaa

SEQ ID NO: 353882 - RNA, 15 nt, Human herpesvirus 8 (Kaposi`s sarcoma-associated h
cuuacugcagcacua

SEQ ID NO: 353883 - RNA, 17 nt, Human herpesvirus 8 (Kaposi`s sarcoma-associated h
cuuagcagaguguccag

SEQ ID NO: 353884 - RNA, 14 nt, Human herpesvirus 8 (Kaposi`s sarcoma-associated h
cuuaggacacugau

SEQ ID NO: 353885 - RNA, 20 nt, Human herpesvirus 8 (Kaposi`s sarcoma-associated h
cuuaggcuaaccaccacagu

SEQ ID NO: 353886 - RNA, 16 nt, Human herpesvirus 8 (Kaposi`s sarcoma-associated h
cuuauaacacuaauau

SEQ ID NO: 353887 - RNA, 23 nt, Human herpesvirus 8 (Kaposi`s sarcoma-associated h
cuuauaacacuaauauacuuugc

SEQ ID NO: 353888 - RNA, 14 nt, Human herpesvirus 8 (Kaposi`s sarcoma-associated h
cuuauaacagugcu

SEQ ID NO: 353889 - RNA, 23 nt, Human herpesvirus 8 (Kaposi`s sarcoma-associated h
cuuauaccggccuguuuccaaac

SEQ ID NO: 353890 - RNA, 17 nt, Human herpesvirus 8 (Kaposi`s sarcoma-associated h
cuuauuaaaagcauugu

SEQ ID NO: 353891 - RNA, 16 nt, Human herpesvirus 8 (Kaposi`s sarcoma-associated h
cuucauuguucuccag

SEQ ID NO: 353892 - RNA, 16 nt, Human herpesvirus 8 (Kaposi`s sarcoma-associated h
cuuccagucuccagag

SEQ ID NO: 353893 - RNA, 12 nt, Human herpesvirus 8 (Kaposi`s sarcoma-associated h
cuucccaauagc

SEQ ID NO: 353894 - RNA, 21 nt, Human herpesvirus 8 (Kaposi`s sarcoma-associated h
cuucccagauuaaacaaaaag

SEQ ID NO: 353895 - RNA, 21 nt, Human herpesvirus 8 (Kaposi`s sarcoma-associated h
cuuccuauggcgcaagcacuu

SEQ ID NO: 353896 - RNA, 15 nt, Human herpesvirus 8 (Kaposi`s sarcoma-associated h
cuuccugaugaaauc

SEQ ID NO: 353897 - RNA, 23 nt, Human herpesvirus 8 (Kaposi`s sarcoma-associated h
cuucgccuaugaaaauacagggg

SEQ ID NO: 353898 - RNA, 16 nt, Human herpesvirus 8 (Kaposi`s sarcoma-associated h
cuucggaaagcacugg

SEQ ID NO: 353899 - RNA, 12 nt, Human herpesvirus 8 (Kaposi`s sarcoma-associated h
cuucuauacaug

SEQ ID NO: 353900 - RNA, 13 nt, Human herpesvirus 8 (Kaposi`s sarcoma-associated h
cuucuauacaugc

SEQ ID NO: 353901 - RNA, 14 nt, Human herpesvirus 8 (Kaposi`s sarcoma-associated h
cuucugacucugua

SEQ ID NO: 353902 - RNA, 19 nt, Human herpesvirus 8 (Kaposi`s sarcoma-associated h
cuucuggaucccacgcuau

SEQ ID NO: 353903 - RNA, 15 nt, Human herpesvirus 8 (Kaposi`s sarcoma-associated h
cuucugggcgaagaa

SEQ ID NO: 353904 - RNA, 13 nt, Human herpesvirus 8 (Kaposi`s sarcoma-associated h
cuugaacagggca

SEQ ID NO: 353905 - RNA, 15 nt, Human herpesvirus 8 (Kaposi`s sarcoma-associated h
cuugaggauggugcu

SEQ ID NO: 353906 - RNA, 18 nt, Human herpesvirus 8 (Kaposi`s sarcoma-associated h
cuugcugcauaaagucau

SEQ ID NO: 353907 - RNA, 19 nt, Human herpesvirus 8 (Kaposi`s sarcoma-associated h
cuugcuggucgguucacug

SEQ ID NO: 353908 - RNA, 20 nt, Human herpesvirus 8 (Kaposi`s sarcoma-associated h
cuugcuggucgguucacugc

SEQ ID NO: 353909 - RNA, 22 nt, Human herpesvirus 8 (Kaposi`s sarcoma-associated h
cuuggaguuaaagcugucacua

SEQ ID NO: 353910 - RNA, 23 nt, Human herpesvirus 8 (Kaposi`s sarcoma-associated h
cuuggaguuaaagcugucacuaa

SEQ ID NO: 353911 - RNA, 17 nt, Human herpesvirus 8 (Kaposi`s sarcoma-associated h
cuuggcgcccacguaug

SEQ ID NO: 353912 - RNA, 12 nt, Human herpesvirus 8 (Kaposi`s sarcoma-associated h
cuugggauuuuu

SEQ ID NO: 353913 - RNA, 17 nt, Human herpesvirus 8 (Kaposi`s sarcoma-associated h
cuugguaacucccucaa

SEQ ID NO: 353914 - RNA, 20 nt, Human herpesvirus 8 (Kaposi`s sarcoma-associated h
cuuggugugcugauguugua

SEQ ID NO: 353915 - RNA, 21 nt, Human herpesvirus 8 (Kaposi`s sarcoma-associated h
cuuguacagugaguggcugua

SEQ ID NO: 353916 - RNA, 13 nt, Human herpesvirus 8 (Kaposi`s sarcoma-associated h
cuuguacaugugu

SEQ ID NO: 353917 - RNA, 14 nt, Human herpesvirus 8 (Kaposi`s sarcoma-associated h
cuuguacauguguc

SEQ ID NO: 353918 - RNA, 14 nt, Human herpesvirus 8 (Kaposi`s sarcoma-associated h
cuuguuuauaacaa

SEQ ID NO: 353919 - RNA, 18 nt, Human herpesvirus 8 (Kaposi`s sarcoma-associated h
cuuguuuauaacaaugaa

SEQ ID NO: 353920 - RNA, 18 nt, Human herpesvirus 8 (Kaposi`s sarcoma-associated h
cuuuaccacagagaucac

SEQ ID NO: 353921 - RNA, 22 nt, Human herpesvirus 8 (Kaposi`s sarcoma-associated h
cuuuaccacagagaucacggcc

SEQ ID NO: 353922 - RNA, 22 nt, Human herpesvirus 8 (Kaposi`s sarcoma-associated h
cuuuagagagcuagaggcuucc

SEQ ID NO: 353923 - RNA, 20 nt, Human herpesvirus 8 (Kaposi`s sarcoma-associated h
cuuuauuacagguaugaccg

SEQ ID NO: 353924 - RNA, 22 nt, Human herpesvirus 8 (Kaposi`s sarcoma-associated h
cuuuauugucuagacacgcaaa

SEQ ID NO: 353925 - RNA, 12 nt, Human herpesvirus 8 (Kaposi`s sarcoma-associated h
cuuucagaauuc

SEQ ID NO: 353926 - RNA, 18 nt, Human herpesvirus 8 (Kaposi`s sarcoma-associated h
cuuucagacguccaguuc

SEQ ID NO: 353927 - RNA, 17 nt, Human herpesvirus 8 (Kaposi`s sarcoma-associated h
cuuucauuagugacaua

SEQ ID NO: 353928 - RNA, 22 nt, Human herpesvirus 8 (Kaposi`s sarcoma-associated h
cuuucauuagugacauacauga

SEQ ID NO: 353929 - RNA, 15 nt, Human herpesvirus 8 (Kaposi`s sarcoma-associated h
cuuucuagcagagcg

SEQ ID NO: 353930 - RNA, 21 nt, Human herpesvirus 8 (Kaposi`s sarcoma-associated h
cuuugggcuagugccaaauau

SEQ ID NO: 353931 - RNA, 14 nt, Human herpesvirus 8 (Kaposi`s sarcoma-associated h
cuuuguauaaaaua

SEQ ID NO: 353932 - RNA, 13 nt, Human herpesvirus 8 (Kaposi`s sarcoma-associated h
cuuuuaccaguuc

SEQ ID NO: 353933 - RNA, 15 nt, Human herpesvirus 8 (Kaposi`s sarcoma-associated h
cuuuuaccaguucag

SEQ ID NO: 353934 - RNA, 14 nt, Human herpesvirus 8 (Kaposi`s sarcoma-associated h
cuuuucaaccucga

SEQ ID NO: 353935 - RNA, 21 nt, Human herpesvirus 8 (Kaposi`s sarcoma-associated h
cuuuuccguagugaguucuaa

SEQ ID NO: 353936 - RNA, 20 nt, Human herpesvirus 8 (Kaposi`s sarcoma-associated h
cuuuuuuguuauuguuacuu

SEQ ID NO: 353937 - RNA, 17 nt, Human herpesvirus 8 (Kaposi`s sarcoma-associated h
gaaaaacguuuuuccca

SEQ ID NO: 353938 - RNA, 14 nt, Human herpesvirus 8 (Kaposi`s sarcoma-associated h
gaaaaggaucuucu

SEQ ID NO: 353939 - RNA, 16 nt, Human herpesvirus 8 (Kaposi`s sarcoma-associated h
gaaaaucgaagccagg

SEQ ID NO: 353940 - RNA, 18 nt, Human herpesvirus 8 (Kaposi`s sarcoma-associated h
gaaacaaagcacuggcug

SEQ ID NO: 353941 - RNA, 22 nt, Human herpesvirus 8 (Kaposi`s sarcoma-associated h
gaaaccccgcccccuggugcuc

SEQ ID NO: 353942 - RNA, 13 nt, Human herpesvirus 8 (Kaposi`s sarcoma-associated h
gaaacgugccugc

SEQ ID NO: 353943 - RNA, 22 nt, Human herpesvirus 8 (Kaposi`s sarcoma-associated h
gaaacuccaggcucuacaggua

SEQ ID NO: 353944 - RNA, 18 nt, Human herpesvirus 8 (Kaposi`s sarcoma-associated h
gaaacucccccaaccucu

SEQ ID NO: 353945 - RNA, 14 nt, Human herpesvirus 8 (Kaposi`s sarcoma-associated h
gaaagacugccuga

SEQ ID NO: 353946 - RNA, 13 nt, Human herpesvirus 8 (Kaposi`s sarcoma-associated h
gaaagaugaagcu

SEQ ID NO: 353947 - RNA, 19 nt, Human herpesvirus 8 (Kaposi`s sarcoma-associated h
gaaagaugaagcugucauu

SEQ ID NO: 353948 - RNA, 23 nt, Human herpesvirus 8 (Kaposi`s sarcoma-associated h
gaaagcuccucgagcgugcugau

SEQ ID NO: 353949 - RNA, 17 nt, Human herpesvirus 8 (Kaposi`s sarcoma-associated h
gaaaguccgucaaccag

SEQ ID NO: 353950 - RNA, 15 nt, Human herpesvirus 8 (Kaposi`s sarcoma-associated h
gaaaugguagagggg

SEQ ID NO: 353951 - RNA, 14 nt, Human herpesvirus 8 (Kaposi`s sarcoma-associated h
gaaauuguggcacu

SEQ ID NO: 353952 - RNA, 18 nt, Human herpesvirus 8 (Kaposi`s sarcoma-associated h
gaacaauggcgccaccuu

SEQ ID NO: 353953 - RNA, 16 nt, Human herpesvirus 8 (Kaposi`s sarcoma-associated h
gaacacgagauagugu

SEQ ID NO: 353954 - RNA, 14 nt, Human herpesvirus 8 (Kaposi`s sarcoma-associated h
gaacacguaccuga

SEQ ID NO: 353955 - RNA, 15 nt, Human herpesvirus 8 (Kaposi`s sarcoma-associated h
gaacagcacauaugu

SEQ ID NO: 353956 - RNA, 16 nt, Human herpesvirus 8 (Kaposi`s sarcoma-associated h
gaacaguacccacgaa

SEQ ID NO: 353957 - RNA, 17 nt, Human herpesvirus 8 (Kaposi`s sarcoma-associated h
gaacaguacccacgaaa

SEQ ID NO: 353958 - RNA, 14 nt, Human herpesvirus 8 (Kaposi`s sarcoma-associated h
gaacaugcugccac

SEQ ID NO: 353959 - RNA, 16 nt, Human herpesvirus 8 (Kaposi`s sarcoma-associated h
gaacauugaugccuug

SEQ ID NO: 353960 - RNA, 16 nt, Human herpesvirus 8 (Kaposi`s sarcoma-associated h
gaaccaugccagacuu

SEQ ID NO: 353961 - RNA, 15 nt, Human herpesvirus 8 (Kaposi`s sarcoma-associated h
cucuuggcuguuaca

SEQ ID NO: 353962 - RNA, 16 nt, Human herpesvirus 8 (Kaposi`s sarcoma-associated h
cucuuggcuguuacaa

SEQ ID NO: 353963 - RNA, 14 nt, Human herpesvirus 8 (Kaposi`s sarcoma-associated h
cugaagcaccacau

SEQ ID NO: 353964 - RNA, 19 nt, Human herpesvirus 8 (Kaposi`s sarcoma-associated h
cugaagcaccacauacaga

SEQ ID NO: 353965 - RNA, 16 nt, Human herpesvirus 8 (Kaposi`s sarcoma-associated h
cugacagacaacacua

SEQ ID NO: 353966 - RNA, 23 nt, Human herpesvirus 8 (Kaposi`s sarcoma-associated h
cugaccauguucaggugguaaua

SEQ ID NO: 353967 - RNA, 21 nt, Human herpesvirus 8 (Kaposi`s sarcoma-associated h
cugacgccggcgacaaugaau

SEQ ID NO: 353968 - RNA, 22 nt, Human herpesvirus 8 (Kaposi`s sarcoma-associated h
cugacgguggggaaaacgaagu

SEQ ID NO: 353969 - RNA, 21 nt, Human herpesvirus 8 (Kaposi`s sarcoma-associated h
cugaggaggauggguggaauu

SEQ ID NO: 353970 - RNA, 23 nt, Human herpesvirus 8 (Kaposi`s sarcoma-associated h
cugagugcggcggccgcuaagaa

SEQ ID NO: 353971 - RNA, 12 nt, Human herpesvirus 8 (Kaposi`s sarcoma-associated h
cugauucuuaga

SEQ ID NO: 353972 - RNA, 12 nt, Human herpesvirus 8 (Kaposi`s sarcoma-associated h
cugcaaugcaag

SEQ ID NO: 353973 - RNA, 23 nt, Human herpesvirus 8 (Kaposi`s sarcoma-associated h
cugccaaaugcccagaaugaagg

SEQ ID NO: 353974 - RNA, 19 nt, Human herpesvirus 8 (Kaposi`s sarcoma-associated h
cugccgaagucagugccac

SEQ ID NO: 353975 - RNA, 22 nt, Human herpesvirus 8 (Kaposi`s sarcoma-associated h
cugcgcagaacaguacccacga

SEQ ID NO: 353976 - RNA, 18 nt, Human herpesvirus 8 (Kaposi`s sarcoma-associated h
cugcgcgucagcaguguu

SEQ ID NO: 353977 - RNA, 15 nt, Human herpesvirus 8 (Kaposi`s sarcoma-associated h
cugcgucuacugcug

SEQ ID NO: 353978 - RNA, 20 nt, Human herpesvirus 8 (Kaposi`s sarcoma-associated h
cugcguguucccggcgcgaa

SEQ ID NO: 353979 - RNA, 22 nt, Human herpesvirus 8 (Kaposi`s sarcoma-associated h
cugcucaucgcgaccgcugcca

SEQ ID NO: 353980 - RNA, 17 nt, Human herpesvirus 8 (Kaposi`s sarcoma-associated h
cugcugucuaucuuuac

SEQ ID NO: 353981 - RNA, 12 nt, Human herpesvirus 8 (Kaposi`s sarcoma-associated h
cugcuucacuua

SEQ ID NO: 353982 - RNA, 14 nt, Human herpesvirus 8 (Kaposi`s sarcoma-associated h
cugcuuuugcgcag

SEQ ID NO: 353983 - RNA, 15 nt, Human herpesvirus 8 (Kaposi`s sarcoma-associated h
cuggaagacgagcaa

SEQ ID NO: 353984 - RNA, 17 nt, Human herpesvirus 8 (Kaposi`s sarcoma-associated h
cuggaagacgagcaauu

SEQ ID NO: 353985 - RNA, 17 nt, Human herpesvirus 8 (Kaposi`s sarcoma-associated h
cuggacgauguacuuga

SEQ ID NO: 353986 - RNA, 23 nt, Human herpesvirus 8 (Kaposi`s sarcoma-associated h
cuggagcagcgccaguggaucuc

SEQ ID NO: 353987 - RNA, 15 nt, Human herpesvirus 8 (Kaposi`s sarcoma-associated h
cuggauacacccaca

SEQ ID NO: 353988 - RNA, 12 nt, Human herpesvirus 8 (Kaposi`s sarcoma-associated h
cuggcagggugg

SEQ ID NO: 353989 - RNA, 12 nt, Human herpesvirus 8 (Kaposi`s sarcoma-associated h
cuggcccccggg

SEQ ID NO: 353990 - RNA, 15 nt, Human herpesvirus 8 (Kaposi`s sarcoma-associated h
cuggccugugcccaa

SEQ ID NO: 353991 - RNA, 24 nt, Human herpesvirus 8 (Kaposi`s sarcoma-associated h
cuggcgcgacaaauaauagaucuc

SEQ ID NO: 353992 - RNA, 13 nt, Human herpesvirus 8 (Kaposi`s sarcoma-associated h
cuggcguguaaac

SEQ ID NO: 353993 - RNA, 20 nt, Human herpesvirus 8 (Kaposi`s sarcoma-associated h
cuggcucagacaccgucgcc

SEQ ID NO: 353994 - RNA, 20 nt, Human herpesvirus 8 (Kaposi`s sarcoma-associated h
cuggcugcaaagcuuaacca

SEQ ID NO: 353995 - RNA, 15 nt, Human herpesvirus 8 (Kaposi`s sarcoma-associated h
cugggacagucuaaa

SEQ ID NO: 353996 - RNA, 18 nt, Human herpesvirus 8 (Kaposi`s sarcoma-associated h
cugggacuugauaaucuc

SEQ ID NO: 353997 - RNA, 20 nt, Human herpesvirus 8 (Kaposi`s sarcoma-associated h
cugggauagaguccaaaaca

SEQ ID NO: 353998 - RNA, 20 nt, Human herpesvirus 8 (Kaposi`s sarcoma-associated h
cugggaucccuucacagugc

SEQ ID NO: 353999 - RNA, 17 nt, Human herpesvirus 8 (Kaposi`s sarcoma-associated h
cugggccacaaaacugc

SEQ ID NO: 354000 - RNA, 19 nt, Human herpesvirus 8 (Kaposi`s sarcoma-associated h
cugggccacaaaacugcca

SEQ ID NO: 354001 - RNA, 20 nt, Human herpesvirus 8 (Kaposi`s sarcoma-associated h
cugggccacaaaacugccaa

SEQ ID NO: 354002 - RNA, 15 nt, Human herpesvirus 8 (Kaposi`s sarcoma-associated h
cuggguagcuaugcc

SEQ ID NO: 354003 - RNA, 18 nt, Human herpesvirus 8 (Kaposi`s sarcoma-associated h
cugggucguggcgccuuu

SEQ ID NO: 354004 - RNA, 14 nt, Human herpesvirus 8 (Kaposi`s sarcoma-associated h
cuggguguuaugca

SEQ ID NO: 354005 - RNA, 16 nt, Human herpesvirus 8 (Kaposi`s sarcoma-associated h
cuggugcgaauggcca

SEQ ID NO: 354006 - RNA, 22 nt, Human herpesvirus 8 (Kaposi`s sarcoma-associated h
cugguguaucagaacaguggug

SEQ ID NO: 354007 - RNA, 22 nt, Human herpesvirus 8 (Kaposi`s sarcoma-associated h
cugguguuguguuuaaggugcg

SEQ ID NO: 354008 - RNA, 15 nt, Human herpesvirus 8 (Kaposi`s sarcoma-associated h
cugguucuaaucuua

SEQ ID NO: 354009 - RNA, 17 nt, Human herpesvirus 8 (Kaposi`s sarcoma-associated h
cuguaaugguguguuua

SEQ ID NO: 354010 - RNA, 14 nt, Human herpesvirus 8 (Kaposi`s sarcoma-associated h
cuguagagucauuu

SEQ ID NO: 354011 - RNA, 23 nt, Human herpesvirus 8 (Kaposi`s sarcoma-associated h
cugucaaccgucuccgccaggga

SEQ ID NO: 354012 - RNA, 16 nt, Human herpesvirus 8 (Kaposi`s sarcoma-associated h
cugucagauuucucua

SEQ ID NO: 354013 - RNA, 16 nt, Human herpesvirus 8 (Kaposi`s sarcoma-associated h
cuguccaugucgcaca

SEQ ID NO: 354014 - RNA, 15 nt, Human herpesvirus 8 (Kaposi`s sarcoma-associated h
cugucccgugcccag

SEQ ID NO: 354015 - RNA, 17 nt, Human herpesvirus 8 (Kaposi`s sarcoma-associated h
cuguccucgcccaacuu

SEQ ID NO: 354016 - RNA, 16 nt, Human herpesvirus 8 (Kaposi`s sarcoma-associated h
cugucgagacauguca

SEQ ID NO: 354017 - RNA, 17 nt, Human herpesvirus 8 (Kaposi`s sarcoma-associated h
cugucgccccaggauca

SEQ ID NO: 354018 - RNA, 20 nt, Human herpesvirus 8 (Kaposi`s sarcoma-associated h
cugucuccagaagagcauuu

SEQ ID NO: 354019 - RNA, 21 nt, Human herpesvirus 8 (Kaposi`s sarcoma-associated h
cugucuucuuaguuacgcaga

SEQ ID NO: 354020 - RNA, 15 nt, Human herpesvirus 8 (Kaposi`s sarcoma-associated h
cugugaaguuuacau

SEQ ID NO: 354021 - RNA, 20 nt, Human herpesvirus 8 (Kaposi`s sarcoma-associated h
cuguggauuuuauggacauu

SEQ ID NO: 354022 - RNA, 21 nt, Human herpesvirus 8 (Kaposi`s sarcoma-associated h
cugugguguuuuaucuucaag

SEQ ID NO: 354023 - RNA, 18 nt, Human herpesvirus 8 (Kaposi`s sarcoma-associated h
cuguguacaaaccaaauu

SEQ ID NO: 354024 - RNA, 19 nt, Human herpesvirus 8 (Kaposi`s sarcoma-associated h
cuguguuuuguaaacugau

SEQ ID NO: 354025 - RNA, 12 nt, Human herpesvirus 8 (Kaposi`s sarcoma-associated h
cuguuacaauaa

SEQ ID NO: 354026 - RNA, 19 nt, Human herpesvirus 8 (Kaposi`s sarcoma-associated h
cuguucgcaaaugaacgca

SEQ ID NO: 354027 - RNA, 17 nt, Human herpesvirus 8 (Kaposi`s sarcoma-associated h
cuguugaaugugaucac

SEQ ID NO: 354028 - RNA, 14 nt, Human herpesvirus 8 (Kaposi`s sarcoma-associated h
cuguugacuuucaa

SEQ ID NO: 354029 - RNA, 18 nt, Human herpesvirus 8 (Kaposi`s sarcoma-associated h
cuguuguggaaagcuccu

SEQ ID NO: 354030 - RNA, 14 nt, Human herpesvirus 8 (Kaposi`s sarcoma-associated h
cuguuuacugcugu

SEQ ID NO: 354031 - RNA, 15 nt, Human herpesvirus 8 (Kaposi`s sarcoma-associated h
cuguuuccagugacc

SEQ ID NO: 354032 - RNA, 21 nt, Human herpesvirus 8 (Kaposi`s sarcoma-associated h
cuguuuccagugacccuaguc

SEQ ID NO: 354033 - RNA, 21 nt, Human herpesvirus 8 (Kaposi`s sarcoma-associated h
cuguuuucccacgaugggaac

SEQ ID NO: 354034 - RNA, 12 nt, Human herpesvirus 8 (Kaposi`s sarcoma-associated h
cuuaaacacaac

SEQ ID NO: 354035 - RNA, 21 nt, Human herpesvirus 8 (Kaposi`s sarcoma-associated h
cuuaacacuucccaauaacaa

SEQ ID NO: 354036 - RNA, 16 nt, Human herpesvirus 8 (Kaposi`s sarcoma-associated h
cuuaacuaaacauuac

SEQ ID NO: 354037 - RNA, 21 nt, Human herpesvirus 8 (Kaposi`s sarcoma-associated h
cuuaacuaaacauuaccaaua

SEQ ID NO: 354038 - RNA, 14 nt, Human herpesvirus 8 (Kaposi`s sarcoma-associated h
cuuaauccuuacuu

SEQ ID NO: 354039 - RNA, 15 nt, Human herpesvirus 8 (Kaposi`s sarcoma-associated h
ccugacucauuucau

SEQ ID NO: 354040 - RNA, 16 nt, Human herpesvirus 8 (Kaposi`s sarcoma-associated h
ccugacucauuucauu

SEQ ID NO: 354041 - RNA, 18 nt, Human herpesvirus 8 (Kaposi`s sarcoma-associated h
ccugauacgccacggugg

SEQ ID NO: 354042 - RNA, 17 nt, Human herpesvirus 8 (Kaposi`s sarcoma-associated h
ccugauuagcacuguau

SEQ ID NO: 354043 - RNA, 14 nt, Human herpesvirus 8 (Kaposi`s sarcoma-associated h
ccugcaaugcaagg

SEQ ID NO: 354044 - RNA, 20 nt, Human herpesvirus 8 (Kaposi`s sarcoma-associated h
ccugcacuccaagccagucg

SEQ ID NO: 354045 - RNA, 16 nt, Human herpesvirus 8 (Kaposi`s sarcoma-associated h
ccugcauuuggacaca

SEQ ID NO: 354046 - RNA, 18 nt, Human herpesvirus 8 (Kaposi`s sarcoma-associated h
ccugccucuguuuuccca

SEQ ID NO: 354047 - RNA, 18 nt, Human herpesvirus 8 (Kaposi`s sarcoma-associated h
ccugcggucccagggugc

SEQ ID NO: 354048 - RNA, 16 nt, Human herpesvirus 8 (Kaposi`s sarcoma-associated h
ccugcugucuaucuuu

SEQ ID NO: 354049 - RNA, 22 nt, Human herpesvirus 8 (Kaposi`s sarcoma-associated h
ccugcuuacaaugugucugugg

SEQ ID NO: 354050 - RNA, 19 nt, Human herpesvirus 8 (Kaposi`s sarcoma-associated h
ccuggagaagggugggugg

SEQ ID NO: 354051 - RNA, 20 nt, Human herpesvirus 8 (Kaposi`s sarcoma-associated h
ccuggaucagggaaauaugu

SEQ ID NO: 354052 - RNA, 22 nt, Human herpesvirus 8 (Kaposi`s sarcoma-associated h
ccuggauggguuaacaguggau

SEQ ID NO: 354053 - RNA, 23 nt, Human herpesvirus 8 (Kaposi`s sarcoma-associated h
ccuggauggguuaacaguggaug

SEQ ID NO: 354054 - RNA, 13 nt, Human herpesvirus 8 (Kaposi`s sarcoma-associated h
ccuguacaugaac

SEQ ID NO: 354055 - RNA, 21 nt, Human herpesvirus 8 (Kaposi`s sarcoma-associated h
ccuguacaugaaccagaauca

SEQ ID NO: 354056 - RNA, 12 nt, Human herpesvirus 8 (Kaposi`s sarcoma-associated h
ccugugcccaaa

SEQ ID NO: 354057 - RNA, 17 nt, Human herpesvirus 8 (Kaposi`s sarcoma-associated h
ccugugcccaaaucugu

SEQ ID NO: 354058 - RNA, 16 nt, Human herpesvirus 8 (Kaposi`s sarcoma-associated h
ccuguguggaagaugu

SEQ ID NO: 354059 - RNA, 17 nt, Human herpesvirus 8 (Kaposi`s sarcoma-associated h
ccuguuagcacauucuc

SEQ ID NO: 354060 - RNA, 18 nt, Human herpesvirus 8 (Kaposi`s sarcoma-associated h
ccuuagaccuacaucucc

SEQ ID NO: 354061 - RNA, 14 nt, Human herpesvirus 8 (Kaposi`s sarcoma-associated h
ccuucgucaugcac

SEQ ID NO: 354062 - RNA, 20 nt, Human herpesvirus 8 (Kaposi`s sarcoma-associated h
ccuucuucugguaagcaccu

SEQ ID NO: 354063 - RNA, 14 nt, Human herpesvirus 8 (Kaposi`s sarcoma-associated h
ccuugagugucuag

SEQ ID NO: 354064 - RNA, 16 nt, Human herpesvirus 8 (Kaposi`s sarcoma-associated h
ccuugcugucuuugua

SEQ ID NO: 354065 - RNA, 19 nt, Human herpesvirus 8 (Kaposi`s sarcoma-associated h
ccuuggaagauauguugug

SEQ ID NO: 354066 - RNA, 19 nt, Human herpesvirus 8 (Kaposi`s sarcoma-associated h
ccuugucacaaauuuuaac

SEQ ID NO: 354067 - RNA, 21 nt, Human herpesvirus 8 (Kaposi`s sarcoma-associated h
cgaaaguugaagauaucacug

SEQ ID NO: 354068 - RNA, 18 nt, Human herpesvirus 8 (Kaposi`s sarcoma-associated h
cgaacagaagacccagaa

SEQ ID NO: 354069 - RNA, 21 nt, Human herpesvirus 8 (Kaposi`s sarcoma-associated h
cgaacagaagacccagaaaau

SEQ ID NO: 354070 - RNA, 23 nt, Human herpesvirus 8 (Kaposi`s sarcoma-associated h
cgaacuaacggguaacugcaugc

SEQ ID NO: 354071 - RNA, 13 nt, Human herpesvirus 8 (Kaposi`s sarcoma-associated h
cgaacuugcucuu

SEQ ID NO: 354072 - RNA, 15 nt, Human herpesvirus 8 (Kaposi`s sarcoma-associated h
cgaauaaaacaggaa

SEQ ID NO: 354073 - RNA, 17 nt, Human herpesvirus 8 (Kaposi`s sarcoma-associated h
cgaaugcguucuccugc

SEQ ID NO: 354074 - RNA, 22 nt, Human herpesvirus 8 (Kaposi`s sarcoma-associated h
cgaaugcucaggucugucacua

SEQ ID NO: 354075 - RNA, 12 nt, Human herpesvirus 8 (Kaposi`s sarcoma-associated h
cgacaugugcuu

SEQ ID NO: 354076 - RNA, 22 nt, Human herpesvirus 8 (Kaposi`s sarcoma-associated h
cgaccauuggcggguagaauca

SEQ ID NO: 354077 - RNA, 14 nt, Human herpesvirus 8 (Kaposi`s sarcoma-associated h
cgaccgcugccaau

SEQ ID NO: 354078 - RNA, 23 nt, Human herpesvirus 8 (Kaposi`s sarcoma-associated h
cgagaacugucgagacaugucac

SEQ ID NO: 354079 - RNA, 19 nt, Human herpesvirus 8 (Kaposi`s sarcoma-associated h
cgagccacaucgucaucuc

SEQ ID NO: 354080 - RNA, 18 nt, Human herpesvirus 8 (Kaposi`s sarcoma-associated h
cgagguucucugugaggu

SEQ ID NO: 354081 - RNA, 19 nt, Human herpesvirus 8 (Kaposi`s sarcoma-associated h
cgaguacgacgcaggcguc

SEQ ID NO: 354082 - RNA, 16 nt, Human herpesvirus 8 (Kaposi`s sarcoma-associated h
cgaguguacacagcca

SEQ ID NO: 354083 - RNA, 15 nt, Human herpesvirus 8 (Kaposi`s sarcoma-associated h
cgauaugcaccucca

SEQ ID NO: 354084 - RNA, 16 nt, Human herpesvirus 8 (Kaposi`s sarcoma-associated h
cgauaugcaccuccaa

SEQ ID NO: 354085 - RNA, 17 nt, Human herpesvirus 8 (Kaposi`s sarcoma-associated h
cgaugcucgagaacugu

SEQ ID NO: 354086 - RNA, 20 nt, Human herpesvirus 8 (Kaposi`s sarcoma-associated h
cgauguacuugaacagggca

SEQ ID NO: 354087 - RNA, 21 nt, Human herpesvirus 8 (Kaposi`s sarcoma-associated h
cgauuaaaaaccacucacuga

SEQ ID NO: 354088 - RNA, 12 nt, Human herpesvirus 8 (Kaposi`s sarcoma-associated h
cgauugcucaag

SEQ ID NO: 354089 - RNA, 13 nt, Human herpesvirus 8 (Kaposi`s sarcoma-associated h
cgauuucacuguc

SEQ ID NO: 354090 - RNA, 21 nt, Human herpesvirus 8 (Kaposi`s sarcoma-associated h
cgcaacggcgguguaucaggc

SEQ ID NO: 354091 - RNA, 22 nt, Human herpesvirus 8 (Kaposi`s sarcoma-associated h
cgcagcuuaccgcuacuguggg

SEQ ID NO: 354092 - RNA, 19 nt, Human herpesvirus 8 (Kaposi`s sarcoma-associated h
cgcagcuuuccugugauuu

SEQ ID NO: 354093 - RNA, 18 nt, Human herpesvirus 8 (Kaposi`s sarcoma-associated h
cgcaggagucagagcagu

SEQ ID NO: 354094 - RNA, 14 nt, Human herpesvirus 8 (Kaposi`s sarcoma-associated h
cgcauggcuuacaa

SEQ ID NO: 354095 - RNA, 20 nt, Human herpesvirus 8 (Kaposi`s sarcoma-associated h
cgcauuaaaaaagaagaaaa

SEQ ID NO: 354096 - RNA, 14 nt, Human herpesvirus 8 (Kaposi`s sarcoma-associated h
cgcauuaaagcacu

SEQ ID NO: 354097 - RNA, 21 nt, Human herpesvirus 8 (Kaposi`s sarcoma-associated h
cgccaccacuauccaugucuu

SEQ ID NO: 354098 - RNA, 18 nt, Human herpesvirus 8 (Kaposi`s sarcoma-associated h
cgccauuuuuguggcugc

SEQ ID NO: 354099 - RNA, 21 nt, Human herpesvirus 8 (Kaposi`s sarcoma-associated h
cgccccucuuggcuguuacaa

SEQ ID NO: 354100 - RNA, 23 nt, Human herpesvirus 8 (Kaposi`s sarcoma-associated h
cgccucgagggcggccaguauua

SEQ ID NO: 354101 - RNA, 18 nt, Human herpesvirus 8 (Kaposi`s sarcoma-associated h
cgcgaaaugguagagggg

SEQ ID NO: 354102 - RNA, 16 nt, Human herpesvirus 8 (Kaposi`s sarcoma-associated h
cgcgaccgcugccaau

SEQ ID NO: 354103 - RNA, 14 nt, Human herpesvirus 8 (Kaposi`s sarcoma-associated h
cgcgacggaucucu

SEQ ID NO: 354104 - RNA, 20 nt, Human herpesvirus 8 (Kaposi`s sarcoma-associated h
cgcgcagcuuuccugugauu

SEQ ID NO: 354105 - RNA, 21 nt, Human herpesvirus 8 (Kaposi`s sarcoma-associated h
cgcgcucugucgcucuucagu

SEQ ID NO: 354106 - RNA, 14 nt, Human herpesvirus 8 (Kaposi`s sarcoma-associated h
cgcggugaaacaga

SEQ ID NO: 354107 - RNA, 20 nt, Human herpesvirus 8 (Kaposi`s sarcoma-associated h
cgcguaugggaacacaauac

SEQ ID NO: 354108 - RNA, 17 nt, Human herpesvirus 8 (Kaposi`s sarcoma-associated h
cgcuacugcuuguucag

SEQ ID NO: 354109 - RNA, 22 nt, Human herpesvirus 8 (Kaposi`s sarcoma-associated h
cgcuacugugggugcacugagu

SEQ ID NO: 354110 - RNA, 16 nt, Human herpesvirus 8 (Kaposi`s sarcoma-associated h
cgcucgccacucuaua

SEQ ID NO: 354111 - RNA, 23 nt, Human herpesvirus 8 (Kaposi`s sarcoma-associated h
cgcucgcgcgguuucugaucccu

SEQ ID NO: 354112 - RNA, 20 nt, Human herpesvirus 8 (Kaposi`s sarcoma-associated h
cgcugcuauuuuucaucuga

SEQ ID NO: 354113 - RNA, 21 nt, Human herpesvirus 8 (Kaposi`s sarcoma-associated h
cgcugcuauuuuucaucugaa

SEQ ID NO: 354114 - RNA, 22 nt, Human herpesvirus 8 (Kaposi`s sarcoma-associated h
cggaagauugguguccagacag

SEQ ID NO: 354115 - RNA, 22 nt, Human herpesvirus 8 (Kaposi`s sarcoma-associated h
cggaauguaagcugcugguuca

SEQ ID NO: 354116 - RNA, 19 nt, Human herpesvirus 8 (Kaposi`s sarcoma-associated h
cggagacuaucagguagca

SEQ ID NO: 354117 - RNA, 14 nt, Human herpesvirus 8 (Kaposi`s sarcoma-associated h
cggaguagugcaag

SEQ ID NO: 354118 - RNA, 20 nt, Human herpesvirus 8 (Kaposi`s sarcoma-associated h
cggaguagugcaagugcacg

SEQ ID NO: 354119 - RNA, 14 nt, Human herpesvirus 8 (Kaposi`s sarcoma-associated h
cggaugcgggcgau

SEQ ID NO: 354120 - RNA, 19 nt, Human herpesvirus 8 (Kaposi`s sarcoma-associated h
cggaugcgggcgauuacag

SEQ ID NO: 354121 - RNA, 22 nt, Human herpesvirus 8 (Kaposi`s sarcoma-associated h
cggauguaaucuuguaguccaa

SEQ ID NO: 354122 - RNA, 15 nt, Human herpesvirus 8 (Kaposi`s sarcoma-associated h
cggauuuugauaugu

SEQ ID NO: 354123 - RNA, 13 nt, Human herpesvirus 8 (Kaposi`s sarcoma-associated h
cggcacauugugu

SEQ ID NO: 354124 - RNA, 18 nt, Human herpesvirus 8 (Kaposi`s sarcoma-associated h
cggcggaccaucccccca

SEQ ID NO: 354125 - RNA, 14 nt, Human herpesvirus 8 (Kaposi`s sarcoma-associated h
cggcggugcaugug

SEQ ID NO: 354126 - RNA, 17 nt, Human herpesvirus 8 (Kaposi`s sarcoma-associated h
cggcguuuccauaugag

SEQ ID NO: 354127 - RNA, 17 nt, Human herpesvirus 8 (Kaposi`s sarcoma-associated h
cggcucacuucccccca

SEQ ID NO: 354128 - RNA, 11 nt, Human herpesvirus 8 (Kaposi`s sarcoma-associated h
cggcuccgucc

SEQ ID NO: 354129 - RNA, 21 nt, Human herpesvirus 8 (Kaposi`s sarcoma-associated h
cgggaaacaggugucuaucuu

SEQ ID NO: 354130 - RNA, 23 nt, Human herpesvirus 8 (Kaposi`s sarcoma-associated h
cgggauuuaaaaccgcccacuga

SEQ ID NO: 354131 - RNA, 19 nt, Human herpesvirus 8 (Kaposi`s sarcoma-associated h
cgggcaaccauuuuuuacg

SEQ ID NO: 354132 - RNA, 19 nt, Human herpesvirus 8 (Kaposi`s sarcoma-associated h
cggggaagucaugcucauc

SEQ ID NO: 354133 - RNA, 21 nt, Human herpesvirus 8 (Kaposi`s sarcoma-associated h
cggggggugggggauccacuc

SEQ ID NO: 354134 - RNA, 22 nt, Human herpesvirus 8 (Kaposi`s sarcoma-associated h
cgguaaacauuguuuauuucaa

SEQ ID NO: 354135 - RNA, 18 nt, Human herpesvirus 8 (Kaposi`s sarcoma-associated h
cggucccguugucccuca

SEQ ID NO: 354136 - RNA, 16 nt, Human herpesvirus 8 (Kaposi`s sarcoma-associated h
cggucgcaguggaccg

SEQ ID NO: 354137 - RNA, 21 nt, Human herpesvirus 8 (Kaposi`s sarcoma-associated h
cggucuacaggggcuugacag

SEQ ID NO: 354138 - RNA, 21 nt, Human herpesvirus 8 (Kaposi`s sarcoma-associated h
cggucuaugccgaugugucag

SEQ ID NO: 354139 - RNA, 23 nt, Human herpesvirus 8 (Kaposi`s sarcoma-associated h
cggucuuuggggcuacacaucau

SEQ ID NO: 354140 - RNA, 17 nt, Human herpesvirus 8 (Kaposi`s sarcoma-associated h
cggugaacguccccgcg

SEQ ID NO: 354141 - RNA, 14 nt, Human herpesvirus 8 (Kaposi`s sarcoma-associated h
cggugagugucuuc

SEQ ID NO: 354142 - RNA, 19 nt, Human herpesvirus 8 (Kaposi`s sarcoma-associated h
cgguggcaacauacauuuu

SEQ ID NO: 354143 - RNA, 15 nt, Human herpesvirus 8 (Kaposi`s sarcoma-associated h
cgguucccacccaca

SEQ ID NO: 354144 - RNA, 18 nt, Human herpesvirus 8 (Kaposi`s sarcoma-associated h
cgguugcaccaagcacaa

SEQ ID NO: 354145 - RNA, 13 nt, Human herpesvirus 8 (Kaposi`s sarcoma-associated h
cgguugguggugu

SEQ ID NO: 354146 - RNA, 20 nt, Human herpesvirus 8 (Kaposi`s sarcoma-associated h
cgguuguuuacgcagggugc

SEQ ID NO: 354147 - RNA, 14 nt, Human herpesvirus 8 (Kaposi`s sarcoma-associated h
cguaagccagugug

SEQ ID NO: 354148 - RNA, 13 nt, Human herpesvirus 8 (Kaposi`s sarcoma-associated h
cguacauggagcg

SEQ ID NO: 354149 - RNA, 16 nt, Human herpesvirus 8 (Kaposi`s sarcoma-associated h
cguaccggcaucugca

SEQ ID NO: 354150 - RNA, 16 nt, Human herpesvirus 8 (Kaposi`s sarcoma-associated h
cguaggccaauacugc

SEQ ID NO: 354151 - RNA, 20 nt, Human herpesvirus 8 (Kaposi`s sarcoma-associated h
cguaggccaauacugcccaa

SEQ ID NO: 354152 - RNA, 15 nt, Human herpesvirus 8 (Kaposi`s sarcoma-associated h
cgucaccgacaccau

SEQ ID NO: 354153 - RNA, 16 nt, Human herpesvirus 8 (Kaposi`s sarcoma-associated h
cgucaccgacaccauc

SEQ ID NO: 354154 - RNA, 20 nt, Human herpesvirus 8 (Kaposi`s sarcoma-associated h
cgucagcagcaagcacagaa

SEQ ID NO: 354155 - RNA, 12 nt, Human herpesvirus 8 (Kaposi`s sarcoma-associated h
cgucagcagugu

SEQ ID NO: 354156 - RNA, 14 nt, Human herpesvirus 8 (Kaposi`s sarcoma-associated h
cgucaucugauauu

SEQ ID NO: 354157 - RNA, 21 nt, Human herpesvirus 8 (Kaposi`s sarcoma-associated h
cgucccucuuggcuguuacaa

SEQ ID NO: 354158 - RNA, 17 nt, Human herpesvirus 8 (Kaposi`s sarcoma-associated h
cgucuacaacagacuuu

SEQ ID NO: 354159 - RNA, 12 nt, Human herpesvirus 8 (Kaposi`s sarcoma-associated h
cgucuacugcug

SEQ ID NO: 354160 - RNA, 14 nt, Human herpesvirus 8 (Kaposi`s sarcoma-associated h
cgucugugucacuc

SEQ ID NO: 354161 - RNA, 11 nt, Human herpesvirus 8 (Kaposi`s sarcoma-associated h
cgucuuuauga

SEQ ID NO: 354162 - RNA, 15 nt, Human herpesvirus 8 (Kaposi`s sarcoma-associated h
cgugagguuguauga

SEQ ID NO: 354163 - RNA, 15 nt, Human herpesvirus 8 (Kaposi`s sarcoma-associated h
cgugcagccuugcau

SEQ ID NO: 354164 - RNA, 23 nt, Human herpesvirus 8 (Kaposi`s sarcoma-associated h
cgugcaggucgcagagaccucuu

SEQ ID NO: 354165 - RNA, 12 nt, Human herpesvirus 8 (Kaposi`s sarcoma-associated h
cguggaguugcc

SEQ ID NO: 354166 - RNA, 15 nt, Human herpesvirus 8 (Kaposi`s sarcoma-associated h
cguggcggaaggugg

SEQ ID NO: 354167 - RNA, 13 nt, Human herpesvirus 8 (Kaposi`s sarcoma-associated h
cguguaacccugc

SEQ ID NO: 354168 - RNA, 18 nt, Human herpesvirus 8 (Kaposi`s sarcoma-associated h
cguguaacccugccaaau

SEQ ID NO: 354169 - RNA, 23 nt, Human herpesvirus 8 (Kaposi`s sarcoma-associated h
cguguaugccaauaucuugaaga

SEQ ID NO: 354170 - RNA, 14 nt, Human herpesvirus 8 (Kaposi`s sarcoma-associated h
cguguggcugcaaa

SEQ ID NO: 354171 - RNA, 18 nt, Human herpesvirus 8 (Kaposi`s sarcoma-associated h
cguguuucacgucuugac

SEQ ID NO: 354172 - RNA, 15 nt, Human herpesvirus 8 (Kaposi`s sarcoma-associated h
cguuagcagccaugu

SEQ ID NO: 354173 - RNA, 12 nt, Human herpesvirus 8 (Kaposi`s sarcoma-associated h
cguucccaugag

SEQ ID NO: 354174 - RNA, 19 nt, Human herpesvirus 8 (Kaposi`s sarcoma-associated h
cguucuaaucuggcaugua

SEQ ID NO: 354175 - RNA, 19 nt, Human herpesvirus 8 (Kaposi`s sarcoma-associated h
cguugggagugugcacuag

SEQ ID NO: 354176 - RNA, 21 nt, Human herpesvirus 8 (Kaposi`s sarcoma-associated h
cguuugagucuuucuagcaga

SEQ ID NO: 354177 - RNA, 16 nt, Human herpesvirus 8 (Kaposi`s sarcoma-associated h
cuaaaaaaugugcaug

SEQ ID NO: 354178 - RNA, 20 nt, Human herpesvirus 8 (Kaposi`s sarcoma-associated h
cuaaaaccggaguagugcaa

SEQ ID NO: 354179 - RNA, 21 nt, Human herpesvirus 8 (Kaposi`s sarcoma-associated h
cuaaaaucaggagggucaaug

SEQ ID NO: 354180 - RNA, 14 nt, Human herpesvirus 8 (Kaposi`s sarcoma-associated h
cuaaacauuaccaa

SEQ ID NO: 354181 - RNA, 19 nt, Human herpesvirus 8 (Kaposi`s sarcoma-associated h
cuaaaugaauaucauuugc

SEQ ID NO: 354182 - RNA, 13 nt, Human herpesvirus 8 (Kaposi`s sarcoma-associated h
cuaaaugugacaa

SEQ ID NO: 354183 - RNA, 15 nt, Human herpesvirus 8 (Kaposi`s sarcoma-associated h
cuaaccacaacaaua

SEQ ID NO: 354184 - RNA, 15 nt, Human herpesvirus 8 (Kaposi`s sarcoma-associated h
cuaacccacgucaca

SEQ ID NO: 354185 - RNA, 21 nt, Human herpesvirus 8 (Kaposi`s sarcoma-associated h
cuaaccgcaaagauaagccaa

SEQ ID NO: 354186 - RNA, 15 nt, Human herpesvirus 8 (Kaposi`s sarcoma-associated h
cuaagagaacagcac

SEQ ID NO: 354187 - RNA, 19 nt, Human herpesvirus 8 (Kaposi`s sarcoma-associated h
cuaagcgggacgcacuuga

SEQ ID NO: 354188 - RNA, 23 nt, Human herpesvirus 8 (Kaposi`s sarcoma-associated h
cuaagggucugcagaugaucccg

SEQ ID NO: 354189 - RNA, 13 nt, Human herpesvirus 8 (Kaposi`s sarcoma-associated h
cuaauaaaacuaa

SEQ ID NO: 354190 - RNA, 16 nt, Human herpesvirus 8 (Kaposi`s sarcoma-associated h
cuaauaaacaagcuac

SEQ ID NO: 354191 - RNA, 16 nt, Human herpesvirus 8 (Kaposi`s sarcoma-associated h
cuaauacauaacacac

SEQ ID NO: 354192 - RNA, 21 nt, Human herpesvirus 8 (Kaposi`s sarcoma-associated h
cuaauacauaacacacacaaa

SEQ ID NO: 354193 - RNA, 15 nt, Human herpesvirus 8 (Kaposi`s sarcoma-associated h
cuaauauuaaccaua

SEQ ID NO: 354194 - RNA, 16 nt, Human herpesvirus 8 (Kaposi`s sarcoma-associated h
cuaaucgaguaccccu

SEQ ID NO: 354195 - RNA, 20 nt, Human herpesvirus 8 (Kaposi`s sarcoma-associated h
cuacaaauguuuuaugcaaa

SEQ ID NO: 354196 - RNA, 16 nt, Human herpesvirus 8 (Kaposi`s sarcoma-associated h
cuacaccguauuguua

SEQ ID NO: 354197 - RNA, 17 nt, Human herpesvirus 8 (Kaposi`s sarcoma-associated h
cuacaggggcuugacag

SEQ ID NO: 354198 - RNA, 19 nt, Human herpesvirus 8 (Kaposi`s sarcoma-associated h
cuacccugauuagcacugu

SEQ ID NO: 354199 - RNA, 20 nt, Human herpesvirus 8 (Kaposi`s sarcoma-associated h
cuacccugauuagcacugua

SEQ ID NO: 354200 - RNA, 22 nt, Human herpesvirus 8 (Kaposi`s sarcoma-associated h
cuacccugauuagcacuguauu

SEQ ID NO: 354201 - RNA, 21 nt, Human herpesvirus 8 (Kaposi`s sarcoma-associated h
cuaccugcaaacuauacacaa

SEQ ID NO: 354202 - RNA, 18 nt, Human herpesvirus 8 (Kaposi`s sarcoma-associated h
cuacugugggugcacuga

SEQ ID NO: 354203 - RNA, 20 nt, Human herpesvirus 8 (Kaposi`s sarcoma-associated h
cuacugugggugcacugagu

SEQ ID NO: 354204 - RNA, 22 nt, Human herpesvirus 8 (Kaposi`s sarcoma-associated h
cuacuucagccgcuugcugaua

SEQ ID NO: 354205 - RNA, 15 nt, Human herpesvirus 8 (Kaposi`s sarcoma-associated h
cuacuuuggacaguu

SEQ ID NO: 354206 - RNA, 22 nt, Human herpesvirus 8 (Kaposi`s sarcoma-associated h
cuagaacuugcuccaguguuag

SEQ ID NO: 354207 - RNA, 17 nt, Human herpesvirus 8 (Kaposi`s sarcoma-associated h
cuagaaugaagugcaac

SEQ ID NO: 354208 - RNA, 23 nt, Human herpesvirus 8 (Kaposi`s sarcoma-associated h
cuagacugcuaggauucgugcag

SEQ ID NO: 354209 - RNA, 17 nt, Human herpesvirus 8 (Kaposi`s sarcoma-associated h
cuagcggucaaccccgu

SEQ ID NO: 354210 - RNA, 22 nt, Human herpesvirus 8 (Kaposi`s sarcoma-associated h
cuagcuguagagucauuuccuu

SEQ ID NO: 354211 - RNA, 21 nt, Human herpesvirus 8 (Kaposi`s sarcoma-associated h
cuaggaccuuucugcugcauc

SEQ ID NO: 354212 - RNA, 19 nt, Human herpesvirus 8 (Kaposi`s sarcoma-associated h
cuaggaggaagagcacugu

SEQ ID NO: 354213 - RNA, 20 nt, Human herpesvirus 8 (Kaposi`s sarcoma-associated h
cuaggaggaagagcacuguu

SEQ ID NO: 354214 - RNA, 23 nt, Human herpesvirus 8 (Kaposi`s sarcoma-associated h
cuaggaggaagagcacuguuaua

SEQ ID NO: 354215 - RNA, 23 nt, Human herpesvirus 8 (Kaposi`s sarcoma-associated h
cuaggaugcacaguauagggaua

SEQ ID NO: 354216 - RNA, 13 nt, Human herpesvirus 8 (Kaposi`s sarcoma-associated h
cuauaaacagccu

SEQ ID NO: 354217 - RNA, 15 nt, Human herpesvirus 8 (Kaposi`s sarcoma-associated h
cuauaauggucugua

SEQ ID NO: 354218 - RNA, 19 nt, Human herpesvirus 8 (Kaposi`s sarcoma-associated h
cuaucagguagcaaaugaa

SEQ ID NO: 354219 - RNA, 15 nt, Human herpesvirus 8 (Kaposi`s sarcoma-associated h
cuauccaagugcaca

SEQ ID NO: 354220 - RNA, 16 nt, Human herpesvirus 8 (Kaposi`s sarcoma-associated h
cuauccacccuaauac

SEQ ID NO: 354221 - RNA, 20 nt, Human herpesvirus 8 (Kaposi`s sarcoma-associated h
cuauccacccuaauacauaa

SEQ ID NO: 354222 - RNA, 23 nt, Human herpesvirus 8 (Kaposi`s sarcoma-associated h
cuauccacccuaauacauaacac

SEQ ID NO: 354223 - RNA, 13 nt, Human herpesvirus 8 (Kaposi`s sarcoma-associated h
cuaucgcacagac

SEQ ID NO: 354224 - RNA, 18 nt, Human herpesvirus 8 (Kaposi`s sarcoma-associated h
cuaucucuggugguggcu

SEQ ID NO: 354225 - RNA, 17 nt, Human herpesvirus 8 (Kaposi`s sarcoma-associated h
cuaucugguugacaccc

SEQ ID NO: 354226 - RNA, 16 nt, Human herpesvirus 8 (Kaposi`s sarcoma-associated h
cuauggcgcaagcacu

SEQ ID NO: 354227 - RNA, 17 nt, Human herpesvirus 8 (Kaposi`s sarcoma-associated h
cuauggggucagggugg

SEQ ID NO: 354228 - RNA, 17 nt, Human herpesvirus 8 (Kaposi`s sarcoma-associated h
cuauggucauagccaga

SEQ ID NO: 354229 - RNA, 13 nt, Human herpesvirus 8 (Kaposi`s sarcoma-associated h
cuauuauaacauu

SEQ ID NO: 354230 - RNA, 17 nt, Human herpesvirus 8 (Kaposi`s sarcoma-associated h
cuauugcaacugaccau

SEQ ID NO: 354231 - RNA, 16 nt, Human herpesvirus 8 (Kaposi`s sarcoma-associated h
cucaacccacacuggc

SEQ ID NO: 354232 - RNA, 12 nt, Human herpesvirus 8 (Kaposi`s sarcoma-associated h
cucacacccuga

SEQ ID NO: 354233 - RNA, 20 nt, Human herpesvirus 8 (Kaposi`s sarcoma-associated h
cucacugggggucucgggaa

SEQ ID NO: 354234 - RNA, 19 nt, Human herpesvirus 8 (Kaposi`s sarcoma-associated h
cucagcugccaaggcaagg

SEQ ID NO: 354235 - RNA, 16 nt, Human herpesvirus 8 (Kaposi`s sarcoma-associated h
cucagggagcacguga

SEQ ID NO: 354236 - RNA, 15 nt, Human herpesvirus 8 (Kaposi`s sarcoma-associated h
cucaggucugucacu

SEQ ID NO: 354237 - RNA, 18 nt, Human herpesvirus 8 (Kaposi`s sarcoma-associated h
cucaggucugucacuaga

SEQ ID NO: 354238 - RNA, 20 nt, Human herpesvirus 8 (Kaposi`s sarcoma-associated h
cucagugugcuguccagcgu

SEQ ID NO: 354239 - RNA, 23 nt, Human herpesvirus 8 (Kaposi`s sarcoma-associated h
cucauaaaaccuccaaacacagg

SEQ ID NO: 354240 - RNA, 13 nt, Human herpesvirus 8 (Kaposi`s sarcoma-associated h
cucauaacacagu

SEQ ID NO: 354241 - RNA, 19 nt, Human herpesvirus 8 (Kaposi`s sarcoma-associated h
cucaucucucacacccuga

SEQ ID NO: 354242 - RNA, 21 nt, Human herpesvirus 8 (Kaposi`s sarcoma-associated h
cucaugauuacagagucacaa

SEQ ID NO: 354243 - RNA, 16 nt, Human herpesvirus 8 (Kaposi`s sarcoma-associated h
cuccagaagagcauuu

SEQ ID NO: 354244 - RNA, 16 nt, Human herpesvirus 8 (Kaposi`s sarcoma-associated h
cuccagcaaagcacau

SEQ ID NO: 354245 - RNA, 20 nt, Human herpesvirus 8 (Kaposi`s sarcoma-associated h
cuccauagguagauugacug

SEQ ID NO: 354246 - RNA, 22 nt, Human herpesvirus 8 (Kaposi`s sarcoma-associated h
cuccauucccggucccacauga

SEQ ID NO: 354247 - RNA, 13 nt, Human herpesvirus 8 (Kaposi`s sarcoma-associated h
cucccaacaugua

SEQ ID NO: 354248 - RNA, 14 nt, Human herpesvirus 8 (Kaposi`s sarcoma-associated h
cucccguauuccau

SEQ ID NO: 354249 - RNA, 22 nt, Human herpesvirus 8 (Kaposi`s sarcoma-associated h
cucccguucccaugaugcagag

SEQ ID NO: 354250 - RNA, 11 nt, Human herpesvirus 8 (Kaposi`s sarcoma-associated h
cucccuaauag

SEQ ID NO: 354251 - RNA, 15 nt, Human herpesvirus 8 (Kaposi`s sarcoma-associated h
cucccucccauaaca

SEQ ID NO: 354252 - RNA, 17 nt, Human herpesvirus 8 (Kaposi`s sarcoma-associated h
cucccuuugucuuaccg

SEQ ID NO: 354253 - RNA, 17 nt, Human herpesvirus 8 (Kaposi`s sarcoma-associated h
cuccgcauuaaagcacu

SEQ ID NO: 354254 - RNA, 21 nt, Human herpesvirus 8 (Kaposi`s sarcoma-associated h
cuccgcauuaaagcacucggu

SEQ ID NO: 354255 - RNA, 18 nt, Human herpesvirus 8 (Kaposi`s sarcoma-associated h
cuccucuucggagaucaa

SEQ ID NO: 354256 - RNA, 21 nt, Human herpesvirus 8 (Kaposi`s sarcoma-associated h
cuccuggguagcuaugcccac

SEQ ID NO: 354257 - RNA, 19 nt, Human herpesvirus 8 (Kaposi`s sarcoma-associated h
cuccuguuagcacauucuc

SEQ ID NO: 354258 - RNA, 13 nt, Human herpesvirus 8 (Kaposi`s sarcoma-associated h
cucgccacucuau

SEQ ID NO: 354259 - RNA, 20 nt, Human herpesvirus 8 (Kaposi`s sarcoma-associated h
cucgggccuugggugcgaug

SEQ ID NO: 354260 - RNA, 13 nt, Human herpesvirus 8 (Kaposi`s sarcoma-associated h
cucgugugcccuu

SEQ ID NO: 354261 - RNA, 20 nt, Human herpesvirus 8 (Kaposi`s sarcoma-associated h
cucuaaggcccccaccaaac

SEQ ID NO: 354262 - RNA, 13 nt, Human herpesvirus 8 (Kaposi`s sarcoma-associated h
cucuaauccugaa

SEQ ID NO: 354263 - RNA, 20 nt, Human herpesvirus 8 (Kaposi`s sarcoma-associated h
cucuauaacauaauuguaau

SEQ ID NO: 354264 - RNA, 18 nt, Human herpesvirus 8 (Kaposi`s sarcoma-associated h
cucuccgcauuaaagcac

SEQ ID NO: 354265 - RNA, 18 nt, Human herpesvirus 8 (Kaposi`s sarcoma-associated h
cucugaagcaccacauac

SEQ ID NO: 354266 - RNA, 20 nt, Human herpesvirus 8 (Kaposi`s sarcoma-associated h
cucugacaaccuucagauaa

SEQ ID NO: 354267 - RNA, 18 nt, Human herpesvirus 8 (Kaposi`s sarcoma-associated h
cucugacggccaccgaga

SEQ ID NO: 354268 - RNA, 17 nt, Human herpesvirus 8 (Kaposi`s sarcoma-associated h
cucuggcagcgcaccac

SEQ ID NO: 354269 - RNA, 18 nt, Human herpesvirus 8 (Kaposi`s sarcoma-associated h
cucuggccugugcccaaa

SEQ ID NO: 354270 - RNA, 15 nt, Human herpesvirus 8 (Kaposi`s sarcoma-associated h
cucugucgcucuuca

SEQ ID NO: 354271 - RNA, 13 nt, Human herpesvirus 8 (Kaposi`s sarcoma-associated h
cucugugcccauc

SEQ ID NO: 354272 - RNA, 12 nt, Human herpesvirus 8 (Kaposi`s sarcoma-associated h
cucuucccacac

SEQ ID NO: 354273 - RNA, 18 nt, Human herpesvirus 8 (Kaposi`s sarcoma-associated h
cucuucccacacccggcu

SEQ ID NO: 354274 - RNA, 15 nt, Human herpesvirus 8 (Kaposi`s sarcoma-associated h
ggcuuguacagugag

SEQ ID NO: 354275 - RNA, 23 nt, Human herpesvirus 8 (Kaposi`s sarcoma-associated h
gggaacaauggcgccaccuugcu

SEQ ID NO: 354276 - RNA, 11 nt, Human herpesvirus 8 (Kaposi`s sarcoma-associated h
gggaacggaca

SEQ ID NO: 354277 - RNA, 15 nt, Human herpesvirus 8 (Kaposi`s sarcoma-associated h
gggaagucaugcuca

SEQ ID NO: 354278 - RNA, 16 nt, Human herpesvirus 8 (Kaposi`s sarcoma-associated h
gggaagucaugcucau

SEQ ID NO: 354279 - RNA, 14 nt, Human herpesvirus 8 (Kaposi`s sarcoma-associated h
gggagaaccaugcc

SEQ ID NO: 354280 - RNA, 16 nt, Human herpesvirus 8 (Kaposi`s sarcoma-associated h
gggagaaccaugccag

SEQ ID NO: 354281 - RNA, 19 nt, Human herpesvirus 8 (Kaposi`s sarcoma-associated h
gggagcugucccaccagag

SEQ ID NO: 354282 - RNA, 19 nt, Human herpesvirus 8 (Kaposi`s sarcoma-associated h
gggauggaggaagagggau

SEQ ID NO: 354283 - RNA, 20 nt, Human herpesvirus 8 (Kaposi`s sarcoma-associated h
gggauggguuuauaaugcca

SEQ ID NO: 354284 - RNA, 17 nt, Human herpesvirus 8 (Kaposi`s sarcoma-associated h
gggauuaauaaccauga

SEQ ID NO: 354285 - RNA, 19 nt, Human herpesvirus 8 (Kaposi`s sarcoma-associated h
gggcacggaugacagggaa

SEQ ID NO: 354286 - RNA, 20 nt, Human herpesvirus 8 (Kaposi`s sarcoma-associated h
gggcgagaauggcgugccag

SEQ ID NO: 354287 - RNA, 20 nt, Human herpesvirus 8 (Kaposi`s sarcoma-associated h
gggcgccgaaugcguucucc

SEQ ID NO: 354288 - RNA, 22 nt, Human herpesvirus 8 (Kaposi`s sarcoma-associated h
gggcuucauuaugcaugcaaua

SEQ ID NO: 354289 - RNA, 14 nt, Human herpesvirus 8 (Kaposi`s sarcoma-associated h
gggcuuguacaugu

SEQ ID NO: 354290 - RNA, 23 nt, Human herpesvirus 8 (Kaposi`s sarcoma-associated h
ggggacggcgucaccgacaccau

SEQ ID NO: 354291 - RNA, 13 nt, Human herpesvirus 8 (Kaposi`s sarcoma-associated h
ggggacgugucau

SEQ ID NO: 354292 - RNA, 13 nt, Human herpesvirus 8 (Kaposi`s sarcoma-associated h
ggggauaugggcu

SEQ ID NO: 354293 - RNA, 21 nt, Human herpesvirus 8 (Kaposi`s sarcoma-associated h
ggggcggcuguggcaccaaau

SEQ ID NO: 354294 - RNA, 18 nt, Human herpesvirus 8 (Kaposi`s sarcoma-associated h
ggggcuuaugucauuuuu

SEQ ID NO: 354295 - RNA, 19 nt, Human herpesvirus 8 (Kaposi`s sarcoma-associated h
gggguauggcgucaucuga

SEQ ID NO: 354296 - RNA, 12 nt, Human herpesvirus 8 (Kaposi`s sarcoma-associated h
gggguuccagug

SEQ ID NO: 354297 - RNA, 15 nt, Human herpesvirus 8 (Kaposi`s sarcoma-associated h
gggugcgaugaugaa

SEQ ID NO: 354298 - RNA, 21 nt, Human herpesvirus 8 (Kaposi`s sarcoma-associated h
ggguuaugggugugugccagu

SEQ ID NO: 354299 - RNA, 14 nt, Human herpesvirus 8 (Kaposi`s sarcoma-associated h
ggguugcugauuac

SEQ ID NO: 354300 - RNA, 23 nt, Human herpesvirus 8 (Kaposi`s sarcoma-associated h
gguaacugcaugcucggcaacau

SEQ ID NO: 354301 - RNA, 21 nt, Human herpesvirus 8 (Kaposi`s sarcoma-associated h
gguaaugagguuaguaaagua

SEQ ID NO: 354302 - RNA, 13 nt, Human herpesvirus 8 (Kaposi`s sarcoma-associated h
gguaaugccacau

SEQ ID NO: 354303 - RNA, 12 nt, Human herpesvirus 8 (Kaposi`s sarcoma-associated h
gguaccccaugc

SEQ ID NO: 354304 - RNA, 17 nt, Human herpesvirus 8 (Kaposi`s sarcoma-associated h
gguagagaagagaccac

SEQ ID NO: 354305 - RNA, 16 nt, Human herpesvirus 8 (Kaposi`s sarcoma-associated h
ggucaauacauuguga

SEQ ID NO: 354306 - RNA, 15 nt, Human herpesvirus 8 (Kaposi`s sarcoma-associated h
ggucaccuggcccaa

SEQ ID NO: 354307 - RNA, 22 nt, Human herpesvirus 8 (Kaposi`s sarcoma-associated h
ggucaggacaauauucagcaag

SEQ ID NO: 354308 - RNA, 15 nt, Human herpesvirus 8 (Kaposi`s sarcoma-associated h
ggucuccggugccug

SEQ ID NO: 354309 - RNA, 17 nt, Human herpesvirus 8 (Kaposi`s sarcoma-associated h
ggucuuauaacagugcu

SEQ ID NO: 354310 - RNA, 22 nt, Human herpesvirus 8 (Kaposi`s sarcoma-associated h
ggugacaccuuucagacgucca

SEQ ID NO: 354311 - RNA, 13 nt, Human herpesvirus 8 (Kaposi`s sarcoma-associated h
gguggguggcuug

SEQ ID NO: 354312 - RNA, 13 nt, Human herpesvirus 8 (Kaposi`s sarcoma-associated h
ggugucaaccagg

SEQ ID NO: 354313 - RNA, 17 nt, Human herpesvirus 8 (Kaposi`s sarcoma-associated h
gguguccagacaguuac

SEQ ID NO: 354314 - RNA, 14 nt, Human herpesvirus 8 (Kaposi`s sarcoma-associated h
ggugugugccagua

SEQ ID NO: 354315 - RNA, 23 nt, Human herpesvirus 8 (Kaposi`s sarcoma-associated h
gguuaaccuguccaugucgcaca

SEQ ID NO: 354316 - RNA, 12 nt, Human herpesvirus 8 (Kaposi`s sarcoma-associated h
gguuccacccag

SEQ ID NO: 354317 - RNA, 21 nt, Human herpesvirus 8 (Kaposi`s sarcoma-associated h
gguuccgacaaggaguggcug

SEQ ID NO: 354318 - RNA, 16 nt, Human herpesvirus 8 (Kaposi`s sarcoma-associated h
gguugccgcugcacau

SEQ ID NO: 354319 - RNA, 21 nt, Human herpesvirus 8 (Kaposi`s sarcoma-associated h
gguuucugaucccuaaggguc

SEQ ID NO: 354320 - RNA, 14 nt, Human herpesvirus 8 (Kaposi`s sarcoma-associated h
guaaaacacuguuu

SEQ ID NO: 354321 - RNA, 13 nt, Human herpesvirus 8 (Kaposi`s sarcoma-associated h
guaaaacggccaa

SEQ ID NO: 354322 - RNA, 20 nt, Human herpesvirus 8 (Kaposi`s sarcoma-associated h
guaaaauaaaauacaaaaac

SEQ ID NO: 354323 - RNA, 16 nt, Human herpesvirus 8 (Kaposi`s sarcoma-associated h
guaaauuggccacugc

SEQ ID NO: 354324 - RNA, 18 nt, Human herpesvirus 8 (Kaposi`s sarcoma-associated h
guaaauuggccacugcag

SEQ ID NO: 354325 - RNA, 19 nt, Human herpesvirus 8 (Kaposi`s sarcoma-associated h
guaacgagguuacugccag

SEQ ID NO: 354326 - RNA, 20 nt, Human herpesvirus 8 (Kaposi`s sarcoma-associated h
guaacuguucgcuacugcuu

SEQ ID NO: 354327 - RNA, 20 nt, Human herpesvirus 8 (Kaposi`s sarcoma-associated h
guaagacaaacaugugggcu

SEQ ID NO: 354328 - RNA, 18 nt, Human herpesvirus 8 (Kaposi`s sarcoma-associated h
guaagcaagucgauuuga

SEQ ID NO: 354329 - RNA, 22 nt, Human herpesvirus 8 (Kaposi`s sarcoma-associated h
guaagucguccgacaugugcuu

SEQ ID NO: 354330 - RNA, 14 nt, Human herpesvirus 8 (Kaposi`s sarcoma-associated h
guaauuaacaucca

SEQ ID NO: 354331 - RNA, 12 nt, Human herpesvirus 8 (Kaposi`s sarcoma-associated h
guacacagccaa

SEQ ID NO: 354332 - RNA, 19 nt, Human herpesvirus 8 (Kaposi`s sarcoma-associated h
guacagaaaaccauacugu

SEQ ID NO: 354333 - RNA, 17 nt, Human herpesvirus 8 (Kaposi`s sarcoma-associated h
guacauuaaaaggacau

SEQ ID NO: 354334 - RNA, 21 nt, Human herpesvirus 8 (Kaposi`s sarcoma-associated h
guacauuaaaaggacauugua

SEQ ID NO: 354335 - RNA, 20 nt, Human herpesvirus 8 (Kaposi`s sarcoma-associated h
guaccauggcaaaaaacacu

SEQ ID NO: 354336 - RNA, 17 nt, Human herpesvirus 8 (Kaposi`s sarcoma-associated h
guaccauucgugugguu

SEQ ID NO: 354337 - RNA, 13 nt, Human herpesvirus 8 (Kaposi`s sarcoma-associated h
guaccccaugcau

SEQ ID NO: 354338 - RNA, 16 nt, Human herpesvirus 8 (Kaposi`s sarcoma-associated h
guaccggcaucugcaa

SEQ ID NO: 354339 - RNA, 14 nt, Human herpesvirus 8 (Kaposi`s sarcoma-associated h
guacucguucacac

SEQ ID NO: 354340 - RNA, 19 nt, Human herpesvirus 8 (Kaposi`s sarcoma-associated h
guacugccaugaaaggugg

SEQ ID NO: 354341 - RNA, 19 nt, Human herpesvirus 8 (Kaposi`s sarcoma-associated h
aaaaaaacgaguguacaca

SEQ ID NO: 354342 - RNA, 18 nt, Human herpesvirus 8 (Kaposi`s sarcoma-associated h
aaaaaccacucacugaga

SEQ ID NO: 354343 - RNA, 21 nt, Human herpesvirus 8 (Kaposi`s sarcoma-associated h
aaaaauaaagaagcaauuuau

SEQ ID NO: 354344 - RNA, 19 nt, Human herpesvirus 8 (Kaposi`s sarcoma-associated h
aaaacauuggcuguguaca

SEQ ID NO: 354345 - RNA, 18 nt, Human herpesvirus 8 (Kaposi`s sarcoma-associated h
aaaacuaccgucuaccug

SEQ ID NO: 354346 - RNA, 13 nt, Human herpesvirus 8 (Kaposi`s sarcoma-associated h
aaaacugccaaag

SEQ ID NO: 354347 - RNA, 15 nt, Human herpesvirus 8 (Kaposi`s sarcoma-associated h
aaaagggcauguugc

SEQ ID NO: 354348 - RNA, 13 nt, Human herpesvirus 8 (Kaposi`s sarcoma-associated h
aaaauacauuuua

SEQ ID NO: 354349 - RNA, 20 nt, Human herpesvirus 8 (Kaposi`s sarcoma-associated h
aaaauagggagcguacugcc

SEQ ID NO: 354350 - RNA, 15 nt, Human herpesvirus 8 (Kaposi`s sarcoma-associated h
aaaaucgaagccagg

SEQ ID NO: 354351 - RNA, 21 nt, Human herpesvirus 8 (Kaposi`s sarcoma-associated h
aaaaucuguugaaugugauca

SEQ ID NO: 354352 - RNA, 13 nt, Human herpesvirus 8 (Kaposi`s sarcoma-associated h
aaaauugccaccu

SEQ ID NO: 354353 - RNA, 17 nt, Human herpesvirus 8 (Kaposi`s sarcoma-associated h
aaaauuguguguaccua

SEQ ID NO: 354354 - RNA, 20 nt, Human herpesvirus 8 (Kaposi`s sarcoma-associated h
aaaauuguguguaccuagcc

SEQ ID NO: 354355 - RNA, 21 nt, Human herpesvirus 8 (Kaposi`s sarcoma-associated h
aaaauuucuguuuccagugac

SEQ ID NO: 354356 - RNA, 13 nt, Human herpesvirus 8 (Kaposi`s sarcoma-associated h
aaacaaggucaau

SEQ ID NO: 354357 - RNA, 21 nt, Human herpesvirus 8 (Kaposi`s sarcoma-associated h
aaacaaggucaauacauugug

SEQ ID NO: 354358 - RNA, 21 nt, Human herpesvirus 8 (Kaposi`s sarcoma-associated h
aaacaaugggggguuugaaaa

SEQ ID NO: 354359 - RNA, 22 nt, Human herpesvirus 8 (Kaposi`s sarcoma-associated h
aaacacgacacgauguuuucca

SEQ ID NO: 354360 - RNA, 23 nt, Human herpesvirus 8 (Kaposi`s sarcoma-associated h
aaacacgacacgauguuuuccag

SEQ ID NO: 354361 - RNA, 15 nt, Human herpesvirus 8 (Kaposi`s sarcoma-associated h
aaacacucccucaca

SEQ ID NO: 354362 - RNA, 22 nt, Human herpesvirus 8 (Kaposi`s sarcoma-associated h
aaacauacguuuugaacaaugu

SEQ ID NO: 354363 - RNA, 19 nt, Human herpesvirus 8 (Kaposi`s sarcoma-associated h
aaacaugggguuccagugc

SEQ ID NO: 354364 - RNA, 17 nt, Human herpesvirus 8 (Kaposi`s sarcoma-associated h
aaacaugugggcuucau

SEQ ID NO: 354365 - RNA, 14 nt, Human herpesvirus 8 (Kaposi`s sarcoma-associated h
aaacauuaccaaua

SEQ ID NO: 354366 - RNA, 18 nt, Human herpesvirus 8 (Kaposi`s sarcoma-associated h
aaacauuggcuguguaca

SEQ ID NO: 354367 - RNA, 19 nt, Human herpesvirus 8 (Kaposi`s sarcoma-associated h
aaaccaaaauucgcaggga

SEQ ID NO: 354368 - RNA, 18 nt, Human herpesvirus 8 (Kaposi`s sarcoma-associated h
aaaccaaauucgccucuc

SEQ ID NO: 354369 - RNA, 15 nt, Human herpesvirus 8 (Kaposi`s sarcoma-associated h
aaaccuuaauuggau

SEQ ID NO: 354370 - RNA, 16 nt, Human herpesvirus 8 (Kaposi`s sarcoma-associated h
aaacgaagcaaagugu

SEQ ID NO: 354371 - RNA, 21 nt, Human herpesvirus 8 (Kaposi`s sarcoma-associated h
aaacgaagcaaagugucucac

SEQ ID NO: 354372 - RNA, 17 nt, Human herpesvirus 8 (Kaposi`s sarcoma-associated h
aaacgccccucuuggcu

SEQ ID NO: 354373 - RNA, 20 nt, Human herpesvirus 8 (Kaposi`s sarcoma-associated h
aaacggagaccuacacugca

SEQ ID NO: 354374 - RNA, 18 nt, Human herpesvirus 8 (Kaposi`s sarcoma-associated h
aaacggccaaagcaaagu

SEQ ID NO: 354375 - RNA, 13 nt, Human herpesvirus 8 (Kaposi`s sarcoma-associated h
aaacguuuuuccc

SEQ ID NO: 354376 - RNA, 14 nt, Human herpesvirus 8 (Kaposi`s sarcoma-associated h
aaacucacugagug

SEQ ID NO: 354377 - RNA, 16 nt, Human herpesvirus 8 (Kaposi`s sarcoma-associated h
aaagaauggugucaau

SEQ ID NO: 354378 - RNA, 14 nt, Human herpesvirus 8 (Kaposi`s sarcoma-associated h
aaagacacaugaga

SEQ ID NO: 354379 - RNA, 14 nt, Human herpesvirus 8 (Kaposi`s sarcoma-associated h
aaagagggauccca

SEQ ID NO: 354380 - RNA, 13 nt, Human herpesvirus 8 (Kaposi`s sarcoma-associated h
aaagagugucagu

SEQ ID NO: 354381 - RNA, 15 nt, Human herpesvirus 8 (Kaposi`s sarcoma-associated h
aaagauggguccgua

SEQ ID NO: 354382 - RNA, 19 nt, Human herpesvirus 8 (Kaposi`s sarcoma-associated h
aaagcagcgcccacuggug

SEQ ID NO: 354383 - RNA, 17 nt, Human herpesvirus 8 (Kaposi`s sarcoma-associated h
aaagccgagccacaaag

SEQ ID NO: 354384 - RNA, 18 nt, Human herpesvirus 8 (Kaposi`s sarcoma-associated h
aaagcggauugaguguaa

SEQ ID NO: 354385 - RNA, 19 nt, Human herpesvirus 8 (Kaposi`s sarcoma-associated h
aaagcuaugguuuuucaau

SEQ ID NO: 354386 - RNA, 17 nt, Human herpesvirus 8 (Kaposi`s sarcoma-associated h
aaagcugagccacaaac

SEQ ID NO: 354387 - RNA, 12 nt, Human herpesvirus 8 (Kaposi`s sarcoma-associated h
aaaggaccuuac

SEQ ID NO: 354388 - RNA, 22 nt, Human herpesvirus 8 (Kaposi`s sarcoma-associated h
aaaggauggaaaacagucugua

SEQ ID NO: 354389 - RNA, 20 nt, Human herpesvirus 8 (Kaposi`s sarcoma-associated h
aaagggaaacaauggggggu

SEQ ID NO: 354390 - RNA, 19 nt, Human herpesvirus 8 (Kaposi`s sarcoma-associated h
aaagggggugguauuuccu

SEQ ID NO: 354391 - RNA, 16 nt, Human herpesvirus 8 (Kaposi`s sarcoma-associated h
aaaggugacuuaucua

SEQ ID NO: 354392 - RNA, 18 nt, Human herpesvirus 8 (Kaposi`s sarcoma-associated h
aaaguauuuaaagcuggg

SEQ ID NO: 354393 - RNA, 16 nt, Human herpesvirus 8 (Kaposi`s sarcoma-associated h
aaagucuggcccucac

SEQ ID NO: 354394 - RNA, 16 nt, Human herpesvirus 8 (Kaposi`s sarcoma-associated h
aaauaaugcagacaga

SEQ ID NO: 354395 - RNA, 15 nt, Human herpesvirus 8 (Kaposi`s sarcoma-associated h
aaauacaaaaacaca

SEQ ID NO: 354396 - RNA, 22 nt, Human herpesvirus 8 (Kaposi`s sarcoma-associated h
aagcaacaugcccuuuucugaa

SEQ ID NO: 354397 - RNA, 15 nt, Human herpesvirus 8 (Kaposi`s sarcoma-associated h
aagcacaacauuaaa

SEQ ID NO: 354398 - RNA, 15 nt, Human herpesvirus 8 (Kaposi`s sarcoma-associated h
aagcacauuuugcac

SEQ ID NO: 354399 - RNA, 12 nt, Human herpesvirus 8 (Kaposi`s sarcoma-associated h
aagcaccacaua

SEQ ID NO: 354400 - RNA, 20 nt, Human herpesvirus 8 (Kaposi`s sarcoma-associated h
aagcagcgcccacuggugua

SEQ ID NO: 354401 - RNA, 15 nt, Human herpesvirus 8 (Kaposi`s sarcoma-associated h
aagcaguuucaggac

SEQ ID NO: 354402 - RNA, 17 nt, Human herpesvirus 8 (Kaposi`s sarcoma-associated h
aagcaugagacuugaca

SEQ ID NO: 354403 - RNA, 21 nt, Human herpesvirus 8 (Kaposi`s sarcoma-associated h
aagcauguugcgcacaucagc

SEQ ID NO: 354404 - RNA, 21 nt, Human herpesvirus 8 (Kaposi`s sarcoma-associated h
aagcgcaccacagaaacgccu

SEQ ID NO: 354405 - RNA, 15 nt, Human herpesvirus 8 (Kaposi`s sarcoma-associated h
aagcgccaagccauu

SEQ ID NO: 354406 - RNA, 14 nt, Human herpesvirus 8 (Kaposi`s sarcoma-associated h
aagcugagccacaa

SEQ ID NO: 354407 - RNA, 15 nt, Human herpesvirus 8 (Kaposi`s sarcoma-associated h
aagcugucacuaaua

SEQ ID NO: 354408 - RNA, 20 nt, Human herpesvirus 8 (Kaposi`s sarcoma-associated h
aaggaaugcauauggacugu

SEQ ID NO: 354409 - RNA, 22 nt, Human herpesvirus 8 (Kaposi`s sarcoma-associated h
aaggacggaugacggcuccguc

SEQ ID NO: 354410 - RNA, 19 nt, Human herpesvirus 8 (Kaposi`s sarcoma-associated h
aaggaggagggcagguuaa

SEQ ID NO: 354411 - RNA, 19 nt, Human herpesvirus 8 (Kaposi`s sarcoma-associated h
aaggcgggaucaucugcag

SEQ ID NO: 354412 - RNA, 18 nt, Human herpesvirus 8 (Kaposi`s sarcoma-associated h
aaggucaauacauuguga

SEQ ID NO: 354413 - RNA, 15 nt, Human herpesvirus 8 (Kaposi`s sarcoma-associated h
aagguuguaacacaa

SEQ ID NO: 354414 - RNA, 22 nt, Human herpesvirus 8 (Kaposi`s sarcoma-associated h
aaguaagucguccgacaugugc

SEQ ID NO: 354415 - RNA, 21 nt, Human herpesvirus 8 (Kaposi`s sarcoma-associated h
aaguacauuaaaaggacauug

SEQ ID NO: 354416 - RNA, 19 nt, Human herpesvirus 8 (Kaposi`s sarcoma-associated h
aaguauuuaaagcugggua

SEQ ID NO: 354417 - RNA, 18 nt, Human herpesvirus 8 (Kaposi`s sarcoma-associated h
aagucaugggaccgugug

SEQ ID NO: 354418 - RNA, 16 nt, Human herpesvirus 8 (Kaposi`s sarcoma-associated h
aagucucuuggacaag

SEQ ID NO: 354419 - RNA, 19 nt, Human herpesvirus 8 (Kaposi`s sarcoma-associated h
aagucuggcccucacuaca

SEQ ID NO: 354420 - RNA, 16 nt, Human herpesvirus 8 (Kaposi`s sarcoma-associated h
aaguggaguuaaccua

SEQ ID NO: 354421 - RNA, 21 nt, Human herpesvirus 8 (Kaposi`s sarcoma-associated h
aaguggaguuaaccuacagau

SEQ ID NO: 354422 - RNA, 23 nt, Human herpesvirus 8 (Kaposi`s sarcoma-associated h
aaguguucccaaaaaaccuuaau

SEQ ID NO: 354423 - RNA, 12 nt, Human herpesvirus 8 (Kaposi`s sarcoma-associated h
aaguuaaaccaa

SEQ ID NO: 354424 - RNA, 23 nt, Human herpesvirus 8 (Kaposi`s sarcoma-associated h
aaguuggccuccagcaaagcaca

SEQ ID NO: 354425 - RNA, 14 nt, Human herpesvirus 8 (Kaposi`s sarcoma-associated h
aauaaagagaccaa

SEQ ID NO: 354426 - RNA, 15 nt, Human herpesvirus 8 (Kaposi`s sarcoma-associated h
aauaaagccaaccua

SEQ ID NO: 354427 - RNA, 17 nt, Human herpesvirus 8 (Kaposi`s sarcoma-associated h
aauaaagccaaccuaug

SEQ ID NO: 354428 - RNA, 18 nt, Human herpesvirus 8 (Kaposi`s sarcoma-associated h
aauaaagcugagccacaa

SEQ ID NO: 354429 - RNA, 12 nt, Human herpesvirus 8 (Kaposi`s sarcoma-associated h
aauaacuuuauu

SEQ ID NO: 354430 - RNA, 12 nt, Human herpesvirus 8 (Kaposi`s sarcoma-associated h
aauacaaaaaca

SEQ ID NO: 354431 - RNA, 23 nt, Human herpesvirus 8 (Kaposi`s sarcoma-associated h
aauacagugcuaaucaggguaga

SEQ ID NO: 354432 - RNA, 23 nt, Human herpesvirus 8 (Kaposi`s sarcoma-associated h
aauacauaacacacacaaagaca

SEQ ID NO: 354433 - RNA, 18 nt, Human herpesvirus 8 (Kaposi`s sarcoma-associated h
aauauaacagcaacaugu

SEQ ID NO: 354434 - RNA, 13 nt, Human herpesvirus 8 (Kaposi`s sarcoma-associated h
aauauuaaccaua

SEQ ID NO: 354435 - RNA, 16 nt, Human herpesvirus 8 (Kaposi`s sarcoma-associated h
aauauuaaccauagug

SEQ ID NO: 354436 - RNA, 20 nt, Human herpesvirus 8 (Kaposi`s sarcoma-associated h
aauauucucuauaacauaau

SEQ ID NO: 354437 - RNA, 19 nt, Human herpesvirus 8 (Kaposi`s sarcoma-associated h
aaucaggagggucaaugaa

SEQ ID NO: 354438 - RNA, 15 nt, Human herpesvirus 8 (Kaposi`s sarcoma-associated h
aaucaguguccagcc

SEQ ID NO: 354439 - RNA, 23 nt, Human herpesvirus 8 (Kaposi`s sarcoma-associated h
aaucaguguccagccacaucagc

SEQ ID NO: 354440 - RNA, 13 nt, Human herpesvirus 8 (Kaposi`s sarcoma-associated h
aauccuuacuugg

SEQ ID NO: 354441 - RNA, 14 nt, Human herpesvirus 8 (Kaposi`s sarcoma-associated h
aauccuuacuuggu

SEQ ID NO: 354442 - RNA, 23 nt, Human herpesvirus 8 (Kaposi`s sarcoma-associated h
aaucguuuauucaaaagaacauu

SEQ ID NO: 354443 - RNA, 15 nt, Human herpesvirus 8 (Kaposi`s sarcoma-associated h
aaucuaaauauucuc

SEQ ID NO: 354444 - RNA, 22 nt, Human herpesvirus 8 (Kaposi`s sarcoma-associated h
aaucuaaauauucucuauaaca

SEQ ID NO: 354445 - RNA, 17 nt, Human herpesvirus 8 (Kaposi`s sarcoma-associated h
aaucucucauagacuuu

SEQ ID NO: 354446 - RNA, 18 nt, Human herpesvirus 8 (Kaposi`s sarcoma-associated h
aaucugagaaaaguuaaa

SEQ ID NO: 354447 - RNA, 17 nt, Human herpesvirus 8 (Kaposi`s sarcoma-associated h
aaucuggcaugcuggga

SEQ ID NO: 354448 - RNA, 17 nt, Human herpesvirus 8 (Kaposi`s sarcoma-associated h
aaugaacgcacaucagc

SEQ ID NO: 354449 - RNA, 17 nt, Human herpesvirus 8 (Kaposi`s sarcoma-associated h
aaugaaggacauaccua

SEQ ID NO: 354450 - RNA, 19 nt, Human herpesvirus 8 (Kaposi`s sarcoma-associated h
aaugaauaacuuuauuaca

SEQ ID NO: 354451 - RNA, 18 nt, Human herpesvirus 8 (Kaposi`s sarcoma-associated h
aaugaauguguagguugu

SEQ ID NO: 354452 - RNA, 14 nt, Human herpesvirus 8 (Kaposi`s sarcoma-associated h
aaugcaaugcuucc

SEQ ID NO: 354453 - RNA, 15 nt, Human herpesvirus 8 (Kaposi`s sarcoma-associated h
aaugccacauuuccc

SEQ ID NO: 354454 - RNA, 14 nt, Human herpesvirus 8 (Kaposi`s sarcoma-associated h
aaugcggccaguuu

SEQ ID NO: 354455 - RNA, 19 nt, Human herpesvirus 8 (Kaposi`s sarcoma-associated h
aaugcucaggucugucacu

SEQ ID NO: 354456 - RNA, 20 nt, Human herpesvirus 8 (Kaposi`s sarcoma-associated h
aaugcucaggucugucacua

SEQ ID NO: 354457 - RNA, 18 nt, Human herpesvirus 8 (Kaposi`s sarcoma-associated h
aauggauguugggugcca

SEQ ID NO: 354458 - RNA, 14 nt, Human herpesvirus 8 (Kaposi`s sarcoma-associated h
aauggucuccagaa

SEQ ID NO: 354459 - RNA, 19 nt, Human herpesvirus 8 (Kaposi`s sarcoma-associated h
aaugguggacggcuccguc

SEQ ID NO: 354460 - RNA, 14 nt, Human herpesvirus 8 (Kaposi`s sarcoma-associated h
aauguacugccaug

SEQ ID NO: 354461 - RNA, 15 nt, Human herpesvirus 8 (Kaposi`s sarcoma-associated h
aauguacugccauga

SEQ ID NO: 354462 - RNA, 17 nt, Human herpesvirus 8 (Kaposi`s sarcoma-associated h
aauguacugccaugaaa

SEQ ID NO: 354463 - RNA, 14 nt, Human herpesvirus 8 (Kaposi`s sarcoma-associated h
aaugugccuaucaa

SEQ ID NO: 354464 - RNA, 23 nt, Human herpesvirus 8 (Kaposi`s sarcoma-associated h
aauguguagguuguuauuaucaa

SEQ ID NO: 354465 - RNA, 22 nt, Human herpesvirus 8 (Kaposi`s sarcoma-associated h
aauuauggaggcuaggugccca

SEQ ID NO: 354466 - RNA, 16 nt, Human herpesvirus 8 (Kaposi`s sarcoma-associated h
aauucaaggaucucaa

SEQ ID NO: 354467 - RNA, 14 nt, Human herpesvirus 8 (Kaposi`s sarcoma-associated h
aauuucauuaacaa

SEQ ID NO: 354468 - RNA, 17 nt, Human herpesvirus 8 (Kaposi`s sarcoma-associated h
aauuuccugcugucuau

SEQ ID NO: 354469 - RNA, 21 nt, Human herpesvirus 8 (Kaposi`s sarcoma-associated h
aauuuuccuuuguuuuuccac

SEQ ID NO: 354470 - RNA, 13 nt, Human herpesvirus 8 (Kaposi`s sarcoma-associated h
acaaaaacacaau

SEQ ID NO: 354471 - RNA, 14 nt, Human herpesvirus 8 (Kaposi`s sarcoma-associated h
acaaaaacacaauc

SEQ ID NO: 354472 - RNA, 13 nt, Human herpesvirus 8 (Kaposi`s sarcoma-associated h
acaaaacugccaa

SEQ ID NO: 354473 - RNA, 14 nt, Human herpesvirus 8 (Kaposi`s sarcoma-associated h
acaaaauauacagg

SEQ ID NO: 354474 - RNA, 14 nt, Human herpesvirus 8 (Kaposi`s sarcoma-associated h
acaaacaagacaca

SEQ ID NO: 354475 - RNA, 18 nt, Human herpesvirus 8 (Kaposi`s sarcoma-associated h
acauuuuguaaugaauaa

SEQ ID NO: 354476 - RNA, 16 nt, Human herpesvirus 8 (Kaposi`s sarcoma-associated h
accaagccucccguga

SEQ ID NO: 354477 - RNA, 19 nt, Human herpesvirus 8 (Kaposi`s sarcoma-associated h
accaauaacgaagguaugu

SEQ ID NO: 354478 - RNA, 22 nt, Human herpesvirus 8 (Kaposi`s sarcoma-associated h
accacagagaucacggccgugu

SEQ ID NO: 354479 - RNA, 14 nt, Human herpesvirus 8 (Kaposi`s sarcoma-associated h
accacauacagacu

SEQ ID NO: 354480 - RNA, 17 nt, Human herpesvirus 8 (Kaposi`s sarcoma-associated h
accacgccacaacccaa

SEQ ID NO: 354481 - RNA, 20 nt, Human herpesvirus 8 (Kaposi`s sarcoma-associated h
accacgccugacucauuuca

SEQ ID NO: 354482 - RNA, 17 nt, Human herpesvirus 8 (Kaposi`s sarcoma-associated h
accacuauccaugucuu

SEQ ID NO: 354483 - RNA, 20 nt, Human herpesvirus 8 (Kaposi`s sarcoma-associated h
accacuauccaugucuuucc

SEQ ID NO: 354484 - RNA, 20 nt, Human herpesvirus 8 (Kaposi`s sarcoma-associated h
accacucuuuaucaugugaa

SEQ ID NO: 354485 - RNA, 22 nt, Human herpesvirus 8 (Kaposi`s sarcoma-associated h
accagccugaaacgucgcccaa

SEQ ID NO: 354486 - RNA, 14 nt, Human herpesvirus 8 (Kaposi`s sarcoma-associated h
accaggcaacacaa

SEQ ID NO: 354487 - RNA, 22 nt, Human herpesvirus 8 (Kaposi`s sarcoma-associated h
accaggcaacacaagggugaaa

SEQ ID NO: 354488 - RNA, 17 nt, Human herpesvirus 8 (Kaposi`s sarcoma-associated h
accauggcaaaaaacac

SEQ ID NO: 354489 - RNA, 23 nt, Human herpesvirus 8 (Kaposi`s sarcoma-associated h
accauguugcgcaauucaggcau

SEQ ID NO: 354490 - RNA, 21 nt, Human herpesvirus 8 (Kaposi`s sarcoma-associated h
accauuccucuccgcauuaaa

SEQ ID NO: 354491 - RNA, 20 nt, Human herpesvirus 8 (Kaposi`s sarcoma-associated h
accauuuuuuacggacaaua

SEQ ID NO: 354492 - RNA, 18 nt, Human herpesvirus 8 (Kaposi`s sarcoma-associated h
acccaauguuaauguucu

SEQ ID NO: 354493 - RNA, 15 nt, Human herpesvirus 8 (Kaposi`s sarcoma-associated h
acccacguuuaucaa

SEQ ID NO: 354494 - RNA, 14 nt, Human herpesvirus 8 (Kaposi`s sarcoma-associated h
acccaucuaccuca

SEQ ID NO: 354495 - RNA, 15 nt, Human herpesvirus 8 (Kaposi`s sarcoma-associated h
accccaugcauucug

SEQ ID NO: 354496 - RNA, 16 nt, Human herpesvirus 8 (Kaposi`s sarcoma-associated h
accccgauaugcaccu

SEQ ID NO: 354497 - RNA, 18 nt, Human herpesvirus 8 (Kaposi`s sarcoma-associated h
accccgcgcguaucucuc

SEQ ID NO: 354498 - RNA, 17 nt, Human herpesvirus 8 (Kaposi`s sarcoma-associated h
accccuagccggugaaa

SEQ ID NO: 354499 - RNA, 23 nt, Human herpesvirus 8 (Kaposi`s sarcoma-associated h
accccuagccggugaaacagaua

SEQ ID NO: 354500 - RNA, 23 nt, Human herpesvirus 8 (Kaposi`s sarcoma-associated h
accccucuggaucuacagauauc

SEQ ID NO: 354501 - RNA, 19 nt, Human herpesvirus 8 (Kaposi`s sarcoma-associated h
accccucuuacuaagagaa

SEQ ID NO: 354502 - RNA, 22 nt, Human herpesvirus 8 (Kaposi`s sarcoma-associated h
acccuauuggucacaucucacg

SEQ ID NO: 354503 - RNA, 23 nt, Human herpesvirus 8 (Kaposi`s sarcoma-associated h
acccucagugugcuguccagcgu

SEQ ID NO: 354504 - RNA, 23 nt, Human herpesvirus 8 (Kaposi`s sarcoma-associated h
acccucccccaccgagugcuuua

SEQ ID NO: 354505 - RNA, 17 nt, Human herpesvirus 8 (Kaposi`s sarcoma-associated h
acccugauuagcacugu

SEQ ID NO: 354506 - RNA, 18 nt, Human herpesvirus 8 (Kaposi`s sarcoma-associated h
acccugauuagcacugua

SEQ ID NO: 354507 - RNA, 16 nt, Human herpesvirus 8 (Kaposi`s sarcoma-associated h
acccuguacaugaacc

SEQ ID NO: 354508 - RNA, 19 nt, Human herpesvirus 8 (Kaposi`s sarcoma-associated h
acccuguacaugaaccaga

SEQ ID NO: 354509 - RNA, 22 nt, Human herpesvirus 8 (Kaposi`s sarcoma-associated h
acccuuucauuagugacauaca

SEQ ID NO: 354510 - RNA, 22 nt, Human herpesvirus 8 (Kaposi`s sarcoma-associated h
accgacaccaucucggccauua

SEQ ID NO: 354511 - RNA, 23 nt, Human herpesvirus 8 (Kaposi`s sarcoma-associated h
accgaccaauacaagacaacuaa

SEQ ID NO: 354512 - RNA, 12 nt, Human herpesvirus 8 (Kaposi`s sarcoma-associated h
accgagugcuuu

SEQ ID NO: 354513 - RNA, 22 nt, Human herpesvirus 8 (Kaposi`s sarcoma-associated h
accgcauacguucguaugccgu

SEQ ID NO: 354514 - RNA, 21 nt, Human herpesvirus 8 (Kaposi`s sarcoma-associated h
accgcccuccguuuugcacua

SEQ ID NO: 354515 - RNA, 16 nt, Human herpesvirus 8 (Kaposi`s sarcoma-associated h
accgcgagacaucaga

SEQ ID NO: 354516 - RNA, 21 nt, Human herpesvirus 8 (Kaposi`s sarcoma-associated h
accgcuugaccugcaaacuuu

SEQ ID NO: 354517 - RNA, 17 nt, Human herpesvirus 8 (Kaposi`s sarcoma-associated h
accggaguagugcaagu

SEQ ID NO: 354518 - RNA, 18 nt, Human herpesvirus 8 (Kaposi`s sarcoma-associated h
accggcuuguuuauaaca

SEQ ID NO: 354519 - RNA, 21 nt, Human herpesvirus 8 (Kaposi`s sarcoma-associated h
accgggaucuguuacuggcac

SEQ ID NO: 354520 - RNA, 14 nt, Human herpesvirus 8 (Kaposi`s sarcoma-associated h
accgucuaccugcc

SEQ ID NO: 354521 - RNA, 14 nt, Human herpesvirus 8 (Kaposi`s sarcoma-associated h
accgugcuacuuac

SEQ ID NO: 354522 - RNA, 15 nt, Human herpesvirus 8 (Kaposi`s sarcoma-associated h
accguguggcugcaa

SEQ ID NO: 354523 - RNA, 13 nt, Human herpesvirus 8 (Kaposi`s sarcoma-associated h
accguguguggcu

SEQ ID NO: 354524 - RNA, 18 nt, Human herpesvirus 8 (Kaposi`s sarcoma-associated h
accuaaaaaaugugcaug

SEQ ID NO: 354525 - RNA, 18 nt, Human herpesvirus 8 (Kaposi`s sarcoma-associated h
accuacacccucacgugu

SEQ ID NO: 354526 - RNA, 13 nt, Human herpesvirus 8 (Kaposi`s sarcoma-associated h
accuacacugcau

SEQ ID NO: 354527 - RNA, 17 nt, Human herpesvirus 8 (Kaposi`s sarcoma-associated h
accuacacugcauucua

SEQ ID NO: 354528 - RNA, 13 nt, Human herpesvirus 8 (Kaposi`s sarcoma-associated h
accuccuccuacg

SEQ ID NO: 354529 - RNA, 22 nt, Human herpesvirus 8 (Kaposi`s sarcoma-associated h
accucgggccuugggugcgaug

SEQ ID NO: 354530 - RNA, 23 nt, Human herpesvirus 8 (Kaposi`s sarcoma-associated h
accugcaaacuauacacaaauga

SEQ ID NO: 354531 - RNA, 24 nt, Human herpesvirus 8 (Kaposi`s sarcoma-associated h
accuggugaggaagcaucuggucc

SEQ ID NO: 354532 - RNA, 22 nt, Human herpesvirus 8 (Kaposi`s sarcoma-associated h
accugucgcuuccauuuuccaa

SEQ ID NO: 354533 - RNA, 18 nt, Human herpesvirus 8 (Kaposi`s sarcoma-associated h
accuuaaacacaacacca

SEQ ID NO: 354534 - RNA, 21 nt, Human herpesvirus 8 (Kaposi`s sarcoma-associated h
accuuaacacuucccaauaac

SEQ ID NO: 354535 - RNA, 13 nt, Human herpesvirus 8 (Kaposi`s sarcoma-associated h
accuuaauuggau

SEQ ID NO: 354536 - RNA, 16 nt, Human herpesvirus 8 (Kaposi`s sarcoma-associated h
accuugauguuuccca

SEQ ID NO: 354537 - RNA, 18 nt, Human herpesvirus 8 (Kaposi`s sarcoma-associated h
accuuucagacguccagu

SEQ ID NO: 354538 - RNA, 14 nt, Human herpesvirus 8 (Kaposi`s sarcoma-associated h
acgaaaaucuggca

SEQ ID NO: 354539 - RNA, 13 nt, Human herpesvirus 8 (Kaposi`s sarcoma-associated h
acgaaagcuaugg

SEQ ID NO: 354540 - RNA, 22 nt, Human herpesvirus 8 (Kaposi`s sarcoma-associated h
acgaaugcucaggucugucacu

SEQ ID NO: 354541 - RNA, 19 nt, Human herpesvirus 8 (Kaposi`s sarcoma-associated h
acgacauuucgccaauuau

SEQ ID NO: 354542 - RNA, 23 nt, Human herpesvirus 8 (Kaposi`s sarcoma-associated h
acgaccgggaucuguuacuggca

SEQ ID NO: 354543 - RNA, 14 nt, Human herpesvirus 8 (Kaposi`s sarcoma-associated h
acgacgcaggcguc

SEQ ID NO: 354544 - RNA, 18 nt, Human herpesvirus 8 (Kaposi`s sarcoma-associated h
acgacugggccaccaaga

SEQ ID NO: 354545 - RNA, 20 nt, Human herpesvirus 8 (Kaposi`s sarcoma-associated h
acgagcgaccagucuuauac

SEQ ID NO: 354546 - RNA, 16 nt, Human herpesvirus 8 (Kaposi`s sarcoma-associated h
acgagguuacugccag

SEQ ID NO: 354547 - RNA, 15 nt, Human herpesvirus 8 (Kaposi`s sarcoma-associated h
acgauggcaaaggaa

SEQ ID NO: 354548 - RNA, 20 nt, Human herpesvirus 8 (Kaposi`s sarcoma-associated h
acgaugggaacuuucaucca

SEQ ID NO: 354549 - RNA, 13 nt, Human herpesvirus 8 (Kaposi`s sarcoma-associated h
acgauguacuuga

SEQ ID NO: 354550 - RNA, 21 nt, Human herpesvirus 8 (Kaposi`s sarcoma-associated h
acgauuaaaaaccacucacug

SEQ ID NO: 354551 - RNA, 16 nt, Human herpesvirus 8 (Kaposi`s sarcoma-associated h
acgcaccgacacugga

SEQ ID NO: 354552 - RNA, 17 nt, Human herpesvirus 8 (Kaposi`s sarcoma-associated h
acgcaccgcaagcagca

SEQ ID NO: 354553 - RNA, 17 nt, Human herpesvirus 8 (Kaposi`s sarcoma-associated h
agaaauccgagcaccuc

SEQ ID NO: 354554 - RNA, 20 nt, Human herpesvirus 8 (Kaposi`s sarcoma-associated h
agaaauuacugcaccucgcc

SEQ ID NO: 354555 - RNA, 16 nt, Human herpesvirus 8 (Kaposi`s sarcoma-associated h
agaaauuuuaugucac

SEQ ID NO: 354556 - RNA, 16 nt, Human herpesvirus 8 (Kaposi`s sarcoma-associated h
agaacaguacccacga

SEQ ID NO: 354557 - RNA, 20 nt, Human herpesvirus 8 (Kaposi`s sarcoma-associated h
agaaccgaugguuuccuagc

SEQ ID NO: 354558 - RNA, 21 nt, Human herpesvirus 8 (Kaposi`s sarcoma-associated h
agaacugucgagacaugucac

SEQ ID NO: 354559 - RNA, 12 nt, Human herpesvirus 8 (Kaposi`s sarcoma-associated h
agaagacccaga

SEQ ID NO: 354560 - RNA, 22 nt, Human herpesvirus 8 (Kaposi`s sarcoma-associated h
agaagagaccacgccugacuca

SEQ ID NO: 354561 - RNA, 14 nt, Human herpesvirus 8 (Kaposi`s sarcoma-associated h
agaauuggagcacu

SEQ ID NO: 354562 - RNA, 13 nt, Human herpesvirus 8 (Kaposi`s sarcoma-associated h
agacaaacacugu

SEQ ID NO: 354563 - RNA, 18 nt, Human herpesvirus 8 (Kaposi`s sarcoma-associated h
agacaaacaugugggcuu

SEQ ID NO: 354564 - RNA, 13 nt, Human herpesvirus 8 (Kaposi`s sarcoma-associated h
agacaccaaagac

SEQ ID NO: 354565 - RNA, 16 nt, Human herpesvirus 8 (Kaposi`s sarcoma-associated h
agacaguugugaucuc

SEQ ID NO: 354566 - RNA, 20 nt, Human herpesvirus 8 (Kaposi`s sarcoma-associated h
agacauagugacuguagaca

SEQ ID NO: 354567 - RNA, 21 nt, Human herpesvirus 8 (Kaposi`s sarcoma-associated h
agacauggugacccacauaga

SEQ ID NO: 354568 - RNA, 20 nt, Human herpesvirus 8 (Kaposi`s sarcoma-associated h
agaccauuauaggugucaag

SEQ ID NO: 354569 - RNA, 13 nt, Human herpesvirus 8 (Kaposi`s sarcoma-associated h
agacccaaaaagg

SEQ ID NO: 354570 - RNA, 14 nt, Human herpesvirus 8 (Kaposi`s sarcoma-associated h
agaccguacauccu

SEQ ID NO: 354571 - RNA, 16 nt, Human herpesvirus 8 (Kaposi`s sarcoma-associated h
agacgacaaaacgcac

SEQ ID NO: 354572 - RNA, 17 nt, Human herpesvirus 8 (Kaposi`s sarcoma-associated h
agacggggagcugugug

SEQ ID NO: 354573 - RNA, 19 nt, Human herpesvirus 8 (Kaposi`s sarcoma-associated h
agacggucuuuaggggcac

SEQ ID NO: 354574 - RNA, 14 nt, Human herpesvirus 8 (Kaposi`s sarcoma-associated h
agacguuagcuuca

SEQ ID NO: 354575 - RNA, 16 nt, Human herpesvirus 8 (Kaposi`s sarcoma-associated h
agacuaugggaaugug

SEQ ID NO: 354576 - RNA, 18 nt, Human herpesvirus 8 (Kaposi`s sarcoma-associated h
agacuaugggaaugugcc

SEQ ID NO: 354577 - RNA, 22 nt, Human herpesvirus 8 (Kaposi`s sarcoma-associated h
agacuuugugugguaagaagga

SEQ ID NO: 354578 - RNA, 23 nt, Human herpesvirus 8 (Kaposi`s sarcoma-associated h
agagaauggagaggagaccccca

SEQ ID NO: 354579 - RNA, 11 nt, Human herpesvirus 8 (Kaposi`s sarcoma-associated h
agagcacuguu

SEQ ID NO: 354580 - RNA, 23 nt, Human herpesvirus 8 (Kaposi`s sarcoma-associated h
agagccuucacggcacacuacuc

SEQ ID NO: 354581 - RNA, 21 nt, Human herpesvirus 8 (Kaposi`s sarcoma-associated h
agaggauauuaaaguggugau

SEQ ID NO: 354582 - RNA, 14 nt, Human herpesvirus 8 (Kaposi`s sarcoma-associated h
agagggauggguuu

SEQ ID NO: 354583 - RNA, 13 nt, Human herpesvirus 8 (Kaposi`s sarcoma-associated h
agagucugcucua

SEQ ID NO: 354584 - RNA, 18 nt, Human herpesvirus 8 (Kaposi`s sarcoma-associated h
agauaacccgagaccgca

SEQ ID NO: 354585 - RNA, 12 nt, Human herpesvirus 8 (Kaposi`s sarcoma-associated h
agauagccacau

SEQ ID NO: 354586 - RNA, 16 nt, Human herpesvirus 8 (Kaposi`s sarcoma-associated h
agauauaaacauggca

SEQ ID NO: 354587 - RNA, 20 nt, Human herpesvirus 8 (Kaposi`s sarcoma-associated h
agauauaaacauggcacucu

SEQ ID NO: 354588 - RNA, 13 nt, Human herpesvirus 8 (Kaposi`s sarcoma-associated h
agauauuuuaaaa

SEQ ID NO: 354589 - RNA, 18 nt, Human herpesvirus 8 (Kaposi`s sarcoma-associated h
agauauuuuucaacaaca

SEQ ID NO: 354590 - RNA, 20 nt, Human herpesvirus 8 (Kaposi`s sarcoma-associated h
agaugauaggcaacaugaca

SEQ ID NO: 354591 - RNA, 14 nt, Human herpesvirus 8 (Kaposi`s sarcoma-associated h
agauggccggguuu

SEQ ID NO: 354592 - RNA, 14 nt, Human herpesvirus 8 (Kaposi`s sarcoma-associated h
agauguucuugcca

SEQ ID NO: 354593 - RNA, 13 nt, Human herpesvirus 8 (Kaposi`s sarcoma-associated h
agauuauaauggg

SEQ ID NO: 354594 - RNA, 22 nt, Human herpesvirus 8 (Kaposi`s sarcoma-associated h
agauuauaaugggucuacuucg

SEQ ID NO: 354595 - RNA, 14 nt, Human herpesvirus 8 (Kaposi`s sarcoma-associated h
agauugacuggaac

SEQ ID NO: 354596 - RNA, 20 nt, Human herpesvirus 8 (Kaposi`s sarcoma-associated h
agauuggaggcacauaagga

SEQ ID NO: 354597 - RNA, 13 nt, Human herpesvirus 8 (Kaposi`s sarcoma-associated h
agauuggguuggg

SEQ ID NO: 354598 - RNA, 17 nt, Human herpesvirus 8 (Kaposi`s sarcoma-associated h
agauugguguccagaca

SEQ ID NO: 354599 - RNA, 15 nt, Human herpesvirus 8 (Kaposi`s sarcoma-associated h
agauuucucuaucua

SEQ ID NO: 354600 - RNA, 21 nt, Human herpesvirus 8 (Kaposi`s sarcoma-associated h
agcaacugcgucauguaccug

SEQ ID NO: 354601 - RNA, 21 nt, Human herpesvirus 8 (Kaposi`s sarcoma-associated h
agcacagcgcucaauuaucua

SEQ ID NO: 354602 - RNA, 18 nt, Human herpesvirus 8 (Kaposi`s sarcoma-associated h
agcacgaagacaugguga

SEQ ID NO: 354603 - RNA, 20 nt, Human herpesvirus 8 (Kaposi`s sarcoma-associated h
agcacgugaaaucucgccug

SEQ ID NO: 354604 - RNA, 22 nt, Human herpesvirus 8 (Kaposi`s sarcoma-associated h
agcagcgccaguggaucucgga

SEQ ID NO: 354605 - RNA, 16 nt, Human herpesvirus 8 (Kaposi`s sarcoma-associated h
agcaggacguccaggc

SEQ ID NO: 354606 - RNA, 13 nt, Human herpesvirus 8 (Kaposi`s sarcoma-associated h
agcaguccggggu

SEQ ID NO: 354607 - RNA, 18 nt, Human herpesvirus 8 (Kaposi`s sarcoma-associated h
agcauccuaucgcacaga

SEQ ID NO: 354608 - RNA, 20 nt, Human herpesvirus 8 (Kaposi`s sarcoma-associated h
agcauccuaucgcacagaca

SEQ ID NO: 354609 - RNA, 18 nt, Human herpesvirus 8 (Kaposi`s sarcoma-associated h
agcaugagacuugacacc

SEQ ID NO: 354610 - RNA, 12 nt, Human herpesvirus 8 (Kaposi`s sarcoma-associated h
agccaagaacca

SEQ ID NO: 354611 - RNA, 22 nt, Human herpesvirus 8 (Kaposi`s sarcoma-associated h
agccacauacgucccucuuggc

SEQ ID NO: 354612 - RNA, 23 nt, Human herpesvirus 8 (Kaposi`s sarcoma-associated h
agccacauacgucccucuuggcu

SEQ ID NO: 354613 - RNA, 12 nt, Human herpesvirus 8 (Kaposi`s sarcoma-associated h
agccacaucagc

SEQ ID NO: 354614 - RNA, 15 nt, Human herpesvirus 8 (Kaposi`s sarcoma-associated h
agccaucaacgauac

SEQ ID NO: 354615 - RNA, 18 nt, Human herpesvirus 8 (Kaposi`s sarcoma-associated h
agccccuugguuccacga

SEQ ID NO: 354616 - RNA, 17 nt, Human herpesvirus 8 (Kaposi`s sarcoma-associated h
agccgaaaggauuccac

SEQ ID NO: 354617 - RNA, 18 nt, Human herpesvirus 8 (Kaposi`s sarcoma-associated h
agccggggaaaaguggac

SEQ ID NO: 354618 - RNA, 23 nt, Human herpesvirus 8 (Kaposi`s sarcoma-associated h
agccgggugaggccaauggauuc

SEQ ID NO: 354619 - RNA, 21 nt, Human herpesvirus 8 (Kaposi`s sarcoma-associated h
agccuaugcugggacagaaua

SEQ ID NO: 354620 - RNA, 14 nt, Human herpesvirus 8 (Kaposi`s sarcoma-associated h
agccucaacgggca

SEQ ID NO: 354621 - RNA, 17 nt, Human herpesvirus 8 (Kaposi`s sarcoma-associated h
agccucuguacauggag

SEQ ID NO: 354622 - RNA, 19 nt, Human herpesvirus 8 (Kaposi`s sarcoma-associated h
agccuggacgauguacuug

SEQ ID NO: 354623 - RNA, 15 nt, Human herpesvirus 8 (Kaposi`s sarcoma-associated h
agccuucacggcaca

SEQ ID NO: 354624 - RNA, 22 nt, Human herpesvirus 8 (Kaposi`s sarcoma-associated h
agccuuguuggggguuauauuc

SEQ ID NO: 354625 - RNA, 15 nt, Human herpesvirus 8 (Kaposi`s sarcoma-associated h
agcgcgaaaccacug

SEQ ID NO: 354626 - RNA, 22 nt, Human herpesvirus 8 (Kaposi`s sarcoma-associated h
agcgcgcucugucgcucuucag

SEQ ID NO: 354627 - RNA, 21 nt, Human herpesvirus 8 (Kaposi`s sarcoma-associated h
agcgcguguuucacgucuuga

SEQ ID NO: 354628 - RNA, 14 nt, Human herpesvirus 8 (Kaposi`s sarcoma-associated h
agcgcugugcuuuu

SEQ ID NO: 354629 - RNA, 14 nt, Human herpesvirus 8 (Kaposi`s sarcoma-associated h
agcggacgccauuu

SEQ ID NO: 354630 - RNA, 14 nt, Human herpesvirus 8 (Kaposi`s sarcoma-associated h
agcgggguuuccag

SEQ ID NO: 354631 - RNA, 23 nt, Human herpesvirus 8 (Kaposi`s sarcoma-associated h
agcggguuggacuggcagggugg

SEQ ID NO: 354632 - RNA, 16 nt, Human herpesvirus 8 (Kaposi`s sarcoma-associated h
agucgucugacgccau

SEQ ID NO: 354633 - RNA, 13 nt, Human herpesvirus 8 (Kaposi`s sarcoma-associated h
agucuucuuguca

SEQ ID NO: 354634 - RNA, 18 nt, Human herpesvirus 8 (Kaposi`s sarcoma-associated h
agucuuuuuuuccccaac

SEQ ID NO: 354635 - RNA, 15 nt, Human herpesvirus 8 (Kaposi`s sarcoma-associated h
agugacauacaugag

SEQ ID NO: 354636 - RNA, 19 nt, Human herpesvirus 8 (Kaposi`s sarcoma-associated h
agugccacaauuucauuaa

SEQ ID NO: 354637 - RNA, 17 nt, Human herpesvirus 8 (Kaposi`s sarcoma-associated h
aguggaauuacguugua

SEQ ID NO: 354638 - RNA, 22 nt, Human herpesvirus 8 (Kaposi`s sarcoma-associated h
aguggauugccgucacauauca

SEQ ID NO: 354639 - RNA, 17 nt, Human herpesvirus 8 (Kaposi`s sarcoma-associated h
aguggcccgucuguaua

SEQ ID NO: 354640 - RNA, 19 nt, Human herpesvirus 8 (Kaposi`s sarcoma-associated h
agugggacagcaacaccca

SEQ ID NO: 354641 - RNA, 20 nt, Human herpesvirus 8 (Kaposi`s sarcoma-associated h
agugguuaacuucaccucca

SEQ ID NO: 354642 - RNA, 16 nt, Human herpesvirus 8 (Kaposi`s sarcoma-associated h
agugguugccauccuu

SEQ ID NO: 354643 - RNA, 15 nt, Human herpesvirus 8 (Kaposi`s sarcoma-associated h
aguguacacagccaa

SEQ ID NO: 354644 - RNA, 23 nt, Human herpesvirus 8 (Kaposi`s sarcoma-associated h
aguguaucccccacaggacaagc

SEQ ID NO: 354645 - RNA, 16 nt, Human herpesvirus 8 (Kaposi`s sarcoma-associated h
agugucgccagugccu

SEQ ID NO: 354646 - RNA, 19 nt, Human herpesvirus 8 (Kaposi`s sarcoma-associated h
agugugcgcgcagcuuucc

SEQ ID NO: 354647 - RNA, 22 nt, Human herpesvirus 8 (Kaposi`s sarcoma-associated h
aguguggacuuuuaccaguuca

SEQ ID NO: 354648 - RNA, 15 nt, Human herpesvirus 8 (Kaposi`s sarcoma-associated h
aguguucccaaaaaa

SEQ ID NO: 354649 - RNA, 22 nt, Human herpesvirus 8 (Kaposi`s sarcoma-associated h
aguguugguuacacuaaccaca

SEQ ID NO: 354650 - RNA, 14 nt, Human herpesvirus 8 (Kaposi`s sarcoma-associated h
aguguuugcugcug

SEQ ID NO: 354651 - RNA, 17 nt, Human herpesvirus 8 (Kaposi`s sarcoma-associated h
aguguuuuuugccaugg

SEQ ID NO: 354652 - RNA, 19 nt, Human herpesvirus 8 (Kaposi`s sarcoma-associated h
aguguuuuuugccauggua

SEQ ID NO: 354653 - RNA, 19 nt, Human herpesvirus 8 (Kaposi`s sarcoma-associated h
aguuaaagcugucacuaau

SEQ ID NO: 354654 - RNA, 22 nt, Human herpesvirus 8 (Kaposi`s sarcoma-associated h
aguuccccgggaacggacaauu

SEQ ID NO: 354655 - RNA, 17 nt, Human herpesvirus 8 (Kaposi`s sarcoma-associated h
aguuggagaaacagugg

SEQ ID NO: 354656 - RNA, 18 nt, Human herpesvirus 8 (Kaposi`s sarcoma-associated h
aguuggagaaacagugga

SEQ ID NO: 354657 - RNA, 23 nt, Human herpesvirus 8 (Kaposi`s sarcoma-associated h
aguuggccuccagcaaagcacau

SEQ ID NO: 354658 - RNA, 22 nt, Human herpesvirus 8 (Kaposi`s sarcoma-associated h
aguuguggucucucuugcuggu

SEQ ID NO: 354659 - RNA, 15 nt, Human herpesvirus 8 (Kaposi`s sarcoma-associated h
aguuuaucucagaca

SEQ ID NO: 354660 - RNA, 20 nt, Human herpesvirus 8 (Kaposi`s sarcoma-associated h
aguuuuuuucuaaauuggca

SEQ ID NO: 354661 - RNA, 19 nt, Human herpesvirus 8 (Kaposi`s sarcoma-associated h
auaaaacgguguucuguca

SEQ ID NO: 354662 - RNA, 15 nt, Human herpesvirus 8 (Kaposi`s sarcoma-associated h
auaaaauacgcgugu

SEQ ID NO: 354663 - RNA, 11 nt, Human herpesvirus 8 (Kaposi`s sarcoma-associated h
auaaacagccu

SEQ ID NO: 354664 - RNA, 15 nt, Human herpesvirus 8 (Kaposi`s sarcoma-associated h
auaaacagccuuggu

SEQ ID NO: 354665 - RNA, 12 nt, Human herpesvirus 8 (Kaposi`s sarcoma-associated h
auaaacauggca

SEQ ID NO: 354666 - RNA, 19 nt, Human herpesvirus 8 (Kaposi`s sarcoma-associated h
auaaaccgaaguacugcuu

SEQ ID NO: 354667 - RNA, 20 nt, Human herpesvirus 8 (Kaposi`s sarcoma-associated h
auaaagacaaaugugugggu

SEQ ID NO: 354668 - RNA, 17 nt, Human herpesvirus 8 (Kaposi`s sarcoma-associated h
auaaagcugagccacaa

SEQ ID NO: 354669 - RNA, 17 nt, Human herpesvirus 8 (Kaposi`s sarcoma-associated h
auaaaguacuuuuccau

SEQ ID NO: 354670 - RNA, 17 nt, Human herpesvirus 8 (Kaposi`s sarcoma-associated h
auaaagucaugggaccg

SEQ ID NO: 354671 - RNA, 16 nt, Human herpesvirus 8 (Kaposi`s sarcoma-associated h
auaacacagucacagu

SEQ ID NO: 354672 - RNA, 16 nt, Human herpesvirus 8 (Kaposi`s sarcoma-associated h
auaacagcaacauguu

SEQ ID NO: 354673 - RNA, 17 nt, Human herpesvirus 8 (Kaposi`s sarcoma-associated h
auaacagcaacauguuu

SEQ ID NO: 354674 - RNA, 20 nt, Human herpesvirus 8 (Kaposi`s sarcoma-associated h
auaacagcaacauguuuaca

SEQ ID NO: 354675 - RNA, 22 nt, Human herpesvirus 8 (Kaposi`s sarcoma-associated h
auaacauuuuguaaugaauaac

SEQ ID NO: 354676 - RNA, 17 nt, Human herpesvirus 8 (Kaposi`s sarcoma-associated h
auaaccaugaguuccac

SEQ ID NO: 354677 - RNA, 17 nt, Human herpesvirus 8 (Kaposi`s sarcoma-associated h
auaacgagcgaccaguc

SEQ ID NO: 354678 - RNA, 14 nt, Human herpesvirus 8 (Kaposi`s sarcoma-associated h
auaacgaguggggu

SEQ ID NO: 354679 - RNA, 19 nt, Human herpesvirus 8 (Kaposi`s sarcoma-associated h
auaacggugucuaacugcc

SEQ ID NO: 354680 - RNA, 12 nt, Human herpesvirus 8 (Kaposi`s sarcoma-associated h
auaacuuuauua

SEQ ID NO: 354681 - RNA, 19 nt, Human herpesvirus 8 (Kaposi`s sarcoma-associated h
auaagaaauuuuaugucac

SEQ ID NO: 354682 - RNA, 18 nt, Human herpesvirus 8 (Kaposi`s sarcoma-associated h
auaagaaccaaaggacau

SEQ ID NO: 354683 - RNA, 11 nt, Human herpesvirus 8 (Kaposi`s sarcoma-associated h
auaagcaccuu

SEQ ID NO: 354684 - RNA, 17 nt, Human herpesvirus 8 (Kaposi`s sarcoma-associated h
auaagcugcauacauau

SEQ ID NO: 354685 - RNA, 13 nt, Human herpesvirus 8 (Kaposi`s sarcoma-associated h
auaaugccaauau

SEQ ID NO: 354686 - RNA, 15 nt, Human herpesvirus 8 (Kaposi`s sarcoma-associated h
auaauggauggcuau

SEQ ID NO: 354687 - RNA, 19 nt, Human herpesvirus 8 (Kaposi`s sarcoma-associated h
auaauugagcgcugugcuu

SEQ ID NO: 354688 - RNA, 13 nt, Human herpesvirus 8 (Kaposi`s sarcoma-associated h
auacaaaaacaca

SEQ ID NO: 354689 - RNA, 14 nt, Human herpesvirus 8 (Kaposi`s sarcoma-associated h
auacaaaaacacaa

SEQ ID NO: 354690 - RNA, 16 nt, Human herpesvirus 8 (Kaposi`s sarcoma-associated h
auacagaccauuauag

SEQ ID NO: 354691 - RNA, 17 nt, Human herpesvirus 8 (Kaposi`s sarcoma-associated h
auacagacugcaguuau

SEQ ID NO: 354692 - RNA, 15 nt, Human herpesvirus 8 (Kaposi`s sarcoma-associated h
auacagggacagaug

SEQ ID NO: 354693 - RNA, 19 nt, Human herpesvirus 8 (Kaposi`s sarcoma-associated h
auacagggguaucacuucc

SEQ ID NO: 354694 - RNA, 23 nt, Human herpesvirus 8 (Kaposi`s sarcoma-associated h
auacauagucacaucuguguaca

SEQ ID NO: 354695 - RNA, 17 nt, Human herpesvirus 8 (Kaposi`s sarcoma-associated h
auacaugagagacugca

SEQ ID NO: 354696 - RNA, 22 nt, Human herpesvirus 8 (Kaposi`s sarcoma-associated h
auacauguguuuuucuugguuu

SEQ ID NO: 354697 - RNA, 17 nt, Human herpesvirus 8 (Kaposi`s sarcoma-associated h
auacccuggaucaggga

SEQ ID NO: 354698 - RNA, 20 nt, Human herpesvirus 8 (Kaposi`s sarcoma-associated h
auaccgcgccacguaugggc

SEQ ID NO: 354699 - RNA, 23 nt, Human herpesvirus 8 (Kaposi`s sarcoma-associated h
auacgucccucuuggcuguuaca

SEQ ID NO: 354700 - RNA, 18 nt, Human herpesvirus 8 (Kaposi`s sarcoma-associated h
auacucccucccauaaca

SEQ ID NO: 354701 - RNA, 16 nt, Human herpesvirus 8 (Kaposi`s sarcoma-associated h
auagaugaaacauucg

SEQ ID NO: 354702 - RNA, 17 nt, Human herpesvirus 8 (Kaposi`s sarcoma-associated h
auaggcaacaugacaug

SEQ ID NO: 354703 - RNA, 17 nt, Human herpesvirus 8 (Kaposi`s sarcoma-associated h
auagggauacuguuuau

SEQ ID NO: 354704 - RNA, 21 nt, Human herpesvirus 8 (Kaposi`s sarcoma-associated h
auagugucuggcuggcagggu

SEQ ID NO: 354705 - RNA, 15 nt, Human herpesvirus 8 (Kaposi`s sarcoma-associated h
auaguguugagguaa

SEQ ID NO: 354706 - RNA, 12 nt, Human herpesvirus 8 (Kaposi`s sarcoma-associated h
auaucauaucaa

SEQ ID NO: 354707 - RNA, 17 nt, Human herpesvirus 8 (Kaposi`s sarcoma-associated h
auaucguugacaugugg

SEQ ID NO: 354708 - RNA, 16 nt, Human herpesvirus 8 (Kaposi`s sarcoma-associated h
auaugcccaacuucau

SEQ ID NO: 354709 - RNA, 22 nt, Human herpesvirus 8 (Kaposi`s sarcoma-associated h
auaugcccaacuucaucacauc

SEQ ID NO: 354710 - RNA, 20 nt, Human herpesvirus 8 (Kaposi`s sarcoma-associated h
auaugggcuuguacaugugu

SEQ ID NO: 354711 - RNA, 16 nt, Human herpesvirus 8 (Kaposi`s sarcoma-associated h
auggaccucugucuuc

SEQ ID NO: 354712 - RNA, 17 nt, Human herpesvirus 8 (Kaposi`s sarcoma-associated h
auggaucccucugacaa

SEQ ID NO: 354713 - RNA, 22 nt, Human herpesvirus 8 (Kaposi`s sarcoma-associated h
auggccuccacccaccaagcua

SEQ ID NO: 354714 - RNA, 18 nt, Human herpesvirus 8 (Kaposi`s sarcoma-associated h
auggccuuuuuaagacaa

SEQ ID NO: 354715 - RNA, 15 nt, Human herpesvirus 8 (Kaposi`s sarcoma-associated h
augggaacuuucauc

SEQ ID NO: 354716 - RNA, 20 nt, Human herpesvirus 8 (Kaposi`s sarcoma-associated h
augggaccguguguggcugu

SEQ ID NO: 354717 - RNA, 15 nt, Human herpesvirus 8 (Kaposi`s sarcoma-associated h
augggguuccagugc

SEQ ID NO: 354718 - RNA, 15 nt, Human herpesvirus 8 (Kaposi`s sarcoma-associated h
augggucuaugauca

SEQ ID NO: 354719 - RNA, 15 nt, Human herpesvirus 8 (Kaposi`s sarcoma-associated h
augggugaccacaua

SEQ ID NO: 354720 - RNA, 12 nt, Human herpesvirus 8 (Kaposi`s sarcoma-associated h
auggguggaauu

SEQ ID NO: 354721 - RNA, 17 nt, Human herpesvirus 8 (Kaposi`s sarcoma-associated h
augggugugugccagua

SEQ ID NO: 354722 - RNA, 16 nt, Human herpesvirus 8 (Kaposi`s sarcoma-associated h
auggucauagccagau

SEQ ID NO: 354723 - RNA, 19 nt, Human herpesvirus 8 (Kaposi`s sarcoma-associated h
auggucauagccagauuag

SEQ ID NO: 354724 - RNA, 20 nt, Human herpesvirus 8 (Kaposi`s sarcoma-associated h
augguguaugcguggucucc

SEQ ID NO: 354725 - RNA, 22 nt, Human herpesvirus 8 (Kaposi`s sarcoma-associated h
augguuauuggccaggacaaug

SEQ ID NO: 354726 - RNA, 20 nt, Human herpesvirus 8 (Kaposi`s sarcoma-associated h
augguuuuguguuacacuau

SEQ ID NO: 354727 - RNA, 21 nt, Human herpesvirus 8 (Kaposi`s sarcoma-associated h
auguaagcugcugguucagga

SEQ ID NO: 354728 - RNA, 23 nt, Human herpesvirus 8 (Kaposi`s sarcoma-associated h
auguaaucuuguaguccaaauaa

SEQ ID NO: 354729 - RNA, 21 nt, Human herpesvirus 8 (Kaposi`s sarcoma-associated h
auguaggucuccgagcacugc

SEQ ID NO: 354730 - RNA, 18 nt, Human herpesvirus 8 (Kaposi`s sarcoma-associated h
augucagguuccacccag

SEQ ID NO: 354731 - RNA, 15 nt, Human herpesvirus 8 (Kaposi`s sarcoma-associated h
augucauuuuuacuu

SEQ ID NO: 354732 - RNA, 20 nt, Human herpesvirus 8 (Kaposi`s sarcoma-associated h
augucauuuuuacuuuuaca

SEQ ID NO: 354733 - RNA, 20 nt, Human herpesvirus 8 (Kaposi`s sarcoma-associated h
augugauuacucgcacaagc

SEQ ID NO: 354734 - RNA, 21 nt, Human herpesvirus 8 (Kaposi`s sarcoma-associated h
augugccgcgcaucaaccagc

SEQ ID NO: 354735 - RNA, 19 nt, Human herpesvirus 8 (Kaposi`s sarcoma-associated h
auguggaauauaaugugaa

SEQ ID NO: 354736 - RNA, 19 nt, Human herpesvirus 8 (Kaposi`s sarcoma-associated h
augugggacaacuagaguc

SEQ ID NO: 354737 - RNA, 22 nt, Human herpesvirus 8 (Kaposi`s sarcoma-associated h
auguguguaacuuuuucgugga

SEQ ID NO: 354738 - RNA, 21 nt, Human herpesvirus 8 (Kaposi`s sarcoma-associated h
auguuguuuguauaacaugca

SEQ ID NO: 354739 - RNA, 15 nt, Human herpesvirus 8 (Kaposi`s sarcoma-associated h
auguuuccuguuaua

SEQ ID NO: 354740 - RNA, 15 nt, Human herpesvirus 8 (Kaposi`s sarcoma-associated h
auuaaacacauacaa

SEQ ID NO: 354741 - RNA, 19 nt, Human herpesvirus 8 (Kaposi`s sarcoma-associated h
auuaaacacauacaaugcu

SEQ ID NO: 354742 - RNA, 15 nt, Human herpesvirus 8 (Kaposi`s sarcoma-associated h
auuaccaauacuauu

SEQ ID NO: 354743 - RNA, 16 nt, Human herpesvirus 8 (Kaposi`s sarcoma-associated h
auuaccaauacuauua

SEQ ID NO: 354744 - RNA, 20 nt, Human herpesvirus 8 (Kaposi`s sarcoma-associated h
auuacucgcacaagcgcuga

SEQ ID NO: 354745 - RNA, 13 nt, Human herpesvirus 8 (Kaposi`s sarcoma-associated h
auuagcacuguau

SEQ ID NO: 354746 - RNA, 22 nt, Human herpesvirus 8 (Kaposi`s sarcoma-associated h
auuagcacuguauucucugacu

SEQ ID NO: 354747 - RNA, 17 nt, Human herpesvirus 8 (Kaposi`s sarcoma-associated h
auuagccugcagugugg

SEQ ID NO: 354748 - RNA, 12 nt, Human herpesvirus 8 (Kaposi`s sarcoma-associated h
auuagugacaua

SEQ ID NO: 354749 - RNA, 13 nt, Human herpesvirus 8 (Kaposi`s sarcoma-associated h
auuauaacagcga

SEQ ID NO: 354750 - RNA, 15 nt, Human herpesvirus 8 (Kaposi`s sarcoma-associated h
auuauacacacgggu

SEQ ID NO: 354751 - RNA, 16 nt, Human herpesvirus 8 (Kaposi`s sarcoma-associated h
auuauaggugucaagu

SEQ ID NO: 354752 - RNA, 22 nt, Human herpesvirus 8 (Kaposi`s sarcoma-associated h
auuaucaaagaaaggugacuua

SEQ ID NO: 354753 - RNA, 20 nt, Human herpesvirus 8 (Kaposi`s sarcoma-associated h
auuaugcaguaucuauccaa

SEQ ID NO: 354754 - RNA, 22 nt, Human herpesvirus 8 (Kaposi`s sarcoma-associated h
auuaugcaugcaauacccuguu

SEQ ID NO: 354755 - RNA, 18 nt, Human herpesvirus 8 (Kaposi`s sarcoma-associated h
auucaaaggcgggaucau

SEQ ID NO: 354756 - RNA, 18 nt, Human herpesvirus 8 (Kaposi`s sarcoma-associated h
auucccggucccacauga

SEQ ID NO: 354757 - RNA, 15 nt, Human herpesvirus 8 (Kaposi`s sarcoma-associated h
auuccuccgcacaga

SEQ ID NO: 354758 - RNA, 23 nt, Human herpesvirus 8 (Kaposi`s sarcoma-associated h
auuccucuccgcauuaaagcacu

SEQ ID NO: 354759 - RNA, 22 nt, Human herpesvirus 8 (Kaposi`s sarcoma-associated h
auucggggagcgggguuuccag

SEQ ID NO: 354760 - RNA, 23 nt, Human herpesvirus 8 (Kaposi`s sarcoma-associated h
auucguaagaggacccagggugc

SEQ ID NO: 354761 - RNA, 19 nt, Human herpesvirus 8 (Kaposi`s sarcoma-associated h
auucgugugguuugggaga

SEQ ID NO: 354762 - RNA, 12 nt, Human herpesvirus 8 (Kaposi`s sarcoma-associated h
auucuacuuaaa

SEQ ID NO: 354763 - RNA, 16 nt, Human herpesvirus 8 (Kaposi`s sarcoma-associated h
auucucuccacuagac

SEQ ID NO: 354764 - RNA, 13 nt, Human herpesvirus 8 (Kaposi`s sarcoma-associated h
auucucugguacc

SEQ ID NO: 354765 - RNA, 16 nt, Human herpesvirus 8 (Kaposi`s sarcoma-associated h
auugaagcauguugcg

SEQ ID NO: 354766 - RNA, 14 nt, Human herpesvirus 8 (Kaposi`s sarcoma-associated h
auugagcgcugugc

SEQ ID NO: 354767 - RNA, 21 nt, Human herpesvirus 8 (Kaposi`s sarcoma-associated h
auugaguuugccgagcccguu

SEQ ID NO: 354768 - RNA, 18 nt, Human herpesvirus 8 (Kaposi`s sarcoma-associated h
auugccaacgaccugaug

SEQ ID NO: 354769 - RNA, 19 nt, Human herpesvirus 8 (Kaposi`s sarcoma-associated h
auugcuucauacgcauaua

SEQ ID NO: 354770 - RNA, 22 nt, Human herpesvirus 8 (Kaposi`s sarcoma-associated h
auuggauggggcaugggcacca

SEQ ID NO: 354771 - RNA, 15 nt, Human herpesvirus 8 (Kaposi`s sarcoma-associated h
auuggccaggacaau

SEQ ID NO: 354772 - RNA, 21 nt, Human herpesvirus 8 (Kaposi`s sarcoma-associated h
auuggucuuauaacagugcuc

SEQ ID NO: 354773 - RNA, 15 nt, Human herpesvirus 8 (Kaposi`s sarcoma-associated h
auuggugcguuguga

SEQ ID NO: 354774 - RNA, 16 nt, Human herpesvirus 8 (Kaposi`s sarcoma-associated h
auugguguccagacag

SEQ ID NO: 354775 - RNA, 13 nt, Human herpesvirus 8 (Kaposi`s sarcoma-associated h
auugucuagacac

SEQ ID NO: 354776 - RNA, 19 nt, Human herpesvirus 8 (Kaposi`s sarcoma-associated h
auuuaaugagacuagcugc

SEQ ID NO: 354777 - RNA, 20 nt, Human herpesvirus 8 (Kaposi`s sarcoma-associated h
auuuacaaaugguccggguu

SEQ ID NO: 354778 - RNA, 19 nt, Human herpesvirus 8 (Kaposi`s sarcoma-associated h
auuuacgcgacggaucucu

SEQ ID NO: 354779 - RNA, 14 nt, Human herpesvirus 8 (Kaposi`s sarcoma-associated h
auuuaguacguggu

SEQ ID NO: 354780 - RNA, 22 nt, Human herpesvirus 8 (Kaposi`s sarcoma-associated h
auuuaguacgugguaagggaag

SEQ ID NO: 354781 - RNA, 20 nt, Human herpesvirus 8 (Kaposi`s sarcoma-associated h
auuuauuuuuuacuacaggu

SEQ ID NO: 354782 - RNA, 22 nt, Human herpesvirus 8 (Kaposi`s sarcoma-associated h
auuuauuuuuuacuacagguau

SEQ ID NO: 354783 - RNA, 14 nt, Human herpesvirus 8 (Kaposi`s sarcoma-associated h
auuucacugucacu

SEQ ID NO: 354784 - RNA, 20 nt, Human herpesvirus 8 (Kaposi`s sarcoma-associated h
auuucagcccuuaucagcuc

SEQ ID NO: 354785 - RNA, 17 nt, Human herpesvirus 8 (Kaposi`s sarcoma-associated h
auuucuguuuccaguga

SEQ ID NO: 354786 - RNA, 15 nt, Human herpesvirus 8 (Kaposi`s sarcoma-associated h
auuugaaagcaauaa

SEQ ID NO: 354787 - RNA, 17 nt, Human herpesvirus 8 (Kaposi`s sarcoma-associated h
auuuuaacagccacgac

SEQ ID NO: 354788 - RNA, 22 nt, Human herpesvirus 8 (Kaposi`s sarcoma-associated h
auuuuaugaggucggauacuua

SEQ ID NO: 354789 - RNA, 15 nt, Human herpesvirus 8 (Kaposi`s sarcoma-associated h
cacacauuugucuuu

SEQ ID NO: 354790 - RNA, 13 nt, Human herpesvirus 8 (Kaposi`s sarcoma-associated h
cacacgcugcaau

SEQ ID NO: 354791 - RNA, 15 nt, Human herpesvirus 8 (Kaposi`s sarcoma-associated h
cacacgcugcaaugu

SEQ ID NO: 354792 - RNA, 22 nt, Human herpesvirus 8 (Kaposi`s sarcoma-associated h
cacacgcugcaauguacugcca

SEQ ID NO: 354793 - RNA, 23 nt, Human herpesvirus 8 (Kaposi`s sarcoma-associated h
cacacguagggcuuuacccucug

SEQ ID NO: 354794 - RNA, 12 nt, Human herpesvirus 8 (Kaposi`s sarcoma-associated h
cacacucgcugu

SEQ ID NO: 354795 - RNA, 16 nt, Human herpesvirus 8 (Kaposi`s sarcoma-associated h
cacagagauaugugac

SEQ ID NO: 354796 - RNA, 12 nt, Human herpesvirus 8 (Kaposi`s sarcoma-associated h
cacagagucuac

SEQ ID NO: 354797 - RNA, 19 nt, Human herpesvirus 8 (Kaposi`s sarcoma-associated h
cacagaugugacuauguau

SEQ ID NO: 354798 - RNA, 20 nt, Human herpesvirus 8 (Kaposi`s sarcoma-associated h
cacaggaagcgaaaagccug

SEQ ID NO: 354799 - RNA, 16 nt, Human herpesvirus 8 (Kaposi`s sarcoma-associated h
cacagucacaguucag

SEQ ID NO: 354800 - RNA, 16 nt, Human herpesvirus 8 (Kaposi`s sarcoma-associated h
cacaguguauccccca

SEQ ID NO: 354801 - RNA, 15 nt, Human herpesvirus 8 (Kaposi`s sarcoma-associated h
cacaucgucaucucu

SEQ ID NO: 354802 - RNA, 17 nt, Human herpesvirus 8 (Kaposi`s sarcoma-associated h
cacaugauuugauacag

SEQ ID NO: 354803 - RNA, 15 nt, Human herpesvirus 8 (Kaposi`s sarcoma-associated h
caccaggauccagac

SEQ ID NO: 354804 - RNA, 18 nt, Human herpesvirus 8 (Kaposi`s sarcoma-associated h
caccaucucggccauuau

SEQ ID NO: 354805 - RNA, 14 nt, Human herpesvirus 8 (Kaposi`s sarcoma-associated h
caccauggccacuu

SEQ ID NO: 354806 - RNA, 14 nt, Human herpesvirus 8 (Kaposi`s sarcoma-associated h
cacccaacauccau

SEQ ID NO: 354807 - RNA, 14 nt, Human herpesvirus 8 (Kaposi`s sarcoma-associated h
cacccaauacuuaa

SEQ ID NO: 354808 - RNA, 20 nt, Human herpesvirus 8 (Kaposi`s sarcoma-associated h
caccccagauguucuugcca

SEQ ID NO: 354809 - RNA, 15 nt, Human herpesvirus 8 (Kaposi`s sarcoma-associated h
caccccguucuaauc

SEQ ID NO: 354810 - RNA, 16 nt, Human herpesvirus 8 (Kaposi`s sarcoma-associated h
cacccuacuuagugaa

SEQ ID NO: 354811 - RNA, 20 nt, Human herpesvirus 8 (Kaposi`s sarcoma-associated h
cacccuauuggucacaucuc

SEQ ID NO: 354812 - RNA, 23 nt, Human herpesvirus 8 (Kaposi`s sarcoma-associated h
cacccucccccaccgagugcuuu

SEQ ID NO: 354813 - RNA, 12 nt, Human herpesvirus 8 (Kaposi`s sarcoma-associated h
caccgacacugg

SEQ ID NO: 354814 - RNA, 13 nt, Human herpesvirus 8 (Kaposi`s sarcoma-associated h
caccgagugcuuu

SEQ ID NO: 354815 - RNA, 21 nt, Human herpesvirus 8 (Kaposi`s sarcoma-associated h
caccgcgguccauuagcuuaa

SEQ ID NO: 354816 - RNA, 21 nt, Human herpesvirus 8 (Kaposi`s sarcoma-associated h
caccgucggcggugcauguga

SEQ ID NO: 354817 - RNA, 14 nt, Human herpesvirus 8 (Kaposi`s sarcoma-associated h
caccuguguacaau

SEQ ID NO: 354818 - RNA, 23 nt, Human herpesvirus 8 (Kaposi`s sarcoma-associated h
cacgaaugcucaggucugucacu

SEQ ID NO: 354819 - RNA, 19 nt, Human herpesvirus 8 (Kaposi`s sarcoma-associated h
cacgacacgauguuuucca

SEQ ID NO: 354820 - RNA, 18 nt, Human herpesvirus 8 (Kaposi`s sarcoma-associated h
cacgcacuuggcccugau

SEQ ID NO: 354821 - RNA, 21 nt, Human herpesvirus 8 (Kaposi`s sarcoma-associated h
cacgcgaaugcagcaguagac

SEQ ID NO: 354822 - RNA, 13 nt, Human herpesvirus 8 (Kaposi`s sarcoma-associated h
cacggaaggcagu

SEQ ID NO: 354823 - RNA, 14 nt, Human herpesvirus 8 (Kaposi`s sarcoma-associated h
cacggaguuggcua

SEQ ID NO: 354824 - RNA, 16 nt, Human herpesvirus 8 (Kaposi`s sarcoma-associated h
cacggcgcuguacagu

SEQ ID NO: 354825 - RNA, 20 nt, Human herpesvirus 8 (Kaposi`s sarcoma-associated h
cacgguggcccugccuagug

SEQ ID NO: 354826 - RNA, 20 nt, Human herpesvirus 8 (Kaposi`s sarcoma-associated h
cacgguugcaccaagcacaa

SEQ ID NO: 354827 - RNA, 22 nt, Human herpesvirus 8 (Kaposi`s sarcoma-associated h
cacgguugcaccaagcacaaca

SEQ ID NO: 354828 - RNA, 16 nt, Human herpesvirus 8 (Kaposi`s sarcoma-associated h
cacguaccugaccuga

SEQ ID NO: 354829 - RNA, 19 nt, Human herpesvirus 8 (Kaposi`s sarcoma-associated h
cacguagggcuuuacccuc

SEQ ID NO: 354830 - RNA, 19 nt, Human herpesvirus 8 (Kaposi`s sarcoma-associated h
cacgucgcucuuuacuuau

SEQ ID NO: 354831 - RNA, 21 nt, Human herpesvirus 8 (Kaposi`s sarcoma-associated h
cacguugggagugugcacuag

SEQ ID NO: 354832 - RNA, 24 nt, Human herpesvirus 8 (Kaposi`s sarcoma-associated h
cacuaaaaccggaguagugcaagu

SEQ ID NO: 354833 - RNA, 17 nt, Human herpesvirus 8 (Kaposi`s sarcoma-associated h
cacuaaccacaacaaua

SEQ ID NO: 354834 - RNA, 20 nt, Human herpesvirus 8 (Kaposi`s sarcoma-associated h
cacuagaauuggagcacuuu

SEQ ID NO: 354835 - RNA, 23 nt, Human herpesvirus 8 (Kaposi`s sarcoma-associated h
cacuauaaauaucauugccguua

SEQ ID NO: 354836 - RNA, 20 nt, Human herpesvirus 8 (Kaposi`s sarcoma-associated h
cacuauggggucagggugga

SEQ ID NO: 354837 - RNA, 21 nt, Human herpesvirus 8 (Kaposi`s sarcoma-associated h
cacucuauauggcaacugcca

SEQ ID NO: 354838 - RNA, 22 nt, Human herpesvirus 8 (Kaposi`s sarcoma-associated h
cacucuauauggcaacugccaa

SEQ ID NO: 354839 - RNA, 21 nt, Human herpesvirus 8 (Kaposi`s sarcoma-associated h
cacuguggauuuuauggacau

SEQ ID NO: 354840 - RNA, 20 nt, Human herpesvirus 8 (Kaposi`s sarcoma-associated h
cacuguuauaagaccaauca

SEQ ID NO: 354841 - RNA, 16 nt, Human herpesvirus 8 (Kaposi`s sarcoma-associated h
cacuguucuccacgua

SEQ ID NO: 354842 - RNA, 13 nt, Human herpesvirus 8 (Kaposi`s sarcoma-associated h
cacuucccaauaa

SEQ ID NO: 354843 - RNA, 17 nt, Human herpesvirus 8 (Kaposi`s sarcoma-associated h
cacuucuccguugacag

SEQ ID NO: 354844 - RNA, 15 nt, Human herpesvirus 8 (Kaposi`s sarcoma-associated h
cagaaacugcucucg

SEQ ID NO: 354845 - RNA, 19 nt, Human herpesvirus 8 (Kaposi`s sarcoma-associated h
cagaacaguacccacgaaa

SEQ ID NO: 354846 - RNA, 23 nt, Human herpesvirus 8 (Kaposi`s sarcoma-associated h
cagaaccgaugguuuccuagcca

SEQ ID NO: 354847 - RNA, 16 nt, Human herpesvirus 8 (Kaposi`s sarcoma-associated h
cagaacguaagguuac

SEQ ID NO: 354848 - RNA, 13 nt, Human herpesvirus 8 (Kaposi`s sarcoma-associated h
cagaagacccaga

SEQ ID NO: 354849 - RNA, 15 nt, Human herpesvirus 8 (Kaposi`s sarcoma-associated h
cagaagacccagaaa

SEQ ID NO: 354850 - RNA, 19 nt, Human herpesvirus 8 (Kaposi`s sarcoma-associated h
cagaagaccgcguccucca

SEQ ID NO: 354851 - RNA, 23 nt, Human herpesvirus 8 (Kaposi`s sarcoma-associated h
cagaagggggcggcguuuccaua

SEQ ID NO: 354852 - RNA, 12 nt, Human herpesvirus 8 (Kaposi`s sarcoma-associated h
cagacaccaaag

SEQ ID NO: 354853 - RNA, 16 nt, Human herpesvirus 8 (Kaposi`s sarcoma-associated h
cagacccaaaaaggac

SEQ ID NO: 354854 - RNA, 19 nt, Human herpesvirus 8 (Kaposi`s sarcoma-associated h
cagacgguccaaagcuuac

SEQ ID NO: 354855 - RNA, 15 nt, Human herpesvirus 8 (Kaposi`s sarcoma-associated h
cagacggucuuuagg

SEQ ID NO: 354856 - RNA, 15 nt, Human herpesvirus 8 (Kaposi`s sarcoma-associated h
cagacguccaguucc

SEQ ID NO: 354857 - RNA, 16 nt, Human herpesvirus 8 (Kaposi`s sarcoma-associated h
cagagaauaaagccaa

SEQ ID NO: 354858 - RNA, 16 nt, Human herpesvirus 8 (Kaposi`s sarcoma-associated h
cagagaauacagugcu

SEQ ID NO: 354859 - RNA, 17 nt, Human herpesvirus 8 (Kaposi`s sarcoma-associated h
cagagaauacagugcua

SEQ ID NO: 354860 - RNA, 19 nt, Human herpesvirus 8 (Kaposi`s sarcoma-associated h
cagagacucaauuggaugc

SEQ ID NO: 354861 - RNA, 13 nt, Human herpesvirus 8 (Kaposi`s sarcoma-associated h
cagagaucacggc

SEQ ID NO: 354862 - RNA, 15 nt, Human herpesvirus 8 (Kaposi`s sarcoma-associated h
cagagccuaccccaa

SEQ ID NO: 354863 - RNA, 18 nt, Human herpesvirus 8 (Kaposi`s sarcoma-associated h
cagagccuucacggcaca

SEQ ID NO: 354864 - RNA, 21 nt, Human herpesvirus 8 (Kaposi`s sarcoma-associated h
cagagcguagaugaaugucuc

SEQ ID NO: 354865 - RNA, 21 nt, Human herpesvirus 8 (Kaposi`s sarcoma-associated h
cagaggcaacguucauccuag

SEQ ID NO: 354866 - RNA, 18 nt, Human herpesvirus 8 (Kaposi`s sarcoma-associated h
cagagggcguguccagga

SEQ ID NO: 354867 - RNA, 18 nt, Human herpesvirus 8 (Kaposi`s sarcoma-associated h
cagagucuacgugccagu

SEQ ID NO: 354868 - RNA, 13 nt, Human herpesvirus 8 (Kaposi`s sarcoma-associated h
caucucggccauu

SEQ ID NO: 354869 - RNA, 14 nt, Human herpesvirus 8 (Kaposi`s sarcoma-associated h
caucucgguacugc

SEQ ID NO: 354870 - RNA, 21 nt, Human herpesvirus 8 (Kaposi`s sarcoma-associated h
caucuguguacaaaccaaauu

SEQ ID NO: 354871 - RNA, 14 nt, Human herpesvirus 8 (Kaposi`s sarcoma-associated h
caucuucauucucu

SEQ ID NO: 354872 - RNA, 22 nt, Human herpesvirus 8 (Kaposi`s sarcoma-associated h
caucuuugggcuagugccaaau

SEQ ID NO: 354873 - RNA, 22 nt, Human herpesvirus 8 (Kaposi`s sarcoma-associated h
caugaaagacugccugaggcuu

SEQ ID NO: 354874 - RNA, 19 nt, Human herpesvirus 8 (Kaposi`s sarcoma-associated h
caugacauggucugacaac

SEQ ID NO: 354875 - RNA, 22 nt, Human herpesvirus 8 (Kaposi`s sarcoma-associated h
caugacauggucugacaacaua

SEQ ID NO: 354876 - RNA, 20 nt, Human herpesvirus 8 (Kaposi`s sarcoma-associated h
caugacuacgcucaccaucc

SEQ ID NO: 354877 - RNA, 21 nt, Human herpesvirus 8 (Kaposi`s sarcoma-associated h
caugagccucccuuagugaca

SEQ ID NO: 354878 - RNA, 20 nt, Human herpesvirus 8 (Kaposi`s sarcoma-associated h
caugauuugauacagggaca

SEQ ID NO: 354879 - RNA, 22 nt, Human herpesvirus 8 (Kaposi`s sarcoma-associated h
caugcccacccuguacaugaac

SEQ ID NO: 354880 - RNA, 18 nt, Human herpesvirus 8 (Kaposi`s sarcoma-associated h
caugccuuucuguaauca

SEQ ID NO: 354881 - RNA, 17 nt, Human herpesvirus 8 (Kaposi`s sarcoma-associated h
caugcgucgccguagug

SEQ ID NO: 354882 - RNA, 19 nt, Human herpesvirus 8 (Kaposi`s sarcoma-associated h
caugcuagggcgauaccgc

SEQ ID NO: 354883 - RNA, 19 nt, Human herpesvirus 8 (Kaposi`s sarcoma-associated h
caugcucggcaacauucaa

SEQ ID NO: 354884 - RNA, 23 nt, Human herpesvirus 8 (Kaposi`s sarcoma-associated h
caugcugaugcgaaugugccagc

SEQ ID NO: 354885 - RNA, 15 nt, Human herpesvirus 8 (Kaposi`s sarcoma-associated h
cauggagguguguau

SEQ ID NO: 354886 - RNA, 19 nt, Human herpesvirus 8 (Kaposi`s sarcoma-associated h
cauggauccuacacuuuac

SEQ ID NO: 354887 - RNA, 16 nt, Human herpesvirus 8 (Kaposi`s sarcoma-associated h
cauggcagcugaauca

SEQ ID NO: 354888 - RNA, 14 nt, Human herpesvirus 8 (Kaposi`s sarcoma-associated h
cauggcaucccaua

SEQ ID NO: 354889 - RNA, 16 nt, Human herpesvirus 8 (Kaposi`s sarcoma-associated h
cauggccggacaccac

SEQ ID NO: 354890 - RNA, 14 nt, Human herpesvirus 8 (Kaposi`s sarcoma-associated h
cauggccuuuuuaa

SEQ ID NO: 354891 - RNA, 15 nt, Human herpesvirus 8 (Kaposi`s sarcoma-associated h
caugggcaccacgga

SEQ ID NO: 354892 - RNA, 18 nt, Human herpesvirus 8 (Kaposi`s sarcoma-associated h
caugguacaagcaaugau

SEQ ID NO: 354893 - RNA, 20 nt, Human herpesvirus 8 (Kaposi`s sarcoma-associated h
caugucuguccggacauuuu

SEQ ID NO: 354894 - RNA, 22 nt, Human herpesvirus 8 (Kaposi`s sarcoma-associated h
caugugaacaauaaacacguuu

SEQ ID NO: 354895 - RNA, 16 nt, Human herpesvirus 8 (Kaposi`s sarcoma-associated h
caugugcugguucaag

SEQ ID NO: 354896 - RNA, 13 nt, Human herpesvirus 8 (Kaposi`s sarcoma-associated h
cauguggagccac

SEQ ID NO: 354897 - RNA, 12 nt, Human herpesvirus 8 (Kaposi`s sarcoma-associated h
cauuaaacacau

SEQ ID NO: 354898 - RNA, 22 nt, Human herpesvirus 8 (Kaposi`s sarcoma-associated h
cauuaaaugaacauuguucaaa

SEQ ID NO: 354899 - RNA, 19 nt, Human herpesvirus 8 (Kaposi`s sarcoma-associated h
cauuaacaaacaaggucaa

SEQ ID NO: 354900 - RNA, 16 nt, Human herpesvirus 8 (Kaposi`s sarcoma-associated h
cauuaagagugccacu

SEQ ID NO: 354901 - RNA, 23 nt, Human herpesvirus 8 (Kaposi`s sarcoma-associated h
cauuaccaauacuauuauaacau

SEQ ID NO: 354902 - RNA, 17 nt, Human herpesvirus 8 (Kaposi`s sarcoma-associated h
cauuagugacauacaug

SEQ ID NO: 354903 - RNA, 18 nt, Human herpesvirus 8 (Kaposi`s sarcoma-associated h
cauuagugacauacauga

SEQ ID NO: 354904 - RNA, 19 nt, Human herpesvirus 8 (Kaposi`s sarcoma-associated h
cauuauaaacccaucccuc

SEQ ID NO: 354905 - RNA, 14 nt, Human herpesvirus 8 (Kaposi`s sarcoma-associated h
cauucucuccacua

SEQ ID NO: 354906 - RNA, 22 nt, Human herpesvirus 8 (Kaposi`s sarcoma-associated h
cauucucuccacuagacuccag

SEQ ID NO: 354907 - RNA, 21 nt, Human herpesvirus 8 (Kaposi`s sarcoma-associated h
cauuggauuggaucaacuaag

SEQ ID NO: 354908 - RNA, 19 nt, Human herpesvirus 8 (Kaposi`s sarcoma-associated h
cauuggcuguguacacucg

SEQ ID NO: 354909 - RNA, 22 nt, Human herpesvirus 8 (Kaposi`s sarcoma-associated h
cauuguauaaccgugcuacuua

SEQ ID NO: 354910 - RNA, 20 nt, Human herpesvirus 8 (Kaposi`s sarcoma-associated h
cauuugcgugcaaaaugugc

SEQ ID NO: 354911 - RNA, 18 nt, Human herpesvirus 8 (Kaposi`s sarcoma-associated h
cauuuuguaaugaauaac

SEQ ID NO: 354912 - RNA, 22 nt, Human herpesvirus 8 (Kaposi`s sarcoma-associated h
cauuuuuuacggacaauacuga

SEQ ID NO: 354913 - RNA, 22 nt, Human herpesvirus 8 (Kaposi`s sarcoma-associated h
ccaaaauucgcagggagacaag

SEQ ID NO: 354914 - RNA, 12 nt, Human herpesvirus 8 (Kaposi`s sarcoma-associated h
ccaaaccaguaa

SEQ ID NO: 354915 - RNA, 15 nt, Human herpesvirus 8 (Kaposi`s sarcoma-associated h
ccaaauuaugcagua

SEQ ID NO: 354916 - RNA, 21 nt, Human herpesvirus 8 (Kaposi`s sarcoma-associated h
ccaacaagacaguugugaucu

SEQ ID NO: 354917 - RNA, 13 nt, Human herpesvirus 8 (Kaposi`s sarcoma-associated h
ccaacaauauuau

SEQ ID NO: 354918 - RNA, 14 nt, Human herpesvirus 8 (Kaposi`s sarcoma-associated h
ccaacaauauuauu

SEQ ID NO: 354919 - RNA, 16 nt, Human herpesvirus 8 (Kaposi`s sarcoma-associated h
ccaacccucagugugc

SEQ ID NO: 354920 - RNA, 19 nt, Human herpesvirus 8 (Kaposi`s sarcoma-associated h
ccaaccuggcaagcagugg

SEQ ID NO: 354921 - RNA, 17 nt, Human herpesvirus 8 (Kaposi`s sarcoma-associated h
ccaacgaccugaugcag

SEQ ID NO: 354922 - RNA, 15 nt, Human herpesvirus 8 (Kaposi`s sarcoma-associated h
ccaagccucccguga

SEQ ID NO: 354923 - RNA, 14 nt, Human herpesvirus 8 (Kaposi`s sarcoma-associated h
ccaagcuacuggcc

SEQ ID NO: 354924 - RNA, 13 nt, Human herpesvirus 8 (Kaposi`s sarcoma-associated h
ccaaguauggaau

SEQ ID NO: 354925 - RNA, 12 nt, Human herpesvirus 8 (Kaposi`s sarcoma-associated h
ccaagugcauug

SEQ ID NO: 354926 - RNA, 20 nt, Human herpesvirus 8 (Kaposi`s sarcoma-associated h
ccaauaaugcaaugcuuccc

SEQ ID NO: 354927 - RNA, 13 nt, Human herpesvirus 8 (Kaposi`s sarcoma-associated h
ccaauacuauuau

SEQ ID NO: 354928 - RNA, 18 nt, Human herpesvirus 8 (Kaposi`s sarcoma-associated h
ccaauguuaauguucucu

SEQ ID NO: 354929 - RNA, 15 nt, Human herpesvirus 8 (Kaposi`s sarcoma-associated h
ccaauugacugugga

SEQ ID NO: 354930 - RNA, 22 nt, Human herpesvirus 8 (Kaposi`s sarcoma-associated h
ccaauuucaguacuccuuccca

SEQ ID NO: 354931 - RNA, 16 nt, Human herpesvirus 8 (Kaposi`s sarcoma-associated h
ccacaaaacugccaaa

SEQ ID NO: 354932 - RNA, 19 nt, Human herpesvirus 8 (Kaposi`s sarcoma-associated h
ccacaaacacaaucuggca

SEQ ID NO: 354933 - RNA, 15 nt, Human herpesvirus 8 (Kaposi`s sarcoma-associated h
ccacaaaguacauaa

SEQ ID NO: 354934 - RNA, 19 nt, Human herpesvirus 8 (Kaposi`s sarcoma-associated h
ccacaaaguacauaagugu

SEQ ID NO: 354935 - RNA, 14 nt, Human herpesvirus 8 (Kaposi`s sarcoma-associated h
ccacaaauaaugaa

SEQ ID NO: 354936 - RNA, 14 nt, Human herpesvirus 8 (Kaposi`s sarcoma-associated h
ccacaagggccaag

SEQ ID NO: 354937 - RNA, 23 nt, Human herpesvirus 8 (Kaposi`s sarcoma-associated h
ccacaagggccaagcuacuggcc

SEQ ID NO: 354938 - RNA, 13 nt, Human herpesvirus 8 (Kaposi`s sarcoma-associated h
ccacagcaucccc

SEQ ID NO: 354939 - RNA, 15 nt, Human herpesvirus 8 (Kaposi`s sarcoma-associated h
ccacauaauuggaug

SEQ ID NO: 354940 - RNA, 18 nt, Human herpesvirus 8 (Kaposi`s sarcoma-associated h
ccacaucggugccuucac

SEQ ID NO: 354941 - RNA, 22 nt, Human herpesvirus 8 (Kaposi`s sarcoma-associated h
ccacaugauuugauacagggac

SEQ ID NO: 354942 - RNA, 21 nt, Human herpesvirus 8 (Kaposi`s sarcoma-associated h
ccacauuccccccgugcacaa

SEQ ID NO: 354943 - RNA, 13 nt, Human herpesvirus 8 (Kaposi`s sarcoma-associated h
ccacccaccuacu

SEQ ID NO: 354944 - RNA, 22 nt, Human herpesvirus 8 (Kaposi`s sarcoma-associated h
ccaccgacaaagcgucuuuaug

SEQ ID NO: 354945 - RNA, 18 nt, Human herpesvirus 8 (Kaposi`s sarcoma-associated h
ccaccguaaucgugcagg

SEQ ID NO: 354946 - RNA, 23 nt, Human herpesvirus 8 (Kaposi`s sarcoma-associated h
cccucguguuugggcaaaacaca

SEQ ID NO: 354947 - RNA, 16 nt, Human herpesvirus 8 (Kaposi`s sarcoma-associated h
cccucuuggcuguuac

SEQ ID NO: 354948 - RNA, 17 nt, Human herpesvirus 8 (Kaposi`s sarcoma-associated h
cccucuuggcuguuaca

SEQ ID NO: 354949 - RNA, 21 nt, Human herpesvirus 8 (Kaposi`s sarcoma-associated h
cccucuuggcuguuacaauaa

SEQ ID NO: 354950 - RNA, 14 nt, Human herpesvirus 8 (Kaposi`s sarcoma-associated h
cccugaaacuccag

SEQ ID NO: 354951 - RNA, 16 nt, Human herpesvirus 8 (Kaposi`s sarcoma-associated h
cccugaaaugaucguc

SEQ ID NO: 354952 - RNA, 16 nt, Human herpesvirus 8 (Kaposi`s sarcoma-associated h
cccugacagaguugug

SEQ ID NO: 354953 - RNA, 16 nt, Human herpesvirus 8 (Kaposi`s sarcoma-associated h
cccugauuagcacugu

SEQ ID NO: 354954 - RNA, 18 nt, Human herpesvirus 8 (Kaposi`s sarcoma-associated h
cccugauuagcacuguau

SEQ ID NO: 354955 - RNA, 22 nt, Human herpesvirus 8 (Kaposi`s sarcoma-associated h
cccugcccucaaauucucacaa

SEQ ID NO: 354956 - RNA, 17 nt, Human herpesvirus 8 (Kaposi`s sarcoma-associated h
ccgaaguacugcuuaaa

SEQ ID NO: 354957 - RNA, 14 nt, Human herpesvirus 8 (Kaposi`s sarcoma-associated h
ccgaaugcguucuc

SEQ ID NO: 354958 - RNA, 16 nt, Human herpesvirus 8 (Kaposi`s sarcoma-associated h
ccgagcguauucucag

SEQ ID NO: 354959 - RNA, 16 nt, Human herpesvirus 8 (Kaposi`s sarcoma-associated h
ccgcaaagauaagcca

SEQ ID NO: 354960 - RNA, 21 nt, Human herpesvirus 8 (Kaposi`s sarcoma-associated h
ccgcaaucaugccuguggauu

SEQ ID NO: 354961 - RNA, 17 nt, Human herpesvirus 8 (Kaposi`s sarcoma-associated h
ccgccaucaccaacaag

SEQ ID NO: 354962 - RNA, 16 nt, Human herpesvirus 8 (Kaposi`s sarcoma-associated h
ccgcgagacaucagaa

SEQ ID NO: 354963 - RNA, 16 nt, Human herpesvirus 8 (Kaposi`s sarcoma-associated h
ccgcgcaucaaccagc

SEQ ID NO: 354964 - RNA, 14 nt, Human herpesvirus 8 (Kaposi`s sarcoma-associated h
ccgcgccacguaug

SEQ ID NO: 354965 - RNA, 22 nt, Human herpesvirus 8 (Kaposi`s sarcoma-associated h
ccgcgcccaggggcagacccaa

SEQ ID NO: 354966 - RNA, 21 nt, Human herpesvirus 8 (Kaposi`s sarcoma-associated h
ccgcuaagaaaaucgaagcca

SEQ ID NO: 354967 - RNA, 23 nt, Human herpesvirus 8 (Kaposi`s sarcoma-associated h
ccgcuaagaaaaucgaagccagg

SEQ ID NO: 354968 - RNA, 21 nt, Human herpesvirus 8 (Kaposi`s sarcoma-associated h
ccgcuacugugggugcacuga

SEQ ID NO: 354969 - RNA, 17 nt, Human herpesvirus 8 (Kaposi`s sarcoma-associated h
ccgcucucccaaaccac

SEQ ID NO: 354970 - RNA, 22 nt, Human herpesvirus 8 (Kaposi`s sarcoma-associated h
ccgcugcuauuuuucaucugaa

SEQ ID NO: 354971 - RNA, 20 nt, Human herpesvirus 8 (Kaposi`s sarcoma-associated h
ccgcuugaccugcaaacuuu

SEQ ID NO: 354972 - RNA, 16 nt, Human herpesvirus 8 (Kaposi`s sarcoma-associated h
ccggacuacauccaaa

SEQ ID NO: 354973 - RNA, 21 nt, Human herpesvirus 8 (Kaposi`s sarcoma-associated h
ccggagagcgucaucugcgaa

SEQ ID NO: 354974 - RNA, 16 nt, Human herpesvirus 8 (Kaposi`s sarcoma-associated h
ccggaguagugcaagu

SEQ ID NO: 354975 - RNA, 12 nt, Human herpesvirus 8 (Kaposi`s sarcoma-associated h
ccggauuugccc

SEQ ID NO: 354976 - RNA, 14 nt, Human herpesvirus 8 (Kaposi`s sarcoma-associated h
ccggcgacaaugaa

SEQ ID NO: 354977 - RNA, 13 nt, Human herpesvirus 8 (Kaposi`s sarcoma-associated h
ccgggaacggaca

SEQ ID NO: 354978 - RNA, 19 nt, Human herpesvirus 8 (Kaposi`s sarcoma-associated h
ccgggaucuguuacuggca

SEQ ID NO: 354979 - RNA, 23 nt, Human herpesvirus 8 (Kaposi`s sarcoma-associated h
ccggguuaugggugugugccagu

SEQ ID NO: 354980 - RNA, 20 nt, Human herpesvirus 8 (Kaposi`s sarcoma-associated h
ccguaucggacuuuggauaa

SEQ ID NO: 354981 - RNA, 15 nt, Human herpesvirus 8 (Kaposi`s sarcoma-associated h
ccguccaccauuccu

SEQ ID NO: 354982 - RNA, 14 nt, Human herpesvirus 8 (Kaposi`s sarcoma-associated h
ccguccccuucuuc

SEQ ID NO: 354983 - RNA, 19 nt, Human herpesvirus 8 (Kaposi`s sarcoma-associated h
ccgucgucgagcacuccug

SEQ ID NO: 354984 - RNA, 13 nt, Human herpesvirus 8 (Kaposi`s sarcoma-associated h
ccgucuguauacg

SEQ ID NO: 354985 - RNA, 23 nt, Human herpesvirus 8 (Kaposi`s sarcoma-associated h
ccgugcguuugcagugugcagua

SEQ ID NO: 354986 - RNA, 19 nt, Human herpesvirus 8 (Kaposi`s sarcoma-associated h
ccguggcucauaacacagu

SEQ ID NO: 354987 - RNA, 21 nt, Human herpesvirus 8 (Kaposi`s sarcoma-associated h
ccguucuaaucuggcauguau

SEQ ID NO: 354988 - RNA, 15 nt, Human herpesvirus 8 (Kaposi`s sarcoma-associated h
ccguuguucuuugcg

SEQ ID NO: 354989 - RNA, 21 nt, Human herpesvirus 8 (Kaposi`s sarcoma-associated h
ccguuuuauuugaaagcaaua

SEQ ID NO: 354990 - RNA, 13 nt, Human herpesvirus 8 (Kaposi`s sarcoma-associated h
ccuacacugcauu

SEQ ID NO: 354991 - RNA, 20 nt, Human herpesvirus 8 (Kaposi`s sarcoma-associated h
ccuacugccugucagauuua

SEQ ID NO: 354992 - RNA, 20 nt, Human herpesvirus 8 (Kaposi`s sarcoma-associated h
ccuaggugacugggagauaa

SEQ ID NO: 354993 - RNA, 19 nt, Human herpesvirus 8 (Kaposi`s sarcoma-associated h
ccuaggugggugugcauuu

SEQ ID NO: 354994 - RNA, 14 nt, Human herpesvirus 8 (Kaposi`s sarcoma-associated h
ccuagucacuccau

SEQ ID NO: 354995 - RNA, 16 nt, Human herpesvirus 8 (Kaposi`s sarcoma-associated h
ccuaguuaacuuuaac

SEQ ID NO: 354996 - RNA, 21 nt, Human herpesvirus 8 (Kaposi`s sarcoma-associated h
ccucaacccacacuggcccaa

SEQ ID NO: 354997 - RNA, 17 nt, Human herpesvirus 8 (Kaposi`s sarcoma-associated h
ccucaagcauugaguuu

SEQ ID NO: 354998 - RNA, 18 nt, Human herpesvirus 8 (Kaposi`s sarcoma-associated h
ccucagcaacugcgucau

SEQ ID NO: 354999 - RNA, 17 nt, Human herpesvirus 8 (Kaposi`s sarcoma-associated h
ccuccguuuugcacuau

SEQ ID NO: 355000 - RNA, 20 nt, Human herpesvirus 8 (Kaposi`s sarcoma-associated h
ccucuccgcauuaaagcacu

SEQ ID NO: 355001 - RNA, 18 nt, Human herpesvirus 8 (Kaposi`s sarcoma-associated h
ccucuggccugugcccaa

SEQ ID NO: 355002 - RNA, 14 nt, Human herpesvirus 8 (Kaposi`s sarcoma-associated h
ccucuguacaugga

SEQ ID NO: 355003 - RNA, 22 nt, Human herpesvirus 8 (Kaposi`s sarcoma-associated h
ccucuugcgcgaccugcuucac

SEQ ID NO: 355004 - RNA, 19 nt, Human herpesvirus 8 (Kaposi`s sarcoma-associated h
ccucuuggcuguuacaaua

SEQ ID NO: 355005 - RNA, 18 nt, Human herpesvirus 8 (Kaposi`s sarcoma-associated h
ccugaaacgucgcccaaa

SEQ ID NO: 355006 - RNA, 10 nt, Human herpesvirus 8 (Kaposi`s sarcoma-associated h
ccugaguaua

SEQ ID NO: 355007 - RNA, 15 nt, Human herpesvirus 8 (Kaposi`s sarcoma-associated h
ccugauuagcacugu

SEQ ID NO: 355008 - RNA, 17 nt, Human herpesvirus 8 (Kaposi`s sarcoma-associated h
ccugcacuccaagccag

SEQ ID NO: 355009 - RNA, 15 nt, Human herpesvirus 8 (Kaposi`s sarcoma-associated h
ccugcagugugggga

SEQ ID NO: 355010 - RNA, 20 nt, Human herpesvirus 8 (Kaposi`s sarcoma-associated h
ccugcccucaaauucucaca

SEQ ID NO: 355011 - RNA, 17 nt, Human herpesvirus 8 (Kaposi`s sarcoma-associated h
ccuggacaguauucuca

SEQ ID NO: 355012 - RNA, 18 nt, Human herpesvirus 8 (Kaposi`s sarcoma-associated h
ccuggacaguauucucac

SEQ ID NO: 355013 - RNA, 18 nt, Human herpesvirus 8 (Kaposi`s sarcoma-associated h
ccuggacgauguacuuga

SEQ ID NO: 355014 - RNA, 20 nt, Human herpesvirus 8 (Kaposi`s sarcoma-associated h
ccuggcaagcaguggagcaa

SEQ ID NO: 355015 - RNA, 13 nt, Human herpesvirus 8 (Kaposi`s sarcoma-associated h
ccuggcugcaaag

SEQ ID NO: 355016 - RNA, 13 nt, Human herpesvirus 8 (Kaposi`s sarcoma-associated h
ccugucagauuua

SEQ ID NO: 355017 - RNA, 12 nt, Human herpesvirus 8 (Kaposi`s sarcoma-associated h
ccugugcccaac

SEQ ID NO: 355018 - RNA, 17 nt, Human herpesvirus 8 (Kaposi`s sarcoma-associated h
ccuuaaacacaacacca

SEQ ID NO: 355019 - RNA, 16 nt, Human herpesvirus 8 (Kaposi`s sarcoma-associated h
ccuuaagaaaguggau

SEQ ID NO: 355020 - RNA, 21 nt, Human herpesvirus 8 (Kaposi`s sarcoma-associated h
ccuuaauuggauauagacuua

SEQ ID NO: 355021 - RNA, 15 nt, Human herpesvirus 8 (Kaposi`s sarcoma-associated h
ccuuaauuuaaucua

SEQ ID NO: 355022 - RNA, 15 nt, Human herpesvirus 8 (Kaposi`s sarcoma-associated h
ccuuaugucaguucc

SEQ ID NO: 355023 - RNA, 14 nt, Human herpesvirus 8 (Kaposi`s sarcoma-associated h
cgaaagcuucaucg

SEQ ID NO: 355024 - RNA, 13 nt, Human herpesvirus 8 (Kaposi`s sarcoma-associated h
cgaauaaaacagg

SEQ ID NO: 355025 - RNA, 14 nt, Human herpesvirus 8 (Kaposi`s sarcoma-associated h
cguuagcagccaug

SEQ ID NO: 355026 - RNA, 22 nt, Human herpesvirus 8 (Kaposi`s sarcoma-associated h
cguucuccuucuugauguuuaa

SEQ ID NO: 355027 - RNA, 15 nt, Human herpesvirus 8 (Kaposi`s sarcoma-associated h
cguugacugccacgg

SEQ ID NO: 355028 - RNA, 22 nt, Human herpesvirus 8 (Kaposi`s sarcoma-associated h
cguugucccucagccacaaaua

SEQ ID NO: 355029 - RNA, 17 nt, Human herpesvirus 8 (Kaposi`s sarcoma-associated h
cguuuugaacaauguuc

SEQ ID NO: 355030 - RNA, 19 nt, Human herpesvirus 8 (Kaposi`s sarcoma-associated h
cuaaaaucaggagggucaa

SEQ ID NO: 355031 - RNA, 23 nt, Human herpesvirus 8 (Kaposi`s sarcoma-associated h
cuaaaaucaggagggucaaugaa

SEQ ID NO: 355032 - RNA, 21 nt, Human herpesvirus 8 (Kaposi`s sarcoma-associated h
cuaaagauaccgaccaauaca

SEQ ID NO: 355033 - RNA, 14 nt, Human herpesvirus 8 (Kaposi`s sarcoma-associated h
cuaaccgcaaagau

SEQ ID NO: 355034 - RNA, 11 nt, Human herpesvirus 8 (Kaposi`s sarcoma-associated h
cuaagccucaa

SEQ ID NO: 355035 - RNA, 18 nt, Human herpesvirus 8 (Kaposi`s sarcoma-associated h
cuaaggcccccaccaaac

SEQ ID NO: 355036 - RNA, 16 nt, Human herpesvirus 8 (Kaposi`s sarcoma-associated h
cuaagucgcacguuag

SEQ ID NO: 355037 - RNA, 13 nt, Human herpesvirus 8 (Kaposi`s sarcoma-associated h
cuaauaaacuggc

SEQ ID NO: 355038 - RNA, 19 nt, Human herpesvirus 8 (Kaposi`s sarcoma-associated h
cuaauacauaacacacaca

SEQ ID NO: 355039 - RNA, 22 nt, Human herpesvirus 8 (Kaposi`s sarcoma-associated h
cuaaucaggguagaugagcaug

SEQ ID NO: 355040 - RNA, 15 nt, Human herpesvirus 8 (Kaposi`s sarcoma-associated h
cuaaucuggcaugua

SEQ ID NO: 355041 - RNA, 16 nt, Human herpesvirus 8 (Kaposi`s sarcoma-associated h
cuacacuuuacugugu

SEQ ID NO: 355042 - RNA, 17 nt, Human herpesvirus 8 (Kaposi`s sarcoma-associated h
cuacagauucuacuuaa

SEQ ID NO: 355043 - RNA, 18 nt, Human herpesvirus 8 (Kaposi`s sarcoma-associated h
cuaccugccggacacuga

SEQ ID NO: 355044 - RNA, 16 nt, Human herpesvirus 8 (Kaposi`s sarcoma-associated h
cuacuaagaguucccc

SEQ ID NO: 355045 - RNA, 18 nt, Human herpesvirus 8 (Kaposi`s sarcoma-associated h
cuacuaauguaaccuaaa

SEQ ID NO: 355046 - RNA, 14 nt, Human herpesvirus 8 (Kaposi`s sarcoma-associated h
cuacugcacaaaau

SEQ ID NO: 355047 - RNA, 18 nt, Human herpesvirus 8 (Kaposi`s sarcoma-associated h
cuacugugaaguuuacau

SEQ ID NO: 355048 - RNA, 21 nt, Human herpesvirus 8 (Kaposi`s sarcoma-associated h
cuacugugaaguuuacauuau

SEQ ID NO: 355049 - RNA, 23 nt, Human herpesvirus 8 (Kaposi`s sarcoma-associated h
cuagaaagcggauugaguguaaa

SEQ ID NO: 355050 - RNA, 18 nt, Human herpesvirus 8 (Kaposi`s sarcoma-associated h
cuagaauuggagcacuuu

SEQ ID NO: 355051 - RNA, 12 nt, Human herpesvirus 8 (Kaposi`s sarcoma-associated h
cuagacacgcaa

SEQ ID NO: 355052 - RNA, 21 nt, Human herpesvirus 8 (Kaposi`s sarcoma-associated h
cuagcggcgagauuggaggca

SEQ ID NO: 355053 - RNA, 15 nt, Human herpesvirus 8 (Kaposi`s sarcoma-associated h
cuagcgugucugaaa

SEQ ID NO: 355054 - RNA, 14 nt, Human herpesvirus 8 (Kaposi`s sarcoma-associated h
cuauaaauaucauu

SEQ ID NO: 355055 - RNA, 13 nt, Human herpesvirus 8 (Kaposi`s sarcoma-associated h
cuauaauggaugg

SEQ ID NO: 355056 - RNA, 12 nt, Human herpesvirus 8 (Kaposi`s sarcoma-associated h
cuauacaugccc

SEQ ID NO: 355057 - RNA, 16 nt, Human herpesvirus 8 (Kaposi`s sarcoma-associated h
cuauauggcaacugcc

SEQ ID NO: 355058 - RNA, 20 nt, Human herpesvirus 8 (Kaposi`s sarcoma-associated h
cuauccaagugcacacucgc

SEQ ID NO: 355059 - RNA, 13 nt, Human herpesvirus 8 (Kaposi`s sarcoma-associated h
cuauccacccuaa

SEQ ID NO: 355060 - RNA, 24 nt, Human herpesvirus 8 (Kaposi`s sarcoma-associated h
cuauccacccuaauacauaacaca

SEQ ID NO: 355061 - RNA, 20 nt, Human herpesvirus 8 (Kaposi`s sarcoma-associated h
cuaucuaucucugguggugg

SEQ ID NO: 355062 - RNA, 16 nt, Human herpesvirus 8 (Kaposi`s sarcoma-associated h
cuaucucugguggugg

SEQ ID NO: 355063 - RNA, 19 nt, Human herpesvirus 8 (Kaposi`s sarcoma-associated h
cuaugggaaugugccuauc

SEQ ID NO: 355064 - RNA, 18 nt, Human herpesvirus 8 (Kaposi`s sarcoma-associated h
cuaugggggggcuguaga

SEQ ID NO: 355065 - RNA, 18 nt, Human herpesvirus 8 (Kaposi`s sarcoma-associated h
cuaugguauucaggcaga

SEQ ID NO: 355066 - RNA, 15 nt, Human herpesvirus 8 (Kaposi`s sarcoma-associated h
cuauuucugccguuu

SEQ ID NO: 355067 - RNA, 18 nt, Human herpesvirus 8 (Kaposi`s sarcoma-associated h
cuauuucuuuuugccaga

SEQ ID NO: 355068 - RNA, 16 nt, Human herpesvirus 8 (Kaposi`s sarcoma-associated h
cucaacgggcaaccau

SEQ ID NO: 355069 - RNA, 22 nt, Human herpesvirus 8 (Kaposi`s sarcoma-associated h
cucacggacaacgccaugcagc

SEQ ID NO: 355070 - RNA, 14 nt, Human herpesvirus 8 (Kaposi`s sarcoma-associated h
cucagggagcacgu

SEQ ID NO: 355071 - RNA, 12 nt, Human herpesvirus 8 (Kaposi`s sarcoma-associated h
cucauaacacag

SEQ ID NO: 355072 - RNA, 14 nt, Human herpesvirus 8 (Kaposi`s sarcoma-associated h
cucauaucuuuaag

SEQ ID NO: 355073 - RNA, 21 nt, Human herpesvirus 8 (Kaposi`s sarcoma-associated h
cucaucgcgaccgcugccaau

SEQ ID NO: 355074 - RNA, 16 nt, Human herpesvirus 8 (Kaposi`s sarcoma-associated h
cucaucggacaggacg

SEQ ID NO: 355075 - RNA, 22 nt, Human herpesvirus 8 (Kaposi`s sarcoma-associated h
cucaucuacccugauuagcacu

SEQ ID NO: 355076 - RNA, 17 nt, Human herpesvirus 8 (Kaposi`s sarcoma-associated h
cucaugcccacccugua

SEQ ID NO: 355077 - RNA, 23 nt, Human herpesvirus 8 (Kaposi`s sarcoma-associated h
cucauuucauuuguguauaguuu

SEQ ID NO: 355078 - RNA, 20 nt, Human herpesvirus 8 (Kaposi`s sarcoma-associated h
cuccaccucuuucaucacuu

SEQ ID NO: 355079 - RNA, 19 nt, Human herpesvirus 8 (Kaposi`s sarcoma-associated h
cuccagacucuucgcugau

SEQ ID NO: 355080 - RNA, 15 nt, Human herpesvirus 8 (Kaposi`s sarcoma-associated h
cuccagcaaagcaca

SEQ ID NO: 355081 - RNA, 16 nt, Human herpesvirus 8 (Kaposi`s sarcoma-associated h
cucccaccauguugaa

SEQ ID NO: 355082 - RNA, 12 nt, Human herpesvirus 8 (Kaposi`s sarcoma-associated h
cucccauaacaa

SEQ ID NO: 355083 - RNA, 14 nt, Human herpesvirus 8 (Kaposi`s sarcoma-associated h
cucccauaacaaua

SEQ ID NO: 355084 - RNA, 15 nt, Human herpesvirus 8 (Kaposi`s sarcoma-associated h
cucccccaaccucug

SEQ ID NO: 355085 - RNA, 16 nt, Human herpesvirus 8 (Kaposi`s sarcoma-associated h
cucccucaagcauuga

SEQ ID NO: 355086 - RNA, 15 nt, Human herpesvirus 8 (Kaposi`s sarcoma-associated h
cuccguugacaggga

SEQ ID NO: 355087 - RNA, 21 nt, Human herpesvirus 8 (Kaposi`s sarcoma-associated h
cuccguuuggacacuccucaa

SEQ ID NO: 355088 - RNA, 23 nt, Human herpesvirus 8 (Kaposi`s sarcoma-associated h
cuccucagacgacaaaacgcaca

SEQ ID NO: 355089 - RNA, 14 nt, Human herpesvirus 8 (Kaposi`s sarcoma-associated h
cuccucgucugugu

SEQ ID NO: 355090 - RNA, 18 nt, Human herpesvirus 8 (Kaposi`s sarcoma-associated h
cuccuguuagcacauucu

SEQ ID NO: 355091 - RNA, 17 nt, Human herpesvirus 8 (Kaposi`s sarcoma-associated h
cucgacggagacacgau

SEQ ID NO: 355092 - RNA, 21 nt, Human herpesvirus 8 (Kaposi`s sarcoma-associated h
cucgagccucccggaaacgga

SEQ ID NO: 355093 - RNA, 20 nt, Human herpesvirus 8 (Kaposi`s sarcoma-associated h
cucgagggcggccaguauua

SEQ ID NO: 355094 - RNA, 17 nt, Human herpesvirus 8 (Kaposi`s sarcoma-associated h
cucgaugggauauuucc

SEQ ID NO: 355095 - RNA, 17 nt, Human herpesvirus 8 (Kaposi`s sarcoma-associated h
cucgcgaaaaugcacuc

SEQ ID NO: 355096 - RNA, 22 nt, Human herpesvirus 8 (Kaposi`s sarcoma-associated h
cucgcuuuccguuagugaccug

SEQ ID NO: 355097 - RNA, 14 nt, Human herpesvirus 8 (Kaposi`s sarcoma-associated h
cucggcaacauuca

SEQ ID NO: 355098 - RNA, 20 nt, Human herpesvirus 8 (Kaposi`s sarcoma-associated h
cucgucuacccugccacucu

SEQ ID NO: 355099 - RNA, 17 nt, Human herpesvirus 8 (Kaposi`s sarcoma-associated h
cucgugacggugacauu

SEQ ID NO: 355100 - RNA, 22 nt, Human herpesvirus 8 (Kaposi`s sarcoma-associated h
cucgugacggugacauugcagu

SEQ ID NO: 355101 - RNA, 23 nt, Human herpesvirus 8 (Kaposi`s sarcoma-associated h
cucgugcaaaagagacacuaucu

SEQ ID NO: 355102 - RNA, 16 nt, Human herpesvirus 8 (Kaposi`s sarcoma-associated h
cucguucaaugcaugu

SEQ ID NO: 355103 - RNA, 19 nt, Human herpesvirus 8 (Kaposi`s sarcoma-associated h
cucguugcacacagacaca

SEQ ID NO: 355104 - RNA, 15 nt, Human herpesvirus 8 (Kaposi`s sarcoma-associated h
cuguuucgugcaggu

SEQ ID NO: 355105 - RNA, 13 nt, Human herpesvirus 8 (Kaposi`s sarcoma-associated h
cuguuugcuuaau

SEQ ID NO: 355106 - RNA, 15 nt, Human herpesvirus 8 (Kaposi`s sarcoma-associated h
cuuaaaauagcucau

SEQ ID NO: 355107 - RNA, 20 nt, Human herpesvirus 8 (Kaposi`s sarcoma-associated h
cuuaacacuucccaauaaca

SEQ ID NO: 355108 - RNA, 14 nt, Human herpesvirus 8 (Kaposi`s sarcoma-associated h
cuuaacgugucuga

SEQ ID NO: 355109 - RNA, 18 nt, Human herpesvirus 8 (Kaposi`s sarcoma-associated h
cuuaagcgccaagccauu

SEQ ID NO: 355110 - RNA, 16 nt, Human herpesvirus 8 (Kaposi`s sarcoma-associated h
cuuaaggggauuacug

SEQ ID NO: 355111 - RNA, 15 nt, Human herpesvirus 8 (Kaposi`s sarcoma-associated h
cuuaaguacauuaaa

SEQ ID NO: 355112 - RNA, 17 nt, Human herpesvirus 8 (Kaposi`s sarcoma-associated h
cuuaccgcuacuguggg

SEQ ID NO: 355113 - RNA, 20 nt, Human herpesvirus 8 (Kaposi`s sarcoma-associated h
cuuacgccccuggugggaca

SEQ ID NO: 355114 - RNA, 16 nt, Human herpesvirus 8 (Kaposi`s sarcoma-associated h
cuuauaacagugcucu

SEQ ID NO: 355115 - RNA, 17 nt, Human herpesvirus 8 (Kaposi`s sarcoma-associated h
cuuauaacagugcucuu

SEQ ID NO: 355116 - RNA, 19 nt, Human herpesvirus 8 (Kaposi`s sarcoma-associated h
cuucacagugcgauagggg

SEQ ID NO: 355117 - RNA, 15 nt, Human herpesvirus 8 (Kaposi`s sarcoma-associated h
cuucaucguggugcc

SEQ ID NO: 355118 - RNA, 13 nt, Human herpesvirus 8 (Kaposi`s sarcoma-associated h
cuucauuaugcau

SEQ ID NO: 355119 - RNA, 19 nt, Human herpesvirus 8 (Kaposi`s sarcoma-associated h
cuucauuaugcaugcaaua

SEQ ID NO: 355120 - RNA, 17 nt, Human herpesvirus 8 (Kaposi`s sarcoma-associated h
cuucgcaccccauccac

SEQ ID NO: 355121 - RNA, 13 nt, Human herpesvirus 8 (Kaposi`s sarcoma-associated h
cuucgucaugcac

SEQ ID NO: 355122 - RNA, 22 nt, Human herpesvirus 8 (Kaposi`s sarcoma-associated h
cuucguccccuauccacccuaa

SEQ ID NO: 355123 - RNA, 13 nt, Human herpesvirus 8 (Kaposi`s sarcoma-associated h
cuucgugccccag

SEQ ID NO: 355124 - RNA, 15 nt, Human herpesvirus 8 (Kaposi`s sarcoma-associated h
cuucuagcauaugcu

SEQ ID NO: 355125 - RNA, 19 nt, Human herpesvirus 8 (Kaposi`s sarcoma-associated h
cuucugggccacaaaacug

SEQ ID NO: 355126 - RNA, 15 nt, Human herpesvirus 8 (Kaposi`s sarcoma-associated h
cuucuugaccaaaag

SEQ ID NO: 355127 - RNA, 18 nt, Human herpesvirus 8 (Kaposi`s sarcoma-associated h
cuugcagcagccuaacau

SEQ ID NO: 355128 - RNA, 19 nt, Human herpesvirus 8 (Kaposi`s sarcoma-associated h
cuugccggacagcuuucag

SEQ ID NO: 355129 - RNA, 15 nt, Human herpesvirus 8 (Kaposi`s sarcoma-associated h
cuugcugcauaaagu

SEQ ID NO: 355130 - RNA, 13 nt, Human herpesvirus 8 (Kaposi`s sarcoma-associated h
cuuggaacaaucu

SEQ ID NO: 355131 - RNA, 19 nt, Human herpesvirus 8 (Kaposi`s sarcoma-associated h
cuuggaguuaaagcuguca

SEQ ID NO: 355132 - RNA, 13 nt, Human herpesvirus 8 (Kaposi`s sarcoma-associated h
cuuggcuguuaca

SEQ ID NO: 355133 - RNA, 14 nt, Human herpesvirus 8 (Kaposi`s sarcoma-associated h
cuuggcuguuacaa

SEQ ID NO: 355134 - RNA, 19 nt, Human herpesvirus 8 (Kaposi`s sarcoma-associated h
cuuggcuguuacaauaaag

SEQ ID NO: 355135 - RNA, 15 nt, Human herpesvirus 8 (Kaposi`s sarcoma-associated h
cuugggugcacagag

SEQ ID NO: 355136 - RNA, 15 nt, Human herpesvirus 8 (Kaposi`s sarcoma-associated h
cuugguugugccguc

SEQ ID NO: 355137 - RNA, 21 nt, Human herpesvirus 8 (Kaposi`s sarcoma-associated h
cuuguaaaaauaaaugugaau

SEQ ID NO: 355138 - RNA, 22 nt, Human herpesvirus 8 (Kaposi`s sarcoma-associated h
cuuguuuauuagagaaaggcua

SEQ ID NO: 355139 - RNA, 16 nt, Human herpesvirus 8 (Kaposi`s sarcoma-associated h
cuuuaccuugucaucu

SEQ ID NO: 355140 - RNA, 19 nt, Human herpesvirus 8 (Kaposi`s sarcoma-associated h
cuuucagacguccaguucc

SEQ ID NO: 355141 - RNA, 23 nt, Human herpesvirus 8 (Kaposi`s sarcoma-associated h
cuuucccgucaggggagugacaa

SEQ ID NO: 355142 - RNA, 19 nt, Human herpesvirus 8 (Kaposi`s sarcoma-associated h
cuuugcccuaaaugugaca

SEQ ID NO: 355143 - RNA, 20 nt, Human herpesvirus 8 (Kaposi`s sarcoma-associated h
cuuugcgugucuagacaaua

SEQ ID NO: 355144 - RNA, 16 nt, Human herpesvirus 8 (Kaposi`s sarcoma-associated h
cuuugcuggaggccaa

SEQ ID NO: 355145 - RNA, 18 nt, Human herpesvirus 8 (Kaposi`s sarcoma-associated h
cuuuguuaccuggcugca

SEQ ID NO: 355146 - RNA, 21 nt, Human herpesvirus 8 (Kaposi`s sarcoma-associated h
cuuuugcuuggcgcuguauga

SEQ ID NO: 355147 - RNA, 14 nt, Human herpesvirus 8 (Kaposi`s sarcoma-associated h
cuuuuuaagacaaa

SEQ ID NO: 355148 - RNA, 20 nt, Human herpesvirus 8 (Kaposi`s sarcoma-associated h
cuuuuuaagacaaacacugu

SEQ ID NO: 355149 - RNA, 23 nt, Human herpesvirus 8 (Kaposi`s sarcoma-associated h
cuuuuuaagacaaacacugugga

SEQ ID NO: 355150 - RNA, 21 nt, Human herpesvirus 8 (Kaposi`s sarcoma-associated h
cuuuuugugagauagccacau

SEQ ID NO: 355151 - RNA, 13 nt, Human herpesvirus 8 (Kaposi`s sarcoma-associated h
gaaaacugucucc

SEQ ID NO: 355152 - RNA, 16 nt, Human herpesvirus 8 (Kaposi`s sarcoma-associated h
gaaaagggaacgguca

SEQ ID NO: 355153 - RNA, 21 nt, Human herpesvirus 8 (Kaposi`s sarcoma-associated h
gaaaagugggcgugguauauu

SEQ ID NO: 355154 - RNA, 18 nt, Human herpesvirus 8 (Kaposi`s sarcoma-associated h
gaaaauucuccaggcagu

SEQ ID NO: 355155 - RNA, 15 nt, Human herpesvirus 8 (Kaposi`s sarcoma-associated h
gaaaccaggcucuau

SEQ ID NO: 355156 - RNA, 16 nt, Human herpesvirus 8 (Kaposi`s sarcoma-associated h
gaaacuaccagccauc

SEQ ID NO: 355157 - RNA, 17 nt, Human herpesvirus 8 (Kaposi`s sarcoma-associated h
gaaacucccccaaccuc

SEQ ID NO: 355158 - RNA, 21 nt, Human herpesvirus 8 (Kaposi`s sarcoma-associated h
gaaacugcucucgcugcucag

SEQ ID NO: 355159 - RNA, 13 nt, Human herpesvirus 8 (Kaposi`s sarcoma-associated h
gaaacugggugua

SEQ ID NO: 355160 - RNA, 20 nt, Human herpesvirus 8 (Kaposi`s sarcoma-associated h
gaaagcuucaucguggugcc

SEQ ID NO: 355161 - RNA, 19 nt, Human herpesvirus 8 (Kaposi`s sarcoma-associated h
gaaauaugucgcaggccga

SEQ ID NO: 355162 - RNA, 20 nt, Human herpesvirus 8 (Kaposi`s sarcoma-associated h
gaacacacggacaacggcua

SEQ ID NO: 355163 - RNA, 21 nt, Human herpesvirus 8 (Kaposi`s sarcoma-associated h
gaacacauuaagagugccacu

SEQ ID NO: 355164 - RNA, 20 nt, Human herpesvirus 8 (Kaposi`s sarcoma-associated h
gaacagaagacccagaaaau

SEQ ID NO: 355165 - RNA, 21 nt, Human herpesvirus 8 (Kaposi`s sarcoma-associated h
gaacagcacauaugucucccu

SEQ ID NO: 355166 - RNA, 18 nt, Human herpesvirus 8 (Kaposi`s sarcoma-associated h
gaacaguacccacgaaau

SEQ ID NO: 355167 - RNA, 14 nt, Human herpesvirus 8 (Kaposi`s sarcoma-associated h
gaacaucagagaug

SEQ ID NO: 355168 - RNA, 21 nt, Human herpesvirus 8 (Kaposi`s sarcoma-associated h
gaacaugcuggaucccagugc

SEQ ID NO: 355169 - RNA, 14 nt, Human herpesvirus 8 (Kaposi`s sarcoma-associated h
gaacauguggcaca

SEQ ID NO: 355170 - RNA, 15 nt, Human herpesvirus 8 (Kaposi`s sarcoma-associated h
gaacauguggcacac

SEQ ID NO: 355171 - RNA, 16 nt, Human herpesvirus 8 (Kaposi`s sarcoma-associated h
gaacauuguucaaaac

SEQ ID NO: 355172 - RNA, 19 nt, Human herpesvirus 8 (Kaposi`s sarcoma-associated h
gaaccacggcgcuguacag

SEQ ID NO: 355173 - RNA, 21 nt, Human herpesvirus 8 (Kaposi`s sarcoma-associated h
gaaccgaugguuuccuagcca

SEQ ID NO: 355174 - RNA, 19 nt, Human herpesvirus 8 (Kaposi`s sarcoma-associated h
gaaccgucgugcuuaccca

SEQ ID NO: 355175 - RNA, 20 nt, Human herpesvirus 8 (Kaposi`s sarcoma-associated h
gaaccugacagagcacccug

SEQ ID NO: 355176 - RNA, 12 nt, Human herpesvirus 8 (Kaposi`s sarcoma-associated h
gaacggacaauu

SEQ ID NO: 355177 - RNA, 23 nt, Human herpesvirus 8 (Kaposi`s sarcoma-associated h
gaacggucaauuuugcgccagcc

SEQ ID NO: 355178 - RNA, 19 nt, Human herpesvirus 8 (Kaposi`s sarcoma-associated h
gaacugucgagacauguca

SEQ ID NO: 355179 - RNA, 20 nt, Human herpesvirus 8 (Kaposi`s sarcoma-associated h
gaacuucuagcauaugcugc

SEQ ID NO: 355180 - RNA, 22 nt, Human herpesvirus 8 (Kaposi`s sarcoma-associated h
gaacuucuagcauaugcugcca

SEQ ID NO: 355181 - RNA, 18 nt, Human herpesvirus 8 (Kaposi`s sarcoma-associated h
gaagaaaaggaugcacaa

SEQ ID NO: 355182 - RNA, 13 nt, Human herpesvirus 8 (Kaposi`s sarcoma-associated h
gaagacccagaaa

SEQ ID NO: 355183 - RNA, 22 nt, Human herpesvirus 8 (Kaposi`s sarcoma-associated h
gaggauccuaggugggugugca

SEQ ID NO: 355184 - RNA, 14 nt, Human herpesvirus 8 (Kaposi`s sarcoma-associated h
gaggaugaggaaga

SEQ ID NO: 355185 - RNA, 20 nt, Human herpesvirus 8 (Kaposi`s sarcoma-associated h
gaggcccgagaaacacugug

SEQ ID NO: 355186 - RNA, 17 nt, Human herpesvirus 8 (Kaposi`s sarcoma-associated h
gagguaccccaugcauu

SEQ ID NO: 355187 - RNA, 19 nt, Human herpesvirus 8 (Kaposi`s sarcoma-associated h
gaggugacccuuugugcuc

SEQ ID NO: 355188 - RNA, 17 nt, Human herpesvirus 8 (Kaposi`s sarcoma-associated h
gaggugcucuucccaca

SEQ ID NO: 355189 - RNA, 12 nt, Human herpesvirus 8 (Kaposi`s sarcoma-associated h
gagguggcgcgg

SEQ ID NO: 355190 - RNA, 15 nt, Human herpesvirus 8 (Kaposi`s sarcoma-associated h
gaguauaucagggga

SEQ ID NO: 355191 - RNA, 13 nt, Human herpesvirus 8 (Kaposi`s sarcoma-associated h
gagucacaaaggg

SEQ ID NO: 355192 - RNA, 17 nt, Human herpesvirus 8 (Kaposi`s sarcoma-associated h
gagucacaaguaccacu

SEQ ID NO: 355193 - RNA, 20 nt, Human herpesvirus 8 (Kaposi`s sarcoma-associated h
gagucagagaauacagugcu

SEQ ID NO: 355194 - RNA, 18 nt, Human herpesvirus 8 (Kaposi`s sarcoma-associated h
gaguuaaagcugucacua

SEQ ID NO: 355195 - RNA, 15 nt, Human herpesvirus 8 (Kaposi`s sarcoma-associated h
gaguuccacacagau

SEQ ID NO: 355196 - RNA, 19 nt, Human herpesvirus 8 (Kaposi`s sarcoma-associated h
gauaaaaaacguauaugcc

SEQ ID NO: 355197 - RNA, 16 nt, Human herpesvirus 8 (Kaposi`s sarcoma-associated h
gauaacggugucuaac

SEQ ID NO: 355198 - RNA, 22 nt, Human herpesvirus 8 (Kaposi`s sarcoma-associated h
gauacagggacagauguuagau

SEQ ID NO: 355199 - RNA, 21 nt, Human herpesvirus 8 (Kaposi`s sarcoma-associated h
gauagauaggagaaaucccau

SEQ ID NO: 355200 - RNA, 22 nt, Human herpesvirus 8 (Kaposi`s sarcoma-associated h
gauagcccguuucgcuggccca

SEQ ID NO: 355201 - RNA, 20 nt, Human herpesvirus 8 (Kaposi`s sarcoma-associated h
gauaggauggcuagauuucg

SEQ ID NO: 355202 - RNA, 18 nt, Human herpesvirus 8 (Kaposi`s sarcoma-associated h
gauaggcaacaugacaug

SEQ ID NO: 355203 - RNA, 16 nt, Human herpesvirus 8 (Kaposi`s sarcoma-associated h
gauauagcgugucuca

SEQ ID NO: 355204 - RNA, 15 nt, Human herpesvirus 8 (Kaposi`s sarcoma-associated h
gaucacggccguguu

SEQ ID NO: 355205 - RNA, 21 nt, Human herpesvirus 8 (Kaposi`s sarcoma-associated h
gauccacucagguguuuucca

SEQ ID NO: 355206 - RNA, 22 nt, Human herpesvirus 8 (Kaposi`s sarcoma-associated h
gauccagaggauauuaaagugg

SEQ ID NO: 355207 - RNA, 16 nt, Human herpesvirus 8 (Kaposi`s sarcoma-associated h
gaucccagugccucag

SEQ ID NO: 355208 - RNA, 21 nt, Human herpesvirus 8 (Kaposi`s sarcoma-associated h
gaucccagugccucagcaacu

SEQ ID NO: 355209 - RNA, 15 nt, Human herpesvirus 8 (Kaposi`s sarcoma-associated h
gauccgcaaugucag

SEQ ID NO: 355210 - RNA, 21 nt, Human herpesvirus 8 (Kaposi`s sarcoma-associated h
gauccgcaaugucagguucca

SEQ ID NO: 355211 - RNA, 23 nt, Human herpesvirus 8 (Kaposi`s sarcoma-associated h
gaucggaucuuuuacaauauucu

SEQ ID NO: 355212 - RNA, 17 nt, Human herpesvirus 8 (Kaposi`s sarcoma-associated h
gaucucccaauuacagg

SEQ ID NO: 355213 - RNA, 21 nt, Human herpesvirus 8 (Kaposi`s sarcoma-associated h
gaucugcgcgucagcaguguu

SEQ ID NO: 355214 - RNA, 20 nt, Human herpesvirus 8 (Kaposi`s sarcoma-associated h
gaucuggauacacuacuuau

SEQ ID NO: 355215 - RNA, 10 nt, Human herpesvirus 8 (Kaposi`s sarcoma-associated h
gaucuuugcg

SEQ ID NO: 355216 - RNA, 13 nt, Human herpesvirus 8 (Kaposi`s sarcoma-associated h
gaugaaacauucg

SEQ ID NO: 355217 - RNA, 15 nt, Human herpesvirus 8 (Kaposi`s sarcoma-associated h
gaugaauaugauccu

SEQ ID NO: 355218 - RNA, 13 nt, Human herpesvirus 8 (Kaposi`s sarcoma-associated h
gaugaaugcuucc

SEQ ID NO: 355219 - RNA, 18 nt, Human herpesvirus 8 (Kaposi`s sarcoma-associated h
gaugauaggcaacaugac

SEQ ID NO: 355220 - RNA, 21 nt, Human herpesvirus 8 (Kaposi`s sarcoma-associated h
gaugccgcgcuuggguuggcg

SEQ ID NO: 355221 - RNA, 15 nt, Human herpesvirus 8 (Kaposi`s sarcoma-associated h
gaugguguuggacac

SEQ ID NO: 355222 - RNA, 14 nt, Human herpesvirus 8 (Kaposi`s sarcoma-associated h
gauguucuugccag

SEQ ID NO: 355223 - RNA, 17 nt, Human herpesvirus 8 (Kaposi`s sarcoma-associated h
gauuaaaaaccacucac

SEQ ID NO: 355224 - RNA, 21 nt, Human herpesvirus 8 (Kaposi`s sarcoma-associated h
gauuaaaaaccacucacugag

SEQ ID NO: 355225 - RNA, 14 nt, Human herpesvirus 8 (Kaposi`s sarcoma-associated h
gauuaacugucuac

SEQ ID NO: 355226 - RNA, 17 nt, Human herpesvirus 8 (Kaposi`s sarcoma-associated h
gauuacagagucacaaa

SEQ ID NO: 355227 - RNA, 13 nt, Human herpesvirus 8 (Kaposi`s sarcoma-associated h
gauuagcacugua

SEQ ID NO: 355228 - RNA, 18 nt, Human herpesvirus 8 (Kaposi`s sarcoma-associated h
gauuagccugcagugugg

SEQ ID NO: 355229 - RNA, 19 nt, Human herpesvirus 8 (Kaposi`s sarcoma-associated h
gauuaugguuccguucucc

SEQ ID NO: 355230 - RNA, 23 nt, Human herpesvirus 8 (Kaposi`s sarcoma-associated h
gauucacgguagagaagagacca

SEQ ID NO: 355231 - RNA, 20 nt, Human herpesvirus 8 (Kaposi`s sarcoma-associated h
gauucgcacagaaaucccug

SEQ ID NO: 355232 - RNA, 11 nt, Human herpesvirus 8 (Kaposi`s sarcoma-associated h
gauuguaucag

SEQ ID NO: 355233 - RNA, 19 nt, Human herpesvirus 8 (Kaposi`s sarcoma-associated h
gauuuaaaaccgcccacug

SEQ ID NO: 355234 - RNA, 21 nt, Human herpesvirus 8 (Kaposi`s sarcoma-associated h
gauuuaaaaccgcccacugau

SEQ ID NO: 355235 - RNA, 19 nt, Human herpesvirus 8 (Kaposi`s sarcoma-associated h
gcaaaagagacacuaucuc

SEQ ID NO: 355236 - RNA, 13 nt, Human herpesvirus 8 (Kaposi`s sarcoma-associated h
gcaaaauacauuu

SEQ ID NO: 355237 - RNA, 15 nt, Human herpesvirus 8 (Kaposi`s sarcoma-associated h
gcaaaauacauuuua

SEQ ID NO: 355238 - RNA, 14 nt, Human herpesvirus 8 (Kaposi`s sarcoma-associated h
gcaaaaugugcuuu

SEQ ID NO: 355239 - RNA, 15 nt, Human herpesvirus 8 (Kaposi`s sarcoma-associated h
gcaaagauaagccaa

SEQ ID NO: 355240 - RNA, 12 nt, Human herpesvirus 8 (Kaposi`s sarcoma-associated h
gcaacacuggac

SEQ ID NO: 355241 - RNA, 21 nt, Human herpesvirus 8 (Kaposi`s sarcoma-associated h
gcaaccauuuuuuacggacaa

SEQ ID NO: 355242 - RNA, 16 nt, Human herpesvirus 8 (Kaposi`s sarcoma-associated h
gcaacccacagcaucc

SEQ ID NO: 355243 - RNA, 20 nt, Human herpesvirus 8 (Kaposi`s sarcoma-associated h
gcaacggcgguguaucaggc

SEQ ID NO: 355244 - RNA, 20 nt, Human herpesvirus 8 (Kaposi`s sarcoma-associated h
gcaacguucauccuagguga

SEQ ID NO: 355245 - RNA, 11 nt, Human herpesvirus 8 (Kaposi`s sarcoma-associated h
gcaacugacca

SEQ ID NO: 355246 - RNA, 14 nt, Human herpesvirus 8 (Kaposi`s sarcoma-associated h
gcaagcacagaaac

SEQ ID NO: 355247 - RNA, 23 nt, Human herpesvirus 8 (Kaposi`s sarcoma-associated h
gcaaggggguguccccugcaaug

SEQ ID NO: 355248 - RNA, 21 nt, Human herpesvirus 8 (Kaposi`s sarcoma-associated h
gcaagguuguaacacaaaagc

SEQ ID NO: 355249 - RNA, 15 nt, Human herpesvirus 8 (Kaposi`s sarcoma-associated h
gcaauaaacccacag

SEQ ID NO: 355250 - RNA, 14 nt, Human herpesvirus 8 (Kaposi`s sarcoma-associated h
gcaauguacugcca

SEQ ID NO: 355251 - RNA, 20 nt, Human herpesvirus 8 (Kaposi`s sarcoma-associated h
gcaaugucagguuccaccca

SEQ ID NO: 355252 - RNA, 23 nt, Human herpesvirus 8 (Kaposi`s sarcoma-associated h
gcaauugccaacgaccugaugca

SEQ ID NO: 355253 - RNA, 18 nt, Human herpesvirus 8 (Kaposi`s sarcoma-associated h
gcaauuuauuaagcaaac

SEQ ID NO: 355254 - RNA, 22 nt, Human herpesvirus 8 (Kaposi`s sarcoma-associated h
gcacaacucuacugcacaaaau

SEQ ID NO: 355255 - RNA, 14 nt, Human herpesvirus 8 (Kaposi`s sarcoma-associated h
gcacacgaaugcuc

SEQ ID NO: 355256 - RNA, 15 nt, Human herpesvirus 8 (Kaposi`s sarcoma-associated h
gcacacgcugcaaug

SEQ ID NO: 355257 - RNA, 19 nt, Human herpesvirus 8 (Kaposi`s sarcoma-associated h
gcacauaaggaacagauua

SEQ ID NO: 355258 - RNA, 13 nt, Human herpesvirus 8 (Kaposi`s sarcoma-associated h
gcaccaagcacaa

SEQ ID NO: 355259 - RNA, 15 nt, Human herpesvirus 8 (Kaposi`s sarcoma-associated h
gcaccaagcacaaca

SEQ ID NO: 355260 - RNA, 16 nt, Human herpesvirus 8 (Kaposi`s sarcoma-associated h
gcaccauggccacuua

SEQ ID NO: 355261 - RNA, 13 nt, Human herpesvirus 8 (Kaposi`s sarcoma-associated h
gcacccaacaucc

SEQ ID NO: 355262 - RNA, 20 nt, Human herpesvirus 8 (Kaposi`s sarcoma-associated h
gccgauagggcggccacuuu

SEQ ID NO: 355263 - RNA, 15 nt, Human herpesvirus 8 (Kaposi`s sarcoma-associated h
gccgcgcaucaacca

SEQ ID NO: 355264 - RNA, 13 nt, Human herpesvirus 8 (Kaposi`s sarcoma-associated h
gccgcugcacauu

SEQ ID NO: 355265 - RNA, 13 nt, Human herpesvirus 8 (Kaposi`s sarcoma-associated h
gccggcacgcggu

SEQ ID NO: 355266 - RNA, 22 nt, Human herpesvirus 8 (Kaposi`s sarcoma-associated h
gccgucguccgggagaaccaug

SEQ ID NO: 355267 - RNA, 18 nt, Human herpesvirus 8 (Kaposi`s sarcoma-associated h
gccuacagacgguccaaa

SEQ ID NO: 355268 - RNA, 22 nt, Human herpesvirus 8 (Kaposi`s sarcoma-associated h
gccuagaacuaaccacucauaa

SEQ ID NO: 355269 - RNA, 21 nt, Human herpesvirus 8 (Kaposi`s sarcoma-associated h
gccuagugggguggcgcgcca

SEQ ID NO: 355270 - RNA, 22 nt, Human herpesvirus 8 (Kaposi`s sarcoma-associated h
gccuaucugaggaggaugggug

SEQ ID NO: 355271 - RNA, 18 nt, Human herpesvirus 8 (Kaposi`s sarcoma-associated h
gccuaugcugggacagaa

SEQ ID NO: 355272 - RNA, 15 nt, Human herpesvirus 8 (Kaposi`s sarcoma-associated h
gccuccagcaaagca

SEQ ID NO: 355273 - RNA, 15 nt, Human herpesvirus 8 (Kaposi`s sarcoma-associated h
gccuccuuagaccua

SEQ ID NO: 355274 - RNA, 15 nt, Human herpesvirus 8 (Kaposi`s sarcoma-associated h
gccucugaagcacca

SEQ ID NO: 355275 - RNA, 14 nt, Human herpesvirus 8 (Kaposi`s sarcoma-associated h
gccucuguacaugg

SEQ ID NO: 355276 - RNA, 20 nt, Human herpesvirus 8 (Kaposi`s sarcoma-associated h
gccugaaacgucgcccaaau

SEQ ID NO: 355277 - RNA, 17 nt, Human herpesvirus 8 (Kaposi`s sarcoma-associated h
gccugcggucccagggu

SEQ ID NO: 355278 - RNA, 18 nt, Human herpesvirus 8 (Kaposi`s sarcoma-associated h
gccuggacaguauucuca

SEQ ID NO: 355279 - RNA, 17 nt, Human herpesvirus 8 (Kaposi`s sarcoma-associated h
gccuggcguuuagugug

SEQ ID NO: 355280 - RNA, 14 nt, Human herpesvirus 8 (Kaposi`s sarcoma-associated h
gccugugcccaaau

SEQ ID NO: 355281 - RNA, 15 nt, Human herpesvirus 8 (Kaposi`s sarcoma-associated h
gccuguggauuuuca

SEQ ID NO: 355282 - RNA, 15 nt, Human herpesvirus 8 (Kaposi`s sarcoma-associated h
gccuucgaggccagg

SEQ ID NO: 355283 - RNA, 17 nt, Human herpesvirus 8 (Kaposi`s sarcoma-associated h
gccuucgucaugcacgg

SEQ ID NO: 355284 - RNA, 20 nt, Human herpesvirus 8 (Kaposi`s sarcoma-associated h
gccuuguuggggguuauauu

SEQ ID NO: 355285 - RNA, 19 nt, Human herpesvirus 8 (Kaposi`s sarcoma-associated h
gccuuuucuggguuuacau

SEQ ID NO: 355286 - RNA, 14 nt, Human herpesvirus 8 (Kaposi`s sarcoma-associated h
gccuuuugcuuaaa

SEQ ID NO: 355287 - RNA, 22 nt, Human herpesvirus 8 (Kaposi`s sarcoma-associated h
gccuuuuuaagacaaacacugu

SEQ ID NO: 355288 - RNA, 12 nt, Human herpesvirus 8 (Kaposi`s sarcoma-associated h
gcgaaaccacug

SEQ ID NO: 355289 - RNA, 23 nt, Human herpesvirus 8 (Kaposi`s sarcoma-associated h
gcgaacaagacaccaauaacgaa

SEQ ID NO: 355290 - RNA, 17 nt, Human herpesvirus 8 (Kaposi`s sarcoma-associated h
gcgaauaaaacaggaag

SEQ ID NO: 355291 - RNA, 23 nt, Human herpesvirus 8 (Kaposi`s sarcoma-associated h
gcgaaugugccagcagccagcgu

SEQ ID NO: 355292 - RNA, 11 nt, Human herpesvirus 8 (Kaposi`s sarcoma-associated h
gcgacccggcg

SEQ ID NO: 355293 - RNA, 20 nt, Human herpesvirus 8 (Kaposi`s sarcoma-associated h
gcgaucacgacggauuuuug

SEQ ID NO: 355294 - RNA, 14 nt, Human herpesvirus 8 (Kaposi`s sarcoma-associated h
gcgcagauuugugc

SEQ ID NO: 355295 - RNA, 21 nt, Human herpesvirus 8 (Kaposi`s sarcoma-associated h
gcgccagccgcgcgaccuccc

SEQ ID NO: 355296 - RNA, 14 nt, Human herpesvirus 8 (Kaposi`s sarcoma-associated h
gcgcccacguaugg

SEQ ID NO: 355297 - RNA, 13 nt, Human herpesvirus 8 (Kaposi`s sarcoma-associated h
gcgcggcacauug

SEQ ID NO: 355298 - RNA, 11 nt, Human herpesvirus 8 (Kaposi`s sarcoma-associated h
gcgcuaugugg

SEQ ID NO: 355299 - RNA, 13 nt, Human herpesvirus 8 (Kaposi`s sarcoma-associated h
gcgcuauuugccg

SEQ ID NO: 355300 - RNA, 20 nt, Human herpesvirus 8 (Kaposi`s sarcoma-associated h
gcggagaggggguggugcga

SEQ ID NO: 355301 - RNA, 13 nt, Human herpesvirus 8 (Kaposi`s sarcoma-associated h
gcggcacauugug

SEQ ID NO: 355302 - RNA, 22 nt, Human herpesvirus 8 (Kaposi`s sarcoma-associated h
gcggccaguuuauuagggcgau

SEQ ID NO: 355303 - RNA, 23 nt, Human herpesvirus 8 (Kaposi`s sarcoma-associated h
gcgguaguugugcuuccugauga

SEQ ID NO: 355304 - RNA, 15 nt, Human herpesvirus 8 (Kaposi`s sarcoma-associated h
gcggugucaaccagg

SEQ ID NO: 355305 - RNA, 18 nt, Human herpesvirus 8 (Kaposi`s sarcoma-associated h
gcgguugggauucacuca

SEQ ID NO: 355306 - RNA, 14 nt, Human herpesvirus 8 (Kaposi`s sarcoma-associated h
gcguacaugugacu

SEQ ID NO: 355307 - RNA, 23 nt, Human herpesvirus 8 (Kaposi`s sarcoma-associated h
gcguaucuuaaagcgccccguga

SEQ ID NO: 355308 - RNA, 24 nt, Human herpesvirus 8 (Kaposi`s sarcoma-associated h
gcguguuuugccuguaccaguguc

SEQ ID NO: 355309 - RNA, 19 nt, Human herpesvirus 8 (Kaposi`s sarcoma-associated h
gcguuagcagccaugugcu

SEQ ID NO: 355310 - RNA, 15 nt, Human herpesvirus 8 (Kaposi`s sarcoma-associated h
gcuaaaugaauauca

SEQ ID NO: 355311 - RNA, 17 nt, Human herpesvirus 8 (Kaposi`s sarcoma-associated h
gcuaccugcaaacuaua

SEQ ID NO: 355312 - RNA, 20 nt, Human herpesvirus 8 (Kaposi`s sarcoma-associated h
gcuacguacccaauguuaau

SEQ ID NO: 355313 - RNA, 11 nt, Human herpesvirus 8 (Kaposi`s sarcoma-associated h
gcuacuggccu

SEQ ID NO: 355314 - RNA, 19 nt, Human herpesvirus 8 (Kaposi`s sarcoma-associated h
gcuacugugggugcacuga

SEQ ID NO: 355315 - RNA, 15 nt, Human herpesvirus 8 (Kaposi`s sarcoma-associated h
gcuagcguacucucg

SEQ ID NO: 355316 - RNA, 20 nt, Human herpesvirus 8 (Kaposi`s sarcoma-associated h
gcuaguuaucuucagagcug

SEQ ID NO: 355317 - RNA, 20 nt, Human herpesvirus 8 (Kaposi`s sarcoma-associated h
gcucagacaccgucgccaaa

SEQ ID NO: 355318 - RNA, 22 nt, Human herpesvirus 8 (Kaposi`s sarcoma-associated h
gcucaucgcgaccgcugccaau

SEQ ID NO: 355319 - RNA, 20 nt, Human herpesvirus 8 (Kaposi`s sarcoma-associated h
gcuccuauugcaacugacca

SEQ ID NO: 355320 - RNA, 17 nt, Human herpesvirus 8 (Kaposi`s sarcoma-associated h
gcucgaaagcuucaucg

SEQ ID NO: 355321 - RNA, 19 nt, Human herpesvirus 8 (Kaposi`s sarcoma-associated h
gcucgcaugaauacccugg

SEQ ID NO: 355322 - RNA, 16 nt, Human herpesvirus 8 (Kaposi`s sarcoma-associated h
gcucuaaauagaacag

SEQ ID NO: 355323 - RNA, 17 nt, Human herpesvirus 8 (Kaposi`s sarcoma-associated h
gcucucccaaaccacac

SEQ ID NO: 355324 - RNA, 14 nt, Human herpesvirus 8 (Kaposi`s sarcoma-associated h
gcucuggaggccaa

SEQ ID NO: 355325 - RNA, 14 nt, Human herpesvirus 8 (Kaposi`s sarcoma-associated h
gcugaaaagggaac

SEQ ID NO: 355326 - RNA, 13 nt, Human herpesvirus 8 (Kaposi`s sarcoma-associated h
gcugagccacaaa

SEQ ID NO: 355327 - RNA, 16 nt, Human herpesvirus 8 (Kaposi`s sarcoma-associated h
gcugaugcucuggcca

SEQ ID NO: 355328 - RNA, 14 nt, Human herpesvirus 8 (Kaposi`s sarcoma-associated h
gcugccacugccac

SEQ ID NO: 355329 - RNA, 22 nt, Human herpesvirus 8 (Kaposi`s sarcoma-associated h
gcugccuaggaccuuucugcug

SEQ ID NO: 355330 - RNA, 18 nt, Human herpesvirus 8 (Kaposi`s sarcoma-associated h
gcugcgcauggcuuacaa

SEQ ID NO: 355331 - RNA, 16 nt, Human herpesvirus 8 (Kaposi`s sarcoma-associated h
gcugcgcgucuucuau

SEQ ID NO: 355332 - RNA, 20 nt, Human herpesvirus 8 (Kaposi`s sarcoma-associated h
gcuggcccaaacuagcagag

SEQ ID NO: 355333 - RNA, 14 nt, Human herpesvirus 8 (Kaposi`s sarcoma-associated h
gcugguaucuggaa

SEQ ID NO: 355334 - RNA, 16 nt, Human herpesvirus 8 (Kaposi`s sarcoma-associated h
gcuggucccgugguca

SEQ ID NO: 355335 - RNA, 17 nt, Human herpesvirus 8 (Kaposi`s sarcoma-associated h
gcuggucgguucacugc

SEQ ID NO: 355336 - RNA, 16 nt, Human herpesvirus 8 (Kaposi`s sarcoma-associated h
gcugguuacucaaaug

SEQ ID NO: 355337 - RNA, 20 nt, Human herpesvirus 8 (Kaposi`s sarcoma-associated h
gcugguugaugcgcggcaca

SEQ ID NO: 355338 - RNA, 13 nt, Human herpesvirus 8 (Kaposi`s sarcoma-associated h
gcuguaauggugu

SEQ ID NO: 355339 - RNA, 15 nt, Human herpesvirus 8 (Kaposi`s sarcoma-associated h
gcuguaauggugugu

SEQ ID NO: 355340 - RNA, 15 nt, Human herpesvirus 8 (Kaposi`s sarcoma-associated h
gcugucuaguggaga

SEQ ID NO: 355341 - RNA, 15 nt, Human herpesvirus 8 (Kaposi`s sarcoma-associated h
ggcuucggcauuauu

SEQ ID NO: 355342 - RNA, 18 nt, Human herpesvirus 8 (Kaposi`s sarcoma-associated h
ggcuucuauaagcaccuu

SEQ ID NO: 355343 - RNA, 17 nt, Human herpesvirus 8 (Kaposi`s sarcoma-associated h
ggcuugaggauggugcu

SEQ ID NO: 355344 - RNA, 17 nt, Human herpesvirus 8 (Kaposi`s sarcoma-associated h
ggcuugggaguggccaa

SEQ ID NO: 355345 - RNA, 15 nt, Human herpesvirus 8 (Kaposi`s sarcoma-associated h
gggaaggaagggcgg

SEQ ID NO: 355346 - RNA, 18 nt, Human herpesvirus 8 (Kaposi`s sarcoma-associated h
gggagagcggacgccauu

SEQ ID NO: 355347 - RNA, 23 nt, Human herpesvirus 8 (Kaposi`s sarcoma-associated h
gggaggcuugguggccauucgca

SEQ ID NO: 355348 - RNA, 22 nt, Human herpesvirus 8 (Kaposi`s sarcoma-associated h
gggaguuuuucuacgaggcaau

SEQ ID NO: 355349 - RNA, 12 nt, Human herpesvirus 8 (Kaposi`s sarcoma-associated h
gggauacuguuu

SEQ ID NO: 355350 - RNA, 22 nt, Human herpesvirus 8 (Kaposi`s sarcoma-associated h
gggaucgaacagaagacccaga

SEQ ID NO: 355351 - RNA, 12 nt, Human herpesvirus 8 (Kaposi`s sarcoma-associated h
gggaugagccag

SEQ ID NO: 355352 - RNA, 22 nt, Human herpesvirus 8 (Kaposi`s sarcoma-associated h
gggcaaccauuuuuuacggaca

SEQ ID NO: 355353 - RNA, 14 nt, Human herpesvirus 8 (Kaposi`s sarcoma-associated h
gggccaaugccaug

SEQ ID NO: 355354 - RNA, 20 nt, Human herpesvirus 8 (Kaposi`s sarcoma-associated h
gggcgaagaagcgcacccag

SEQ ID NO: 355355 - RNA, 20 nt, Human herpesvirus 8 (Kaposi`s sarcoma-associated h
gggcgauaccgcgccacgua

SEQ ID NO: 355356 - RNA, 15 nt, Human herpesvirus 8 (Kaposi`s sarcoma-associated h
gggcgauuacaggaa

SEQ ID NO: 355357 - RNA, 18 nt, Human herpesvirus 8 (Kaposi`s sarcoma-associated h
gggcuugggaguggccaa

SEQ ID NO: 355358 - RNA, 16 nt, Human herpesvirus 8 (Kaposi`s sarcoma-associated h
ggggaagucaugcuca

SEQ ID NO: 355359 - RNA, 14 nt, Human herpesvirus 8 (Kaposi`s sarcoma-associated h
ggggacgugucauu

SEQ ID NO: 355360 - RNA, 17 nt, Human herpesvirus 8 (Kaposi`s sarcoma-associated h
ggggcagcaucacccca

SEQ ID NO: 355361 - RNA, 19 nt, Human herpesvirus 8 (Kaposi`s sarcoma-associated h
ggggguggguucagcgggu

SEQ ID NO: 355362 - RNA, 21 nt, Human herpesvirus 8 (Kaposi`s sarcoma-associated h
gggugaaacccggauuugccc

SEQ ID NO: 355363 - RNA, 18 nt, Human herpesvirus 8 (Kaposi`s sarcoma-associated h
gggugaccccuagccggu

SEQ ID NO: 355364 - RNA, 16 nt, Human herpesvirus 8 (Kaposi`s sarcoma-associated h
ggguugucuacaugaa

SEQ ID NO: 355365 - RNA, 21 nt, Human herpesvirus 8 (Kaposi`s sarcoma-associated h
gguaagggaagcaaaacacaa

SEQ ID NO: 355366 - RNA, 15 nt, Human herpesvirus 8 (Kaposi`s sarcoma-associated h
gguaauaaagucauu

SEQ ID NO: 355367 - RNA, 17 nt, Human herpesvirus 8 (Kaposi`s sarcoma-associated h
gguaccauggcaaaaaa

SEQ ID NO: 355368 - RNA, 15 nt, Human herpesvirus 8 (Kaposi`s sarcoma-associated h
gguauuugcagacau

SEQ ID NO: 355369 - RNA, 18 nt, Human herpesvirus 8 (Kaposi`s sarcoma-associated h
gguccccggaagaguaga

SEQ ID NO: 355370 - RNA, 18 nt, Human herpesvirus 8 (Kaposi`s sarcoma-associated h
ggucuccggugccuguug

SEQ ID NO: 355371 - RNA, 19 nt, Human herpesvirus 8 (Kaposi`s sarcoma-associated h
ggucucuucucuaccguga

SEQ ID NO: 355372 - RNA, 17 nt, Human herpesvirus 8 (Kaposi`s sarcoma-associated h
ggugaaaaauaacgggg

SEQ ID NO: 355373 - RNA, 21 nt, Human herpesvirus 8 (Kaposi`s sarcoma-associated h
gguggcacccaacauccauua

SEQ ID NO: 355374 - RNA, 16 nt, Human herpesvirus 8 (Kaposi`s sarcoma-associated h
gguggcccugaaauga

SEQ ID NO: 355375 - RNA, 19 nt, Human herpesvirus 8 (Kaposi`s sarcoma-associated h
ggugggacgugcgggccaa

SEQ ID NO: 355376 - RNA, 21 nt, Human herpesvirus 8 (Kaposi`s sarcoma-associated h
ggugggcuacguacccaaugu

SEQ ID NO: 355377 - RNA, 12 nt, Human herpesvirus 8 (Kaposi`s sarcoma-associated h
gguggugugccu

SEQ ID NO: 355378 - RNA, 18 nt, Human herpesvirus 8 (Kaposi`s sarcoma-associated h
gguguaugacccugagcu

SEQ ID NO: 355379 - RNA, 17 nt, Human herpesvirus 8 (Kaposi`s sarcoma-associated h
gguguccccugcaaugc

SEQ ID NO: 355380 - RNA, 17 nt, Human herpesvirus 8 (Kaposi`s sarcoma-associated h
ggugucguguaugccaa

SEQ ID NO: 355381 - RNA, 17 nt, Human herpesvirus 8 (Kaposi`s sarcoma-associated h
gguucuaaucuuagucu

SEQ ID NO: 355382 - RNA, 17 nt, Human herpesvirus 8 (Kaposi`s sarcoma-associated h
gguugaugcgcggcaca

SEQ ID NO: 355383 - RNA, 19 nt, Human herpesvirus 8 (Kaposi`s sarcoma-associated h
gguugcauagggcuuugau

SEQ ID NO: 355384 - RNA, 21 nt, Human herpesvirus 8 (Kaposi`s sarcoma-associated h
gguugcauagggcuuugauga

SEQ ID NO: 355385 - RNA, 15 nt, Human herpesvirus 8 (Kaposi`s sarcoma-associated h
gguugggauucacuc

SEQ ID NO: 355386 - RNA, 19 nt, Human herpesvirus 8 (Kaposi`s sarcoma-associated h
gguuguuuacgcagggugc

SEQ ID NO: 355387 - RNA, 16 nt, Human herpesvirus 8 (Kaposi`s sarcoma-associated h
gguuuccuagccagau

SEQ ID NO: 355388 - RNA, 17 nt, Human herpesvirus 8 (Kaposi`s sarcoma-associated h
gguuuccuagccagaua

SEQ ID NO: 355389 - RNA, 21 nt, Human herpesvirus 8 (Kaposi`s sarcoma-associated h
gguuucugggauagugucugg

SEQ ID NO: 355390 - RNA, 16 nt, Human herpesvirus 8 (Kaposi`s sarcoma-associated h
gguuugauagcagaua

SEQ ID NO: 355391 - RNA, 14 nt, Human herpesvirus 8 (Kaposi`s sarcoma-associated h
guaaaaauaaaugu

SEQ ID NO: 355392 - RNA, 14 nt, Human herpesvirus 8 (Kaposi`s sarcoma-associated h
guaaaacggccaaa

SEQ ID NO: 355393 - RNA, 21 nt, Human herpesvirus 8 (Kaposi`s sarcoma-associated h
guaacacaaaagcaaguggac

SEQ ID NO: 355394 - RNA, 21 nt, Human herpesvirus 8 (Kaposi`s sarcoma-associated h
guaaccagcuacgcacugagc

SEQ ID NO: 355395 - RNA, 14 nt, Human herpesvirus 8 (Kaposi`s sarcoma-associated h
guaacgauggcaaa

SEQ ID NO: 355396 - RNA, 15 nt, Human herpesvirus 8 (Kaposi`s sarcoma-associated h
guaacuucaccgugg

SEQ ID NO: 355397 - RNA, 21 nt, Human herpesvirus 8 (Kaposi`s sarcoma-associated h
guaaugccacauuucccccau

SEQ ID NO: 355398 - RNA, 13 nt, Human herpesvirus 8 (Kaposi`s sarcoma-associated h
guacagugccugc

SEQ ID NO: 355399 - RNA, 22 nt, Human herpesvirus 8 (Kaposi`s sarcoma-associated h
guacauuaaaaggacauuguau

SEQ ID NO: 355400 - RNA, 12 nt, Human herpesvirus 8 (Kaposi`s sarcoma-associated h
guaccaccaaga

SEQ ID NO: 355401 - RNA, 13 nt, Human herpesvirus 8 (Kaposi`s sarcoma-associated h
guacccaauguua

SEQ ID NO: 355402 - RNA, 20 nt, Human herpesvirus 8 (Kaposi`s sarcoma-associated h
guacgguagggcuccugggu

SEQ ID NO: 355403 - RNA, 12 nt, Human herpesvirus 8 (Kaposi`s sarcoma-associated h
guacugccauga

SEQ ID NO: 355404 - RNA, 17 nt, Human herpesvirus 8 (Kaposi`s sarcoma-associated h
guagaaucaaugugguu

SEQ ID NO: 355405 - RNA, 22 nt, Human herpesvirus 8 (Kaposi`s sarcoma-associated h
guagacgcaggcgccuaugacu

SEQ ID NO: 355406 - RNA, 14 nt, Human herpesvirus 8 (Kaposi`s sarcoma-associated h
guagaggguugcug

SEQ ID NO: 355407 - RNA, 15 nt, Human herpesvirus 8 (Kaposi`s sarcoma-associated h
guagauugacuggaa

SEQ ID NO: 355408 - RNA, 14 nt, Human herpesvirus 8 (Kaposi`s sarcoma-associated h
guagcaugcugaug

SEQ ID NO: 355409 - RNA, 18 nt, Human herpesvirus 8 (Kaposi`s sarcoma-associated h
guaggcauuuuguauuau

SEQ ID NO: 355410 - RNA, 15 nt, Human herpesvirus 8 (Kaposi`s sarcoma-associated h
guaggcguagagggu

SEQ ID NO: 355411 - RNA, 21 nt, Human herpesvirus 8 (Kaposi`s sarcoma-associated h
guagggcuccuggguagcuau

SEQ ID NO: 355412 - RNA, 16 nt, Human herpesvirus 8 (Kaposi`s sarcoma-associated h
guaucucucuacgagg

SEQ ID NO: 355413 - RNA, 21 nt, Human herpesvirus 8 (Kaposi`s sarcoma-associated h
guaucugauuuaauaaacacu

SEQ ID NO: 355414 - RNA, 19 nt, Human herpesvirus 8 (Kaposi`s sarcoma-associated h
guaugacccugagcuggua

SEQ ID NO: 355415 - RNA, 17 nt, Human herpesvirus 8 (Kaposi`s sarcoma-associated h
guauggcgucaucugau

SEQ ID NO: 355416 - RNA, 13 nt, Human herpesvirus 8 (Kaposi`s sarcoma-associated h
guauuguacuaaa

SEQ ID NO: 355417 - RNA, 13 nt, Human herpesvirus 8 (Kaposi`s sarcoma-associated h
guauuuaaagcug

SEQ ID NO: 355418 - RNA, 18 nt, Human herpesvirus 8 (Kaposi`s sarcoma-associated h
guauuuaaagcuggguau

SEQ ID NO: 355419 - RNA, 16 nt, Human herpesvirus 8 (Kaposi`s sarcoma-associated h
guauuucugcauugua

SEQ ID NO: 355420 - RNA, 12 nt, Human herpesvirus 8 (Kaposi`s sarcoma-associated h
guguccaggaaa

SEQ ID NO: 355421 - RNA, 16 nt, Human herpesvirus 8 (Kaposi`s sarcoma-associated h
guguccccugcaaugc

SEQ ID NO: 355422 - RNA, 22 nt, Human herpesvirus 8 (Kaposi`s sarcoma-associated h
guguucaucgcugccccaaaag

SEQ ID NO: 355423 - RNA, 22 nt, Human herpesvirus 8 (Kaposi`s sarcoma-associated h
guguuuuucuggucgcugccag

SEQ ID NO: 355424 - RNA, 22 nt, Human herpesvirus 8 (Kaposi`s sarcoma-associated h
guuaagcuuugcagccagguaa

SEQ ID NO: 355425 - RNA, 21 nt, Human herpesvirus 8 (Kaposi`s sarcoma-associated h
guuaccuuauccgcuagccac

SEQ ID NO: 355426 - RNA, 14 nt, Human herpesvirus 8 (Kaposi`s sarcoma-associated h
guuacuauaaacag

SEQ ID NO: 355427 - RNA, 17 nt, Human herpesvirus 8 (Kaposi`s sarcoma-associated h
guuagauggcacagagu

SEQ ID NO: 355428 - RNA, 16 nt, Human herpesvirus 8 (Kaposi`s sarcoma-associated h
guuagugaccugcugu

SEQ ID NO: 355429 - RNA, 16 nt, Human herpesvirus 8 (Kaposi`s sarcoma-associated h
guuaucuccugcucau

SEQ ID NO: 355430 - RNA, 18 nt, Human herpesvirus 8 (Kaposi`s sarcoma-associated h
guuaucuuugcagugucu

SEQ ID NO: 355431 - RNA, 12 nt, Human herpesvirus 8 (Kaposi`s sarcoma-associated h
guucaaccugga

SEQ ID NO: 355432 - RNA, 15 nt, Human herpesvirus 8 (Kaposi`s sarcoma-associated h
guucacugcugguau

SEQ ID NO: 355433 - RNA, 20 nt, Human herpesvirus 8 (Kaposi`s sarcoma-associated h
guucacugcugguaucugga

SEQ ID NO: 355434 - RNA, 22 nt, Human herpesvirus 8 (Kaposi`s sarcoma-associated h
guucaggauuucgaauaucuca

SEQ ID NO: 355435 - RNA, 23 nt, Human herpesvirus 8 (Kaposi`s sarcoma-associated h
guucaggugguaauaaagucauu

SEQ ID NO: 355436 - RNA, 12 nt, Human herpesvirus 8 (Kaposi`s sarcoma-associated h
guucauaccuca

SEQ ID NO: 355437 - RNA, 21 nt, Human herpesvirus 8 (Kaposi`s sarcoma-associated h
guuccaagagcgagugugccu

SEQ ID NO: 355438 - RNA, 20 nt, Human herpesvirus 8 (Kaposi`s sarcoma-associated h
guuccacggcguguuuugcc

SEQ ID NO: 355439 - RNA, 21 nt, Human herpesvirus 8 (Kaposi`s sarcoma-associated h
guuccuccuaaacguguucau

SEQ ID NO: 355440 - RNA, 19 nt, Human herpesvirus 8 (Kaposi`s sarcoma-associated h
guucuaaucuggcauguau

SEQ ID NO: 355441 - RNA, 14 nt, Human herpesvirus 8 (Kaposi`s sarcoma-associated h
guugacacaaugug

SEQ ID NO: 355442 - RNA, 14 nt, Human herpesvirus 8 (Kaposi`s sarcoma-associated h
guugcacacagaca

SEQ ID NO: 355443 - RNA, 19 nt, Human herpesvirus 8 (Kaposi`s sarcoma-associated h
guugcgcaauucaggcauc

SEQ ID NO: 355444 - RNA, 19 nt, Human herpesvirus 8 (Kaposi`s sarcoma-associated h
guugucccucagccacaaa

SEQ ID NO: 355445 - RNA, 17 nt, Human herpesvirus 8 (Kaposi`s sarcoma-associated h
guugugaagcauuuuaa

SEQ ID NO: 355446 - RNA, 13 nt, Human herpesvirus 8 (Kaposi`s sarcoma-associated h
guuguucuuugcg

SEQ ID NO: 355447 - RNA, 19 nt, Human herpesvirus 8 (Kaposi`s sarcoma-associated h
guuguuuguauaacaugca

SEQ ID NO: 355448 - RNA, 15 nt, Human herpesvirus 8 (Kaposi`s sarcoma-associated h
guuuauaacaaugaa

SEQ ID NO: 355449 - RNA, 20 nt, Human herpesvirus 8 (Kaposi`s sarcoma-associated h
guuuauuuuuuuucaaacag

SEQ ID NO: 355450 - RNA, 18 nt, Human herpesvirus 8 (Kaposi`s sarcoma-associated h
guuuccagugacccuagu

SEQ ID NO: 355451 - RNA, 20 nt, Human herpesvirus 8 (Kaposi`s sarcoma-associated h
guuuccagugacccuaguca

SEQ ID NO: 355452 - RNA, 22 nt, Human herpesvirus 8 (Kaposi`s sarcoma-associated h
guuuccagugacccuagucacu

SEQ ID NO: 355453 - RNA, 20 nt, Human herpesvirus 8 (Kaposi`s sarcoma-associated h
guuucccacgugcaccagcu

SEQ ID NO: 355454 - RNA, 19 nt, Human herpesvirus 8 (Kaposi`s sarcoma-associated h
guuugcgcggccuuuucug

SEQ ID NO: 355455 - RNA, 15 nt, Human herpesvirus 8 (Kaposi`s sarcoma-associated h
guuuggcagucacuu

SEQ ID NO: 355456 - RNA, 20 nt, Human herpesvirus 8 (Kaposi`s sarcoma-associated h
guuuggcccacguggugcug

SEQ ID NO: 355457 - RNA, 15 nt, Human herpesvirus 8 (Kaposi`s sarcoma-associated h
guuuuauuaugcgau

SEQ ID NO: 355458 - RNA, 18 nt, Human herpesvirus 8 (Kaposi`s sarcoma-associated h
guuuugaacaauguucau

SEQ ID NO: 355459 - RNA, 11 nt, Human herpesvirus 8 (Kaposi`s sarcoma-associated h
guuuugcacua

SEQ ID NO: 355460 - RNA, 16 nt, Human herpesvirus 8 (Kaposi`s sarcoma-associated h
guuuuguaaacugaug

SEQ ID NO: 355461 - RNA, 23 nt, Human herpesvirus 8 (Kaposi`s sarcoma-associated h
guuuuucuggucgcugccaguca

SEQ ID NO: 355462 - RNA, 18 nt, Human herpesvirus 8 (Kaposi`s sarcoma-associated h
uaaaaaacguauaugccc

SEQ ID NO: 355463 - RNA, 17 nt, Human herpesvirus 8 (Kaposi`s sarcoma-associated h
uaaaaaccacucacuga

SEQ ID NO: 355464 - RNA, 18 nt, Human herpesvirus 8 (Kaposi`s sarcoma-associated h
uaaaacgaagcaaagugu

SEQ ID NO: 355465 - RNA, 14 nt, Human herpesvirus 8 (Kaposi`s sarcoma-associated h
uaaaacggccaaag

SEQ ID NO: 355466 - RNA, 19 nt, Human herpesvirus 8 (Kaposi`s sarcoma-associated h
uaaaacggccaaagcaaag

SEQ ID NO: 355467 - RNA, 15 nt, Human herpesvirus 8 (Kaposi`s sarcoma-associated h
uaaaaggacauugua

SEQ ID NO: 355468 - RNA, 14 nt, Human herpesvirus 8 (Kaposi`s sarcoma-associated h
uaaaagucuggccc

SEQ ID NO: 355469 - RNA, 15 nt, Human herpesvirus 8 (Kaposi`s sarcoma-associated h
uaaaauaaaauacaa

SEQ ID NO: 355470 - RNA, 17 nt, Human herpesvirus 8 (Kaposi`s sarcoma-associated h
uaaaauacaaaaacaca

SEQ ID NO: 355471 - RNA, 20 nt, Human herpesvirus 8 (Kaposi`s sarcoma-associated h
uaaaauacaaaaacacaauc

SEQ ID NO: 355472 - RNA, 14 nt, Human herpesvirus 8 (Kaposi`s sarcoma-associated h
uaaaauagcucauu

SEQ ID NO: 355473 - RNA, 18 nt, Human herpesvirus 8 (Kaposi`s sarcoma-associated h
uaaacaagcuaccugcaa

SEQ ID NO: 355474 - RNA, 17 nt, Human herpesvirus 8 (Kaposi`s sarcoma-associated h
uaaacacauacaaugcu

SEQ ID NO: 355475 - RNA, 16 nt, Human herpesvirus 8 (Kaposi`s sarcoma-associated h
uaaacauggcacucuu

SEQ ID NO: 355476 - RNA, 16 nt, Human herpesvirus 8 (Kaposi`s sarcoma-associated h
uaaacgucuguaaaac

SEQ ID NO: 355477 - RNA, 20 nt, Human herpesvirus 8 (Kaposi`s sarcoma-associated h
uaaacgucuguaaaacacug

SEQ ID NO: 355478 - RNA, 22 nt, Human herpesvirus 8 (Kaposi`s sarcoma-associated h
uaaacguguaacccugccaaau

SEQ ID NO: 355479 - RNA, 15 nt, Human herpesvirus 8 (Kaposi`s sarcoma-associated h
uaaagaguaccacuc

SEQ ID NO: 355480 - RNA, 20 nt, Human herpesvirus 8 (Kaposi`s sarcoma-associated h
uaaagauaccgaccaauaca

SEQ ID NO: 355481 - RNA, 16 nt, Human herpesvirus 8 (Kaposi`s sarcoma-associated h
uaaagccgagccacaa

SEQ ID NO: 355482 - RNA, 18 nt, Human herpesvirus 8 (Kaposi`s sarcoma-associated h
uaaagccgagccacaaag

SEQ ID NO: 355483 - RNA, 22 nt, Human herpesvirus 8 (Kaposi`s sarcoma-associated h
uaaagcgcgaacaagacaccaa

SEQ ID NO: 355484 - RNA, 22 nt, Human herpesvirus 8 (Kaposi`s sarcoma-associated h
uaaaggggacgugucauugcca

SEQ ID NO: 355485 - RNA, 22 nt, Human herpesvirus 8 (Kaposi`s sarcoma-associated h
uaaagucaugggaccgugugug

SEQ ID NO: 355486 - RNA, 18 nt, Human herpesvirus 8 (Kaposi`s sarcoma-associated h
uaaaugaauaucauuugc

SEQ ID NO: 355487 - RNA, 16 nt, Human herpesvirus 8 (Kaposi`s sarcoma-associated h
uaaauuggccacugca

SEQ ID NO: 355488 - RNA, 19 nt, Human herpesvirus 8 (Kaposi`s sarcoma-associated h
uaacaauacgguguaggca

SEQ ID NO: 355489 - RNA, 21 nt, Human herpesvirus 8 (Kaposi`s sarcoma-associated h
uaacaauacgguguaggcauu

SEQ ID NO: 355490 - RNA, 17 nt, Human herpesvirus 8 (Kaposi`s sarcoma-associated h
uaacacacacaaagaca

SEQ ID NO: 355491 - RNA, 18 nt, Human herpesvirus 8 (Kaposi`s sarcoma-associated h
uaacacuucccaauaaca

SEQ ID NO: 355492 - RNA, 17 nt, Human herpesvirus 8 (Kaposi`s sarcoma-associated h
uaacagcaacauguuua

SEQ ID NO: 355493 - RNA, 23 nt, Human herpesvirus 8 (Kaposi`s sarcoma-associated h
uaacagugcucuuccuccuaguc

SEQ ID NO: 355494 - RNA, 24 nt, Human herpesvirus 8 (Kaposi`s sarcoma-associated h
uaacagugcucuuccuccuaguca

SEQ ID NO: 355495 - RNA, 20 nt, Human herpesvirus 8 (Kaposi`s sarcoma-associated h
uaacaugcaacccucuacuc

SEQ ID NO: 355496 - RNA, 22 nt, Human herpesvirus 8 (Kaposi`s sarcoma-associated h
uaaccacaacaauagggauacu

SEQ ID NO: 355497 - RNA, 13 nt, Human herpesvirus 8 (Kaposi`s sarcoma-associated h
uaacccacgucac

SEQ ID NO: 355498 - RNA, 15 nt, Human herpesvirus 8 (Kaposi`s sarcoma-associated h
uagaccuacaucucc

SEQ ID NO: 355499 - RNA, 15 nt, Human herpesvirus 8 (Kaposi`s sarcoma-associated h
uagacuuaaaauguc

SEQ ID NO: 355500 - RNA, 16 nt, Human herpesvirus 8 (Kaposi`s sarcoma-associated h
uagagcccgcugcuau

SEQ ID NO: 355501 - RNA, 15 nt, Human herpesvirus 8 (Kaposi`s sarcoma-associated h
uagagcgacugcugg

SEQ ID NO: 355502 - RNA, 20 nt, Human herpesvirus 8 (Kaposi`s sarcoma-associated h
uagaguccaaaacacgcacc

SEQ ID NO: 355503 - RNA, 19 nt, Human herpesvirus 8 (Kaposi`s sarcoma-associated h
uagaucuggauacacuacu

SEQ ID NO: 355504 - RNA, 15 nt, Human herpesvirus 8 (Kaposi`s sarcoma-associated h
uagaugaaacauucg

SEQ ID NO: 355505 - RNA, 16 nt, Human herpesvirus 8 (Kaposi`s sarcoma-associated h
uagauggcacagaguc

SEQ ID NO: 355506 - RNA, 13 nt, Human herpesvirus 8 (Kaposi`s sarcoma-associated h
uagauugacugga

SEQ ID NO: 355507 - RNA, 16 nt, Human herpesvirus 8 (Kaposi`s sarcoma-associated h
uagauuuuggacuaga

SEQ ID NO: 355508 - RNA, 15 nt, Human herpesvirus 8 (Kaposi`s sarcoma-associated h
uagcagaaaacuguc

SEQ ID NO: 355509 - RNA, 20 nt, Human herpesvirus 8 (Kaposi`s sarcoma-associated h
uagcagauauaaacauggca

SEQ ID NO: 355510 - RNA, 23 nt, Human herpesvirus 8 (Kaposi`s sarcoma-associated h
uagcgugcggucagagugguggg

SEQ ID NO: 355511 - RNA, 13 nt, Human herpesvirus 8 (Kaposi`s sarcoma-associated h
uaggaauacgcuu

SEQ ID NO: 355512 - RNA, 16 nt, Human herpesvirus 8 (Kaposi`s sarcoma-associated h
uaggaccuuucugcug

SEQ ID NO: 355513 - RNA, 18 nt, Human herpesvirus 8 (Kaposi`s sarcoma-associated h
uaggaggaagagcacugu

SEQ ID NO: 355514 - RNA, 19 nt, Human herpesvirus 8 (Kaposi`s sarcoma-associated h
uaggaggaagagcacuguu

SEQ ID NO: 355515 - RNA, 15 nt, Human herpesvirus 8 (Kaposi`s sarcoma-associated h
uaggcaacaugacau

SEQ ID NO: 355516 - RNA, 24 nt, Human herpesvirus 8 (Kaposi`s sarcoma-associated h
uaggcacccggaacuaucguugcu

SEQ ID NO: 355517 - RNA, 18 nt, Human herpesvirus 8 (Kaposi`s sarcoma-associated h
uaggcgaagagaccgcau

SEQ ID NO: 355518 - RNA, 22 nt, Human herpesvirus 8 (Kaposi`s sarcoma-associated h
uaggcgaagagaccgcaucucu

SEQ ID NO: 355519 - RNA, 19 nt, Human herpesvirus 8 (Kaposi`s sarcoma-associated h
uagguagauugacuggaac

SEQ ID NO: 355520 - RNA, 17 nt, Human herpesvirus 8 (Kaposi`s sarcoma-associated h
uaggugggugugcauuu

SEQ ID NO: 355521 - RNA, 20 nt, Human herpesvirus 8 (Kaposi`s sarcoma-associated h
uagguuguuauuaucaaaga

SEQ ID NO: 355522 - RNA, 18 nt, Human herpesvirus 8 (Kaposi`s sarcoma-associated h
uaguacgugguaagggaa

SEQ ID NO: 355523 - RNA, 20 nt, Human herpesvirus 8 (Kaposi`s sarcoma-associated h
uagucaucgccgccgccaaa

SEQ ID NO: 355524 - RNA, 16 nt, Human herpesvirus 8 (Kaposi`s sarcoma-associated h
uagucguuguaguggu

SEQ ID NO: 355525 - RNA, 19 nt, Human herpesvirus 8 (Kaposi`s sarcoma-associated h
uagucuuacugucagauuu

SEQ ID NO: 355526 - RNA, 18 nt, Human herpesvirus 8 (Kaposi`s sarcoma-associated h
uagugacauacaugagag

SEQ ID NO: 355527 - RNA, 19 nt, Human herpesvirus 8 (Kaposi`s sarcoma-associated h
uagugcaagugcacggauc

SEQ ID NO: 355528 - RNA, 17 nt, Human herpesvirus 8 (Kaposi`s sarcoma-associated h
uagugccucauaucuuu

SEQ ID NO: 355529 - RNA, 20 nt, Human herpesvirus 8 (Kaposi`s sarcoma-associated h
uagugcuccgauaugaacga

SEQ ID NO: 355530 - RNA, 15 nt, Human herpesvirus 8 (Kaposi`s sarcoma-associated h
uaguguaugccgcgu

SEQ ID NO: 355531 - RNA, 19 nt, Human herpesvirus 8 (Kaposi`s sarcoma-associated h
uaguugugcuuccugauga

SEQ ID NO: 355532 - RNA, 19 nt, Human herpesvirus 8 (Kaposi`s sarcoma-associated h
uauaaacagccuuggugcu

SEQ ID NO: 355533 - RNA, 21 nt, Human herpesvirus 8 (Kaposi`s sarcoma-associated h
uauaacagcaacauguuuaca

SEQ ID NO: 355534 - RNA, 15 nt, Human herpesvirus 8 (Kaposi`s sarcoma-associated h
uauaacaucaccaag

SEQ ID NO: 355535 - RNA, 18 nt, Human herpesvirus 8 (Kaposi`s sarcoma-associated h
uauaaccgugcuacuuac

SEQ ID NO: 355536 - RNA, 12 nt, Human herpesvirus 8 (Kaposi`s sarcoma-associated h
uauaauggaugg

SEQ ID NO: 355537 - RNA, 16 nt, Human herpesvirus 8 (Kaposi`s sarcoma-associated h
uauacagguaaaacgg

SEQ ID NO: 355538 - RNA, 18 nt, Human herpesvirus 8 (Kaposi`s sarcoma-associated h
uauacagguaaaacggcc

SEQ ID NO: 355539 - RNA, 20 nt, Human herpesvirus 8 (Kaposi`s sarcoma-associated h
uauacaugccccuuaucucc

SEQ ID NO: 355540 - RNA, 19 nt, Human herpesvirus 8 (Kaposi`s sarcoma-associated h
uauaccggccuguuuccaa

SEQ ID NO: 355541 - RNA, 17 nt, Human herpesvirus 8 (Kaposi`s sarcoma-associated h
uauacuuugcgugucua

SEQ ID NO: 355542 - RNA, 17 nt, Human herpesvirus 8 (Kaposi`s sarcoma-associated h
uauagaugaaacauucg

SEQ ID NO: 355543 - RNA, 14 nt, Human herpesvirus 8 (Kaposi`s sarcoma-associated h
uauagugguuuaca

SEQ ID NO: 355544 - RNA, 21 nt, Human herpesvirus 8 (Kaposi`s sarcoma-associated h
uauauaagagcacacugugug

SEQ ID NO: 355545 - RNA, 16 nt, Human herpesvirus 8 (Kaposi`s sarcoma-associated h
uauaugacuacuguga

SEQ ID NO: 355546 - RNA, 20 nt, Human herpesvirus 8 (Kaposi`s sarcoma-associated h
uauaugcaccguuuccacac

SEQ ID NO: 355547 - RNA, 15 nt, Human herpesvirus 8 (Kaposi`s sarcoma-associated h
uaucaacccuacucg

SEQ ID NO: 355548 - RNA, 18 nt, Human herpesvirus 8 (Kaposi`s sarcoma-associated h
uaucaauaaagagaccaa

SEQ ID NO: 355549 - RNA, 17 nt, Human herpesvirus 8 (Kaposi`s sarcoma-associated h
uaucagcugcagccagg

SEQ ID NO: 355550 - RNA, 18 nt, Human herpesvirus 8 (Kaposi`s sarcoma-associated h
uaucaggcuagugcugua

SEQ ID NO: 355551 - RNA, 17 nt, Human herpesvirus 8 (Kaposi`s sarcoma-associated h
uaucaugugaacaauaa

SEQ ID NO: 355552 - RNA, 18 nt, Human herpesvirus 8 (Kaposi`s sarcoma-associated h
uaucaugugaacaauaaa

SEQ ID NO: 355553 - RNA, 19 nt, Human herpesvirus 8 (Kaposi`s sarcoma-associated h
uauccgcaacuucuauguu

SEQ ID NO: 355554 - RNA, 16 nt, Human herpesvirus 8 (Kaposi`s sarcoma-associated h
uaucgagggcauaccc

SEQ ID NO: 355555 - RNA, 15 nt, Human herpesvirus 8 (Kaposi`s sarcoma-associated h
uaucgucuccagauc

SEQ ID NO: 355556 - RNA, 19 nt, Human herpesvirus 8 (Kaposi`s sarcoma-associated h
uaucuaucucugguggugg

SEQ ID NO: 355557 - RNA, 18 nt, Human herpesvirus 8 (Kaposi`s sarcoma-associated h
uaucucuggugguggcua

SEQ ID NO: 355558 - RNA, 14 nt, Human herpesvirus 8 (Kaposi`s sarcoma-associated h
uaugacuacuguga

SEQ ID NO: 355559 - RNA, 15 nt, Human herpesvirus 8 (Kaposi`s sarcoma-associated h
uaugacuacugugaa

SEQ ID NO: 355560 - RNA, 23 nt, Human herpesvirus 8 (Kaposi`s sarcoma-associated h
uaugacuacugugaaguuuacau

SEQ ID NO: 355561 - RNA, 20 nt, Human herpesvirus 8 (Kaposi`s sarcoma-associated h
uaugaggucggauacuuauu

SEQ ID NO: 355562 - RNA, 14 nt, Human herpesvirus 8 (Kaposi`s sarcoma-associated h
uaugaguguaaaaa

SEQ ID NO: 355563 - RNA, 20 nt, Human herpesvirus 8 (Kaposi`s sarcoma-associated h
uaugcagcagcgugacacua

SEQ ID NO: 355564 - RNA, 23 nt, Human herpesvirus 8 (Kaposi`s sarcoma-associated h
uaugcagcagcgugacacuacua

SEQ ID NO: 355565 - RNA, 16 nt, Human herpesvirus 8 (Kaposi`s sarcoma-associated h
uaugcccaacuucauc

SEQ ID NO: 355566 - RNA, 16 nt, Human herpesvirus 8 (Kaposi`s sarcoma-associated h
uaugccgcguuagcag

SEQ ID NO: 355567 - RNA, 17 nt, Human herpesvirus 8 (Kaposi`s sarcoma-associated h
uaugcucacgugagaca

SEQ ID NO: 355568 - RNA, 23 nt, Human herpesvirus 8 (Kaposi`s sarcoma-associated h
uauggacauuuaccaugguuauu

SEQ ID NO: 355569 - RNA, 21 nt, Human herpesvirus 8 (Kaposi`s sarcoma-associated h
uaugggagggaguauaucaua

SEQ ID NO: 355570 - RNA, 15 nt, Human herpesvirus 8 (Kaposi`s sarcoma-associated h
uaugguauucaggca

SEQ ID NO: 355571 - RNA, 22 nt, Human herpesvirus 8 (Kaposi`s sarcoma-associated h
uaugucauuuuuacuuuuacaa

SEQ ID NO: 355572 - RNA, 16 nt, Human herpesvirus 8 (Kaposi`s sarcoma-associated h
uauguccuucacuuug

SEQ ID NO: 355573 - RNA, 16 nt, Human herpesvirus 8 (Kaposi`s sarcoma-associated h
uauguugugcgccuac

SEQ ID NO: 355574 - RNA, 12 nt, Human herpesvirus 8 (Kaposi`s sarcoma-associated h
uauuaaagggac

SEQ ID NO: 355575 - RNA, 19 nt, Human herpesvirus 8 (Kaposi`s sarcoma-associated h
uauuaaaguggugaucuua

SEQ ID NO: 355576 - RNA, 18 nt, Human herpesvirus 8 (Kaposi`s sarcoma-associated h
ucccccaccgagugcuuu

SEQ ID NO: 355577 - RNA, 18 nt, Human herpesvirus 8 (Kaposi`s sarcoma-associated h
uccccggauuccuccgca

SEQ ID NO: 355578 - RNA, 19 nt, Human herpesvirus 8 (Kaposi`s sarcoma-associated h
uccccggcguccucucaug

SEQ ID NO: 355579 - RNA, 15 nt, Human herpesvirus 8 (Kaposi`s sarcoma-associated h
uccccugcaaugcaa

SEQ ID NO: 355580 - RNA, 18 nt, Human herpesvirus 8 (Kaposi`s sarcoma-associated h
ucccgccgguugguggug

SEQ ID NO: 355581 - RNA, 21 nt, Human herpesvirus 8 (Kaposi`s sarcoma-associated h
ucccuaagggucugcagauga

SEQ ID NO: 355582 - RNA, 14 nt, Human herpesvirus 8 (Kaposi`s sarcoma-associated h
ucccucagccacaa

SEQ ID NO: 355583 - RNA, 17 nt, Human herpesvirus 8 (Kaposi`s sarcoma-associated h
ucccucuuggcuguuac

SEQ ID NO: 355584 - RNA, 15 nt, Human herpesvirus 8 (Kaposi`s sarcoma-associated h
ucccuucacagugcg

SEQ ID NO: 355585 - RNA, 12 nt, Human herpesvirus 8 (Kaposi`s sarcoma-associated h
uccgacaugugc

SEQ ID NO: 355586 - RNA, 16 nt, Human herpesvirus 8 (Kaposi`s sarcoma-associated h
uccgacaugugcuuuu

SEQ ID NO: 355587 - RNA, 12 nt, Human herpesvirus 8 (Kaposi`s sarcoma-associated h
uccgagcaccuc

SEQ ID NO: 355588 - RNA, 14 nt, Human herpesvirus 8 (Kaposi`s sarcoma-associated h
uccgagcaccucag

SEQ ID NO: 355589 - RNA, 13 nt, Human herpesvirus 8 (Kaposi`s sarcoma-associated h
uccgauugcuuca

SEQ ID NO: 355590 - RNA, 17 nt, Human herpesvirus 8 (Kaposi`s sarcoma-associated h
uccgcaacuucuauguu

SEQ ID NO: 355591 - RNA, 19 nt, Human herpesvirus 8 (Kaposi`s sarcoma-associated h
uccgcacagacgacugggc

SEQ ID NO: 355592 - RNA, 15 nt, Human herpesvirus 8 (Kaposi`s sarcoma-associated h
uccgcauuaaagcac

SEQ ID NO: 355593 - RNA, 21 nt, Human herpesvirus 8 (Kaposi`s sarcoma-associated h
uccgccacgcagcucaucaau

SEQ ID NO: 355594 - RNA, 16 nt, Human herpesvirus 8 (Kaposi`s sarcoma-associated h
uccguccccaauuuca

SEQ ID NO: 355595 - RNA, 14 nt, Human herpesvirus 8 (Kaposi`s sarcoma-associated h
uccgugguacccag

SEQ ID NO: 355596 - RNA, 22 nt, Human herpesvirus 8 (Kaposi`s sarcoma-associated h
uccguugucgacuauaaccugg

SEQ ID NO: 355597 - RNA, 17 nt, Human herpesvirus 8 (Kaposi`s sarcoma-associated h
uccuauugcaacugacc

SEQ ID NO: 355598 - RNA, 22 nt, Human herpesvirus 8 (Kaposi`s sarcoma-associated h
uccucauuaaaaacaaguagcu

SEQ ID NO: 355599 - RNA, 19 nt, Human herpesvirus 8 (Kaposi`s sarcoma-associated h
uccucuagucguuguagug

SEQ ID NO: 355600 - RNA, 12 nt, Human herpesvirus 8 (Kaposi`s sarcoma-associated h
uccucuugcgcu

SEQ ID NO: 355601 - RNA, 12 nt, Human herpesvirus 8 (Kaposi`s sarcoma-associated h
uccugcauuugg

SEQ ID NO: 355602 - RNA, 13 nt, Human herpesvirus 8 (Kaposi`s sarcoma-associated h
uccugcugucuau

SEQ ID NO: 355603 - RNA, 18 nt, Human herpesvirus 8 (Kaposi`s sarcoma-associated h
uccuguggaccacccuau

SEQ ID NO: 355604 - RNA, 18 nt, Human herpesvirus 8 (Kaposi`s sarcoma-associated h
uccuuaagaaaguggaua

SEQ ID NO: 355605 - RNA, 15 nt, Human herpesvirus 8 (Kaposi`s sarcoma-associated h
ucgaagccaggguca

SEQ ID NO: 355606 - RNA, 16 nt, Human herpesvirus 8 (Kaposi`s sarcoma-associated h
ucgaggaagaaauggg

SEQ ID NO: 355607 - RNA, 21 nt, Human herpesvirus 8 (Kaposi`s sarcoma-associated h
ucgaucacgcccgugugcaug

SEQ ID NO: 355608 - RNA, 15 nt, Human herpesvirus 8 (Kaposi`s sarcoma-associated h
ucgauuucacuguca

SEQ ID NO: 355609 - RNA, 20 nt, Human herpesvirus 8 (Kaposi`s sarcoma-associated h
ucgcaagcuugagcuuuuca

SEQ ID NO: 355610 - RNA, 20 nt, Human herpesvirus 8 (Kaposi`s sarcoma-associated h
ucgcaugaauacccuggauc

SEQ ID NO: 355611 - RNA, 15 nt, Human herpesvirus 8 (Kaposi`s sarcoma-associated h
ucgccaccacuaucc

SEQ ID NO: 355612 - RNA, 20 nt, Human herpesvirus 8 (Kaposi`s sarcoma-associated h
ucgccagggucaucccgccg

SEQ ID NO: 355613 - RNA, 14 nt, Human herpesvirus 8 (Kaposi`s sarcoma-associated h
ucgcccgccugugu

SEQ ID NO: 355614 - RNA, 21 nt, Human herpesvirus 8 (Kaposi`s sarcoma-associated h
ucgcccgucacuggauguaag

SEQ ID NO: 355615 - RNA, 14 nt, Human herpesvirus 8 (Kaposi`s sarcoma-associated h
ucgcucuuuacuua

SEQ ID NO: 355616 - RNA, 17 nt, Human herpesvirus 8 (Kaposi`s sarcoma-associated h
ucgcugccccaaaaggc

SEQ ID NO: 355617 - RNA, 16 nt, Human herpesvirus 8 (Kaposi`s sarcoma-associated h
ucggcggugcauguga

SEQ ID NO: 355618 - RNA, 15 nt, Human herpesvirus 8 (Kaposi`s sarcoma-associated h
ucgggggaucuugua

SEQ ID NO: 355619 - RNA, 13 nt, Human herpesvirus 8 (Kaposi`s sarcoma-associated h
ucgggugggacgu

SEQ ID NO: 355620 - RNA, 15 nt, Human herpesvirus 8 (Kaposi`s sarcoma-associated h
ucgguucaaccugga

SEQ ID NO: 355621 - RNA, 14 nt, Human herpesvirus 8 (Kaposi`s sarcoma-associated h
ucguaagaggaccc

SEQ ID NO: 355622 - RNA, 14 nt, Human herpesvirus 8 (Kaposi`s sarcoma-associated h
ucguccgacaugug

SEQ ID NO: 355623 - RNA, 17 nt, Human herpesvirus 8 (Kaposi`s sarcoma-associated h
ucgugcgccuaggccau

SEQ ID NO: 355624 - RNA, 13 nt, Human herpesvirus 8 (Kaposi`s sarcoma-associated h
ucguguaugccaa

SEQ ID NO: 355625 - RNA, 23 nt, Human herpesvirus 8 (Kaposi`s sarcoma-associated h
ucuaaaaagagguuggucugcac

SEQ ID NO: 355626 - RNA, 13 nt, Human herpesvirus 8 (Kaposi`s sarcoma-associated h
ucuaauaaacaag

SEQ ID NO: 355627 - RNA, 22 nt, Human herpesvirus 8 (Kaposi`s sarcoma-associated h
ucuaaucuuagucuuacuguca

SEQ ID NO: 355628 - RNA, 24 nt, Human herpesvirus 8 (Kaposi`s sarcoma-associated h
ucuacagguaggccacauacgcuc

SEQ ID NO: 355629 - RNA, 20 nt, Human herpesvirus 8 (Kaposi`s sarcoma-associated h
ucuacccugauuagcacugu

SEQ ID NO: 355630 - RNA, 21 nt, Human herpesvirus 8 (Kaposi`s sarcoma-associated h
ucuacccugauuagcacugua

SEQ ID NO: 355631 - RNA, 14 nt, Human herpesvirus 8 (Kaposi`s sarcoma-associated h
ucuacgaggcaauu

SEQ ID NO: 355632 - RNA, 14 nt, Human herpesvirus 8 (Kaposi`s sarcoma-associated h
ucuacgugccagug

SEQ ID NO: 355633 - RNA, 15 nt, Human herpesvirus 8 (Kaposi`s sarcoma-associated h
ucuagacacgcaaag

SEQ ID NO: 355634 - RNA, 20 nt, Human herpesvirus 8 (Kaposi`s sarcoma-associated h
ucuagcagagcgccgaagaa

SEQ ID NO: 355635 - RNA, 18 nt, Human herpesvirus 8 (Kaposi`s sarcoma-associated h
ucuagcauaugcugccaa

SEQ ID NO: 355636 - RNA, 19 nt, Human herpesvirus 8 (Kaposi`s sarcoma-associated h
ucuauaacauaauuguaau

SEQ ID NO: 355637 - RNA, 13 nt, Human herpesvirus 8 (Kaposi`s sarcoma-associated h
ucuauacaugccc

SEQ ID NO: 355638 - RNA, 16 nt, Human herpesvirus 8 (Kaposi`s sarcoma-associated h
ucuauauccaccacuu

SEQ ID NO: 355639 - RNA, 18 nt, Human herpesvirus 8 (Kaposi`s sarcoma-associated h
ucuauauggcaacugcca

SEQ ID NO: 355640 - RNA, 19 nt, Human herpesvirus 8 (Kaposi`s sarcoma-associated h
ucuaucaucgguagccaua

SEQ ID NO: 355641 - RNA, 11 nt, Human herpesvirus 8 (Kaposi`s sarcoma-associated h
ucuaucuggaa

SEQ ID NO: 355642 - RNA, 19 nt, Human herpesvirus 8 (Kaposi`s sarcoma-associated h
ucuaugccgaugugucagc

SEQ ID NO: 355643 - RNA, 20 nt, Human herpesvirus 8 (Kaposi`s sarcoma-associated h
ucucaagcaguaucuuggga

SEQ ID NO: 355644 - RNA, 17 nt, Human herpesvirus 8 (Kaposi`s sarcoma-associated h
ucucacccaauacuuaa

SEQ ID NO: 355645 - RNA, 20 nt, Human herpesvirus 8 (Kaposi`s sarcoma-associated h
ucucacgacccaucuaccuc

SEQ ID NO: 355646 - RNA, 22 nt, Human herpesvirus 8 (Kaposi`s sarcoma-associated h
ucucauagacuuucuaaagguu

SEQ ID NO: 355647 - RNA, 19 nt, Human herpesvirus 8 (Kaposi`s sarcoma-associated h
ucucaugcuuuauucccaa

SEQ ID NO: 355648 - RNA, 17 nt, Human herpesvirus 8 (Kaposi`s sarcoma-associated h
ucuccagaagagcauuu

SEQ ID NO: 355649 - RNA, 18 nt, Human herpesvirus 8 (Kaposi`s sarcoma-associated h
ucuccauagaacuggaau

SEQ ID NO: 355650 - RNA, 19 nt, Human herpesvirus 8 (Kaposi`s sarcoma-associated h
ucucccguggccugcauug

SEQ ID NO: 355651 - RNA, 18 nt, Human herpesvirus 8 (Kaposi`s sarcoma-associated h
ucuccgcauuaaagcacu

SEQ ID NO: 355652 - RNA, 15 nt, Human herpesvirus 8 (Kaposi`s sarcoma-associated h
ucucgguacugcgca

SEQ ID NO: 355653 - RNA, 23 nt, Human herpesvirus 8 (Kaposi`s sarcoma-associated h
ucucgugacggugacauugcagu

SEQ ID NO: 355654 - RNA, 15 nt, Human herpesvirus 8 (Kaposi`s sarcoma-associated h
ucucuauaacauaau

SEQ ID NO: 355655 - RNA, 16 nt, Human herpesvirus 8 (Kaposi`s sarcoma-associated h
ugcaaaaugugcuuug

SEQ ID NO: 355656 - RNA, 15 nt, Human herpesvirus 8 (Kaposi`s sarcoma-associated h
ugcaaacuauacaca

SEQ ID NO: 355657 - RNA, 18 nt, Human herpesvirus 8 (Kaposi`s sarcoma-associated h
ugcaaagcuuaaccacau

SEQ ID NO: 355658 - RNA, 19 nt, Human herpesvirus 8 (Kaposi`s sarcoma-associated h
ugcacaaaauugucuugua

SEQ ID NO: 355659 - RNA, 20 nt, Human herpesvirus 8 (Kaposi`s sarcoma-associated h
ugcacaguauagggauacag

SEQ ID NO: 355660 - RNA, 13 nt, Human herpesvirus 8 (Kaposi`s sarcoma-associated h
ugcaccaagcaca

SEQ ID NO: 355661 - RNA, 17 nt, Human herpesvirus 8 (Kaposi`s sarcoma-associated h
ugcaccaagcacaacau

SEQ ID NO: 355662 - RNA, 17 nt, Human herpesvirus 8 (Kaposi`s sarcoma-associated h
ugcacucagaacauaaa

SEQ ID NO: 355663 - RNA, 20 nt, Human herpesvirus 8 (Kaposi`s sarcoma-associated h
ugcacuccaagccagucgua

SEQ ID NO: 355664 - RNA, 15 nt, Human herpesvirus 8 (Kaposi`s sarcoma-associated h
ugcagacagaggcaa

SEQ ID NO: 355665 - RNA, 22 nt, Human herpesvirus 8 (Kaposi`s sarcoma-associated h
ugcagacauggccggacaccac

SEQ ID NO: 355666 - RNA, 16 nt, Human herpesvirus 8 (Kaposi`s sarcoma-associated h
ugcagcacuagguuag

SEQ ID NO: 355667 - RNA, 17 nt, Human herpesvirus 8 (Kaposi`s sarcoma-associated h
ugcagcagcgugacacu

SEQ ID NO: 355668 - RNA, 13 nt, Human herpesvirus 8 (Kaposi`s sarcoma-associated h
ugcagccaggaag

SEQ ID NO: 355669 - RNA, 23 nt, Human herpesvirus 8 (Kaposi`s sarcoma-associated h
ugcaggcaguccaaggucgacag

SEQ ID NO: 355670 - RNA, 13 nt, Human herpesvirus 8 (Kaposi`s sarcoma-associated h
ugcagugugcagu

SEQ ID NO: 355671 - RNA, 15 nt, Human herpesvirus 8 (Kaposi`s sarcoma-associated h
ugcaguuggagaaac

SEQ ID NO: 355672 - RNA, 20 nt, Human herpesvirus 8 (Kaposi`s sarcoma-associated h
ugcaugcucggcaacauuca

SEQ ID NO: 355673 - RNA, 16 nt, Human herpesvirus 8 (Kaposi`s sarcoma-associated h
ugcaugcuggcgaugc

SEQ ID NO: 355674 - RNA, 20 nt, Human herpesvirus 8 (Kaposi`s sarcoma-associated h
ugcauucugguggaucuaga

SEQ ID NO: 355675 - RNA, 17 nt, Human herpesvirus 8 (Kaposi`s sarcoma-associated h
ugcauuggcuauuuuag

SEQ ID NO: 355676 - RNA, 20 nt, Human herpesvirus 8 (Kaposi`s sarcoma-associated h
ugccaaggagugggaucucc

SEQ ID NO: 355677 - RNA, 22 nt, Human herpesvirus 8 (Kaposi`s sarcoma-associated h
ugccaugguaccauucgugugg

SEQ ID NO: 355678 - RNA, 19 nt, Human herpesvirus 8 (Kaposi`s sarcoma-associated h
ugcccaaaucuguccucau

SEQ ID NO: 355679 - RNA, 16 nt, Human herpesvirus 8 (Kaposi`s sarcoma-associated h
ugcccaaguauggaau

SEQ ID NO: 355680 - RNA, 14 nt, Human herpesvirus 8 (Kaposi`s sarcoma-associated h
ugcccaaucucuca

SEQ ID NO: 355681 - RNA, 16 nt, Human herpesvirus 8 (Kaposi`s sarcoma-associated h
ugcccagacaccaaag

SEQ ID NO: 355682 - RNA, 20 nt, Human herpesvirus 8 (Kaposi`s sarcoma-associated h
ugcccagacaccaaagacaa

SEQ ID NO: 355683 - RNA, 16 nt, Human herpesvirus 8 (Kaposi`s sarcoma-associated h
ugcccagcgacucuca

SEQ ID NO: 355684 - RNA, 22 nt, Human herpesvirus 8 (Kaposi`s sarcoma-associated h
ugcccccuuaauccuuacuugg

SEQ ID NO: 355685 - RNA, 18 nt, Human herpesvirus 8 (Kaposi`s sarcoma-associated h
ugcccuaaaugugacaau

SEQ ID NO: 355686 - RNA, 19 nt, Human herpesvirus 8 (Kaposi`s sarcoma-associated h
ugcccugguugacacaaug

SEQ ID NO: 355687 - RNA, 17 nt, Human herpesvirus 8 (Kaposi`s sarcoma-associated h
ugccguggacaccacau

SEQ ID NO: 355688 - RNA, 18 nt, Human herpesvirus 8 (Kaposi`s sarcoma-associated h
ugccguggacaccacauu

SEQ ID NO: 355689 - RNA, 23 nt, Human herpesvirus 8 (Kaposi`s sarcoma-associated h
ugccugcgcugcgcauggcuuac

SEQ ID NO: 355690 - RNA, 18 nt, Human herpesvirus 8 (Kaposi`s sarcoma-associated h
ugccugcuuacaaugugu

SEQ ID NO: 355691 - RNA, 17 nt, Human herpesvirus 8 (Kaposi`s sarcoma-associated h
ugccuguaccagugucg

SEQ ID NO: 355692 - RNA, 14 nt, Human herpesvirus 8 (Kaposi`s sarcoma-associated h
ugccuuuugcuuaa

SEQ ID NO: 355693 - RNA, 21 nt, Human herpesvirus 8 (Kaposi`s sarcoma-associated h
ugcgauagggggaugagccag

SEQ ID NO: 355694 - RNA, 15 nt, Human herpesvirus 8 (Kaposi`s sarcoma-associated h
ugcgcgguguggcag

SEQ ID NO: 355695 - RNA, 20 nt, Human herpesvirus 8 (Kaposi`s sarcoma-associated h
ugcgcuaugugggacaacua

SEQ ID NO: 355696 - RNA, 23 nt, Human herpesvirus 8 (Kaposi`s sarcoma-associated h
ugcgggcgauuacaggaaacugg

SEQ ID NO: 355697 - RNA, 15 nt, Human herpesvirus 8 (Kaposi`s sarcoma-associated h
ugcgugcaaaaugug

SEQ ID NO: 355698 - RNA, 17 nt, Human herpesvirus 8 (Kaposi`s sarcoma-associated h
ugcgugcuucuguuuga

SEQ ID NO: 355699 - RNA, 16 nt, Human herpesvirus 8 (Kaposi`s sarcoma-associated h
ugcgugucuagacaau

SEQ ID NO: 355700 - RNA, 16 nt, Human herpesvirus 8 (Kaposi`s sarcoma-associated h
ugcucggcaacauuca

SEQ ID NO: 355701 - RNA, 14 nt, Human herpesvirus 8 (Kaposi`s sarcoma-associated h
ugcucugcgugcug

SEQ ID NO: 355702 - RNA, 14 nt, Human herpesvirus 8 (Kaposi`s sarcoma-associated h
ugcucuggacaaug

SEQ ID NO: 355703 - RNA, 21 nt, Human herpesvirus 8 (Kaposi`s sarcoma-associated h
ugcugauauaugaguguaaaa

SEQ ID NO: 355704 - RNA, 17 nt, Human herpesvirus 8 (Kaposi`s sarcoma-associated h
ugcugccacugccacgg

SEQ ID NO: 355705 - RNA, 19 nt, Human herpesvirus 8 (Kaposi`s sarcoma-associated h
ugcugguucaggauuucga

SEQ ID NO: 355706 - RNA, 12 nt, Human herpesvirus 8 (Kaposi`s sarcoma-associated h
ugcuguggguug

SEQ ID NO: 355707 - RNA, 19 nt, Human herpesvirus 8 (Kaposi`s sarcoma-associated h
ugcuuuugggaucagaccc

SEQ ID NO: 355708 - RNA, 15 nt, Human herpesvirus 8 (Kaposi`s sarcoma-associated h
uggaaagguguccuu

SEQ ID NO: 355709 - RNA, 20 nt, Human herpesvirus 8 (Kaposi`s sarcoma-associated h
uggaauauaaugugaaagga

SEQ ID NO: 355710 - RNA, 14 nt, Human herpesvirus 8 (Kaposi`s sarcoma-associated h
uggacacaacaugc

SEQ ID NO: 355711 - RNA, 19 nt, Human herpesvirus 8 (Kaposi`s sarcoma-associated h
uggacaccacauuuccacc

SEQ ID NO: 355712 - RNA, 12 nt, Human herpesvirus 8 (Kaposi`s sarcoma-associated h
uggaccgugugu

SEQ ID NO: 355713 - RNA, 13 nt, Human herpesvirus 8 (Kaposi`s sarcoma-associated h
uggaccuccgccg

SEQ ID NO: 355714 - RNA, 20 nt, Human herpesvirus 8 (Kaposi`s sarcoma-associated h
uggacgaccgggaucuguua

SEQ ID NO: 355715 - RNA, 16 nt, Human herpesvirus 8 (Kaposi`s sarcoma-associated h
uggacgucaggaguca

SEQ ID NO: 355716 - RNA, 16 nt, Human herpesvirus 8 (Kaposi`s sarcoma-associated h
uggacuggcagggugg

SEQ ID NO: 355717 - RNA, 16 nt, Human herpesvirus 8 (Kaposi`s sarcoma-associated h
uggacuuucuccguga

SEQ ID NO: 355718 - RNA, 13 nt, Human herpesvirus 8 (Kaposi`s sarcoma-associated h
uggagaaacagug

SEQ ID NO: 355719 - RNA, 17 nt, Human herpesvirus 8 (Kaposi`s sarcoma-associated h
uggagacguuagcuuca

SEQ ID NO: 355720 - RNA, 21 nt, Human herpesvirus 8 (Kaposi`s sarcoma-associated h
uggagcaagacgccagacagc

SEQ ID NO: 355721 - RNA, 12 nt, Human herpesvirus 8 (Kaposi`s sarcoma-associated h
uggagcacuuuu

SEQ ID NO: 355722 - RNA, 22 nt, Human herpesvirus 8 (Kaposi`s sarcoma-associated h
uggagccaacaaacaagacaca

SEQ ID NO: 355723 - RNA, 18 nt, Human herpesvirus 8 (Kaposi`s sarcoma-associated h
uggagcccgagaucaucu

SEQ ID NO: 355724 - RNA, 18 nt, Human herpesvirus 8 (Kaposi`s sarcoma-associated h
uggaggcuaggugcccag

SEQ ID NO: 355725 - RNA, 15 nt, Human herpesvirus 8 (Kaposi`s sarcoma-associated h
uggagggcacagauu

SEQ ID NO: 355726 - RNA, 16 nt, Human herpesvirus 8 (Kaposi`s sarcoma-associated h
uggaguggaguggugu

SEQ ID NO: 355727 - RNA, 17 nt, Human herpesvirus 8 (Kaposi`s sarcoma-associated h
uggagugguguguuuca

SEQ ID NO: 355728 - RNA, 17 nt, Human herpesvirus 8 (Kaposi`s sarcoma-associated h
uggaguuaaagcuguca

SEQ ID NO: 355729 - RNA, 12 nt, Human herpesvirus 8 (Kaposi`s sarcoma-associated h
uggaguugccug

SEQ ID NO: 355730 - RNA, 22 nt, Human herpesvirus 8 (Kaposi`s sarcoma-associated h
uggauaacuucugggccacaaa

SEQ ID NO: 355731 - RNA, 13 nt, Human herpesvirus 8 (Kaposi`s sarcoma-associated h
uggauauagacuu

SEQ ID NO: 355732 - RNA, 12 nt, Human herpesvirus 8 (Kaposi`s sarcoma-associated h
uggaucagggaa

SEQ ID NO: 355733 - RNA, 17 nt, Human herpesvirus 8 (Kaposi`s sarcoma-associated h
uggauccuacacuuuac

SEQ ID NO: 355734 - RNA, 17 nt, Human herpesvirus 8 (Kaposi`s sarcoma-associated h
uguccgagcacauaugg

SEQ ID NO: 355735 - RNA, 20 nt, Human herpesvirus 8 (Kaposi`s sarcoma-associated h
uguccucauuagucgggacu

SEQ ID NO: 355736 - RNA, 15 nt, Human herpesvirus 8 (Kaposi`s sarcoma-associated h
uguccugauuuucca

SEQ ID NO: 355737 - RNA, 23 nt, Human herpesvirus 8 (Kaposi`s sarcoma-associated h
uguccuucgcacuucuugaccaa

SEQ ID NO: 355738 - RNA, 16 nt, Human herpesvirus 8 (Kaposi`s sarcoma-associated h
ugucgacuauaaccug

SEQ ID NO: 355739 - RNA, 16 nt, Human herpesvirus 8 (Kaposi`s sarcoma-associated h
ugucgccccaggauca

SEQ ID NO: 355740 - RNA, 18 nt, Human herpesvirus 8 (Kaposi`s sarcoma-associated h
ugucgcccgucacuggau

SEQ ID NO: 355741 - RNA, 18 nt, Human herpesvirus 8 (Kaposi`s sarcoma-associated h
ugucgcgacagacugccu

SEQ ID NO: 355742 - RNA, 13 nt, Human herpesvirus 8 (Kaposi`s sarcoma-associated h
ugucguggcuuuu

SEQ ID NO: 355743 - RNA, 14 nt, Human herpesvirus 8 (Kaposi`s sarcoma-associated h
ugucuagacaauaa

SEQ ID NO: 355744 - RNA, 15 nt, Human herpesvirus 8 (Kaposi`s sarcoma-associated h
ugucuagacaauaaa

SEQ ID NO: 355745 - RNA, 17 nt, Human herpesvirus 8 (Kaposi`s sarcoma-associated h
ugucugaauguggaaua

SEQ ID NO: 355746 - RNA, 17 nt, Human herpesvirus 8 (Kaposi`s sarcoma-associated h
ugucuuaaguacauuaa

SEQ ID NO: 355747 - RNA, 14 nt, Human herpesvirus 8 (Kaposi`s sarcoma-associated h
ugucuucgugggua

SEQ ID NO: 355748 - RNA, 22 nt, Human herpesvirus 8 (Kaposi`s sarcoma-associated h
ugucuuguaaaaauaaauguga

SEQ ID NO: 355749 - RNA, 13 nt, Human herpesvirus 8 (Kaposi`s sarcoma-associated h
ugugaacaauaaa

SEQ ID NO: 355750 - RNA, 14 nt, Human herpesvirus 8 (Kaposi`s sarcoma-associated h
ugugaaguuuacau

SEQ ID NO: 355751 - RNA, 21 nt, Human herpesvirus 8 (Kaposi`s sarcoma-associated h
ugugaggaucggaucuuuuac

SEQ ID NO: 355752 - RNA, 23 nt, Human herpesvirus 8 (Kaposi`s sarcoma-associated h
ugugcacuagcagaaaacugucu

SEQ ID NO: 355753 - RNA, 20 nt, Human herpesvirus 8 (Kaposi`s sarcoma-associated h
ugugcauuuauuagacguug

SEQ ID NO: 355754 - RNA, 20 nt, Human herpesvirus 8 (Kaposi`s sarcoma-associated h
ugugccuaucaaucugagaa

SEQ ID NO: 355755 - RNA, 15 nt, Human herpesvirus 8 (Kaposi`s sarcoma-associated h
uguggcuaucuugcu

SEQ ID NO: 355756 - RNA, 13 nt, Human herpesvirus 8 (Kaposi`s sarcoma-associated h
uguggcugcaaaa

SEQ ID NO: 355757 - RNA, 19 nt, Human herpesvirus 8 (Kaposi`s sarcoma-associated h
ugugggauuccgucauuca

SEQ ID NO: 355758 - RNA, 13 nt, Human herpesvirus 8 (Kaposi`s sarcoma-associated h
uguguagguuguu

SEQ ID NO: 355759 - RNA, 21 nt, Human herpesvirus 8 (Kaposi`s sarcoma-associated h
uguguagguuguuauuaucaa

SEQ ID NO: 355760 - RNA, 15 nt, Human herpesvirus 8 (Kaposi`s sarcoma-associated h
ugugucugugcccug

SEQ ID NO: 355761 - RNA, 16 nt, Human herpesvirus 8 (Kaposi`s sarcoma-associated h
ugugucugugcccugc

SEQ ID NO: 355762 - RNA, 17 nt, Human herpesvirus 8 (Kaposi`s sarcoma-associated h
uguuaaacgcaccaagg

SEQ ID NO: 355763 - RNA, 13 nt, Human herpesvirus 8 (Kaposi`s sarcoma-associated h
uguuaaauuuggc

SEQ ID NO: 355764 - RNA, 14 nt, Human herpesvirus 8 (Kaposi`s sarcoma-associated h
uguuacaauaaagc

SEQ ID NO: 355765 - RNA, 16 nt, Human herpesvirus 8 (Kaposi`s sarcoma-associated h
uguuacuauaaacagc

SEQ ID NO: 355766 - RNA, 11 nt, Human herpesvirus 8 (Kaposi`s sarcoma-associated h
uguuacuggca

SEQ ID NO: 355767 - RNA, 23 nt, Human herpesvirus 8 (Kaposi`s sarcoma-associated h
uguucaggugguaauaaagucau

SEQ ID NO: 355768 - RNA, 18 nt, Human herpesvirus 8 (Kaposi`s sarcoma-associated h
uguucgauucauuacugg

SEQ ID NO: 355769 - RNA, 11 nt, Human herpesvirus 8 (Kaposi`s sarcoma-associated h
uguucuugcca

SEQ ID NO: 355770 - RNA, 18 nt, Human herpesvirus 8 (Kaposi`s sarcoma-associated h
uguuggcuccacguggcg

SEQ ID NO: 355771 - RNA, 15 nt, Human herpesvirus 8 (Kaposi`s sarcoma-associated h
uguugguuacacuaa

SEQ ID NO: 355772 - RNA, 13 nt, Human herpesvirus 8 (Kaposi`s sarcoma-associated h
uguuuacugcugu

SEQ ID NO: 355773 - RNA, 17 nt, Human herpesvirus 8 (Kaposi`s sarcoma-associated h
uguuuauuucaagagcc

SEQ ID NO: 355774 - RNA, 12 nt, Human herpesvirus 8 (Kaposi`s sarcoma-associated h
uguuugcugcug

SEQ ID NO: 355775 - RNA, 13 nt, Human herpesvirus 8 (Kaposi`s sarcoma-associated h
uguuugcugcugu

SEQ ID NO: 355776 - RNA, 14 nt, Human herpesvirus 8 (Kaposi`s sarcoma-associated h
uguuugugaggacc

SEQ ID NO: 355777 - RNA, 15 nt, Human herpesvirus 8 (Kaposi`s sarcoma-associated h
uguuuucggacgcua

SEQ ID NO: 355778 - RNA, 15 nt, Human herpesvirus 8 (Kaposi`s sarcoma-associated h
uguuuuuugccaugg

SEQ ID NO: 355779 - RNA, 18 nt, Human herpesvirus 8 (Kaposi`s sarcoma-associated h
uuaaaaacaaguagcugu

SEQ ID NO: 355780 - RNA, 20 nt, Human herpesvirus 8 (Kaposi`s sarcoma-associated h
uuaaaaacaaguagcuguug

SEQ ID NO: 355781 - RNA, 19 nt, Human herpesvirus 8 (Kaposi`s sarcoma-associated h
uuaaaaaccacucacugag

SEQ ID NO: 355782 - RNA, 16 nt, Human herpesvirus 8 (Kaposi`s sarcoma-associated h
uuaaaaggacauugua

SEQ ID NO: 355783 - RNA, 13 nt, Human herpesvirus 8 (Kaposi`s sarcoma-associated h
uuaaaagguuucc

SEQ ID NO: 355784 - RNA, 17 nt, Human herpesvirus 8 (Kaposi`s sarcoma-associated h
uuaaaaugcguuuuaga

SEQ ID NO: 355785 - RNA, 16 nt, Human herpesvirus 8 (Kaposi`s sarcoma-associated h
uuaaacgacaaaguga

SEQ ID NO: 355786 - RNA, 16 nt, Human herpesvirus 8 (Kaposi`s sarcoma-associated h
uuaacaaacaagguca

SEQ ID NO: 355787 - RNA, 19 nt, Human herpesvirus 8 (Kaposi`s sarcoma-associated h
uuaacccaaugucagggga

SEQ ID NO: 355788 - RNA, 15 nt, Human herpesvirus 8 (Kaposi`s sarcoma-associated h
uuaacgcagauaucg

SEQ ID NO: 355789 - RNA, 18 nt, Human herpesvirus 8 (Kaposi`s sarcoma-associated h
uuaacugucuacagucac

SEQ ID NO: 355790 - RNA, 20 nt, Human herpesvirus 8 (Kaposi`s sarcoma-associated h
uuaacuguuuacugcuguua

SEQ ID NO: 355791 - RNA, 15 nt, Human herpesvirus 8 (Kaposi`s sarcoma-associated h
uuaacuucaccucca

SEQ ID NO: 355792 - RNA, 16 nt, Human herpesvirus 8 (Kaposi`s sarcoma-associated h
uuaacuuucagaauuc

SEQ ID NO: 355793 - RNA, 13 nt, Human herpesvirus 8 (Kaposi`s sarcoma-associated h
uuaagaauaaaga

SEQ ID NO: 355794 - RNA, 22 nt, Human herpesvirus 8 (Kaposi`s sarcoma-associated h
uuaagauuauaaugggucuacu

SEQ ID NO: 355795 - RNA, 14 nt, Human herpesvirus 8 (Kaposi`s sarcoma-associated h
uuaaguacauuaaa

SEQ ID NO: 355796 - RNA, 12 nt, Human herpesvirus 8 (Kaposi`s sarcoma-associated h
uuaaucuuuauu

SEQ ID NO: 355797 - RNA, 21 nt, Human herpesvirus 8 (Kaposi`s sarcoma-associated h
uuaaucuuuauugucuagaca

SEQ ID NO: 355798 - RNA, 22 nt, Human herpesvirus 8 (Kaposi`s sarcoma-associated h
uuacaauaaagcugagccacaa

SEQ ID NO: 355799 - RNA, 12 nt, Human herpesvirus 8 (Kaposi`s sarcoma-associated h
uuacacuaacca

SEQ ID NO: 355800 - RNA, 12 nt, Human herpesvirus 8 (Kaposi`s sarcoma-associated h
uuacacuaugua

SEQ ID NO: 355801 - RNA, 22 nt, Human herpesvirus 8 (Kaposi`s sarcoma-associated h
uuacauggaauacgggagacac

SEQ ID NO: 355802 - RNA, 21 nt, Human herpesvirus 8 (Kaposi`s sarcoma-associated h
uuacauuaucuuaacuaaaca

SEQ ID NO: 355803 - RNA, 20 nt, Human herpesvirus 8 (Kaposi`s sarcoma-associated h
uuacauuugacaacacgcac

SEQ ID NO: 355804 - RNA, 17 nt, Human herpesvirus 8 (Kaposi`s sarcoma-associated h
uuacgguggugugccug

SEQ ID NO: 355805 - RNA, 22 nt, Human herpesvirus 8 (Kaposi`s sarcoma-associated h
uuacuagcaccacuauuucugc

SEQ ID NO: 355806 - RNA, 16 nt, Human herpesvirus 8 (Kaposi`s sarcoma-associated h
uuacuauaaacagccu

SEQ ID NO: 355807 - RNA, 14 nt, Human herpesvirus 8 (Kaposi`s sarcoma-associated h
uuacugguaccaga

SEQ ID NO: 355808 - RNA, 14 nt, Human herpesvirus 8 (Kaposi`s sarcoma-associated h
uuagaaacaaagca

SEQ ID NO: 355809 - RNA, 17 nt, Human herpesvirus 8 (Kaposi`s sarcoma-associated h
uuagaaugcgugcuucu

SEQ ID NO: 355810 - RNA, 19 nt, Human herpesvirus 8 (Kaposi`s sarcoma-associated h
uuagauaguguugagguaa

SEQ ID NO: 355811 - RNA, 18 nt, Human herpesvirus 8 (Kaposi`s sarcoma-associated h
uuagcaguccggggucca

SEQ ID NO: 355812 - RNA, 19 nt, Human herpesvirus 8 (Kaposi`s sarcoma-associated h
uuagcggaaugucuguuuc

SEQ ID NO: 355813 - RNA, 15 nt, Human herpesvirus 8 (Kaposi`s sarcoma-associated h
uuuaaggcagucuau

SEQ ID NO: 355814 - RNA, 14 nt, Human herpesvirus 8 (Kaposi`s sarcoma-associated h
uuuacugguguaca

SEQ ID NO: 355815 - RNA, 13 nt, Human herpesvirus 8 (Kaposi`s sarcoma-associated h
uuuacuugcagca

SEQ ID NO: 355816 - RNA, 17 nt, Human herpesvirus 8 (Kaposi`s sarcoma-associated h
uuuagcauccuaucgca

SEQ ID NO: 355817 - RNA, 22 nt, Human herpesvirus 8 (Kaposi`s sarcoma-associated h
uuuagugguggucguugaucuu

SEQ ID NO: 355818 - RNA, 20 nt, Human herpesvirus 8 (Kaposi`s sarcoma-associated h
uuuaugcaaaauacauuuua

SEQ ID NO: 355819 - RNA, 19 nt, Human herpesvirus 8 (Kaposi`s sarcoma-associated h
uuuaugguuuuguguuaca

SEQ ID NO: 355820 - RNA, 21 nt, Human herpesvirus 8 (Kaposi`s sarcoma-associated h
uuuauguuguuuguauaacau

SEQ ID NO: 355821 - RNA, 16 nt, Human herpesvirus 8 (Kaposi`s sarcoma-associated h
uuuauguuuauagcua

SEQ ID NO: 355822 - RNA, 20 nt, Human herpesvirus 8 (Kaposi`s sarcoma-associated h
uuuauguuuauagcuacaaa

SEQ ID NO: 355823 - RNA, 16 nt, Human herpesvirus 8 (Kaposi`s sarcoma-associated h
uuuauuacagguauga

SEQ ID NO: 355824 - RNA, 13 nt, Human herpesvirus 8 (Kaposi`s sarcoma-associated h
uuucagugggaca

SEQ ID NO: 355825 - RNA, 22 nt, Human herpesvirus 8 (Kaposi`s sarcoma-associated h
uuucccacgaugggaacuuuca

SEQ ID NO: 355826 - RNA, 22 nt, Human herpesvirus 8 (Kaposi`s sarcoma-associated h
uuuccgucguggaugagagggu

SEQ ID NO: 355827 - RNA, 20 nt, Human herpesvirus 8 (Kaposi`s sarcoma-associated h
uuuccguuagugaccugcug

SEQ ID NO: 355828 - RNA, 16 nt, Human herpesvirus 8 (Kaposi`s sarcoma-associated h
uuuccuaaacaaggaa

SEQ ID NO: 355829 - RNA, 12 nt, Human herpesvirus 8 (Kaposi`s sarcoma-associated h
uuuccuagccag

SEQ ID NO: 355830 - RNA, 17 nt, Human herpesvirus 8 (Kaposi`s sarcoma-associated h
uuuccuauguguuuauu

SEQ ID NO: 355831 - RNA, 14 nt, Human herpesvirus 8 (Kaposi`s sarcoma-associated h
uuuccucuugcgcu

SEQ ID NO: 355832 - RNA, 17 nt, Human herpesvirus 8 (Kaposi`s sarcoma-associated h
uuuccugugauuucucu

SEQ ID NO: 355833 - RNA, 23 nt, Human herpesvirus 8 (Kaposi`s sarcoma-associated h
uuugaaagcaauaaagacaaaug

SEQ ID NO: 355834 - RNA, 16 nt, Human herpesvirus 8 (Kaposi`s sarcoma-associated h
uuugacaacacgcacc

SEQ ID NO: 355835 - RNA, 19 nt, Human herpesvirus 8 (Kaposi`s sarcoma-associated h
uuugacaagucuucuuguc

SEQ ID NO: 355836 - RNA, 18 nt, Human herpesvirus 8 (Kaposi`s sarcoma-associated h
uuugauauuacagacucu

SEQ ID NO: 355837 - RNA, 16 nt, Human herpesvirus 8 (Kaposi`s sarcoma-associated h
uuugcgcuauuugccg

SEQ ID NO: 355838 - RNA, 16 nt, Human herpesvirus 8 (Kaposi`s sarcoma-associated h
uuugcuuggcgcugua

SEQ ID NO: 355839 - RNA, 17 nt, Human herpesvirus 8 (Kaposi`s sarcoma-associated h
uuugcuuggcgcuguau

SEQ ID NO: 355840 - RNA, 18 nt, Human herpesvirus 8 (Kaposi`s sarcoma-associated h
uuuggcccacguggugcu

SEQ ID NO: 355841 - RNA, 21 nt, Human herpesvirus 8 (Kaposi`s sarcoma-associated h
uuugggaccuuucaacaaucu

SEQ ID NO: 355842 - RNA, 18 nt, Human herpesvirus 8 (Kaposi`s sarcoma-associated h
uuuggggcuacacaucau

SEQ ID NO: 355843 - RNA, 16 nt, Human herpesvirus 8 (Kaposi`s sarcoma-associated h
uuuguauaacaugcaa

SEQ ID NO: 355844 - RNA, 23 nt, Human herpesvirus 8 (Kaposi`s sarcoma-associated h
uuuguauuauuuauugcauggca

SEQ ID NO: 355845 - RNA, 18 nt, Human herpesvirus 8 (Kaposi`s sarcoma-associated h
uuugucuucgccuaugaa

SEQ ID NO: 355846 - RNA, 18 nt, Human herpesvirus 8 (Kaposi`s sarcoma-associated h
uuugugcucgacggagac

SEQ ID NO: 355847 - RNA, 13 nt, Human herpesvirus 8 (Kaposi`s sarcoma-associated h
uuuguuacuauaa

SEQ ID NO: 355848 - RNA, 22 nt, Human herpesvirus 8 (Kaposi`s sarcoma-associated h
uuuuaacaguuuggugcaaagu

SEQ ID NO: 355849 - RNA, 12 nt, Human herpesvirus 8 (Kaposi`s sarcoma-associated h
uuuuaagacaaa

SEQ ID NO: 355850 - RNA, 15 nt, Human herpesvirus 8 (Kaposi`s sarcoma-associated h
uuuuauggacauuua

SEQ ID NO: 355851 - RNA, 18 nt, Human herpesvirus 8 (Kaposi`s sarcoma-associated h
uuuuauuugaaagcaaua

SEQ ID NO: 355852 - RNA, 19 nt, Human herpesvirus 8 (Kaposi`s sarcoma-associated h
uuuuauuugggggaugcug

SEQ ID NO: 355853 - RNA, 20 nt, Human herpesvirus 8 (Kaposi`s sarcoma-associated h
uuuuauuugggggaugcugu

SEQ ID NO: 355854 - RNA, 21 nt, Human herpesvirus 8 (Kaposi`s sarcoma-associated h
uuuuccauaauggauguuggg

SEQ ID NO: 355855 - RNA, 18 nt, Human herpesvirus 8 (Kaposi`s sarcoma-associated h
uuuucucgugugcccuuc

SEQ ID NO: 355856 - RNA, 22 nt, Human herpesvirus 8 (Kaposi`s sarcoma-associated h
uuuucugaaacgcgaauggggu

SEQ ID NO: 355857 - RNA, 22 nt, Human herpesvirus 8 (Kaposi`s sarcoma-associated h
uuuugacaagucuucuugucac

SEQ ID NO: 355858 - RNA, 16 nt, Human herpesvirus 8 (Kaposi`s sarcoma-associated h
uuuugauaugugugcc

SEQ ID NO: 355859 - RNA, 15 nt, Human herpesvirus 8 (Kaposi`s sarcoma-associated h
uuuugcauugcucug

SEQ ID NO: 355860 - RNA, 13 nt, Human herpesvirus 8 (Kaposi`s sarcoma-associated h
uuuuuccagugua

SEQ ID NO: 355861 - RNA, 18 nt, Human herpesvirus 8 (Kaposi`s sarcoma-associated h
uuuuucuggucgcugcca

SEQ ID NO: 355862 - RNA, 23 nt, Human herpesvirus 8 (Kaposi`s sarcoma-associated h
uuuuucuggucgcugccagucac

SEQ ID NO: 355863 - RNA, 12 nt, Human herpesvirus 8 (Kaposi`s sarcoma-associated h
uuuuuguggcug

SEQ ID NO: 355864 - RNA, 11 nt, Human herpesvirus 8 (Kaposi`s sarcoma-associated h
uuuuuuacuac

SEQ ID NO: 355865 - RNA, 22 nt, Human immunodeficiency virus 1 (HIV-1)
aaaaauugugggucacagucua

SEQ ID NO: 355866 - RNA, 14 nt, Human immunodeficiency virus 1 (HIV-1)
aaagagcagaagac

SEQ ID NO: 355867 - RNA, 17 nt, Human immunodeficiency virus 1 (HIV-1)
aaagccauguguaaaau

SEQ ID NO: 355868 - RNA, 15 nt, Human immunodeficiency virus 1 (HIV-1)
aaagccuaaagccau

SEQ ID NO: 355869 - RNA, 16 nt, Human immunodeficiency virus 1 (HIV-1)
aaaggauuuugcuaua

SEQ ID NO: 355870 - RNA, 13 nt, Human immunodeficiency virus 1 (HIV-1)
aaaguaagacagu

SEQ ID NO: 355871 - RNA, 22 nt, Human immunodeficiency virus 1 (HIV-1)
aaagugcacugauuugaagaau

SEQ ID NO: 355872 - RNA, 14 nt, Human immunodeficiency virus 1 (HIV-1)
aaauuaaagccagg

SEQ ID NO: 355873 - RNA, 18 nt, Human immunodeficiency virus 1 (HIV-1)
aacaaaagccuuaggcau

SEQ ID NO: 355874 - RNA, 17 nt, Human immunodeficiency virus 1 (HIV-1)
aacaccagcuuguuaca

SEQ ID NO: 355875 - RNA, 19 nt, Human immunodeficiency virus 1 (HIV-1)
aacauauuggggucugcau

SEQ ID NO: 355876 - RNA, 18 nt, Human immunodeficiency virus 1 (HIV-1)
aacauggagcaaucacaa

SEQ ID NO: 355877 - RNA, 19 nt, Human immunodeficiency virus 1 (HIV-1)
aacauguggaaaaaugaca

SEQ ID NO: 355878 - RNA, 13 nt, Human immunodeficiency virus 1 (HIV-1)
aaccccacucugu

SEQ ID NO: 355879 - RNA, 17 nt, Human immunodeficiency virus 1 (HIV-1)
aacuaauucaucuguau

SEQ ID NO: 355880 - RNA, 13 nt, Human immunodeficiency virus 1 (HIV-1)
aagaaugauacua

SEQ ID NO: 355881 - RNA, 21 nt, Human immunodeficiency virus 1 (HIV-1)
aagaauucugcaacaacugcu

SEQ ID NO: 355882 - RNA, 18 nt, Human immunodeficiency virus 1 (HIV-1)
aagacaguaugaucagau

SEQ ID NO: 355883 - RNA, 21 nt, Human immunodeficiency virus 1 (HIV-1)
aagauauccuugaucugugga

SEQ ID NO: 355884 - RNA, 23 nt, Human immunodeficiency virus 1 (HIV-1)
aagauggaaaccaaaaaugauag

SEQ ID NO: 355885 - RNA, 22 nt, Human immunodeficiency virus 1 (HIV-1)
aagauggguggcaaguggucaa

SEQ ID NO: 355886 - RNA, 20 nt, Human immunodeficiency virus 1 (HIV-1)
aagcagcugcuuuuugccug

SEQ ID NO: 355887 - RNA, 13 nt, Human immunodeficiency virus 1 (HIV-1)
aagcauaugauac

SEQ ID NO: 355888 - RNA, 16 nt, Human immunodeficiency virus 1 (HIV-1)
aagcuaguaccaguug

SEQ ID NO: 355889 - RNA, 17 nt, Human immunodeficiency virus 1 (HIV-1)
aagcuauagguacagua

SEQ ID NO: 355890 - RNA, 18 nt, Human immunodeficiency virus 1 (HIV-1)
aagcuauagguacaguau

SEQ ID NO: 355891 - RNA, 16 nt, Human immunodeficiency virus 1 (HIV-1)
aaggaagggaaaauuu

SEQ ID NO: 355892 - RNA, 19 nt, Human immunodeficiency virus 1 (HIV-1)
aaggagagaacaccagcuu

SEQ ID NO: 355893 - RNA, 20 nt, Human immunodeficiency virus 1 (HIV-1)
aagggacuuuccgcugggga

SEQ ID NO: 355894 - RNA, 16 nt, Human immunodeficiency virus 1 (HIV-1)
aagggcuaauucacuc

SEQ ID NO: 355895 - RNA, 17 nt, Human immunodeficiency virus 1 (HIV-1)
auacuuggcacuagcag

SEQ ID NO: 355896 - RNA, 17 nt, Human immunodeficiency virus 1 (HIV-1)
auagaaguaguacaagg

SEQ ID NO: 355897 - RNA, 20 nt, Human immunodeficiency virus 1 (HIV-1)
auaggguuauagaaguagua

SEQ ID NO: 355898 - RNA, 19 nt, Human immunodeficiency virus 1 (HIV-1)
auaguugugugguccauag

SEQ ID NO: 355899 - RNA, 16 nt, Human immunodeficiency virus 1 (HIV-1)
auaucuaugaaacuua

SEQ ID NO: 355900 - RNA, 18 nt, Human immunodeficiency virus 1 (HIV-1)
aucaagcaggacauaaca

SEQ ID NO: 355901 - RNA, 23 nt, Human immunodeficiency virus 1 (HIV-1)
aucaguuuaugggaucaaagccu

SEQ ID NO: 355902 - RNA, 21 nt, Human immunodeficiency virus 1 (HIV-1)
aucccacuaggggaugcuaga

SEQ ID NO: 355903 - RNA, 20 nt, Human immunodeficiency virus 1 (HIV-1)
auccggaguacuucaagaac

SEQ ID NO: 355904 - RNA, 23 nt, Human immunodeficiency virus 1 (HIV-1)
auccuugaucuguggaucuacca

SEQ ID NO: 355905 - RNA, 21 nt, Human immunodeficiency virus 1 (HIV-1)
aucgagcuugcuacaagggac

SEQ ID NO: 355906 - RNA, 11 nt, Human immunodeficiency virus 1 (HIV-1)
aucuaccacac

SEQ ID NO: 355907 - RNA, 14 nt, Human immunodeficiency virus 1 (HIV-1)
aucuccuacaguau

SEQ ID NO: 355908 - RNA, 14 nt, Human immunodeficiency virus 1 (HIV-1)
augauacaguauua

SEQ ID NO: 355909 - RNA, 16 nt, Human immunodeficiency virus 1 (HIV-1)
auggugcuacaagcua

SEQ ID NO: 355910 - RNA, 17 nt, Human immunodeficiency virus 1 (HIV-1)
auguauguuucagggaa

SEQ ID NO: 355911 - RNA, 22 nt, Human immunodeficiency virus 1 (HIV-1)
auguuugggccacacaugccug

SEQ ID NO: 355912 - RNA, 17 nt, Human immunodeficiency virus 1 (HIV-1)
auucgccacauaccuag

SEQ ID NO: 355913 - RNA, 19 nt, Human immunodeficiency virus 1 (HIV-1)
auugggugucgacauagca

SEQ ID NO: 355914 - RNA, 22 nt, Human immunodeficiency virus 1 (HIV-1)
auuguaacgaggauuguggaac

SEQ ID NO: 355915 - RNA, 17 nt, Human immunodeficiency virus 1 (HIV-1)
auuuuaacauguggaaa

SEQ ID NO: 355916 - RNA, 14 nt, Human immunodeficiency virus 1 (HIV-1)
caacauaauuggaa

SEQ ID NO: 355917 - RNA, 21 nt, Human immunodeficiency virus 1 (HIV-1)
caacauauuggggucugcaua

SEQ ID NO: 355918 - RNA, 18 nt, Human immunodeficiency virus 1 (HIV-1)
caagaaauggagccagua

SEQ ID NO: 355919 - RNA, 13 nt, Human immunodeficiency virus 1 (HIV-1)
caagaaguaguau

SEQ ID NO: 355920 - RNA, 18 nt, Human immunodeficiency virus 1 (HIV-1)
caagaaguaguauuggua

SEQ ID NO: 355921 - RNA, 18 nt, Human immunodeficiency virus 1 (HIV-1)
caagauauccuugaucug

SEQ ID NO: 355922 - RNA, 20 nt, Human immunodeficiency virus 1 (HIV-1)
caaggagcuuguagagcuau

SEQ ID NO: 355923 - RNA, 17 nt, Human immunodeficiency virus 1 (HIV-1)
caagguaggaucucuac

SEQ ID NO: 355924 - RNA, 18 nt, Human immunodeficiency virus 1 (HIV-1)
caauaguagcaauaguag

SEQ ID NO: 355925 - RNA, 18 nt, Human immunodeficiency virus 1 (HIV-1)
cacuaggggaugcuagau

SEQ ID NO: 355926 - RNA, 22 nt, Human immunodeficiency virus 1 (HIV-1)
cacuaugaaagcccucauccaa

SEQ ID NO: 355927 - RNA, 21 nt, Human immunodeficiency virus 1 (HIV-1)
cagaaaauuuuaacaugugga

SEQ ID NO: 355928 - RNA, 17 nt, Human immunodeficiency virus 1 (HIV-1)
cagaacuacacaccagg

SEQ ID NO: 355929 - RNA, 21 nt, Human immunodeficiency virus 1 (HIV-1)
cagaagaaaaaauaaaagcau

SEQ ID NO: 355930 - RNA, 23 nt, Human immunodeficiency virus 1 (HIV-1)
cagauaggguuauagaaguagua

SEQ ID NO: 355931 - RNA, 16 nt, Human immunodeficiency virus 1 (HIV-1)
cagauccugcauauaa

SEQ ID NO: 355932 - RNA, 15 nt, Human immunodeficiency virus 1 (HIV-1)
cagaugauacaguau

SEQ ID NO: 355933 - RNA, 16 nt, Human immunodeficiency virus 1 (HIV-1)
cagcagcagauagggu

SEQ ID NO: 355934 - RNA, 19 nt, Human immunodeficiency virus 1 (HIV-1)
cagcaucucgagaccugga

SEQ ID NO: 355935 - RNA, 17 nt, Human immunodeficiency virus 1 (HIV-1)
cagcugcuuuuugccug

SEQ ID NO: 355936 - RNA, 22 nt, Human immunodeficiency virus 1 (HIV-1)
cagcuuguuacacccugugagc

SEQ ID NO: 355937 - RNA, 20 nt, Human immunodeficiency virus 1 (HIV-1)
caggaauggauggcccaaaa

SEQ ID NO: 355938 - RNA, 17 nt, Human immunodeficiency virus 1 (HIV-1)
caggaguggaagccaua

SEQ ID NO: 355939 - RNA, 18 nt, Human immunodeficiency virus 1 (HIV-1)
caguaaguaguacaugua

SEQ ID NO: 355940 - RNA, 21 nt, Human immunodeficiency virus 1 (HIV-1)
cauaacaagguaggaucucua

SEQ ID NO: 355941 - RNA, 19 nt, Human immunodeficiency virus 1 (HIV-1)
cauaguaaucauagaauau

SEQ ID NO: 355942 - RNA, 20 nt, Human immunodeficiency virus 1 (HIV-1)
cauauguauguuucagggaa

SEQ ID NO: 355943 - RNA, 17 nt, Human immunodeficiency virus 1 (HIV-1)
cauuagcccuauugaga

SEQ ID NO: 355944 - RNA, 18 nt, Human immunodeficiency virus 1 (HIV-1)
cauuaguaguagcaauaa

SEQ ID NO: 355945 - RNA, 16 nt, Human immunodeficiency virus 1 (HIV-1)
cauuugggucagggag

SEQ ID NO: 355946 - RNA, 23 nt, Human immunodeficiency virus 1 (HIV-1)
ccaaaaguuaaacaauggccauu

SEQ ID NO: 355947 - RNA, 21 nt, Human immunodeficiency virus 1 (HIV-1)
ccaaagaagacaagauauccu

SEQ ID NO: 355948 - RNA, 23 nt, Human immunodeficiency virus 1 (HIV-1)
ccaauaaaggagagaacaccagc

SEQ ID NO: 355949 - RNA, 20 nt, Human immunodeficiency virus 1 (HIV-1)
ccacugcuuaagccucaaua

SEQ ID NO: 355950 - RNA, 18 nt, Human immunodeficiency virus 1 (HIV-1)
ccaguagauccuagacua

SEQ ID NO: 355951 - RNA, 17 nt, Human immunodeficiency virus 1 (HIV-1)
ccaguugagccagauaa

SEQ ID NO: 355952 - RNA, 14 nt, Human immunodeficiency virus 1 (HIV-1)
cccgagagcugcau

SEQ ID NO: 355953 - RNA, 13 nt, Human immunodeficiency virus 1 (HIV-1)
ccuacaccuguca

SEQ ID NO: 355954 - RNA, 21 nt, Human immunodeficiency virus 1 (HIV-1)
ccuagaagaauaagacagggc

SEQ ID NO: 355955 - RNA, 22 nt, Human immunodeficiency virus 1 (HIV-1)
ccuauugagacuguaccaguaa

SEQ ID NO: 355956 - RNA, 18 nt, Human immunodeficiency virus 1 (HIV-1)
ccuggcuagaagcacaag

SEQ ID NO: 355957 - RNA, 21 nt, Human immunodeficiency virus 1 (HIV-1)
ccuuauuaggacacauaguua

SEQ ID NO: 355958 - RNA, 14 nt, Human immunodeficiency virus 1 (HIV-1)
cgccacauaccuag

SEQ ID NO: 355959 - RNA, 22 nt, Human immunodeficiency virus 1 (HIV-1)
cuaaaggaagcucuauuagaua

SEQ ID NO: 355960 - RNA, 19 nt, Human immunodeficiency virus 1 (HIV-1)
cuaauaccaauaguaguag

SEQ ID NO: 355961 - RNA, 19 nt, Human immunodeficiency virus 1 (HIV-1)
cuaauucacucccaaagaa

SEQ ID NO: 355962 - RNA, 17 nt, Human immunodeficiency virus 1 (HIV-1)
cuacaauacuuggcacu

SEQ ID NO: 355963 - RNA, 12 nt, Human immunodeficiency virus 1 (HIV-1)
cuacacaccagg

SEQ ID NO: 355964 - RNA, 15 nt, Human immunodeficiency virus 1 (HIV-1)
cuaccacacacaagg

SEQ ID NO: 355965 - RNA, 12 nt, Human immunodeficiency virus 1 (HIV-1)
cuagaagcacaa

SEQ ID NO: 355966 - RNA, 23 nt, Human immunodeficiency virus 1 (HIV-1)
cuaguaccaguugagccagauaa

SEQ ID NO: 355967 - RNA, 21 nt, Human immunodeficiency virus 1 (HIV-1)
cuauaccaauaguagcaauag

SEQ ID NO: 355968 - RNA, 23 nt, Human immunodeficiency virus 1 (HIV-1)
cucaaugccacagccauagcagu

SEQ ID NO: 355969 - RNA, 15 nt, Human immunodeficiency virus 1 (HIV-1)
cucagguaccuuuaa

SEQ ID NO: 355970 - RNA, 20 nt, Human immunodeficiency virus 1 (HIV-1)
cugacaucgagcuugcuaca

SEQ ID NO: 355971 - RNA, 14 nt, Human immunodeficiency virus 1 (HIV-1)
cugagccagcagca

SEQ ID NO: 355972 - RNA, 19 nt, Human immunodeficiency virus 1 (HIV-1)
cugagccugggagcucucu

SEQ ID NO: 355973 - RNA, 21 nt, Human immunodeficiency virus 1 (HIV-1)
cugauuagcagaacuacacac

SEQ ID NO: 355974 - RNA, 20 nt, Human immunodeficiency virus 1 (HIV-1)
cugauuugaagaaugauacu

SEQ ID NO: 355975 - RNA, 19 nt, Human immunodeficiency virus 1 (HIV-1)
cugcaacaacugcuguuua

SEQ ID NO: 355976 - RNA, 16 nt, Human immunodeficiency virus 1 (HIV-1)
cugcauacaggagaaa

SEQ ID NO: 355977 - RNA, 16 nt, Human immunodeficiency virus 1 (HIV-1)
cugcuuuuugccugua

SEQ ID NO: 355978 - RNA, 19 nt, Human immunodeficiency virus 1 (HIV-1)
cuggaagggcuaauucacu

SEQ ID NO: 355979 - RNA, 17 nt, Human immunodeficiency virus 1 (HIV-1)
cuggcuagaagcacaag

SEQ ID NO: 355980 - RNA, 23 nt, Human immunodeficiency virus 1 (HIV-1)
cuggggaguggcgagcccucaga

SEQ ID NO: 355981 - RNA, 12 nt, Human immunodeficiency virus 1 (HIV-1)
cuguuagacauu

SEQ ID NO: 355982 - RNA, 19 nt, Human immunodeficiency virus 1 (HIV-1)
cuuaagaaugaagcuguua

SEQ ID NO: 355983 - RNA, 20 nt, Human immunodeficiency virus 1 (HIV-1)
cuugaucuguggaucuacca

SEQ ID NO: 355984 - RNA, 16 nt, Human immunodeficiency virus 1 (HIV-1)
uagcaauacagcagcu

SEQ ID NO: 355985 - RNA, 22 nt, Human immunodeficiency virus 1 (HIV-1)
uagcaauacagcagcuaccaau

SEQ ID NO: 355986 - RNA, 19 nt, Human immunodeficiency virus 1 (HIV-1)
uagcaauaguagcauuagu

SEQ ID NO: 355987 - RNA, 15 nt, Human immunodeficiency virus 1 (HIV-1)
uagcauuaguaguag

SEQ ID NO: 355988 - RNA, 18 nt, Human immunodeficiency virus 1 (HIV-1)
uagcauuaguaguagcaa

SEQ ID NO: 355989 - RNA, 13 nt, Human immunodeficiency virus 1 (HIV-1)
uagcuugcucaau

SEQ ID NO: 355990 - RNA, 15 nt, Human immunodeficiency virus 1 (HIV-1)
uagggcaacauaucu

SEQ ID NO: 355991 - RNA, 16 nt, Human immunodeficiency virus 1 (HIV-1)
uaggugugaauaucaa

SEQ ID NO: 355992 - RNA, 18 nt, Human immunodeficiency virus 1 (HIV-1)
uaguacaaggagcuugua

SEQ ID NO: 355993 - RNA, 11 nt, Human immunodeficiency virus 1 (HIV-1)
uaguagcaaua

SEQ ID NO: 355994 - RNA, 23 nt, Human immunodeficiency virus 1 (HIV-1)
uaguagcaauaauaauagcaaua

SEQ ID NO: 355995 - RNA, 12 nt, Human immunodeficiency virus 1 (HIV-1)
uaguagcaauag

SEQ ID NO: 355996 - RNA, 21 nt, Human immunodeficiency virus 1 (HIV-1)
uaguugugugguccauaguaa

SEQ ID NO: 355997 - RNA, 17 nt, Human immunodeficiency virus 1 (HIV-1)
uauaccaauaguagcaa

SEQ ID NO: 355998 - RNA, 15 nt, Human immunodeficiency virus 1 (HIV-1)
uauaggaaaauauua

SEQ ID NO: 355999 - RNA, 16 nt, Human immunodeficiency virus 1 (HIV-1)
uauagguacaguauua

SEQ ID NO: 356000 - RNA, 21 nt, Human immunodeficiency virus 1 (HIV-1)
uaucaaaguaagacaguauga

SEQ ID NO: 356001 - RNA, 16 nt, Human immunodeficiency virus 1 (HIV-1)
uauccacugaccuuug

SEQ ID NO: 356002 - RNA, 14 nt, Human immunodeficiency virus 1 (HIV-1)
uauguauguuucag

SEQ ID NO: 356003 - RNA, 13 nt, Human immunodeficiency virus 1 (HIV-1)
ucaaaaaguagug

SEQ ID NO: 356004 - RNA, 18 nt, Human immunodeficiency virus 1 (HIV-1)
ucaagaacugcugacauc

SEQ ID NO: 356005 - RNA, 18 nt, Human immunodeficiency virus 1 (HIV-1)
ucacaaguagcaauacag

SEQ ID NO: 356006 - RNA, 23 nt, Human immunodeficiency virus 1 (HIV-1)
ucacguggcccgagagcugcauc

SEQ ID NO: 356007 - RNA, 16 nt, Human immunodeficiency virus 1 (HIV-1)
ucagaugcuaaagcau

SEQ ID NO: 356008 - RNA, 23 nt, Human immunodeficiency virus 1 (HIV-1)
uccauggcuuagggcaacauauc

SEQ ID NO: 356009 - RNA, 17 nt, Human immunodeficiency virus 1 (HIV-1)
uccuacaguauuggagu

SEQ ID NO: 356010 - RNA, 15 nt, Human immunodeficiency virus 1 (HIV-1)
ucugcaacaacugcu

SEQ ID NO: 356011 - RNA, 20 nt, Human immunodeficiency virus 1 (HIV-1)
ugaaagcccucauccaagaa

SEQ ID NO: 356012 - RNA, 20 nt, Human immunodeficiency virus 1 (HIV-1)
ugacaucgagcuugcuacaa

SEQ ID NO: 356013 - RNA, 17 nt, Human immunodeficiency virus 1 (HIV-1)
ugagccagcagcagaua

SEQ ID NO: 356014 - RNA, 13 nt, Human immunodeficiency virus 1 (HIV-1)
ugauacaguauua

SEQ ID NO: 356015 - RNA, 14 nt, Human immunodeficiency virus 1 (HIV-1)
ugauacaguauuag

SEQ ID NO: 356016 - RNA, 18 nt, Human immunodeficiency virus 1 (HIV-1)
ugcaaccuauaccaauag

SEQ ID NO: 356017 - RNA, 18 nt, Human immunodeficiency virus 1 (HIV-1)
ugcauccggaguacuuca

SEQ ID NO: 356018 - RNA, 19 nt, Human immunodeficiency virus 1 (HIV-1)
ugcuuguaccaauugcuau

SEQ ID NO: 356019 - RNA, 16 nt, Human immunodeficiency virus 1 (HIV-1)
uggaacuucugggacg

SEQ ID NO: 356020 - RNA, 16 nt, Human immunodeficiency virus 1 (HIV-1)
uggaagcauccaggaa

SEQ ID NO: 356021 - RNA, 16 nt, Human immunodeficiency virus 1 (HIV-1)
uggacauaaagcuaua

SEQ ID NO: 356022 - RNA, 18 nt, Human immunodeficiency virus 1 (HIV-1)
uggagaaaggagagauaa

SEQ ID NO: 356023 - RNA, 16 nt, Human immunodeficiency virus 1 (HIV-1)
uggagcaaucacaagu

SEQ ID NO: 356024 - RNA, 15 nt, Human immunodeficiency virus 1 (HIV-1)
uggauggugcuacaa

SEQ ID NO: 356025 - RNA, 15 nt, Human immunodeficiency virus 1 (HIV-1)
uggcaaguggucaaa

SEQ ID NO: 356026 - RNA, 12 nt, Human immunodeficiency virus 1 (HIV-1)
ugggucagggag

SEQ ID NO: 356027 - RNA, 17 nt, Human immunodeficiency virus 1 (HIV-1)
ugggugucgacauagca

SEQ ID NO: 356028 - RNA, 15 nt, Human immunodeficiency virus 1 (HIV-1)
ugguagaacagaugc

SEQ ID NO: 356029 - RNA, 13 nt, Human immunodeficiency virus 1 (HIV-1)
ugguccauaguaa

SEQ ID NO: 356030 - RNA, 15 nt, Human immunodeficiency virus 1 (HIV-1)
uguagaucuuagcca

SEQ ID NO: 356031 - RNA, 16 nt, Human immunodeficiency virus 1 (HIV-1)
uguauguuucagggaa

SEQ ID NO: 356032 - RNA, 20 nt, Human immunodeficiency virus 1 (HIV-1)
uguggaaaaaugacauggua

SEQ ID NO: 356033 - RNA, 20 nt, Human immunodeficiency virus 1 (HIV-1)
uguggaucuaccacacacaa

SEQ ID NO: 356034 - RNA, 18 nt, Human immunodeficiency virus 1 (HIV-1)
uguuugggccacacaugc

SEQ ID NO: 356035 - RNA, 23 nt, Human immunodeficiency virus 1 (HIV-1)
uuaagaccaaugacuuacaaggc

SEQ ID NO: 356036 - RNA, 12 nt, Human immunodeficiency virus 1 (HIV-1)
uuauagacauca

SEQ ID NO: 356037 - RNA, 18 nt, Human immunodeficiency virus 1 (HIV-1)
uuauagacaucacuauga

SEQ ID NO: 356038 - RNA, 18 nt, Human immunodeficiency virus 1 (HIV-1)
uugauuguaacgaggauu

SEQ ID NO: 356039 - RNA, 17 nt, Human immunodeficiency virus 1 (HIV-1)
uugugcaucagaugcua

SEQ ID NO: 356040 - RNA, 17 nt, Human immunodeficiency virus 1 (HIV-1)
uuugaagaaugauacua

SEQ ID NO: 356041 - RNA, 20 nt, Human immunodeficiency virus 1 (HIV-1)
uuuggauggugcuacaagcu

SEQ ID NO: 356042 - RNA, 14 nt, Human immunodeficiency virus 1 (HIV-1)
aaguaagacaguau

SEQ ID NO: 356043 - RNA, 20 nt, Human immunodeficiency virus 1 (HIV-1)
aagucagccuaaaacugcuu

SEQ ID NO: 356044 - RNA, 19 nt, Human immunodeficiency virus 1 (HIV-1)
aaguggucaaaaaguagug

SEQ ID NO: 356045 - RNA, 21 nt, Human immunodeficiency virus 1 (HIV-1)
aauaaaggagagaacaccagc

SEQ ID NO: 356046 - RNA, 13 nt, Human immunodeficiency virus 1 (HIV-1)
aauaauagcaaua

SEQ ID NO: 356047 - RNA, 13 nt, Human immunodeficiency virus 1 (HIV-1)
aauacagcagcua

SEQ ID NO: 356048 - RNA, 16 nt, Human immunodeficiency virus 1 (HIV-1)
aauaguagcaauagua

SEQ ID NO: 356049 - RNA, 23 nt, Human immunodeficiency virus 1 (HIV-1)
aauaguugugugguccauaguaa

SEQ ID NO: 356050 - RNA, 15 nt, Human immunodeficiency virus 1 (HIV-1)
aauauugguggaauc

SEQ ID NO: 356051 - RNA, 15 nt, Human immunodeficiency virus 1 (HIV-1)
aaugacuuacaaggc

SEQ ID NO: 356052 - RNA, 22 nt, Human immunodeficiency virus 1 (HIV-1)
aaugauacuaauaccaauagua

SEQ ID NO: 356053 - RNA, 17 nt, Human immunodeficiency virus 1 (HIV-1)
aauucacucccaaagaa

SEQ ID NO: 356054 - RNA, 20 nt, Human immunodeficiency virus 1 (HIV-1)
aauuuucccauuagcccuau

SEQ ID NO: 356055 - RNA, 12 nt, Human immunodeficiency virus 1 (HIV-1)
acaaaagccuua

SEQ ID NO: 356056 - RNA, 16 nt, Human immunodeficiency virus 1 (HIV-1)
acaagauauccuugau

SEQ ID NO: 356057 - RNA, 16 nt, Human immunodeficiency virus 1 (HIV-1)
acacaaggcuacuucc

SEQ ID NO: 356058 - RNA, 17 nt, Human immunodeficiency virus 1 (HIV-1)
acacauaguuagcccua

SEQ ID NO: 356059 - RNA, 18 nt, Human immunodeficiency virus 1 (HIV-1)
acacaucccacuagggga

SEQ ID NO: 356060 - RNA, 17 nt, Human immunodeficiency virus 1 (HIV-1)
acagcagcuaccaaugc

SEQ ID NO: 356061 - RNA, 16 nt, Human immunodeficiency virus 1 (HIV-1)
acagccgccuagcauu

SEQ ID NO: 356062 - RNA, 23 nt, Human immunodeficiency virus 1 (HIV-1)
acagccgccuagcauuucaucac

SEQ ID NO: 356063 - RNA, 23 nt, Human immunodeficiency virus 1 (HIV-1)
acagcgacgaagagcucaucaga

SEQ ID NO: 356064 - RNA, 16 nt, Human immunodeficiency virus 1 (HIV-1)
acaguaugaucagaua

SEQ ID NO: 356065 - RNA, 14 nt, Human immunodeficiency virus 1 (HIV-1)
acagucagacucau

SEQ ID NO: 356066 - RNA, 23 nt, Human immunodeficiency virus 1 (HIV-1)
acagucagacucaucaagcuucu

SEQ ID NO: 356067 - RNA, 16 nt, Human immunodeficiency virus 1 (HIV-1)
acauaguuagcccuag

SEQ ID NO: 356068 - RNA, 20 nt, Human immunodeficiency virus 1 (HIV-1)
acauaguuagcccuaggugu

SEQ ID NO: 356069 - RNA, 14 nt, Human immunodeficiency virus 1 (HIV-1)
accacacacaaggc

SEQ ID NO: 356070 - RNA, 14 nt, Human immunodeficiency virus 1 (HIV-1)
acccugaacuagca

SEQ ID NO: 356071 - RNA, 20 nt, Human immunodeficiency virus 1 (HIV-1)
accuauaccaauaguagcaa

SEQ ID NO: 356072 - RNA, 23 nt, Human immunodeficiency virus 1 (HIV-1)
accuggaaaaacauggagcaauc

SEQ ID NO: 356073 - RNA, 20 nt, Human immunodeficiency virus 1 (HIV-1)
accuuuggauggugcuacaa

SEQ ID NO: 356074 - RNA, 16 nt, Human immunodeficiency virus 1 (HIV-1)
acuaaaggaagcucua

SEQ ID NO: 356075 - RNA, 13 nt, Human immunodeficiency virus 1 (HIV-1)
acuacacaccagg

SEQ ID NO: 356076 - RNA, 15 nt, Human immunodeficiency virus 1 (HIV-1)
acuacacaccagggc

SEQ ID NO: 356077 - RNA, 15 nt, Human immunodeficiency virus 1 (HIV-1)
acuaugaaagcccuc

SEQ ID NO: 356078 - RNA, 23 nt, Human immunodeficiency virus 1 (HIV-1)
acucauagaaaucuguggacaua

SEQ ID NO: 356079 - RNA, 12 nt, Human immunodeficiency virus 1 (HIV-1)
acucugcuauaa

SEQ ID NO: 356080 - RNA, 12 nt, Human immunodeficiency virus 1 (HIV-1)
acuguaccagua

SEQ ID NO: 356081 - RNA, 13 nt, Human immunodeficiency virus 1 (HIV-1)
acuguaccaguaa

SEQ ID NO: 356082 - RNA, 21 nt, Human immunodeficiency virus 1 (HIV-1)
agaaaauuuuaacauguggaa

SEQ ID NO: 356083 - RNA, 23 nt, Human immunodeficiency virus 1 (HIV-1)
agaaaggccuuauuaggacacau

SEQ ID NO: 356084 - RNA, 20 nt, Human immunodeficiency virus 1 (HIV-1)
agaaaugaguuugccaggaa

SEQ ID NO: 356085 - RNA, 18 nt, Human immunodeficiency virus 1 (HIV-1)
agaaauuuguacagagau

SEQ ID NO: 356086 - RNA, 21 nt, Human immunodeficiency virus 1 (HIV-1)
agaacuacacaccagggccag

SEQ ID NO: 356087 - RNA, 22 nt, Human immunodeficiency virus 1 (HIV-1)
agaauaaguucagaaguacaca

SEQ ID NO: 356088 - RNA, 22 nt, Human immunodeficiency virus 1 (HIV-1)
agaauagugcuguuagcuugcu

SEQ ID NO: 356089 - RNA, 21 nt, Human immunodeficiency virus 1 (HIV-1)
agaauucugcaacaacugcug

SEQ ID NO: 356090 - RNA, 21 nt, Human immunodeficiency virus 1 (HIV-1)
agacaagauauccuugaucug

SEQ ID NO: 356091 - RNA, 20 nt, Human immunodeficiency virus 1 (HIV-1)
agagcagaagacaguggcaa

SEQ ID NO: 356092 - RNA, 22 nt, Human immunodeficiency virus 1 (HIV-1)
agauacaggagcagaugauaca

SEQ ID NO: 356093 - RNA, 23 nt, Human immunodeficiency virus 1 (HIV-1)
agauaggguuauagaaguaguac

SEQ ID NO: 356094 - RNA, 14 nt, Human immunodeficiency virus 1 (HIV-1)
agauauagcacaca

SEQ ID NO: 356095 - RNA, 13 nt, Human immunodeficiency virus 1 (HIV-1)
agaugauacagua

SEQ ID NO: 356096 - RNA, 19 nt, Human immunodeficiency virus 1 (HIV-1)
agcaauaauaauagcaaua

SEQ ID NO: 356097 - RNA, 16 nt, Human immunodeficiency virus 1 (HIV-1)
agcaauaguagcauua

SEQ ID NO: 356098 - RNA, 14 nt, Human immunodeficiency virus 1 (HIV-1)
agcagaauaggcgu

SEQ ID NO: 356099 - RNA, 12 nt, Human immunodeficiency virus 1 (HIV-1)
agcagaugauac

SEQ ID NO: 356100 - RNA, 17 nt, Human immunodeficiency virus 1 (HIV-1)
agcagaugauacaguau

SEQ ID NO: 356101 - RNA, 12 nt, Human immunodeficiency virus 1 (HIV-1)
agcccucagauc

SEQ ID NO: 356102 - RNA, 20 nt, Human immunodeficiency virus 1 (HIV-1)
agcucuauuagauacaggag

SEQ ID NO: 356103 - RNA, 20 nt, Human immunodeficiency virus 1 (HIV-1)
agcugagccagcagcagaua

SEQ ID NO: 356104 - RNA, 17 nt, Human immunodeficiency virus 1 (HIV-1)
agcugaggggacagaua

SEQ ID NO: 356105 - RNA, 22 nt, Human immunodeficiency virus 1 (HIV-1)
aggaagucagccuaaaacugcu

SEQ ID NO: 356106 - RNA, 17 nt, Human immunodeficiency virus 1 (HIV-1)
aggagcuuguagagcua

SEQ ID NO: 356107 - RNA, 18 nt, Human immunodeficiency virus 1 (HIV-1)
aggagcuuguagagcuau

SEQ ID NO: 356108 - RNA, 12 nt, Human immunodeficiency virus 1 (HIV-1)
aggcagcuguag

SEQ ID NO: 356109 - RNA, 18 nt, Human immunodeficiency virus 1 (HIV-1)
agggacuuuccgcugggg

SEQ ID NO: 356110 - RNA, 21 nt, Human immunodeficiency virus 1 (HIV-1)
aguaaaauuaaagccaggaau

SEQ ID NO: 356111 - RNA, 14 nt, Human immunodeficiency virus 1 (HIV-1)
aguaagacaguaug

SEQ ID NO: 356112 - RNA, 20 nt, Human immunodeficiency virus 1 (HIV-1)
aguaagacaguaugaucaga

SEQ ID NO: 356113 - RNA, 21 nt, Human immunodeficiency virus 1 (HIV-1)
aguagaaauuuguacagagau

SEQ ID NO: 356114 - RNA, 19 nt, Human immunodeficiency virus 1 (HIV-1)
aguagcaauacagcagcua

SEQ ID NO: 356115 - RNA, 17 nt, Human immunodeficiency virus 1 (HIV-1)
aguagcaauaguagcau

SEQ ID NO: 356116 - RNA, 19 nt, Human immunodeficiency virus 1 (HIV-1)
aguagcgggagaaugauaa

SEQ ID NO: 356117 - RNA, 17 nt, Human immunodeficiency virus 1 (HIV-1)
aguauugguaaauguga

SEQ ID NO: 356118 - RNA, 13 nt, Human immunodeficiency virus 1 (HIV-1)
agucuccauagaa

SEQ ID NO: 356119 - RNA, 20 nt, Human immunodeficiency virus 1 (HIV-1)
agugcuguuagcuugcucaa

SEQ ID NO: 356120 - RNA, 13 nt, Human immunodeficiency virus 1 (HIV-1)
aguggaagccaua

SEQ ID NO: 356121 - RNA, 19 nt, Human immunodeficiency virus 1 (HIV-1)
aguggucaaaaaguagugu

SEQ ID NO: 356122 - RNA, 18 nt, Human immunodeficiency virus 1 (HIV-1)
aguuaaacaauggccauu

SEQ ID NO: 356123 - RNA, 22 nt, Human immunodeficiency virus 1 (HIV-1)
aguuaaacaauggccauugaca

SEQ ID NO: 356124 - RNA, 22 nt, Human immunodeficiency virus 1 (HIV-1)
auaaaagcauuaguagaaauuu

SEQ ID NO: 356125 - RNA, 23 nt, Human immunodeficiency virus 1 (HIV-1)
auaaagcuauagguacaguauua

SEQ ID NO: 356126 - RNA, 15 nt, Human immunodeficiency virus 1 (HIV-1)
auaacaaaagccuua

SEQ ID NO: 356127 - RNA, 23 nt, Human immunodeficiency virus 1 (HIV-1)
auaagaaaggccuuauuaggaca

SEQ ID NO: 356128 - RNA, 15 nt, Human immunodeficiency virus 1 (HIV-1)
auaauguuugggcca

SEQ ID NO: 356129 - RNA, 24 nt, Human immunodeficiency virus 1 (HIV-1)
auaauguuugggccacacaugccu

SEQ ID NO: 356130 - RNA, 17 nt, Human immunodeficiency virus 1 (HIV-1)
auaccaauaguagcaau

SEQ ID NO: 356131 - RNA, 13 nt, Human immunodeficiency virus 1 (HIV-1)
cuuggcacuagca

SEQ ID NO: 356132 - RNA, 21 nt, Human immunodeficiency virus 1 (HIV-1)
cuuguaccaauugcuauugua

SEQ ID NO: 356133 - RNA, 16 nt, Human immunodeficiency virus 1 (HIV-1)
cuuuaagaccaaugac

SEQ ID NO: 356134 - RNA, 19 nt, Human immunodeficiency virus 1 (HIV-1)
gaaaauauuaagacaaaga

SEQ ID NO: 356135 - RNA, 17 nt, Human immunodeficiency virus 1 (HIV-1)
gaaaggccuuauuagga

SEQ ID NO: 356136 - RNA, 15 nt, Human immunodeficiency virus 1 (HIV-1)
gaaaugaguuugcca

SEQ ID NO: 356137 - RNA, 13 nt, Human immunodeficiency virus 1 (HIV-1)
gaacuucugggac

SEQ ID NO: 356138 - RNA, 20 nt, Human immunodeficiency virus 1 (HIV-1)
gaagaaugauacuaauacca

SEQ ID NO: 356139 - RNA, 16 nt, Human immunodeficiency virus 1 (HIV-1)
gaagcccucaaauauu

SEQ ID NO: 356140 - RNA, 15 nt, Human immunodeficiency virus 1 (HIV-1)
gaaguacacauccca

SEQ ID NO: 356141 - RNA, 14 nt, Human immunodeficiency virus 1 (HIV-1)
gaauagugcuguua

SEQ ID NO: 356142 - RNA, 22 nt, Human immunodeficiency virus 1 (HIV-1)
gaauaucaagcaggacauaaca

SEQ ID NO: 356143 - RNA, 14 nt, Human immunodeficiency virus 1 (HIV-1)
gaaugaagcuguua

SEQ ID NO: 356144 - RNA, 14 nt, Human immunodeficiency virus 1 (HIV-1)
gacauaaagcuaua

SEQ ID NO: 356145 - RNA, 17 nt, Human immunodeficiency virus 1 (HIV-1)
gacaugguagaacagau

SEQ ID NO: 356146 - RNA, 15 nt, Human immunodeficiency virus 1 (HIV-1)
gaccuacaccuguca

SEQ ID NO: 356147 - RNA, 20 nt, Human immunodeficiency virus 1 (HIV-1)
gaccuuuggauggugcuaca

SEQ ID NO: 356148 - RNA, 17 nt, Human immunodeficiency virus 1 (HIV-1)
gacgagcugagccagca

SEQ ID NO: 356149 - RNA, 13 nt, Human immunodeficiency virus 1 (HIV-1)
gacuguaccagua

SEQ ID NO: 356150 - RNA, 13 nt, Human immunodeficiency virus 1 (HIV-1)
gacuuacaaggca

SEQ ID NO: 356151 - RNA, 13 nt, Human immunodeficiency virus 1 (HIV-1)
gagagaacaccag

SEQ ID NO: 356152 - RNA, 14 nt, Human immunodeficiency virus 1 (HIV-1)
gagagaacaccagc

SEQ ID NO: 356153 - RNA, 19 nt, Human immunodeficiency virus 1 (HIV-1)
gagagaacaccagcuuguu

SEQ ID NO: 356154 - RNA, 16 nt, Human immunodeficiency virus 1 (HIV-1)
gagauauagcacacaa

SEQ ID NO: 356155 - RNA, 15 nt, Human immunodeficiency virus 1 (HIV-1)
gagcaaucacaagua

SEQ ID NO: 356156 - RNA, 23 nt, Human immunodeficiency virus 1 (HIV-1)
gagcagaagacaguggcaaugag

SEQ ID NO: 356157 - RNA, 18 nt, Human immunodeficiency virus 1 (HIV-1)
gagcccuggaagcaucca

SEQ ID NO: 356158 - RNA, 16 nt, Human immunodeficiency virus 1 (HIV-1)
gagccugcaugggaug

SEQ ID NO: 356159 - RNA, 16 nt, Human immunodeficiency virus 1 (HIV-1)
gagcuugcuacaaggg

SEQ ID NO: 356160 - RNA, 17 nt, Human immunodeficiency virus 1 (HIV-1)
gagcuuguagagcuauu

SEQ ID NO: 356161 - RNA, 13 nt, Human immunodeficiency virus 1 (HIV-1)
gauacaguauuag

SEQ ID NO: 356162 - RNA, 12 nt, Human immunodeficiency virus 1 (HIV-1)
gauauagcacac

SEQ ID NO: 356163 - RNA, 23 nt, Human immunodeficiency virus 1 (HIV-1)
gauccuuggcacuuaucugggac

SEQ ID NO: 356164 - RNA, 20 nt, Human immunodeficiency virus 1 (HIV-1)
gauggugcuacaagcuagua

SEQ ID NO: 356165 - RNA, 22 nt, Human immunodeficiency virus 1 (HIV-1)
gauugguaauaacaacauauug

SEQ ID NO: 356166 - RNA, 17 nt, Human immunodeficiency virus 1 (HIV-1)
gcaggaguggaagccau

SEQ ID NO: 356167 - RNA, 20 nt, Human immunodeficiency virus 1 (HIV-1)
gcaguaaguaguacauguaa

SEQ ID NO: 356168 - RNA, 17 nt, Human immunodeficiency virus 1 (HIV-1)
gcauccggaguacuuca

SEQ ID NO: 356169 - RNA, 22 nt, Human immunodeficiency virus 1 (HIV-1)
gccaggaagauggaaaccaaaa

SEQ ID NO: 356170 - RNA, 18 nt, Human immunodeficiency virus 1 (HIV-1)
gccauagcaguagcugag

SEQ ID NO: 356171 - RNA, 18 nt, Human immunodeficiency virus 1 (HIV-1)
gccauugacagaagaaaa

SEQ ID NO: 356172 - RNA, 14 nt, Human immunodeficiency virus 1 (HIV-1)
gccuguacuggguc

SEQ ID NO: 356173 - RNA, 14 nt, Human immunodeficiency virus 1 (HIV-1)
gccuugagugcuuc

SEQ ID NO: 356174 - RNA, 22 nt, Human immunodeficiency virus 1 (HIV-1)
gcggagacagcgacgaagagcu

SEQ ID NO: 356175 - RNA, 13 nt, Human immunodeficiency virus 1 (HIV-1)
gcuagaagcacaa

SEQ ID NO: 356176 - RNA, 19 nt, Human immunodeficiency virus 1 (HIV-1)
gcuauagguacaguauuag

SEQ ID NO: 356177 - RNA, 14 nt, Human immunodeficiency virus 1 (HIV-1)
gcugagccagcagc

SEQ ID NO: 356178 - RNA, 18 nt, Human immunodeficiency virus 1 (HIV-1)
gcuuaagaaugaagcugu

SEQ ID NO: 356179 - RNA, 18 nt, Human immunodeficiency virus 1 (HIV-1)
ggaaucuccuacaguauu

SEQ ID NO: 356180 - RNA, 18 nt, Human immunodeficiency virus 1 (HIV-1)
ggagaaagagacuggcau

SEQ ID NO: 356181 - RNA, 14 nt, Human immunodeficiency virus 1 (HIV-1)
ggagucuccauaga

SEQ ID NO: 356182 - RNA, 16 nt, Human immunodeficiency virus 1 (HIV-1)
ggaguggaagccauaa

SEQ ID NO: 356183 - RNA, 22 nt, Human immunodeficiency virus 1 (HIV-1)
ggaugcuagauugguaauaaca

SEQ ID NO: 356184 - RNA, 16 nt, Human immunodeficiency virus 1 (HIV-1)
ggauggccuacuguaa

SEQ ID NO: 356185 - RNA, 15 nt, Human immunodeficiency virus 1 (HIV-1)
ggcccgagagcugca

SEQ ID NO: 356186 - RNA, 18 nt, Human immunodeficiency virus 1 (HIV-1)
ggccuuauuaggacacau

SEQ ID NO: 356187 - RNA, 21 nt, Human immunodeficiency virus 1 (HIV-1)
ggcgagcccucagauccugca

SEQ ID NO: 356188 - RNA, 20 nt, Human immunodeficiency virus 1 (HIV-1)
gggucugcauacaggagaaa

SEQ ID NO: 356189 - RNA, 20 nt, Human immunodeficiency virus 1 (HIV-1)
gguccauaguaaucauagaa

SEQ ID NO: 356190 - RNA, 15 nt, Human immunodeficiency virus 1 (HIV-1)
gguuaauugauagac

SEQ ID NO: 356191 - RNA, 22 nt, Human immunodeficiency virus 1 (HIV-1)
guaccaguaaaauuaaagccag

SEQ ID NO: 356192 - RNA, 18 nt, Human immunodeficiency virus 1 (HIV-1)
guagagcuauucgccaca

SEQ ID NO: 356193 - RNA, 12 nt, Human immunodeficiency virus 1 (HIV-1)
guaguacaagga

SEQ ID NO: 356194 - RNA, 13 nt, Human immunodeficiency virus 1 (HIV-1)
guaguagcaauaa

SEQ ID NO: 356195 - RNA, 15 nt, Human immunodeficiency virus 1 (HIV-1)
guauguuucagggaa

SEQ ID NO: 356196 - RNA, 14 nt, Human immunodeficiency virus 1 (HIV-1)
gucugcauacagga

SEQ ID NO: 356197 - RNA, 16 nt, Human immunodeficiency virus 1 (HIV-1)
guggacauaaagcuau

SEQ ID NO: 356198 - RNA, 14 nt, Human immunodeficiency virus 1 (HIV-1)
gugucgacauagca

SEQ ID NO: 356199 - RNA, 19 nt, Human immunodeficiency virus 1 (HIV-1)
guucagaaguacacauccc

SEQ ID NO: 356200 - RNA, 22 nt, Human immunodeficiency virus 1 (HIV-1)
guuuuauagacaucacuaugaa

SEQ ID NO: 356201 - RNA, 16 nt, Human immunodeficiency virus 1 (HIV-1)
uaaaaaguguugcuuu

SEQ ID NO: 356202 - RNA, 13 nt, Human immunodeficiency virus 1 (HIV-1)
uaaaacaccauau

SEQ ID NO: 356203 - RNA, 18 nt, Human immunodeficiency virus 1 (HIV-1)
uaaaagcauuaguagaaa

SEQ ID NO: 356204 - RNA, 23 nt, Human immunodeficiency virus 1 (HIV-1)
uaaagcuauagguacaguauuag

SEQ ID NO: 356205 - RNA, 14 nt, Human immunodeficiency virus 1 (HIV-1)
uaaaggaagcucua

SEQ ID NO: 356206 - RNA, 13 nt, Human immunodeficiency virus 1 (HIV-1)
uaaagugcacuga

SEQ ID NO: 356207 - RNA, 16 nt, Human immunodeficiency virus 1 (HIV-1)
uaacaaaagccuuagg

SEQ ID NO: 356208 - RNA, 19 nt, Human immunodeficiency virus 1 (HIV-1)
uaagggaaagaaugagacg

SEQ ID NO: 356209 - RNA, 13 nt, Human immunodeficiency virus 1 (HIV-1)
uaaguaguacaug

SEQ ID NO: 356210 - RNA, 15 nt, Human immunodeficiency virus 1 (HIV-1)
uaauaauagcaauag

SEQ ID NO: 356211 - RNA, 13 nt, Human immunodeficiency virus 1 (HIV-1)
uacacccugugag

SEQ ID NO: 356212 - RNA, 20 nt, Human immunodeficiency virus 1 (HIV-1)
uacacccugugagccugcau

SEQ ID NO: 356213 - RNA, 20 nt, Human immunodeficiency virus 1 (HIV-1)
uaccaauaguagcaauagua

SEQ ID NO: 356214 - RNA, 14 nt, Human immunodeficiency virus 1 (HIV-1)
uaccaauaguagua

SEQ ID NO: 356215 - RNA, 17 nt, Human immunodeficiency virus 1 (HIV-1)
uaccaaugcugcuugug

SEQ ID NO: 356216 - RNA, 16 nt, Human immunodeficiency virus 1 (HIV-1)
uacuucaagaacugcu

SEQ ID NO: 356217 - RNA, 17 nt, Human immunodeficiency virus 1 (HIV-1)
uagaagaauaagacagg

SEQ ID NO: 356218 - RNA, 18 nt, Human immunodeficiency virus 1 (HIV-1)
uagaaguaguacaaggag

SEQ ID NO: 356219 - RNA, 14 nt, Human immunodeficiency virus 1 (HIV-1)
uagacuaauagaaa

SEQ ID NO: 356220 - RNA, 17 nt, Human immunodeficiency virus 1 (HIV-1)
uagcaauaauaauagca

SEQ ID NO: 356221 - RNA, 12 nt, Human immunodeficiency virus 1 (HIV-1)
aaaaacauggag

SEQ ID NO: 356222 - RNA, 13 nt, Human immunodeficiency virus 1 (HIV-1)
aaaaacauggagc

SEQ ID NO: 356223 - RNA, 16 nt, Human immunodeficiency virus 1 (HIV-1)
aaaaacugcucuuuca

SEQ ID NO: 356224 - RNA, 15 nt, Human immunodeficiency virus 1 (HIV-1)
aaaaguagugugauu

SEQ ID NO: 356225 - RNA, 13 nt, Human immunodeficiency virus 1 (HIV-1)
aaacaauggccau

SEQ ID NO: 356226 - RNA, 22 nt, Human immunodeficiency virus 1 (HIV-1)
aaacaauggccauugacagaag

SEQ ID NO: 356227 - RNA, 22 nt, Human immunodeficiency virus 1 (HIV-1)
aaagccaggaauggauggccca

SEQ ID NO: 356228 - RNA, 14 nt, Human immunodeficiency virus 1 (HIV-1)
aaagcccucaucca

SEQ ID NO: 356229 - RNA, 14 nt, Human immunodeficiency virus 1 (HIV-1)
aaagcuaggggaug

SEQ ID NO: 356230 - RNA, 13 nt, Human immunodeficiency virus 1 (HIV-1)
aaaggauuuugcu

SEQ ID NO: 356231 - RNA, 12 nt, Human immunodeficiency virus 1 (HIV-1)
aaauaaaagcau

SEQ ID NO: 356232 - RNA, 18 nt, Human immunodeficiency virus 1 (HIV-1)
aaauauuaagacaaagaa

SEQ ID NO: 356233 - RNA, 13 nt, Human immunodeficiency virus 1 (HIV-1)
aaauuaaagccag

SEQ ID NO: 356234 - RNA, 15 nt, Human immunodeficiency virus 1 (HIV-1)
aaauuaaccccacuc

SEQ ID NO: 356235 - RNA, 13 nt, Human immunodeficiency virus 1 (HIV-1)
aacaaaagccuua

SEQ ID NO: 356236 - RNA, 22 nt, Human immunodeficiency virus 1 (HIV-1)
aacaacauauuggggucugcau

SEQ ID NO: 356237 - RNA, 22 nt, Human immunodeficiency virus 1 (HIV-1)
aacaagguaggaucucuacaau

SEQ ID NO: 356238 - RNA, 23 nt, Human immunodeficiency virus 1 (HIV-1)
aaccuauaccaauaguagcaaua

SEQ ID NO: 356239 - RNA, 18 nt, Human immunodeficiency virus 1 (HIV-1)
aacuaaaggaagcucuau

SEQ ID NO: 356240 - RNA, 19 nt, Human immunodeficiency virus 1 (HIV-1)
aagaaaucuguugacucag

SEQ ID NO: 356241 - RNA, 18 nt, Human immunodeficiency virus 1 (HIV-1)
aagaaaugaguuugccag

SEQ ID NO: 356242 - RNA, 20 nt, Human immunodeficiency virus 1 (HIV-1)
aagaaaugaguuugccagga

SEQ ID NO: 356243 - RNA, 20 nt, Human immunodeficiency virus 1 (HIV-1)
aagaacugcugacaucgagc

SEQ ID NO: 356244 - RNA, 14 nt, Human immunodeficiency virus 1 (HIV-1)
aagaauagugcugu

SEQ ID NO: 356245 - RNA, 21 nt, Human immunodeficiency virus 1 (HIV-1)
aagacaagauauccuugaucu

SEQ ID NO: 356246 - RNA, 17 nt, Human immunodeficiency virus 1 (HIV-1)
aagauagaagaggccaa

SEQ ID NO: 356247 - RNA, 14 nt, Human immunodeficiency virus 1 (HIV-1)
aagauggaaaccaa

SEQ ID NO: 356248 - RNA, 13 nt, Human immunodeficiency virus 1 (HIV-1)
aagcagcugcuuu

SEQ ID NO: 356249 - RNA, 17 nt, Human immunodeficiency virus 1 (HIV-1)
aagcaguaaguaguaca

SEQ ID NO: 356250 - RNA, 14 nt, Human immunodeficiency virus 1 (HIV-1)
aagcauaugauaca

SEQ ID NO: 356251 - RNA, 17 nt, Human immunodeficiency virus 1 (HIV-1)
aagcauccaggaaguca

SEQ ID NO: 356252 - RNA, 17 nt, Human immunodeficiency virus 1 (HIV-1)
aagcccucauccaagaa

SEQ ID NO: 356253 - RNA, 13 nt, Human immunodeficiency virus 1 (HIV-1)
aagccuaaagcca

SEQ ID NO: 356254 - RNA, 15 nt, Human immunodeficiency virus 1 (HIV-1)
aaggauuuugcuaua

SEQ ID NO: 356255 - RNA, 14 nt, Human immunodeficiency virus 1 (HIV-1)
aaguacacauccca

SEQ ID NO: 356256 - RNA, 14 nt, Human immunodeficiency virus 1 (HIV-1)
aaguaguacaagga

SEQ ID NO: 356257 - RNA, 19 nt, Human immunodeficiency virus 1 (HIV-1)
aauacagcagcuaccaaug

SEQ ID NO: 356258 - RNA, 20 nt, Human immunodeficiency virus 1 (HIV-1)
aauacagcagcuaccaaugc

SEQ ID NO: 356259 - RNA, 17 nt, Human immunodeficiency virus 1 (HIV-1)
aauacuuggcacuagca

SEQ ID NO: 356260 - RNA, 20 nt, Human immunodeficiency virus 1 (HIV-1)
aauacuuggcacuagcagca

SEQ ID NO: 356261 - RNA, 13 nt, Human immunodeficiency virus 1 (HIV-1)
aauaguagcaaua

SEQ ID NO: 356262 - RNA, 22 nt, Human immunodeficiency virus 1 (HIV-1)
aauagugcuguuagcuugcuca

SEQ ID NO: 356263 - RNA, 22 nt, Human immunodeficiency virus 1 (HIV-1)
aauaguugugugguccauagua

SEQ ID NO: 356264 - RNA, 14 nt, Human immunodeficiency virus 1 (HIV-1)
aauaucaagcagga

SEQ ID NO: 356265 - RNA, 22 nt, Human immunodeficiency virus 1 (HIV-1)
aauaucaagcaggacauaacaa

SEQ ID NO: 356266 - RNA, 16 nt, Human immunodeficiency virus 1 (HIV-1)
aauauuaagacaaaga

SEQ ID NO: 356267 - RNA, 20 nt, Human immunodeficiency virus 1 (HIV-1)
aaugacuuacaaggcagcug

SEQ ID NO: 356268 - RNA, 21 nt, Human immunodeficiency virus 1 (HIV-1)
aaugagagugaaggagaaaua

SEQ ID NO: 356269 - RNA, 14 nt, Human immunodeficiency virus 1 (HIV-1)
aaugccacagccau

SEQ ID NO: 356270 - RNA, 14 nt, Human immunodeficiency virus 1 (HIV-1)
aauuaaagccagga

SEQ ID NO: 356271 - RNA, 15 nt, Human immunodeficiency virus 1 (HIV-1)
aauuuuaacaugugg

SEQ ID NO: 356272 - RNA, 13 nt, Human immunodeficiency virus 1 (HIV-1)
acaagaaguagua

SEQ ID NO: 356273 - RNA, 21 nt, Human immunodeficiency virus 1 (HIV-1)
acaagauauccuugaucugug

SEQ ID NO: 356274 - RNA, 23 nt, Human immunodeficiency virus 1 (HIV-1)
acaaguagacccugaacuagcag

SEQ ID NO: 356275 - RNA, 20 nt, Human immunodeficiency virus 1 (HIV-1)
acacaucccacuaggggaug

SEQ ID NO: 356276 - RNA, 14 nt, Human immunodeficiency virus 1 (HIV-1)
acacaugccugugu

SEQ ID NO: 356277 - RNA, 13 nt, Human immunodeficiency virus 1 (HIV-1)
acagagacagauc

SEQ ID NO: 356278 - RNA, 19 nt, Human immunodeficiency virus 1 (HIV-1)
acagcgacgaagagcucau

SEQ ID NO: 356279 - RNA, 22 nt, Human immunodeficiency virus 1 (HIV-1)
acaggagcagaugauacaguau

SEQ ID NO: 356280 - RNA, 18 nt, Human immunodeficiency virus 1 (HIV-1)
acagucagacucaucaag

SEQ ID NO: 356281 - RNA, 18 nt, Human immunodeficiency virus 1 (HIV-1)
acaucgagcuugcuacaa

SEQ ID NO: 356282 - RNA, 16 nt, Human immunodeficiency virus 1 (HIV-1)
accaauaguagcaaua

SEQ ID NO: 356283 - RNA, 17 nt, Human immunodeficiency virus 1 (HIV-1)
acccugugagccugcau

SEQ ID NO: 356284 - RNA, 21 nt, Human immunodeficiency virus 1 (HIV-1)
accuauaccaauaguagcaau

SEQ ID NO: 356285 - RNA, 23 nt, Human immunodeficiency virus 1 (HIV-1)
accuauaccaauaguagcaauag

SEQ ID NO: 356286 - RNA, 17 nt, Human immunodeficiency virus 1 (HIV-1)
accuuuaagaccaauga

SEQ ID NO: 356287 - RNA, 17 nt, Human immunodeficiency virus 1 (HIV-1)
acuaugaaagcccucau

SEQ ID NO: 356288 - RNA, 18 nt, Human immunodeficiency virus 1 (HIV-1)
acucccaaagaagacaag

SEQ ID NO: 356289 - RNA, 20 nt, Human immunodeficiency virus 1 (HIV-1)
acugauuugaagaaugauac

SEQ ID NO: 356290 - RNA, 15 nt, Human immunodeficiency virus 1 (HIV-1)
acugcuuaagccuca

SEQ ID NO: 356291 - RNA, 18 nt, Human immunodeficiency virus 1 (HIV-1)
acuuacaaggcagcugua

SEQ ID NO: 356292 - RNA, 14 nt, Human immunodeficiency virus 1 (HIV-1)
acuucaagaacugc

SEQ ID NO: 356293 - RNA, 22 nt, Human immunodeficiency virus 1 (HIV-1)
agaaaggccuuauuaggacaca

SEQ ID NO: 356294 - RNA, 21 nt, Human immunodeficiency virus 1 (HIV-1)
agaaaugaguuugccaggaag

SEQ ID NO: 356295 - RNA, 16 nt, Human immunodeficiency virus 1 (HIV-1)
agaaauuuguacagag

SEQ ID NO: 356296 - RNA, 12 nt, Human immunodeficiency virus 1 (HIV-1)
agaacuacacac

SEQ ID NO: 356297 - RNA, 15 nt, Human immunodeficiency virus 1 (HIV-1)
agacaguaugaucag

SEQ ID NO: 356298 - RNA, 16 nt, Human immunodeficiency virus 1 (HIV-1)
cauuaguaguagcaau

SEQ ID NO: 356299 - RNA, 18 nt, Human immunodeficiency virus 1 (HIV-1)
ccaaugacuuacaaggca

SEQ ID NO: 356300 - RNA, 21 nt, Human immunodeficiency virus 1 (HIV-1)
ccacacacaaggcuacuuccc

SEQ ID NO: 356301 - RNA, 17 nt, Human immunodeficiency virus 1 (HIV-1)
ccacagccauagcagua

SEQ ID NO: 356302 - RNA, 20 nt, Human immunodeficiency virus 1 (HIV-1)
ccaccacucuauuuugugca

SEQ ID NO: 356303 - RNA, 13 nt, Human immunodeficiency virus 1 (HIV-1)
ccacucuguguua

SEQ ID NO: 356304 - RNA, 20 nt, Human immunodeficiency virus 1 (HIV-1)
ccaggggucagauauccacu

SEQ ID NO: 356305 - RNA, 21 nt, Human immunodeficiency virus 1 (HIV-1)
ccauauguauguuucagggaa

SEQ ID NO: 356306 - RNA, 22 nt, Human immunodeficiency virus 1 (HIV-1)
ccauauguauguuucagggaaa

SEQ ID NO: 356307 - RNA, 12 nt, Human immunodeficiency virus 1 (HIV-1)
ccauguguaaaa

SEQ ID NO: 356308 - RNA, 18 nt, Human immunodeficiency virus 1 (HIV-1)
cccaacccacaagaagua

SEQ ID NO: 356309 - RNA, 20 nt, Human immunodeficiency virus 1 (HIV-1)
cccacucuguguuaguuuaa

SEQ ID NO: 356310 - RNA, 16 nt, Human immunodeficiency virus 1 (HIV-1)
cccucagauccugcau

SEQ ID NO: 356311 - RNA, 17 nt, Human immunodeficiency virus 1 (HIV-1)
cccucagauccugcaua

SEQ ID NO: 356312 - RNA, 13 nt, Human immunodeficiency virus 1 (HIV-1)
ccuaaaacugcuu

SEQ ID NO: 356313 - RNA, 19 nt, Human immunodeficiency virus 1 (HIV-1)
ccuauaccaauaguagcaa

SEQ ID NO: 356314 - RNA, 16 nt, Human immunodeficiency virus 1 (HIV-1)
ccuggaaaaacaugga

SEQ ID NO: 356315 - RNA, 23 nt, Human immunodeficiency virus 1 (HIV-1)
cgagcccucagauccugcauaua

SEQ ID NO: 356316 - RNA, 15 nt, Human immunodeficiency virus 1 (HIV-1)
cgccacauaccuaga

SEQ ID NO: 356317 - RNA, 16 nt, Human immunodeficiency virus 1 (HIV-1)
cuaaagccauguguaa

SEQ ID NO: 356318 - RNA, 20 nt, Human immunodeficiency virus 1 (HIV-1)
cuauaagaaaggccuuauua

SEQ ID NO: 356319 - RNA, 15 nt, Human immunodeficiency virus 1 (HIV-1)
cuaucaaagcaguaa

SEQ ID NO: 356320 - RNA, 22 nt, Human immunodeficiency virus 1 (HIV-1)
cugacaucgagcuugcuacaag

SEQ ID NO: 356321 - RNA, 23 nt, Human immunodeficiency virus 1 (HIV-1)
cugaccuuuggauggugcuacaa

SEQ ID NO: 356322 - RNA, 23 nt, Human immunodeficiency virus 1 (HIV-1)
cugagccagcagcagauagggug

SEQ ID NO: 356323 - RNA, 20 nt, Human immunodeficiency virus 1 (HIV-1)
cuggcauuugggucagggag

SEQ ID NO: 356324 - RNA, 16 nt, Human immunodeficiency virus 1 (HIV-1)
cuguagaucuuagcca

SEQ ID NO: 356325 - RNA, 20 nt, Human immunodeficiency virus 1 (HIV-1)
cuguggaucuaccacacaca

SEQ ID NO: 356326 - RNA, 14 nt, Human immunodeficiency virus 1 (HIV-1)
cuucaagaacugcu

SEQ ID NO: 356327 - RNA, 18 nt, Human immunodeficiency virus 1 (HIV-1)
cuucaagaacugcugaca

SEQ ID NO: 356328 - RNA, 15 nt, Human immunodeficiency virus 1 (HIV-1)
cuucucuaucaaagc

SEQ ID NO: 356329 - RNA, 16 nt, Human immunodeficiency virus 1 (HIV-1)
gaaaauauuaagacaa

SEQ ID NO: 356330 - RNA, 15 nt, Human immunodeficiency virus 1 (HIV-1)
gaacuacacaccagg

SEQ ID NO: 356331 - RNA, 20 nt, Human immunodeficiency virus 1 (HIV-1)
gaacuacacaccagggccag

SEQ ID NO: 356332 - RNA, 12 nt, Human immunodeficiency virus 1 (HIV-1)
gaacugcugaca

SEQ ID NO: 356333 - RNA, 17 nt, Human immunodeficiency virus 1 (HIV-1)
gaagacaguggcaauga

SEQ ID NO: 356334 - RNA, 16 nt, Human immunodeficiency virus 1 (HIV-1)
gaagcaaccaccacuc

SEQ ID NO: 356335 - RNA, 21 nt, Human immunodeficiency virus 1 (HIV-1)
gaagcucuauuagauacagga

SEQ ID NO: 356336 - RNA, 22 nt, Human immunodeficiency virus 1 (HIV-1)
gaaguaguauugguaaauguga

SEQ ID NO: 356337 - RNA, 20 nt, Human immunodeficiency virus 1 (HIV-1)
gaauaucaagcaggacauaa

SEQ ID NO: 356338 - RNA, 17 nt, Human immunodeficiency virus 1 (HIV-1)
gaaucuccuacaguauu

SEQ ID NO: 356339 - RNA, 20 nt, Human immunodeficiency virus 1 (HIV-1)
gaaugagacgagcugagcca

SEQ ID NO: 356340 - RNA, 13 nt, Human immunodeficiency virus 1 (HIV-1)
gaaugauaaugga

SEQ ID NO: 356341 - RNA, 15 nt, Human immunodeficiency virus 1 (HIV-1)
gacaguaugaucaga

SEQ ID NO: 356342 - RNA, 15 nt, Human immunodeficiency virus 1 (HIV-1)
gacccugaacuagca

SEQ ID NO: 356343 - RNA, 16 nt, Human immunodeficiency virus 1 (HIV-1)
gacccugaacuagcag

SEQ ID NO: 356344 - RNA, 12 nt, Human immunodeficiency virus 1 (HIV-1)
gacuaauagaaa

SEQ ID NO: 356345 - RNA, 12 nt, Human immunodeficiency virus 1 (HIV-1)
gagaacaccagc

SEQ ID NO: 356346 - RNA, 17 nt, Human immunodeficiency virus 1 (HIV-1)
gagagacagagacagau

SEQ ID NO: 356347 - RNA, 13 nt, Human immunodeficiency virus 1 (HIV-1)
gagcagaugauac

SEQ ID NO: 356348 - RNA, 13 nt, Human immunodeficiency virus 1 (HIV-1)
gagccugcauggg

SEQ ID NO: 356349 - RNA, 18 nt, Human immunodeficiency virus 1 (HIV-1)
gagcugagccagcagcag

SEQ ID NO: 356350 - RNA, 15 nt, Human immunodeficiency virus 1 (HIV-1)
gagcuuguagagcua

SEQ ID NO: 356351 - RNA, 21 nt, Human immunodeficiency virus 1 (HIV-1)
gaggagcuuaagaaugaagcu

SEQ ID NO: 356352 - RNA, 21 nt, Human immunodeficiency virus 1 (HIV-1)
gauacaggagcagaugauaca

SEQ ID NO: 356353 - RNA, 18 nt, Human immunodeficiency virus 1 (HIV-1)
gauaggguuauagaagua

SEQ ID NO: 356354 - RNA, 18 nt, Human immunodeficiency virus 1 (HIV-1)
gaucuaccacacacaagg

SEQ ID NO: 356355 - RNA, 20 nt, Human immunodeficiency virus 1 (HIV-1)
gaucucuacaauacuuggca

SEQ ID NO: 356356 - RNA, 16 nt, Human immunodeficiency virus 1 (HIV-1)
gcaauaauaauagcaa

SEQ ID NO: 356357 - RNA, 20 nt, Human immunodeficiency virus 1 (HIV-1)
gcaaugagagugaaggagaa

SEQ ID NO: 356358 - RNA, 18 nt, Human immunodeficiency virus 1 (HIV-1)
gcacuuuaaauuuuccca

SEQ ID NO: 356359 - RNA, 17 nt, Human immunodeficiency virus 1 (HIV-1)
gcagaacuacacaccag

SEQ ID NO: 356360 - RNA, 18 nt, Human immunodeficiency virus 1 (HIV-1)
gcagaacuacacaccagg

SEQ ID NO: 356361 - RNA, 15 nt, Human immunodeficiency virus 1 (HIV-1)
gcagaugauacagua

SEQ ID NO: 356362 - RNA, 16 nt, Human immunodeficiency virus 1 (HIV-1)
gcagaugauacaguau

SEQ ID NO: 356363 - RNA, 21 nt, Human immunodeficiency virus 1 (HIV-1)
gcaguagcugaggggacagau

SEQ ID NO: 356364 - RNA, 19 nt, Human immunodeficiency virus 1 (HIV-1)
gcauauaagcagcugcuuu

SEQ ID NO: 356365 - RNA, 15 nt, Human immunodeficiency virus 1 (HIV-1)
gcccucauccaagaa

SEQ ID NO: 356366 - RNA, 18 nt, Human immunodeficiency virus 1 (HIV-1)
gccuuaggcaucuccuau

SEQ ID NO: 356367 - RNA, 13 nt, Human immunodeficiency virus 1 (HIV-1)
gcgggacugggga

SEQ ID NO: 356368 - RNA, 15 nt, Human immunodeficiency virus 1 (HIV-1)
gcuauagguacagua

SEQ ID NO: 356369 - RNA, 16 nt, Human immunodeficiency virus 1 (HIV-1)
gcuauagguacaguau

SEQ ID NO: 356370 - RNA, 20 nt, Human immunodeficiency virus 1 (HIV-1)
gcuauucgccacauaccuag

SEQ ID NO: 356371 - RNA, 15 nt, Human immunodeficiency virus 1 (HIV-1)
gcucaaugccacagc

SEQ ID NO: 356372 - RNA, 14 nt, Human immunodeficiency virus 1 (HIV-1)
ggacagauaggguu

SEQ ID NO: 356373 - RNA, 16 nt, Human immunodeficiency virus 1 (HIV-1)
ggacuggaagggcuaa

SEQ ID NO: 356374 - RNA, 15 nt, Human immunodeficiency virus 1 (HIV-1)
ggacuuuccagggag

SEQ ID NO: 356375 - RNA, 19 nt, Human immunodeficiency virus 1 (HIV-1)
ggaucaaagccuaaagcca

SEQ ID NO: 356376 - RNA, 20 nt, Human immunodeficiency virus 1 (HIV-1)
ggaucaaagccuaaagccau

SEQ ID NO: 356377 - RNA, 13 nt, Human immunodeficiency virus 1 (HIV-1)
ggaugacccggag

SEQ ID NO: 356378 - RNA, 22 nt, Human immunodeficiency virus 1 (HIV-1)
ggcccgagagcugcauccggag

SEQ ID NO: 356379 - RNA, 19 nt, Human immunodeficiency virus 1 (HIV-1)
ggccugggcgggacugggg

SEQ ID NO: 356380 - RNA, 16 nt, Human immunodeficiency virus 1 (HIV-1)
gguaccuguguggaag

SEQ ID NO: 356381 - RNA, 17 nt, Human immunodeficiency virus 1 (HIV-1)
guaaaauuaaagccagg

SEQ ID NO: 356382 - RNA, 18 nt, Human immunodeficiency virus 1 (HIV-1)
guaaaugugacagaaaau

SEQ ID NO: 356383 - RNA, 20 nt, Human immunodeficiency virus 1 (HIV-1)
guagaaauuuguacagagau

SEQ ID NO: 356384 - RNA, 19 nt, Human immunodeficiency virus 1 (HIV-1)
guagcaauacagcagcuac

SEQ ID NO: 356385 - RNA, 13 nt, Human immunodeficiency virus 1 (HIV-1)
guauuacuuugac

SEQ ID NO: 356386 - RNA, 23 nt, Human immunodeficiency virus 1 (HIV-1)
guauuacuuugacuguuuuucag

SEQ ID NO: 356387 - RNA, 21 nt, Human immunodeficiency virus 1 (HIV-1)
gugcaucagaugcuaaagcau

SEQ ID NO: 356388 - RNA, 21 nt, Human immunodeficiency virus 1 (HIV-1)
guggaucuaccacacacaagg

SEQ ID NO: 356389 - RNA, 17 nt, Human immunodeficiency virus 1 (HIV-1)
guuuuauagacaucacu

SEQ ID NO: 356390 - RNA, 15 nt, Human immunodeficiency virus 1 (HIV-1)
uaaaauuaaagccag

SEQ ID NO: 356391 - RNA, 21 nt, Human immunodeficiency virus 1 (HIV-1)
uaaagcuauagguacaguauu

SEQ ID NO: 356392 - RNA, 22 nt, Human immunodeficiency virus 1 (HIV-1)
uaaagcuauagguacaguauua

SEQ ID NO: 356393 - RNA, 21 nt, Human immunodeficiency virus 1 (HIV-1)
uaagacaaagaaaaauagaca

SEQ ID NO: 356394 - RNA, 20 nt, Human immunodeficiency virus 1 (HIV-1)
uaagacaguaugaucagaua

SEQ ID NO: 356395 - RNA, 18 nt, Human immunodeficiency virus 1 (HIV-1)
uaagcagcugcuuuuugc

SEQ ID NO: 356396 - RNA, 14 nt, Human immunodeficiency virus 1 (HIV-1)
uaauaacaacauau

SEQ ID NO: 356397 - RNA, 21 nt, Human immunodeficiency virus 1 (HIV-1)
uaaucaguuuaugggaucaaa

SEQ ID NO: 356398 - RNA, 12 nt, Human immunodeficiency virus 1 (HIV-1)
uaaucauagaau

SEQ ID NO: 356399 - RNA, 22 nt, Human immunodeficiency virus 1 (HIV-1)
uaauucaucuguauuacuuuga

SEQ ID NO: 356400 - RNA, 20 nt, Human immunodeficiency virus 1 (HIV-1)
uacaagcuaguaccaguuga

SEQ ID NO: 356401 - RNA, 18 nt, Human immunodeficiency virus 1 (HIV-1)
uacaaggcagcuguagau

SEQ ID NO: 356402 - RNA, 22 nt, Human immunodeficiency virus 1 (HIV-1)
uacaaggcagcuguagaucuua

SEQ ID NO: 356403 - RNA, 20 nt, Human immunodeficiency virus 1 (HIV-1)
uaccuagaagaauaagacag

SEQ ID NO: 356404 - RNA, 21 nt, Human immunodeficiency virus 1 (HIV-1)
uacuucaagaacugcugacau

SEQ ID NO: 356405 - RNA, 12 nt, Human immunodeficiency virus 1 (HIV-1)
uagaaaucugug

SEQ ID NO: 356406 - RNA, 16 nt, Human immunodeficiency virus 1 (HIV-1)
uagaacagaugcauga

SEQ ID NO: 356407 - RNA, 22 nt, Human immunodeficiency virus 1 (HIV-1)
uagacuaauagaaagagcagaa

SEQ ID NO: 356408 - RNA, 17 nt, Human immunodeficiency virus 1 (HIV-1)
uagauugguaauaacaa

SEQ ID NO: 356409 - RNA, 14 nt, Human immunodeficiency virus 1 (HIV-1)
uagcagaacuacac

SEQ ID NO: 356410 - RNA, 18 nt, Human immunodeficiency virus 1 (HIV-1)
uagcugaggggacagaua

SEQ ID NO: 356411 - RNA, 22 nt, Human immunodeficiency virus 1 (HIV-1)
uaggcaucuccuauggcaggaa

SEQ ID NO: 356412 - RNA, 22 nt, Human immunodeficiency virus 1 (HIV-1)
uaguagcgggagaaugauaaug

SEQ ID NO: 356413 - RNA, 20 nt, Human immunodeficiency virus 1 (HIV-1)
uagugugauuggauggccua

SEQ ID NO: 356414 - RNA, 21 nt, Human immunodeficiency virus 1 (HIV-1)
uauaaucaguuuaugggauca

SEQ ID NO: 356415 - RNA, 14 nt, Human immunodeficiency virus 1 (HIV-1)
uauagguacaguau

SEQ ID NO: 356416 - RNA, 17 nt, Human immunodeficiency virus 1 (HIV-1)
uaucaagcaggacauaa

SEQ ID NO: 356417 - RNA, 19 nt, Human immunodeficiency virus 1 (HIV-1)
uaucaagcaggacauaaca

SEQ ID NO: 356418 - RNA, 15 nt, Human immunodeficiency virus 1 (HIV-1)
uauccuugaucugug

SEQ ID NO: 356419 - RNA, 13 nt, Human immunodeficiency virus 1 (HIV-1)
uaugaaacuuaug

SEQ ID NO: 356420 - RNA, 17 nt, Human immunodeficiency virus 1 (HIV-1)
ucaaaaaguagugugau

SEQ ID NO: 356421 - RNA, 12 nt, Human immunodeficiency virus 1 (HIV-1)
ucaaagcaguaa

SEQ ID NO: 356422 - RNA, 18 nt, Human immunodeficiency virus 1 (HIV-1)
ucaaagcaguaaguagua

SEQ ID NO: 356423 - RNA, 17 nt, Human immunodeficiency virus 1 (HIV-1)
ucaaagccuaaagccau

SEQ ID NO: 356424 - RNA, 12 nt, Human immunodeficiency virus 1 (HIV-1)
ucaagcaggaca

SEQ ID NO: 356425 - RNA, 13 nt, Human immunodeficiency virus 1 (HIV-1)
ucacaaguagcaa

SEQ ID NO: 356426 - RNA, 24 nt, Human immunodeficiency virus 1 (HIV-1)
ucacaaguagcaauacagcagcua

SEQ ID NO: 356427 - RNA, 16 nt, Human immunodeficiency virus 1 (HIV-1)
ucagacucugcuauaa

SEQ ID NO: 356428 - RNA, 19 nt, Human immunodeficiency virus 1 (HIV-1)
ucagggagucuccauagaa

SEQ ID NO: 356429 - RNA, 18 nt, Human immunodeficiency virus 1 (HIV-1)
ucccaaagaagacaagau

SEQ ID NO: 356430 - RNA, 13 nt, Human immunodeficiency virus 1 (HIV-1)
ucccugauuagca

SEQ ID NO: 356431 - RNA, 22 nt, Human immunodeficiency virus 1 (HIV-1)
uccgcuggggacuuuccaggga

SEQ ID NO: 356432 - RNA, 18 nt, Human immunodeficiency virus 1 (HIV-1)
uccugcauauaagcagcu

SEQ ID NO: 356433 - RNA, 15 nt, Human immunodeficiency virus 1 (HIV-1)
ucucgagaccuggaa

SEQ ID NO: 356434 - RNA, 18 nt, Human immunodeficiency virus 1 (HIV-1)
ucucugguuagaccagau

SEQ ID NO: 356435 - RNA, 16 nt, Human immunodeficiency virus 1 (HIV-1)
ugaagaaugauacuaa

SEQ ID NO: 356436 - RNA, 16 nt, Human immunodeficiency virus 1 (HIV-1)
ugaaggagaaauauca

SEQ ID NO: 356437 - RNA, 13 nt, Human immunodeficiency virus 1 (HIV-1)
ugagccagcagca

SEQ ID NO: 356438 - RNA, 14 nt, Human immunodeficiency virus 1 (HIV-1)
ugauaauggagaaa

SEQ ID NO: 356439 - RNA, 14 nt, Human immunodeficiency virus 1 (HIV-1)
ugauacagagguac

SEQ ID NO: 356440 - RNA, 15 nt, Human immunodeficiency virus 1 (HIV-1)
ugauuagcagaacua

SEQ ID NO: 356441 - RNA, 17 nt, Human immunodeficiency virus 1 (HIV-1)
ugcaacaacugcuguuu

SEQ ID NO: 356442 - RNA, 14 nt, Human immunodeficiency virus 1 (HIV-1)
ugcauacaggagaa

SEQ ID NO: 356443 - RNA, 15 nt, Human immunodeficiency virus 1 (HIV-1)
ugcauauaagcagcu

SEQ ID NO: 356444 - RNA, 18 nt, Human immunodeficiency virus 1 (HIV-1)
ugcauauaagcagcugcu

SEQ ID NO: 356445 - RNA, 19 nt, Human immunodeficiency virus 1 (HIV-1)
ugcaucagaugcuaaagca

SEQ ID NO: 356446 - RNA, 19 nt, Human immunodeficiency virus 1 (HIV-1)
ugcuaaagcauaugauaca

SEQ ID NO: 356447 - RNA, 12 nt, Human immunodeficiency virus 1 (HIV-1)
ugcuugugccug

SEQ ID NO: 356448 - RNA, 16 nt, Human immunodeficiency virus 1 (HIV-1)
uggaagaaaucuguug

SEQ ID NO: 356449 - RNA, 15 nt, Human immunodeficiency virus 1 (HIV-1)
uggacauaaagcuau

SEQ ID NO: 356450 - RNA, 23 nt, Human immunodeficiency virus 1 (HIV-1)
uggagcaaucacaaguagcaaua

SEQ ID NO: 356451 - RNA, 22 nt, Human immunodeficiency virus 1 (HIV-1)
uggaggaaaaagagauauagca

SEQ ID NO: 356452 - RNA, 14 nt, Human immunodeficiency virus 1 (HIV-1)
uggauggugcuaca

SEQ ID NO: 356453 - RNA, 19 nt, Human immunodeficiency virus 1 (HIV-1)
uggcauuugggucagggag

SEQ ID NO: 356454 - RNA, 18 nt, Human immunodeficiency virus 1 (HIV-1)
uggcuagaagcacaagag

SEQ ID NO: 356455 - RNA, 19 nt, Human immunodeficiency virus 1 (HIV-1)
uggcuuagggcaacauauc

SEQ ID NO: 356456 - RNA, 20 nt, Human immunodeficiency virus 1 (HIV-1)
uggcuuagggcaacauaucu

SEQ ID NO: 356457 - RNA, 15 nt, Human immunodeficiency virus 1 (HIV-1)
ugguuuuauagacau

SEQ ID NO: 356458 - RNA, 13 nt, Human immunodeficiency virus 1 (HIV-1)
uguaccaguaaaa

SEQ ID NO: 356459 - RNA, 12 nt, Human immunodeficiency virus 1 (HIV-1)
ugucgacauagc

SEQ ID NO: 356460 - RNA, 16 nt, Human immunodeficiency virus 1 (HIV-1)
ugugcaucagaugcua

SEQ ID NO: 356461 - RNA, 17 nt, Human immunodeficiency virus 1 (HIV-1)
ugugcaucagaugcuaa

SEQ ID NO: 356462 - RNA, 23 nt, Human immunodeficiency virus 1 (HIV-1)
uguggaaaaaugacaugguagaa

SEQ ID NO: 356463 - RNA, 16 nt, Human immunodeficiency virus 1 (HIV-1)
uguuucauaacaaaag

SEQ ID NO: 356464 - RNA, 14 nt, Human immunodeficiency virus 1 (HIV-1)
uuaaagugcacuga

SEQ ID NO: 356465 - RNA, 15 nt, Human immunodeficiency virus 1 (HIV-1)
uuaacauguggaaaa

SEQ ID NO: 356466 - RNA, 19 nt, Human immunodeficiency virus 1 (HIV-1)
uuaagaaugaagcuguuag

SEQ ID NO: 356467 - RNA, 12 nt, Human immunodeficiency virus 1 (HIV-1)
uuagaccagauc

SEQ ID NO: 356468 - RNA, 12 nt, Human immunodeficiency virus 1 (HIV-1)
uuaucugggacg

SEQ ID NO: 356469 - RNA, 17 nt, Human immunodeficiency virus 1 (HIV-1)
uuccagucacaccucag

SEQ ID NO: 356470 - RNA, 20 nt, Human immunodeficiency virus 1 (HIV-1)
uucugcaacaacugcuguuu

SEQ ID NO: 356471 - RNA, 20 nt, Human immunodeficiency virus 1 (HIV-1)
uugagacuguaccaguaaaa

SEQ ID NO: 356472 - RNA, 12 nt, Human immunodeficiency virus 1 (HIV-1)
uugcuacaaggg

SEQ ID NO: 356473 - RNA, 23 nt, Human immunodeficiency virus 1 (HIV-1)
uugguggaaucuccuacaguauu

SEQ ID NO: 356474 - RNA, 14 nt, Human immunodeficiency virus 1 (HIV-1)
agacucugcuauaa

SEQ ID NO: 356475 - RNA, 15 nt, Human immunodeficiency virus 1 (HIV-1)
agagaacaccagcuu

SEQ ID NO: 356476 - RNA, 17 nt, Human immunodeficiency virus 1 (HIV-1)
agagcaagaaauggagc

SEQ ID NO: 356477 - RNA, 20 nt, Human immunodeficiency virus 1 (HIV-1)
agauagggugggagcagcau

SEQ ID NO: 356478 - RNA, 15 nt, Human immunodeficiency virus 1 (HIV-1)
agauauagcacacaa

SEQ ID NO: 356479 - RNA, 16 nt, Human immunodeficiency virus 1 (HIV-1)
agaugauacaguauua

SEQ ID NO: 356480 - RNA, 17 nt, Human immunodeficiency virus 1 (HIV-1)
agcaauacagcagcuac

SEQ ID NO: 356481 - RNA, 19 nt, Human immunodeficiency virus 1 (HIV-1)
agcagaugauacaguauua

SEQ ID NO: 356482 - RNA, 19 nt, Human immunodeficiency virus 1 (HIV-1)
agcauuaguaguagcaaua

SEQ ID NO: 356483 - RNA, 22 nt, Human immunodeficiency virus 1 (HIV-1)
agccuaaaacugcuuguaccaa

SEQ ID NO: 356484 - RNA, 16 nt, Human immunodeficiency virus 1 (HIV-1)
agccuuaggcaucucc

SEQ ID NO: 356485 - RNA, 20 nt, Human immunodeficiency virus 1 (HIV-1)
agcucaucagaacagucaga

SEQ ID NO: 356486 - RNA, 23 nt, Human immunodeficiency virus 1 (HIV-1)
agcuugcucaaugccacagccau

SEQ ID NO: 356487 - RNA, 15 nt, Human immunodeficiency virus 1 (HIV-1)
agcuuguagagcuau

SEQ ID NO: 356488 - RNA, 15 nt, Human immunodeficiency virus 1 (HIV-1)
aggaagcucuauuag

SEQ ID NO: 356489 - RNA, 16 nt, Human immunodeficiency virus 1 (HIV-1)
aggagagaacaccagc

SEQ ID NO: 356490 - RNA, 19 nt, Human immunodeficiency virus 1 (HIV-1)
aggagcuuguagagcuauu

SEQ ID NO: 356491 - RNA, 13 nt, Human immunodeficiency virus 1 (HIV-1)
agguacaguauua

SEQ ID NO: 356492 - RNA, 14 nt, Human immunodeficiency virus 1 (HIV-1)
agguacaguauuag

SEQ ID NO: 356493 - RNA, 19 nt, Human immunodeficiency virus 1 (HIV-1)
agguggagagagagacaga

SEQ ID NO: 356494 - RNA, 20 nt, Human immunodeficiency virus 1 (HIV-1)
agguggguuuuccagucaca

SEQ ID NO: 356495 - RNA, 20 nt, Human immunodeficiency virus 1 (HIV-1)
aguaaaauuaaagccaggaa

SEQ ID NO: 356496 - RNA, 15 nt, Human immunodeficiency virus 1 (HIV-1)
aguaagacaguauga

SEQ ID NO: 356497 - RNA, 17 nt, Human immunodeficiency virus 1 (HIV-1)
aguacaaggagcuugua

SEQ ID NO: 356498 - RNA, 22 nt, Human immunodeficiency virus 1 (HIV-1)
aguagcaauaauaauagcaaua

SEQ ID NO: 356499 - RNA, 23 nt, Human immunodeficiency virus 1 (HIV-1)
agucaggaacuaaagaauagugc

SEQ ID NO: 356500 - RNA, 16 nt, Human immunodeficiency virus 1 (HIV-1)
aguuuaaagugcacug

SEQ ID NO: 356501 - RNA, 20 nt, Human immunodeficiency virus 1 (HIV-1)
auaaaggagagaacaccagc

SEQ ID NO: 356502 - RNA, 15 nt, Human immunodeficiency virus 1 (HIV-1)
auaauaauagcaaua

SEQ ID NO: 356503 - RNA, 13 nt, Human immunodeficiency virus 1 (HIV-1)
auaaucaguuuau

SEQ ID NO: 356504 - RNA, 14 nt, Human immunodeficiency virus 1 (HIV-1)
auacaggagcagau

SEQ ID NO: 356505 - RNA, 11 nt, Human immunodeficiency virus 1 (HIV-1)
auacaguauua

SEQ ID NO: 356506 - RNA, 20 nt, Human immunodeficiency virus 1 (HIV-1)
auacaguauuagaagaaaug

SEQ ID NO: 356507 - RNA, 16 nt, Human immunodeficiency virus 1 (HIV-1)
auagaaguaguacaag

SEQ ID NO: 356508 - RNA, 20 nt, Human immunodeficiency virus 1 (HIV-1)
auagaaguaguacaaggagc

SEQ ID NO: 356509 - RNA, 12 nt, Human immunodeficiency virus 1 (HIV-1)
auaguagcaaua

SEQ ID NO: 356510 - RNA, 15 nt, Human immunodeficiency virus 1 (HIV-1)
auaucaagcaggaca

SEQ ID NO: 356511 - RNA, 17 nt, Human immunodeficiency virus 1 (HIV-1)
aucagaugcuaaagcau

SEQ ID NO: 356512 - RNA, 19 nt, Human immunodeficiency virus 1 (HIV-1)
aucuguggaucuaccacac

SEQ ID NO: 356513 - RNA, 12 nt, Human immunodeficiency virus 1 (HIV-1)
augaagcuguua

SEQ ID NO: 356514 - RNA, 15 nt, Human immunodeficiency virus 1 (HIV-1)
augauacaguauuag

SEQ ID NO: 356515 - RNA, 16 nt, Human immunodeficiency virus 1 (HIV-1)
augcaugaggauauaa

SEQ ID NO: 356516 - RNA, 21 nt, Human immunodeficiency virus 1 (HIV-1)
augggauggaugacccggaga

SEQ ID NO: 356517 - RNA, 17 nt, Human immunodeficiency virus 1 (HIV-1)
augguagaacagaugca

SEQ ID NO: 356518 - RNA, 19 nt, Human immunodeficiency virus 1 (HIV-1)
augguagaacagaugcaug

SEQ ID NO: 356519 - RNA, 13 nt, Human immunodeficiency virus 1 (HIV-1)
auuagcagaacua

SEQ ID NO: 356520 - RNA, 17 nt, Human immunodeficiency virus 1 (HIV-1)
auuagcagaacuacaca

SEQ ID NO: 356521 - RNA, 15 nt, Human immunodeficiency virus 1 (HIV-1)
auuaguaguagcaau

SEQ ID NO: 356522 - RNA, 21 nt, Human immunodeficiency virus 1 (HIV-1)
auucacucccaaagaagacaa

SEQ ID NO: 356523 - RNA, 20 nt, Human immunodeficiency virus 1 (HIV-1)
auuggggucugcauacagga

SEQ ID NO: 356524 - RNA, 19 nt, Human immunodeficiency virus 1 (HIV-1)
auugguaaaugugacagaa

SEQ ID NO: 356525 - RNA, 14 nt, Human immunodeficiency virus 1 (HIV-1)
auuugggucaggga

SEQ ID NO: 356526 - RNA, 13 nt, Human immunodeficiency virus 1 (HIV-1)
caaaguaagacag

SEQ ID NO: 356527 - RNA, 14 nt, Human immunodeficiency virus 1 (HIV-1)
caaaguaagacagu

SEQ ID NO: 356528 - RNA, 16 nt, Human immunodeficiency virus 1 (HIV-1)
caaaguaagacaguau

SEQ ID NO: 356529 - RNA, 12 nt, Human immunodeficiency virus 1 (HIV-1)
caacaacugcug

SEQ ID NO: 356530 - RNA, 23 nt, Human immunodeficiency virus 1 (HIV-1)
caacauauuggggucugcauaca

SEQ ID NO: 356531 - RNA, 20 nt, Human immunodeficiency virus 1 (HIV-1)
caacuaauucaucuguauua

SEQ ID NO: 356532 - RNA, 16 nt, Human immunodeficiency virus 1 (HIV-1)
caagcuaguaccaguu

SEQ ID NO: 356533 - RNA, 14 nt, Human immunodeficiency virus 1 (HIV-1)
caauacagcagcua

SEQ ID NO: 356534 - RNA, 15 nt, Human immunodeficiency virus 1 (HIV-1)
cacaaguagcaauac

SEQ ID NO: 356535 - RNA, 16 nt, Human immunodeficiency virus 1 (HIV-1)
cacacaugccugugua

SEQ ID NO: 356536 - RNA, 19 nt, Human immunodeficiency virus 1 (HIV-1)
cacauaccuagaagaauaa

SEQ ID NO: 356537 - RNA, 21 nt, Human immunodeficiency virus 1 (HIV-1)
cagaagacaguggcaaugaga

SEQ ID NO: 356538 - RNA, 18 nt, Human immunodeficiency virus 1 (HIV-1)
cagacucaucaagcuucu

SEQ ID NO: 356539 - RNA, 13 nt, Human immunodeficiency virus 1 (HIV-1)
cagacucugcuau

SEQ ID NO: 356540 - RNA, 14 nt, Human immunodeficiency virus 1 (HIV-1)
cagacucugcuaua

SEQ ID NO: 356541 - RNA, 21 nt, Human immunodeficiency virus 1 (HIV-1)
cagauacucauagaaaucugu

SEQ ID NO: 356542 - RNA, 16 nt, Human immunodeficiency virus 1 (HIV-1)
cagaugauacaguauu

SEQ ID NO: 356543 - RNA, 17 nt, Human immunodeficiency virus 1 (HIV-1)
cagccauagcaguagcu

SEQ ID NO: 356544 - RNA, 20 nt, Human immunodeficiency virus 1 (HIV-1)
cagccauagcaguagcugag

SEQ ID NO: 356545 - RNA, 15 nt, Human immunodeficiency virus 1 (HIV-1)
cagccuaaaacugcu

SEQ ID NO: 356546 - RNA, 16 nt, Human immunodeficiency virus 1 (HIV-1)
cagccuaaaacugcuu

SEQ ID NO: 356547 - RNA, 18 nt, Human immunodeficiency virus 1 (HIV-1)
cagcgacgaagagcucau

SEQ ID NO: 356548 - RNA, 22 nt, Human immunodeficiency virus 1 (HIV-1)
cagcgacgaagagcucaucaga

SEQ ID NO: 356549 - RNA, 20 nt, Human immunodeficiency virus 1 (HIV-1)
caggaagauggaaaccaaaa

SEQ ID NO: 356550 - RNA, 21 nt, Human immunodeficiency virus 1 (HIV-1)
caggagcagaugauacaguau

SEQ ID NO: 356551 - RNA, 18 nt, Human immunodeficiency virus 1 (HIV-1)
caggaguggaagccauaa

SEQ ID NO: 356552 - RNA, 21 nt, Human immunodeficiency virus 1 (HIV-1)
cagggccaggggucagauauc

SEQ ID NO: 356553 - RNA, 17 nt, Human immunodeficiency virus 1 (HIV-1)
cauaacaaaagccuuag

SEQ ID NO: 356554 - RNA, 20 nt, Human immunodeficiency virus 1 (HIV-1)
cauaauuggaagaaaucugu

SEQ ID NO: 356555 - RNA, 15 nt, Human immunodeficiency virus 1 (HIV-1)
cauaguaaucauaga

SEQ ID NO: 356556 - RNA, 22 nt, Human immunodeficiency virus 1 (HIV-1)
caucacguggcccgagagcugc

SEQ ID NO: 356557 - RNA, 14 nt, Human immunodeficiency virus 1 (HIV-1)
caucagaacaguca

SEQ ID NO: 356558 - RNA, 23 nt, Human immunodeficiency virus 1 (HIV-1)
caucccacuaggggaugcuagau

SEQ ID NO: 356559 - RNA, 14 nt, Human immunodeficiency virus 1 (HIV-1)
caucuccuauggca

SEQ ID NO: 356560 - RNA, 15 nt, Human immunodeficiency virus 1 (HIV-1)
cauggagcaaucaca

SEQ ID NO: 356561 - RNA, 17 nt, Human immunodeficiency virus 1 (HIV-1)
cauggagcaaucacaag

SEQ ID NO: 356562 - RNA, 18 nt, Human immunodeficiency virus 1 (HIV-1)
cauuagcccuauugagac

SEQ ID NO: 356563 - RNA, 15 nt, Human immunodeficiency virus 1 (HIV-1)
cauuaguaguagcaa

SEQ ID NO: 356564 - RNA, 15 nt, Human immunodeficiency virus 2 (HIV-2)
gcuauauuuacacau

SEQ ID NO: 356565 - RNA, 21 nt, Human immunodeficiency virus 2 (HIV-2)
gcuugcuuaaagaccucuuca

SEQ ID NO: 356566 - RNA, 16 nt, Human immunodeficiency virus 2 (HIV-2)
gcuuuacggcagguga

SEQ ID NO: 356567 - RNA, 22 nt, Human immunodeficiency virus 2 (HIV-2)
ggaaaacuaagacuccuucgcc

SEQ ID NO: 356568 - RNA, 22 nt, Human immunodeficiency virus 2 (HIV-2)
ggaauacucgcaguuccaagaa

SEQ ID NO: 356569 - RNA, 18 nt, Human immunodeficiency virus 2 (HIV-2)
ggagaagaacuccuugcc

SEQ ID NO: 356570 - RNA, 19 nt, Human immunodeficiency virus 2 (HIV-2)
ggagaagaacuccuugccc

SEQ ID NO: 356571 - RNA, 21 nt, Human immunodeficiency virus 2 (HIV-2)
ggauaauaccagauuggcaga

SEQ ID NO: 356572 - RNA, 17 nt, Human immunodeficiency virus 2 (HIV-2)
ggauccaagaagcuuuc

SEQ ID NO: 356573 - RNA, 20 nt, Human immunodeficiency virus 2 (HIV-2)
ggcagacgaagaaggacucc

SEQ ID NO: 356574 - RNA, 20 nt, Human immunodeficiency virus 2 (HIV-2)
gggaccauacagugcuugcc

SEQ ID NO: 356575 - RNA, 16 nt, Human immunodeficiency virus 2 (HIV-2)
ggucauucgguguuca

SEQ ID NO: 356576 - RNA, 18 nt, Human immunodeficiency virus 2 (HIV-2)
guaagaagagccaucaga

SEQ ID NO: 356577 - RNA, 15 nt, Human immunodeficiency virus 2 (HIV-2)
guaagcgaugcaguu

SEQ ID NO: 356578 - RNA, 23 nt, Human immunodeficiency virus 2 (HIV-2)
guaccacggagagaaaugaccua

SEQ ID NO: 356579 - RNA, 14 nt, Human immunodeficiency virus 2 (HIV-2)
guaguacaacaaaa

SEQ ID NO: 356580 - RNA, 22 nt, Human immunodeficiency virus 2 (HIV-2)
gucauuuuacuaacaagugcuu

SEQ ID NO: 356581 - RNA, 15 nt, Human immunodeficiency virus 2 (HIV-2)
gugccuaaugcaaaa

SEQ ID NO: 356582 - RNA, 13 nt, Human immunodeficiency virus 2 (HIV-2)
gugcuugccagac

SEQ ID NO: 356583 - RNA, 17 nt, Human immunodeficiency virus 2 (HIV-2)
guggaagcuaguaucag

SEQ ID NO: 356584 - RNA, 14 nt, Human immunodeficiency virus 2 (HIV-2)
guggauccaagaag

SEQ ID NO: 356585 - RNA, 22 nt, Human immunodeficiency virus 2 (HIV-2)
guguguucccaucucuccuagu

SEQ ID NO: 356586 - RNA, 16 nt, Human immunodeficiency virus 2 (HIV-2)
guuaaguguguguucc

SEQ ID NO: 356587 - RNA, 11 nt, Human immunodeficiency virus 2 (HIV-2)
guuccaagaag

SEQ ID NO: 356588 - RNA, 16 nt, Human immunodeficiency virus 2 (HIV-2)
uaaaaguaacauugaa

SEQ ID NO: 356589 - RNA, 20 nt, Human immunodeficiency virus 2 (HIV-2)
uaaacaccaaagaauacaaa

SEQ ID NO: 356590 - RNA, 21 nt, Human immunodeficiency virus 2 (HIV-2)
uaaauaaaagaguaagagcca

SEQ ID NO: 356591 - RNA, 17 nt, Human immunodeficiency virus 2 (HIV-2)
uaacagcaaucagggac

SEQ ID NO: 356592 - RNA, 17 nt, Human immunodeficiency virus 2 (HIV-2)
uaagaagagccaucaga

SEQ ID NO: 356593 - RNA, 14 nt, Human immunodeficiency virus 2 (HIV-2)
uaagcgaugcaguu

SEQ ID NO: 356594 - RNA, 16 nt, Human immunodeficiency virus 2 (HIV-2)
uaaguguguguuccca

SEQ ID NO: 356595 - RNA, 18 nt, Human immunodeficiency virus 2 (HIV-2)
uaauaccagauuggcaga

SEQ ID NO: 356596 - RNA, 15 nt, Human immunodeficiency virus 2 (HIV-2)
uacaugaacagccca

SEQ ID NO: 356597 - RNA, 13 nt, Human immunodeficiency virus 2 (HIV-2)
uacggcaggugaa

SEQ ID NO: 356598 - RNA, 17 nt, Human immunodeficiency virus 2 (HIV-2)
uacuuggucaaggcagg

SEQ ID NO: 356599 - RNA, 14 nt, Human immunodeficiency virus 2 (HIV-2)
uagagccaugcacu

SEQ ID NO: 356600 - RNA, 18 nt, Human immunodeficiency virus 2 (HIV-2)
uagagccuggguguuccc

SEQ ID NO: 356601 - RNA, 19 nt, Human immunodeficiency virus 2 (HIV-2)
uagagccuggguguucccu

SEQ ID NO: 356602 - RNA, 18 nt, Human immunodeficiency virus 2 (HIV-2)
uaggaggagacauagaau

SEQ ID NO: 356603 - RNA, 23 nt, Human immunodeficiency virus 2 (HIV-2)
uaggaguuccuguuacaccaaga

SEQ ID NO: 356604 - RNA, 21 nt, Human immunodeficiency virus 2 (HIV-2)
uaucauaugagcgaaagggca

SEQ ID NO: 356605 - RNA, 18 nt, Human immunodeficiency virus 2 (HIV-2)
ucaagaauuggcuaaaca

SEQ ID NO: 356606 - RNA, 18 nt, Human immunodeficiency virus 2 (HIV-2)
ucagcagggagaguacau

SEQ ID NO: 356607 - RNA, 21 nt, Human immunodeficiency virus 2 (HIV-2)
ucaggcagggagcagaacucg

SEQ ID NO: 356608 - RNA, 12 nt, Human immunodeficiency virus 2 (HIV-2)
uccuagacauau

SEQ ID NO: 356609 - RNA, 14 nt, Human immunodeficiency virus 2 (HIV-2)
uccuugcccagcug

SEQ ID NO: 356610 - RNA, 20 nt, Human immunodeficiency virus 2 (HIV-2)
ucgccuucugcaccagacaa

SEQ ID NO: 356611 - RNA, 17 nt, Human immunodeficiency virus 2 (HIV-2)
ucugaugaugaugaccu

SEQ ID NO: 356612 - RNA, 14 nt, Human immunodeficiency virus 2 (HIV-2)
ucugcaccagacaa

SEQ ID NO: 356613 - RNA, 15 nt, Human immunodeficiency virus 2 (HIV-2)
ucugcagagacuuac

SEQ ID NO: 356614 - RNA, 18 nt, Human immunodeficiency virus 2 (HIV-2)
ucugccccgagagcucau

SEQ ID NO: 356615 - RNA, 14 nt, Human immunodeficiency virus 2 (HIV-2)
ucuucgugcacuuc

SEQ ID NO: 356616 - RNA, 21 nt, Human immunodeficiency virus 2 (HIV-2)
ugaccuauaaauuggcaauag

SEQ ID NO: 356617 - RNA, 17 nt, Human immunodeficiency virus 2 (HIV-2)
ugacugaagcaccaaca

SEQ ID NO: 356618 - RNA, 16 nt, Human immunodeficiency virus 2 (HIV-2)
ugagggacagcaguau

SEQ ID NO: 356619 - RNA, 12 nt, Human immunodeficiency virus 2 (HIV-2)
aaaagaaaaagg

SEQ ID NO: 356620 - RNA, 17 nt, Human immunodeficiency virus 2 (HIV-2)
aaaagaguaagagccac

SEQ ID NO: 356621 - RNA, 23 nt, Human immunodeficiency virus 2 (HIV-2)
aaacaauggccccuaacaaaaga

SEQ ID NO: 356622 - RNA, 13 nt, Human immunodeficiency virus 2 (HIV-2)
aaacaccaaagaa

SEQ ID NO: 356623 - RNA, 19 nt, Human immunodeficiency virus 2 (HIV-2)
aaacagggaggcagugaac

SEQ ID NO: 356624 - RNA, 22 nt, Human immunodeficiency virus 2 (HIV-2)
aaacagggaggcagugaaccau

SEQ ID NO: 356625 - RNA, 22 nt, Human immunodeficiency virus 2 (HIV-2)
aaagaccucuucaauaaagcug

SEQ ID NO: 356626 - RNA, 13 nt, Human immunodeficiency virus 2 (HIV-2)
aaaguacuaaaua

SEQ ID NO: 356627 - RNA, 14 nt, Human immunodeficiency virus 2 (HIV-2)
aaauagaagcacua

SEQ ID NO: 356628 - RNA, 16 nt, Human immunodeficiency virus 2 (HIV-2)
aaauagaagcacuaaa

SEQ ID NO: 356629 - RNA, 15 nt, Human immunodeficiency virus 2 (HIV-2)
aaauggaaaaagagg

SEQ ID NO: 356630 - RNA, 16 nt, Human immunodeficiency virus 2 (HIV-2)
aacaaaugcuauugua

SEQ ID NO: 356631 - RNA, 14 nt, Human immunodeficiency virus 2 (HIV-2)
aacaagugcuugcu

SEQ ID NO: 356632 - RNA, 15 nt, Human immunodeficiency virus 2 (HIV-2)
aacaagugcuugcuu

SEQ ID NO: 356633 - RNA, 19 nt, Human immunodeficiency virus 2 (HIV-2)
aacaagugcuugcuuagua

SEQ ID NO: 356634 - RNA, 22 nt, Human immunodeficiency virus 2 (HIV-2)
aacaauggccccuaacaaaaga

SEQ ID NO: 356635 - RNA, 22 nt, Human immunodeficiency virus 2 (HIV-2)
aacuauccccaagcucauaaag

SEQ ID NO: 356636 - RNA, 12 nt, Human immunodeficiency virus 2 (HIV-2)
aagaaacagcug

SEQ ID NO: 356637 - RNA, 13 nt, Human immunodeficiency virus 2 (HIV-2)
aagaccucuucaa

SEQ ID NO: 356638 - RNA, 16 nt, Human immunodeficiency virus 2 (HIV-2)
aagagagggugcacuu

SEQ ID NO: 356639 - RNA, 20 nt, Human immunodeficiency virus 2 (HIV-2)
aagaguaccacggagagaaa

SEQ ID NO: 356640 - RNA, 14 nt, Human immunodeficiency virus 2 (HIV-2)
aagauagagccaau

SEQ ID NO: 356641 - RNA, 16 nt, Human immunodeficiency virus 2 (HIV-2)
aagauagagccaauaa

SEQ ID NO: 356642 - RNA, 13 nt, Human immunodeficiency virus 2 (HIV-2)
aagcgaugcaguu

SEQ ID NO: 356643 - RNA, 12 nt, Human immunodeficiency virus 2 (HIV-2)
aagcuacacaaa

SEQ ID NO: 356644 - RNA, 24 nt, Human immunodeficiency virus 2 (HIV-2)
aaggagaagaacuccuugcccagc

SEQ ID NO: 356645 - RNA, 17 nt, Human immunodeficiency virus 2 (HIV-2)
aagggaugucagcaagc

SEQ ID NO: 356646 - RNA, 23 nt, Human immunodeficiency virus 2 (HIV-2)
aagggaugucagcaagcuacaca

SEQ ID NO: 356647 - RNA, 19 nt, Human immunodeficiency virus 2 (HIV-2)
aauaaaggaagaagccuua

SEQ ID NO: 356648 - RNA, 14 nt, Human immunodeficiency virus 2 (HIV-2)
aauagauaugucac

SEQ ID NO: 356649 - RNA, 15 nt, Human immunodeficiency virus 2 (HIV-2)
aaucagcuguuuguu

SEQ ID NO: 356650 - RNA, 22 nt, Human immunodeficiency virus 2 (HIV-2)
aaucaggcagggagcagaacuc

SEQ ID NO: 356651 - RNA, 13 nt, Human immunodeficiency virus 2 (HIV-2)
aaugaccuauaaa

SEQ ID NO: 356652 - RNA, 17 nt, Human immunodeficiency virus 2 (HIV-2)
aauuacacuccaaaaau

SEQ ID NO: 356653 - RNA, 17 nt, Human immunodeficiency virus 2 (HIV-2)
acaacaucugcagagac

SEQ ID NO: 356654 - RNA, 10 nt, Human immunodeficiency virus 2 (HIV-2)
acaagggaug

SEQ ID NO: 356655 - RNA, 21 nt, Human immunodeficiency virus 2 (HIV-2)
acaauggccccuaacaaaaga

SEQ ID NO: 356656 - RNA, 19 nt, Human immunodeficiency virus 2 (HIV-2)
acacaggggcugaugacuc

SEQ ID NO: 356657 - RNA, 14 nt, Human immunodeficiency virus 2 (HIV-2)
acacuccaaaaaua

SEQ ID NO: 356658 - RNA, 21 nt, Human immunodeficiency virus 2 (HIV-2)
acagcaaucagggacuggcug

SEQ ID NO: 356659 - RNA, 13 nt, Human immunodeficiency virus 2 (HIV-2)
acagcaguaucag

SEQ ID NO: 356660 - RNA, 15 nt, Human immunodeficiency virus 2 (HIV-2)
acagugcuugccaga

SEQ ID NO: 356661 - RNA, 19 nt, Human immunodeficiency virus 2 (HIV-2)
acaugaacagcccauggag

SEQ ID NO: 356662 - RNA, 18 nt, Human immunodeficiency virus 2 (HIV-2)
accaagaguaccacggag

SEQ ID NO: 356663 - RNA, 17 nt, Human immunodeficiency virus 2 (HIV-2)
accccagagaaagggua

SEQ ID NO: 356664 - RNA, 21 nt, Human immunodeficiency virus 2 (HIV-2)
acccgcguggaaaaaugcauc

SEQ ID NO: 356665 - RNA, 16 nt, Human immunodeficiency virus 2 (HIV-2)
accgccaggaaacagu

SEQ ID NO: 356666 - RNA, 21 nt, Human immunodeficiency virus 2 (HIV-2)
acgagcccucuucgugcacuu

SEQ ID NO: 356667 - RNA, 12 nt, Human immunodeficiency virus 2 (HIV-2)
acggcaggugaa

SEQ ID NO: 356668 - RNA, 12 nt, Human immunodeficiency virus 2 (HIV-2)
acuauccaagaa

SEQ ID NO: 356669 - RNA, 14 nt, Human immunodeficiency virus 2 (HIV-2)
acucaauaguagca

SEQ ID NO: 356670 - RNA, 23 nt, Human immunodeficiency virus 2 (HIV-2)
acuccuucgccuucugcaccaga

SEQ ID NO: 356671 - RNA, 22 nt, Human immunodeficiency virus 2 (HIV-2)
acuccuugcccagcugcaccga

SEQ ID NO: 356672 - RNA, 17 nt, Human immunodeficiency virus 2 (HIV-2)
acucgcaguuccaagaa

SEQ ID NO: 356673 - RNA, 20 nt, Human immunodeficiency virus 2 (HIV-2)
acucgcccuccugugaggga

SEQ ID NO: 356674 - RNA, 13 nt, Human immunodeficiency virus 2 (HIV-2)
acugcaagggaug

SEQ ID NO: 356675 - RNA, 18 nt, Human immunodeficiency virus 2 (HIV-2)
agaaacccagcaacagaa

SEQ ID NO: 356676 - RNA, 21 nt, Human immunodeficiency virus 2 (HIV-2)
agaaaggguaccgccaggaaa

SEQ ID NO: 356677 - RNA, 13 nt, Human immunodeficiency virus 2 (HIV-2)
agaagcuuuccaa

SEQ ID NO: 356678 - RNA, 17 nt, Human immunodeficiency virus 2 (HIV-2)
agagacuuacuauccaa

SEQ ID NO: 356679 - RNA, 20 nt, Human immunodeficiency virus 2 (HIV-2)
agagcucauuuuccaggugu

SEQ ID NO: 356680 - RNA, 14 nt, Human immunodeficiency virus 2 (HIV-2)
agaggaccauagaa

SEQ ID NO: 356681 - RNA, 12 nt, Human immunodeficiency virus 2 (HIV-2)
agauagagccaa

SEQ ID NO: 356682 - RNA, 14 nt, Human immunodeficiency virus 2 (HIV-2)
agcaacagaaagac

SEQ ID NO: 356683 - RNA, 22 nt, Human immunodeficiency virus 2 (HIV-2)
agccugguaggaaucagcuguu

SEQ ID NO: 356684 - RNA, 18 nt, Human immunodeficiency virus 2 (HIV-2)
agccuuaagacauuuuga

SEQ ID NO: 356685 - RNA, 23 nt, Human immunodeficiency virus 2 (HIV-2)
agcgaugcaguuuccauugccag

SEQ ID NO: 356686 - RNA, 24 nt, Human immunodeficiency virus 2 (HIV-2)
aggaaacaguggagaagagaccau

SEQ ID NO: 356687 - RNA, 19 nt, Human immunodeficiency virus 2 (HIV-2)
aggaccauagaagccuuaa

SEQ ID NO: 356688 - RNA, 21 nt, Human immunodeficiency virus 2 (HIV-2)
aggagaagaacuccuugccca

SEQ ID NO: 356689 - RNA, 16 nt, Human immunodeficiency virus 2 (HIV-2)
aggaguuccuguuaca

SEQ ID NO: 356690 - RNA, 18 nt, Human immunodeficiency virus 2 (HIV-2)
aggcggcccaacugcaau

SEQ ID NO: 356691 - RNA, 22 nt, Human immunodeficiency virus 2 (HIV-2)
aguaacauugaagccagggaaa

SEQ ID NO: 356692 - RNA, 15 nt, Human immunodeficiency virus 2 (HIV-2)
aguaucagcagggag

SEQ ID NO: 356693 - RNA, 20 nt, Human immunodeficiency virus 2 (HIV-2)
agucuaacagcaaucaggga

SEQ ID NO: 356694 - RNA, 19 nt, Human immunodeficiency virus 2 (HIV-2)
agucuaaugacugaagcac

SEQ ID NO: 356695 - RNA, 22 nt, Human immunodeficiency virus 2 (HIV-2)
agucuaaugacugaagcaccaa

SEQ ID NO: 356696 - RNA, 12 nt, Human immunodeficiency virus 2 (HIV-2)
agugcuugccag

SEQ ID NO: 356697 - RNA, 16 nt, Human immunodeficiency virus 2 (HIV-2)
agugcuugccagacaa

SEQ ID NO: 356698 - RNA, 13 nt, Human immunodeficiency virus 2 (HIV-2)
auaaacaccaaag

SEQ ID NO: 356699 - RNA, 14 nt, Human immunodeficiency virus 2 (HIV-2)
auaaacaccaaaga

SEQ ID NO: 356700 - RNA, 17 nt, Human immunodeficiency virus 2 (HIV-2)
auaaacaccaaagaaua

SEQ ID NO: 356701 - RNA, 16 nt, Human immunodeficiency virus 2 (HIV-2)
auaaauuggcaauaga

SEQ ID NO: 356702 - RNA, 16 nt, Human immunodeficiency virus 2 (HIV-2)
auacucgcaguuccaa

SEQ ID NO: 356703 - RNA, 18 nt, Human immunodeficiency virus 2 (HIV-2)
auagaagccuuaaacagg

SEQ ID NO: 356704 - RNA, 20 nt, Human immunodeficiency virus 2 (HIV-2)
auagaauccuagacauauac

SEQ ID NO: 356705 - RNA, 18 nt, Human immunodeficiency virus 2 (HIV-2)
auaugggugcgaguggau

SEQ ID NO: 356706 - RNA, 22 nt, Human immunodeficiency virus 2 (HIV-2)
aucagcagggagaguacaugaa

SEQ ID NO: 356707 - RNA, 14 nt, Human immunodeficiency virus 2 (HIV-2)
auccccaagcucau

SEQ ID NO: 356708 - RNA, 22 nt, Human immunodeficiency virus 2 (HIV-2)
aucugcagagacuuacuaucca

SEQ ID NO: 356709 - RNA, 23 nt, Human immunodeficiency virus 2 (HIV-2)
augacaggagauaccccaaucaa

SEQ ID NO: 356710 - RNA, 20 nt, Human immunodeficiency virus 2 (HIV-2)
augaccuaauaggaguuccu

SEQ ID NO: 356711 - RNA, 22 nt, Human immunodeficiency virus 2 (HIV-2)
augggaccccacggagggacuu

SEQ ID NO: 356712 - RNA, 19 nt, Human immunodeficiency virus 2 (HIV-2)
augucagcaagcuacacaa

SEQ ID NO: 356713 - RNA, 20 nt, Human immunodeficiency virus 2 (HIV-2)
augucagcaagcuacacaaa

SEQ ID NO: 356714 - RNA, 21 nt, Human immunodeficiency virus 2 (HIV-2)
auucugaugaugaugaccuaa

SEQ ID NO: 356715 - RNA, 14 nt, Human immunodeficiency virus 2 (HIV-2)
auugaagccaggga

SEQ ID NO: 356716 - RNA, 20 nt, Human immunodeficiency virus 2 (HIV-2)
auuuaccaguugccaagaua

SEQ ID NO: 356717 - RNA, 17 nt, Human immunodeficiency virus 2 (HIV-2)
auuugugccuaaugcaa

SEQ ID NO: 356718 - RNA, 21 nt, Human immunodeficiency virus 2 (HIV-2)
caaaagagaaaauagaagcac

SEQ ID NO: 356719 - RNA, 14 nt, Human immunodeficiency virus 2 (HIV-2)
caacugcaauaugg

SEQ ID NO: 356720 - RNA, 16 nt, Human immunodeficiency virus 2 (HIV-2)
caagagagggugcacu

SEQ ID NO: 356721 - RNA, 17 nt, Human immunodeficiency virus 2 (HIV-2)
caauuacacuccaaaaa

SEQ ID NO: 356722 - RNA, 16 nt, Human immunodeficiency virus 2 (HIV-2)
cacaggggcugaugac

SEQ ID NO: 356723 - RNA, 21 nt, Human immunodeficiency virus 2 (HIV-2)
cagagucuaacagcaaucagg

SEQ ID NO: 356724 - RNA, 23 nt, Human immunodeficiency virus 2 (HIV-2)
cagagucuaacagcaaucaggga

SEQ ID NO: 356725 - RNA, 19 nt, Human immunodeficiency virus 2 (HIV-2)
cagcaaucagggacuggcu

SEQ ID NO: 356726 - RNA, 22 nt, Human immunodeficiency virus 2 (HIV-2)
cagccuuaggcaugucauuaaa

SEQ ID NO: 356727 - RNA, 23 nt, Human immunodeficiency virus 2 (HIV-2)
cagggagaguacaugaacagccc

SEQ ID NO: 356728 - RNA, 15 nt, Human immunodeficiency virus 2 (HIV-2)
cagggaggcagugaa

SEQ ID NO: 356729 - RNA, 19 nt, Human immunodeficiency virus 2 (HIV-2)
cagggaggcagugaaccau

SEQ ID NO: 356730 - RNA, 18 nt, Human immunodeficiency virus 2 (HIV-2)
caguuccaagaagaauca

SEQ ID NO: 356731 - RNA, 22 nt, Human immunodeficiency virus 2 (HIV-2)
caguuccugauccaccuacuga

SEQ ID NO: 356732 - RNA, 17 nt, Human immunodeficiency virus 2 (HIV-2)
caguuuccauugccagc

SEQ ID NO: 356733 - RNA, 18 nt, Human immunodeficiency virus 2 (HIV-2)
cauauaccuagaaaaaga

SEQ ID NO: 356734 - RNA, 21 nt, Human immunodeficiency virus 2 (HIV-2)
caucugccccgagagcucauu

SEQ ID NO: 356735 - RNA, 17 nt, Human immunodeficiency virus 2 (HIV-2)
caugaugaacaagggau

SEQ ID NO: 356736 - RNA, 14 nt, Human immunodeficiency virus 2 (HIV-2)
ccaagaagaaucag

SEQ ID NO: 356737 - RNA, 15 nt, Human immunodeficiency virus 2 (HIV-2)
ccaagauagagccaa

SEQ ID NO: 356738 - RNA, 17 nt, Human immunodeficiency virus 2 (HIV-2)
ccaagauagagccaaua

SEQ ID NO: 356739 - RNA, 21 nt, Human immunodeficiency virus 2 (HIV-2)
ccaauaaaaguaacauugaag

SEQ ID NO: 356740 - RNA, 21 nt, Human immunodeficiency virus 2 (HIV-2)
ccacggagagaaaugaccuau

SEQ ID NO: 356741 - RNA, 17 nt, Human immunodeficiency virus 2 (HIV-2)
ccagagucuaacagcaa

SEQ ID NO: 356742 - RNA, 22 nt, Human immunodeficiency virus 2 (HIV-2)
ccaggucuagucuaaugacuga

SEQ ID NO: 356743 - RNA, 14 nt, Human immunodeficiency virus 2 (HIV-2)
cccagcaacagaaa

SEQ ID NO: 356744 - RNA, 14 nt, Human immunodeficiency virus 2 (HIV-2)
ccccgagagcucau

SEQ ID NO: 356745 - RNA, 16 nt, Human immunodeficiency virus 2 (HIV-2)
cccucuucgugcacuu

SEQ ID NO: 356746 - RNA, 14 nt, Human immunodeficiency virus 2 (HIV-2)
ccuaacaaaagaga

SEQ ID NO: 356747 - RNA, 15 nt, Human immunodeficiency virus 2 (HIV-2)
ccugcuggacucuca

SEQ ID NO: 356748 - RNA, 16 nt, Human immunodeficiency virus 2 (HIV-2)
cgaguggauccaagaa

SEQ ID NO: 356749 - RNA, 22 nt, Human immunodeficiency virus 2 (HIV-2)
cggagggacuuagggagugacu

SEQ ID NO: 356750 - RNA, 20 nt, Human immunodeficiency virus 2 (HIV-2)
cgggcuauacaacaucugca

SEQ ID NO: 356751 - RNA, 13 nt, Human immunodeficiency virus 2 (HIV-2)
cgguguucaucug

SEQ ID NO: 356752 - RNA, 15 nt, Human immunodeficiency virus 2 (HIV-2)
cuaaauaaaagagua

SEQ ID NO: 356753 - RNA, 17 nt, Human immunodeficiency virus 2 (HIV-2)
cuacuauauccauaaua

SEQ ID NO: 356754 - RNA, 19 nt, Human immunodeficiency virus 2 (HIV-2)
cuagagccaugcacuaaca

SEQ ID NO: 356755 - RNA, 20 nt, Human immunodeficiency virus 2 (HIV-2)
cuagagccaugcacuaacaa

SEQ ID NO: 356756 - RNA, 20 nt, Human immunodeficiency virus 2 (HIV-2)
cuauauccauaauagacaug

SEQ ID NO: 356757 - RNA, 15 nt, Human immunodeficiency virus 2 (HIV-2)
cuauccaagaacucc

SEQ ID NO: 356758 - RNA, 20 nt, Human immunodeficiency virus 2 (HIV-2)
cucgaaaaaggggcucggaa

SEQ ID NO: 356759 - RNA, 16 nt, Human immunodeficiency virus 2 (HIV-2)
cucgcaguuccaagaa

SEQ ID NO: 356760 - RNA, 13 nt, Human immunodeficiency virus 2 (HIV-2)
cugacagccuuag

SEQ ID NO: 356761 - RNA, 23 nt, Human immunodeficiency virus 2 (HIV-2)
cugagagguucucuccagcacua

SEQ ID NO: 356762 - RNA, 23 nt, Human immunodeficiency virus 2 (HIV-2)
cugcaccgaccccuagagccaug

SEQ ID NO: 356763 - RNA, 15 nt, Human immunodeficiency virus 2 (HIV-2)
cugcagagacuuacu

SEQ ID NO: 356764 - RNA, 12 nt, Human immunodeficiency virus 2 (HIV-2)
cuuacuauccaa

SEQ ID NO: 356765 - RNA, 15 nt, Human immunodeficiency virus 2 (HIV-2)
gaaaacuaagacucc

SEQ ID NO: 356766 - RNA, 16 nt, Human immunodeficiency virus 2 (HIV-2)
gaaaauagaagcacua

SEQ ID NO: 356767 - RNA, 16 nt, Human immunodeficiency virus 2 (HIV-2)
gaacaagggaugucag

SEQ ID NO: 356768 - RNA, 15 nt, Human immunodeficiency virus 2 (HIV-2)
gaagaacuccuugcc

SEQ ID NO: 356769 - RNA, 17 nt, Human immunodeficiency virus 2 (HIV-2)
gaagaacuccuugccca

SEQ ID NO: 356770 - RNA, 20 nt, Human immunodeficiency virus 2 (HIV-2)
aauguacccgcuucuugcau

SEQ ID NO: 356771 - RNA, 15 nt, Human immunodeficiency virus 2 (HIV-2)
aauugcucuuggcua

SEQ ID NO: 356772 - RNA, 20 nt, Human immunodeficiency virus 2 (HIV-2)
acaccaagaguaccacggag

SEQ ID NO: 356773 - RNA, 23 nt, Human immunodeficiency virus 2 (HIV-2)
acagaaagauuuguauaggcagc

SEQ ID NO: 356774 - RNA, 15 nt, Human immunodeficiency virus 2 (HIV-2)
acagaccccagagaa

SEQ ID NO: 356775 - RNA, 17 nt, Human immunodeficiency virus 2 (HIV-2)
acagggaggcagugaac

SEQ ID NO: 356776 - RNA, 18 nt, Human immunodeficiency virus 2 (HIV-2)
acaguaggaggagacaua

SEQ ID NO: 356777 - RNA, 14 nt, Human immunodeficiency virus 2 (HIV-2)
acaucugcagagac

SEQ ID NO: 356778 - RNA, 16 nt, Human immunodeficiency virus 2 (HIV-2)
acauugaagccaggga

SEQ ID NO: 356779 - RNA, 17 nt, Human immunodeficiency virus 2 (HIV-2)
accauacagugcuugcc

SEQ ID NO: 356780 - RNA, 20 nt, Human immunodeficiency virus 2 (HIV-2)
accauacagugcuugccaga

SEQ ID NO: 356781 - RNA, 22 nt, Human immunodeficiency virus 2 (HIV-2)
accaucugccccgagagcucau

SEQ ID NO: 356782 - RNA, 13 nt, Human immunodeficiency virus 2 (HIV-2)
accuaauaggagu

SEQ ID NO: 356783 - RNA, 23 nt, Human immunodeficiency virus 2 (HIV-2)
accuagaaaaagaggaagggaua

SEQ ID NO: 356784 - RNA, 12 nt, Human immunodeficiency virus 2 (HIV-2)
acuacgagagag

SEQ ID NO: 356785 - RNA, 14 nt, Human immunodeficiency virus 2 (HIV-2)
acuagacacagggg

SEQ ID NO: 356786 - RNA, 12 nt, Human immunodeficiency virus 2 (HIV-2)
acuccaaaaaua

SEQ ID NO: 356787 - RNA, 18 nt, Human immunodeficiency virus 2 (HIV-2)
acuccaaggaaaacuaag

SEQ ID NO: 356788 - RNA, 20 nt, Human immunodeficiency virus 2 (HIV-2)
acucucacaagaggcagagg

SEQ ID NO: 356789 - RNA, 17 nt, Human immunodeficiency virus 2 (HIV-2)
acugaagcaccaacaga

SEQ ID NO: 356790 - RNA, 20 nt, Human immunodeficiency virus 2 (HIV-2)
acuugggggaccauacagug

SEQ ID NO: 356791 - RNA, 12 nt, Human immunodeficiency virus 2 (HIV-2)
agaaaugaccua

SEQ ID NO: 356792 - RNA, 18 nt, Human immunodeficiency virus 2 (HIV-2)
agaacuccuugcccagcu

SEQ ID NO: 356793 - RNA, 13 nt, Human immunodeficiency virus 2 (HIV-2)
agaagaaucaggc

SEQ ID NO: 356794 - RNA, 15 nt, Human immunodeficiency virus 2 (HIV-2)
agaauuaggggacaa

SEQ ID NO: 356795 - RNA, 21 nt, Human immunodeficiency virus 2 (HIV-2)
agaauuaggggacaauuacac

SEQ ID NO: 356796 - RNA, 16 nt, Human immunodeficiency virus 2 (HIV-2)
agacaaugaugauuau

SEQ ID NO: 356797 - RNA, 21 nt, Human immunodeficiency virus 2 (HIV-2)
agacacuugggggaccauaca

SEQ ID NO: 356798 - RNA, 17 nt, Human immunodeficiency virus 2 (HIV-2)
agacauauaccuagaaa

SEQ ID NO: 356799 - RNA, 22 nt, Human immunodeficiency virus 2 (HIV-2)
agaccauuggagaggccuucga

SEQ ID NO: 356800 - RNA, 21 nt, Human immunodeficiency virus 2 (HIV-2)
agacuuacuauccaagaacuc

SEQ ID NO: 356801 - RNA, 22 nt, Human immunodeficiency virus 2 (HIV-2)
agagaaaggguaccgccaggaa

SEQ ID NO: 356802 - RNA, 18 nt, Human immunodeficiency virus 2 (HIV-2)
agagccuggguguucccu

SEQ ID NO: 356803 - RNA, 16 nt, Human immunodeficiency virus 2 (HIV-2)
agagguucucuccagc

SEQ ID NO: 356804 - RNA, 18 nt, Human immunodeficiency virus 2 (HIV-2)
agcacagguaccaucacu

SEQ ID NO: 356805 - RNA, 14 nt, Human immunodeficiency virus 2 (HIV-2)
agcacuaaaagaga

SEQ ID NO: 356806 - RNA, 16 nt, Human immunodeficiency virus 2 (HIV-2)
aggcggcccaacugca

SEQ ID NO: 356807 - RNA, 14 nt, Human immunodeficiency virus 2 (HIV-2)
agggagaguacaug

SEQ ID NO: 356808 - RNA, 17 nt, Human immunodeficiency virus 2 (HIV-2)
agggagaguacaugaac

SEQ ID NO: 356809 - RNA, 14 nt, Human immunodeficiency virus 2 (HIV-2)
agggaggcagugaa

SEQ ID NO: 356810 - RNA, 15 nt, Human immunodeficiency virus 2 (HIV-2)
aguaagaagagccau

SEQ ID NO: 356811 - RNA, 14 nt, Human immunodeficiency virus 2 (HIV-2)
aguagaacucucac

SEQ ID NO: 356812 - RNA, 14 nt, Human immunodeficiency virus 2 (HIV-2)
aguggauccaagaa

SEQ ID NO: 356813 - RNA, 19 nt, Human immunodeficiency virus 2 (HIV-2)
aguuauuguccugcugcaa

SEQ ID NO: 356814 - RNA, 18 nt, Human immunodeficiency virus 2 (HIV-2)
auacucaugggccaggag

SEQ ID NO: 356815 - RNA, 15 nt, Human immunodeficiency virus 2 (HIV-2)
auagaagcacuaaaa

SEQ ID NO: 356816 - RNA, 21 nt, Human immunodeficiency virus 2 (HIV-2)
auagaauccuagacauauacc

SEQ ID NO: 356817 - RNA, 14 nt, Human immunodeficiency virus 2 (HIV-2)
auagauaugucaca

SEQ ID NO: 356818 - RNA, 20 nt, Human immunodeficiency virus 2 (HIV-2)
auaggcagcaaaauauggau

SEQ ID NO: 356819 - RNA, 23 nt, Human immunodeficiency virus 2 (HIV-2)
auaucauaugagcgaaagggcag

SEQ ID NO: 356820 - RNA, 17 nt, Human immunodeficiency virus 2 (HIV-2)
auauuuacacauuucaa

SEQ ID NO: 356821 - RNA, 20 nt, Human immunodeficiency virus 2 (HIV-2)
aucagcagggagaguacaug

SEQ ID NO: 356822 - RNA, 17 nt, Human immunodeficiency virus 2 (HIV-2)
auccaagaagcuuucca

SEQ ID NO: 356823 - RNA, 18 nt, Human immunodeficiency virus 2 (HIV-2)
auccaagaagcuuuccaa

SEQ ID NO: 356824 - RNA, 23 nt, Human immunodeficiency virus 2 (HIV-2)
aucugcagagacuuacuauccaa

SEQ ID NO: 356825 - RNA, 14 nt, Human immunodeficiency virus 2 (HIV-2)
augaugaugaccua

SEQ ID NO: 356826 - RNA, 13 nt, Human immunodeficiency virus 2 (HIV-2)
augcacuaacaaa

SEQ ID NO: 356827 - RNA, 20 nt, Human immunodeficiency virus 2 (HIV-2)
augcaguuuccauugccagc

SEQ ID NO: 356828 - RNA, 12 nt, Human immunodeficiency virus 2 (HIV-2)
auggaccaaggc

SEQ ID NO: 356829 - RNA, 19 nt, Human immunodeficiency virus 2 (HIV-2)
auuggcaugaugaacaagg

SEQ ID NO: 356830 - RNA, 18 nt, Human immunodeficiency virus 2 (HIV-2)
auuuauaaacaccaaaga

SEQ ID NO: 356831 - RNA, 22 nt, Human immunodeficiency virus 2 (HIV-2)
caaaaugacagaccccagagaa

SEQ ID NO: 356832 - RNA, 19 nt, Human immunodeficiency virus 2 (HIV-2)
caaaguauagauauuugug

SEQ ID NO: 356833 - RNA, 13 nt, Human immunodeficiency virus 2 (HIV-2)
caaaugcuauugu

SEQ ID NO: 356834 - RNA, 20 nt, Human immunodeficiency virus 2 (HIV-2)
caacaucuuuggcagaaaua

SEQ ID NO: 356835 - RNA, 12 nt, Human immunodeficiency virus 2 (HIV-2)
caacugcaauau

SEQ ID NO: 356836 - RNA, 17 nt, Human immunodeficiency virus 2 (HIV-2)
caagagagggugcacuu

SEQ ID NO: 356837 - RNA, 17 nt, Human immunodeficiency virus 2 (HIV-2)
caauaguagcaggaaua

SEQ ID NO: 356838 - RNA, 20 nt, Human immunodeficiency virus 2 (HIV-2)
caauggccccuaacaaaaga

SEQ ID NO: 356839 - RNA, 22 nt, Human immunodeficiency virus 2 (HIV-2)
caauggccccuaacaaaagaga

SEQ ID NO: 356840 - RNA, 19 nt, Human immunodeficiency virus 2 (HIV-2)
caccaaagaauacaaaaau

SEQ ID NO: 356841 - RNA, 16 nt, Human immunodeficiency virus 2 (HIV-2)
caccagacaagugagu

SEQ ID NO: 356842 - RNA, 20 nt, Human immunodeficiency virus 2 (HIV-2)
caccauaaugacaggagaua

SEQ ID NO: 356843 - RNA, 16 nt, Human immunodeficiency virus 2 (HIV-2)
cagaaagacagaaaga

SEQ ID NO: 356844 - RNA, 23 nt, Human immunodeficiency virus 2 (HIV-2)
cagacaaugaugauuaucaggaa

SEQ ID NO: 356845 - RNA, 22 nt, Human immunodeficiency virus 2 (HIV-2)
cagagcgggauguaaccgcuca

SEQ ID NO: 356846 - RNA, 20 nt, Human immunodeficiency virus 2 (HIV-2)
cagcagggagaguacaugaa

SEQ ID NO: 356847 - RNA, 16 nt, Human immunodeficiency virus 2 (HIV-2)
cagggagcagaacucg

SEQ ID NO: 356848 - RNA, 22 nt, Human immunodeficiency virus 2 (HIV-2)
caggugaaguaagaagagccau

SEQ ID NO: 356849 - RNA, 19 nt, Human immunodeficiency virus 2 (HIV-2)
caguagaacucucacaaga

SEQ ID NO: 356850 - RNA, 21 nt, Human immunodeficiency virus 2 (HIV-2)
caguaucagcagggagaguac

SEQ ID NO: 356851 - RNA, 14 nt, Human immunodeficiency virus 2 (HIV-2)
cagugcuugccaga

SEQ ID NO: 356852 - RNA, 15 nt, Human immunodeficiency virus 2 (HIV-2)
caguuccugauccac

SEQ ID NO: 356853 - RNA, 13 nt, Human immunodeficiency virus 2 (HIV-2)
cauacagugcuug

SEQ ID NO: 356854 - RNA, 20 nt, Human immunodeficiency virus 2 (HIV-2)
caucagaggggaaaaguuau

SEQ ID NO: 356855 - RNA, 18 nt, Human immunodeficiency virus 2 (HIV-2)
caucugcagagacuuacu

SEQ ID NO: 356856 - RNA, 21 nt, Human immunodeficiency virus 2 (HIV-2)
caugcacuaacaaaugcuauu

SEQ ID NO: 356857 - RNA, 22 nt, Human immunodeficiency virus 2 (HIV-2)
cauggagaaacccagcaacaga

SEQ ID NO: 356858 - RNA, 18 nt, Human immunodeficiency virus 2 (HIV-2)
cauucgcgaggacuacga

SEQ ID NO: 356859 - RNA, 22 nt, Human immunodeficiency virus 2 (HIV-2)
ggggaccauacagugcuugcca

SEQ ID NO: 356860 - RNA, 19 nt, Human immunodeficiency virus 2 (HIV-2)
guaagcgaugcaguuucca

SEQ ID NO: 356861 - RNA, 17 nt, Human immunodeficiency virus 2 (HIV-2)
guacaacaaaaugacag

SEQ ID NO: 356862 - RNA, 15 nt, Human immunodeficiency virus 2 (HIV-2)
guaccaucacuucaa

SEQ ID NO: 356863 - RNA, 24 nt, Human immunodeficiency virus 2 (HIV-2)
gucaaggcaggaaguagcuacuaa

SEQ ID NO: 356864 - RNA, 20 nt, Human immunodeficiency virus 2 (HIV-2)
gucuaaugacugaagcacca

SEQ ID NO: 356865 - RNA, 13 nt, Human immunodeficiency virus 2 (HIV-2)
gugaaccaucugc

SEQ ID NO: 356866 - RNA, 16 nt, Human immunodeficiency virus 2 (HIV-2)
gugaguauggagccug

SEQ ID NO: 356867 - RNA, 17 nt, Human immunodeficiency virus 2 (HIV-2)
gugcaguuccugaucca

SEQ ID NO: 356868 - RNA, 13 nt, Human immunodeficiency virus 2 (HIV-2)
guuuccauugcca

SEQ ID NO: 356869 - RNA, 17 nt, Human immunodeficiency virus 2 (HIV-2)
uaaaagagaucugugaa

SEQ ID NO: 356870 - RNA, 14 nt, Human immunodeficiency virus 2 (HIV-2)
uaaacaccaaagaa

SEQ ID NO: 356871 - RNA, 16 nt, Human immunodeficiency virus 2 (HIV-2)
uaaacaccaaagaaua

SEQ ID NO: 356872 - RNA, 17 nt, Human immunodeficiency virus 2 (HIV-2)
uaaagcacagguaccau

SEQ ID NO: 356873 - RNA, 18 nt, Human immunodeficiency virus 2 (HIV-2)
uaaauuuaccaguugcca

SEQ ID NO: 356874 - RNA, 13 nt, Human immunodeficiency virus 2 (HIV-2)
uaagcgaugcagu

SEQ ID NO: 356875 - RNA, 21 nt, Human immunodeficiency virus 2 (HIV-2)
uaaggcggcccaacugcaaua

SEQ ID NO: 356876 - RNA, 15 nt, Human immunodeficiency virus 2 (HIV-2)
uaaguguguguuccc

SEQ ID NO: 356877 - RNA, 17 nt, Human immunodeficiency virus 2 (HIV-2)
uacaccaagaguaccac

SEQ ID NO: 356878 - RNA, 22 nt, Human immunodeficiency virus 2 (HIV-2)
uacaccaagaguaccacggaga

SEQ ID NO: 356879 - RNA, 20 nt, Human immunodeficiency virus 2 (HIV-2)
uacaguaggaggagacauag

SEQ ID NO: 356880 - RNA, 16 nt, Human immunodeficiency virus 2 (HIV-2)
uacagugcuugccaga

SEQ ID NO: 356881 - RNA, 19 nt, Human immunodeficiency virus 2 (HIV-2)
uacagugcuugccagacaa

SEQ ID NO: 356882 - RNA, 21 nt, Human immunodeficiency virus 2 (HIV-2)
uacaugaacagcccauggaga

SEQ ID NO: 356883 - RNA, 20 nt, Human immunodeficiency virus 2 (HIV-2)
uacccgcguggaaaaaugca

SEQ ID NO: 356884 - RNA, 18 nt, Human immunodeficiency virus 2 (HIV-2)
uaccuagaaaaagaggaa

SEQ ID NO: 356885 - RNA, 15 nt, Human immunodeficiency virus 2 (HIV-2)
uacgagagagacucu

SEQ ID NO: 356886 - RNA, 20 nt, Human immunodeficiency virus 2 (HIV-2)
uacuaacaagugcuugcuua

SEQ ID NO: 356887 - RNA, 17 nt, Human immunodeficiency virus 2 (HIV-2)
uacuauccaagaacucc

SEQ ID NO: 356888 - RNA, 11 nt, Human immunodeficiency virus 2 (HIV-2)
uacuuggucaa

SEQ ID NO: 356889 - RNA, 17 nt, Human immunodeficiency virus 2 (HIV-2)
uagaaauaaaaguacua

SEQ ID NO: 356890 - RNA, 18 nt, Human immunodeficiency virus 2 (HIV-2)
uagaaauaaaaguacuaa

SEQ ID NO: 356891 - RNA, 17 nt, Human immunodeficiency virus 2 (HIV-2)
uagacauauaccuagaa

SEQ ID NO: 356892 - RNA, 18 nt, Human immunodeficiency virus 2 (HIV-2)
uagacauauaccuagaaa

SEQ ID NO: 356893 - RNA, 17 nt, Human immunodeficiency virus 2 (HIV-2)
uagagaggaccauagaa

SEQ ID NO: 356894 - RNA, 10 nt, Human immunodeficiency virus 2 (HIV-2)
uagagccaug

SEQ ID NO: 356895 - RNA, 22 nt, Human immunodeficiency virus 2 (HIV-2)
uaggcaugucauuaaauuuacc

SEQ ID NO: 356896 - RNA, 18 nt, Human immunodeficiency virus 2 (HIV-2)
uagucgccgccuggucau

SEQ ID NO: 356897 - RNA, 15 nt, Human immunodeficiency virus 2 (HIV-2)
uauaaacaccaaaga

SEQ ID NO: 356898 - RNA, 23 nt, Human immunodeficiency virus 2 (HIV-2)
uaucaguagaacucucacaagag

SEQ ID NO: 356899 - RNA, 19 nt, Human immunodeficiency virus 2 (HIV-2)
uauuguaagcgaugcaguu

SEQ ID NO: 356900 - RNA, 22 nt, Human immunodeficiency virus 2 (HIV-2)
ucaagagagggugcacuugcug

SEQ ID NO: 356901 - RNA, 18 nt, Human immunodeficiency virus 2 (HIV-2)
ucacaagaggcagaggaa

SEQ ID NO: 356902 - RNA, 22 nt, Human immunodeficiency virus 2 (HIV-2)
ucagcagggagaguacaugaac

SEQ ID NO: 356903 - RNA, 17 nt, Human immunodeficiency virus 2 (HIV-2)
ucaggcagggagcagaa

SEQ ID NO: 356904 - RNA, 22 nt, Human immunodeficiency virus 2 (HIV-2)
ucagggacuggcugagacuuaa

SEQ ID NO: 356905 - RNA, 15 nt, Human immunodeficiency virus 2 (HIV-2)
ucauuuuccaggugu

SEQ ID NO: 356906 - RNA, 19 nt, Human immunodeficiency virus 2 (HIV-2)
uccaagaagaaucaggcag

SEQ ID NO: 356907 - RNA, 12 nt, Human immunodeficiency virus 2 (HIV-2)
uccauugccagc

SEQ ID NO: 356908 - RNA, 14 nt, Human immunodeficiency virus 2 (HIV-2)
uccauugccagcug

SEQ ID NO: 356909 - RNA, 19 nt, Human immunodeficiency virus 2 (HIV-2)
ucccagagucuaacagcaa

SEQ ID NO: 356910 - RNA, 14 nt, Human immunodeficiency virus 2 (HIV-2)
uccuguuacaccaa

SEQ ID NO: 356911 - RNA, 19 nt, Human immunodeficiency virus 2 (HIV-2)
ucgccuucugcaccagaca

SEQ ID NO: 356912 - RNA, 16 nt, Human immunodeficiency virus 2 (HIV-2)
ucucacaagaggcaga

SEQ ID NO: 356913 - RNA, 21 nt, Human immunodeficiency virus 2 (HIV-2)
ucuugcuuuacggcaggugaa

SEQ ID NO: 356914 - RNA, 18 nt, Human immunodeficiency virus 2 (HIV-2)
ugacagaccccagagaaa

SEQ ID NO: 356915 - RNA, 12 nt, Human immunodeficiency virus 2 (HIV-2)
ugcaccagacaa

SEQ ID NO: 356916 - RNA, 17 nt, Human immunodeficiency virus 2 (HIV-2)
ugcacuaacaaaugcua

SEQ ID NO: 356917 - RNA, 16 nt, Human immunodeficiency virus 2 (HIV-2)
ugcaguuuccauugcc

SEQ ID NO: 356918 - RNA, 17 nt, Human immunodeficiency virus 2 (HIV-2)
ugcaguuuccauugcca

SEQ ID NO: 356919 - RNA, 16 nt, Human immunodeficiency virus 2 (HIV-2)
ugccaagauagagcca

SEQ ID NO: 356920 - RNA, 17 nt, Human immunodeficiency virus 2 (HIV-2)
ugccaagauagagccaa

SEQ ID NO: 356921 - RNA, 17 nt, Human immunodeficiency virus 2 (HIV-2)
ugccagcuguguuucuc

SEQ ID NO: 356922 - RNA, 18 nt, Human immunodeficiency virus 2 (HIV-2)
uggagaaacccagcaaca

SEQ ID NO: 356923 - RNA, 12 nt, Human immunodeficiency virus 2 (HIV-2)
uggauccaagaa

SEQ ID NO: 356924 - RNA, 13 nt, Human immunodeficiency virus 2 (HIV-2)
uggaugauguaga

SEQ ID NO: 356925 - RNA, 15 nt, Human immunodeficiency virus 2 (HIV-2)
uguaagcgaugcagu

SEQ ID NO: 356926 - RNA, 12 nt, Human immunodeficiency virus 2 (HIV-2)
uguauaggcagc

SEQ ID NO: 356927 - RNA, 13 nt, Human immunodeficiency virus 2 (HIV-2)
ugucauuuuacua

SEQ ID NO: 356928 - RNA, 15 nt, Human immunodeficiency virus 2 (HIV-2)
ugugacuguuuucua

SEQ ID NO: 356929 - RNA, 17 nt, Human immunodeficiency virus 2 (HIV-2)
uuaaguguguguuccca

SEQ ID NO: 356930 - RNA, 14 nt, Human immunodeficiency virus 2 (HIV-2)
uuacacuccaaaaa

SEQ ID NO: 356931 - RNA, 15 nt, Human immunodeficiency virus 2 (HIV-2)
uuacacuccaaaaau

SEQ ID NO: 356932 - RNA, 23 nt, Human immunodeficiency virus 2 (HIV-2)
uuauaaacaccaaagaauacaaa

SEQ ID NO: 356933 - RNA, 18 nt, Human immunodeficiency virus 2 (HIV-2)
uugcuuuacggcagguga

SEQ ID NO: 356934 - RNA, 20 nt, Human immunodeficiency virus 2 (HIV-2)
uuguugucauuuuacuaaca

SEQ ID NO: 356935 - RNA, 13 nt, Human immunodeficiency virus 2 (HIV-2)
uuuacaguaggag

SEQ ID NO: 356936 - RNA, 15 nt, Human immunodeficiency virus 2 (HIV-2)
uuucccccagaagau

SEQ ID NO: 356937 - RNA, 17 nt, Human immunodeficiency virus 2 (HIV-2)
uuucucgaaaaaggggc

SEQ ID NO: 356938 - RNA, 21 nt, Human immunodeficiency virus 2 (HIV-2)
aaaaagaggaagggauaauac

SEQ ID NO: 356939 - RNA, 22 nt, Human immunodeficiency virus 2 (HIV-2)
aaaaaggggcucggaauaucau

SEQ ID NO: 356940 - RNA, 12 nt, Human immunodeficiency virus 2 (HIV-2)
aaaagagaaaau

SEQ ID NO: 356941 - RNA, 17 nt, Human immunodeficiency virus 2 (HIV-2)
aaaagagaucugugaaa

SEQ ID NO: 356942 - RNA, 14 nt, Human immunodeficiency virus 2 (HIV-2)
aaaaguacuaaaua

SEQ ID NO: 356943 - RNA, 12 nt, Human immunodeficiency virus 2 (HIV-2)
aaacaccaaaga

SEQ ID NO: 356944 - RNA, 21 nt, Human immunodeficiency virus 2 (HIV-2)
aaacaguggagaagagaccau

SEQ ID NO: 356945 - RNA, 12 nt, Human immunodeficiency virus 2 (HIV-2)
aaauaaaagagu

SEQ ID NO: 356946 - RNA, 15 nt, Human immunodeficiency virus 2 (HIV-2)
aaauaaaaguacuaa

SEQ ID NO: 356947 - RNA, 17 nt, Human immunodeficiency virus 2 (HIV-2)
aaauagaagcacuaaaa

SEQ ID NO: 356948 - RNA, 19 nt, Human immunodeficiency virus 2 (HIV-2)
aaauauucugacagccuua

SEQ ID NO: 356949 - RNA, 17 nt, Human immunodeficiency virus 2 (HIV-2)
aacagggaggcagugaa

SEQ ID NO: 356950 - RNA, 22 nt, Human immunodeficiency virus 2 (HIV-2)
aacgagcccucuucgugcacuu

SEQ ID NO: 356951 - RNA, 19 nt, Human immunodeficiency virus 2 (HIV-2)
aacuauccccaagcucaua

SEQ ID NO: 356952 - RNA, 23 nt, Human immunodeficiency virus 2 (HIV-2)
aacuccuugcccagcugcaccga

SEQ ID NO: 356953 - RNA, 16 nt, Human immunodeficiency virus 2 (HIV-2)
aagaacuccuugccca

SEQ ID NO: 356954 - RNA, 15 nt, Human immunodeficiency virus 2 (HIV-2)
aagaauacaaaaaug

SEQ ID NO: 356955 - RNA, 18 nt, Human immunodeficiency virus 2 (HIV-2)
aagagccaccauaaugac

SEQ ID NO: 356956 - RNA, 18 nt, Human immunodeficiency virus 2 (HIV-2)
aagaguaagagccaccau

SEQ ID NO: 356957 - RNA, 19 nt, Human immunodeficiency virus 2 (HIV-2)
aagcacagguaccaucacu

SEQ ID NO: 356958 - RNA, 16 nt, Human immunodeficiency virus 2 (HIV-2)
aagcuauauuuacaca

SEQ ID NO: 356959 - RNA, 17 nt, Human immunodeficiency virus 2 (HIV-2)
aagcuauauuuacacau

SEQ ID NO: 356960 - RNA, 18 nt, Human immunodeficiency virus 2 (HIV-2)
aagcucauaaagcacagg

SEQ ID NO: 356961 - RNA, 20 nt, Human immunodeficiency virus 2 (HIV-2)
aaggauuggaagaccaagga

SEQ ID NO: 356962 - RNA, 17 nt, Human immunodeficiency virus 2 (HIV-2)
aaguaagaagagccauc

SEQ ID NO: 356963 - RNA, 21 nt, Human immunodeficiency virus 2 (HIV-2)
aaguaagaagagccaucagag

SEQ ID NO: 356964 - RNA, 21 nt, Human immunodeficiency virus 2 (HIV-2)
aagucuuacuagacacagggg

SEQ ID NO: 356965 - RNA, 20 nt, Human immunodeficiency virus 2 (HIV-2)
aauaaaagaguaagagccac

SEQ ID NO: 356966 - RNA, 16 nt, Human immunodeficiency virus 2 (HIV-2)
aauaaaaguacuaaau

SEQ ID NO: 356967 - RNA, 13 nt, Human immunodeficiency virus 2 (HIV-2)
aaugcaaaaagcu

SEQ ID NO: 356968 - RNA, 16 nt, Human immunodeficiency virus 2 (HIV-2)
aaugcaaaaagcuaua

SEQ ID NO: 356969 - RNA, 19 nt, Human immunodeficiency virus 2 (HIV-2)
aauggccccuaacaaaaga

SEQ ID NO: 356970 - RNA, 13 nt, Human immunodeficiency virus 2 (HIV-2)
cauuucaagagag

SEQ ID NO: 356971 - RNA, 23 nt, Human immunodeficiency virus 2 (HIV-2)
cauuucaagagagggugcacuug

SEQ ID NO: 356972 - RNA, 21 nt, Human immunodeficiency virus 2 (HIV-2)
cauuuuacuaacaagugcuug

SEQ ID NO: 356973 - RNA, 16 nt, Human immunodeficiency virus 2 (HIV-2)
ccagagucuaacagca

SEQ ID NO: 356974 - RNA, 18 nt, Human immunodeficiency virus 2 (HIV-2)
ccagagucuaacagcaau

SEQ ID NO: 356975 - RNA, 16 nt, Human immunodeficiency virus 2 (HIV-2)
ccaggaaacaguggag

SEQ ID NO: 356976 - RNA, 22 nt, Human immunodeficiency virus 2 (HIV-2)
ccauacagugcuugccagacaa

SEQ ID NO: 356977 - RNA, 12 nt, Human immunodeficiency virus 2 (HIV-2)
ccccaagcucau

SEQ ID NO: 356978 - RNA, 17 nt, Human immunodeficiency virus 2 (HIV-2)
cccuacaacgagcccuc

SEQ ID NO: 356979 - RNA, 13 nt, Human immunodeficiency virus 2 (HIV-2)
cccuagagccaug

SEQ ID NO: 356980 - RNA, 23 nt, Human immunodeficiency virus 2 (HIV-2)
ccgaccccuagagccaugcacua

SEQ ID NO: 356981 - RNA, 13 nt, Human immunodeficiency virus 2 (HIV-2)
ccuagaaaaagag

SEQ ID NO: 356982 - RNA, 16 nt, Human immunodeficiency virus 2 (HIV-2)
ccuagaaaaagaggaa

SEQ ID NO: 356983 - RNA, 19 nt, Human immunodeficiency virus 2 (HIV-2)
ccuauaaauuggcaauaga

SEQ ID NO: 356984 - RNA, 15 nt, Human immunodeficiency virus 2 (HIV-2)
ccucuucgugcacuu

SEQ ID NO: 356985 - RNA, 21 nt, Human immunodeficiency virus 2 (HIV-2)
ccuuauuuugugcaacuaaaa

SEQ ID NO: 356986 - RNA, 19 nt, Human immunodeficiency virus 2 (HIV-2)
ccuugaaggcgccagagag

SEQ ID NO: 356987 - RNA, 16 nt, Human immunodeficiency virus 2 (HIV-2)
cgaagaaggacuccaa

SEQ ID NO: 356988 - RNA, 16 nt, Human immunodeficiency virus 2 (HIV-2)
cgaccccuagagccau

SEQ ID NO: 356989 - RNA, 19 nt, Human immunodeficiency virus 2 (HIV-2)
cgaccccuagagccaugca

SEQ ID NO: 356990 - RNA, 21 nt, Human immunodeficiency virus 2 (HIV-2)
cgagcccugagagguucucuc

SEQ ID NO: 356991 - RNA, 14 nt, Human immunodeficiency virus 2 (HIV-2)
cgaugcaguuucca

SEQ ID NO: 356992 - RNA, 15 nt, Human immunodeficiency virus 2 (HIV-2)
cgccagagagcucau

SEQ ID NO: 356993 - RNA, 15 nt, Human immunodeficiency virus 2 (HIV-2)
cgguagaagucuuac

SEQ ID NO: 356994 - RNA, 16 nt, Human immunodeficiency virus 2 (HIV-2)
cguggaaaaaugcauc

SEQ ID NO: 356995 - RNA, 23 nt, Human immunodeficiency virus 2 (HIV-2)
cuaaaagagaucugugaaaaaau

SEQ ID NO: 356996 - RNA, 23 nt, Human immunodeficiency virus 2 (HIV-2)
cuaaauaaaagaguaagagccac

SEQ ID NO: 356997 - RNA, 19 nt, Human immunodeficiency virus 2 (HIV-2)
cuaaugcaaaaagcuauau

SEQ ID NO: 356998 - RNA, 21 nt, Human immunodeficiency virus 2 (HIV-2)
cuaauugcucuuggcuacuau

SEQ ID NO: 356999 - RNA, 16 nt, Human immunodeficiency virus 2 (HIV-2)
cuagagccaugcacua

SEQ ID NO: 357000 - RNA, 14 nt, Human immunodeficiency virus 2 (HIV-2)
cuauaaauuggcaa

SEQ ID NO: 357001 - RNA, 18 nt, Human immunodeficiency virus 2 (HIV-2)
cuauccaagaacuccccg

SEQ ID NO: 357002 - RNA, 18 nt, Human immunodeficiency virus 2 (HIV-2)
cuccuucgccuucugcac

SEQ ID NO: 357003 - RNA, 16 nt, Human immunodeficiency virus 2 (HIV-2)
cucuuggcuacuauau

SEQ ID NO: 357004 - RNA, 23 nt, Human immunodeficiency virus 2 (HIV-2)
cugaagcaccaacagaguuuccc

SEQ ID NO: 357005 - RNA, 18 nt, Human immunodeficiency virus 2 (HIV-2)
cugauccaccuacugacu

SEQ ID NO: 357006 - RNA, 20 nt, Human immunodeficiency virus 2 (HIV-2)
cuggacucucaccaguacuu

SEQ ID NO: 357007 - RNA, 16 nt, Human immunodeficiency virus 2 (HIV-2)
cuguaaccaagggagg

SEQ ID NO: 357008 - RNA, 18 nt, Human immunodeficiency virus 2 (HIV-2)
cuguuacaccaagaguac

SEQ ID NO: 357009 - RNA, 14 nt, Human immunodeficiency virus 2 (HIV-2)
cuuauuuugugcaa

SEQ ID NO: 357010 - RNA, 14 nt, Human immunodeficiency virus 2 (HIV-2)
gaaacccagcaaca

SEQ ID NO: 357011 - RNA, 23 nt, Human immunodeficiency virus 2 (HIV-2)
gaaaugaccuauaaauuggcaau

SEQ ID NO: 357012 - RNA, 21 nt, Human immunodeficiency virus 2 (HIV-2)
gaagcaccaacagaguuuccc

SEQ ID NO: 357013 - RNA, 18 nt, Human immunodeficiency virus 2 (HIV-2)
gaagccuuaaacagggag

SEQ ID NO: 357014 - RNA, 14 nt, Human immunodeficiency virus 2 (HIV-2)
gaagccuuaagaca

SEQ ID NO: 357015 - RNA, 15 nt, Human immunodeficiency virus 2 (HIV-2)
gaagcuuuccaagca

SEQ ID NO: 357016 - RNA, 17 nt, Human immunodeficiency virus 2 (HIV-2)
gaaguaagaagagccau

SEQ ID NO: 357017 - RNA, 21 nt, Human immunodeficiency virus 2 (HIV-2)
gaaguaagaagagccaucaga

SEQ ID NO: 357018 - RNA, 19 nt, Human immunodeficiency virus 2 (HIV-2)
gaauacaaaaauguagaaa

SEQ ID NO: 357019 - RNA, 18 nt, Human immunodeficiency virus 2 (HIV-2)
gaauacucgcaguuccaa

SEQ ID NO: 357020 - RNA, 21 nt, Human immunodeficiency virus 2 (HIV-2)
gaauacucgcaguuccaagaa

SEQ ID NO: 357021 - RNA, 20 nt, Human immunodeficiency virus 2 (HIV-2)
gaaucaggcagggagcagaa

SEQ ID NO: 357022 - RNA, 14 nt, Human immunodeficiency virus 2 (HIV-2)
gacagaaagauuug

SEQ ID NO: 357023 - RNA, 12 nt, Human immunodeficiency virus 2 (HIV-2)
gaccaaggaccu

SEQ ID NO: 357024 - RNA, 20 nt, Human immunodeficiency virus 2 (HIV-2)
gacuacgagagagacucuug

SEQ ID NO: 357025 - RNA, 14 nt, Human immunodeficiency virus 2 (HIV-2)
gacugaagcaccaa

SEQ ID NO: 357026 - RNA, 18 nt, Human immunodeficiency virus 2 (HIV-2)
gacuuacuauccaagaac

SEQ ID NO: 357027 - RNA, 19 nt, Human immunodeficiency virus 2 (HIV-2)
gagacacccuugaaggcgc

SEQ ID NO: 357028 - RNA, 12 nt, Human immunodeficiency virus 2 (HIV-2)
gagacauagaau

SEQ ID NO: 357029 - RNA, 13 nt, Human immunodeficiency virus 2 (HIV-2)
gagaucugugaaa

SEQ ID NO: 357030 - RNA, 22 nt, Human immunodeficiency virus 2 (HIV-2)
gagggacuuagggagugacugg

SEQ ID NO: 357031 - RNA, 17 nt, Human immunodeficiency virus 2 (HIV-2)
gaggggaauacucgcag

SEQ ID NO: 357032 - RNA, 16 nt, Human immunodeficiency virus 2 (HIV-2)
gagucuaacagcaauc

SEQ ID NO: 357033 - RNA, 17 nt, Human immunodeficiency virus 2 (HIV-2)
gagucuaacagcaauca

SEQ ID NO: 357034 - RNA, 15 nt, Human immunodeficiency virus 2 (HIV-2)
gauauuugugccuaa

SEQ ID NO: 357035 - RNA, 19 nt, Human immunodeficiency virus 2 (HIV-2)
gauccaagaagcuuuccaa

SEQ ID NO: 357036 - RNA, 19 nt, Human immunodeficiency virus 2 (HIV-2)
gaucucccagagucuaaca

SEQ ID NO: 357037 - RNA, 21 nt, Human immunodeficiency virus 2 (HIV-2)
gaugaccuaauaggaguuccu

SEQ ID NO: 357038 - RNA, 12 nt, Human immunodeficiency virus 2 (HIV-2)
gauggaccaagg

SEQ ID NO: 357039 - RNA, 19 nt, Human immunodeficiency virus 2 (HIV-2)
gauuuauaaacaccaaaga

SEQ ID NO: 357040 - RNA, 17 nt, Human immunodeficiency virus 2 (HIV-2)
gcagugaaccaucugcc

SEQ ID NO: 357041 - RNA, 19 nt, Human immunodeficiency virus 2 (HIV-2)
gcaguuuccauugccagcu

SEQ ID NO: 357042 - RNA, 21 nt, Human immunodeficiency virus 2 (HIV-2)
gccaugcacuaacaaaugcua

SEQ ID NO: 357043 - RNA, 15 nt, Human immunodeficiency virus 2 (HIV-2)
gccccuaacaaaaga

SEQ ID NO: 357044 - RNA, 19 nt, Human immunodeficiency virus 2 (HIV-2)
gcccuaguaguaguacaac

SEQ ID NO: 357045 - RNA, 14 nt, Human immunodeficiency virus 2 (HIV-2)
gccgacugaucucc

SEQ ID NO: 357046 - RNA, 20 nt, Human immunodeficiency virus 2 (HIV-2)
gccuaaugcaaaaagcuaua

SEQ ID NO: 357047 - RNA, 13 nt, Human immunodeficiency virus 2 (HIV-2)
gcuacuauaucca

SEQ ID NO: 357048 - RNA, 17 nt, Human immunodeficiency virus 2 (HIV-2)
gcucaagaauuggcuaa

SEQ ID NO: 357049 - RNA, 17 nt, Human immunodeficiency virus 2 (HIV-2)
gcucauuuuccaggugu

SEQ ID NO: 357050 - RNA, 23 nt, Human immunodeficiency virus 2 (HIV-2)
gcucggaauaucauaugagcgaa

SEQ ID NO: 357051 - RNA, 17 nt, Human immunodeficiency virus 2 (HIV-2)
gcucuuggcuacuauau

SEQ ID NO: 357052 - RNA, 21 nt, Human immunodeficiency virus 2 (HIV-2)
ggaagcuaguaucaguagaac

SEQ ID NO: 357053 - RNA, 18 nt, Human immunodeficiency virus 2 (HIV-2)
ggaauacucgcaguucca

SEQ ID NO: 357054 - RNA, 13 nt, Human immunodeficiency virus 2 (HIV-2)
ggaccauacagug

SEQ ID NO: 357055 - RNA, 20 nt, Human immunodeficiency virus 2 (HIV-2)
ggaccauacagugcuugcca

SEQ ID NO: 357056 - RNA, 21 nt, Human immunodeficiency virus 2 (HIV-2)
ggaccauacagugcuugccag

SEQ ID NO: 357057 - RNA, 17 nt, Human immunodeficiency virus 2 (HIV-2)
ggagaagaacuccuugc

SEQ ID NO: 357058 - RNA, 19 nt, Human immunodeficiency virus 2 (HIV-2)
ggcaugaugaacaagggau

SEQ ID NO: 357059 - RNA, 14 nt, Human immunodeficiency virus 2 (HIV-2)
gaagagccaucaga

SEQ ID NO: 357060 - RNA, 16 nt, Human immunodeficiency virus 2 (HIV-2)
gaagccuuaagacauu

SEQ ID NO: 357061 - RNA, 22 nt, Human immunodeficiency virus 2 (HIV-2)
gaauagggggauuuauaaacac

SEQ ID NO: 357062 - RNA, 20 nt, Human immunodeficiency virus 2 (HIV-2)
gaauccuagacauauaccua

SEQ ID NO: 357063 - RNA, 12 nt, Human immunodeficiency virus 2 (HIV-2)
gaauuauacuca

SEQ ID NO: 357064 - RNA, 22 nt, Human immunodeficiency virus 2 (HIV-2)
gacacaggggcugaugacucaa

SEQ ID NO: 357065 - RNA, 23 nt, Human immunodeficiency virus 2 (HIV-2)
gacacaggggcugaugacucaau

SEQ ID NO: 357066 - RNA, 11 nt, Human immunodeficiency virus 2 (HIV-2)
gacagcaguau

SEQ ID NO: 357067 - RNA, 21 nt, Human immunodeficiency virus 2 (HIV-2)
gacauggagacacccuugaag

SEQ ID NO: 357068 - RNA, 18 nt, Human immunodeficiency virus 2 (HIV-2)
gaccaaggcugaaacaau

SEQ ID NO: 357069 - RNA, 19 nt, Human immunodeficiency virus 2 (HIV-2)
gaccaaggcugaaacaaug

SEQ ID NO: 357070 - RNA, 19 nt, Human immunodeficiency virus 2 (HIV-2)
gaccauacagugcuugcca

SEQ ID NO: 357071 - RNA, 17 nt, Human immunodeficiency virus 2 (HIV-2)
gacuuacuauccaagaa

SEQ ID NO: 357072 - RNA, 19 nt, Human immunodeficiency virus 2 (HIV-2)
gagacuuacuauccaagaa

SEQ ID NO: 357073 - RNA, 21 nt, Human immunodeficiency virus 2 (HIV-2)
gagagcucauuuuccaggugu

SEQ ID NO: 357074 - RNA, 19 nt, Human immunodeficiency virus 2 (HIV-2)
gagaggaccauagaagccu

SEQ ID NO: 357075 - RNA, 18 nt, Human immunodeficiency virus 2 (HIV-2)
gagccaauaaaaguaaca

SEQ ID NO: 357076 - RNA, 17 nt, Human immunodeficiency virus 2 (HIV-2)
gagccaugcacuaacaa

SEQ ID NO: 357077 - RNA, 19 nt, Human immunodeficiency virus 2 (HIV-2)
gaggccuucgaguggcuag

SEQ ID NO: 357078 - RNA, 13 nt, Human immunodeficiency virus 2 (HIV-2)
gagggugcacuug

SEQ ID NO: 357079 - RNA, 13 nt, Human immunodeficiency virus 2 (HIV-2)
gaguaagagccac

SEQ ID NO: 357080 - RNA, 15 nt, Human immunodeficiency virus 2 (HIV-2)
gaugaugaugaccua

SEQ ID NO: 357081 - RNA, 17 nt, Human immunodeficiency virus 2 (HIV-2)
gaugucagcaagcuaca

SEQ ID NO: 357082 - RNA, 17 nt, Human immunodeficiency virus 2 (HIV-2)
gauguuuuacaguagga

SEQ ID NO: 357083 - RNA, 14 nt, Human immunodeficiency virus 2 (HIV-2)
gauuggaagaccaa

SEQ ID NO: 357084 - RNA, 18 nt, Human immunodeficiency virus 2 (HIV-2)
gcaagcuacacaaaguau

SEQ ID NO: 357085 - RNA, 17 nt, Human immunodeficiency virus 2 (HIV-2)
gcacagguaccaucacu

SEQ ID NO: 357086 - RNA, 20 nt, Human immunodeficiency virus 2 (HIV-2)
gcagggagcagaacucgccc

SEQ ID NO: 357087 - RNA, 17 nt, Human immunodeficiency virus 2 (HIV-2)
gcaguuuccauugccag

SEQ ID NO: 357088 - RNA, 18 nt, Human immunodeficiency virus 2 (HIV-2)
gcaguuuccauugccagc

SEQ ID NO: 357089 - RNA, 20 nt, Human immunodeficiency virus 2 (HIV-2)
gccagggaaagauggaccaa

SEQ ID NO: 357090 - RNA, 18 nt, Human immunodeficiency virus 2 (HIV-2)
gccgggaaggauuggaag

SEQ ID NO: 357091 - RNA, 14 nt, Human immunodeficiency virus 2 (HIV-2)
gcggcccaacugca

SEQ ID NO: 357092 - RNA, 13 nt, Human immunodeficiency virus 2 (HIV-2)
ugcaacuaaaaau

SEQ ID NO: 357093 - RNA, 18 nt, Human immunodeficiency virus 2 (HIV-2)
ugcaccagacaagugagu

SEQ ID NO: 357094 - RNA, 23 nt, Human immunodeficiency virus 2 (HIV-2)
ugcagagacuuacuauccaagaa

SEQ ID NO: 357095 - RNA, 23 nt, Human immunodeficiency virus 2 (HIV-2)
ugcaguuuccauugccagcugug

SEQ ID NO: 357096 - RNA, 16 nt, Human immunodeficiency virus 2 (HIV-2)
ugcaucuauucccuua

SEQ ID NO: 357097 - RNA, 21 nt, Human immunodeficiency virus 2 (HIV-2)
ugccagacaaugaugauuauc

SEQ ID NO: 357098 - RNA, 13 nt, Human immunodeficiency virus 2 (HIV-2)
ugcuugccagaca

SEQ ID NO: 357099 - RNA, 15 nt, Human immunodeficiency virus 2 (HIV-2)
uggaaaaaugcaucu

SEQ ID NO: 357100 - RNA, 15 nt, Human immunodeficiency virus 2 (HIV-2)
uggagaagagaccau

SEQ ID NO: 357101 - RNA, 17 nt, Human immunodeficiency virus 2 (HIV-2)
uggcaauagauauguca

SEQ ID NO: 357102 - RNA, 17 nt, Human immunodeficiency virus 2 (HIV-2)
uggcagaauuauacuca

SEQ ID NO: 357103 - RNA, 17 nt, Human immunodeficiency virus 2 (HIV-2)
uguugucauuuuacuaa

SEQ ID NO: 357104 - RNA, 20 nt, Human immunodeficiency virus 2 (HIV-2)
uguugucauuuuacuaacaa

SEQ ID NO: 357105 - RNA, 17 nt, Human immunodeficiency virus 2 (HIV-2)
uuaccaguugccaagau

SEQ ID NO: 357106 - RNA, 20 nt, Human immunodeficiency virus 2 (HIV-2)
uuaguauauuguagccagua

SEQ ID NO: 357107 - RNA, 16 nt, Human immunodeficiency virus 2 (HIV-2)
uuauaaacaccaaaga

SEQ ID NO: 357108 - RNA, 16 nt, Human immunodeficiency virus 2 (HIV-2)
uucucuccagcacuag

SEQ ID NO: 357109 - RNA, 19 nt, Human immunodeficiency virus 2 (HIV-2)
uugcuggggggaggacaug

SEQ ID NO: 357110 - RNA, 15 nt, Human immunodeficiency virus 2 (HIV-2)
uuugugcaacuaaaa

SEQ ID NO: 357111 - RNA, 13 nt, Human metapneumovirus
aaaaaacacucgc

SEQ ID NO: 357112 - RNA, 18 nt, Human metapneumovirus
aaaaagugaauacuguau

SEQ ID NO: 357113 - RNA, 17 nt, Human metapneumovirus
aaaaaugacaacacugc

SEQ ID NO: 357114 - RNA, 21 nt, Human metapneumovirus
aaaacaaucugcaaauaugcc

SEQ ID NO: 357115 - RNA, 13 nt, Human metapneumovirus
aaaaccaggucau

SEQ ID NO: 357116 - RNA, 21 nt, Human metapneumovirus
aaaagaaacugaaaccaucaa

SEQ ID NO: 357117 - RNA, 16 nt, Human metapneumovirus
aaaaguaaaaaacaau

SEQ ID NO: 357118 - RNA, 18 nt, Human metapneumovirus
aaaaguaaaaaacaauaa

SEQ ID NO: 357119 - RNA, 15 nt, Human metapneumovirus
aaaagugcacuaaga

SEQ ID NO: 357120 - RNA, 23 nt, Human metapneumovirus
aaaaugcaaaaaaacacaucuga

SEQ ID NO: 357121 - RNA, 21 nt, Human metapneumovirus
aaaauuugggacaaaucauaa

SEQ ID NO: 357122 - RNA, 15 nt, Human metapneumovirus
aaacaacacccaaga

SEQ ID NO: 357123 - RNA, 21 nt, Human metapneumovirus
aaacacaucagagugggauaa

SEQ ID NO: 357124 - RNA, 13 nt, Human metapneumovirus
aaacacaucugaa

SEQ ID NO: 357125 - RNA, 14 nt, Human metapneumovirus
aaacauguacucac

SEQ ID NO: 357126 - RNA, 18 nt, Human metapneumovirus
aaacauguacucaccuca

SEQ ID NO: 357127 - RNA, 19 nt, Human metapneumovirus
aaacauguacucaccucaa

SEQ ID NO: 357128 - RNA, 13 nt, Human metapneumovirus
aaaccaaccauac

SEQ ID NO: 357129 - RNA, 20 nt, Human metapneumovirus
aaaccaugcagacaccaaca

SEQ ID NO: 357130 - RNA, 23 nt, Human metapneumovirus
aaagaaacugaaaccaucaacua

SEQ ID NO: 357131 - RNA, 15 nt, Human metapneumovirus
aaagaucucaaucua

SEQ ID NO: 357132 - RNA, 19 nt, Human metapneumovirus
aaaggaccuguuaccugca

SEQ ID NO: 357133 - RNA, 19 nt, Human metapneumovirus
aaagguggggcaaccaaaa

SEQ ID NO: 357134 - RNA, 18 nt, Human metapneumovirus
aaagugaauacuguauca

SEQ ID NO: 357135 - RNA, 16 nt, Human metapneumovirus
aaagugcacuaagaga

SEQ ID NO: 357136 - RNA, 12 nt, Human metapneumovirus
aaauaacucuaa

SEQ ID NO: 357137 - RNA, 16 nt, Human metapneumovirus
aaauaccacaaccacc

SEQ ID NO: 357138 - RNA, 14 nt, Human metapneumovirus
aaauaccacaucag

SEQ ID NO: 357139 - RNA, 19 nt, Human metapneumovirus
aaaucaugauaucacacag

SEQ ID NO: 357140 - RNA, 18 nt, Human metapneumovirus
aaaugcaaaaaaacacau

SEQ ID NO: 357141 - RNA, 14 nt, Human metapneumovirus
aacaacacccaaga

SEQ ID NO: 357142 - RNA, 17 nt, Human metapneumovirus
aacaacacccaagagac

SEQ ID NO: 357143 - RNA, 21 nt, Human metapneumovirus
aacaagaauuaaaucaaucaa

SEQ ID NO: 357144 - RNA, 22 nt, Human metapneumovirus
aacaauggagaagccaaaagac

SEQ ID NO: 357145 - RNA, 18 nt, Human metapneumovirus
aacauguacucaccucaa

SEQ ID NO: 357146 - RNA, 22 nt, Human metapneumovirus
aacauuucucacaguaacaauc

SEQ ID NO: 357147 - RNA, 12 nt, Human metapneumovirus
aaccaaccauac

SEQ ID NO: 357148 - RNA, 14 nt, Human metapneumovirus
aaccaccccaagaa

SEQ ID NO: 357149 - RNA, 20 nt, Human metapneumovirus
aacccuaucucauagaucau

SEQ ID NO: 357150 - RNA, 15 nt, Human metapneumovirus
aaccuuacaugugcc

SEQ ID NO: 357151 - RNA, 19 nt, Human metapneumovirus
aacucuaagauaaaccaug

SEQ ID NO: 357152 - RNA, 15 nt, Human metapneumovirus
aacuggaauuugaca

SEQ ID NO: 357153 - RNA, 12 nt, Human metapneumovirus
aagagacaaaua

SEQ ID NO: 357154 - RNA, 15 nt, Human metapneumovirus
aagcuuuccagaaau

SEQ ID NO: 357155 - RNA, 20 nt, Human metapneumovirus
aaggacuuaaaagaagcuuu

SEQ ID NO: 357156 - RNA, 13 nt, Human metapneumovirus
aaggauaucucag

SEQ ID NO: 357157 - RNA, 19 nt, Human metapneumovirus
aaggcauuccuuacacagc

SEQ ID NO: 357158 - RNA, 20 nt, Human metapneumovirus
aagguauacaaacucugcaa

SEQ ID NO: 357159 - RNA, 23 nt, Human metapneumovirus
aagguggggcaaccaaaacugaa

SEQ ID NO: 357160 - RNA, 20 nt, Human metapneumovirus
aagucauggaucccauugaa

SEQ ID NO: 357161 - RNA, 20 nt, Human metapneumovirus
aagugaugggucuucaaaaa

SEQ ID NO: 357162 - RNA, 19 nt, Human metapneumovirus
aagugcggggcaaaugcaa

SEQ ID NO: 357163 - RNA, 14 nt, Human metapneumovirus
aaguggaaaacaau

SEQ ID NO: 357164 - RNA, 19 nt, Human metapneumovirus
aaguuaauauuagcuuuac

SEQ ID NO: 357165 - RNA, 14 nt, Human metapneumovirus
aauaaacaauggga

SEQ ID NO: 357166 - RNA, 13 nt, Human metapneumovirus
aauaaacagugac

SEQ ID NO: 357167 - RNA, 18 nt, Human metapneumovirus
aauaaagcaagcaaucaa

SEQ ID NO: 357168 - RNA, 12 nt, Human metapneumovirus
aauaacaaugga

SEQ ID NO: 357169 - RNA, 22 nt, Human metapneumovirus
aauaaccacucuguaugcugca

SEQ ID NO: 357170 - RNA, 14 nt, Human metapneumovirus
aauaaguaauaauu

SEQ ID NO: 357171 - RNA, 20 nt, Human metapneumovirus
aauaauaucaggagcaggca

SEQ ID NO: 357172 - RNA, 17 nt, Human metapneumovirus
aauacucaaagugaaug

SEQ ID NO: 357173 - RNA, 19 nt, Human metapneumovirus
aauagaaaaggaccuguua

SEQ ID NO: 357174 - RNA, 21 nt, Human metapneumovirus
aaucaagaacgggacaaauaa

SEQ ID NO: 357175 - RNA, 19 nt, Human metapneumovirus
aaucaugauaucacacagu

SEQ ID NO: 357176 - RNA, 18 nt, Human metapneumovirus
aaucauuaagaaaaccag

SEQ ID NO: 357177 - RNA, 19 nt, Human metapneumovirus
aaucauuaagaaaaccagg

SEQ ID NO: 357178 - RNA, 15 nt, Human metapneumovirus
aaucuccccaaaaag

SEQ ID NO: 357179 - RNA, 18 nt, Human metapneumovirus
aaugacaacacugcaaaa

SEQ ID NO: 357180 - RNA, 15 nt, Human metapneumovirus
aaugccucuuugguc

SEQ ID NO: 357181 - RNA, 18 nt, Human metapneumovirus
aaugcuuuaaaaaugccu

SEQ ID NO: 357182 - RNA, 21 nt, Human metapneumovirus
aaugucuaucuuccugacuca

SEQ ID NO: 357183 - RNA, 22 nt, Human metapneumovirus
aauuaaaaauaaaguaaauuaa

SEQ ID NO: 357184 - RNA, 23 nt, Human metapneumovirus
aauugguucaugucucuuaaaaa

SEQ ID NO: 357185 - RNA, 13 nt, Human metapneumovirus
acaaaagcugcag

SEQ ID NO: 357186 - RNA, 14 nt, Human metapneumovirus
acaacaccauauua

SEQ ID NO: 357187 - RNA, 23 nt, Human metapneumovirus
acaaguaaguuucuaugauacuu

SEQ ID NO: 357188 - RNA, 16 nt, Human metapneumovirus
acaccaacaauggaga

SEQ ID NO: 357189 - RNA, 15 nt, Human metapneumovirus
acacucgcccauaua

SEQ ID NO: 357190 - RNA, 17 nt, Human metapneumovirus
acaguaacaaucaccau

SEQ ID NO: 357191 - RNA, 14 nt, Human metapneumovirus
acagucuacauaau

SEQ ID NO: 357192 - RNA, 14 nt, Human metapneumovirus
acaucagucacaac

SEQ ID NO: 357193 - RNA, 17 nt, Human metapneumovirus
acauguacucaccucaa

SEQ ID NO: 357194 - RNA, 22 nt, Human metapneumovirus
acaugugccgauggacccagcu

SEQ ID NO: 357195 - RNA, 14 nt, Human metapneumovirus
acauucgaacaaua

SEQ ID NO: 357196 - RNA, 20 nt, Human metapneumovirus
acauugaguauugcccucaa

SEQ ID NO: 357197 - RNA, 19 nt, Human metapneumovirus
accaaaaauaccacaacca

SEQ ID NO: 357198 - RNA, 15 nt, Human metapneumovirus
accaaagcauaacaa

SEQ ID NO: 357199 - RNA, 18 nt, Human metapneumovirus
accacaauuacuggaguu

SEQ ID NO: 357200 - RNA, 20 nt, Human metapneumovirus
accacaucagucacaaccaa

SEQ ID NO: 357201 - RNA, 13 nt, Human metapneumovirus
accacucuguaug

SEQ ID NO: 357202 - RNA, 22 nt, Human metapneumovirus
accauaccgucagaaccaaagu

SEQ ID NO: 357203 - RNA, 21 nt, Human metapneumovirus
accaucaacuaacaccaaaaa

SEQ ID NO: 357204 - RNA, 13 nt, Human metapneumovirus
acccaagagacaa

SEQ ID NO: 357205 - RNA, 16 nt, Human metapneumovirus
accgucagaaccaaag

SEQ ID NO: 357206 - RNA, 21 nt, Human metapneumovirus
accuaaaaaaugacaacacug

SEQ ID NO: 357207 - RNA, 21 nt, Human metapneumovirus
accuacuaucaguagaccugc

SEQ ID NO: 357208 - RNA, 14 nt, Human metapneumovirus
accuguuaccugca

SEQ ID NO: 357209 - RNA, 13 nt, Human metapneumovirus
acuaacaccaaaa

SEQ ID NO: 357210 - RNA, 15 nt, Human metapneumovirus
acuaacauuucucac

SEQ ID NO: 357211 - RNA, 14 nt, Human metapneumovirus
acuaagagagcuca

SEQ ID NO: 357212 - RNA, 14 nt, Human metapneumovirus
acucaaagugaaug

SEQ ID NO: 357213 - RNA, 17 nt, Human metapneumovirus
acucacagucugugaag

SEQ ID NO: 357214 - RNA, 17 nt, Human metapneumovirus
acugaaggauaucucag

SEQ ID NO: 357215 - RNA, 21 nt, Human metapneumovirus
acuuauuaauaagaucaaauu

SEQ ID NO: 357216 - RNA, 16 nt, Human metapneumovirus
agaaaagaaacugaaa

SEQ ID NO: 357217 - RNA, 14 nt, Human metapneumovirus
agaaaucaaugcac

SEQ ID NO: 357218 - RNA, 17 nt, Human metapneumovirus
agaaauuauauauguca

SEQ ID NO: 357219 - RNA, 20 nt, Human metapneumovirus
agaacaguuucugcugauca

SEQ ID NO: 357220 - RNA, 18 nt, Human metapneumovirus
agaagagucuaccgagaa

SEQ ID NO: 357221 - RNA, 19 nt, Human metapneumovirus
agacaaauaacaauggauc

SEQ ID NO: 357222 - RNA, 20 nt, Human metapneumovirus
agaccugaccaaaagugcac

SEQ ID NO: 357223 - RNA, 16 nt, Human metapneumovirus
agaccugcaaaaccaa

SEQ ID NO: 357224 - RNA, 18 nt, Human metapneumovirus
agaccugcaaaaccaacc

SEQ ID NO: 357225 - RNA, 19 nt, Human metapneumovirus
agagacaaauaacaaugga

SEQ ID NO: 357226 - RNA, 22 nt, Human metapneumovirus
agagcuacuaacccuaucucau

SEQ ID NO: 357227 - RNA, 12 nt, Human metapneumovirus
agagcuacuuag

SEQ ID NO: 357228 - RNA, 19 nt, Human metapneumovirus
agagugggauaaaugacaa

SEQ ID NO: 357229 - RNA, 17 nt, Human metapneumovirus
agauagauacuuauuaa

SEQ ID NO: 357230 - RNA, 13 nt, Human metapneumovirus
agauaggacacaa

SEQ ID NO: 357231 - RNA, 14 nt, Human metapneumovirus
agcaagaguaaaaa

SEQ ID NO: 357232 - RNA, 15 nt, Human metapneumovirus
agcaagcaaucaaag

SEQ ID NO: 357233 - RNA, 11 nt, Human metapneumovirus
agcagcuguuc

SEQ ID NO: 357234 - RNA, 13 nt, Human metapneumovirus
agccaaaagacaa

SEQ ID NO: 357235 - RNA, 18 nt, Human metapneumovirus
agcuacuaacccuaucuc

SEQ ID NO: 357236 - RNA, 21 nt, Human metapneumovirus
agcugauggcuuaucaauaau

SEQ ID NO: 357237 - RNA, 17 nt, Human metapneumovirus
aggaauaacuacauuga

SEQ ID NO: 357238 - RNA, 13 nt, Human metapneumovirus
aggcaacaacacc

SEQ ID NO: 357239 - RNA, 15 nt, Human metapneumovirus
aggccaacacaccac

SEQ ID NO: 357240 - RNA, 21 nt, Human metapneumovirus
agguauacaaacucugcaaua

SEQ ID NO: 357241 - RNA, 16 nt, Human metapneumovirus
aguaaaaacacaucag

SEQ ID NO: 357242 - RNA, 13 nt, Human metapneumovirus
agucaaaaacuga

SEQ ID NO: 357243 - RNA, 23 nt, Human metapneumovirus
agucuacauaauauaaucaaaca

SEQ ID NO: 357244 - RNA, 17 nt, Human metapneumovirus
agucuaccgagaagaag

SEQ ID NO: 357245 - RNA, 15 nt, Human metapneumovirus
agugaaugcaucagc

SEQ ID NO: 357246 - RNA, 16 nt, Human metapneumovirus
agugaugggaaaaccc

SEQ ID NO: 357247 - RNA, 19 nt, Human metapneumovirus
agugcugcucgaucagcua

SEQ ID NO: 357248 - RNA, 16 nt, Human metapneumovirus
aguggaaaacaaucug

SEQ ID NO: 357249 - RNA, 16 nt, Human metapneumovirus
aguguucugaggacag

SEQ ID NO: 357250 - RNA, 21 nt, Human metapneumovirus
aguuagcauggacagauaaag

SEQ ID NO: 357251 - RNA, 17 nt, Human metapneumovirus
aguuuaaccacaauuac

SEQ ID NO: 357252 - RNA, 16 nt, Human metapneumovirus
aguuuauuaaaaauaa

SEQ ID NO: 357253 - RNA, 13 nt, Human metapneumovirus
auaaaagaucuca

SEQ ID NO: 357254 - RNA, 21 nt, Human metapneumovirus
auaaaaguggaaaacaaucug

SEQ ID NO: 357255 - RNA, 15 nt, Human metapneumovirus
auaaacagugacaca

SEQ ID NO: 357256 - RNA, 16 nt, Human metapneumovirus
auaacauuagauguca

SEQ ID NO: 357257 - RNA, 21 nt, Human metapneumovirus
auaauaucaggagcaggcaga

SEQ ID NO: 357258 - RNA, 14 nt, Human metapneumovirus
auacuucauaauaa

SEQ ID NO: 357259 - RNA, 20 nt, Human metapneumovirus
auagagguugaugacaugau

SEQ ID NO: 357260 - RNA, 16 nt, Human metapneumovirus
auaggaauaacuacau

SEQ ID NO: 357261 - RNA, 13 nt, Human metapneumovirus
auaggacacaaga

SEQ ID NO: 357262 - RNA, 15 nt, Human metapneumovirus
auagugaagucucau

SEQ ID NO: 357263 - RNA, 13 nt, Human metapneumovirus
auauaccaaaaau

SEQ ID NO: 357264 - RNA, 14 nt, Human metapneumovirus
auauagcaaacugg

SEQ ID NO: 357265 - RNA, 17 nt, Human metapneumovirus
auauaugucaaggcuua

SEQ ID NO: 357266 - RNA, 22 nt, Human metapneumovirus
auauaugucaaggcuuacuuaa

SEQ ID NO: 357267 - RNA, 15 nt, Human metapneumovirus
auaugccagucaaaa

SEQ ID NO: 357268 - RNA, 15 nt, Human metapneumovirus
auauuuugaaaacaa

SEQ ID NO: 357269 - RNA, 17 nt, Human metapneumovirus
aucaaggcauuccuuac

SEQ ID NO: 357270 - RNA, 22 nt, Human metapneumovirus
aucaaguuagaacaagaauuaa

SEQ ID NO: 357271 - RNA, 20 nt, Human metapneumovirus
aucaaucaagaacgggacaa

SEQ ID NO: 357272 - RNA, 21 nt, Human metapneumovirus
aucaguagaccugcaaaacca

SEQ ID NO: 357273 - RNA, 21 nt, Human metapneumovirus
aucauuaagaaaaccagguca

SEQ ID NO: 357274 - RNA, 15 nt, Human metapneumovirus
aucucaaucuauuau

SEQ ID NO: 357275 - RNA, 18 nt, Human metapneumovirus
aucucauagaucauaaag

SEQ ID NO: 357276 - RNA, 14 nt, Human metapneumovirus
aucucccuggaaaa

SEQ ID NO: 357277 - RNA, 21 nt, Human metapneumovirus
augaagugcggggcaaaugca

SEQ ID NO: 357278 - RNA, 15 nt, Human metapneumovirus
augauaaccaaagca

SEQ ID NO: 357279 - RNA, 21 nt, Human metapneumovirus
augggacaaguaaaaauggag

SEQ ID NO: 357280 - RNA, 16 nt, Human metapneumovirus
augguccaguuuucau

SEQ ID NO: 357281 - RNA, 20 nt, Human metapneumovirus
augucuaucuuccugacuca

SEQ ID NO: 357282 - RNA, 15 nt, Human metapneumovirus
auuagaugucauuaa

SEQ ID NO: 357283 - RNA, 16 nt, Human metapneumovirus
auuaggauccauccaa

SEQ ID NO: 357284 - RNA, 21 nt, Human metapneumovirus
auucaauuuaaaaaguaaaaa

SEQ ID NO: 357285 - RNA, 14 nt, Human metapneumovirus
auucacaaucuccc

SEQ ID NO: 357286 - RNA, 21 nt, Human metapneumovirus
auugcuuaaucaucaucacaa

SEQ ID NO: 357287 - RNA, 13 nt, Human metapneumovirus
auuugaagucaau

SEQ ID NO: 357288 - RNA, 17 nt, Human metapneumovirus
auuugaagucaaugcga

SEQ ID NO: 357289 - RNA, 22 nt, Human metapneumovirus
caaaaaaauaauuaaagaccac

SEQ ID NO: 357290 - RNA, 22 nt, Human metapneumovirus
caaaaacauguacucaccucaa

SEQ ID NO: 357291 - RNA, 16 nt, Human metapneumovirus
caaaaaggacucauca

SEQ ID NO: 357292 - RNA, 21 nt, Human metapneumovirus
caaaaaggacucaucaucaaa

SEQ ID NO: 357293 - RNA, 17 nt, Human metapneumovirus
caaaacaacacccaaga

SEQ ID NO: 357294 - RNA, 18 nt, Human metapneumovirus
caaaaguugccauagaga

SEQ ID NO: 357295 - RNA, 18 nt, Human metapneumovirus
caaaaugucauucccuga

SEQ ID NO: 357296 - RNA, 15 nt, Human metapneumovirus
caacacccaagagac

SEQ ID NO: 357297 - RNA, 15 nt, Human metapneumovirus
caaccaaaacugaaa

SEQ ID NO: 357298 - RNA, 15 nt, Human metapneumovirus
caaccaagacuacuc

SEQ ID NO: 357299 - RNA, 15 nt, Human metapneumovirus
caacuaacaccaaaa

SEQ ID NO: 357300 - RNA, 14 nt, Human metapneumovirus
caacuacaagaagu

SEQ ID NO: 357301 - RNA, 13 nt, Human metapneumovirus
caagagcuacuaa

SEQ ID NO: 357302 - RNA, 16 nt, Human metapneumovirus
caaggcuccgugcaaa

SEQ ID NO: 357303 - RNA, 19 nt, Human metapneumovirus
caaggugcagcaaugucug

SEQ ID NO: 357304 - RNA, 14 nt, Human metapneumovirus
caaguaaaaaugga

SEQ ID NO: 357305 - RNA, 15 nt, Human metapneumovirus
caaguuagaacaaga

SEQ ID NO: 357306 - RNA, 23 nt, Human metapneumovirus
caauagaggaagugagugcaagu

SEQ ID NO: 357307 - RNA, 15 nt, Human metapneumovirus
caaucuccccaaaaa

SEQ ID NO: 357308 - RNA, 20 nt, Human metapneumovirus
caaucuccccaaaaaggcaa

SEQ ID NO: 357309 - RNA, 13 nt, Human metapneumovirus
caaugcgacugua

SEQ ID NO: 357310 - RNA, 15 nt, Human metapneumovirus
caaugugguucaagg

SEQ ID NO: 357311 - RNA, 18 nt, Human metapneumovirus
caauuauauaaaagugga

SEQ ID NO: 357312 - RNA, 22 nt, Human metapneumovirus
caauucacaaucuccccaaaaa

SEQ ID NO: 357313 - RNA, 16 nt, Human metapneumovirus
cacaaccaccccaaga

SEQ ID NO: 357314 - RNA, 17 nt, Human metapneumovirus
cacaaccaccccaagaa

SEQ ID NO: 357315 - RNA, 13 nt, Human metapneumovirus
caccaaugugguu

SEQ ID NO: 357316 - RNA, 18 nt, Human metapneumovirus
caccuaucaaggcauucc

SEQ ID NO: 357317 - RNA, 22 nt, Human metapneumovirus
caccuuggccaagagcuacuaa

SEQ ID NO: 357318 - RNA, 16 nt, Human metapneumovirus
cagaaaagaaacugaa

SEQ ID NO: 357319 - RNA, 13 nt, Human metapneumovirus
cagaacaguuucu

SEQ ID NO: 357320 - RNA, 20 nt, Human metapneumovirus
cagaagcuuuccagaaauca

SEQ ID NO: 357321 - RNA, 19 nt, Human metapneumovirus
cagacaaaaaggacucauc

SEQ ID NO: 357322 - RNA, 16 nt, Human metapneumovirus
cagcaaaugcuuuaaa

SEQ ID NO: 357323 - RNA, 15 nt, Human metapneumovirus
caggccaacacacca

SEQ ID NO: 357324 - RNA, 22 nt, Human metapneumovirus
caguaacaaucaccaucaauua

SEQ ID NO: 357325 - RNA, 12 nt, Human metapneumovirus
cagucaaaaacu

SEQ ID NO: 357326 - RNA, 18 nt, Human metapneumovirus
caguuuacuuaacaacca

SEQ ID NO: 357327 - RNA, 14 nt, Human metapneumovirus
cauaaaagaucuca

SEQ ID NO: 357328 - RNA, 17 nt, Human metapneumovirus
cauaaugucucgcaagg

SEQ ID NO: 357329 - RNA, 17 nt, Human metapneumovirus
cauagagaauccuguua

SEQ ID NO: 357330 - RNA, 15 nt, Human metapneumovirus
caucaacuaacacca

SEQ ID NO: 357331 - RNA, 15 nt, Human metapneumovirus
caugggacaaguagu

SEQ ID NO: 357332 - RNA, 23 nt, Human metapneumovirus
cauggguaaugaagcagcaaaau

SEQ ID NO: 357333 - RNA, 13 nt, Human metapneumovirus
cauguuagacuca

SEQ ID NO: 357334 - RNA, 15 nt, Human metapneumovirus
cauuaagaaaaccag

SEQ ID NO: 357335 - RNA, 23 nt, Human metapneumovirus
cauuagaugucauuaaaagugau

SEQ ID NO: 357336 - RNA, 19 nt, Human metapneumovirus
cauuuacaauuguuauuua

SEQ ID NO: 357337 - RNA, 13 nt, Human metapneumovirus
ccaaaacugaaau

SEQ ID NO: 357338 - RNA, 22 nt, Human metapneumovirus
ccaagagacaaauaacaaugga

SEQ ID NO: 357339 - RNA, 21 nt, Human metapneumovirus
ccacucuguaugcugcaucac

SEQ ID NO: 357340 - RNA, 18 nt, Human metapneumovirus
ccagauagauacuuauua

SEQ ID NO: 357341 - RNA, 19 nt, Human metapneumovirus
ccagcuuaauaaaaacaga

SEQ ID NO: 357342 - RNA, 20 nt, Human metapneumovirus
ccaguuuucauuacuauaga

SEQ ID NO: 357343 - RNA, 17 nt, Human metapneumovirus
ccauaccgucagaacca

SEQ ID NO: 357344 - RNA, 23 nt, Human metapneumovirus
ccauaccgucagaaccaaaguua

SEQ ID NO: 357345 - RNA, 20 nt, Human metapneumovirus
ccauagagaauccuguuauc

SEQ ID NO: 357346 - RNA, 14 nt, Human metapneumovirus
ccauauaccaaaaa

SEQ ID NO: 357347 - RNA, 21 nt, Human metapneumovirus
cccaaaaaauuugaagucaau

SEQ ID NO: 357348 - RNA, 23 nt, Human metapneumovirus
cccugcagaaaagaaacugaaac

SEQ ID NO: 357349 - RNA, 20 nt, Human metapneumovirus
ccugacaauaaccacucugu

SEQ ID NO: 357350 - RNA, 22 nt, Human metapneumovirus
ccugaccaaaagugcacuaaga

SEQ ID NO: 357351 - RNA, 16 nt, Human metapneumovirus
ccuggaaaaaacacuc

SEQ ID NO: 357352 - RNA, 21 nt, Human metapneumovirus
ccuguuacagucuacauaaua

SEQ ID NO: 357353 - RNA, 15 nt, Human metapneumovirus
ccuuggccaagagcu

SEQ ID NO: 357354 - RNA, 12 nt, Human metapneumovirus
cgaacaauagau

SEQ ID NO: 357355 - RNA, 21 nt, Human metapneumovirus
cgaacaauagauaugcucaaa

SEQ ID NO: 357356 - RNA, 17 nt, Human metapneumovirus
cgacuguagcacucgau

SEQ ID NO: 357357 - RNA, 20 nt, Human metapneumovirus
cuaaaaaaugacaacacugc

SEQ ID NO: 357358 - RNA, 19 nt, Human metapneumovirus
cuaaaucaugauaucacac

SEQ ID NO: 357359 - RNA, 14 nt, Human metapneumovirus
cuaacccuaucuca

SEQ ID NO: 357360 - RNA, 23 nt, Human metapneumovirus
cuacaagaaguugaaguuaggca

SEQ ID NO: 357361 - RNA, 13 nt, Human metapneumovirus
cuaguuauauaaa

SEQ ID NO: 357362 - RNA, 21 nt, Human metapneumovirus
cuauaacugaaggauaucuca

SEQ ID NO: 357363 - RNA, 16 nt, Human metapneumovirus
cucaaugaauccacug

SEQ ID NO: 357364 - RNA, 21 nt, Human metapneumovirus
cucaaugaauccacuguuaau

SEQ ID NO: 357365 - RNA, 19 nt, Human metapneumovirus
cucacagucugugaaguaa

SEQ ID NO: 357366 - RNA, 14 nt, Human metapneumovirus
cucaucaucaaaua

SEQ ID NO: 357367 - RNA, 13 nt, Human metapneumovirus
cuccccaaaaagg

SEQ ID NO: 357368 - RNA, 19 nt, Human metapneumovirus
cugaccaaaagugcacuaa

SEQ ID NO: 357369 - RNA, 12 nt, Human metapneumovirus
cugcaaaaccaa

SEQ ID NO: 357370 - RNA, 21 nt, Human metapneumovirus
cugcaaaaguugccauagaga

SEQ ID NO: 357371 - RNA, 20 nt, Human metapneumovirus
cugcagaaaagaaacugaaa

SEQ ID NO: 357372 - RNA, 16 nt, Human metapneumovirus
cuggaaaaaacacucg

SEQ ID NO: 357373 - RNA, 16 nt, Human metapneumovirus
cugggcaaaacaacac

SEQ ID NO: 357374 - RNA, 21 nt, Human metapneumovirus
cuuaaagagagcuacuuagaa

SEQ ID NO: 357375 - RNA, 16 nt, Human metapneumovirus
cuuaacaaccaugaaa

SEQ ID NO: 357376 - RNA, 12 nt, Human metapneumovirus
cuuacaugugcc

SEQ ID NO: 357377 - RNA, 21 nt, Human metapneumovirus
cuuagaagagucauguagcac

SEQ ID NO: 357378 - RNA, 13 nt, Human metapneumovirus
cuuaucaauaaua

SEQ ID NO: 357379 - RNA, 17 nt, Human metapneumovirus
cuucaaaaacauguacu

SEQ ID NO: 357380 - RNA, 18 nt, Human metapneumovirus
cuuuuaaggaacacugau

SEQ ID NO: 357381 - RNA, 16 nt, Human metapneumovirus
gaaaaaaacugggcaa

SEQ ID NO: 357382 - RNA, 12 nt, Human metapneumovirus
gaaaaagugaau

SEQ ID NO: 357383 - RNA, 14 nt, Human metapneumovirus
gaaaagaaacugaa

SEQ ID NO: 357384 - RNA, 15 nt, Human metapneumovirus
gaaaagaaacugaaa

SEQ ID NO: 357385 - RNA, 13 nt, Human metapneumovirus
gaaacauuggaau

SEQ ID NO: 357386 - RNA, 16 nt, Human metapneumovirus
gaaauuauauauguca

SEQ ID NO: 357387 - RNA, 22 nt, Human metapneumovirus
gaagccaaaagacaauucacaa

SEQ ID NO: 357388 - RNA, 22 nt, Human metapneumovirus
gaaguaaaaacaguuuacuuaa

SEQ ID NO: 357389 - RNA, 19 nt, Human metapneumovirus
gaauuaccuacuaucagua

SEQ ID NO: 357390 - RNA, 17 nt, Human metapneumovirus
gacaaauaacaauggau

SEQ ID NO: 357391 - RNA, 23 nt, Human metapneumovirus
gacaaugauaacauuagauguca

SEQ ID NO: 357392 - RNA, 15 nt, Human metapneumovirus
gacaccaacaaugga

SEQ ID NO: 357393 - RNA, 16 nt, Human metapneumovirus
gacaccuaucaaggca

SEQ ID NO: 357394 - RNA, 22 nt, Human metapneumovirus
gaccuuaccuaaaaaaugacaa

SEQ ID NO: 357395 - RNA, 16 nt, Human metapneumovirus
gacucaaaaaugcagu

SEQ ID NO: 357396 - RNA, 21 nt, Human metapneumovirus
gacuguagcacucgaugaaua

SEQ ID NO: 357397 - RNA, 13 nt, Human metapneumovirus
gagaaaaagugaa

SEQ ID NO: 357398 - RNA, 16 nt, Human metapneumovirus
gagaagaaggugcuac

SEQ ID NO: 357399 - RNA, 18 nt, Human metapneumovirus
gagacaaauaacaaugga

SEQ ID NO: 357400 - RNA, 20 nt, Human metapneumovirus
gagugcaaguuuaaccacaa

SEQ ID NO: 357401 - RNA, 22 nt, Human metapneumovirus
gauaaagguggggcaaccaaaa

SEQ ID NO: 357402 - RNA, 18 nt, Human metapneumovirus
gcaaaaaaacacaucuga

SEQ ID NO: 357403 - RNA, 18 nt, Human metapneumovirus
gcaaaacaacacccaaga

SEQ ID NO: 357404 - RNA, 22 nt, Human metapneumovirus
gcaaauaugaagugcggggcaa

SEQ ID NO: 357405 - RNA, 10 nt, Human metapneumovirus
gcaaccaaaa

SEQ ID NO: 357406 - RNA, 17 nt, Human metapneumovirus
gcaaccaaaacugaaau

SEQ ID NO: 357407 - RNA, 18 nt, Human metapneumovirus
gcaagcaaucaaagucau

SEQ ID NO: 357408 - RNA, 15 nt, Human metapneumovirus
gcaaguuuaaccaca

SEQ ID NO: 357409 - RNA, 21 nt, Human metapneumovirus
gcacuaagagagcucagaaca

SEQ ID NO: 357410 - RNA, 16 nt, Human metapneumovirus
gccaacacaccaccag

SEQ ID NO: 357411 - RNA, 15 nt, Human metapneumovirus
gccaagagcuacuaa

SEQ ID NO: 357412 - RNA, 17 nt, Human metapneumovirus
gcccauauaccaaaaau

SEQ ID NO: 357413 - RNA, 14 nt, Human metapneumovirus
ggaagugagugcaa

SEQ ID NO: 357414 - RNA, 16 nt, Human metapneumovirus
ggaauaacuacauuga

SEQ ID NO: 357415 - RNA, 15 nt, Human metapneumovirus
ggagaaaaagugaau

SEQ ID NO: 357416 - RNA, 14 nt, Human metapneumovirus
ggcaacaacaccau

SEQ ID NO: 357417 - RNA, 12 nt, Human metapneumovirus
ggcaaccaaaac

SEQ ID NO: 357418 - RNA, 12 nt, Human metapneumovirus
ggcuuaucaaua

SEQ ID NO: 357419 - RNA, 14 nt, Human metapneumovirus
ggucuucaaaaaca

SEQ ID NO: 357420 - RNA, 21 nt, Human metapneumovirus
ggugaucauuuuuucauuguu

SEQ ID NO: 357421 - RNA, 18 nt, Human metapneumovirus
gguugguacaccaauguu

SEQ ID NO: 357422 - RNA, 18 nt, Human metapneumovirus
guagcacuauaacugaag

SEQ ID NO: 357423 - RNA, 18 nt, Human metapneumovirus
guauacaaacucugcaau

SEQ ID NO: 357424 - RNA, 15 nt, Human metapneumovirus
gucauguagcacuau

SEQ ID NO: 357425 - RNA, 17 nt, Human metapneumovirus
gucauguagcacuauaa

SEQ ID NO: 357426 - RNA, 21 nt, Human metapneumovirus
guccaauacucaaagugaaug

SEQ ID NO: 357427 - RNA, 13 nt, Human metapneumovirus
gugacaacuucau

SEQ ID NO: 357428 - RNA, 19 nt, Human metapneumovirus
gugcaaguuuaaccacaau

SEQ ID NO: 357429 - RNA, 16 nt, Human metapneumovirus
gugggacaagucaaaa

SEQ ID NO: 357430 - RNA, 15 nt, Human metapneumovirus
guuaauaacaccuca

SEQ ID NO: 357431 - RNA, 18 nt, Human metapneumovirus
guuacagucuacauaaua

SEQ ID NO: 357432 - RNA, 15 nt, Human metapneumovirus
uaaaaacacaucaga

SEQ ID NO: 357433 - RNA, 20 nt, Human metapneumovirus
uaaaagugaugggucuucaa

SEQ ID NO: 357434 - RNA, 20 nt, Human metapneumovirus
uaaaauaggugacaacuuca

SEQ ID NO: 357435 - RNA, 19 nt, Human metapneumovirus
uaaagcaagcaaucaaagu

SEQ ID NO: 357436 - RNA, 21 nt, Human metapneumovirus
uaaagguggggcaaccaaaac

SEQ ID NO: 357437 - RNA, 16 nt, Human metapneumovirus
uaaaucaugauaucac

SEQ ID NO: 357438 - RNA, 20 nt, Human metapneumovirus
uaacucuaagauaaaccaug

SEQ ID NO: 357439 - RNA, 22 nt, Human metapneumovirus
uaacucuaagauaaaccaugca

SEQ ID NO: 357440 - RNA, 22 nt, Human metapneumovirus
uaagaaaaccaggucauaaaag

SEQ ID NO: 357441 - RNA, 15 nt, Human metapneumovirus
uaauaaaaacagaau

SEQ ID NO: 357442 - RNA, 15 nt, Human metapneumovirus
uaauaagaucaaauu

SEQ ID NO: 357443 - RNA, 15 nt, Human metapneumovirus
uacaaacucugcaau

SEQ ID NO: 357444 - RNA, 17 nt, Human metapneumovirus
uaccacaucagucacaa

SEQ ID NO: 357445 - RNA, 22 nt, Human metapneumovirus
uaccuaaaaaaugacaacacug

SEQ ID NO: 357446 - RNA, 15 nt, Human metapneumovirus
uacuaacauuuacaa

SEQ ID NO: 357447 - RNA, 16 nt, Human metapneumovirus
uacuaacccuaucuca

SEQ ID NO: 357448 - RNA, 17 nt, Human metapneumovirus
uacuaacccuaucucau

SEQ ID NO: 357449 - RNA, 13 nt, Human metapneumovirus
uacucaaagugaa

SEQ ID NO: 357450 - RNA, 19 nt, Human metapneumovirus
uagaaacuaacaacuguca

SEQ ID NO: 357451 - RNA, 15 nt, Human metapneumovirus
uagacaccuaucaag

SEQ ID NO: 357452 - RNA, 14 nt, Human metapneumovirus
uaggauccauccaa

SEQ ID NO: 357453 - RNA, 12 nt, Human metapneumovirus
uauaccaaaaau

SEQ ID NO: 357454 - RNA, 13 nt, Human metapneumovirus
uaugauacuucau

SEQ ID NO: 357455 - RNA, 15 nt, Human metapneumovirus
uaugcugcaucacaa

SEQ ID NO: 357456 - RNA, 18 nt, Human metapneumovirus
uaugcugcaucacaaaau

SEQ ID NO: 357457 - RNA, 13 nt, Human metapneumovirus
uauggacucacaa

SEQ ID NO: 357458 - RNA, 15 nt, Human metapneumovirus
uauucgaaaccauaa

SEQ ID NO: 357459 - RNA, 18 nt, Human metapneumovirus
uauucgaaaccauaacua

SEQ ID NO: 357460 - RNA, 16 nt, Human metapneumovirus
ucaaacaacuacaaga

SEQ ID NO: 357461 - RNA, 17 nt, Human metapneumovirus
ucaaagcaagaguaaaa

SEQ ID NO: 357462 - RNA, 18 nt, Human metapneumovirus
ucaaagugaaugcaucag

SEQ ID NO: 357463 - RNA, 15 nt, Human metapneumovirus
ucaaauaccacauca

SEQ ID NO: 357464 - RNA, 17 nt, Human metapneumovirus
ucaacuaacaccaaaaa

SEQ ID NO: 357465 - RNA, 15 nt, Human metapneumovirus
ucaacuggcaagaga

SEQ ID NO: 357466 - RNA, 20 nt, Human metapneumovirus
ucaaggcauuccuuacacag

SEQ ID NO: 357467 - RNA, 22 nt, Human metapneumovirus
ucaaggcauuccuuacacagca

SEQ ID NO: 357468 - RNA, 14 nt, Human metapneumovirus
ucaauaucuaucug

SEQ ID NO: 357469 - RNA, 13 nt, Human metapneumovirus
ucaaugaauccac

SEQ ID NO: 357470 - RNA, 22 nt, Human metapneumovirus
ucacaguaacaaucaccaucaa

SEQ ID NO: 357471 - RNA, 18 nt, Human metapneumovirus
ucacagucugugaaguaa

SEQ ID NO: 357472 - RNA, 14 nt, Human metapneumovirus
ucagcccaaggugc

SEQ ID NO: 357473 - RNA, 21 nt, Human metapneumovirus
ucagcuaaaaacccugacaau

SEQ ID NO: 357474 - RNA, 19 nt, Human metapneumovirus
ucaggccaacacaccacca

SEQ ID NO: 357475 - RNA, 14 nt, Human metapneumovirus
ucaugauaucacac

SEQ ID NO: 357476 - RNA, 16 nt, Human metapneumovirus
ucauguagcacuauaa

SEQ ID NO: 357477 - RNA, 19 nt, Human metapneumovirus
uccaauacucaaagugaau

SEQ ID NO: 357478 - RNA, 23 nt, Human metapneumovirus
uccagaaaucauuaagaaaacca

SEQ ID NO: 357479 - RNA, 15 nt, Human metapneumovirus
ucccaaaaaauuuga

SEQ ID NO: 357480 - RNA, 22 nt, Human metapneumovirus
uccucauaggaauaacuacauu

SEQ ID NO: 357481 - RNA, 18 nt, Human metapneumovirus
uccugacucauaucuuaa

SEQ ID NO: 357482 - RNA, 20 nt, Human metapneumovirus
uccuuuagugagacuaaugc

SEQ ID NO: 357483 - RNA, 17 nt, Human metapneumovirus
ucucacaguaacaauca

SEQ ID NO: 357484 - RNA, 19 nt, Human metapneumovirus
ucucacaguaacaaucacc

SEQ ID NO: 357485 - RNA, 13 nt, Human metapneumovirus
ucuccccaaaaag

SEQ ID NO: 357486 - RNA, 14 nt, Human metapneumovirus
ucugaggacagguu

SEQ ID NO: 357487 - RNA, 20 nt, Human metapneumovirus
ucugcaauaaacagugacac

SEQ ID NO: 357488 - RNA, 12 nt, Human metapneumovirus
ucugcugaucaa

SEQ ID NO: 357489 - RNA, 18 nt, Human metapneumovirus
ucuguuaguucaacaauu

SEQ ID NO: 357490 - RNA, 15 nt, Human metapneumovirus
ugaaucagaacauca

SEQ ID NO: 357491 - RNA, 15 nt, Human metapneumovirus
ugacaaacucacagu

SEQ ID NO: 357492 - RNA, 15 nt, Human metapneumovirus
ugagacuaaugcaau

SEQ ID NO: 357493 - RNA, 15 nt, Human metapneumovirus
ugauaucacacagua

SEQ ID NO: 357494 - RNA, 22 nt, Human metapneumovirus
ugaucauaaacuauaaaaugca

SEQ ID NO: 357495 - RNA, 19 nt, Human metapneumovirus
ugaucuaauagaaaaggac

SEQ ID NO: 357496 - RNA, 16 nt, Human metapneumovirus
ugcaaaaaaacacauc

SEQ ID NO: 357497 - RNA, 18 nt, Human metapneumovirus
ugcaaaaaaacacaucug

SEQ ID NO: 357498 - RNA, 20 nt, Human metapneumovirus
ugcaaaaaaacacaucugaa

SEQ ID NO: 357499 - RNA, 19 nt, Human metapneumovirus
ugcaaauaugccagucaaa

SEQ ID NO: 357500 - RNA, 17 nt, Human metapneumovirus
ugcaaguuuaaccacaa

SEQ ID NO: 357501 - RNA, 15 nt, Human metapneumovirus
ugcaauaaacaguga

SEQ ID NO: 357502 - RNA, 18 nt, Human metapneumovirus
ugcaauaaacagugacac

SEQ ID NO: 357503 - RNA, 20 nt, Human metapneumovirus
ugcagaaaagaaacugaaac

SEQ ID NO: 357504 - RNA, 15 nt, Human metapneumovirus
ugcaucacaaaaugg

SEQ ID NO: 357505 - RNA, 22 nt, Human metapneumovirus
ugcaucagcccaaggugcagca

SEQ ID NO: 357506 - RNA, 15 nt, Human metapneumovirus
ugcccucaauaucua

SEQ ID NO: 357507 - RNA, 20 nt, Human metapneumovirus
ugcugcaucacaaaaugguc

SEQ ID NO: 357508 - RNA, 19 nt, Human metapneumovirus
ugcuuaaucaucaucacaa

SEQ ID NO: 357509 - RNA, 23 nt, Human metapneumovirus
uggaauuaccuacuaucaguaga

SEQ ID NO: 357510 - RNA, 19 nt, Human metapneumovirus
uggagaagccaaaagacaa

SEQ ID NO: 357511 - RNA, 17 nt, Human metapneumovirus
uggccaagagcuacuaa

SEQ ID NO: 357512 - RNA, 19 nt, Human metapneumovirus
uggcuuaucaauaauauca

SEQ ID NO: 357513 - RNA, 14 nt, Human metapneumovirus
ugggacaaaucaua

SEQ ID NO: 357514 - RNA, 18 nt, Human metapneumovirus
ugggacaaguaaaaaugg

SEQ ID NO: 357515 - RNA, 17 nt, Human metapneumovirus
ugggucuucaaaaacau

SEQ ID NO: 357516 - RNA, 13 nt, Human metapneumovirus
uguucaaguugau

SEQ ID NO: 357517 - RNA, 14 nt, Human metapneumovirus
uguucugaggacag

SEQ ID NO: 357518 - RNA, 13 nt, Human metapneumovirus
uuaaaaaguaaaa

SEQ ID NO: 357519 - RNA, 11 nt, Human metapneumovirus
uuaacaaccau

SEQ ID NO: 357520 - RNA, 16 nt, Human metapneumovirus
uuaaucaucaucacaa

SEQ ID NO: 357521 - RNA, 19 nt, Human metapneumovirus
uuaccugcaagccuaacaa

SEQ ID NO: 357522 - RNA, 13 nt, Human metapneumovirus
uuagaccugacca

SEQ ID NO: 357523 - RNA, 17 nt, Human metapneumovirus
uuagacucaaaaaugca

SEQ ID NO: 357524 - RNA, 18 nt, Human metapneumovirus
uucucacaguaacaauca

SEQ ID NO: 357525 - RNA, 18 nt, Human metapneumovirus
uuuuaaaaguuugauuca

SEQ ID NO: 357526 - RNA, 23 nt, Human metapneumovirus
aaaauaccacaaccaccccaaga

SEQ ID NO: 357527 - RNA, 18 nt, Human metapneumovirus
aaaaugacaacacugcaa

SEQ ID NO: 357528 - RNA, 18 nt, Human metapneumovirus
aaacauuggaauuaccua

SEQ ID NO: 357529 - RNA, 16 nt, Human metapneumovirus
aaaccaggucauaaaa

SEQ ID NO: 357530 - RNA, 23 nt, Human metapneumovirus
aaaccaggucauaaaagaucuca

SEQ ID NO: 357531 - RNA, 22 nt, Human metapneumovirus
aaaccaucaacuaacaccaaaa

SEQ ID NO: 357532 - RNA, 15 nt, Human metapneumovirus
aaacugaaaccauca

SEQ ID NO: 357533 - RNA, 21 nt, Human metapneumovirus
aaacugggcaaaacaacaccc

SEQ ID NO: 357534 - RNA, 13 nt, Human metapneumovirus
aaaggacucauca

SEQ ID NO: 357535 - RNA, 16 nt, Human metapneumovirus
aaaggcaacaacacca

SEQ ID NO: 357536 - RNA, 17 nt, Human metapneumovirus
aaagugggacaagucaa

SEQ ID NO: 357537 - RNA, 23 nt, Human metapneumovirus
aaaguuagaaacuaacaacuguc

SEQ ID NO: 357538 - RNA, 19 nt, Human metapneumovirus
aaauaaagcaagcaaucaa

SEQ ID NO: 357539 - RNA, 22 nt, Human metapneumovirus
aaauaacaauggauccucucaa

SEQ ID NO: 357540 - RNA, 19 nt, Human metapneumovirus
aaauacaaaauaacucuaa

SEQ ID NO: 357541 - RNA, 19 nt, Human metapneumovirus
aaauaccacaucagucaca

SEQ ID NO: 357542 - RNA, 19 nt, Human metapneumovirus
aaauaggugacaacuucau

SEQ ID NO: 357543 - RNA, 17 nt, Human metapneumovirus
aaauuugggacaaauca

SEQ ID NO: 357544 - RNA, 15 nt, Human metapneumovirus
aacaacugucauuaa

SEQ ID NO: 357545 - RNA, 15 nt, Human metapneumovirus
aacaauaacauggga

SEQ ID NO: 357546 - RNA, 13 nt, Human metapneumovirus
aacaaucugcaaa

SEQ ID NO: 357547 - RNA, 18 nt, Human metapneumovirus
aacaauggauccucucaa

SEQ ID NO: 357548 - RNA, 22 nt, Human metapneumovirus
aacacucgcccauauaccaaaa

SEQ ID NO: 357549 - RNA, 18 nt, Human metapneumovirus
aacaugggacaaguaguu

SEQ ID NO: 357550 - RNA, 20 nt, Human metapneumovirus
aacauuauucgaaaccauaa

SEQ ID NO: 357551 - RNA, 19 nt, Human metapneumovirus
aaccaaaacugaaauaaag

SEQ ID NO: 357552 - RNA, 22 nt, Human metapneumovirus
aaccauaccgucagaaccaaag

SEQ ID NO: 357553 - RNA, 13 nt, Human metapneumovirus
aaccccugcagaa

SEQ ID NO: 357554 - RNA, 16 nt, Human metapneumovirus
aacuaacaccaaaaag

SEQ ID NO: 357555 - RNA, 14 nt, Human metapneumovirus
aacuauaaaaugca

SEQ ID NO: 357556 - RNA, 17 nt, Human metapneumovirus
aacugaaggauaucuca

SEQ ID NO: 357557 - RNA, 14 nt, Human metapneumovirus
aacuggcaagagag

SEQ ID NO: 357558 - RNA, 13 nt, Human metapneumovirus
aagacuacucuaa

SEQ ID NO: 357559 - RNA, 23 nt, Human metapneumovirus
aagagcuacuaacccuaucucau

SEQ ID NO: 357560 - RNA, 23 nt, Human metapneumovirus
aagauaaaccaugcagacaccaa

SEQ ID NO: 357561 - RNA, 19 nt, Human metapneumovirus
aagcaccuuggccaagagc

SEQ ID NO: 357562 - RNA, 23 nt, Human metapneumovirus
aagccuaacaauaugguucccuu

SEQ ID NO: 357563 - RNA, 19 nt, Human metapneumovirus
aaggaccuguuaccugcaa

SEQ ID NO: 357564 - RNA, 18 nt, Human metapneumovirus
aagguggggcaaccaaaa

SEQ ID NO: 357565 - RNA, 23 nt, Human metapneumovirus
aaguaaaaacaguuuacuuaaca

SEQ ID NO: 357566 - RNA, 23 nt, Human metapneumovirus
aaguaaucauuugauuaugcaau

SEQ ID NO: 357567 - RNA, 13 nt, Human metapneumovirus
aagucaaugcgac

SEQ ID NO: 357568 - RNA, 19 nt, Human metapneumovirus
aagucucauacuaacauuu

SEQ ID NO: 357569 - RNA, 21 nt, Human metapneumovirus
aaguggaaaacaaucugcaaa

SEQ ID NO: 357570 - RNA, 17 nt, Human metapneumovirus
aaguuaguaaaaacaca

SEQ ID NO: 357571 - RNA, 21 nt, Human metapneumovirus
aaguuaguaaaaacacaucag

SEQ ID NO: 357572 - RNA, 14 nt, Human metapneumovirus
aaguugccauagag

SEQ ID NO: 357573 - RNA, 20 nt, Human metapneumovirus
aaguuucuaugauacuucau

SEQ ID NO: 357574 - RNA, 16 nt, Human metapneumovirus
aauaacaccucaacac

SEQ ID NO: 357575 - RNA, 14 nt, Human metapneumovirus
aauaacuacauuga

SEQ ID NO: 357576 - RNA, 19 nt, Human metapneumovirus
aauaucaggagcaggcaga

SEQ ID NO: 357577 - RNA, 15 nt, Human metapneumovirus
aauaugccagucaaa

SEQ ID NO: 357578 - RNA, 17 nt, Human metapneumovirus
aauaugccagucaaaaa

SEQ ID NO: 357579 - RNA, 18 nt, Human metapneumovirus
aaucaaguuagaacaaga

SEQ ID NO: 357580 - RNA, 23 nt, Human metapneumovirus
aaucaaguuagaacaagaauuaa

SEQ ID NO: 357581 - RNA, 20 nt, Human metapneumovirus
aaucuccccaaaaaggcaac

SEQ ID NO: 357582 - RNA, 14 nt, Human metapneumovirus
aauggagaagccaa

SEQ ID NO: 357583 - RNA, 15 nt, Human metapneumovirus
aauggagaagccaaa

SEQ ID NO: 357584 - RNA, 18 nt, Human metapneumovirus
aaugucuuggaaaguggu

SEQ ID NO: 357585 - RNA, 17 nt, Human metapneumovirus
aauguuuuuacacugga

SEQ ID NO: 357586 - RNA, 13 nt, Human metapneumovirus
aauuaccuacuau

SEQ ID NO: 357587 - RNA, 23 nt, Human metapneumovirus
aauuagaccugaccaaaagugca

SEQ ID NO: 357588 - RNA, 19 nt, Human metapneumovirus
aauuauauaaaaguggaaa

SEQ ID NO: 357589 - RNA, 21 nt, Human metapneumovirus
aauucacaaucuccccaaaaa

SEQ ID NO: 357590 - RNA, 13 nt, Human metapneumovirus
aauuugggacaaa

SEQ ID NO: 357591 - RNA, 21 nt, Human metapneumovirus
acaaaaugguccaauacucaa

SEQ ID NO: 357592 - RNA, 16 nt, Human metapneumovirus
acaagaauuaaaucaa

SEQ ID NO: 357593 - RNA, 17 nt, Human metapneumovirus
acaagucaaaaugucau

SEQ ID NO: 357594 - RNA, 22 nt, Human metapneumovirus
acaaugauaacauuagauguca

SEQ ID NO: 357595 - RNA, 18 nt, Human metapneumovirus
acaauggagaagccaaaa

SEQ ID NO: 357596 - RNA, 22 nt, Human metapneumovirus
acaauuacuggaguuggccaga

SEQ ID NO: 357597 - RNA, 14 nt, Human metapneumovirus
acacaccaccagca

SEQ ID NO: 357598 - RNA, 14 nt, Human metapneumovirus
acaccaacaaugga

SEQ ID NO: 357599 - RNA, 21 nt, Human metapneumovirus
acaccuaucaaggcauuccuu

SEQ ID NO: 357600 - RNA, 21 nt, Human metapneumovirus
acacucgcccauauaccaaaa

SEQ ID NO: 357601 - RNA, 22 nt, Human metapneumovirus
acacugauagagcugauggcuu

SEQ ID NO: 357602 - RNA, 19 nt, Human metapneumovirus
acagaauuagaccugacca

SEQ ID NO: 357603 - RNA, 14 nt, Human metapneumovirus
acaguaacaaucac

SEQ ID NO: 357604 - RNA, 22 nt, Human metapneumovirus
acaguuuacuuaacaaccauga

SEQ ID NO: 357605 - RNA, 14 nt, Human metapneumovirus
acaugggacaagua

SEQ ID NO: 357606 - RNA, 13 nt, Human metapneumovirus
accaacaauggag

SEQ ID NO: 357607 - RNA, 14 nt, Human metapneumovirus
accaacaauggaga

SEQ ID NO: 357608 - RNA, 12 nt, Human metapneumovirus
accaaugugguu

SEQ ID NO: 357609 - RNA, 22 nt, Human metapneumovirus
accaggucauaaaagaucucaa

SEQ ID NO: 357610 - RNA, 15 nt, Human metapneumovirus
accauaacuauucaa

SEQ ID NO: 357611 - RNA, 12 nt, Human metapneumovirus
accauaccguca

SEQ ID NO: 357612 - RNA, 21 nt, Human metapneumovirus
accauaccgucagaaccaaag

SEQ ID NO: 357613 - RNA, 22 nt, Human metapneumovirus
accaucaauuauauaaaagugg

SEQ ID NO: 357614 - RNA, 23 nt, Human metapneumovirus
acccaagagacaaauaacaaugg

SEQ ID NO: 357615 - RNA, 22 nt, Human metapneumovirus
acccagcuuaauaaaaacagaa

SEQ ID NO: 357616 - RNA, 19 nt, Human metapneumovirus
accccaagaaaaaaacugg

SEQ ID NO: 357617 - RNA, 12 nt, Human metapneumovirus
acccuccaguga

SEQ ID NO: 357618 - RNA, 16 nt, Human metapneumovirus
accuaaaaaaugacaa

SEQ ID NO: 357619 - RNA, 22 nt, Human metapneumovirus
accuaaaaaaugacaacacugc

SEQ ID NO: 357620 - RNA, 20 nt, Human metapneumovirus
accucaacacggucuuaaag

SEQ ID NO: 357621 - RNA, 18 nt, Human metapneumovirus
accuuacaugugccgaug

SEQ ID NO: 357622 - RNA, 15 nt, Human metapneumovirus
acuaacaacugucau

SEQ ID NO: 357623 - RNA, 15 nt, Human metapneumovirus
acuaacccuaucuca

SEQ ID NO: 357624 - RNA, 22 nt, Human metapneumovirus
acuauaacugaaggauaucuca

SEQ ID NO: 357625 - RNA, 21 nt, Human metapneumovirus
acuaucaguagaccugcaaaa

SEQ ID NO: 357626 - RNA, 21 nt, Human metapneumovirus
acuauucaauuuaaaaaguaa

SEQ ID NO: 357627 - RNA, 13 nt, Human metapneumovirus
acucaaagugaau

SEQ ID NO: 357628 - RNA, 22 nt, Human metapneumovirus
acucugcaauaaacagugacac

SEQ ID NO: 357629 - RNA, 15 nt, Human metapneumovirus
acugaaggauaucuc

SEQ ID NO: 357630 - RNA, 16 nt, Human metapneumovirus
acugaaggauaucuca

SEQ ID NO: 357631 - RNA, 22 nt, Human metapneumovirus
acugaaggauaucucaguguuc

SEQ ID NO: 357632 - RNA, 16 nt, Human metapneumovirus
acugauagagcugaug

SEQ ID NO: 357633 - RNA, 18 nt, Human metapneumovirus
acuuaaaagaagcuuuau

SEQ ID NO: 357634 - RNA, 16 nt, Human metapneumovirus
agaaaaccaggucaua

SEQ ID NO: 357635 - RNA, 16 nt, Human metapneumovirus
agaaacugaaaccauc

SEQ ID NO: 357636 - RNA, 19 nt, Human metapneumovirus
cacggucuuaaagagagcu

SEQ ID NO: 357637 - RNA, 16 nt, Human metapneumovirus
cacuaagagagcucag

SEQ ID NO: 357638 - RNA, 23 nt, Human metapneumovirus
cacuauaacugaaggauaucuca

SEQ ID NO: 357639 - RNA, 17 nt, Human metapneumovirus
cacucuguaugcugcau

SEQ ID NO: 357640 - RNA, 12 nt, Human metapneumovirus
cagaaccaaagu

SEQ ID NO: 357641 - RNA, 17 nt, Human metapneumovirus
cagacaccaacaaugga

SEQ ID NO: 357642 - RNA, 20 nt, Human metapneumovirus
cagagaagauaggacacaag

SEQ ID NO: 357643 - RNA, 21 nt, Human metapneumovirus
cagagaagauaggacacaaga

SEQ ID NO: 357644 - RNA, 13 nt, Human metapneumovirus
cagcccaaggugc

SEQ ID NO: 357645 - RNA, 18 nt, Human metapneumovirus
cagcuuaauaaaaacaga

SEQ ID NO: 357646 - RNA, 19 nt, Human metapneumovirus
caggucauaaaagaucuca

SEQ ID NO: 357647 - RNA, 20 nt, Human metapneumovirus
caguagaccugcaaaaccaa

SEQ ID NO: 357648 - RNA, 19 nt, Human metapneumovirus
cauaccgucagaaccaaag

SEQ ID NO: 357649 - RNA, 20 nt, Human metapneumovirus
cauagaaauuauauauguca

SEQ ID NO: 357650 - RNA, 17 nt, Human metapneumovirus
caucaacuaacaccaaa

SEQ ID NO: 357651 - RNA, 19 nt, Human metapneumovirus
caucaacuaacaccaaaaa

SEQ ID NO: 357652 - RNA, 15 nt, Human metapneumovirus
caucaucaaauacca

SEQ ID NO: 357653 - RNA, 21 nt, Human metapneumovirus
caugcagacaccaacaaugga

SEQ ID NO: 357654 - RNA, 22 nt, Human metapneumovirus
caugcagacaccaacaauggag

SEQ ID NO: 357655 - RNA, 15 nt, Human metapneumovirus
cauggaucccauuga

SEQ ID NO: 357656 - RNA, 15 nt, Human metapneumovirus
cauuagaugucauua

SEQ ID NO: 357657 - RNA, 11 nt, Human metapneumovirus
ccaaaacugaa

SEQ ID NO: 357658 - RNA, 15 nt, Human metapneumovirus
ccaaaagacaauuca

SEQ ID NO: 357659 - RNA, 17 nt, Human metapneumovirus
ccaaagcauaacaaaag

SEQ ID NO: 357660 - RNA, 23 nt, Human metapneumovirus
ccaacaauggagaagccaaaaga

SEQ ID NO: 357661 - RNA, 16 nt, Human metapneumovirus
ccaagacuacucuaaa

SEQ ID NO: 357662 - RNA, 15 nt, Human metapneumovirus
ccaagagacaaauaa

SEQ ID NO: 357663 - RNA, 14 nt, Human metapneumovirus
ccaaggugcagcaa

SEQ ID NO: 357664 - RNA, 19 nt, Human metapneumovirus
ccaccaaugugguucaagg

SEQ ID NO: 357665 - RNA, 15 nt, Human metapneumovirus
ccagucaaaaacuga

SEQ ID NO: 357666 - RNA, 20 nt, Human metapneumovirus
ccauaccgucagaaccaaag

SEQ ID NO: 357667 - RNA, 18 nt, Human metapneumovirus
ccauagagaauccuguua

SEQ ID NO: 357668 - RNA, 22 nt, Human metapneumovirus
cccaaaaaauuugaagucaaug

SEQ ID NO: 357669 - RNA, 14 nt, Human metapneumovirus
cccaaggugcagca

SEQ ID NO: 357670 - RNA, 16 nt, Human metapneumovirus
cccaaggugcagcaau

SEQ ID NO: 357671 - RNA, 14 nt, Human metapneumovirus
ccccugcagaaaag

SEQ ID NO: 357672 - RNA, 18 nt, Human metapneumovirus
cgcccauauaccaaaaau

SEQ ID NO: 357673 - RNA, 16 nt, Human metapneumovirus
cuaaaaacccugacaa

SEQ ID NO: 357674 - RNA, 13 nt, Human metapneumovirus
cuaacaccaaaaa

SEQ ID NO: 357675 - RNA, 15 nt, Human metapneumovirus
cuaacccuaucucau

SEQ ID NO: 357676 - RNA, 16 nt, Human metapneumovirus
cuaagagagcucagaa

SEQ ID NO: 357677 - RNA, 20 nt, Human metapneumovirus
cuacauaauauaaucaaaca

SEQ ID NO: 357678 - RNA, 17 nt, Human metapneumovirus
cuacuaacccuaucuca

SEQ ID NO: 357679 - RNA, 18 nt, Human metapneumovirus
cuacuaacccuaucucau

SEQ ID NO: 357680 - RNA, 15 nt, Human metapneumovirus
cuaguagacaccuau

SEQ ID NO: 357681 - RNA, 22 nt, Human metapneumovirus
cuauaacugaaggauaucucag

SEQ ID NO: 357682 - RNA, 12 nt, Human metapneumovirus
cucaaagugaau

SEQ ID NO: 357683 - RNA, 22 nt, Human metapneumovirus
cucagaacaguuucugcugauc

SEQ ID NO: 357684 - RNA, 22 nt, Human metapneumovirus
cucaucaucaaauaccacauca

SEQ ID NO: 357685 - RNA, 12 nt, Human metapneumovirus
cuccccaaaaag

SEQ ID NO: 357686 - RNA, 15 nt, Human metapneumovirus
cuccccaaaaaggca

SEQ ID NO: 357687 - RNA, 22 nt, Human metapneumovirus
cucgaucagcuaaaaacccuga

SEQ ID NO: 357688 - RNA, 21 nt, Human metapneumovirus
cucuaaaucaugauaucacac

SEQ ID NO: 357689 - RNA, 15 nt, Human metapneumovirus
cugaaggauaucuca

SEQ ID NO: 357690 - RNA, 16 nt, Human metapneumovirus
cugaaggauaucucag

SEQ ID NO: 357691 - RNA, 22 nt, Human metapneumovirus
cugaaggauaucucaguguucu

SEQ ID NO: 357692 - RNA, 18 nt, Human metapneumovirus
cugaaucagaacaucaca

SEQ ID NO: 357693 - RNA, 16 nt, Human metapneumovirus
cugacaauaaccacuc

SEQ ID NO: 357694 - RNA, 23 nt, Human metapneumovirus
cugaccaaaagugcacuaagaga

SEQ ID NO: 357695 - RNA, 18 nt, Human metapneumovirus
cugcaaauaugccaguca

SEQ ID NO: 357696 - RNA, 16 nt, Human metapneumovirus
cugcaauaaacaguga

SEQ ID NO: 357697 - RNA, 22 nt, Human metapneumovirus
cugguaaagugcuuauuguacu

SEQ ID NO: 357698 - RNA, 13 nt, Human metapneumovirus
cuuaacaaccaug

SEQ ID NO: 357699 - RNA, 15 nt, Human metapneumovirus
cuuaacaaccaugaa

SEQ ID NO: 357700 - RNA, 16 nt, Human metapneumovirus
cuuaaucaucaucaca

SEQ ID NO: 357701 - RNA, 14 nt, Human metapneumovirus
cuucaaaaacaugu

SEQ ID NO: 357702 - RNA, 13 nt, Human metapneumovirus
cuuugguccucau

SEQ ID NO: 357703 - RNA, 12 nt, Human metapneumovirus
gaaaauaaacag

SEQ ID NO: 357704 - RNA, 18 nt, Human metapneumovirus
gaaacuaacaacugucau

SEQ ID NO: 357705 - RNA, 15 nt, Human metapneumovirus
gaaaguggagaacau

SEQ ID NO: 357706 - RNA, 16 nt, Human metapneumovirus
gaaaguggugaucauu

SEQ ID NO: 357707 - RNA, 17 nt, Human metapneumovirus
gaagagucuaccgagaa

SEQ ID NO: 357708 - RNA, 15 nt, Human metapneumovirus
gaauacuguaucaga

SEQ ID NO: 357709 - RNA, 19 nt, Human metapneumovirus
gacaaaaaggacucaucau

SEQ ID NO: 357710 - RNA, 16 nt, Human metapneumovirus
gacaaauaacaaugga

SEQ ID NO: 357711 - RNA, 16 nt, Human metapneumovirus
gacaccaacaauggag

SEQ ID NO: 357712 - RNA, 13 nt, Human metapneumovirus
gaccuuaccuaaa

SEQ ID NO: 357713 - RNA, 14 nt, Human metapneumovirus
gacucaaaaaugca

SEQ ID NO: 357714 - RNA, 15 nt, Human metapneumovirus
gacucaaaaaugcag

SEQ ID NO: 357715 - RNA, 20 nt, Human metapneumovirus
gacucauaucuuaaaggagu

SEQ ID NO: 357716 - RNA, 18 nt, Human metapneumovirus
gagaacauucgaacaaua

SEQ ID NO: 357717 - RNA, 16 nt, Human metapneumovirus
gagaagccaaaagaca

SEQ ID NO: 357718 - RNA, 13 nt, Human metapneumovirus
gagacuaaugcaa

SEQ ID NO: 357719 - RNA, 14 nt, Human metapneumovirus
gagacuaaugcaau

SEQ ID NO: 357720 - RNA, 18 nt, Human metapneumovirus
gagcaggcagagaagaua

SEQ ID NO: 357721 - RNA, 20 nt, Human metapneumovirus
gagcugauggcuuaucaaua

SEQ ID NO: 357722 - RNA, 11 nt, Human metapneumovirus
gagugggauaa

SEQ ID NO: 357723 - RNA, 16 nt, Human metapneumovirus
gauaaccaaagcauaa

SEQ ID NO: 357724 - RNA, 20 nt, Human metapneumovirus
gaucucaaucuauuauagga

SEQ ID NO: 357725 - RNA, 14 nt, Human metapneumovirus
gaugauaaccaaag

SEQ ID NO: 357726 - RNA, 19 nt, Human metapneumovirus
gaugauaaccaaagcauaa

SEQ ID NO: 357727 - RNA, 20 nt, Human metapneumovirus
gcaaaacaacacccaagaga

SEQ ID NO: 357728 - RNA, 23 nt, Human metapneumovirus
gcaaaacaacacccaagagacaa

SEQ ID NO: 357729 - RNA, 14 nt, Human metapneumovirus
gcaaaaccaaccau

SEQ ID NO: 357730 - RNA, 14 nt, Human metapneumovirus
gcaaaugcaauaga

SEQ ID NO: 357731 - RNA, 14 nt, Human metapneumovirus
gcaagcaaucaaag

SEQ ID NO: 357732 - RNA, 22 nt, Human metapneumovirus
gcaaggcuccgugcaaauauga

SEQ ID NO: 357733 - RNA, 17 nt, Human metapneumovirus
gcaccuuggccaagagc

SEQ ID NO: 357734 - RNA, 23 nt, Human metapneumovirus
gcagaaaagaaacugaaaccauc

SEQ ID NO: 357735 - RNA, 23 nt, Human metapneumovirus
gcaggcagagaagauaggacaca

SEQ ID NO: 357736 - RNA, 13 nt, Human metapneumovirus
gcauaacaaaagc

SEQ ID NO: 357737 - RNA, 14 nt, Human metapneumovirus
gcauguuagacuca

SEQ ID NO: 357738 - RNA, 20 nt, Human metapneumovirus
gccagucaaaaacugaauca

SEQ ID NO: 357739 - RNA, 14 nt, Human metapneumovirus
gcccauauaccaaa

SEQ ID NO: 357740 - RNA, 19 nt, Human metapneumovirus
gcuacuuagaagagucaug

SEQ ID NO: 357741 - RNA, 14 nt, Human metapneumovirus
gcucgaucagcuaa

SEQ ID NO: 357742 - RNA, 14 nt, Human metapneumovirus
gcuuaucaauaaua

SEQ ID NO: 357743 - RNA, 19 nt, Human metapneumovirus
gcuuuaucugaugggauag

SEQ ID NO: 357744 - RNA, 17 nt, Human metapneumovirus
ggaauuaccuacuauca

SEQ ID NO: 357745 - RNA, 24 nt, Human metapneumovirus
ggaauuugacaaacucacagucug

SEQ ID NO: 357746 - RNA, 23 nt, Human metapneumovirus
ggcagagaagauaggacacaaga

SEQ ID NO: 357747 - RNA, 19 nt, Human metapneumovirus
ggcauuccuuacacagcag

SEQ ID NO: 357748 - RNA, 21 nt, Human metapneumovirus
uguuagacucaaaaaugcagu

SEQ ID NO: 357749 - RNA, 20 nt, Human metapneumovirus
uuaaaaagaccuuaccuaaa

SEQ ID NO: 357750 - RNA, 18 nt, Human metapneumovirus
uuauaggagaaaaaguga

SEQ ID NO: 357751 - RNA, 20 nt, Human metapneumovirus
uucaaaaacauguacucacc

SEQ ID NO: 357752 - RNA, 19 nt, Human metapneumovirus
uucacaaucuccccaaaaa

SEQ ID NO: 357753 - RNA, 18 nt, Human metapneumovirus
uuucucacaguaacaauc

SEQ ID NO: 357754 - RNA, 12 nt, Human metapneumovirus
aaaaaaugacaa

SEQ ID NO: 357755 - RNA, 17 nt, Human metapneumovirus
aaaaacaguuuacuuaa

SEQ ID NO: 357756 - RNA, 13 nt, Human metapneumovirus
aaaaauaccacaa

SEQ ID NO: 357757 - RNA, 22 nt, Human metapneumovirus
aaaacacucgcccauauaccaa

SEQ ID NO: 357758 - RNA, 17 nt, Human metapneumovirus
aaaacugaaucagacaa

SEQ ID NO: 357759 - RNA, 19 nt, Human metapneumovirus
aaaacugggcaaaacaaca

SEQ ID NO: 357760 - RNA, 20 nt, Human metapneumovirus
aaaagaaacugaaaccauca

SEQ ID NO: 357761 - RNA, 14 nt, Human metapneumovirus
aaaagaagcuuuau

SEQ ID NO: 357762 - RNA, 21 nt, Human metapneumovirus
aaaagacaauucacaaucucc

SEQ ID NO: 357763 - RNA, 16 nt, Human metapneumovirus
aaaagaccuuaccuaa

SEQ ID NO: 357764 - RNA, 22 nt, Human metapneumovirus
aaaagugcacuaagagagcuca

SEQ ID NO: 357765 - RNA, 17 nt, Human metapneumovirus
aaaaguggaaaacaauc

SEQ ID NO: 357766 - RNA, 15 nt, Human metapneumovirus
aaaauaacucuaaga

SEQ ID NO: 357767 - RNA, 23 nt, Human metapneumovirus
agaagcuuuaucugaugggauag

SEQ ID NO: 357768 - RNA, 19 nt, Human metapneumovirus
agacaaaaaggacucauca

SEQ ID NO: 357769 - RNA, 14 nt, Human metapneumovirus
agacaccaacaaug

SEQ ID NO: 357770 - RNA, 13 nt, Human metapneumovirus
agacucaaaaaug

SEQ ID NO: 357771 - RNA, 20 nt, Human metapneumovirus
agagagcucagaacaguuuc

SEQ ID NO: 357772 - RNA, 23 nt, Human metapneumovirus
agagugggauaaaugacaaugau

SEQ ID NO: 357773 - RNA, 21 nt, Human metapneumovirus
agauaaagguggggcaaccaa

SEQ ID NO: 357774 - RNA, 23 nt, Human metapneumovirus
agauaaagguggggcaaccaaaa

SEQ ID NO: 357775 - RNA, 19 nt, Human metapneumovirus
agauagauacuuauuaaua

SEQ ID NO: 357776 - RNA, 16 nt, Human metapneumovirus
agauaggacacaagau

SEQ ID NO: 357777 - RNA, 22 nt, Human metapneumovirus
agauaugcucaaagcaagagua

SEQ ID NO: 357778 - RNA, 15 nt, Human metapneumovirus
agcaaucaaagucau

SEQ ID NO: 357779 - RNA, 22 nt, Human metapneumovirus
agcagugcugcucgaucagcua

SEQ ID NO: 357780 - RNA, 23 nt, Human metapneumovirus
agcagugcugcucgaucagcuaa

SEQ ID NO: 357781 - RNA, 15 nt, Human metapneumovirus
agcauaacaaaagcu

SEQ ID NO: 357782 - RNA, 19 nt, Human metapneumovirus
agcuacuuagaagagucau

SEQ ID NO: 357783 - RNA, 17 nt, Human metapneumovirus
agcuuuacuaacauuuc

SEQ ID NO: 357784 - RNA, 23 nt, Human metapneumovirus
aggcauuccuuacacagcagcug

SEQ ID NO: 357785 - RNA, 20 nt, Human metapneumovirus
aggccaacacaccaccagca

SEQ ID NO: 357786 - RNA, 20 nt, Human metapneumovirus
agucuacauaauauaaucaa

SEQ ID NO: 357787 - RNA, 18 nt, Human metapneumovirus
agugaaugcaucagccca

SEQ ID NO: 357788 - RNA, 20 nt, Human metapneumovirus
aguggaaaacaaucugcaaa

SEQ ID NO: 357789 - RNA, 16 nt, Human metapneumovirus
agugggacaagucaaa

SEQ ID NO: 357790 - RNA, 16 nt, Human metapneumovirus
aguuaauuaaaaacua

SEQ ID NO: 357791 - RNA, 16 nt, Human metapneumovirus
auaaaaacagaauuag

SEQ ID NO: 357792 - RNA, 22 nt, Human metapneumovirus
auaaacagaaaucaaugcacaa

SEQ ID NO: 357793 - RNA, 16 nt, Human metapneumovirus
auaaagcaagcaauca

SEQ ID NO: 357794 - RNA, 18 nt, Human metapneumovirus
auaaagguggggcaacca

SEQ ID NO: 357795 - RNA, 20 nt, Human metapneumovirus
auaaagguggggcaaccaaa

SEQ ID NO: 357796 - RNA, 21 nt, Human metapneumovirus
auaaagguggggcaaccaaaa

SEQ ID NO: 357797 - RNA, 19 nt, Human metapneumovirus
auaacaauggauccucuca

SEQ ID NO: 357798 - RNA, 19 nt, Human metapneumovirus
auaaccaaagcauaacaaa

SEQ ID NO: 357799 - RNA, 20 nt, Human metapneumovirus
auaaccacucuguaugcugc

SEQ ID NO: 357800 - RNA, 16 nt, Human metapneumovirus
auaauaauaaguaaua

SEQ ID NO: 357801 - RNA, 17 nt, Human metapneumovirus
auacaaaauaacucuaa

SEQ ID NO: 357802 - RNA, 14 nt, Human metapneumovirus
auacaaacucugca

SEQ ID NO: 357803 - RNA, 16 nt, Human metapneumovirus
auacaaacucugcaau

SEQ ID NO: 357804 - RNA, 12 nt, Human metapneumovirus
auaccaaaaaua

SEQ ID NO: 357805 - RNA, 22 nt, Human metapneumovirus
auaccacaaccaccccaagaaa

SEQ ID NO: 357806 - RNA, 19 nt, Human metapneumovirus
auaccgucagaaccaaagu

SEQ ID NO: 357807 - RNA, 21 nt, Human metapneumovirus
auagagcugauggcuuaucaa

SEQ ID NO: 357808 - RNA, 17 nt, Human metapneumovirus
auagaucauaaagucac

SEQ ID NO: 357809 - RNA, 20 nt, Human metapneumovirus
auaggagaaaaagugaauac

SEQ ID NO: 357810 - RNA, 20 nt, Human metapneumovirus
auauaaucaaacaacuacaa

SEQ ID NO: 357811 - RNA, 14 nt, Human metapneumovirus
auauaccaaaaaua

SEQ ID NO: 357812 - RNA, 14 nt, Human metapneumovirus
auaucuuaaaggag

SEQ ID NO: 357813 - RNA, 18 nt, Human metapneumovirus
auaugccagucaaaaacu

SEQ ID NO: 357814 - RNA, 23 nt, Human metapneumovirus
auauuagcucugcccaaaucucc

SEQ ID NO: 357815 - RNA, 18 nt, Human metapneumovirus
auauugaugauaaccaaa

SEQ ID NO: 357816 - RNA, 12 nt, Human metapneumovirus
aucaaagucaug

SEQ ID NO: 357817 - RNA, 19 nt, Human metapneumovirus
aucaaagucauggauccca

SEQ ID NO: 357818 - RNA, 18 nt, Human metapneumovirus
aucaaauaccacaucagu

SEQ ID NO: 357819 - RNA, 16 nt, Human metapneumovirus
aucaagaacgggacaa

SEQ ID NO: 357820 - RNA, 20 nt, Human metapneumovirus
aucagaaacauuggaauuac

SEQ ID NO: 357821 - RNA, 12 nt, Human metapneumovirus
aucaugauauca

SEQ ID NO: 357822 - RNA, 23 nt, Human metapneumovirus
aucauuaagaaaaccaggucaua

SEQ ID NO: 357823 - RNA, 21 nt, Human metapneumovirus
aucgagcauguuagacucaaa

SEQ ID NO: 357824 - RNA, 14 nt, Human metapneumovirus
aucuccccaaaaag

SEQ ID NO: 357825 - RNA, 13 nt, Human metapneumovirus
augaagcagcaaa

SEQ ID NO: 357826 - RNA, 14 nt, Human metapneumovirus
augaagcagcaaaa

SEQ ID NO: 357827 - RNA, 14 nt, Human metapneumovirus
augaauauagcaaa

SEQ ID NO: 357828 - RNA, 20 nt, Human metapneumovirus
augaauauagcaaacuggaa

SEQ ID NO: 357829 - RNA, 14 nt, Human metapneumovirus
augcugcaucacaa

SEQ ID NO: 357830 - RNA, 19 nt, Human metapneumovirus
auggacucacaaggacuua

SEQ ID NO: 357831 - RNA, 22 nt, Human metapneumovirus
auggagaagccaaaagacaauu

SEQ ID NO: 357832 - RNA, 15 nt, Human metapneumovirus
auguacucaccucaa

SEQ ID NO: 357833 - RNA, 18 nt, Human metapneumovirus
auguacucaccucaaaaa

SEQ ID NO: 357834 - RNA, 18 nt, Human metapneumovirus
augucaaggcuuacuuaa

SEQ ID NO: 357835 - RNA, 16 nt, Human metapneumovirus
auguuagacucaaaaa

SEQ ID NO: 357836 - RNA, 16 nt, Human metapneumovirus
auuaaaauuaaaaaua

SEQ ID NO: 357837 - RNA, 18 nt, Human metapneumovirus
auuaauaagaucaaauua

SEQ ID NO: 357838 - RNA, 19 nt, Human metapneumovirus
auuacuggaguuggccaga

SEQ ID NO: 357839 - RNA, 22 nt, Human metapneumovirus
auuagcucugcccaaaucuccc

SEQ ID NO: 357840 - RNA, 15 nt, Human metapneumovirus
auuccuuacacagca

SEQ ID NO: 357841 - RNA, 17 nt, Human metapneumovirus
auucgaaaccauaacua

SEQ ID NO: 357842 - RNA, 17 nt, Human metapneumovirus
caaaaacugaaucagac

SEQ ID NO: 357843 - RNA, 12 nt, Human metapneumovirus
caaaaauaccac

SEQ ID NO: 357844 - RNA, 16 nt, Human metapneumovirus
caaaaguugccauaga

SEQ ID NO: 357845 - RNA, 19 nt, Human metapneumovirus
caaaaguugccauagagaa

SEQ ID NO: 357846 - RNA, 23 nt, Human metapneumovirus
caaaaugucauucccugaaggaa

SEQ ID NO: 357847 - RNA, 18 nt, Human metapneumovirus
caaacucacagucuguga

SEQ ID NO: 357848 - RNA, 13 nt, Human metapneumovirus
caaacucugcaau

SEQ ID NO: 357849 - RNA, 13 nt, Human metapneumovirus
caacaauggagaa

SEQ ID NO: 357850 - RNA, 23 nt, Human metapneumovirus
caacaauggagaagccaaaagac

SEQ ID NO: 357851 - RNA, 22 nt, Human metapneumovirus
caacacaccaccagcagugcug

SEQ ID NO: 357852 - RNA, 14 nt, Human metapneumovirus
caacacccaagaga

SEQ ID NO: 357853 - RNA, 21 nt, Human metapneumovirus
caacacccaagagacaaauaa

SEQ ID NO: 357854 - RNA, 15 nt, Human metapneumovirus
caaccaccccaagaa

SEQ ID NO: 357855 - RNA, 16 nt, Human metapneumovirus
caaccaccccaagaaa

SEQ ID NO: 357856 - RNA, 14 nt, Human metapneumovirus
caacuggcaagaga

SEQ ID NO: 357857 - RNA, 22 nt, Human metapneumovirus
caagagacaaauaacaauggau

SEQ ID NO: 357858 - RNA, 21 nt, Human metapneumovirus
caagagcuacuaacccuaucu

SEQ ID NO: 357859 - RNA, 15 nt, Human metapneumovirus
caauaaccacucugu

SEQ ID NO: 357860 - RNA, 16 nt, Human metapneumovirus
caauaaccacucugua

SEQ ID NO: 357861 - RNA, 23 nt, Human metapneumovirus
caauaaccacucuguaugcugca

SEQ ID NO: 357862 - RNA, 15 nt, Human metapneumovirus
caauacucaaaguga

SEQ ID NO: 357863 - RNA, 11 nt, Human metapneumovirus
caaucugcaaa

SEQ ID NO: 357864 - RNA, 21 nt, Human metapneumovirus
caaugauaacauuagauguca

SEQ ID NO: 357865 - RNA, 21 nt, Human metapneumovirus
caaugcgacuguagcacucga

SEQ ID NO: 357866 - RNA, 19 nt, Human metapneumovirus
caauggagaagccaaaaga

SEQ ID NO: 357867 - RNA, 22 nt, Human metapneumovirus
caauuauguaauaguuaauuaa

SEQ ID NO: 357868 - RNA, 14 nt, Human metapneumovirus
cacaaaauggucca

SEQ ID NO: 357869 - RNA, 14 nt, Human metapneumovirus
cacaaggacuuaaa

SEQ ID NO: 357870 - RNA, 20 nt, Human metapneumovirus
cacaauuacuggaguuggcc

SEQ ID NO: 357871 - RNA, 21 nt, Human metapneumovirus
cacaccaccagcagugcugcu

SEQ ID NO: 357872 - RNA, 21 nt, Human metapneumovirus
cacagcagcuguucaaguuga

SEQ ID NO: 357873 - RNA, 17 nt, Human metapneumovirus
cacaguaacaaucacca

SEQ ID NO: 357874 - RNA, 14 nt, Human metapneumovirus
cacaucagucacaa

SEQ ID NO: 357875 - RNA, 20 nt, Human metapneumovirus
caccaacaauggagaagcca

SEQ ID NO: 357876 - RNA, 16 nt, Human metapneumovirus
caccuuggccaagagc

SEQ ID NO: 357877 - RNA, 19 nt, Human metapneumovirus
ggguaaugaagcagcaaaa

SEQ ID NO: 357878 - RNA, 18 nt, Human metapneumovirus
gguaaugaagcagcaaaa

SEQ ID NO: 357879 - RNA, 13 nt, Human metapneumovirus
guaaaaaacaaua

SEQ ID NO: 357880 - RNA, 16 nt, Human metapneumovirus
guaaaaaacaauaaca

SEQ ID NO: 357881 - RNA, 15 nt, Human metapneumovirus
guagacaccuaucaa

SEQ ID NO: 357882 - RNA, 23 nt, Human metapneumovirus
guauacaaacucugcaauaaaca

SEQ ID NO: 357883 - RNA, 13 nt, Human metapneumovirus
gucagaaccaaag

SEQ ID NO: 357884 - RNA, 22 nt, Human metapneumovirus
gucauaaaagaucucaaucuau

SEQ ID NO: 357885 - RNA, 20 nt, Human metapneumovirus
guccaauacucaaagugaau

SEQ ID NO: 357886 - RNA, 19 nt, Human metapneumovirus
guccucauaggaauaacua

SEQ ID NO: 357887 - RNA, 13 nt, Human metapneumovirus
gucuucaaaaaca

SEQ ID NO: 357888 - RNA, 19 nt, Human metapneumovirus
guggaaaacaaucugcaaa

SEQ ID NO: 357889 - RNA, 15 nt, Human metapneumovirus
guggggcaaccaaaa

SEQ ID NO: 357890 - RNA, 16 nt, Human metapneumovirus
guucaaguugaucuaa

SEQ ID NO: 357891 - RNA, 17 nt, Human metapneumovirus
guuuacuuaacaaccau

SEQ ID NO: 357892 - RNA, 13 nt, Human metapneumovirus
uaaaaacacauca

SEQ ID NO: 357893 - RNA, 19 nt, Human metapneumovirus
uaaaaacagaauuagaccu

SEQ ID NO: 357894 - RNA, 18 nt, Human metapneumovirus
uaaaaagaccuuaccuaa

SEQ ID NO: 357895 - RNA, 21 nt, Human metapneumovirus
uaaaagugaugggucuucaaa

SEQ ID NO: 357896 - RNA, 17 nt, Human metapneumovirus
uaaaaguuugauucaaa

SEQ ID NO: 357897 - RNA, 20 nt, Human metapneumovirus
uaaagguggggcaaccaaaa

SEQ ID NO: 357898 - RNA, 15 nt, Human metapneumovirus
uaacaaucaccauca

SEQ ID NO: 357899 - RNA, 13 nt, Human metapneumovirus
uaacaccaaaaag

SEQ ID NO: 357900 - RNA, 21 nt, Human metapneumovirus
uaaccaaagcauaacaaaagc

SEQ ID NO: 357901 - RNA, 18 nt, Human metapneumovirus
uaacugaaggauaucuca

SEQ ID NO: 357902 - RNA, 15 nt, Human metapneumovirus
uaagauaaaccaugc

SEQ ID NO: 357903 - RNA, 13 nt, Human metapneumovirus
uaauauaaucaaa

SEQ ID NO: 357904 - RNA, 17 nt, Human metapneumovirus
uaaugaagcagcaaaau

SEQ ID NO: 357905 - RNA, 23 nt, Human metapneumovirus
uaauugcuuaaucaucaucacaa

SEQ ID NO: 357906 - RNA, 14 nt, Human metapneumovirus
uacaaaauaacucu

SEQ ID NO: 357907 - RNA, 18 nt, Human metapneumovirus
uaccgucagaaccaaagu

SEQ ID NO: 357908 - RNA, 17 nt, Human metapneumovirus
uaccuaaaaaaugacaa

SEQ ID NO: 357909 - RNA, 14 nt, Human metapneumovirus
uaccugcaagccua

SEQ ID NO: 357910 - RNA, 18 nt, Human metapneumovirus
uaccugcaagccuaacaa

SEQ ID NO: 357911 - RNA, 23 nt, Human metapneumovirus
uacucaaagugaaugcaucagcc

SEQ ID NO: 357912 - RNA, 19 nt, Human metapneumovirus
uacuuauuaauaagaucaa

SEQ ID NO: 357913 - RNA, 13 nt, Human metapneumovirus
uacuucauaauaa

SEQ ID NO: 357914 - RNA, 14 nt, Human metapneumovirus
uacuucccaaaaaa

SEQ ID NO: 357915 - RNA, 20 nt, Human metapneumovirus
uagaagagucauguagcacu

SEQ ID NO: 357916 - RNA, 14 nt, Human metapneumovirus
uagacaccuaucaa

SEQ ID NO: 357917 - RNA, 18 nt, Human metapneumovirus
uagcaaacuggaauuuga

SEQ ID NO: 357918 - RNA, 23 nt, Human metapneumovirus
uagcaaacuggaauuugacaaac

SEQ ID NO: 357919 - RNA, 14 nt, Human metapneumovirus
uaggugacaacuuc

SEQ ID NO: 357920 - RNA, 16 nt, Human metapneumovirus
uagguuccaccaaugu

SEQ ID NO: 357921 - RNA, 17 nt, Human metapneumovirus
uaguaaaaacacaucag

SEQ ID NO: 357922 - RNA, 18 nt, Human metapneumovirus
uagugagacuaaugcaau

SEQ ID NO: 357923 - RNA, 20 nt, Human metapneumovirus
uauaacugaaggauaucuca

SEQ ID NO: 357924 - RNA, 13 nt, Human metapneumovirus
uauauaaaagugg

SEQ ID NO: 357925 - RNA, 22 nt, Human metapneumovirus
uauauaaaaguggaaaacaauc

SEQ ID NO: 357926 - RNA, 21 nt, Human metapneumovirus
uauauugaugauaaccaaagc

SEQ ID NO: 357927 - RNA, 20 nt, Human metapneumovirus
uaucugaucauaaacuauaa

SEQ ID NO: 357928 - RNA, 22 nt, Human metapneumovirus
uauuaaaucaacuuuuaaggaa

SEQ ID NO: 357929 - RNA, 17 nt, Human metapneumovirus
uauugaugauaaccaaa

SEQ ID NO: 357930 - RNA, 23 nt, Human metapneumovirus
ucaaaaaaauaauuaaagaccac

SEQ ID NO: 357931 - RNA, 17 nt, Human metapneumovirus
ucaaacaacuacaagaa

SEQ ID NO: 357932 - RNA, 16 nt, Human metapneumovirus
ucaaauaccacaucag

SEQ ID NO: 357933 - RNA, 14 nt, Human metapneumovirus
ucaaguugaucuaa

SEQ ID NO: 357934 - RNA, 13 nt, Human metapneumovirus
ucaaucaagaacg

SEQ ID NO: 357935 - RNA, 18 nt, Human metapneumovirus
ucaaugaauccacuguua

SEQ ID NO: 357936 - RNA, 13 nt, Human metapneumovirus
ucaauuauauaaa

SEQ ID NO: 357937 - RNA, 16 nt, Human metapneumovirus
ucacaguaacaaucac

SEQ ID NO: 357938 - RNA, 17 nt, Human metapneumovirus
ucacagucugugaagua

SEQ ID NO: 357939 - RNA, 12 nt, Human metapneumovirus
ucagaacaguuu

SEQ ID NO: 357940 - RNA, 23 nt, Human metapneumovirus
ucagaacaguuucugcugaucaa

SEQ ID NO: 357941 - RNA, 12 nt, Human metapneumovirus
ucagaaccaaag

SEQ ID NO: 357942 - RNA, 14 nt, Human metapneumovirus
ucagagugggauaa

SEQ ID NO: 357943 - RNA, 17 nt, Human metapneumovirus
ucagcuaaaaacccuga

SEQ ID NO: 357944 - RNA, 21 nt, Human metapneumovirus
ucaguagaccugcaaaaccaa

SEQ ID NO: 357945 - RNA, 14 nt, Human metapneumovirus
ucaucaaauaccac

SEQ ID NO: 357946 - RNA, 20 nt, Human metapneumovirus
ucauggaucccauugaagaa

SEQ ID NO: 357947 - RNA, 17 nt, Human metapneumovirus
ucauggguaaugaagca

SEQ ID NO: 357948 - RNA, 13 nt, Human metapneumovirus
ucaugucucuuaa

SEQ ID NO: 357949 - RNA, 17 nt, Human metapneumovirus
uccaauacucaaaguga

SEQ ID NO: 357950 - RNA, 23 nt, Human metapneumovirus
uccauccaagucuguuaguucaa

SEQ ID NO: 357951 - RNA, 21 nt, Human metapneumovirus
ucccaaaaaauuugaagucaa

SEQ ID NO: 357952 - RNA, 22 nt, Human metapneumovirus
ucccaaaaaauuugaagucaau

SEQ ID NO: 357953 - RNA, 15 nt, Human metapneumovirus
uccccaaaaaggcaa

SEQ ID NO: 357954 - RNA, 20 nt, Human metapneumovirus
uccccaaaaaggcaacaaca

SEQ ID NO: 357955 - RNA, 19 nt, Human metapneumovirus
ucccuggaaaaaacacucg

SEQ ID NO: 357956 - RNA, 17 nt, Human metapneumovirus
ucuaaaucaugauauca

SEQ ID NO: 357957 - RNA, 20 nt, Human metapneumovirus
ucuaaaucaugauaucacac

SEQ ID NO: 357958 - RNA, 18 nt, Human metapneumovirus
ucuaagauaaaccaugca

SEQ ID NO: 357959 - RNA, 15 nt, Human metapneumovirus
ucuaugauacuucau

SEQ ID NO: 357960 - RNA, 15 nt, Human metapneumovirus
ucucaaucuauuaua

SEQ ID NO: 357961 - RNA, 17 nt, Human metapneumovirus
ucucauacuaacauuua

SEQ ID NO: 357962 - RNA, 17 nt, Human metapneumovirus
ucucccuggaaaaaaca

SEQ ID NO: 357963 - RNA, 20 nt, Human metapneumovirus
ucugcaaauaugccagucaa

SEQ ID NO: 357964 - RNA, 21 nt, Human metapneumovirus
ucuuggaaaguggugaucauu

SEQ ID NO: 357965 - RNA, 17 nt, Human metapneumovirus
ugaauacuguaucagaa

SEQ ID NO: 357966 - RNA, 18 nt, Human metapneumovirus
ugaauacuguaucagaaa

SEQ ID NO: 357967 - RNA, 17 nt, Human metapneumovirus
ugaauauagcaaacugg

SEQ ID NO: 357968 - RNA, 22 nt, Human metapneumovirus
ugaauccacuguuaaugucuau

SEQ ID NO: 357969 - RNA, 19 nt, Human metapneumovirus
ugaugauaaccaaagcaua

SEQ ID NO: 357970 - RNA, 20 nt, Human metapneumovirus
ugaugauaaccaaagcauaa

SEQ ID NO: 357971 - RNA, 14 nt, Human metapneumovirus
ugaugggaaaaccc

SEQ ID NO: 357972 - RNA, 15 nt, Human metapneumovirus
ugcaagccuaacaau

SEQ ID NO: 357973 - RNA, 20 nt, Human metapneumovirus
ugcaauugguucaugucucu

SEQ ID NO: 357974 - RNA, 19 nt, Human metapneumovirus
ugcagacaccaacaaugga

SEQ ID NO: 357975 - RNA, 17 nt, Human metapneumovirus
uggaauuaccuacuauc

SEQ ID NO: 357976 - RNA, 16 nt, Human metapneumovirus
uggagaagccaaaaga

SEQ ID NO: 357977 - RNA, 17 nt, Human metapneumovirus
uggagaagccaaaagac

SEQ ID NO: 357978 - RNA, 14 nt, Human metapneumovirus
uggcuuaucaauaa

SEQ ID NO: 357979 - RNA, 21 nt, Human metapneumovirus
ugggacaaaucauaaugucuc

SEQ ID NO: 357980 - RNA, 20 nt, Human metapneumovirus
ugggacaaguaaaaauggag

SEQ ID NO: 357981 - RNA, 14 nt, Human metapneumovirus
uggggcaaccaaaa

SEQ ID NO: 357982 - RNA, 15 nt, Human metapneumovirus
uggggcaaccaaaac

SEQ ID NO: 357983 - RNA, 12 nt, Human metapneumovirus
uggguaaugaag

SEQ ID NO: 357984 - RNA, 18 nt, Human metapneumovirus
ugguccaauacucaaagu

SEQ ID NO: 357985 - RNA, 23 nt, Human metapneumovirus
ugguucaugucucuuaaaaagac

SEQ ID NO: 357986 - RNA, 22 nt, Human metapneumovirus
uguaugcugcaucacaaaaugg

SEQ ID NO: 357987 - RNA, 18 nt, Human metapneumovirus
ugucucuuaaaaagaccu

SEQ ID NO: 357988 - RNA, 18 nt, Human papillomavirus type 16
cacaucauuaauaauauu

SEQ ID NO: 357989 - RNA, 12 nt, Human papillomavirus type 16
cagaaacagaga

SEQ ID NO: 357990 - RNA, 20 nt, Human papillomavirus type 16
cagaccuacgugaccauaua

SEQ ID NO: 357991 - RNA, 17 nt, Human papillomavirus type 16
cagcaacuaugguuuaa

SEQ ID NO: 357992 - RNA, 21 nt, Human papillomavirus type 16
caggaagcaaaacaacauaga

SEQ ID NO: 357993 - RNA, 22 nt, Human papillomavirus type 16
caggauguauaaaaaaacaugg

SEQ ID NO: 357994 - RNA, 17 nt, Human papillomavirus type 16
caggugaagauuuggua

SEQ ID NO: 357995 - RNA, 17 nt, Human papillomavirus type 16
caguuugauggagacau

SEQ ID NO: 357996 - RNA, 20 nt, Human papillomavirus type 16
caguuugauggagacauaug

SEQ ID NO: 357997 - RNA, 23 nt, Human papillomavirus type 16
cauaaauaaacuuauuguuucaa

SEQ ID NO: 357998 - RNA, 22 nt, Human papillomavirus type 16
cauaauguaauuguuacauaua

SEQ ID NO: 357999 - RNA, 13 nt, Human papillomavirus type 16
cauaugcaauaca

SEQ ID NO: 358000 - RNA, 14 nt, Human papillomavirus type 16
cauauuaaccacca

SEQ ID NO: 358001 - RNA, 17 nt, Human papillomavirus type 16
cauccagacuacuugca

SEQ ID NO: 358002 - RNA, 20 nt, Human papillomavirus type 16
caugaauauauguuagauuu

SEQ ID NO: 358003 - RNA, 18 nt, Human papillomavirus type 16
cauggauauacaguggaa

SEQ ID NO: 358004 - RNA, 13 nt, Human papillomavirus type 16
cauuacaagcaau

SEQ ID NO: 358005 - RNA, 12 nt, Human papillomavirus type 16
cauuaggugugg

SEQ ID NO: 358006 - RNA, 15 nt, Human papillomavirus type 16
cauuauacaaacugg

SEQ ID NO: 358007 - RNA, 20 nt, Human papillomavirus type 16
cauuauuuuuaauacauaca

SEQ ID NO: 358008 - RNA, 21 nt, Human papillomavirus type 16
cauuauuuuuaauacauacac

SEQ ID NO: 358009 - RNA, 22 nt, Human papillomavirus type 16
cauuauuuuuaauacauacaca

SEQ ID NO: 358010 - RNA, 19 nt, Human papillomavirus type 16
ccagagacaacugaucucu

SEQ ID NO: 358011 - RNA, 16 nt, Human papillomavirus type 16
ccagcuggacaagcag

SEQ ID NO: 358012 - RNA, 12 nt, Human papillomavirus type 16
ccauuaggugug

SEQ ID NO: 358013 - RNA, 18 nt, Human papillomavirus type 16
ccauuauuuuuaauacau

SEQ ID NO: 358014 - RNA, 17 nt, Human papillomavirus type 16
ccuacauugcaugaaua

SEQ ID NO: 358015 - RNA, 18 nt, Human papillomavirus type 16
ccuguuaaugggcacacu

SEQ ID NO: 358016 - RNA, 15 nt, Human papillomavirus type 16
cgaaaguauuuggua

SEQ ID NO: 358017 - RNA, 23 nt, Human papillomavirus type 16
cuaacguuagaaacaauauauaa

SEQ ID NO: 358018 - RNA, 12 nt, Human papillomavirus type 16
cuacauacacau

SEQ ID NO: 358019 - RNA, 14 nt, Human papillomavirus type 16
cuacauacacauca

SEQ ID NO: 358020 - RNA, 15 nt, Human papillomavirus type 16
cuacauacacaucau

SEQ ID NO: 358021 - RNA, 17 nt, Human papillomavirus type 16
cuacgugaccauauaga

SEQ ID NO: 358022 - RNA, 22 nt, Human papillomavirus type 16
cucagaggaggaggaugaaaua

SEQ ID NO: 358023 - RNA, 13 nt, Human papillomavirus type 16
cugucuacuugcc

SEQ ID NO: 358024 - RNA, 16 nt, Human papillomavirus type 16
cuguguagguguugag

SEQ ID NO: 358025 - RNA, 22 nt, Human papillomavirus type 16
cuugauacugcauccacaacau

SEQ ID NO: 358026 - RNA, 17 nt, Human papillomavirus type 16
gaaaaguggacauuaca

SEQ ID NO: 358027 - RNA, 19 nt, Human papillomavirus type 16
gaacgaaaaugacagugau

SEQ ID NO: 358028 - RNA, 14 nt, Human papillomavirus type 16
gaauaaagcauuac

SEQ ID NO: 358029 - RNA, 14 nt, Human papillomavirus type 16
gacaacugaucucu

SEQ ID NO: 358030 - RNA, 20 nt, Human papillomavirus type 16
gacauaugcaauacaaugca

SEQ ID NO: 358031 - RNA, 17 nt, Human papillomavirus type 16
gagaugcaguacagguu

SEQ ID NO: 358032 - RNA, 22 nt, Human papillomavirus type 16
gauccugcagguaccaaugggg

SEQ ID NO: 358033 - RNA, 15 nt, Human papillomavirus type 16
gaugcaguacagguu

SEQ ID NO: 358034 - RNA, 16 nt, Human papillomavirus type 16
gauggagacauaugca

SEQ ID NO: 358035 - RNA, 18 nt, Human papillomavirus type 16
gauggagacauaugcaau

SEQ ID NO: 358036 - RNA, 16 nt, Human papillomavirus type 16
gauguaauggaugguu

SEQ ID NO: 358037 - RNA, 16 nt, Human papillomavirus type 16
gauuaaaagcuauaug

SEQ ID NO: 358038 - RNA, 15 nt, Human papillomavirus type 16
gauuuaaacauauua

SEQ ID NO: 358039 - RNA, 22 nt, Human papillomavirus type 16
gcaaccagagacaacugaucuc

SEQ ID NO: 358040 - RNA, 16 nt, Human papillomavirus type 16
gcaagugugacucuac

SEQ ID NO: 358041 - RNA, 19 nt, Human papillomavirus type 16
gcaauacaaugcauuauac

SEQ ID NO: 358042 - RNA, 18 nt, Human papillomavirus type 16
gcauggagauacaccuac

SEQ ID NO: 358043 - RNA, 15 nt, Human papillomavirus type 16
gcauuacaagcaauu

SEQ ID NO: 358044 - RNA, 22 nt, Human papillomavirus type 16
gccagagaaaugggauuuaaac

SEQ ID NO: 358045 - RNA, 16 nt, Human papillomavirus type 16
gcugauccugcaggua

SEQ ID NO: 358046 - RNA, 15 nt, Human papillomavirus type 16
gcuggacaagcagaa

SEQ ID NO: 358047 - RNA, 13 nt, Human papillomavirus type 16
ggcacacuaggaa

SEQ ID NO: 358048 - RNA, 20 nt, Human papillomavirus type 16
gguaguccacuuagugauau

SEQ ID NO: 358049 - RNA, 17 nt, Human papillomavirus type 16
guaacuauugugucaug

SEQ ID NO: 358050 - RNA, 13 nt, Human papillomavirus type 16
guacaaagcacac

SEQ ID NO: 358051 - RNA, 17 nt, Human papillomavirus type 16
guauaaaaaaacaugga

SEQ ID NO: 358052 - RNA, 22 nt, Human papillomavirus type 16
guauaaaaaaacauggauauac

SEQ ID NO: 358053 - RNA, 16 nt, Human papillomavirus type 16
guauagaaaaacaaag

SEQ ID NO: 358054 - RNA, 23 nt, Human papillomavirus type 16
guauauguuuguaugugcuugua

SEQ ID NO: 358055 - RNA, 18 nt, Human papillomavirus type 16
guaugugcuuguaaauau

SEQ ID NO: 358056 - RNA, 17 nt, Human papillomavirus type 16
gucugugucuacauaca

SEQ ID NO: 358057 - RNA, 12 nt, Human papillomavirus type 16
gugauacaggug

SEQ ID NO: 358058 - RNA, 19 nt, Human papillomavirus type 16
gugauauuaguggaugugu

SEQ ID NO: 358059 - RNA, 12 nt, Human papillomavirus type 16
guggacauuaca

SEQ ID NO: 358060 - RNA, 22 nt, Human papillomavirus type 16
guggugccaacacuggcuguau

SEQ ID NO: 358061 - RNA, 21 nt, Human papillomavirus type 16
gugucuacauacacaucauua

SEQ ID NO: 358062 - RNA, 22 nt, Human papillomavirus type 16
guuuguuguguauauguuugua

SEQ ID NO: 358063 - RNA, 11 nt, Human papillomavirus type 16
uaaacuauauu

SEQ ID NO: 358064 - RNA, 12 nt, Human papillomavirus type 16
uaaaugcuugug

SEQ ID NO: 358065 - RNA, 16 nt, Human papillomavirus type 16
uaaaugcuuguguaac

SEQ ID NO: 358066 - RNA, 18 nt, Human papillomavirus type 16
uaaauuggaugacacaga

SEQ ID NO: 358067 - RNA, 18 nt, Human papillomavirus type 16
uaacuauugugucaugca

SEQ ID NO: 358068 - RNA, 14 nt, Human papillomavirus type 16
uaagcacggaugaa

SEQ ID NO: 358069 - RNA, 20 nt, Human papillomavirus type 16
uaauaauauugguauuacua

SEQ ID NO: 358070 - RNA, 16 nt, Human papillomavirus type 16
uaaugaaaaguggaca

SEQ ID NO: 358071 - RNA, 18 nt, Human papillomavirus type 16
uacaaacuggacacauau

SEQ ID NO: 358072 - RNA, 19 nt, Human papillomavirus type 16
uacaaacuggacacauaua

SEQ ID NO: 358073 - RNA, 19 nt, Human papillomavirus type 16
uacaagacguuagccuuga

SEQ ID NO: 358074 - RNA, 13 nt, Human papillomavirus type 16
uacaagcaauuga

SEQ ID NO: 358075 - RNA, 19 nt, Human papillomavirus type 16
uacaagcaauugaacugca

SEQ ID NO: 358076 - RNA, 20 nt, Human papillomavirus type 16
uacaaggccagagaaauggg

SEQ ID NO: 358077 - RNA, 17 nt, Human papillomavirus type 16
uacaaugcauuauacaa

SEQ ID NO: 358078 - RNA, 22 nt, Human papillomavirus type 16
uacaggguauuuagaauacauu

SEQ ID NO: 358079 - RNA, 23 nt, Human papillomavirus type 16
uacauauaauuguuguauaccau

SEQ ID NO: 358080 - RNA, 23 nt, Human papillomavirus type 16
uaccauuauuuuuaauacauaca

SEQ ID NO: 358081 - RNA, 22 nt, Human papillomavirus type 16
uagaaugugcuauuuauuacaa

SEQ ID NO: 358082 - RNA, 19 nt, Human papillomavirus type 16
uagacuauuggaaacacau

SEQ ID NO: 358083 - RNA, 16 nt, Human papillomavirus type 16
uagccuugaaguguau

SEQ ID NO: 358084 - RNA, 22 nt, Human papillomavirus type 16
uaguguuguuuguuguguauau

SEQ ID NO: 358085 - RNA, 16 nt, Human papillomavirus type 16
uauaauaaacacgugu

SEQ ID NO: 358086 - RNA, 20 nt, Human papillomavirus type 16
uauaauuguuguauaccaua

SEQ ID NO: 358087 - RNA, 17 nt, Human papillomavirus type 16
uauagaaaaacaaagua

SEQ ID NO: 358088 - RNA, 13 nt, Human papillomavirus type 16
uauauacuauauu

SEQ ID NO: 358089 - RNA, 14 nt, Human papillomavirus type 16
aaaacaacauagag

SEQ ID NO: 358090 - RNA, 15 nt, Human papillomavirus type 16
aaaacaacauagaga

SEQ ID NO: 358091 - RNA, 15 nt, Human papillomavirus type 16
aaaagcuauauguau

SEQ ID NO: 358092 - RNA, 14 nt, Human papillomavirus type 16
aaacaauauauaac

SEQ ID NO: 358093 - RNA, 18 nt, Human papillomavirus type 16
aaacaauauauaacucac

SEQ ID NO: 358094 - RNA, 16 nt, Human papillomavirus type 16
aaacuggacacauaua

SEQ ID NO: 358095 - RNA, 13 nt, Human papillomavirus type 16
aaagaauaaagca

SEQ ID NO: 358096 - RNA, 16 nt, Human papillomavirus type 16
aaaugacagugauaca

SEQ ID NO: 358097 - RNA, 14 nt, Human papillomavirus type 16
aaaugcuuguguaa

SEQ ID NO: 358098 - RNA, 17 nt, Human papillomavirus type 16
aaauuggaugacacaga

SEQ ID NO: 358099 - RNA, 21 nt, Human papillomavirus type 16
aacacaggcagaaacagagac

SEQ ID NO: 358100 - RNA, 16 nt, Human papillomavirus type 16
aacaccuacuaauugu

SEQ ID NO: 358101 - RNA, 16 nt, Human papillomavirus type 16
aacacuggcuguauca

SEQ ID NO: 358102 - RNA, 15 nt, Human papillomavirus type 16
aacuauugugucaug

SEQ ID NO: 358103 - RNA, 15 nt, Human papillomavirus type 16
aacuggacacauaua

SEQ ID NO: 358104 - RNA, 13 nt, Human papillomavirus type 16
aagaauaaagcau

SEQ ID NO: 358105 - RNA, 16 nt, Human papillomavirus type 16
aagcaauugaacugca

SEQ ID NO: 358106 - RNA, 21 nt, Human papillomavirus type 16
aaguaucaggauuacaauaca

SEQ ID NO: 358107 - RNA, 15 nt, Human papillomavirus type 16
aaguggacauuacaa

SEQ ID NO: 358108 - RNA, 16 nt, Human papillomavirus type 16
aauaaauuggaugaca

SEQ ID NO: 358109 - RNA, 12 nt, Human papillomavirus type 16
aauacaaugcau

SEQ ID NO: 358110 - RNA, 14 nt, Human papillomavirus type 16
aauacaaugcauua

SEQ ID NO: 358111 - RNA, 21 nt, Human papillomavirus type 16
aaugaaaaguggacauuacaa

SEQ ID NO: 358112 - RNA, 19 nt, Human papillomavirus type 16
aaugggauuuaaacauauu

SEQ ID NO: 358113 - RNA, 18 nt, Human papillomavirus type 16
aauguauauguacauaau

SEQ ID NO: 358114 - RNA, 18 nt, Human papillomavirus type 16
aaugugcuauuuauuaca

SEQ ID NO: 358115 - RNA, 19 nt, Human papillomavirus type 16
aaugugcuauuuauuacaa

SEQ ID NO: 358116 - RNA, 23 nt, Human papillomavirus type 16
aauuaguguuguuuguuguguau

SEQ ID NO: 358117 - RNA, 13 nt, Human papillomavirus type 16
aauugaacugcaa

SEQ ID NO: 358118 - RNA, 13 nt, Human papillomavirus type 16
aauuguuacauau

SEQ ID NO: 358119 - RNA, 19 nt, Human papillomavirus type 16
acaacauagagaugcagua

SEQ ID NO: 358120 - RNA, 19 nt, Human papillomavirus type 16
acacaggcagaaacagaga

SEQ ID NO: 358121 - RNA, 18 nt, Human papillomavirus type 16
acacaugcgccuagaaug

SEQ ID NO: 358122 - RNA, 14 nt, Human papillomavirus type 16
acacguguguaugu

SEQ ID NO: 358123 - RNA, 22 nt, Human papillomavirus type 16
acacuggcuguaucaaagaaua

SEQ ID NO: 358124 - RNA, 16 nt, Human papillomavirus type 16
acagagcccauuacaa

SEQ ID NO: 358125 - RNA, 17 nt, Human papillomavirus type 16
acaggggaugcuauauc

SEQ ID NO: 358126 - RNA, 17 nt, Human papillomavirus type 16
acauaugcaauacaaug

SEQ ID NO: 358127 - RNA, 13 nt, Human papillomavirus type 16
acauauuaaccac

SEQ ID NO: 358128 - RNA, 19 nt, Human papillomavirus type 16
acaugcgccuagaaugugc

SEQ ID NO: 358129 - RNA, 22 nt, Human papillomavirus type 16
acaugcgccuagaaugugcuau

SEQ ID NO: 358130 - RNA, 22 nt, Human papillomavirus type 16
acauuacaagacguuagccuug

SEQ ID NO: 358131 - RNA, 17 nt, Human papillomavirus type 16
accaaguggugccaaca

SEQ ID NO: 358132 - RNA, 15 nt, Human papillomavirus type 16
accauauagacuauu

SEQ ID NO: 358133 - RNA, 21 nt, Human papillomavirus type 16
accauuauuuuuaauacauac

SEQ ID NO: 358134 - RNA, 16 nt, Human papillomavirus type 16
acuauuggaaacacau

SEQ ID NO: 358135 - RNA, 14 nt, Human papillomavirus type 16
acugucuacuugcc

SEQ ID NO: 358136 - RNA, 18 nt, Human papillomavirus type 16
acuuguacguuuccugcu

SEQ ID NO: 358137 - RNA, 17 nt, Human papillomavirus type 16
agauacaccuacauugc

SEQ ID NO: 358138 - RNA, 14 nt, Human papillomavirus type 16
agcaacuaugguuu

SEQ ID NO: 358139 - RNA, 21 nt, Human papillomavirus type 16
agguguugagguaggucgugg

SEQ ID NO: 358140 - RNA, 13 nt, Human papillomavirus type 16
aguggacauuaca

SEQ ID NO: 358141 - RNA, 14 nt, Human papillomavirus type 16
aguggacauuacaa

SEQ ID NO: 358142 - RNA, 20 nt, Human papillomavirus type 16
aguuugauggagacauaugc

SEQ ID NO: 358143 - RNA, 19 nt, Human papillomavirus type 16
auaaauuggaugacacaga

SEQ ID NO: 358144 - RNA, 20 nt, Human papillomavirus type 16
auaauaaacacguguguaug

SEQ ID NO: 358145 - RNA, 16 nt, Human papillomavirus type 16
auaauccagauacaca

SEQ ID NO: 358146 - RNA, 20 nt, Human papillomavirus type 16
auacacaugcacgcuuuuua

SEQ ID NO: 358147 - RNA, 12 nt, Human papillomavirus type 16
auacauacacau

SEQ ID NO: 358148 - RNA, 22 nt, Human papillomavirus type 16
auagacuauuggaaacacaugc

SEQ ID NO: 358149 - RNA, 23 nt, Human papillomavirus type 16
auauaacucacaauauaguaaug

SEQ ID NO: 358150 - RNA, 13 nt, Human papillomavirus type 16
auauauacuauau

SEQ ID NO: 358151 - RNA, 14 nt, Human papillomavirus type 16
auauauacuauauu

SEQ ID NO: 358152 - RNA, 18 nt, Human papillomavirus type 16
auauguugcacgcacaaa

SEQ ID NO: 358153 - RNA, 20 nt, Human papillomavirus type 16
aucaugcaggaacauccaga

SEQ ID NO: 358154 - RNA, 19 nt, Human papillomavirus type 16
augaaaaguggacauuaca

SEQ ID NO: 358155 - RNA, 17 nt, Human papillomavirus type 16
augacagugauacaggu

SEQ ID NO: 358156 - RNA, 18 nt, Human papillomavirus type 16
augauuauuuaacacagg

SEQ ID NO: 358157 - RNA, 18 nt, Human papillomavirus type 16
augcaggaacauccagac

SEQ ID NO: 358158 - RNA, 19 nt, Human papillomavirus type 16
auggaugguuuuauguaga

SEQ ID NO: 358159 - RNA, 16 nt, Human papillomavirus type 16
auggggaagaggguac

SEQ ID NO: 358160 - RNA, 15 nt, Human papillomavirus type 16
auguaauuguuacau

SEQ ID NO: 358161 - RNA, 19 nt, Human papillomavirus type 16
auguaauuguuacauauaa

SEQ ID NO: 358162 - RNA, 15 nt, Human papillomavirus type 16
auguuagauuugcaa

SEQ ID NO: 358163 - RNA, 16 nt, Human papillomavirus type 16
auguugcacgcacaaa

SEQ ID NO: 358164 - RNA, 16 nt, Human papillomavirus type 16
auuacuggcgugcuuu

SEQ ID NO: 358165 - RNA, 15 nt, Human papillomavirus type 16
auuauuuaacacagg

SEQ ID NO: 358166 - RNA, 21 nt, Human papillomavirus type 16
auuauuugaaagcgaagacag

SEQ ID NO: 358167 - RNA, 22 nt, Human papillomavirus type 16
auucauuguauauaaacuauau

SEQ ID NO: 358168 - RNA, 15 nt, Human papillomavirus type 16
auucgguugcaugcu

SEQ ID NO: 358169 - RNA, 14 nt, Human papillomavirus type 16
auuguuacauauaa

SEQ ID NO: 358170 - RNA, 21 nt, Human papillomavirus type 16
auuuaaacauauuaaccacca

SEQ ID NO: 358171 - RNA, 15 nt, Human papillomavirus type 16
auuuaacugcaccaa

SEQ ID NO: 358172 - RNA, 17 nt, Human papillomavirus type 16
auuuuuaauacauacac

SEQ ID NO: 358173 - RNA, 14 nt, Human papillomavirus type 16
caaaacaacauaga

SEQ ID NO: 358174 - RNA, 17 nt, Human papillomavirus type 16
caaaacaacauagagau

SEQ ID NO: 358175 - RNA, 15 nt, Human papillomavirus type 16
caaacuggacacaua

SEQ ID NO: 358176 - RNA, 17 nt, Human papillomavirus type 16
caaacuggacacauaua

SEQ ID NO: 358177 - RNA, 20 nt, Human papillomavirus type 16
caaagaauaaagcauuacaa

SEQ ID NO: 358178 - RNA, 18 nt, Human papillomavirus type 16
caaaguagagcugcaaaa

SEQ ID NO: 358179 - RNA, 20 nt, Human papillomavirus type 16
caacauagagaugcaguaca

SEQ ID NO: 358180 - RNA, 20 nt, Human papillomavirus type 16
caacuaacguuagaaacaau

SEQ ID NO: 358181 - RNA, 13 nt, Human papillomavirus type 16
caauacaaugcau

SEQ ID NO: 358182 - RNA, 21 nt, Human papillomavirus type 16
caaugcauuauacaaacugga

SEQ ID NO: 358183 - RNA, 14 nt, Human papillomavirus type 16
cacacguagacauu

SEQ ID NO: 358184 - RNA, 23 nt, Human papillomavirus type 16
cacaggaagcaaaacaacauaga

SEQ ID NO: 358185 - RNA, 21 nt, Human papillomavirus type 16
uauauauuauauuuguuuaua

SEQ ID NO: 358186 - RNA, 17 nt, Human papillomavirus type 16
uauauguuuguaugugc

SEQ ID NO: 358187 - RNA, 22 nt, Human papillomavirus type 16
uauauguuuguaugugcuugua

SEQ ID NO: 358188 - RNA, 23 nt, Human papillomavirus type 16
uauuauauuuguuuauauaccau

SEQ ID NO: 358189 - RNA, 18 nt, Human papillomavirus type 16
ucaaagaauaaagcauua

SEQ ID NO: 358190 - RNA, 15 nt, Human papillomavirus type 16
uccagacuacuugca

SEQ ID NO: 358191 - RNA, 19 nt, Human papillomavirus type 16
uccagcuggacaagcagaa

SEQ ID NO: 358192 - RNA, 19 nt, Human papillomavirus type 16
ugaaaaguggacauuacaa

SEQ ID NO: 358193 - RNA, 13 nt, Human papillomavirus type 16
ugaaagcgaagac

SEQ ID NO: 358194 - RNA, 15 nt, Human papillomavirus type 16
ugaaguguauuuaac

SEQ ID NO: 358195 - RNA, 21 nt, Human papillomavirus type 16
ugaauauguugcacgcacaaa

SEQ ID NO: 358196 - RNA, 14 nt, Human papillomavirus type 16
ugacagcucagagg

SEQ ID NO: 358197 - RNA, 17 nt, Human papillomavirus type 16
ugacagugauacaggug

SEQ ID NO: 358198 - RNA, 16 nt, Human papillomavirus type 16
ugaccauauagacuau

SEQ ID NO: 358199 - RNA, 19 nt, Human papillomavirus type 16
ugauggagacauaugcaau

SEQ ID NO: 358200 - RNA, 23 nt, Human papillomavirus type 16
ugcaacuaacguuagaaacaaua

SEQ ID NO: 358201 - RNA, 17 nt, Human papillomavirus type 16
ugcacaggaagcaaaac

SEQ ID NO: 358202 - RNA, 17 nt, Human papillomavirus type 16
ugcaccaacaggaugua

SEQ ID NO: 358203 - RNA, 21 nt, Human papillomavirus type 16
ugcaguuugauggagacauau

SEQ ID NO: 358204 - RNA, 24 nt, Human papillomavirus type 16
ugcaguuugauggagacauaugca

SEQ ID NO: 358205 - RNA, 22 nt, Human papillomavirus type 16
ugcauuauacaaacuggacaca

SEQ ID NO: 358206 - RNA, 12 nt, Human papillomavirus type 16
ugccccaucugu

SEQ ID NO: 358207 - RNA, 16 nt, Human papillomavirus type 16
ugccccaucuguucuc

SEQ ID NO: 358208 - RNA, 18 nt, Human papillomavirus type 16
ugcguacaaagcacacac

SEQ ID NO: 358209 - RNA, 14 nt, Human papillomavirus type 16
ugcuuguaugugcu

SEQ ID NO: 358210 - RNA, 22 nt, Human papillomavirus type 16
ugcuuuugucugugucuacaua

SEQ ID NO: 358211 - RNA, 13 nt, Human papillomavirus type 16
uggaaacacaugc

SEQ ID NO: 358212 - RNA, 13 nt, Human papillomavirus type 16
uggagacauaugc

SEQ ID NO: 358213 - RNA, 15 nt, Human papillomavirus type 16
ugggauuuaaacaua

SEQ ID NO: 358214 - RNA, 15 nt, Human papillomavirus type 16
uggugccaacacugg

SEQ ID NO: 358215 - RNA, 17 nt, Human papillomavirus type 16
uguauauaaacuauauu

SEQ ID NO: 358216 - RNA, 13 nt, Human papillomavirus type 16
ugucuacauacac

SEQ ID NO: 358217 - RNA, 15 nt, Human papillomavirus type 16
ugugcguacaaagca

SEQ ID NO: 358218 - RNA, 18 nt, Human papillomavirus type 16
uguguaacuauuguguca

SEQ ID NO: 358219 - RNA, 24 nt, Human papillomavirus type 16
uguguaacuauugugucaugcaac

SEQ ID NO: 358220 - RNA, 17 nt, Human papillomavirus type 16
ugugucuacauacacau

SEQ ID NO: 358221 - RNA, 19 nt, Human papillomavirus type 16
uuagugauauuaguggaug

SEQ ID NO: 358222 - RNA, 14 nt, Human papillomavirus type 16
uuauacaaacugga

SEQ ID NO: 358223 - RNA, 22 nt, Human papillomavirus type 16
uuauguagaggcuguaguggaa

SEQ ID NO: 358224 - RNA, 13 nt, Human papillomavirus type 16
uuauuguauauau

SEQ ID NO: 358225 - RNA, 20 nt, Human papillomavirus type 16
uugaaguguauuuaacugca

SEQ ID NO: 358226 - RNA, 21 nt, Human papillomavirus type 16
uugauacugcauccacaacau

SEQ ID NO: 358227 - RNA, 16 nt, Human papillomavirus type 16
uugcaagugugacucu

SEQ ID NO: 358228 - RNA, 18 nt, Human papillomavirus type 16
uugcacgcacaaacauau

SEQ ID NO: 358229 - RNA, 16 nt, Human papillomavirus type 16
uugcuuugugugcuuu

SEQ ID NO: 358230 - RNA, 16 nt, Human papillomavirus type 16
uuguaagcacggauga

SEQ ID NO: 358231 - RNA, 17 nt, Human papillomavirus type 16
uuguaugugcuuguaug

SEQ ID NO: 358232 - RNA, 15 nt, Human papillomavirus type 16
uugugugucugccua

SEQ ID NO: 358233 - RNA, 15 nt, Human papillomavirus type 16
uuguuguauaccaua

SEQ ID NO: 358234 - RNA, 15 nt, Human papillomavirus type 16
uuguuuauauaccau

SEQ ID NO: 358235 - RNA, 14 nt, Human papillomavirus type 16
uuuaaacuuguacg

SEQ ID NO: 358236 - RNA, 19 nt, Human papillomavirus type 16
uuuaacugcaccaacagga

SEQ ID NO: 358237 - RNA, 16 nt, Human papillomavirus type 16
uuuaauacauacacau

SEQ ID NO: 358238 - RNA, 18 nt, Human papillomavirus type 16
uuuaccugaccccaauaa

SEQ ID NO: 358239 - RNA, 15 nt, Human papillomavirus type 16
uuuacugcacaggaa

SEQ ID NO: 358240 - RNA, 14 nt, Human papillomavirus type 16
uuuauauaccauua

SEQ ID NO: 358241 - RNA, 21 nt, Human papillomavirus type 16
uuuauuaaauaaauuggauga

SEQ ID NO: 358242 - RNA, 23 nt, Human papillomavirus type 16
uuuccuauuaaaaaaccuaacaa

SEQ ID NO: 358243 - RNA, 14 nt, Human papillomavirus type 16
uuugcaaccagaga

SEQ ID NO: 358244 - RNA, 20 nt, Human papillomavirus type 16
uuuguugcaagugugacucu

SEQ ID NO: 358245 - RNA, 20 nt, Human papillomavirus type 16
uuuuaaauaguucuauguca

SEQ ID NO: 358246 - RNA, 17 nt, Human papillomavirus type 16
uuuuauauauacuauau

SEQ ID NO: 358247 - RNA, 22 nt, Human papillomavirus type 16
uuuugucugugucuacauacac

SEQ ID NO: 358248 - RNA, 16 nt, Human papillomavirus type 16
aaaacauggauauaca

SEQ ID NO: 358249 - RNA, 17 nt, Human papillomavirus type 16
aaaaugacagugauaca

SEQ ID NO: 358250 - RNA, 16 nt, Human papillomavirus type 16
aaacauauauuaucau

SEQ ID NO: 358251 - RNA, 16 nt, Human papillomavirus type 16
aaacauggauauacag

SEQ ID NO: 358252 - RNA, 16 nt, Human papillomavirus type 16
aaagaauaaagcauua

SEQ ID NO: 358253 - RNA, 17 nt, Human papillomavirus type 16
aaagcuauauguauaga

SEQ ID NO: 358254 - RNA, 21 nt, Human papillomavirus type 16
aaaugggauuuaaacauauua

SEQ ID NO: 358255 - RNA, 17 nt, Human papillomavirus type 16
aacacguguguaugugu

SEQ ID NO: 358256 - RNA, 18 nt, Human papillomavirus type 16
aacacguguguauguguu

SEQ ID NO: 358257 - RNA, 18 nt, Human papillomavirus type 16
aacacuggcuguaucaaa

SEQ ID NO: 358258 - RNA, 20 nt, Human papillomavirus type 16
aacaggggaugcuauaucag

SEQ ID NO: 358259 - RNA, 21 nt, Human papillomavirus type 16
aacauauauuaucaugcagga

SEQ ID NO: 358260 - RNA, 15 nt, Human papillomavirus type 16
aaccaccaaguggug

SEQ ID NO: 358261 - RNA, 16 nt, Human papillomavirus type 16
aaccuaacaauaacaa

SEQ ID NO: 358262 - RNA, 16 nt, Human papillomavirus type 16
aacuggacacauauau

SEQ ID NO: 358263 - RNA, 23 nt, Human papillomavirus type 16
aacuuguacguuuccugcuugcc

SEQ ID NO: 358264 - RNA, 23 nt, Human papillomavirus type 16
aagaccuguuaaugggcacacua

SEQ ID NO: 358265 - RNA, 17 nt, Human papillomavirus type 16
aagcaaaacaacauaga

SEQ ID NO: 358266 - RNA, 17 nt, Human papillomavirus type 16
aagcaauugaacugcaa

SEQ ID NO: 358267 - RNA, 13 nt, Human papillomavirus type 16
aagugugacucua

SEQ ID NO: 358268 - RNA, 15 nt, Human papillomavirus type 16
aauaaagcauuacaa

SEQ ID NO: 358269 - RNA, 18 nt, Human papillomavirus type 16
aauacaaugcauuauaca

SEQ ID NO: 358270 - RNA, 13 nt, Human papillomavirus type 16
aauauauaacuca

SEQ ID NO: 358271 - RNA, 23 nt, Human papillomavirus type 16
aauauuaguuccuaaaguaucag

SEQ ID NO: 358272 - RNA, 12 nt, Human papillomavirus type 16
aaugacagugau

SEQ ID NO: 358273 - RNA, 22 nt, Human papillomavirus type 16
aaugcauuauacaaacuggaca

SEQ ID NO: 358274 - RNA, 20 nt, Human papillomavirus type 16
aaugggauuuaaacauauua

SEQ ID NO: 358275 - RNA, 16 nt, Human papillomavirus type 16
aauugaacugcaacua

SEQ ID NO: 358276 - RNA, 12 nt, Human papillomavirus type 16
acaaaauguguu

SEQ ID NO: 358277 - RNA, 11 nt, Human papillomavirus type 16
acaaagcacac

SEQ ID NO: 358278 - RNA, 21 nt, Human papillomavirus type 16
acaagcaauugaacugcaacu

SEQ ID NO: 358279 - RNA, 22 nt, Human papillomavirus type 16
acaauauaguaaugaaaagugg

SEQ ID NO: 358280 - RNA, 16 nt, Human papillomavirus type 16
acagugauacagguga

SEQ ID NO: 358281 - RNA, 14 nt, Human papillomavirus type 16
acauagagaugcag

SEQ ID NO: 358282 - RNA, 20 nt, Human papillomavirus type 16
acauauauuaucaugcagga

SEQ ID NO: 358283 - RNA, 16 nt, Human papillomavirus type 16
acauaugcaauacaau

SEQ ID NO: 358284 - RNA, 19 nt, Human papillomavirus type 16
acauaugcaauacaaugca

SEQ ID NO: 358285 - RNA, 18 nt, Human papillomavirus type 16
accaacaggauguauaaa

SEQ ID NO: 358286 - RNA, 21 nt, Human papillomavirus type 16
accaaguggugccaacacugg

SEQ ID NO: 358287 - RNA, 14 nt, Human papillomavirus type 16
accagagacaacug

SEQ ID NO: 358288 - RNA, 20 nt, Human papillomavirus type 16
accggacagagcccauuaca

SEQ ID NO: 358289 - RNA, 16 nt, Human papillomavirus type 16
acgcuucgguugugcg

SEQ ID NO: 358290 - RNA, 20 nt, Human papillomavirus type 16
acgcuuuuuaauuacauaau

SEQ ID NO: 358291 - RNA, 14 nt, Human papillomavirus type 16
acuaauuguguugu

SEQ ID NO: 358292 - RNA, 16 nt, Human papillomavirus type 16
acugcacaggaagcaa

SEQ ID NO: 358293 - RNA, 18 nt, Human papillomavirus type 16
acugcauccacaacauua

SEQ ID NO: 358294 - RNA, 13 nt, Human papillomavirus type 16
acuuagugauauu

SEQ ID NO: 358295 - RNA, 13 nt, Human papillomavirus type 16
agaaacagagaca

SEQ ID NO: 358296 - RNA, 18 nt, Human papillomavirus type 16
agaacgaaaaugacagug

SEQ ID NO: 358297 - RNA, 17 nt, Human papillomavirus type 16
agaauaaagcauuacaa

SEQ ID NO: 358298 - RNA, 17 nt, Human papillomavirus type 16
agacauucguacuuugg

SEQ ID NO: 358299 - RNA, 22 nt, Human papillomavirus type 16
agaccuacgugaccauauagac

SEQ ID NO: 358300 - RNA, 12 nt, Human papillomavirus type 16
agacuacuugca

SEQ ID NO: 358301 - RNA, 20 nt, Human papillomavirus type 16
agaggguacgggauguaaug

SEQ ID NO: 358302 - RNA, 19 nt, Human papillomavirus type 16
agauacaccuacauugcau

SEQ ID NO: 358303 - RNA, 22 nt, Human papillomavirus type 16
agaugguccagcuggacaagca

SEQ ID NO: 358304 - RNA, 13 nt, Human papillomavirus type 16
agcaaaugcaggu

SEQ ID NO: 358305 - RNA, 16 nt, Human papillomavirus type 16
agcaucaguaacugug

SEQ ID NO: 358306 - RNA, 10 nt, Human papillomavirus type 16
agcauuacaa

SEQ ID NO: 358307 - RNA, 11 nt, Human papillomavirus type 16
agcauuacaag

SEQ ID NO: 358308 - RNA, 16 nt, Human papillomavirus type 16
agcauuacaagcaauu

SEQ ID NO: 358309 - RNA, 17 nt, Human papillomavirus type 16
agcauuacaagcaauug

SEQ ID NO: 358310 - RNA, 14 nt, Human papillomavirus type 16
agcggcugguuugg

SEQ ID NO: 358311 - RNA, 14 nt, Human papillomavirus type 16
aguccuagauuaaa

SEQ ID NO: 358312 - RNA, 18 nt, Human papillomavirus type 16
aguggaaaaaaaaacagg

SEQ ID NO: 358313 - RNA, 15 nt, Human papillomavirus type 16
aguggaagugcaguu

SEQ ID NO: 358314 - RNA, 15 nt, Human papillomavirus type 16
aguggacauuacaag

SEQ ID NO: 358315 - RNA, 17 nt, Human papillomavirus type 16
aguguauuuaacugcac

SEQ ID NO: 358316 - RNA, 12 nt, Human papillomavirus type 16
aguuguaugugu

SEQ ID NO: 358317 - RNA, 17 nt, Human papillomavirus type 16
auaaacacguguguaug

SEQ ID NO: 358318 - RNA, 12 nt, Human papillomavirus type 16
auaaacuauauu

SEQ ID NO: 358319 - RNA, 14 nt, Human papillomavirus type 16
auaaagcauuacaa

SEQ ID NO: 358320 - RNA, 13 nt, Human papillomavirus type 16
auaacucacaaua

SEQ ID NO: 358321 - RNA, 12 nt, Human papillomavirus type 16
auaauccagaua

SEQ ID NO: 358322 - RNA, 17 nt, Human papillomavirus type 16
auacaguggaagugcag

SEQ ID NO: 358323 - RNA, 18 nt, Human papillomavirus type 16
auagacuauuggaaacac

SEQ ID NO: 358324 - RNA, 15 nt, Human papillomavirus type 16
auauauaacucacaa

SEQ ID NO: 358325 - RNA, 18 nt, Human papillomavirus type 16
auauguuuguaugugcuu

SEQ ID NO: 358326 - RNA, 19 nt, Human papillomavirus type 16
auauguuuguaugugcuug

SEQ ID NO: 358327 - RNA, 15 nt, Human papillomavirus type 16
auauuaaccaccaag

SEQ ID NO: 358328 - RNA, 23 nt, Human papillomavirus type 16
auauuauauuuguuuauauacca

SEQ ID NO: 358329 - RNA, 22 nt, Human papillomavirus type 16
auauuguaaccuuuuguugcaa

SEQ ID NO: 358330 - RNA, 19 nt, Human papillomavirus type 16
auauuuguuuauauaccau

SEQ ID NO: 358331 - RNA, 17 nt, Human papillomavirus type 16
aucucuacuguuaugag

SEQ ID NO: 358332 - RNA, 20 nt, Human papillomavirus type 16
augaaaaguggacauuacaa

SEQ ID NO: 358333 - RNA, 13 nt, Human papillomavirus type 16
augcaguacaggu

SEQ ID NO: 358334 - RNA, 14 nt, Human papillomavirus type 16
auggagacauaugc

SEQ ID NO: 358335 - RNA, 15 nt, Human papillomavirus type 16
auggagacauaugca

SEQ ID NO: 358336 - RNA, 20 nt, Human papillomavirus type 16
auggcugauccugcagguac

SEQ ID NO: 358337 - RNA, 20 nt, Human papillomavirus type 16
auggggaagaggguacggga

SEQ ID NO: 358338 - RNA, 21 nt, Human papillomavirus type 16
augugcuuguaugugcuugua

SEQ ID NO: 358339 - RNA, 22 nt, Human papillomavirus type 16
auuacauaauguauauguacau

SEQ ID NO: 358340 - RNA, 16 nt, Human papillomavirus type 16
auugaacugcaacuaa

SEQ ID NO: 358341 - RNA, 15 nt, Human papillomavirus type 16
auuggaugacacaga

SEQ ID NO: 358342 - RNA, 15 nt, Human papillomavirus type 16
auuguuguauaccau

SEQ ID NO: 358343 - RNA, 13 nt, Human papillomavirus type 16
auuuaacugcacc

SEQ ID NO: 358344 - RNA, 18 nt, Human papillomavirus type 16
auuuaacugcaccaacag

SEQ ID NO: 358345 - RNA, 18 nt, Human papillomavirus type 16
auuuauuacaaggccaga

SEQ ID NO: 358346 - RNA, 16 nt, Human papillomavirus type 16
auuugcuacauccugu

SEQ ID NO: 358347 - RNA, 20 nt, Human papillomavirus type 16
caaacauauauuaucaugca
